United States Patent Application Publication US 2012/0017338 A1 - sequence listing, part 4

SEQ ID NO: 11598 - DNA, 285 bp, Zea mays
  Peptide Sequence Number=SeqID_53377
atggcgctcgtgctctccctcccctgctgctgctcgcccttcctccctctctctgctcgccaagtagcagcagcacgccgcgcgcgccacctgtttgacgcaatgccgagtcaggtcgcgccacaacaaccccttcgtggcgggtgccccaccttgccacgccacggtgcccgtcgtgctccttcgactttgcttcgatctcccgcgattgacggcgcattcgtcttcgcgccacatgtgcagcaaccacgactgaggtttgatatggacgagatgtgcgaataa

SEQ ID NO: 11599 - DNA, 327 bp, Zea mays
  Peptide Sequence Number=SeqID_53378
atgggtatttataacagacagttcactggcggttggtgtaacagaaccgccagtggaaataccctatttccactggcggctttgagctcttttctactagtgacggtgcgcaacacctgccgctgcgcccagtccgacgtgaaggtggactgcaagggcttcaacaccaccttgtccgtcgacccggcgaagctcaaggagatcggcggcggggtgtgcctcatcaacggcggcgccccgcttgcgccggggcagggcgtcaccttcagctacgcctggagcaaccagttcgggttccggccggtctcgtccaccgtgacgtgctag

SEQ ID NO: 11600 - DNA, 246 bp, Zea mays
  Peptide Sequence Number=SeqID_53379
atggaggcaagaagagcttcgaggtaccgagtgcacgggagaaggacaaggagaccaagaaacccaaagccaggggtgcagaagaagacttgcaaagtcaagataaaatccatctcaagattgagtttattggaatatgatctgaattctaatgcgaatcttatagggacatttggagggcccattgttcaggaattgacttgctatgtagttgaatcatcaaccaacatggatctaaacttgtga

SEQ ID NO: 11601 - DNA, 213 bp, Zea mays
  Peptide Sequence Number=SeqID_53380
atgaagctgtggaaggagacttccaggagttccaagactacgacgagttctaggtgtgggttagcggcaacccccagtcggctgcctgtgaaggccgcgaccttcgggattgcatacggctggtgtgctgatgacatgggtgaagcccttgaactgcttttcgaggccacggacggcggtgaggtattgcatcagcatgggctctttggctaa

SEQ ID NO: 11602 - DNA, 372 bp, Zea mays
  Peptide Sequence Number=SeqID_53381
atggcggcgtgccagtacgacgaccaccgcacagcagcaggcgcgcctaggccatctcggcgtcggctgcgccagatgcgatgtgggtgggggtggcaggcgcggcgcggcgcggcggcccgggtggataggagggcacgcagctgccagcgcgggctgggcgccaggggcaggcctgagcgtgacgcgggccgtcgagcgcgcggcagggcgtcgtgggccctgcagcccggcggcggcaagggcatgcggcgtggtcagccgacgggcagtgtgctcagcggcagggcggggtggtcagttggaggattggagcacttgagccatagccatggtgttgcttctgatttgaagaggctacacttgacatag

SEQ ID NO: 11603 - DNA, 306 bp, Zea mays
  Peptide Sequence Number=SeqID_53382
atggcacccctggccctaaggcaggatgctctcagggtgaagacgccttgggaggaacagccttggtttcacgctgatgtcctgctaagaggatatattggctggaacacaaggcgggctgttcaagtgatggacaaagtgttccctaaggccctcaacgccgacttgacggccgtgaaagccgagctggcaggcctcacggacaagtctgcctcgacgtggcggctgcccagtcggacctcacgacctcgaccgtccgcccagatttcagaagctcgatttcccacgctacgactggaagtctga

SEQ ID NO: 11604 - DNA, 1329 bp, Zea mays
  Peptide Sequence Number=SeqID_53383
atgacactctgcaccgtcttgctccagatcctccttccaacgctgctcttggtttctgccatcacaggcgcggacgctagcggcatcggcgtcaactacggcacgcggggcacgacgctcccggcgccggccgacgtggcgcggttcctggcccgggacaccatcttcgaccgcgtgaggctgttggacgccgacccggtcctgctgcgggccttcgccggcacgggcctcgccgtggacgtgacggtgcccaacggcgtcgtcccgcacctgctgaatctgaccttcgcgcggcgctgggtgcgcgacaacgtgacgccctacgcgggcgccaccaatatctcgcgcctcctggtcggcgacgaggtgaccaccgaggccaaccggacgctgctgctggcgctggtgccggccatgcagaacctgcacaccgcgctggtcgccgcgtccctgcacggccgggtgaaggtctccaccacgcactcgctcggggtgctcaccaccacggagcagccgtcggcggcgcggttccgcgacggctacgacgcggccatcgtgaggccgctgctcaggttcctccgcgcgaccggcgcgccgttcatggtgaacgcgtacccgttctacgcgctcgccaacgacagcagcctcgacttcgcgctgttccgggtgaacgacggcgtcatggaccagggcaccgggctggtctcgacgccgtgcactcggccgtcaggcggatgggcttcggggacgtcgacatcgccgtgtcggagaccgggtggccatcggcccggggaggactgggaggtcggcgtcggcgcggacctcgcccgggactacaacagcaacgccatccgccacctcggctccggcgtcggcacgccgctcatgcccaaccgcaccttcgaggtctccatcttctccctcttcgacgagaacctcaagccagggccggtgtcggagaggaatttcggcttgttccgcggcgacatgacgccggtctacgacgtcggcatcttcactgatccggagacccttgagccggtgagagcgaaggtgacgagccggaaatggtgcgtgccggagccggcggcggacgagatggtgctgcaggagaacatcgacttcgcgtgcggccaaaagggcgtcgactgtaccgcgatccggccgggcggcgtctgctacgagccggacacggtgcaggcccacgcggcgtacgccatgaacctctacttccaggccaatggccagcatgcctttgactgcgattttggacagacaggcattgttaccacagctgatcccagttatggaggctgcaaattcatgtga

SEQ ID NO: 11605 - DNA, 408 bp, Zea mays
  Peptide Sequence Number=SeqID_53384
atgcctacagaagaagctatgcaagggtacatcacaattgttcaggacctattccctaactgggatgcaggtgcaagtgcgaaaaggaaagatgaagatagcattgcttccgcatcagcttcaaaggggcccatgggacctgtgtttagcagtttaatgtatgaggaagacgaaggaaatgaatcagaacttggtgacatccatgtttcagcaagggaaggggcgactgatgacatagtgaagcttctggcagctggtgttgaggtcaacgtgagagataccgaaggtagaagtccgttgcactgggctgttgatcgtggccatcttagtgctgtcgaggttcttgcaaatgcaaatgcagatctgaatgctaagatttatttgatgggtaatcatacagctgggtga

SEQ ID NO: 11606 - DNA, 224 bp, Zea mays
  Peptide Sequence Number=SeqID_53385
atggccgcctcaggctactcgggctccgcgcccattactgatcagggctcaccggagacaccatgttcggtgcccatcgagggaggctcgggggctgctcctcgcataaccggcttctgccaaatcgttgacagcgtcaacataacagcccaagagctgtgcccagaccgtgccccggcttaccgcctgttcgcatggaggaacgaccaacacccgcccaacgc

SEQ ID NO: 11607 - DNA, 318 bp, Zea mays
  Peptide Sequence Number=SeqID_53386
atggaggccacggcagtagcggcagctgacgtcaaatctgaggtcgagtctaaatgtggccggaggatccctgagattgccgcgctcgtgacgaccagagatctgtgcctgcgatggccggagattcgtgcacgtccccctgtagatccgtgccacgctgagcccctcctcaagtggtccaacaacgacatcgatgagttcatcgccttcgattcggtctacgggccccaggttcttatgacatggaaattcaacggtttaaatgatgtaacaagtctaccatgccgcttcaaaaacatagacatgcttaggtcataa

SEQ ID NO: 11608 - DNA, 432 bp, Zea mays
  Peptide Sequence Number=SeqID_53387
atgccggtattgccttcacaagccgacggcacaggggggtataaccctgccggcgaagacgaccgagactacgagttgcggagtcgagggtcagctaccctaggaactaacgcccttgacaacctggtatcacggtcacgtcgatcctcttcaacccattccgatcattcctccacagcggccacgcccaaccccagccctccaccatcaccacagtcatccactgcccccgccccacagccgccagccatggtcgatcccactatgaaggatgtgatggagatgctcaagtccatcaccacagagatgtacaccatgaaggccgacatggccactctgaaggagaagccggcttcgacgttggacaccaccgtcgtcggccgcccggaggggccacgcgatcttgatcaccccccaaattgcagaaactag

SEQ ID NO: 11609 - DNA, 417 bp, Zea mays
  Peptide Sequence Number=SeqID_53388
atggaagacggcgacgagagcgcggcggcggcgctggggctgagcccgcagcttttcgtcaacgaggtccacggcatcatcgccgacatcagcgccgaggccttcgaggcagcggccgcaccaggggtcgtcggcgccgccaaggctgcagagaaggccatggatctcccagcggcttccctggatgttccttatgtagtggagtggagactattagctgattcgctaagtgctgcgacccacatttcagtttctgcttgtttgcgtagcattgcgggattaaatgctgttcaccatgtcgtaaaggatcgactggacaagagaatggccaactgggagaaattctgccttcgacattgcttcgatgtacctgaaggttttgtggccgatgaaaatgttcataatttagaaaagtga

SEQ ID NO: 11610 - DNA, 660 bp, Zea mays
  Peptide Sequence Number=SeqID_53389
atgggcgccaacggacacccgccggcgagcaccgtcgcgcagaacggatcccactctggcggaggcggaggagggggagggggagtgaaccctagcaacggcggcacgggggcggctcttcggcacgaccctggtctggcgcgggagtggtcgacggaggagcagaccatcctcgacgagctgctggtcaagtatgcatccgatttacccgttgttcgttatgcaaaagttgcaatgaagttgccagagaaaacagttcgggatgtagccttgcgctgcagatggatgaatgagaaggtttcagattcttcgtcgaaaccacctgtgcatatggtgggtaggcctaatgttcctccataccctcttccagttcttccaatggacgatgatgaaatctcatccaaagccattggaggtccaacgggtgaaatacttgaaactaatgcccatgttttgggtcaaatttcgtcaaaccttagcaacatgcagatacaggacaatatctctctgctctgccaaactcgcgataatatactcagggtcttgaaagagataaacgatgctccagatatcatgaagcagatgcccccgctacctgtgaagataaacgaggagctcgtcaactcgttgctccctagaccaactgtacctatgcagtag

SEQ ID NO: 11611 - DNA, 522 bp, Zea mays
  Peptide Sequence Number=SeqID_53390
atgaagcagaaagacatggagctgcaagctatgcttgatggagtgctagaagcatctggctgtgagaagttgataaaatgcttgagcgaatactctaaactatattctgacaaggatgacgacccaaaggagttcatcgacaggttcttaaaattctctataaccaggaatgagctcggtccttctattcagactcatgttcagaagaagctacaaatgtggatcgagacgcaaggcttcatggacaacgcggcccaagtgtgcgagcagaacagtggtgagtcggcgaagttcatgtccgaggacagtctcagagcgaacgatctaggtttccagttgtaccatggagtgcaggatgaggacgatgtcaagtgcgctatggatgaagggttgccgctgttggacctcaacatcagaggttgcgccgccatcatagtcctcttcatcccgagcgtcgacgcgtatctacgatcgggacaacaggtctccggaacctgtcgccttcgagatcctacaccgtaa

SEQ ID NO: 11612 - DNA, 186 bp, Zea mays
  Peptide Sequence Number=SeqID_53391
atgaccctaaacttctatttcttcctcaacttgctccctgaccgcggcgcgctggtcgaacgtctcgaacaagagccttaccagagtggtctggccacggatgagctgttcttggcggcgcggcggaccgaattgggggaaaacggcgtcgcggtggctctgtttgaaattggggttggagattga

SEQ ID NO: 11613 - DNA, 2733 bp, Zea mays
  Peptide Sequence Number=SeqID_53392
atgccggacccccgccgaatcactgcattccttggcttcccctaccacgtgccagcgctagttcgccctcgggctcacacgccgatgggagaccgccgcactgggagccggcactacgcctccgcccggactctctctgtcggtgctccttcatcctccccgtcccgtcaatgtggaggcaagaagacagtgctcttctttatatcctgtccggagctcaatacagtgctccaaatccatatcagcctgctaggagtggataaggatctttgcctcaacgagtggagcaaaaccatggatgtgcctacgcctcccaaccgtgccggctgcaacagtaacatcagcaacatcggcagccccatgcaatcttttgatgatccctttggtggtgctgccatgacgagctttgatggatactcggagctcagcagcccatcagttgctgatcacatattctccctgctgaatgatccctcgtctgtgcaacatatgtttgccttgtggtcatcttcggggtcatctccgcgtgcttctgctgtgagagaagacatgtcgtttgacacctatcctggacctatggacgtgacagcatcacttgctcaaaggatcaactcagcatcagtattcaatccaactgaagtggacagaggactaaaagactcagatgggcttgttccaaataatggttcacaacaagggagtagcatcattccgaggtcggttggcaacattcttgcagacaggatgctcatggcgctatctttgttcaggaagtcattgagcgatggtgttcttgcccaagtctggatgcctgttgagcacaatggtcgtgtcgtgttgagtacatccgagcagccctatttacttgaccaggatcttgcaggttacagagaagtttctagaaatttcttgttttcagttaaggaggagcctggtctgcacctagggcttccagggagggtcttcatatctggggtgccagagtggacctcaagtgttacgtattacagtaagccagagtatttgagaatggagcatgctcttcttcatgaaatacgagggtcacttgctatgccagtttatgatcccagcaagggttcttgttgtgcagttcttgaacttgtcacaaacaaggagaaacctgattttgatgcagagatggacattgtttactctgaaaatcagaaatatgcttctacagagattttggatgttctaagagctatttgccatgcacatatgcttcctttggcccttacatggatccctacatcaaacggcaccgctaatggtttttgtgtcgcaaagaatatcaggcttgattcgcaaccaggaaaatcagtacttcgtatccatgaatcagcttgttatgttaacgatgcaaagatgcagggatttcttcatgcatgtgctgaacgtcatcttgagaaagggcagggtattgcaggccgagcccttaaatctaatcttccattcttttcgcctgatataagagagtacagtatcgaagactacccgcttgcacaccatgctctcaactgcaagggctgtggagagcagcagatgttattaaacagcctttccagcacaatgcaaagaatatgcaaaagcttgcgaacagtttctgaagcagagaccgatagtgttagtgctactgaaccaatggatgctgcaatgagccttggcggtgagccctactgtactgttatgaagtcccagttaaatctaattttgctgcgacattcacaacaacatggaatttccagatggccatctcgaaagataaacaaggtcaaccgttcactgaagaagatcgagaaggtcatcaaatcggttcatggtgtggacagatccttgcagtacgatcctgccactggatctcttgttccagcaacctcccttccggataagatgcctacctcatctgcgggcgtaaaaacagtggaggaaaaatctagcccagaaccaggacaggatttctcttcgcctgatggatggcaaagagaaagtagccaacttcatgcctccagtatacctacaagggtaggtgatgaagtccaaatgctggcaatcaacaacgaaggcagcaggaactatgcttctggtatcgcaaatatcgcgcagcattcaaactccgaagacgcacacggtcctttatatcccgtcggtgctgttaattcttcgcgtaccggagaaacaggctacatcgattctccaacctccctccacatggatagcgtcgaaggccaaacaacggtgagggactcaagatctgtacagcaagcagatgtcaccatggccaccaaggagcagacccttccctccacctctggcacaaccgattcttcgagcggcagcgcctcaagtcagcctgctttcaaggggaacccaggacgtgccctcaaagttagcagcagcgatgcactgacggtgaaagctacctgtaacggcgacaccgtgcggttcaagttcctgccggcaatgggctggtaccacctgctggaagaggtagcgaagaggtttaagctggcgacaggagcgttccagctcaaatacaaggacgacgaggacgagtgggtgatcctggcgaacgacgccgacctccaggagtgcgtggacgtcctggactcgatcggctcgcgcagcgtgaagctgcaggtgcgcgacctcccctgcctcgtcagcagctcgggcagcagcagctgctgcttgcaggtggaaggaagcgcctag

SEQ ID NO: 11614 - DNA, 396 bp, Zea mays
  Peptide Sequence Number=SeqID_53393
atggatgcttccaacatcggaggccatgaggaccacatagcgcgggcgctcggcgtcggcggtgaagaaggcctcaaagttagcctggcgggtgaggtcaagcttggcgtgggtgtgggccacgacgcaggtgaagacaagcatgaggaggcgacacacgatggtttaaccgacaagatcgttgcgcccgacgacgaagacctttgcgtccttgtcgacgaggaaggacgggtgtgcatggcgaggggctgtggagcaggaagagggcgagcgacggtgatgcagggcgagggtgagggtgttggtgtggctttgaccagcggttgcgatggtcgcagtggtcgctggacgctaggagtttgcatggtggagggtggcggttccggcggccgataa

SEQ ID NO: 11615 - DNA, 1323 bp, Zea mays
  Peptide Sequence Number=SeqID_53394
atggtcaagttgcctgcactgagaatgaagaggatgtttcatggtgatgattgtgctaatgagttcaaaatcaggaccatgaaatccatgaaagtttcacactttcatgtcagcgagttagagcagtcagctatgtcgaacttatcagataaaactcctcaagatgagccagacccaaccattcaacttgctgaccaggatattagggtaacagaagcttctggcttgcatgatctgattggaggaaaatccatgctcgaggatttaacatccgaagtgatagattcaccaaattcagagggtgactcctctgctaattatgatgacaacaaatctgtgttacatgcagtgaattatgttggcaaagagtttgcagatgatggtgtagattcttcattccagaatttctgttttagtgatcatgaggcgaactggggtttgaatgagtgttgcagactgatggatatttatagtccagatgacgatttctcttatttgcttgatagtccacctgatcttctgcctagttatactggattttgtgatgaatttgtatcaatagatgcattgatgaatatgagtagcagatgtggaatcttcccacttattgagagcgctacggaagccagtgttgataataagccatgctcatctgaggtggatttgtgctttaataattctgaggtattagagtggctcaaccctaatctattggagggggatttaccagatcttgttgattttgctgagttaaattcaaatgctacccctgcaaaaaaagagcaatggaccaggaatgttactctcgtgcttgatttggatgaaacccttgttcattcaactatgaagcattgtgatgacgctgatttcacattttctatgttctatgatatgaaagagcatgttgtatacgtgaaaaagagaccgcatgtccatatgttcctccaaaggatggttgaaatgtttgaggtagtgatatttactgccagtcaaagtgtttatgcagaccagttgcttgacatgctggatccagagaagaaacttttctccaagcgtttcttccgggaatcgtgtttgatcacagacagcggctacagaaaagatctgactgttgttggagtcgaccttgccaaggttgccataattgacaacactccacaggtttttgagctgcaagtgaacaatggtataccaatagagagttggtatagcaaccccttggacgaggcgttacctcagttgatcccattcttggagaccctcgctgtaacagatgatgtccgggcctatcattgccaagaagtttggcaatataatagataa

SEQ ID NO: 11616 - DNA, 474 bp, Zea mays
  Peptide Sequence Number=SeqID_53395
atgaagcggctcgccggcacaccaaatccccgctcgtggaaggagacgaagctcacgatgtaccccggcggattcaaaaacgtgaagcgaaacggtcgttccccgaacggctcgcgcacgcgcaacggccgccccgcgaaccactcgccccgtcgcattaactccgcggcggggagaggcggcgcctctagcaggagaagcgggcgacgcttcgccttcgccgtaatgaccgcatcagaaaagggaccgggaaagggggataccccgaaaaggatccttccccatgaaggaaccaggctccgagcctccctactgatcagaggttcgaaggctggcccctcgaaagggttcgacagccgcctcagatcacgtgggccctacacccactactggtcagaggttcgaaggtcggcccctcggaagggttcaacgaccgcctcaggctactcgggctccgcgcccactactgattag

SEQ ID NO: 11617 - DNA, 402 bp, Zea mays
  Peptide Sequence Number=SeqID_53396
atggcggcagagaacatggacatgcgtgtctatgtttatgtagtaggtccacgcaaagcggaggatgagagccgtttatacggcctgctggagatggagatggcctcagaggagtcaggcctgggcgtcctcgcaaatgccaaaaagcctactgttccattccatcccatcccatcccacacggacacggccccgtgtcgcgcggagtgccgctgccgccgaaagaaggtgccggacgggcgggtgcagtcggtgcgccaggatctggatgccgccactgctgcttgccgttggcgtcagggtcaggctctccagtcatatggatggaccacaaacgcgtctctctttccctggatctatgcggcggcccttccatcccacccaccatcagcgtctctctaa

SEQ ID NO: 11618 - DNA, 504 bp, Zea mays
  Peptide Sequence Number=SeqID_53397
atggctagagggtcaaatatcaaatatgagaaccctaaatttgttttcccctcgtggctttgtgcctttgtcgtcctctacacgacttttctccccatctcccacagccaagtccccaacccacctccacctccgcgccgaggaatccacacttgcaattgcaactacgagcccaccaaatcgagccgagccccgacggcaccaaatcgtgcggcctcggagatccagcagggtctagaagaaccaggagagacaccgtcagaagaggagggtcagcagcagccagaagaggagggccaacagcaggcaggcggtggcggcgaaatcgtcagcggctgccggggtatctgcgatgataacccggtcgaagctggtggagcagctgcgcgactaccagatccgatcccagcacaagatctgattgaagacattcttgaagattataatatagatatgcaccatttaactcgaagtggacttttgaagattggcctctttgtctag

SEQ ID NO: 11619 - DNA, 438 bp, Zea mays
  Peptide Sequence Number=SeqID_53398
atgacgtcgttgtatcttctagatgcccatttcaatgaactatgcggtctgccatctgcttttgggaagcttaccagtcttgaaatactcaaccttagcagcaccttcaatgacttaaaggagctctcctcttcgtttggtgatttgctgaatctccgtgagcttgacctgagcaacaatcagattcatgctctccctaacacttttggtcggctgaaattggagaagctcaacttggagcagaatcccttggccatgccaccagaggtcattgtgaacaaaggtgtgaatgcagtgaaagaatatatgttaaagaggtggttggacatcttgcttgaagaacagagcttagaagtgtcatcgactcctaaggctggtgccagtgcgggcggcagcgcgggcgagaagaggccgctgccgcccgcgcgcgggcgatag

SEQ ID NO: 11620 - DNA, 1245 bp, Zea mays
  Peptide Sequence Number=SeqID_53399
atggcgtccgtggcggagctcaaggagaagcacgccgcagctacggcgtcggtgaactccctgcgcgagcgcctccgccagcgccgggagacgctcctcgacaccgacgtggcgaggtactccaagtcgcaggggagggtgccgcatttggccacaaaatggttcttaactatattaatttggcattgcatccgtaattatataagccttactgtgacagaatgtgtagtaactggtaagggttcacggatcaaggtttgtaaacatttatcaacaactggaatgggtccatcagaccatcagtatgtatattctctggattggacccctgaaaagaattggatagtcagtgcctctcaagatggaaggttaattgtgtggaatgcattgacaagccagaaaacacatgccataaagctgcattgcccatgggttatggcgtgtgcttttgcacccaatggccaatctgtcgcctgtggtggtcttgatagtgcgtgctctattttcaatctcaattctcaagcagacagagatgggaacatgccagtatcaagaattcttactggacacaagggctatgtctcatcatgtcaatatgtcccagatcaggaaacacgtcttattactagttcaggtgatcaaacatgtgttctttgggatgttactactggacagaggatatcaatatttggtggtgaattcccatcagggcatacagctgatgttcaaagtgtgtccatcaactcatcaaatacaaatatgtttgtctctggctcatgtgatacaactgtgaggctgtgggatatcagaattgcaagtcgagctgttcgaacctaccatggacatgaggatgatgttaacagtgtgaagtttttccctgatggccataggtttggtactggctcagatgatggcacatgtagattatttgatatgagaacagggcatcaacttcaggtgtacagtagggagcctgatagaaatagtaatgaactacctactgttacatctattgcattttcaatatcaggaaggctactttttgctggttactccaatggtgactgttatgtgtgggacacacttctcgccgaggtggtacttaatttgggaaacctgcaaaactcccatgatggccgtataagttgcctcgggatgtcatctgatgggagtgcattgtgtacaggaagctgggacaaaaatttgaagatttgggccttcagtggacaccggaagatagtttga

SEQ ID NO: 11621 - DNA, 717 bp, Zea mays
  Peptide Sequence Number=SeqID_53400
atggtgtggaagcaaatgtggggaagggagagaatggagcagaaaaccattgatgtcgtggatgaccgtgtactcgggaaggcccctcgccgagacctttcaccggccgagcgccccgagctgcgccgcggcgacggcgaggtccaccctgtcgccccaggcacgcgggctggtggccagcacggagaggtacccgaggagggcctcagcctagagcgcgcgcctggcgaaggccgcgtccaccgctgccccgggcgcgccatcacggacgccgacgtgctgggcacgctcctcgtgcagaacccatctctacgcgtcctctccatgggcgccccgacgctagcgccgccgccgaagacgccgcgcgtcctctcacctgcccggccgtcgttgcacagctcgaacacgcccctgttctcctgctggtccaggatcgcctgcgcgagggaagggacgggcgtgaggacacgacaggacgccgagacgcaatgcacaattactcagggacgcgcgcacgacacagcaggatttcgtgcggcgaggtgtccttggggatgtgaatccgtgcccgaggctggcgtggtgagggcggtcatctccctgtcgccggtggtgatgcagtgcgagaggacgacggcctccatcctcgggcagaccgccatgagcgcctccaggccacgccagccgacgccgctagcccgtgtgaggcgcacctag

SEQ ID NO: 11622 - DNA, 234 bp, Zea mays
  Peptide Sequence Number=SeqID_53401
atgtggtttggagaagaagattggggcaaaagggacgagctgcagcagaacgaggccaagtgtgagtggagccatttaaacgtggacgcgagctcgtcgaccacgggaggcgagatgacgcaggaatcgtatgcctacgcggctacgcctacgcgggggtggcctccgcctatgctgcagcagtccaaacagctgcaacagtgtcggcttgcagccagccgaacacgcccttag

SEQ ID NO: 11623 - DNA, 750 bp, Zea mays
  Peptide Sequence Number=SeqID_53402
atgcaggtggcgtgcaaccgcaccacggagacacaccccttcgacttcgacgcatccagcatggaggcccaggcccacacatcatggtccgggaaaggggatatttcgaaagggatccttctccgcgaaggaagcgggccccgagccctcctactgatcaggggttcgaaggctggcccctcggaagggttcaacagccgcccagagcactcgggcttcaggctcattactgatcagaggttcgaaggctggcccctcggaagggttcgacagccacctcagagcactcgggctccacacccactattgatcaggggttcgaaggctggcccctcgaagggttcgacagccgccccagagcacgcagagcgagggatgactctgggtacgtccgatacatggccgaggctcgggctacgctcccgaggagaactctccgcctcgcccgaccccagggctcggcccccgcctcggcctcggaaggtggtctccgcctcgcccgaccccagggctcggcctcaacctcgacctcagaaggtggtctccgtctcgcccgaccctagggcccgccctcaacctcgacctcgacctcgggaggaatcacgtcctcgcccgaccccggcctcggcctcagaaggaatctccgcctcgcccgaccttgggctcagaccgaccacgccgcagggggataacacggagccacggtttttcccctttgtgttccgtctcgcgccaacccatctgggctag

SEQ ID NO: 11624 - DNA, 1386 bp, Zea mays
  Peptide Sequence Number=SeqID_53403
atgggtgccgcggcgaggaagcccgccgccgctctgctgccaatctggctctgtctcgtctgcgtgtcaagagcgcagccgtacatcggcgtgaactacggcgaggtagcggacaacctgccgtcgccggacaagacggcgaggctgctcaagtcgacgtccatctccaaggtgcggctgtacggcgtggacgcggggctgatccgcgcgctggcggggtccggcatctccgtggtggtgggtgtggccaacggcgagatccccacgctggccgccgacccggccgcggcgtcgcggtggctggccgccaacgtgctgcccttcgtcccggcgaccaccatctccgccgtggccgtgggcaacgaggtgctggagtccggggacgccgcgctggccgccgcgctcctcccggccatgcagaacctccgcgccgcggcggcggccgcgggggacggcgccgcggggatccggttctccaccgtgaacaccatgggcgtgatggcgcagtcggagccgccgtccgcgggcgcgttccacccggacgtcgcgccgcagctgcagcagatcctgggattcctgagcaagaccggcgcgcccttcatggtcaacccctacccgtggttcgcgtaccagtcggacccgcggccggagacgctggccttctgcctgttccagcccaacgccgggcgcgtggacggcgggtccaaggtcaggtacgccaacatgttcgacgcgcagctggacgccgtgaagtcggcgctggtgcgcgccggatacgggggcgtggacatcgtggtggccgagacggggtggccgaccaggggcgacgccggggagcccggcgccacggtggagaacgccagggcctacgtgtccaacctggtggcgcacctgcggtccggcgccggcacgccgctgatgccggggaggtcggtggacacgtacctgttcgcgctgtacgacgaggacctcaagccggggccgacgtcggagcgctcgttcgggctgtaccacacggacctgaccatggcgtacgacgccgggctgacctccaactccaacgccgggggaggtacaggtactgcggcgccggcgcagcccaaggcgggcgggtggtgcgtggcgcgggacggcgcttcggacgcggagctgcaggcggacctggactacgcgtgctcgcaggtgggcgtcgactgcggcgccatccagcccggcggcgcgtgcttcgagcccaacacggtgcacgcccacgcagcgtacgccatgaaccagctgtaccaggcggccgggcggcaaccgtggaactgcgacttccgggcgtccgccacgctcacctccgagaacccaagctacggcgcatgcgtgtacaccgggggaggccaataa

SEQ ID NO: 11625 - DNA, 177 bp, Zea mays
  Peptide Sequence Number=SeqID_53404
atggtctcccattccagttatggtgggtacaagtgcggtcactgcacgacagcagtcggggtcagtgaggcattttatgccaaggcggtttaccttgcaaggataaaaaactcaattcgaattatctgcttctcgcagctaatgagactgcttgatccatgctgctacattgagtaa

SEQ ID NO: 11626 - DNA, 591 bp, Zea mays
  Peptide Sequence Number=SeqID_53405
atgggtcaagggacacttgccgccaccaaccagctgctggtcaggggcttctcctgtctgttcttcggattccttgaccagaccgttatctatgcgggcacgaacatacattcacatctccaatcagaaaggctgaaccggggcagagcgcgcctcgtcgggggccggggcgagccgaggccgcgggccgcgccacggacgcgacagcaggggagggagagggtcggggcgggcgccagggctgcaggccgagcgccatggccggattccggccgcgccgagcgccacgacgccgggccggacgggttcgcgcgcgcatgggaagggtgcaggggggagggtcgcgtcagggatgctgggccgggacgccggggccacgccaggacgtcggcggacgcaggcgggcgccctggccgcgagccgcgccgaggccacggaagcgagcaggccgcgctggacgagccgcggaccgtgcgaaggggcgcctgcgccgggaccgcgggcgggaacacctcaccgggcgagccgtggaccgcgctgggcgcgcgcgctttcccctcccttttatgggtgtcggcgccgatgccttga

SEQ ID NO: 11627 - DNA, 459 bp, Zea mays
  Peptide Sequence Number=SeqID_53406
atggtggaggtccacgtcgcgcggcgaggagatcggttccgaggatttcttagacttctggcagcggagatctcgaccacgacagattcggtcagcggaagccgattcacgcggggaagaagtcctctgacggggcggtggttatggcgcgggtgtgtctggccgtgtgcgatttcagcgaaggagaaaagggaggctgggctgcgcgactgggattcggttggggcctccgcgcgtagtggatcggagattgctccgccaaggtcgcgcgccattggagatggaggagctgcagaggggggccagccgtcggtggcaggcatactgcggagggtcgaggatggtggcccaccaggcagcgacagcgacggagccacgcgcgcaagtgaaggggctgaccacatggggcccacttgtaagcgcctgggatcaagtgcacaaataaaattactagcctaa

SEQ ID NO: 11628 - DNA, 834 bp, Zea mays
  Peptide Sequence Number=SeqID_53407
atggcgcctcctgtcaacgtggctggcctgcgccctaggttgggcgacatggaggctcctccgaagctgaggtcgagtctgtcttccgtggccgaggccgagtccgagcccctgggtcgggcgaggcggaggtcgtcggctgaggccagggcggagtccgagccctggggtcgggcgaagcggatcggagtggcgcaggcggcgctgtccttctgtcaggccggtcagtggagcggcgaagtgacggcggtcacttcggctctgccggggggcgcgcgtcaggataaagccatacccagcgacggcgtagggcccgcggcggcgcacacaccagcggaaccccgcacggcgattctgggcactaaaaccaccgctatccagtgctacgcgtacgagaggacttctggcagcggagatctcgaccacgacagattcggtcagcggaagccgattcacgcggggaagaagtcctctgacggggcggtggttatggcgcgggtggtaggatccgcgaaggagaaaagggaggctgggctgcgcgactgggattcggttggggcctccgcgcgtagtggatcggagattgctccgccaaggtcgcgcgccattggagatggaggagctgcagaggggggccagccgtcggtggcaggcatactgcggagggtcgaggatggtggcccaccaggcagcgacagcgacggagccacgcgcgcaagtgaaggggctgaccacatggggctcacttttaagcgcctggtgagtaggtgggccgaccaggcacaatcggcccacgtagggggatcaagtgcacaaataaaattactagcctaa

SEQ ID NO: 11629 - DNA, 1329 bp, Zea mays
  Peptide Sequence Number=SeqID_53408
atggcgttctcctgcgcgggcgcgcgcctccacggtcgcaccggcgtcggcggcgccaaatgccgtcccggcgcggctctgctcgggcggcggggcacctgcttccgtccgaccgcctggaggtggagcaccgccaggggaatccgcgctgacctcccgccaccgccgcgggcgagcgcggatggcgccgccacctccggcccggacgtcgtcgtccccgaagcgggggacgctactgaggaggtggccgcggttgttcaacctgttgtgctcccggagaagcttgatgtcgatgatggtggaaatggcaagctccctcccgccgccggcggcggtggggacggcgagaatggcggcggtagcggcggcgggggtgacggtgacgaggaggaggatgagttcggacccatactcagcttcgaccaggtggtccaggaggcggagaagagaggggttagtctgcccagtttgcccacggacatagttgaggcggccaagagcgttgggattcagaaactgctgctgctgagatatctggacatgcaggcgtcggcttggcccttggggcctgcaattaggtcctgctcgcttctccggaataggatgctggttgatcctgcattcctcttcaaaattggcactgagatagtcatcgatacatgttgtgcgacatttgctgaggttcagaagagaggggaggagttttggtcagaatttgagttgtatgctgcagatatgttggtaggagtagttgttaatgtagctttagtcggcatgttagcgccatatgctcgatttggtagcagatctgcatcagaaggtctccttgggcgcgttaggcatgcttatgatgccctcccaagcagcgtttttgaagctgaaaggccaggatacaaattttctgtgcagcaacggataggaacatactttttcaagggaatattgtatggttctgttggattcttttgtggtcttgtgggacaagggattgctaatttgataatgacagccaaacgagggcctatttctgatttcttggtcagtgtgggaattattgcctattttgataggagtgttaagaagtcagatgatgatgtacctgttccacctcttctcaagacttctgctttgtggggtgcattccttgctgtttcttccaacacacggtaccagattattaatggattagagcgcctggttgaggcttcacctgttgggaagcgtgtcccggctgcttctttggcattcactgttggtgtgaggtttgccaataacgtgtacggagggatgcagtttgttgactgggcaagaatgagtggctgccaatga

SEQ ID NO: 11630 - DNA, 156 bp, Zea mays
  Peptide Sequence Number=SeqID_53409
atgcttaggggttttataccaaatgggaagggctatagtaggagagtaatattggttcacaaagaattcccagaagaagaagatgaaattcaagaagtggtttctgaagaggagtctgctttagtgcctgctcatcaagtgatgggagccatctaa

SEQ ID NO: 11631 - DNA, 1410 bp, Zea mays
  Peptide Sequence Number=SeqID_53410
atgggttctataggaggacacacaaccacagctaccgccgaccggcgccgccgcgtgctgttcttcccgctcccgtaccagggccacatcaaccccatgttccaactcgccggcctcctccacttgcgcggtttctccgtcaccgtcttccacaccgacttcaacgctcccgacaagtcccgccaccctgcctacgacttcgtccccgttcccgtccgcggctgcttgccgaagggcagctcggatgccttgcaggtgaccgtggagcgcatcctcgccgtgaatcgcgcctgcgaggctccgttccgggagcgcctggcctctctgctggcgcgggaggacgtcgcgtgcctggtcgctgacgcccacctgctgacgctgctggacgtggcgcgggggctcggcgtgccgacgctggtgctgcgcaccggcagcgcggcgtgcctccgcatgttcgcggcgttccccgcgctctgcgacaaggggtatcagccggcgcaaggcacgaacgcacacgcactcatccatctggagacgccggtgactgagctgccgccgtaccgcgtccgggacctgccgtccaccaccagcgcctgccacggcgtaataagcgaggtgatttcccgtttagtgacggccgtgacgacctcctcgggtctcatcctcaacaccatggacgcgctcgagtgcggcgagctggcgtcgctccggcgagacttcggcgtccccgtgttcgacatcggcccgctccacatgctctctccggctgcctcgagcagcttgctactgcaagaccgcggctgcctcgagtggctcgacgcgcaagccccggcgtccgtgctctacgtcagcttcggcagcctcgccagcatgtccgccgccgagctggtggaaacagcctggggcatagccaacagcggctataccttcctgtgggttctccggccgggcctcgtccgcggctcgcagacgtcggaggcggcgccacccctgcccgacggcttcgacgccgcgacgcgcgggcggggcatggtcgtgagctgggcgccgcaggaggaggtcctggcgcaccctgccgtgggcgcgttctggacgcactgcggctggaactcgacgctagagagcttgtgcgcgggcgtgccggtcattgcccgcccgtgcttcggcgaccagatggggaacgcgaggtacgtggaccacgtgtggcggaccggcctcacgctcgacggcgtgctcgagaggggcgaggtggaggcggccgtcgcggcgctgatggcgccaggagagcccggcgacgggctgcgtcggagggcgcgggagctcgagagcagcgcggcggattgcatgaccaaggatgggtcgtcctgcacgaatgtcgacaagctggtagaccacattctgacactgtag

SEQ ID NO: 11632 - DNA, 348 bp, Zea mays
  Peptide Sequence Number=SeqID_53411
atgaaggccaagttacaccatcaacaaaaatcaaggagtacaatggatcaagcgctctcattgcaagaagcagacgatttgaatcgagttttaaccttgcaagtgaccgcacttgtacccaccatatccggaatgggagaccacgtctcaggacaagtgagggggaaagtcaacgccctgcttcactcagctctgtctagatttggacagattgagacttgtgacttcgaaaattcattactagagactcaggaatttcagtttgcggtcataatagcacttaactcaagcaccaatcaaaatcataaagagatactaccaccaattctcaagtctaatatatcatga

SEQ ID NO: 11633 - DNA, 480 bp, Zea mays
  Peptide Sequence Number=SeqID_53412
atggcgaaggggtacccatgttttaatcccagccgcacacctgaaatcaacggacctggcgccttcttccccaactccgcggcgaccggacgcgccgccgcccttcatccaccccccggcgagccgaattccggtgttttgaagcgcgaaatacaaatcagccagactctacacaatgcggggataagaatgaattgggaaggaagatcagtacccgtaatcggagatttgcgcgtgctgcccatagcgggtgaagtttggcagcagagagttcacatcggtgagaaattcctcacgcccccgtggtttatttgcgaaattgacagcacccaaggcttgttcgactcgcggcgtgcccttcgagttccctgccgccgactagaacacaccaagcctcgcaatccaccacggcggccctctcttcctctctggattcttggtcagtgtggtggtgtttggtggaggcctaacaagccgtga

SEQ ID NO: 11634 - DNA, 381 bp, Zea mays
  Peptide Sequence Number=SeqID_53413
atggcgaaggggtacccatgttttaatcccagccgcacacctgaaatcaacggccctggcgccttcttccccaactccgcggcgaccggacgcgccgccgcccttcatctgcccgccggcgagccgaattcaggtgttttgaagcgcgaaatacaaatcggccagactctacacaatgcggggataagaatgaattgggaaggaagatcagtacccgtaatcggagatttgcgcgtgctgcccacacgggtgaagttttggtggcggagagttcacatcggtgagaaattcctcacgcccccgtggtttatttgcgaaattgacagcacccatggcttgtttacctcgcagcgtgcccttcgagtccctgccgccgactag

SEQ ID NO: 11635 - DNA, 264 bp, Zea mays
  Peptide Sequence Number=SeqID_53414
atgggaggtgtcaccattagcagaggtgagaacaaggctggtcgccgacatagtgaagcccccaacgagagtttggggaggcaagctggcagtgaggccgtggtcttgccgccaggacagcacaacaggctagtggcagtggcggccggtggatatgggtactcacatagaggaacaggggcgcggtcgcccaggctgaatgctagccagtttccacggtgcagcatggacgcgcgtgaggcagctacttgtgtcagcggatag

SEQ ID NO: 11636 - DNA, 204 bp, Zea mays
  Peptide Sequence Number=SeqID_53415
atggagggcacggacgaggactgcttcccgggcgaggtgtctggttggcgtccatggacaagcatcaaagggagggcgctggccatggagcaaggagcaaagagcatgcagggaggtggagctgagctccctgctgcacgccatgtggaagaagaagacagggagaaaaagaagaaggtggcggctaggggggtaggtgaataa

SEQ ID NO: 11637 - DNA, 255 bp, Zea mays
  Peptide Sequence Number=SeqID_53416
atggatggagctcggcgcgcgacgcaagagaagcagaggtcgagctcggcgcggctggagaggagagcaaagaaggcaccggccatggcgagggcgaaactcggcgcggctgggctgggcgcagtgctggagatggccgagaaggagaagtccaagcgccatgggagggagaggagggagctaggaggctgcgaggaagataaagacgacttcaggaaaatcaatagagagagtggacaagataagcgcgcgtag

SEQ ID NO: 11638 - DNA, 579 bp, Zea mays
  Peptide Sequence Number=SeqID_53417
atgtgtgccggggcggcgctcgcacagtgtgctcgcgggaagaggaaggtgagaggaaggtgccaggaaggtgggaggaaccgaggaagagctcccgatgacgtcatcttccgatgtcatagactgaggaattggtccgtgcttgctgacttcccgtggagagccgaggccgaggccaaggggtcgtccgtacgcccatgccgtagtggttgtaacagcgtcggggtatggaccaaaaggcagcttatggggtgcgtcatcatcctggcgcgtgatgatgtcgagattccctgctgcactcatcgagatcagagcccctgctttgttttgatgcggaagttttctgaggcgttagccgagttgtccctcgatgtgcgctacagtcgggcggagtggccgcctgtgggattcgtggcgcagttggtggccgaggccgagctcgggcgagacggagaatgtgctcgaaggctagaccctgggtcgggcgaggcggagaggttgcacccgtgggctagatcccacttcgggcgaggcgaagagattgtgcccgaaggcccgtccgctcggcttgtcgtatag

SEQ ID NO: 11639 - DNA, 240 bp, Zea mays
  Peptide Sequence Number=SeqID_53418
atgcccccgcctccatccccaccgtccgatcgcgtccatctccacggtccgatctcgtccatcctcgctctggatcctcctccgacgcccaccccacaacgtcgcctacgccatctcgtcgtccatgtcgtgtcgcccatgttggagctgttggggctggccaagtacggcgccactaggcggagggaggatgtcaagtgccagggctgttttagcattttaacatgcttagtttactag

SEQ ID NO: 11640 - DNA, 1290 bp, Zea mays
  Peptide Sequence Number=SeqID_53419
atggtacgggacataaatttagttattggtatgaatatggtgcgtggtgaaaccataattcaagatgtagaaggtctctcctttgaacttcgtagatcattgcgtgatttgagacatcagttgccagtggtggaggcagcaattaaggtggatgttttgaaagcaacactatccaatcgagaatatgaaattatttctgaatgtgcattgtctaacttctctgagacaccacatcctgtgcctactctggatgatcctcgatatggcacttccactactccatcccatgtatcagcttcttcttcagaaagtattcatgtcttgtccgaaggtgcagaaacatggatagctaataaattttctgtctcaataaatctggttgagctttctctgcattcaggatcgacaagagattctcctctggcgagcgttcaggcgagtggagcatggcttttctataaatcaaacacacggggagaaaattttatgtatgctactctcaaaggattttctgtttttgatgatcgtgaaggaaccaaagatgagttaaggcttgccattgggaaatcagcatctgttcgggacacatcatctgttgatggctatgataatcctaatgaacttgattcaggtgaacgaagaatacaaaaggatctaggccttgagccaatcccctcgatgcttattcttgatgccatcttccgaaaatcttcgtcatccgtctctgtctgtgttcagcggcccaagtttcttgtggcacttgacttcttactagcagtaatcgaattctttgtgccatctgctcagagtcttctatccaatgatgaagacaaggaccttttacatatgatcactccagtagtattgaatgatcaaatttatttccaggagcattcaacatttagtctttcacctcagaagcccttgattgttgataatgaaagatttgatcacttcgtatatgatgggaagggtggaaagttatatttgctggatagtgaggggaaaattctctcaagcccttgtactgagagtttcattcatgtgcttgggtgtaagagattgcaatttcggaatgtcactatagtgaatggtgaatatttggattcctgtatctctctcggtgatgatagctgttattcagcatcaaggaatgaccatgtctacttagtaagagaagatgatgggtccttgtcaacccccagcaaggaaattagaggagacagtgttaaaaatgggagtgctgatatatcaaccgaatttattatggaactacaggtattgctttaa

SEQ ID NO: 11641 - DNA, 2103 bp, Zea mays
  Peptide Sequence Number=SeqID_53420
atggatattgctgctccaaaaattaccgttcctaccaagttccgaccagatgatgtacatgagactaagcttttgcttgaccttggaaatttagttcttcggacagaggaaatatgggatgcctatacttcagaagagcaggatatatatctaaactttaatttggtgcttagtgatgtctctgcatttctggtggatggtgattaccattggaatgaaacatctgatgaaaagaacttgttgccagtaattgacaaatgtgggattgctttgaaacttcagcagggtgttggaaaccgggaagctgtttggcaacacagatatttgcgtctagtgggtccatttctctatgtatttgaaaatttaatgtctacaacgtacaagcaatggttcagtttacgcgggaaacaagttcaccagattctggaagacactggtgctttaattttgttgtttgataatgatgagggacgaaagatatggcagaaccgtttacagggtgctatataccgtgcatcgggttctgcaatttctagctttcctggagttgctctcccatcagaggcccactcattcaaaggcaactttcttgatgttgctgacacagagaaattatttgttgcgggcattcttgatgaattaaagatatgtttttcatgtggctatgaggttgaactctcaatgaaaggtggcaatttactgataggaactattttggggtcactagaaattgaagaccagtattactatccagggagtcctgtgccaaggttcttggcaaggtcttttattaatagcatgcaaactcaagaactcccgtctcttagccgaaagaacagtgcaggacctagaaacaccccattgatgaaaaatgacagtgaggaaaactttttcgaagcatcagatgattttgatgaatttgaaacacctatgcatcaaaagaggactatatcagactattttagcacccagaaatttttgcctactagcgttccttccctacagccgccaacatttaagcgcattcctgatttgataccagatactgaacttcaaactggcaaattcacattggaaggtagtggcactttcaatagttttgtgaaagctcagatagtgatttatgatcaacattctccccagtacaacagcttggataacagggtagttgtaactgttgccactttatccttcttttgccatcggccaactgttattgcaatcatggaatttatgaatgccatcaaccttgcaaacgggtctgatactgataaagataaaagcacttatcctgctactgtagaagatagtgcaattgaggaatctaagtctgatctggaatcagagccatcaataaaacccttactggctaaaggtaaaagcagaatagtttttcatcttacatccagcatggcagaggcacagatattactgatgaatgaaaatggtgaccggcttgctactttatcacaaaataatctctcgactgatataaaggtgttcacatcatcattcagcataaaggctgcactcggaaaccttaaaataagtgatgatagccttcttagcagccacccttacttttgggtttgtgatatgcgaaatcctggaggtcgttcatttgtggagatcgactttagttcatacaatgttggtgatgaagactattgtggttatgactatagccttgtagggcagctttcagaagttagaattgtttacctcaaccgttttgttcaagagattatcagttattttatgggacttgtgccaaaaagttctgatgccgttgtaaagctgaaagacaataagactaactcagagaagtgggttagcaaaaccgatatggaaggatcacctgctctcaaattggatgtttcattcagcaggcctataattgttatgccccgtgaaactaatagtaatgactttttggagcttgatgttctatacataacagtccaaaatgaattccaatggataggtggtgataagaatgagatgagcactgttcacttagacattttaacagttacactagagaggggtgcaaacatggaaataaaggggcggaggcacaataaagcctttaccaggatttga

SEQ ID NO: 11642 - DNA, 480 bp, Zea mays
  Peptide Sequence Number=SeqID_53421
atgtctgaagatcacgccaagagggagatcatcacaggcgataagcccatgggctcggggaggactctatcaagggagtccggtgacaaatacaaggaggaatcctcttcctccatcaagtcactaaggaagggtgacaagaagaaaaagaaaatgaagaaggtggtctactacgagaccgactcttcatcaccttccatgtacggcgccgagtcgacaacttcgaagcgcgacaagagcaagaatgaaagtgacagggacgacgataagaaggggaagaagaaaatggagaagaaaaggtaccacaagaagaaaggtggtgaggcgcacatgtggcgggaatgggattccgacgagagcttcaccgactcctcctccgacgaggacgccaccaacatcgccatcatcaaaggcctcctcttccccaacgtcggccacaagtgtctcatggctaaggacgacaagaagaagaagatgtag

SEQ ID NO: 11643 - DNA, 597 bp, Zea mays
  Peptide Sequence Number=SeqID_53422
atgttggaggaccaggtcgccttcctgctgcagaagtacctcggcaactacgtccggggcctcagcaaggaggcgctaaagatcagcgtctggagaggtgatgtagagctcacaaacatgcaactgaagccagaagctctcaattcattgaaattacctgctgaaccagcaacacaagttgaaggttgcagcgaggatgctgtccaggaagcaaaaagaagtcgagttagggaaatggagatcaaattgttggagcgccaacagcaactgaaatctgaactaagttcatcatggctagggtctttcattggcactgtaattggaaatatcaagttatccattggcaatattcatatcagatacgaagacgtagagagcaatcctggccacccttttgcagcaggtctggtactttcaaagctttcagcagttacagtggatgaccttggcaaggagacttttgccacaggtggtgatttggaccgagtgaaaaagtctgttgaacttgagagtctggcggtgtattttgactctgatagcagttcttggattgtggataaaccctgggaggatttacttccatcagagtggagtcag

SEQ ID NO: 11644 - DNA, 1797 bp, Zea mays
  Peptide Sequence Number=SeqID_53423
atggagagaacactgatcacctctaacctctgcttgagtgcacacgcttcaagatcgtcccggagggttcactacatccctccttccgcctctgctgctgcacacaactccagctacaggaagaagagtgccccgtctctgccgccgtcggccgccgcatctgccactgttgtcaccgcccctccgtccactgacaatgtccagtccactgctccgaaacagaccgggcgacaggagctggaagatctcgtggccgccaagaccagcacttcaagaactgcacgtgcgccgagccaggctcgggctcgggctcgggctgagcctcgccgccggcctgccccggcagccacgtccctgccaatggcgttctgcagcgcgctggaggaggcgatcaacacgttcgtcgaccctccggcgctgcggccgtccgtggacccccggaacgtgctgtcgaccaacttcgcgccagtggacgagctgccgccgacgccctgccccgtcgtgcgcggcgccatcccgcgctgcctcgccggggggcgcctacatccgcaacgggcccaacccgcagcacctcccccgtgggccgcaccacctcttcgacggcgacggcatgctgcactcgctcctcctcccgacggcggggtccccgccgtcgtcggaccccgtcctctgctcgcgctacgtgcagacatgaacccagccgagggcgtggggctcgctaacaccagcctcgccttcttcggcggccgcctctacgcgcttggcgagtcggatctcccgtacaccgtgcgcgtcgacccggccaccggcgaggtgaccacgcacggccggtgcgacttcggcggccgcctcttcatggggcatgaccgctcacccgaagaaagaccccgtcaccggcgaggtcttcgcgttccgctacggcccccgtgcccgccgttcgtcacctacttccggttcgacccggccgggaacaagggccccgacgtgcccatcttctcggtgcagcagccgtcgttcctgcacgacttcgccgtcacggagcggtacgccatcttcccggagatacagatcgtcatgcagcccatgggcatggtgacgggcggcgcgcccgtggggtctgactccggcaaggtgccccggctcggcgtgctcccgaagtacgccacggacgagtcggagatgcggtggttcgaggtgccgggcttcaacatgatgcactcgctgaacgcgtgggaggaggccgacggcgaggagctggtgctggtggcccctaacgtcctgtccgtggagcacgcgctggagcgcatggagctcgtgcactcctgcgtcgagaaggtgcgcatgaacctgcgcacgggcgccgtgtcgcgcaccccgctctcggcggggaacctcgacttcggcgtgatccacccgggctaccttggccggcgcaaccggtacggatacctcggcatcggcgaccccatgccgaagatctccggagtggccaagctggacttggaccgcgccggcacgggcgactgcacggtggcgcggcgcgacttcgggcccgggtgcttcgcgggggagccgttcttcgtccccgacgacgtggagggggacggcaacgaggacgacggctacttagtgtgctacgtccacaacgagcgcaccggcgagaaccagttcgtggtgatggacgcgaggtcgccgcagctggacatcgtcgccgaggtgcagctgccagcgcgcgtcccctatggcttccacggcatgtttgtcacgcaggccgagctccaggcgcagcagcaatga

SEQ ID NO: 11645 - DNA, 945 bp, Zea mays
  Peptide Sequence Number=SeqID_53424
atgccctgcctattgtttcttctagctccaccgcctcgcccctgtctagctgactcggtgagtcggtcaccgctccccaacaaatatcggttcttcctgccccagacccgtaggcggccaagtccgcggcttggcgacggcgtgcgaatggcggagatgaccagggtttggagcggcggggaaccgctcgaggttggggtttccatggagagtgacccgattgtcggaggggaggcgccttctcgctcgaggtgggaagcgagccggtgggcgcccgtggaggctgcgctgaatcggatgattgattccaaccagggcctcagtagacttcgaaactttgtagccaagctgaagaaaggttgcatagaaccaaaaagcttaccaaaaggcactaaagctcctggatattctggttcctcgatctatagggagcgtcctttgctttatcttcggaaagctatttggaagcgtgatgctgaaatcatgtgggttttgctgggtgcggttggcaactctctgctttcgttggttctcaagaagatgctaaaccatgaaagacctgcaccagctttgcggtctgatcctgggatgccatcgtcccatgcacaatccatattctatgctgcgaccgtcctagctctttcattgtactactggcttgggacaaattatctgaccatgattcttgggcctgcaactctgtcgttggctgcctatctgtcttggctacgtgtgtctcggggccttcatacactaaaccaggtcatggtgggagctgttgtaggatctgccgtcggtgctctttggtttgtgctctggcattggcttgtgcaggaggcctttgcttcttctgtgcttgtcagagttgctgtcatccttggatcatcagcattttgtgttagctttgtcgtctacatgattcgtcactggctcaaggatgagtaa

SEQ ID NO: 11646 - DNA, 579 bp, Zea mays
  Peptide Sequence Number=SeqID_53425
atgggcgctgatggaaaccaacgaagtgggtggccgagaagggagaagcgtcaaggtgagggaacacaagacatacctggtgaggatgacagttggtggggcgatatggggagggagctagaggcggctaatccagaccagacgcaaggctggcgaggagggggaggcgaggacgagacatacctggcgaggctgatggggagtggagcgatcaggggacggagacgtaggcaactaatctatgccagatgcgggctgacgaggaggggggcgaggaaggaaagtctccatggctggtccagactatacgcatcgatttggacggtggggaggtccggagcggggcggggatggagggcagtggagccagcacggcgagtggcaacagcgtgggtgcgtgtgagtgaggggacggaagagagagatggggaagaggaagacaagaaagaagagaaatgcagcaacagtggaggagggggctacgcgccagcacagggaggaaaaagaaggcggacacaactctcgctcttagctgagttcgtgaaagggaaattaggcttacacctagttcctaaataa

SEQ ID NO: 11647 - DNA, 306 bp, Zea mays
  Peptide Sequence Number=SeqID_53426
atgcagatgcagaaggtctcgctctcggttaataacccgtggccgcggtacaacaatcttctggacgccagacggcatcgcgcagttgatgatgagacagcaacggcggcgacggcgatatgcgcgcggcaatatctgaaagcctcgaggatgaattggaaggaagaatccggattctatggtctatggatgaagaacgaatgtgaggggagagacgggagttggaagatcgggttgttcagagatatcttggaaatgtttgatgctgcaatatgttgctccaagcaagcacaagcacaaatgtga

SEQ ID NO: 11648 - DNA, 324 bp, Zea mays
  Peptide Sequence Number=SeqID_53427
atggccgccgccgacgaggacgacgcgacgtgggagcgcgctatctccgccgccaccaaggccacctccgcacccaagatcctcactctcgacggcgccgtcaagtcctccacgggccgcctcccctccgccgcactcatcgggcgcttcgccgcttccctcgaggagttctccgtcacgggggctgccctctcctctctcacgggcctgcccgcctcccggcgctttggcgcctctccttccccgacaaccgtctctcggggcccgctgcgctcgccgctgtcgcggaggcctgcggtgccacgctgcgccacctcgatctag

SEQ ID NO: 11649 - DNA, 1176 bp, Zea mays
  Peptide Sequence Number=SeqID_53428
atgggggccccaggtgtcggcaccgtcaggatcttgagtgaagagatcttgagtgaaggagacgaagtagatcttgttactcaggatggggaaggaggtggagcgcagcagcctgcgctcgggttccccctcttctcggtggaggcgcaacgcctccgggacccggaccctgtcagcaaatatcagattcttcaagggggaatgatcacgcactacgtgctgacagggtcgcctgcacaggtccagaaatccacgtccaagccgccgccctcgcctccggacaagggcacacctgtgccggtggctcctgttaggacacagacgtcccctgcatcactctatgccacgcctgagagcaccaccctgcctgactcaccttcctcgttcccgggaacctggtcgccatatattatcaaccataagaggcggggggcctcccttgccaagacctctcggggtgatgttggaagtgggggcagccagccgaagctccaggtgatgctgtccgctttgcccaaagggggtgaacccactgcagcggaggagcctgagtttgcttttcagcaatcagagaatggtcaaactgaaggtgacagtggtgtggaagaggctcccatctatggaaaaaatgaaatgctactaaaggacaagggatctatgtcagccaaaaatgagcaggagcagcctgagtttgaatttcagcgtggaagtcttgaagcatcagtgaggtctgttaacgttggaaggcctttgattgctggagcaccaaaaaatgatgagagtgacaccttccttgaacttcaggatttgattagtgtgtctagccatactgaagctgacggtgctggtacacaagagcggtggtggaagcccagttccccgcttgggacctctgttggcacacctggtgctgaattctatgatgcgtttgaagctgaggaaactgattattcaagtatggatcctggagctgagttgtgccagcaaataactgtttcacaacttgtcgctgctgctattgcccaaggttttgctcgttctgaagttgaatcagagatggaaaccgtgcttgcagcaaagaactttgagattgcaaggctgtcggatagggtccagtactatgaagctgcaaacagggaaatgtctcaaagaaaccaagaagctatcggtaaataa

SEQ ID NO: 11650 - DNA, 228 bp, Zea mays
  Peptide Sequence Number=SeqID_53429
atgtggccttactacactcggcgcggtatcagcagtctctgcgatgctaccacgcccaagggcttcggccccgaggcttccagaacgtctttcgcgcttttcgattacttcgacagcgggatcctgaaaacgacaagagtacacgtaagcggcaaggccgaccgagccgagggactcctacgcctccgggatacggatacctcactcatcaccttccgcgataagtaa

SEQ ID NO: 11651 - DNA, 150 bp, Zea mays
  Peptide Sequence Number=SeqID_53430
atggtggggcgaatttggcctgcgggggcctatggcgaccggtccacggcgcagtggcgggcgcccgcggcggcgaagccgccgagatacgctagagagggggaagggagctcaccggagcaaggcaggggcacggcggcgctcgcttga

SEQ ID NO: 11652 - DNA, 411 bp, Zea mays
  Peptide Sequence Number=SeqID_53431
atggaagaggcgcgctcagtgagggggagcagccgcgcacccagggagcaggcgagcagcatccacgcccagggagcagcagccgcgcgcagggagcagccgcgcgccccaggcgagcagcagccgcgagcaggcgagcagcagccacgcccagggagcagcagccgcgcgcagggagagggagcagccgcgcgcagggggagagagcagccgcgcgccccaggcgagcagcagccgcgcgcagggagcagcagcggcgcgcagggagcagccgcgcgcagggggagagagcagccgcgcgcacaggagcagtcgcacgcgcacaggggaagttgccgcgcgcgcacagggggaagttgccgcgcgccaaaagcccaaagcacgcgccaatttgggctccgcgcgcggtga

SEQ ID NO: 11653 - DNA, 534 bp, Zea mays
  Peptide Sequence Number=SeqID_53432
atgaagaagacctcatcattgagctgcacgctgtcctcgggaacagtgatgccgccagtttcaccatcggccctctctacatcaatggggctgaatcttccacctgatattcctcgacatggaggaactggcattggaagtaccgcagtagattcattctactgggatgaaatcatcctccacagctgttcctcagttgaagagctggctggcaatatcaaggcaaggacatccgtggcattagaagttgtagcaggatgcataggaaagttgttggtagccagcgctcgtgcgtattacctgtcggccttcgcttcttattggatcgatggtcagaccgcccacgccgccggggtaaagaagatcctgtgcaatttcacatgtgtggcagtaaagaagatccgagcccacaccgacggcgatggggtaaagaagatttgcgaagccgccgagaaggtgcttatccctaccggagagaaggtggtccgtggattcgacggctgccaccacgttgtcgtcgccgtcgcgtggtga

SEQ ID NO: 11654 - DNA, 102 bp, Zea mays
  Peptide Sequence Number=SeqID_53433
atggaggcatcctccgcggggatgaatccatcattcaagcaaggaaagaatttgatgacttgggctttattagttgctccttatggaggtcttgaagcttag

SEQ ID NO: 11655 - DNA, 564 bp, Zea mays
  Peptide Sequence Number=SeqID_53434
atggcgaaacctcgcggggcgccgaagctcctctacccccgccaccggcggctcctacgtaaagtttcttatggtactaatgttttgtatgcactaacatgggcaatagaagattcacaggtgtcaaatgatcaactgtgggcttctaatggttatggttatcatgcttgtgttacaccaacctctagatataaggttcaaggcaagtcagacagctacatgactgttagaagtaatggaggactcaaccaaatgcgcactggaatctgtgatatggttgcagttgcccgtttggtgaatgcaacacttgttatccctcagttagataagcgatccttctggcaagataccagtacatttaaagacatatttgatgagcctcattttattaaggctttggaaggagatgtccacattgtgagtgacttgcctggaagtttgcaatctgctccaagagcccggaaacatttcacctcatggtccggtgcaagttattatgaggaagtgaaagagctctggaagaatcagaagttcgtgcaaaatgagttgaggatgtcacggtag

SEQ ID NO: 11656 - DNA, 471 bp, Zea mays
  Peptide Sequence Number=SeqID_53435
atggggcgaggggcgtggaggtgggagagaagggggctgggagttggcggctcggtgagcgtgcgcgtcgtgggcgccgaaggggttagtccagcggttgtctccatggagaagaggaacatggcacagcgctcgcgcaagcgtgctgaccacggggtgcagggcgcacctggctgggccgctggcggggcatggcacgggatgggttgcgcgcgtgcggcggccgagcgctgggcgcggcggcgtgcgcgagctggggcttgggcgagcaggagcgcgcggagtggctggactgcagcgcggcgcgcgctgggccgcgagcggctgctgggctgcgcggggtgggctggccgaggaagatgggccaggcaggctgcggggaaggaaggggcacggcgtgggacagctgggccggggggggtggaaaagcgcgctgctgggccaccgagaggaggggggagggatggctag

SEQ ID NO: 11657 - DNA, 417 bp, Zea mays
  Peptide Sequence Number=SeqID_53436
atggggggtcagcaaggtcgacatagggctgggacggagctgctgaaattggaagacgacgatggggacgatgccgaggtgaacgcagcagggagcaaggcaaggtcgtggctaggcggactctacagcgtggactcctccgcggccatgacggctgccgcgacgcacacgacgtcgccacgccacaacagcaccacgaccatgaacagaggcgcgcacaggaagctagagactgagcgtggcgagatggacaggggaaactccaagctaggcgaactgcacacgacctcgacacgcagggaaatcggcagagggagctgcacggcacggacgagatccaagcaggggccggacaccatggagcttgatgacagccgggcgcgacagggaagaatgcgcgcgctggagcagaagtag

SEQ ID NO: 11658 - DNA, 213 bp, Zea mays
  Peptide Sequence Number=SeqID_53437
atggacgtttgccagatgttcgatcaaggacttcagctgaaggtcgttgtcgttcgtgcgaacatcgaatcaaattgtgatgcagaatatggggctacatgtagcatggtaactgtgtccacggttgcgaagtcgtcatgctgcgtagccaagttcaggtttaacgacataggttatgtgaggaagattaaatcggtggatcgtatccgatga

SEQ ID NO: 11659 - DNA, 333 bp, Zea mays
  Peptide Sequence Number=SeqID_53438
atgacggaggcacagggacgcgatagggcgacggtggcagagctctggctgcgtaagaaccactccggtgagcgcggaccggatagacaagagagggggagggcacaccaaagggtgtctcgagaagttgacggcaaggcgaagcttaccgtggctctggatggggcacaggcgcaatggcggccacggaacaagcggtggatgtcagcgggcggtggcggaggttctcagttcgtgtgggcagagcgagggagctgggcagggggcgcaaatggaagaggggaggtgggcgagcagggcacgaggttcaaaaggggcgcaggggctcggtag

SEQ ID NO: 11660 - DNA, 579 bp, Zea mays
  Peptide Sequence Number=SeqID_53439
atgggagaggactggggtcgcgaagcagcgggttgggcgccatggaagagggcagagctcagcgagctcgcggctgggagcagtagcgccatggttaggagcttggcacggcaaagggctcggcacgtggtagggaaggaccgggctccgcagagcgcgagctcccgccggggaaaggtgcgcaggcgagcagggacagcgccgagggaacttgaggcgaggacgaccgtcggagagggagctcggctgggcgcagcttccatgggagatggcggccatggcagggagcttggggggaaagggaatcagcaagcagcagagaggaaaaagcggccgagctcccaaactggagcaccagggagatgcgagcagagaggggcgcggcaccagggacctccaagcaggggcgccgcggcactggagccctgggcaccgagcgctgaggggagaaagtggaggagcggctggagaagcctgcaccacgtgggagataaggaagccggtgaagaagaaatatcagggatgaagagcggcgatagggatagagatcggttgtgggatattttctttcttttttaa

SEQ ID NO: 11661 - DNA, 192 bp, Zea mays
  Peptide Sequence Number=SeqID_53440
atggcgagagtagcgtgtaccctccgtggcaagaggatggatagtggcgtatctgtgctctcggttggcgtgtacccggacagcaaacagcggagtttcgttgtttctgttcagagctggtaccaaaagaggagccaaatccgtgatcgcgggtgtgggaggatgcttgcctcccagtttgaaaaacactaa

SEQ ID NO: 11662 - DNA, 387 bp, Zea mays
  Peptide Sequence Number=SeqID_53441
atggagatctttatacatgtggaacaaaggtactggatggagttcaataaatgggagcactttgtcaatgatgattgtacacggtcatttgtttcactagaagttacaagaactggtttgccagagataacgaggcagatacttatggtagatgaagtgtatcgattgcatggtcttcctgaattttacacgaatccacggccacatatatcgttggtgtgggcattgggtgatgtcagcggcaaactaaagcaggcactaaaggacattgaaaaatatcagagcagtatgagctcattgcaaaaatgtaatgttcgatgcaagttcagtcgtgtagtttgtaaagtaggcaagaaggtgcatgatatctgtaaagttgcagattga

SEQ ID NO: 11663 - DNA, 426 bp, Zea mays
  Peptide Sequence Number=SeqID_53442
atggcgctgccgatctcgcctttttcttgctgtagctggaggagcacgacctcatgggggttggcgctcttccgccagtgctcagtttcaaggatgttcatcagcctcgtggtggtgggaagcaagccgggctgcggtctcccaccagcgctcggcttcaaggatgatcaccagtcttgtgttggtgggaagcgagccgggctgcgacctcccctgtcctcagcttcaaggatgttcaacagccttgcaggggtggggagcgagctgagctgcttgctccgccttccgcatgagctgatggcctgcctcttcctgcagcattcggaggaaaggatgttcaccatccttgtgaaggaggcaaactctggctacgccacacctgccagaccacaagcgtcgtctatcgttgtgcatccaactctttag

SEQ ID NO: 11664 - DNA, 555 bp, Zea mays
  Peptide Sequence Number=SeqID_53443
atgccaacagtgggtccagacccccgtgggaaagcgccggacccctgtacatgtagaccagtcctccggggcaaggtccaggacccccgcgagtacaacccggacctccgggtcgggtctcggacccctctgcgtgggctatatgtggccgacagctgggacccgctcttcagccatggctgccgtctccgccagttgggccatatgcgccctgtggatcttccccaatccctggcggacgcaaccaccgaaccgagcaaggcgcggccggtcaacaccagccagcataacggcctccgcttccgcaggaccggagaggagtggaggtctagggcgccgccgacgtcgtctgcggccgtcaccgccgttcagtactcgggtgcgcgtgttggggtttgggcactcgtctgcctgggcgccaaatcgccggcggggtcggactgggagcaccatgctccgcgcgatgccgccgggattggtagtggcgattgcacaccgttggatcgggcagcgatggcccggattagaatgaaggtactgattcagtggaagtag

SEQ ID NO: 11665 - DNA, 207 bp, Zea mays
  Peptide Sequence Number=SeqID_53444
atgtggcctaccgcgcgtgacctggcaggtgacgtccaggccatcctgcagacggcgtacctgtccattccattgccaaacagtacgctcgtgctgcaagatgcactgtgcccatccatcatcactcgtacattgccagggaggcttccgctgcacgccaatgctgcgcagatcgcggatatcatggcgcaaggaagattgcactag

SEQ ID NO: 11666 - DNA, 2430 bp, Zea mays
  Peptide Sequence Number=SeqID_53445
atggaggaaggtgttggtggtgataacagtctagatcagttcattaacaatgatttgaggattataccctgtgatcagaatgctccctctcagtccgttaacaacggtagcagtgctgcacctattgaccttgaagaggccgctgctaccgacaatactgctgctcccacttcagatggtgatgttaagaagcacaaaagagtttgcacatctaaagtgtggcaggattttgacccgctatacaggactgttgacggcaggattttgataacagtctactattcttcctattcctactctattctagtgatctggacatctggtgatatgccgaggaccacaactccacaaggcttgctcatttataatggccttgtggagtccgaggcactgattgatagtagttcttgctctagccgcaccgccatggagatcaaccccgcggacgagatcgacaagtgcgaggccggcggcggcgcggagccgcaacctgcagatccggagcccgatgccgccgcggcggtcgagcagcagcagccgtggcgcgagcagctgacggcgcggggcttggtggccgcggcgctgatcgggtccatgtacaccgtcgtcgtcatgaagctgaacctgacgacggggttcgtgcccacgatgaacgtgtccgccgcgctgctggcgttcctggcgctccgcggctggacgggcgcgctgtcccgcctgggcgtcgccggcgccaggcccttcacgcggcaggagaacaccgtcgtccagacctgcgccgtcgcgtgctactcgctagcgctctgcgggttcgggtcgttcatgctgggcctgaacaggaggacgtacgaggcggccggagtgaacacgccgggaaacgtgccgggtagcgtcaaggagccaggattcgggtggatagccggcttcctcgtcgccagtagcttcggcggcctgctcaccttgatccccctcagaaaggctttggtcatcgactacaagctgacgtacccaagcgggactgcaactgctgttctaataaacgggttccacaccccccaaggagacaagaatgcagagaagcaagtacgtgcatttctgaagtactttgggatcagcttcctatggagcttcttccagtggttctacaccggtggcaacgcctgcggcttcgctcaattccctacgtttggcctcaaggcctggaaacactccatgacgtacgtcggcgccgggatgatctgcccgcaccttgtcaacctctccgccctcctcggggcggtcctctcctggggaatcctgtggccactcatcagcagacgcaagggctactggtaccctgcagacgtaccggagagcagcatgaccagcttgtatggttacaagtccttcgtgtgcatagctctgatcatgggtgatggcatctaccacctcgtcaaggtcctcggcgtcaccgccaagagcctgcatgagcgctcaaagctcagacgcagcaacaaccgagtggccgacgaggacaacgcggccgcgatcgacagcctgcgccgcgacgaggtcttcaaccgagactccatcccggcgtggctggcgtacgctgggtacgccgtcacgagcgccgtcgcggcggtcgccatcccggcgatgttccggcaggtgcggtggtactacgtggtcgccgcgtacgcgctggcgcccgtgctgggcttctccaactcctacggcgccgggctcacggacatcaacatgggctacagctacggccagctcgcgctcttcgtcctcgcggcgtgggccggccgcgacgacggcgtcgtggccggcctcgtcggctgcggcctggtgaagcagctggtgctcatctccgccgacctcatgcacgacttcaagacggcgcacctcaccctgacgtcgccgcgctccatgctcgccgcgcaggccgtcggcgccgccatgggctgcgtcgtcacgccgctcacgtttctcctcttctacagggcgttcgacgtcggcaaccccgacgggtactggaaagcgccgttcgcgctcatctaccgcaacatggccctcctgggagcccagggcttctcggcgctgcccacgcactgcctgccgctgtccgcggggttcttcgcgctcgccgtgctcgccaacgtgatgaaggacgtcctgccgccgcgctacgcgaggtacgtgcccctgccgacggcgatggccgtgccgttcctcgtcggcgccagcttcgccatcgacatggtggtggggaccgtggtggtcttcgcctggcactggattgacggcaacgagaccacgttgctcgtgccggcggtggcgtcaggcctcatctgcggtgacggcgtatggactttcccttcgtcgttgctttctctggccaagatcaagccacccatctgcctgaaatttacacctggaagctag

SEQ ID NO: 11667 - DNA, 477 bp, Zea mays
  Peptide Sequence Number=SeqID_53446
atgtcgggcataccgagggaagtcgccaagcactccttggacatccgagccaactccaggccggtgagacagcacatgtgtcgattcgacgaggagaagcgcagggttatcgggaaggagatccataagcttttggcagccgattcatcaaggaagtgtttcatcctaagtggggccacgtatcaacgttgcatgaaccacatgttcgatgaccacataggctcaatggttgaggcctatgttgatgatatagtggtcaaaaccagaaaggctgacaacctcgtcgctgacctagaaaccgccttcgctttcctccgagctaagagtgtcagactcaaccctgagaagtgtgtctttggggtccctcgaggcatgcttctggggttcaatgtctcagaacgaggaatcgaggccaatccaggcaaggtctcggcgatcacaggcatggggcctataaaagatgtcaagggagtttag

SEQ ID NO: 11668 - DNA, 507 bp, Zea mays
  Peptide Sequence Number=SeqID_53447
atggatagcttaggatacttccctgctggccaagggcgggctgctggagcggatatcgtgccgaggccggatggcgaggtcctgaaaaggtcttccagtgttggtattgatcagtttggaagttgcaccttcaccccgaagaccgggaagacaaaagagaaggttgtggagctagccccctacacaaaaaataagtcaggaggggggcgtccggttactcatagagacttcgaatgcgtcgagaggcaggttttgagtcttgccttcgctatcgagcttggggaacacactcgagacacgtttgtcgtggagattgaaaaagaggctgaggaacttgttggtcctgtttctgagcaggagattgagataggggttgagcttcgtggaggccacacgcatttgaatcacgtgttcagccagatggggctttcctacatggagcacacaacgtgtcctaagagatggcgaaagacgttgacaagggaccctgccgaatcacaaatgtag

SEQ ID NO: 11669 - DNA, 99 bp, Zea mays
  Peptide Sequence Number=SeqID_53448
atggcggtgcggcttaccggcagtgagggaggtccggagaagggtggggttggcttcgagaggtccttgcggtcacaacgaggttataatgttacttaa

SEQ ID NO: 11670 - DNA, 288 bp, Zea mays
  Peptide Sequence Number=SeqID_53449
atgcacgcgttaactaccttatgtgcatatcaccctttggagatggcaactcaccccattggtttattccctgctgcaaaggaggaggatccgatgtggaaagatcgggttgaccacgccaaggaggatgcaaaagtcaccatcaccgaccaggaggatctggtggtggatctatccactgaattggtggagaaggatctccagactgagcaaatgaatgcccaaattcgtgagcttgaagagcgagtggaagaaaggaaccacaccatcgaggttctggaaaactag

SEQ ID NO: 11671 - DNA, 129 bp, Zea mays
  Peptide Sequence Number=SeqID_53450
atgaacttccttctcccgtccccatcgccgcctcaaacgctgcctcgctggcctgggtgcccccataggtgcttcgtccatcgctgtgatgcacacgccatcgggtgctgcgacacgcgcttgctgtag

SEQ ID NO: 11672 - DNA, 1104 bp, Zea mays
  Peptide Sequence Number=SeqID_53451
atgggcattgggaaggatggggtcttgccatggaagcttcctggtgatcttaaattctttaaagagcttacactaactacatctgatcttgtcaaaaagaatgcagttataatggaaaggaaaacatgggagagcattccagttaagtcaaggccattgcctggtcgtttgaatgtcatacttactcgatctggtacttttgattttgcaacagtagagaatgttgttatctgtggaactcacctcacggcgtccgacgcggctactgatgcccgcctgcgccagatcgaggtggataccggctctcgtctcaccgccatagagtccgcagtccagctgttcgactgctggcgcccccgagtggactcctccctcgacgccatgaagacgaacctggatcggctctgttcggaggcgtccaggatggaggtcgtaggcttccaaggtgtgttcggcgggtttccgggcgtactcggatctcccggttccggcgcgacttcgtcaggcctcctcggatccccgccttccttcgctcctaccggagcggtaccggtgcgcccatctgccaccgtcgaccactccgacgcctatcgttttgggcccagctacgaaaactatctccgagacagtgggcttcggtatcctgactgccgatggccgcttcccggtcacgggaagaggcggattcttctcgccgtcgtgacttttgatgtgccggttcaaaacggcatctacgagcctatccacgtcgctccaaaaatcgtggccgtccaatggtggatcgtccgcctgctctctcgtgcgccatcctgtccacgtcaccgcaatttctctcagccgcccgatctcccagcaacggacatagatcgcccagtagcaacttcctctatactcttcttcctcgcctttgacgggtctcctcgtcacgcgatgcttccaggaggatctctacttctccacccagatttccaggctcccatcttcacctccgacactacaccccgtacctcgtgcccaccgccaccatctttgctcccggtgctccacggcttcgccttggcacgcgccggtcgtgcccgcggcctcgctcctcgactagcatag

SEQ ID NO: 11673 - DNA, 2637 bp, Zea mays
  Peptide Sequence Number=SeqID_53452
atggcggaggacgcaccgcctgcagcccctgtgatgacgccggaggaagtgcaggctgagaccgagctgcggatgcgcgacataggccagcgctttggtgctatcccagaggaccccgacgagctgctccggttactcgaagaagccgaaatctggttgtccagggtggatcaatctccgcccgagagcatgtacaatgctcttcgccccaccatggctgttttgattacaaatgagctactggagcaccctgatcccaacgtgaaggttgctctcacctcttgcttaacagaagttaccaggattactgcgccagaggccccctatgatgatgatgttatgaaggacgtgtttaagagagtcgtagagacttttgctgagttggatgatatgaacagcccctcctttgcaaggagggtttcgatccttgattctgttgcaagggagagcgatgatgtccatgctgaactggcatcattccttcttcagaaccttacaaaagaagcacaagaaactctcccggcatcttttggacttgcagagagggtactaggcctatgcagggacaagctcaaaccagtgtttcatgagttacttaaggccactctcttggatgaatacagcaatgttgttacgatgttgttccaagatgcttcagatgctggagagaacaatgtcgatgcatcaggaaaagacatgagtttgacagaaaggggttctatttctcctgttattgagatactgacaggagatgaacatgggatctataccgttattacaggcatgtatattcaagattgtagggtttggctggagcaaaagtcagaagctttaaaccctgctatctcgaaagggagctatattgaccataatataacatgtgaaatttcaaagcagctgaaggtaaacttttctgaaagtctgtttctgatgagtcacgaccaggaaacttcaaaggtagaccgaaatgtcaattgcctaggccaagaaggtactagcccaagtagtactccaacaactgccattagcaatggtggtgctccgattgacaatgtcaagtctccagatgaaccagattcttcaaaacagaagcaagaactgacttctggtgacgaacagacaccagattcttctaaacagaagcaagaactgacttctggtgatgagcagacaccaaattcttctaaacagaagccagaactgacttttcttgacaagcagaccaaaagttctgagcaattggtatcttgtgatgtagaagtacaagaaccagtgactgttggaactgaaaagctatctgatatcaattcaaagaaagatcacaagcttggttcttccaccggatctgagatgactgaacaacccaaggttgttaaagacaatgagagtctagtagcatctgagttatccccagagacaaatgatggtgataaaaagcagctaacagagtctggcaatataactgctgacgaatcatcaaaaccaatcgatactaaacctgcttctgttaaaccaaagaggggccgacctccagcagcaaagtctcaggagaaaaagcctgttggaaagaaacaggcatcaaacctaaaatctccaaaacttgatcctgtcactgattctgtagggagagctaccaggcaactgaataatgatgttgcaaagtcttcatcaactaaggctgttgatggagaatctgggaagaagcaacataaaaccagtatgaaatttcagaaagaagatgccgcctctgataaagacaccgatgatgatattagtttgaaggaaatggtgtccccaacaaggattgataaatcaaaaggccaacaagaagatagagggacgtcatcaaaaaggaaacgtctgctggaagctcaagatacccctgtatcgaagaaaaacaaaatgcttgacaaaaaccttattggctcaagaattaaagtttggtggccagatgacaaaatgttttatgcgggtgttgttgaatcattcgatgcctcgtcaaagaagcacaaggtttcgtatgatgatggtgatgttgaggtactagctcttaagaaggaaagatgggagttcattgctgaggaacaaggcgctgatcctgatgtggcatctaatatgccacgtggcaggaaagctaaagggagctcggttcaacaaatggagggaaaaacaggaacacctcaaagtgatgttaagaattctcccaagaagagagggcgcccaaaaggtgtgcgctccagcaataatatgccaaatgctgatagctctgtgactccagccagactgaagggaaaaagtgtcgagaaggatactgaagagacacctaagactggcagtaactctaagaaggaaggtgcaaaaccctctcgatctactggaaaggctaaggattctgttgtcaaggcaagcagcaaggatgaggctgatagcaccgacaactcaaaggatgctgctgccagtgaagacaaggattcaaaagatgaagtgaaatccagtgaagctatcgatggatccaagacaaatggcctttcaaccaaaaggaagccagatgagaatgaaggtgagtcatcagaggaggagaaggcgtctactaaaactactaccagaaagaagcgcagaagaaagagccgcaactag

SEQ ID NO: 11674 - DNA, 4116 bp, Zea mays
  Peptide Sequence Number=SeqID_53453
atgggcgacacatccaccaagtctaccgtgaaggagagttccatcatgtggccgatgctcacgagcgacaactacaccgagtgggccatgttgatgcagtgcaattacgaagcgcttgaaatctgggaagtgatcaccccaggtgacaagccgaagcgggcacaagatcgacaggccatgagtgtgctcctgcgctcggtcccgaaggagatgtggcagacgttggggaggaagaacacggtgaaagaggcgtgggaagctgtgaagacgatgcgtgtgggcgcggatcgcgtcaaggagttcaaggagggagagtctgtcgacgatttcggcatgagaattaccaatctggttggaaatctcaagattttgggcgagacgatcgacgatttctgggtcgtgaagaagtttctgcgcgtggcgccatcacggttctcacagattgtggtgtccatcgagatgttcgtcgacctcaagaccctgacagttgaagagctggtcggtcggttgagggcggtggaagagcgttttgatgacaagatcgatcagatcgtggacaaggcagggtggctgctgctggccgaggaagtttggctggagaagcacaagcatcgttttcaccccggcaacaaggctggaggaagcggtggcagcagtgtctcctccaagggcaaggcaatagcgcgctctgacggcggcgcctcgggtcagataagactgacatccatggggacgccaagaaggaaaggccgatgccgaaattgtggcatctacggtcactgggcggaggactacaaacgcccgaagaaggagaagaaggaggtggcgcagccggaggcgaacgtggccatcggcggcggtgaccactgtggcgctttgatggtggcaacatgcgacatcgaacaggagccgtcccaggttcatctcactgagaaggtaacacctgtgcttgttcctgatggcgtgtgggttttggataccggcgctagtaatcatatgacagggaacagatcagtactgtcacagctgaatgagggtgttaaaggctcagtaaagtttggggatggctctaaggttagaatccaaggcatgggttcagtggtgattcaagatcgccaaaagggtcacaaggtcctcactgatgtgtatttcatccctgaactgaaaagtaacattgttagtttgggacagctggaagaaaaggggttcaaatatgttggggagaatgggagattgtgtgtgtatgatcaggagaaaacactgctaatctctgcacctagagttgggaacaaattgtacctagctaagtttgggttagactcaccagtttgtctgcaagctcaagttgatgatgtttcctggaggtggcatgctagatttgggcatttgcatttcaaagccctgagtgatctaaaatccaaaaacatggtcactggtttgccaacagtaacaagggtagagaaagtgtgtgatgggtgtgctcttgggaagctacacagatctccatttccaaaaatgtccagctatagggcagaaaagggcttagaacttgtgcatgcagatttgtgtgggcatatctctccaaagtctctggggggagcatcctattttttgctggtagttgatgatcacagcaaatatatgtgggtggaattgctgaagagcaaggatcaggctctggaatattttaagaaaataaagaacagggctgaggttgaatgtgatggcaagttgaaggcattgagaatagatcgggggggagagttcaattccaatctattctcaattttctgcagtgaaggtgggataaagcattacactactactccctatactccccaacagaatggggtggtagaaaggagaaatcagagtgtagttgagatggccagatgcttattgaagacaatggcactaccttctgatttttggggcgaagctatatgtactgcagtgtatgtgttgaacaggtgccctacaaagagcctgaacaacatgaccccatatgaagcttggcatggaagaaaacccaacgtgaagcacatgaggatttttgggtgtgttgcatatgtgaagttggttggacctggtctgacaaagctatctgacagatcagccaagatgattttcatcggctatgaaagtggaaccaagggctatagattttttaatcctgctactagcaagctagtggttgggagagatgccatatttgatgaaaatgtgtcatgggactgggccaatgcagcaggcaacacagatcagctgtcaggagagtttattgttcattatgaagattctgacagtaaccctacaataggagatcctgaacccacagaacagtcagctgaagatgcagtttcagaagatcaagggggtgctgctgattatgatcaagctgcacctggcacacctgtcacaccacagtcgagtgttgcacaagggcatgtttttgtcacaccaccgagccaggattcagctttttctgatcaagggccgcatagatacaggctaatgtcagaactgttggatacaactgatgaagtgcaggactatgagtatagtggtatgtgtttactggcagcagatggacctgctagtgttgaagcagctcttgaagaaggttgttggagggatgcaatgatagctgaactgaagtctatagaacagaacaagacttgggcttatgctaatttgcccaaggatcataaggctataggccttaaatgggtgtttaaggtgaagaaagatccatctggcaagattgtcaaacacaaagctagattggtggtgaaaggatatgctcaagttcagggagttgactatgatgaggtgtttgctccagttgcaaggatggaaacagttaggctgttgttggctcttgcagcacagggtgaatggcaggtgcttcatatggatgtaaagtcggctttcttgaatggcaatctagaagaagaggtgtatgttcacccaccacctggattctctgatcccaaacattcagggaaggttctgagactcaagaaagcattgtatggcctcaaacaggccccccgagcctggaatgcaagacttgatcaagagttgaagtttttgggtttcaataggagtgttgaagatcatgctgtgtacagaagaggtacaggcaactctctgatcctagttggagtctatgttgatgacctgatcatctgtgggccagacagcaagaacattgttgtatttaagcagcagatgaagaaaagttttgacatgagtgaccttgggctgttgacctactatttgggtctagaggtgaagcagaggccaggggaaatcactgtgtgtcagagtgcttatgctaaaaagattgttgagatctcaggaatgaaaggttgtaaccctgctgacacaccaatggaacagcatatcaagctgttgccgggcaagtcagagctggtagctaatgcaacaaagtacaggagcctagttgggagtttgagatatctagtgaactcaaggcctgatctagcttattctgtgggcatgattagcagattcatggagacaccgaactcagaacattggggggcaatgaagagaatcatcagatatgttgcaggtaccaccaagcttggttgcaagtatgtcaaaggagcactttcagacttggttgggttcactgacagtgatcacgcaggtgatctggagaagaggaagagtacatcaggggtgttgttcttctatggtggcaatgcagtttcttggagttcacagaagcaaaaggtggtgtttttatcatcttgtgaatctgagtacatagctgcagctacaggagcctatcagggagtgtggcttagtagattggtggcagacataacctgtagtgacgtgaagaagttcaagcttttcatcgacaacaggtctgccgaggagctgagtaagaacccagtgtttcataagagatcgaagcatatagataccaggtaccactacatcagggaatgtgtggctgatggggtggtggaggtgcagcatgtaagcactgaagatcagctcgccgacatactgacaaaaccacttgcaaggattcgttttgcagagatgcggaggcagctaggggtggttaacatttga

SEQ ID NO: 11675 - DNA, 204 bp, Zea mays
  Peptide Sequence Number=SeqID_53454
atggaccactggatccaccgtatacctctcccctcggctctgataccacgtgttggaaccagccgtcgaagatcgacgccggcgagtccgcgacgccggccggtgcgggattttcccgtgttccccaccgcaacaaatcgatgcacggtgcgccgttatctctggaacgcccagtgcgacatgcacggcaaatctgctgcggtg

SEQ ID NO: 11676 - DNA, 288 bp, Zea mays
  Peptide Sequence Number=SeqID_53455
atgagccatcgtccatggcatggagtacgacgttgtcgcgcttcccctggtgaccgaccattcgatgtggtggtcatccgcaaacttgacgatgaactacgcgacatagttgccgatgtgctcggatcacgcttggctatgcatggtagagaggttccgaccgtaagcgccacgcaagaggacacacatggtgagaacctacacgacccacattgtgttgaccacaaggcggcggaggtcgatggagatgtcgcgcctgtcctcattggcaaagaggtacctgcatag

SEQ ID NO: 11677 - DNA, 339 bp, Zea mays
  Peptide Sequence Number=SeqID_53456
atggcggttcccaaggggcgcgcacgacagctccccaagcgcacgacggtgacggttcctgaggtgcacatgtggtggctgctctccaaggcgcccgttggcgacggttcccaaggggcacgcgcggcgggtcctcaggaggcacgaatagcagcggtggccagaagcgtgcacaggcagcgacacctccctgatgtgagtgtgacagtaaggccctccacctcaaactattttcgagctccgacgagtcgaacgccactgcgacagcgtggatcattcgacgatgacctcctccgatccagcggctttgaggcatccgacgacgacgacctcatctaa

SEQ ID NO: 11678 - DNA, 585 bp, Zea mays
  Peptide Sequence Number=SeqID_53457
atgcgtgatatgacgtcgattgttgtggtgcaaccgctcgccgaggtggtcgtggatatcgcagttttgaaggttgtcaaggaggcggtctcggaccgtgggggctttgtccttccttcgtgggctcaggatggacaaaggtctccctctcttgtcaagagggccctgctcgttgttccgagtggtggatggttccggcatcgtccgaagcaatattactgctgcaacgaggttctggttggccttgtgaaaggtcggaggggggttcggcccagcatcttccatgatacgacgatcatggagctactcgaggtgcgcgatctgactcctcgtgggggtctaaactgcaccctattcacctggctctccatcatgagggactggtgtcggggtattggccctcccgaggtatgccaagctagttttcatcatgtgctcctcgtgcctggcgtggaggcactcccaagtcgggtcgtacccctcatcgtcggagctgtagtcgttggagccgttggagaggaagtagtcacatgcggacaagaaatgtcgcatggtcctaggatcacggagtccggagaagtctag

SEQ ID NO: 11679 - DNA, 438 bp, Zea mays
  Peptide Sequence Number=SeqID_53458
atggatgaagaaaacgatggctctacacagtctcacaccgtatgcttctttctttcttctgcgaagagcatcacggtagaaatgaaagtatacatgcattgcgacgcttgcgaaaggaaagtgcgccgtaccatcagcaaagtcgaaggcgtcgggacggtagaggtggacagggaagagaacaaggtcacagtgacgggagattttgagcctgagaaggtggtgaggaagatcaggaagaagaccggaaagaaggcggagatcttggtccgcgaggaaaacgaggaggacgaaggcaacggagaagaaacttacgttccttatccattgctgtaccctgatgcagatattcccgacgagtttcagacctataggccggaacgatggaacttccattactttgacgacgaaaactcacaagcgtgtacggtaatgtaa

SEQ ID NO: 11680 - DNA, 1161 bp, Zea mays
  Peptide Sequence Number=SeqID_53459
atggcggggtggctgaaggcactggcgtacagcgccgggggcgtagcggtggccggcctagcggcgttggttgcgctgcaggagcgcctcgtctacgtgcccgtgctcccgggtctggcgcgctcgtaccccatcacgcccgcccgcctcggcctcatctacgaggatgtctggctccgtgccgcggacggcgtgcggctccactcctggttcatccgtcactcccccagctaccgagggtctgattggcttggagccggcaaaggctatcttgagccaggtgttgggttttggagccctagggtagggatggatgcctgtccaagttgtctggcaccagggctccaatcaaacagccccgcaatactggtgtattcaagtgagattggtcaagataacatcgctcaccgtttggaatttgttcgactaatgatgcagcgactacagtgcaatgtttttatgctttcttatagagggtatggtgagagtgatggttatccttctcagaaagggatcacatatgatgcacaggctgcacttgaccatctagctcagaggaatgacatcgacacaaccaggatagttatctttggaagatctttaggaggtgctgttggagcagttcttgccaaaaacaatcctgacaaggtggccactctaatactggaaaatacatttacatccatactggatatggctggtattatgcttcccttcttaagatggttcataggcgggagctcttctaaaggtccaaaacttttaaactgtgttgttcgctctccatggaatacacttgatattgttggagaggtcaaacaacccattctcttcctttctggattgcaagatgaactagtcccccctccacacatgaagatgttatatgacaaagcttctgatcataacagaaattgcagatttgttgattttcctagtggtatgcatatggatacctggatgtctggaggggaccgctactggaggacaatccaattgttcttggatcaatacgctcctggagtgcagaatcatgatgccagcttcaaaagtgaaattaccgaggatgtatttggaacattcctaaaaatgtggctgtatgacagcccgatagataggctaagtgttgaagttaggccctgtttcaatctcacaggataa

SEQ ID NO: 11681 - DNA, 744 bp, Zea mays
  Peptide Sequence Number=SeqID_53460
atggtcggggaccggaggaaccagcacgacggacaagggcgccggtgtcactgcggcaaccatagcgaaacaggaaacggtgaaggaaacgcggcagtgggaggagaaggggatggacgagttcgcagaggagtagtccgtacctgcgaagacgacgatgcggcgaggagagggtccggcggcggtgcgttgggtccggatctgcggtccggtggcttggcggcggcggcggtcctactcgtcaatgacaggcaaaagtgtggcaagatttccttaggcgtgacaaactatgacgcagaatttgagcgtctaaccttaggcagtactctggaattgaaatgcaattctgaacttactccttttgaccttctgggtgaaaaagatgctcagcataagggaaagctaactagcaaatggaagccgaccaccaaaggcacactgaaaagaacttacagagtacgatcaacggatgaaggaaggcgggtcctcaaggagatcgcttcagttctgtcccaagatgaccattttgtggatgcctcgtctcacaagggttgccaagttaggagggaaagtgctcatggcgaaagtgtttgctgctacaacgtgagagcgttgttcgatgagcttccaactcctcacctgcttctggagattacacctttccctgctggacaacttaccgacaacgactaccgaaaggcggagaggcttgagatggtgctgaggctcagcgcttctatttaa

SEQ ID NO: 11682 - DNA, 990 bp, Zea mays
  Peptide Sequence Number=SeqID_53461
atgggagaaccgagagctcgccggctgtgcctgcttgctctggtgctcgtgcagtggcaccacgtctcggtggccatgacgttcactatctccaactactgcccccacccgatatggccggggacgctcgccggggccggcacgtcgcagctttccacgacggggttcaagctggagcctgggcagacggcccagctcgcggcgccggcggggtggtcggggcggatatgggcgcggacagggtgcgtgttcgacgcggaaggcgcgggcgtgtgccagacgggcgactgcggcgggcgggtggagtgccgcgggtccggcgccacgccgccggccacgctgttcgaggtcaccctggggcagggcggcggccagctggacttctacgacgtgagcctcgtcgacggctacaacctcccggtcgtcgcgatcccgcgggcgcgccagggcgcgtgcaacgccaccggatgcatggccgacctgaaccgctcgtgcccgacggagctgcaggtggactgcggcggcggcgccatcgcttgccggagcgcgtgcgaggcgttcgggcaggacaggtactgctgcagcggcgcgtacgggacgccggacgcgtgccacccgacggtgtactcgtccatcttcaagtcggcttgcccgcgcgcgtacagctacgcctacgacgacagcaccagcaccttcacctgcaaggccttggactacaccatcgccttctgcctcccgacctccgggataaagaagtcggatgcgatgtttctcggagctcagatggatggccagagcaccggcgatggcagtgccggtgcgccgccgatttacagcaacaatggcggttacaaaccgccgatctacaactacggcggcggaggttctcgttggccggcgacgacaacctcgtccgcgagcagcaaaagatgcatgcagccgtggctcttgctagtgctcgtctccttttctctgaaggcgctcggctga

SEQ ID NO: 11683 - DNA, 672 bp, Zea mays
  Peptide Sequence Number=SeqID_53462
atgtggatcgcgagccggctcttcctcgcggcggcggcgctgctgatggctgtgcttctgctcgtcgcggggccggtggcggcgcaggacgcggcggtggagggcgtggccccgcctgcggaggagatcgcggcgaacgcgagggccaaggaggcggcggttctggccgccgagctagtgcagctcagggcgaagatctccgcgttagagtctcgcattgcagagcagaacctggagttcaagaccaagaatgatgcaatcgaaacactgaatatgattgtcaaggaaaagtcacagaagattgctactatgcagaatgaagtaacttccctcgaggccaaagggtctttagctgcagaggagcaggcaagcaaggccaatgcactggctattgagctcaagaagcagaccgagaagctcaagaaggatattacagaacaaaaaattaaaaaagcagctctggaggctagggctggcaatgctgataagaaggtgcaagagctaaatatgaagctggagaagttgcgagagttccatggaatgaaaaatgataccaaccttggaggaactagatgcctttatattgagaaaatgggcacccaaatttgtctcgacgaggacttcaacctagtggtctcggcatacatccacatcctcaacctactgagctag

SEQ ID NO: 11684 - DNA, 1239 bp, Zea mays
  Peptide Sequence Number=SeqID_53463
atggcggaaggcccttgcgtactgcacactactggctgtatggaagcatcagcagcagcaggaggtgggagagagtcgaacaagaaggaggaggagagcttgccgccgggcttcaggttccacccgactgacgaggagctcatcacgtactacctgcggcggaagatcgccgacggcagattcacggcgagggccatcgccgaggtcgacctcaacaagtccgagccgtgggatctcccggagaaagcgaagctcggagaaaaagagtggtatttcttcagcctaagggaccggaagtacccaacaggcgtgcgaacgaaccgcgccactaacgctggttactggaagacaacggggaaagacaaggagatctacaccgccggtcatcagctacctgctgcagccaccacgccggagctagtagggatgaagaagaccctggtgttctacaaaggaagagctcctcggggtgagaagacgaactgggtcatgcatgagtatcgcctgcactccaaatcactccccaaatctaacaaggtacacgcacgcacgtgcttacggaccttacggatgagtgggtggtgttgccgggtgttcgccaagagcgccgccgcaaagaagtacccgtccaacaacgcgcacgcgctcgcgcggtcatcgcaccaccacccgtacgcgctggacgtgttcccacccctcctgcccacgctgctccagcaagaccccttcgtcgcgcgccgccaccaccaccaccacccgtacatgcccccggcagacctggccgagctcgcgcgcttcgcccgcggcacgccggggctgcacccgcacatccagccgcaccccgggacgtcgtcgtcggcgccgtacatgaaccccgccgtggctgcgccaccgttcacgctctctggcggcggccgcctcaacctcaacctcggcgccacgccggccatgccgtcgtcgccgccagcactccacgcgatgtcgatggcgatgatgagcggccagacggagccgagctgtgccagcaccggtaggcaatatcatcaggtgatggcaggtgaacaccaccagcagaagcagatggcgacggcggctgcggcggggctcggcggctgcgtgatcgtgcccggcgcggacggagggttcggcgcggactcggcggccggggcccggtaccagggcttggacgtggagcagctggtggagaggtactggcctgccggcgggtaccaagtctag

SEQ ID NO: 11685 - DNA, 243 bp, Zea mays
  Peptide Sequence Number=SeqID_53464
atgggcaagagcaagaagggcggaagttcatcgcaccattccggcgacatgcggaagcgcgagccgacccctccctcggaggacttcgatgattctgagtactcggaggaggagttctcctccgagtctgaggggtcgccagtccatgcctctcccctggcgtcgtccgatgactcggacgattcccaggggatcgccgccgatgactcggacgattctcttgtcgggcgtgaaacgacgtaa

SEQ ID NO: 11686 - DNA, 504 bp, Zea mays
  Peptide Sequence Number=SeqID_53465
atggcccaaaaaacgctttccatactggtccccagtgacccgttcgttccgcatgccctgcgatggccacaactccatgttcgtcgcaacagagaacccgcgctgccccgcccgcggtgcggctcccctgccccggcccgctcggccgccgtccctggcgcgttcggccccgccccaacttacctcggcgcgcccgcggcgcggctcctttgcccgctcaaccccccgtccccacgcggcccagccccgcgtgctcggctcgctcccccgtcccggcgcggccggccacggggtggcccagccctgggcgccccgcggcgtgctcgccctagcgcgatgtggcctggagatcagccgacgcgcgcggtgcctcggcccccggcgcgaccccgctgcctgctcgcggcgcgcagcgtggcgcgtgcgcagctcggccccggcgtgcgcgcggctcgttcatggcgcgtcagcgttaatgaaatggaaactcaactcataaattga

SEQ ID NO: 11687 - DNA, 189 bp, Zea mays
  Peptide Sequence Number=SeqID_53466
atggctgctccggtcgttgcatgctccccggcgctccgggtccaagtgaaagcagccgtgaatgcagcgttgtttcgggtaccggcatctctcagtttccccaggcaaagaaataaattacaagtataccttcggtttgaaggagaagagtacaggcgtgacgcaaaagtgaatgcccagtcagcgtga

SEQ ID NO: 11688 - DNA, 219 bp, Zea mays
  Peptide Sequence Number=SeqID_53467
atgaaggagcttttcagaatccgccgcgtccgaattgatggaaagcttactctttgcctggggaaactgagagatgccgacggggcacgacagcgggacgcccaggcggagtctgcgcacgcgtctaaacctggcgagcgggggcggagcaagacaacgggcgacggctacacaaggactgacggcgctgaggacagctatggtggacaggcagactaa

SEQ ID NO: 11689 - DNA, 939 bp, Zea mays
  Peptide Sequence Number=SeqID_53468
atggagctggccgcgacgcgtgtaggcggtgataattgccgtccagagcacgacgtcggtttcgggagtggcgtggagcacggcgcgtgcggagaccatggcgccgcaagcggcgtacatgtggacgagcgcggtcttgaggaccaggccgaggtgggggccccagcagccccagcggaggagctgcgcgtggagctggctgccgtggcggtgcaagcgcatggaggcgcagggcgcgagcagcttggagaaggtgtgctgggtgggtgcgcaaagtgggagcatgcacgggtagagcgcgagcgccccgtggcagtccccggcgcggaggagggcggatatcatggcggtgtaggacacggtgtctgggcacggcatttcgctgaacaccctggtggcgccgttccactcctcgcagtcggcatagaagatgaggagggagcaagcgaggacggggttggaggcggtcaggccacgacggcacgcctgggcatgtatctggtacgcgaggcggcggtcgcggcaccggagcagggcggcataggcgaactggtcggaggcagcgacggcggggtgggctcggagaacgcggcggaagacgagccagagttcgttcccctacaggaggaggaggaggaggaggaggacgcccgattcgtcgtggtgaccttctacaaattcgtgcccctctttgacccccacgccgaggtcgccagacacctcaacttcctccagggacgcgacatacatggtcgcatttacttgaatgagaagggaatcaatgctcagtacagtggccctcacaaagatgcagtggcatatgcagactgggttaagaaacatcatcagttttctgatatgcttgttcaaacctcaccagctgtaactgggcatgcctttcctagactgaaactacggtacaaaccatcacttgttcag

SEQ ID NO: 11690 - DNA, 330 bp, Zea mays
  Peptide Sequence Number=SeqID_53469
atggtcccaacgcacgtgaaacgtcactcgtcactgccgacgggaccaccagaacgcgcgggccccaggatccagggacgtaacaaaaacagtgctcccctcccggtgccccacggggccgatcccgcagccagccaaggtcgctgtctgcactcgactgcggactgccccccagatcccaccaccggtttcgtgccgcggttgctctgctcacacccggcgcggcgcacccacgccacgccccacgcttgcttcgctccaggccagccctgcgatttcgcgcacgtcgcaggggcagaaggggcaatccacgtgccccgtattaattaa

SEQ ID NO: 11691 - DNA, 416 bp, Zea mays
  Peptide Sequence Number=SeqID_53470
tgctgcactaaccttggagaaaattgggtcaaaattcgtgctgtcagatggggagcccctcgtcttcctccctctcgtcgtgctcctcagccgaggttgcgaggactctccctgtaatcgtctcctccatgtcggcatcttcccccatctctccaacgccgtccagccactaagcagctcgccggagcagcaacgctcaacaccggctcccagcatctgtgcttcgccccaccgtggagtcacctcgtcggcgtcccctcactcttcgtccattcatcgagctcgccgagcccctgctcagccgtgccgagtctccaagccggctatcgacgctcgcctttgttttcgtgttgccggcacccagtccttttctccacgtcagagtgcttgcctcaccgtgaccggcactccccgag

SEQ ID NO: 11692 - DNA, 507 bp, Zea mays
  Peptide Sequence Number=SeqID_53471
atggagttgaactctcgatgccagggcccaagagggtccattacagtggtggcgcttggcctcctagtgcgtcggtggctgcagcgggtgcgctggcaaatgctcaaggcaaccttggtggcggttgacctcggcacacaggggcgcaccctcgccctgtcagacggccatcagcaaccgcgccagcctgttgtctccaagtgcgagcatggtgcgtgtcccacaggcaacaaacatcaactctacgacagcggtggtagggaaggtgctcccctcgtcatcgacaaaggtgcactgcttagctccaccacattccgctaccggctgccacaagggcgcctccgctggtcattgttgcgatctgctccaggtgtccatccatgtgctctcctttcgtccagatggcatctatgggatccagatggctgcacacatgcaaatccgatgtgtggagggtgtccgtcttatcttaaggggtcaaaaataaagagtcgcaatcacatttag

SEQ ID NO: 11693 - DNA, 663 bp, Zea mays
  Peptide Sequence Number=SeqID_53472
atgcggtggttgttttttacctttgcggggaggctgtcttttttaatcgctcctggttccctgcgattccggtgcttggctggattgagaaagaggagggtggggaacgcggaaatgcgtataaataatggagaggcaggtcggcgccgcgctggaggcgaggtgatggatgatatggctgctggctgcgggtgtggtgcgcgggggaaggagacgacggcgacgctgggggcgtaccagctgctggattgtggtttacgtgcgtgcgctgcgaagggacggctggaagggggagaagcgagccctaaaggtgaccctatttcagcattgttgtttgatttagttggtgatgcccttactaaaatattttcaaaagctttttggagaggtcagaagtccaagtgtccaacggggtatttcaaaacagtacaacaggttgctttggtcagagctcacagccttagggaaagcattgctatccgcaaaaagcaaagaatgatcatggaatgtgcagcccgcggattaaagcgaacgcaaaagccagtcacaaaacttgacattagcagtaaaagcccatgtcccaatcctataccttcatctacagtaagtcttctcgcgacaaaataccacctcagtagtttgtcaggcttgcagtttttataa

SEQ ID NO: 11694 - DNA, 1731 bp, Zea mays
  Peptide Sequence Number=SeqID_53473
atggcgctgcagctccagctgccgcggccgctcgccgccgcacggccctctatcctcctcccttccccagcccatggtgcctccgcttccgcgaccccccttcacgcccgcgcaggcggcgttgcgttttcgctccagaccaacgtgcgcctcctcaagcccaaccgccgcgtccgccgctctcgggacccctactacgatctcgacgaggacgacgaggaggaggcggagttcgacgaggacgatgaagacgacgaggagggctacgagagcgatgatgacttgtcgggtttggaatatcctggtgtactttattcaaacagccctcgtgcttcaagcaagaaaccagaaacagtggtcacttcgtgcttaaactctaatactccaggactccaaactccagtggtaaaagaaaactgggaaggaagacaaaccaaaacccatgacaaatacggtagtccaggaagaagtaagtccatgcatcctaggagtaaagtgggacgatcatcaacagatcttaagaacatggacagagaagttgagttgaaaaatgcaagtatctctcgaagtctgttccagaaactacaagaagaatatgacttcgatgacaaatggttaccactgattgattacttgtgcacctttggactaaaagagtctcattttacttacatctatgagagacacatggcctgctttcaaatcagtcaggcttcagcagaagaaaggttggatttcctgctaaatgctggggttaaaagcaaagatatgaaaaggatactggtgaggcagccacagattctggaatacacccttggcaatctgaaatctcatgttgattttctcgtgagcattggagttccaaatagacgaatagggcaaattatttctgctgctccttcgatgttctcttacagtgtggagcagtctctgaagccaacagtaaggtatctgattgaggaagtaggtattgaggagagtgatgtggggaaagtagtgcagctaagcccacagattctggtgcagaaaattgatagtgcatggaaatctcgatcgcttttcctgtcaaaagaactggatgctcccaaacatagcattgttaagatggtcacaaaacaccctcagctgcttcactacagcattgaagatggaatcttacctcgactaaatttcctgagaagcattggtatgagaaactctgacattctcaaagtattgacaagtcttactcaggtgttatctttgtcattggaggacaatctcaagccaaagtatctttacttggtcaatgacctcaagaatgaggtccaatccttaacgaaatatcctatgtacctgagtttgtctcttgatcaaagaatccgtccccgccatcgttttctggtttccttgaagaaagctccaaagggcccatttcctctgagctcctttgtgcccacagatgagcgtttttgccagaggtgggctgggactagcttggaggcataccatacattcagacagaggttgctgctaacaagtttcgcagagaagtctggaaggaaaacactagtctcaagacgggtttatactgcatcattaactatagcatatacttatcgtccatatcacctccctaatggtgaaaagtcttcaccgaattccctcaatcagctgcaaatggatgacaatctaagagaaatgcattattgccagtcgccagaatggttggatggacacttggttacctag

SEQ ID NO: 11695 - DNA, 2268 bp, Zea mays
  Peptide Sequence Number=SeqID_53474
atggggacactttcaatgtccgacgccagccctatccctgccaagaactgggatgcttcccctgtcaagctcgaggctcaaggtggtgacgccatcctcggcatgaaggaggaagagcgactactggagctcgtgaaggatgagcaggctgatggaatcttggattcattaccaattgacctggaggccaagaatggcgatgcatcactcatcactgaagccatgaaaaaggaggaggagcagcttgaagacacccggatcaaggtgcaggaagaagaggaagccaggaagagggaagaggctgctagacttgcttttgatcctgagacacagtataacaagttagatgagctgctgacaaagacacaactcttttcggagtttctacttgagaacatggatcggattgccgatgaaagtgttgaaactcaagctgaacagccacaggtagaagagaagaagaaagggcgcggccggaagaggaaagcaaagccacagtacaatgataagaaggctaagacggcagtggctgccatgctcacaagatctcgcgaagaacgtcttgcggaagattctactctctcagaagaagaaaggtgggaaaaggagcaggctaatcttgtgccgttattgactggtggaaagttgaagtcatatcagataaagggtgtcaagtggcttatatcattgtggcagaatgggctgaatggaatactggctgatcaaatgggccttgggaaaaccatccagacaattggatttcttgctcatctgaaagggaaaggcatgcatggtccatacttaataatcgctcctctgtccactctctcaaactgggtgaatgaaatctcaaggtttactccatctctggttagtatcatataccatggaggtaaggctgcccgggcagagatccgaaggaaatttatgcccacaaatgttggccctgattttccgatagtagtgacttcatatgagatggccatgtttgatgctaaatttcttgctgcctataagtggaagtatgttgttgtggatgaggggcatcgtctgaaaaatgctaagtgtctattattgaagcagctgaagcgcataccaatggataataagctccttttgactggaacacccttgcagaataatcttgcagagctctggtcactattgaacttcattttgcctgatatattctcgtcacatcaagagtttgagtcatggtttgatttttctggtggaaatgaagaaactgatgagaagaaaaggctgcatgttgtttcaaagcttcacgctatcttgcgtccattccttctaaggcgtatgaaggaggatgtggaacagatgcttccacgaaagaaagagataatcatatatgccaacatgactgagcaacagaagcaaatccagcatcacttgatcgaaaaaacatttgacaactacttgcacgaggaatcagatattatattgaaaagacctggcattagggcaaggttgcataatctaatgattcagctgaggaagaattgcaaccatcctgatcttttggaatctccagttgattcaactggtttatatccacctgttgagaagcttctggaacagtgtggtaaattccaactttttgacaggttgctaaatttcctgatggcgcaaaagcacaaggttcttgtattctcgcagtggacaaaagtgctggacattattgaatactaccttgattcaaaaggccatgctgtttgccgaatcgatggtaatgtgaaactggaagaaaggaggaggcagatagcagaattcaatgacgtgaatagcagcatgcgtatcttcctcctgagcacaagggctggtgggcttggcatcaaccttactgccgctgacacctgtatcctctacgacagcgactgggggcggatgatgaagagagcctttgggaagctgaagctggagcacgtggtgatcggcaagggacagttcgagcaagacagagctaagccgagcgccttagatgtgatacctccgacgcatcccaatctggaaggtgagctgctggcgcttctcaaggacgagcagaccgaggaggacaggatcgtccagaccgacatcagcgacgaggacctccagaggctgatggaccggagcgacctgatgggcccgccgcctggcgctggcggcgcaaacgcggcctcgcctcttgtaccgctgaaaggcccgggctgggaggtggtggtgccggccaagagtggcggcggcatgctgtcgtcgctcaccagctga

SEQ ID NO: 11696 - DNA, 408 bp, Zea mays
  Peptide Sequence Number=SeqID_53475
atggcgcttcctgttgacgtggcgggcctgtgcccaaggtcgggcgacgtggaggctcctccgaagccgaggtcgagtctgtcttccatggccgaggccgaggccgagcccgtgggttgggcgaggcggaggttgttcggcagaggccagggcggagtccgagccctggggtcgggcgaagcggaactccacagccgcctcagcctcctggatctagaggaggaggtgctcctcttagagtcgacattggtgtctccgcctcgactgacgcacgacgagaggtgcttcctgcctgccacctgcgtggccttcgccaccctggcacgcatgaccgtccctcgattgtcgctgggcaggcgtccacctagcgcgacggaggacgtattgccgttttccgacgacccctag

SEQ ID NO: 11697 - DNA, 483 bp, Zea mays
  Peptide Sequence Number=SeqID_53476
atggccatatatagatctcctaaacaatataggaaacacacagaatatatgatcagtggccaacgccaaagatatcctacggagcttctggagatttcacgccgctcctccctctccatcgccgccctcccccacctcgtcctcatcgcgcgtcatgcctccgggctccggccctccgcgaccctactccacctcccctggccggctttcgctgccgctggcagacgctctcgccgccgctgcagacgcttcaccaccaccgtcacacgatcgtcgccgtcatcgcgccgcccgaggtgctcgaggtcgctgcagccacgacacgtccaatctgagggctccggggttggaggagatggtctcgacgacgcgacggagatcgaggagcccgagcaatggctcagcggcggcggacggcggccgcccgatgtgcttgaggtcgccacggccgcgacgcgcccaagccgagggccccgaggctag

SEQ ID NO: 11698 - DNA, 471 bp, Zea mays
  Peptide Sequence Number=SeqID_53477
atgcgtatagaaccaaagagccctaatcttcctcctcttcctgcagctgcgcaagctcatcctgcccttctactccttcacgctcttctgcatcgtgctgccgctgaccatgttcgtcccggactgggtggtgtgctacgtgccggcgctcatgtcgctcctcaacgtgctgccggcgcccgtctcgttccctttcgtcgtcccgtacctgctgttcgagaacaccatatgtccgtgaccaagttcaacgccatggtcttgggcctgttccagctccgcggcgcctacgagtgggtggtcaccgagaagtccggccgcccgtcagagcgagcggcgaggacaacgcccaccaagcggcgggaggaggaggctgggacggcggaggcggcgaggaggaggaggaggaggtacgatcggatgtacaagaaggagccggcgctgctgctcctgacggacgccgcccggatgtag

SEQ ID NO: 11699 - DNA, 1752 bp, Zea mays
  Peptide Sequence Number=SeqID_53478
atgaccaacaacaacaacggcggcaatgacacgaacgccgcggcgagcggctggctaggcttctcgctgtctcctcacatggacgagcaccagctccagctccagcagcagcagcagcatggcctcttcttcccttccgtcactgcgggcgccgccgcctcgtacggcctcggcggcggcttggccaccagcgcgtcgccgtactacacgccgcagctggcgtccatgccgctcaagtccgacggctccctctgcatcatggaggcgctccggaggagcgatcagcaagaccaccacgggcccaagctcgaggacttccttggcgcggcggcggcgcagtcgcaggccatggcgctgagcctggacaacccggcggccgcctccagcttctactactactactacggaggcggaggcggcggcgggccggggcaccaccacgggtcgttcctgcagccgccgtgcgtggacctgtacggcggggcctcggccgggtcccagctggtggcggacgacgaggccgccgcgacggcgacggcgatggcgagctgggtggcggcgcgcgccgagaacggcgcactgctggccgccgccgggcagccgcaccagcacgcgctggccctgtccatcagctccgggtcgtcgccgtcgagctgcgtgacggcgcaccccagctccgagtacggcgcggcggcggcggcgtcgatggacggcgggcgcaagcgcggcggcgcggcggggcagaagcagcccgtgcaccaccgcaagtccatcgacacgttcgggcagaggacgtcgcagtaccgcggcgtgacgaggcataggtggacggggaggtatgaggcgcacctgtgggacaacagctgcaagaaggaaggccagagcaggaagggccggcaaggcgggtacgacatggaggagaaggcggcgagggcctacgacctggcggcgctcaagtactggggcccttccacgcacatcaacttcccgctggaggactaccaggaggagctggaggagatgaagaacatgacacggcaggagtacgtggcgcacctcaggaggcaccaccagcacgggcggtggcaggcgcgcatcggccgcgtctcgggcaacaaggacctctacctcggcaccttcggcacgcaggaggaggcggcggaggcgtacgacgtcgcggccatcaagttccgcggcctcaacgccgtcaccaacttcgacctcacgcgctacgacgccgacaggatcatggccagcagcacgctgctgccgcccgacctcgcgcgccgcaggaaggacgacgaccccgactgcggcgtcacggccgcggctgctgccctggtgcagcaggctgctgctgctgctgccgccgcggcgccgccgccaccgccgagggacggaagccagcaccagcaccaccacgacgtgctctccggcgaggcctgcttctccgtgctgcacgacctggtggccaccgccgcggacggcggccaccaccacagcaacgcggcgcaacacgttcccgtgtccagcgcggcgtcgtcgctgctcaccagcatcggcaacggcaactaccgcgagggcagccccgaccgcggcctgtccatgctcttctccaagccgccgcctgcgcacgccgccagcgccaagccggtcagcccgctcggctcctgggcgtccacggccgcgtcggccagggccgccgtctccatcgcgcacatgcccgtgttcgccgcctggaccgacgcctga

SEQ ID NO: 11700 - DNA, 582 bp, Zea mays
  Peptide Sequence Number=SeqID_53479
atggggctgtgcatgtcgcgcggcgagaccacgccgacgcgggcggccccgccgcccagcaaggacacggcgctggtgctgatgccgagcggcgagatgcgggagtacccgccgcacacggccacggccgcgcgggtgctgcaggacgcctccgcctccgcctccgcagactggttcctgtgcgacgcggacagggtggggttcgagggccccgtcccggcgctgggcggcgcggaggcgctgcgcgcggggcagatctacttcgtgctcccggccgccgcgcgccgccgcggcctgcggcgcgaggacgtcgcggcgctcgccgtccgggcctccgccgcgctctccgctcgccactcctgcgcgcgcggcaagcggagcaggcgctgcggcgccgtcgcgcccctcgtcttcgcgccgcctcctccgccggaggatgaggaggaggagcacgggcggtgggagacattcgtcgcggcgcgcaaggctcctccggtgcgccggcactcgcgtccgacctcacggcgatcccggagtgcgagatggcgagtgagtagcgagggctcagactggcggggatga

SEQ ID NO: 11701 - DNA, 1740 bp, Zea mays
  Peptide Sequence Number=SeqID_53480
atggcgagcggcgctgcacgcatggtgtcaaagccagtggacgacgatctgaaggcggcggcggcggcgccggagccgtggctggggagggagaaggcggggtgcagccgcggggctttgctcgtcggcggcctgctcctcgcgtgcttcgtcctcggccgagagagcgcgtcgtcgatgccctggctgcagatcgatgtcgccaaggccaagctgacagacacgaccaatggaacagcaggtgtagcgcctccccttacccccttccagctccagggcttaccacggacgctccccgtgggccgcgacgagctgttcggcgggctactcccagccggcatggaccggcgggcgtgccggagccggtacgaggcgtggcggtactacaagcacttcccgtacgcggcgtcggcgcacctccagagcaagctgcgcgcctacgaggcccggcacaggcggtgcgcgccgggcacgccgctctacgccaaggccgtcgagcagctccggtccggccgcagcgccgagggactggagtgcacctacgtggtgtggctccccttcgacggcctcggcaaccgcatgctgtccatggtgagcggcttcctctacgcgctgctgacgggccgcgtcttcctcgccgccctgcctgccgcgggctcgggcgacctcttctgcgagccgttcccgggcacgacgtggcggctccccgtggaggacttccctgtgcccgacctggtcccgcgggggcagagcatcgagcggtcgtacacgaggctcctcgacgccaaggccgtcgggcccgccgcaaacgcgacggcgttgggcgtgcctccgtacgtgtacctcagcctggggtggcagctcaaggacccgctcttcttctgcggcgagcaccagcaagtgctccgcgacgtcaactggctgctgctgtacagcgacctctatttcgcgccatcgctgtacggggtggcggagttccaggacgagctgcgccggctgttcccctccaaggaaagcgtgagccacctcctgtcccggtacctcctccacccgaccaaccccgtgtggaggctggccaccacgtactaccgctcgtacctggctccggcgaagcggaggatcggcgtgcagatcaggatgttcggcttcggctccatccccgtcgacgacatgtacagccagatcctcgcgtgctcgcggcaggagcacgtactgccagagaccgacgacgacgctactggtggcaacgaggcggcggcggcggcgagcagcgaggatggctccaactccacggccatcctggtggcatctctgtacgccgactactacgagcggctgaggaggaggtactacgagcacccggcgaagggcggcgagagggtggccgtgttccagccgtcgcacgaggagcggcaggcgacggacaacatggcgcacaaccagagagcgcttgcggagatctacctgctcagcttctgtgaggagctcctcacgtccgggaggtccacgttcgggtacgtgagcagcagcctcgccggcgtccggccgacgatcctgctcacagcggacggccacaaggttccggagccgccgtgccggcgggccgtgtccatggagccgtgcaacctcacgccgcccctgcgtgtgcactgccagggcaagcccgtggacaaggaggacttggcacgccacctcagagtctgcgaggattccaaggtctccgtcaagctttttgactaa

SEQ ID NO: 11702 - DNA, 1581 bp, Zea mays
  Peptide Sequence Number=SeqID_53481
atggcggaggcggtgggttcggcgctcgtccaaggcgccgtcagccaaatcctatccaacctgatcgacgggcacgaggaggagagaggagagaagtccaaggacgacaccgagaccaacctggagcggctagagatggcgcacatcaggctgggggcagcgctggagacgtccgagaggtggcgcggggtcacggccgacaacgcgtcgctgctgcgctggcggaggaacctgaagcgcgcggcccgggagtgcgacgccatgctccacgagtgcaagcgcagggtcctggaggacgaggcgacggagcgggaggcgagtcgcggtcgcctggccttccccagacgggcggcgcgcgcggccagggcgctcgtctcctccgccctcggcctcaacaacctgcagccgagcagggccgccgtgcggaggttcgagtggtacgcggacggcgcgggcgagttcctgcggttcgtggagctcggctgctgcgcgccgcgctgccgcgtgccctccgccgccgacgctttcgtccggaacctcgccgcggggaggaagctgcagcacgtggtggagctgggggaccggtgcacgttcttcctgctgtggctgccgtttttcatcagtgatcctccggcggaggagcgcggggtcgaggtggtcctgttcttcatccagaaagacggcctggcgccccagaacagcttctacttcagcgtcaccctgcagctctcggagagcacggacgttctcggggtcgccgtcgaatgcctggacctgtacacgccgcttttcgggtctagagtcgagacggtcaggaacatgctcacgcggctgcctgcgcaggacttgtcgtgctcgtgggcgccgtttcttgattcgcgccagaaaaggcactgggagaacctccattcctgtgtctctcagtggcatcgcccagacccgtcgtgctgcaggcagcacgagcttcactgtggtagtagcagcaacacaagcacgccgccagacgtctctctgctagcgtcggtcatcggagtgcacctgcagtgccaggtcgcgttgcaggatgagggctccctgcagtacctgacagccggcctgctgtttgcgccgcacgctggctcttcacaggacctgcgtccggctgcggacgacgacagcgcatcatcagccgtggtggtgagccaccacagcagcgacgacgagcaccgtcgcgcgcacgcaggcgtcaccttggcccaggtggaagaggtcacgctgcccatggccgtcgactacttccgccggtacgcggacgcgccggtctaccggatgctgtggaaggcgaggcatggcgccgcgtacattcaggtcgcgaaggcggcgtcaggcacggagacgcagagcgcgcggcggggcggtagcagggcaagaagcgcggcgatgcgacggcggcaggaggaggaggagccgtacgtgatccctcacttcctcagcctgtgggccgcgcacgcgcccagccggctgcaaggctccatcgcgaggtggatgcggaaggagaaggagaaccggcttgcaccttcgcagatgcgcctcgagttctag

SEQ ID NO: 11703 - DNA, 312 bp, Zea mays
  Peptide Sequence Number=SeqID_53482
atggacgagtctgaaaaaggagatcggggctgtggtcctgtagatgaattcccgtacatgaacttgcctcaagactaccttcaacatgttgagttgtacgatcctgtcagtgtcgagcatgccaacatccttgatgtgggtctgaagatggcagatcgagtggtgactgttagccgcggctacttgtgggagctaaagacaatggaaagcggctggggcctccacgacatcattcgttctaacgactggaagattaatggcattgtgaacgacatcaatgcactcgactctaactatttttgtatcatttag

SEQ ID NO: 11704 - DNA, 714 bp, Zea mays
  Peptide Sequence Number=SeqID_53483
atggcccggccgaggctacgcgcccgtgcttgggccgcacccgcactgtcgggccgtggtcctgtgcctgaccgcaccagcgcagtggccgaaagggccgcgcttgcgcgcgccggaaaccgccacgctgcaaaggccggccgcgccgaggacgggaccgccacgcacaggcccgcgatggggccggggcataggccgccgtgcccgcaccggggccggggctggccgccgcgccagcgccttggccgggcagccgcgcgccatggccgggccaccgcgccagcgcctgggccgggcagccgcgcgccgccagcgcctgggccgggcagccgcacgccatggccgggccaccgcgcccgcgcctcggcccgggccaccgcgcccgcgcctcggccgggcagccggcacacgccgcgcgccatggcaggccgccgcgcctgcgctgccggggctaggcaccgcgcgcgcgcctggccgccatggtcgccgctcctggccgggccgcccgccggcgagccggggctcggggccgcgcgcgcctggctgaggctggggccgccgcagccgcgccgtaccagccctcgccccctcgcgctgggtctgcccgcgccgccgccgggagaccacgcgtacgcgcacctaggccgtcgcacgcgccaccgcgaaccgccaccaggggtcgccggctactgtgggaaggggatgagcagttag

SEQ ID NO: 11705 - DNA, 1389 bp, Zea mays
  Peptide Sequence Number=SeqID_53484
atgcccatgctagaagcgggcaagcggctgctgggcagcgttggcggggggcgcgcgctctcggtgacagtgctggtcatgcggccgccgacggagcatgaggcgcgcgggctcgagagcgtcatacgccgggcggaggaggcggccgcgggcctcgacgtgcgcttccaccgcctccccggcgtggaggccccggcggggtgcgcgggccccgtggagttcatctcccgggtcgtggagctgcacgcgccgcacgtgagggcggccgtggcgggcctggcgtgccccgtggccgcgctgctgctcgacctcttctgcaccccgctgctcgacgtggcccgcgatctggtggcccccgccgtgccgccgccggcgtacgtgtacttcacctgcagcgccgcggcgctctccttcttcctgcgcctgccggcgatgtgcgacgaggtggccggcgagttcggcgacatggacggcgcggccgacatcccggggctgccccccgtgccgccgctcgccctcccgacgccgatcatgcggagggagctgcccgagtgcaagtggtacgcgtaccacggcaggcggttcgcggacgccgacggcatcctcgtcaacacggccgccgagctggagccgggcgtgctctccgccatcgccaggcgcggggccggctgccctgctgccccggcgctgtacccggtcggcccggtcgtctcgttcgccccgccgaccgagccgccgcacccgtgcgtgcggtggctggagacgcagcccgcggcgtccgtcgtcctcctctgcttcgggagcagggggttcttcggcgcggcgcaggcgcgcgaggtcgcccgcggcctggagcgcagcggccaccgcttcctctgggtgctgcgcggcccgccggcgccagggacgtggagccccgtggacgcggacctggcggagctcctcccggagggattcgtcgagcggacacggggcagggggctggtgtggccggcggcggtcccgcagaaggaggtcctggcgcacgccgccgtgggcggcttcgtcacgcactgcggctggaactccgtcctcgagagcctgtggttcggcgtgcccatggtgccctggccgctgtacgccgagcagcacctgaacgcgttcacgctggtggccgccatgggcgtcgccgtggccatagacgtggacaggaggagaggtaacttcgtggaggcggccgagcttgagcgggccgtcagggcgctcatgggtggcgacaacgaggaggggaggaaggcgagggagaaggccgccgagatgcaggcggggtgccggaaggccgtggaggatggagggtcgtcgacggccacgctgacgaagctctctaacgctctctgtcgtaatgactag

SEQ ID NO: 11706 - DNA, 1716 bp, Zea mays
  Peptide Sequence Number=SeqID_53485
atggcggacgcgcccgccgcggcgatccccgccgccgagccgctcgcggcggtggcggaggaaggggagggggaggcggccgccgaggcagtggggtccaccctcaccatggagcgcgtcgccgccgcgaagaagttcatcgagagccactaccgctcgcagatgaagaacatccaagagcgcaaggagaggcgctttagattggagagacagctagcttcttctcaagttcccaaggaacaacaaatcaatttaatgaaagatcttgagaggaaggaaactgaatacatgcgacttaaaaggcacaaaatttgtgttgatgattttgagctgctcactattattgggagaggtgcttttggagaggttcgattgtgtcgagagaggacctcaggcaacatttatgcaatgaaaaaactcaagaagtctgatatggttgtcaggggccaagtggaacatgttagagctgaaagaaacttgttggccgaagttgctagtcatcactgcattgtgaagctttactattctttccaagacactgagtatctttaccttattatggagtacctccctggtggtgatatcatgacccttctcatgagagaggataccttgactgaacatgtggcacgattctacgttgctgagactattcttgctatcgaatccatccataaacataactacatccacagagatattaagcctgataatttgcttctagataagaatggtcacatgaagctgtcagattttgggctgtgtaagccaattgattgttcaaagctctcaactttgaatgaagatgaacccatgagtgatgacaacttgagggaatcaatggatattgatagttctttgtctgatacagcaaatggtagaagatggagaagtcaacacgaacagcttcagcactggcagatgaacaggagaaaactggcattctcaactgttggaacaccggattatattgctccagaggttcttctaaagaagggatatggaatggaatgcgattggtggtctctgggcgcgatcatgtatgagatgctagttgggtatccaccattttatgctgatgatccaataactacatgcagaaagggaagcttattgtcttatcatcaaaataaggctaagtcagcacagaaagctgctttatccctctttttagctgatattattgtgcactggagaaaccatttgaagtttcctgaggatgcaaagttgtcaaatgaagcaagagatctcattagccgattattatgtgatgttgaccacaggatcggcagtgcaggggcagatcaaataaaggcacatccttggttccgaggagttgcatgggataaactttatgaaatggaagcagcatttaagcctcaagtaaatgatgaactggacacacagaatttcatgaaattcgaggaactcatgaatcttgtttctccaacttcattattctctgtggcagttggaaaatcctccagccaaaacaggctctggaccttcaaggaagaagtacaaagcagtagagcactagagcgcactagtattactgctgtaagtgctgtttgtcctcggcaaatttctgaactaaatcagcatgcaaacgcctggatgatgtggctccagctggataacctgctcatttttagccaggtttctgctttctcaatcgtgggcaagcggtttgtagaaatccaccagagtttctag

SEQ ID NO: 11707 - DNA, 333 bp, Zea mays
  Peptide Sequence Number=SeqID_53486
atgccgcaccgccgggggcgcgcctccacgccgctgagccgggaccgtgccggagccacgcccgcgccagggccgattcgggcgagaggcgagatgggggagaggagaatggcaagctccttgcgacgtgggtgcccgagggaaatgaataaagaagcgaaaagaaagaggaacaaggggataacacctgaatttgatgcatatttagaagagaaaaattatacccccaaattcagggtgttacagctcacccttgttgtactcacatccccccaggtcaaggacaggtaccacaggatgaggcaaatgaaggatgttgtgatgagttcgtga

SEQ ID NO: 11708 - DNA, 1005 bp, Zea mays
  Peptide Sequence Number=SeqID_53487
atgtcgatggagagcccagagagccgggcatgtatcttctccatcgccgagttaataacacaacatgagtctcgaccgatcgacccgcaagccgttgtgcacacgcgcgcgcgcgtgccgaccgatccagcccaactagacaccggcagcgggcaccatgcacacgcgcagcgtgaacgcgacgaccacggacgccacggccaccaccatcccccacttctgcgcgctgctggccaccgccgccgctttctcgccgccgggcctcgccacgatggagaacatggacaggccgaggctggagaagaagccgaggacgatgaacgccatgtcggcgccgtacagcagggccggcgggggcagcgcggcgcccggctgccgctgctggctggggaggttgacgaacagcacgagcgaggcggacgcggcgaagaggcagacggtctgcacggccttgcccacgcgcttggactccgcgtcctgctgctggtcgctgcccggatcctcctcgtggcccgccgcctcgatgtcgatcgagtggccggccgcggtcggcgtcgtgcccggcggtgcggcagcaggcgccgcagccgcttctggtgctgtcgtcggcggaggaggaggaggagcagaggccgcctccgtctgcgtggacgaccgcccgccgagctccgcgtcgtcgtgctcgcgcagcaggctggtccggtcgttgaaggagccggtgaagctgagcacgcgggtgatgaggccgccgtagctgttggtggtggaagcgagggaggacgtgagcttgttgaagaaatccatgagttgcagtgcagcttgcgacacacaagtccacttcacttcactgtaccaacagctctaccgctaccactcatcagttgccttgccactcatctatttatggagaccccgatgccagatcacatgcatgcacggatggacatggacatggagagaccggtttaccttcatttcgtggtggttggttttctagatgactag

SEQ ID NO: 11709 - DNA, 207 bp, Zea mays
  Peptide Sequence Number=SeqID_53488
atggcgtgtcccttccacttgagaatgccgcagaccccgctgggcaatgacacggggcttacagacacctcccctttgattgtagcacctaaacatggatttggccaagacgccaccacaacttcatgggcgaacaacctcttcgccagccatagtccagccgaagaaagtgtccacaactcaaaccaaccaggtgacagacggtag

SEQ ID NO: 11710 - DNA, 648 bp, Zea mays
  Peptide Sequence Number=SeqID_53489
atgtcggtgtacaccggactgtccggtgcaactgcggagcaacggctacttcggcgccaatggtcacctgccagcgcatttaactccagagcgcgcagaagtcaggcacacgcgaacaggcacaccggacactctacagtgcatgtccgaattgtccgcacctgcgaagggtgtcagttctacgcgaggcagacccacctgcccgctcaggctctgcagaccatacccctcacctggccgtttgctgtgtggggtctggacctagtcggccccttgcagaaggcacccgggggctacacgcacctgctggtcgccatcgacaaattctccaagtggatcgaggtccgacccctaaacagcatcaggtccgaacaggcggtggcgttcttcaccaacatcatccatcgctttggggtcccgaactccatcatcaccgacaacggcacccagttcactggcagaaagttcctggacttctgcgaggatcaccacatccgggtggactgggccgctgtggctcaccccatgacgaatgggcaagtagagcgggctaacggcatgatcctgcaagagctcaagccgcggatctacaacgacctcaacaagttcggcaagcggtggatgaaggaactcccctcggttatctga

SEQ ID NO: 11711 - DNA, 249 bp, Zea mays
  Peptide Sequence Number=SeqID_53490
atggcgagagtagcttgtaccctccgtggcaagagactggaagcaacccttgagagtcttttctttagtcggaatttattttcgctgcaagtgtttgtatgtgagttgtatttacttaatcctgcgatcttggcgctgttgatgaaaggtgcttcattgcttgaatgcaatattggaaggctccagttatcgtcttatttgaatgcagtcccactcagggctgttgtgcttttctgcctgagcttgtga

SEQ ID NO: 11712 - DNA, 684 bp, Zea mays
  Peptide Sequence Number=SeqID_53491
atgcaggcggcatgcaactgcaccaaggggatgcaccctttcgacttcgacgcatccggcatggcggcccaggcccacacgtcatgtaactggcgcgacagttactacgtgcgaaaaactctaccgccacttacgccaatgtcgcgcctcctcgactgcgaaaccggtgccgcgactcgaggcacccctgcgcacggcccagcagtgccggccaagcgcaccggtcatgggtcagtcagccgcgggagaaggcgcgacagtcgatatggccaaaagtggaccggcagtaatggcggcgggaccgggaaaggggatactccgaaagggatccttctccgcgaaggaagcaggccccgagccctcctactgatcagaggttcgaagactggcccctcggaagggttcgacagccgcctcagagcactcgggctccgcgcccactactggtcagaggttcaaaggctggcccctcggaagggttcgacagctgcctcaggccactcgggctccgcgcccactactgatcaggggttcgaaggctggccccccgaagggttcgacagccgcctcagaacacgcagagcgagggatgactctaggtacgtccgatacatggccgaggctcgggctacgcttccgaggtaccctaggacatttccgagaccagcaggagcgattctgtaa

SEQ ID NO: 11713 - DNA, 537 bp, Zea mays
  Peptide Sequence Number=SeqID_53492
atgtcaatgttattattcaacagatttattctaggtgagaacatatcctactttcagtcagagaaacttgggggcacattaatggaacaactcgctaagatagagccagtgctagaagatttgaggcataggagggatgggagagtaaaagagttcaaggctattcaatcaaagattgtacgtctacaagcagaaatttcaggagccattgatcatggggatcctgctgctcctgtggtagatgagaatgatttatcatcgaagagattaggggaattgaaggagcatcttaatgatcttcagacagaaaagaatggaaggctgcaaaaaattgacatccagactaatagtattcatgaaatgtgcaacataatgtctatcgatctcaaaatggcactaaaggatgtccattccagttatgctgagctgggaggaagcaaacccatgagtattagcaacaattcgcttgataaactatctaaaaaagtacatgtgttaaatcatgaaaagaaacaaaggcttcggaaggttgcttag

SEQ ID NO: 11714 - DNA, 279 bp, Zea mays
  Peptide Sequence Number=SeqID_53493
atggcgtgttcccttcccttcgcccttggccggttggccccttgcgcgcgcgtcttccgtggcatcatatgcgccgcggcacaacacggtgcgacgtacggtacgggtgcgccgcggcggcttgcctgcgaccctcacgtgttcatctgcgcacagcaactttgtggccatgtcgttgtgtcactaggctgcctgtcgtttacttgcgccagaaccgagggattcgcatggggccttggccgcttggcgcacatgcacactgtcagtatggttcgctag

SEQ ID NO: 11715 - DNA, 294 bp, Zea mays
  Peptide Sequence Number=SeqID_53494
atgaagaaggtgacgctcgaggaggatcctgctgaagcttcaggcgacggagcagctgccccgggctcgacgtcgcgcaaaagcctccgcgcgcgtaaaggagacaacacacacctgagccccattgccgagagagggaagcgcagaacaaacgtcgtggaaggggatcagagggccaccatcgtcgaccgaaggattgagcgacctccgtcctcggtcactaaaccccgcaaggaccaccacacacttggtgtctcttgcttggctttacaaagcactcaagaattggaatga

SEQ ID NO: 11716 - DNA, 1028 bp, Zea mays
  Peptide Sequence Number=SeqID_53495
gtacgccgatctcgtcgtcgtcgaccgacagcgatgaacaggacgcccggacggtacggggcctccacatcctgccggcgcaggtggagctccgcgtcgaggagctgccgtggctcgtcggcgactcggccacccggaggtccaggttcgccttctggctgcagaccttgcaccgcgcccggggcctccgctgggtgctcgtcaactccttcccggccgaggccgggtgtccagccgccgccgccgccgccgctggggacgaggacgaggacgacggcgcgcaccggcagcagggcccgcgtgtcatccccgtcggggcggcgctgctaccggccggcggcatcggcgagcgcacgaagcagcagcagcagtgcgtcaacattaataagagccccagcatgtggcgcgcggactcgacgtgcatcgggtggctggacgcgcagcgcgcccggtcggtggtgtacgtctcgttcggcagctgggtggggtcgatcgggccgggcaaggtgcgcgagctggcgctggggctcgaggccacgggccgcccgttcctctgggcgctcaagcgcgacccctcctggcgcgcggggctccccgacgggttcgcgggccgcgtggcgggccggggcaaactggtcgactgggcgccgcagcaggacgtgctccgccacgccgccgtcggctgctacctcacccactgcggatggaactccacgctcgaggccatccagcacggggtgcgcctgctctgctacccggtctccggggaccagttcatcaactgcgcctacatcaccggcctgtggaagatcgggctcaggctcggcggcatgatgcgcgacgacgtcagggccggcgtcgagagggtcatggacgacggcggccacctgcaggagaaggtctgggcgctgcgggagcgcgtcgtgacgccggaggcgaggcgcggggccgaccggaacgtcaggtccttcgtggacgagatcacgagagaccacccgctggtggtgcaactatacagtgtcttgtag

SEQ ID NO: 11717 - DNA, 1641 bp, Zea mays
  Peptide Sequence Number=SeqID_53496
atggcggcgcggtcgctgtggcagctggaggacgcgatcatcgcgaggctccgcacctgcgccactttccgggacctcctccgagcgcacggcctcgccgtgcggttgtgcctctcgcagagcagctacgttgccacccagatcgtgcacatctgcaacgcccacggccgcgccgcgcacgccgcgcgggttttcgcccagatccccgccccgaacctccacctccacaacgccatgatcaaggcctacgcgcagaaccacctccaccgcgacgcggtcgaggtctacgtccgcatgcttaggtgcctcccgcacccttcgactgctggcttctccgtcggcgaccggttcacgtacccgttcctcctcaaggcctgcggcgccctcgctgcttctcggctcggcaggcaggtgcacgcgcacgtggcgaggtccgggtgcgagtcacacgctgtcgtacagaactccctgatcgagatgtacacgcgctgcggggatctgtcgaccgcacgcaaggcgttcgatggaatgcgggagaaggacgtggtctcctggaacacgctcatctccgcgcacgcgagaatggggcagatgaggagggcacgggagttgttctattcgatgcccgacaagaccgtggtttcctggaccgccttggtgtccggatacaccgccgttggggacttcacaggtgcagtagaggtgttcaggctgatgcaaatggaaggattcgaaccagatgacgtgagcatcgtcgcggtgctgccggcctgtgcccagcttggcgctctggagcttggccggtggatatatgcttactgcagcaagcacggcatgctgggaaaggtatacatttgcaacgcgctgatggagatgtacgcgaagtgcgggtgcatcgaggaagcgctgcagctgttccacggcatgtccgagaaggacgtcatctcatggagcacagcgatcggcggcctcgcggcacacgggagagcacgcgaggctgtcaggttgtttgaggtgatggatagagaaggaaggggtgatgccaaatggcatcacattcgtggggctcttgtcggcctgctcccacgcgggcctcgtggacgaaggcctgcgctacttggatcaaatgaaggaagattatggtgtggaaacccggcgtcgagcactatggctgcgtcgtcgacctcctcggccggtcagggcgaatccaaacgcgcgctcgacaccatacgaggcatgccggtccctccagatggcaagatatgggggtcgctgctcagcgcttgccgcagccatggcgacgtcgaaacagccgtggtggcggccgagcggctcgtcgagctggagccaggggacgtgggcaatctcgtcatgctggccaacgtgtacggcgctgcaggccgatggggcgaagtggcgagtacgaggaaggagatacggagccggagcacgaggaagacgcccgggtgcagcatgattgaggtggacaacgtggtgcgcgagttcgtcgccgggcaggacctggggcctgagttgggaggcattgctaccgtactggatatccttgcctcgaagcttgccgacgatgaagaattagttgattcagattgtggggatgccattgtgtttgttagtgggtag

SEQ ID NO: 11718 - DNA, 814 bp, Zea mays
  Peptide Sequence Number=SeqID_53497
gccatttaattggagaaaaaaacgtattcactttcatgatttcatgctgaatgtacatagtcgtcttcagatgcacaaaggtgtttcagatccccttgatgttgtagcagctgagatttcagatgaggccatcatattatgtcttgatgagtttatggaaagatgcatcgtgcatgccattggatctgcggtggactatcgtcaactgggttctgctgaacaaggtttctattttgtcggaaaacattacagtacgcttctgaaacagaagctccagtctttaattggagatgagaaacccagcccacaaactgttgaagtaattatgggaaggaaattacaggttcccctaggagcaaatggttgtgcatattttccttttgaagacctttgtgataaacctttaggtgcagcagattactttggactctttaaaaaatttcacaccctggcacttgatggtattccaaagcttgggtctagtaacagaacagcagcttatcggttcgtcacactgattgatgttatgtacgagaacaaggcaaggctgttatgtacagccgaggctggaccagtaggactgttcgagaatatcgtgactgttgctgaagcacggaaggtttcaccaagatcttcacgctcacagaaaagcgacgacactgacctatgcgtggacaatgagcttggatttgccaaggatcgtacgattagcaggttgacagagatcaacagcagagaatatttggaggacttcgaaatgagattgaggcaacagcagcagctgcccttgcaaggtctagataaaaggtggtga

SEQ ID NO: 11719 - DNA, 1359 bp, Zea mays
  Peptide Sequence Number=SeqID_53498
atggctgtggctatggcctcggcattgctcatgctcgcgctggcaacggcgtcggcagcggtcagcggcgccggcgcgccctggaggagcaggaggccgaggccggaggccgacctggtgaccgggctgcccgggcagccggcggtcgggttcagccactacgccggctacgtcgacgtcacctcgggcggcggcggcggcaaggctctcttctactggttcttcgaggcggagcgggagccggacaagaagccgctcctgctctggctcaacggagccgcgaacctgctgttcctggaagcgccggtgggcgtggggttctcgtacgcgaaccggacgtcggacctgcggcggctgggcgaccgcgtcacggcgcaggactcgtacgccttcctcctcggctggctggacaggttccccgagttcaagggccgcgacttgtacatcgccggagagagctacgccgggcactacgtcccacagctcgcggagctcatctacgaagggaacaaaggggcgagcagggacagagccatcagcatcaaaggtttcatgatcgggaacgcggtgctgaacgacgcgacggaccagctgggcatggtggagtacgcgtggagccacgccatcatctcggacgagctctactcggcggtgcggcgggactgcgactccttcaaggaggaggccgacggcgggcggcccggcaagggctgctccccggcgctccgcgcgttcctgggcgcctacgacgacatcgacatctacagcatctacacgccgacgtgcctgctgagcaacctctcctccgctagcgccgcggccggcagcgctaggccgcggccggcgaggctcgtcgcggcgccgcgcctcctctccaagcatgaggagtggcataggctgatgaagcgtgtgccggcaggatacgacccgtgcacggaggccgaggtcataaggaaatggaacgactcgccggctaccgtgctgcccatcctcaagaagctcatgggcgccgggctgcgcgtctgggtctacagcggcgacacggacgggcgggtgccggtgacgtcgacgcggtacagcatcaacacgatggggctgcggccgcggccgcggcagagggcggcgagccggtcggccgcttcggcaggcggagcggcggcggagtggggcgggtggcgggcgtggtactaccggcagcaggtggccgggtgggcggtggagtacgaggaagggctgacgctcgtcacggtgcgcggcgcgggccaccaggtgccgctcttcgcgccggaccgctcgctcgccatgctctaccatttcctccggggccaggccctgccggccgcgcgctcctccggctag

SEQ ID NO: 11720 - DNA, 552 bp, Zea mays
  Peptide Sequence Number=SeqID_53499
atgcttcgccgtctcgccgccgtcgcccagcgggaccttctcctcctcttccccgcacgcccccgccgctggctgcgtcggggctacaccccgcgccgcgagtacggcctggtgcccatgctgctcttccttgaatccgagaaccccgccaagcccgtccacctctacatcaactccccggggggcgtcgtcactgcgggcctcgccatctacgataccatgcagtacatccgctcccccgtcaccacgctctgcatcggtcaggccgcctccatggcgtcgctactcctcgccgctggggcgagcggggagaggcgggcgctgccgaacgcgcgggtcatgatccaccagccctccggtggcgcgtcggggcaggcgtcagacatcgccatccacgccaaggagatccttaaggtgcgggaccggctcaacaaaatctatgccaagcacacgggccaggccatcgaccgcatcgagcagtgtatggagagggacatgttcatggacccggaggaggcacatgattgggggcttatcgacgaggttacctga

SEQ ID NO: 11721 - DNA, 252 bp, Zea mays
  Peptide Sequence Number=SeqID_53500
atgtctgtcaccttcggaaccccagagaactacaaaactgagttcctgaggttcaaggcagaccgcgtaaggggcgggataagaattccgacatgcttaactcaatcattgaagttaatgaagagtccacacactgagtgtgtgagtagatccatacgcaacagattatgggcatcaatgatggtgcaccagggatatggcaaggtatcgtggtgcaagacggtcaatgatactggcaagtacatcttccag

SEQ ID NO: 11722 - DNA, 717 bp, Zea mays
  Peptide Sequence Number=SeqID_53501
atggctgccactccagaccgcgtcaatgccgaccttcgtcgttgcctcaccgtcgacaccccaccgccgccccagctcttcgatccatgccaacgttttaggatttgcgaggcattttggcgggtgtttgatgtcgccacccccgtgggttttcatgctgttattgccggtgctggggttcgtggctgggccattgatgcttggtggcgccaggtgttcagatgcttcaaggggggtggtgtgctagctttatgttgcggtactacatctatggcagatttagtcgctgctgccatacaccagatgcccagatcttcttcaggccttcgtcggtggtcgaagcgtgaggctgatggtggcgctggtagtccacaaggaactggatttggacgcgctccccttgtctctaggtgttacttcgaggccacgctgtgcacgcaggtagcgaggggtggcgcgtcgccaccatggagggaggatgaccatgacggacacttcgtattcgaccttggcgagaacacccaccgatataaaatcttgagcagaatgggagaaggtttgggttttctgcaatctgtcgtctcctcttctgctgggtatctccgttattattctaatgaagagggctacgagttggattttttcgtaggtctagaggtcaagcctgggcccattgtcaagtgtgtgcttggacatgactttatcctgcacttttga

SEQ ID NO: 11723 - DNA, 684 bp, Zea mays
  Peptide Sequence Number=SeqID_53502
atggcgcggcggatcgccggagtggcggctctgaacctgctctccgtgctcatggcggcgacctgcgccgccggccgcgacttctacgtcggcggccgcgccggctgggcacccaaccccgccgagcccttcaacgcctgggcggagcgcaaccggttccaggtcaacgacaccctcgtgttcaggtacagcaaggacgcggacgccgtgctgctggtgagccagggccactacgacgcctgcaacgccgcgcagccagcccaacggctcgacggcggcgactcccgcttcgtgttcgaccactccgggccctactacttcatcagccccgacgcggcgcggtgcagggccggcgagcggctcgtcgtcgtcgtcctcgccgtccgcggcgacggcgacggcgacggcacgccctcttcctcgccgcctcccgtcgccacacctgctccgagtgccctgcctacaccgccgccgccgccccatcatgttccgggcaagaacgcctcgtcgccgtcgcaggggccggcgccgtcacccgccctcgcgcctgcgcctgcgcctgacgcgaacgggacgtcttcgtcaccgccgtcgccgtcgtccgccgtagcagccttcaggggtggcttcctgctggcgtgcctgctatccgtaaccgctggagcagcaattattctcgtctga

SEQ ID NO: 11724 - DNA, 2586 bp, Zea mays
  Peptide Sequence Number=SeqID_53503
atggagcgcccggcactggaatccctgattggcaagccccctcctcccgccacccctagtgcccgagcgatagccgtcgaggtcgatgcggcgctcaaccgcttcttcctcctctctggcaacatggagctcctgataatggaatccctgattggcaagcccactcctcccgccacccctggcgcccgggcggcagccgccgaggtctacgcggcgcttgaccgcttcttcctcctctctggcaacatggagcacgaggcaatggaatccctgattggcaagcccccctcttcccgccacctctacgtcgggcgacaaccgcggccgctgagcaacatggagcgcccgacaatggaatccctgattggcaagtccccttttcccgccacccctggcgcccgggcaacagccgcggccgccgatgtctatgtggcgctcgaccgcttcttcctcatctctggcaacatggagcgcctgacactggaatccatgatgattggcaagcccacttctcccaccacccctggcgcccgggcgacagccacggccgctgaggtctatgcgacgctcgaccgcttcttgatcctctctagcaacatggagcgcccgacactggaatccatgaatgattggcaagccccacttctcccgccacccctggcgccccgggcgacagccgccgaggtctacgtggcgctataccgttttttcctcctctctggcaacatggagcacctggcactagaatccccgatgattgacaagcccactcctcccgccacccctggcgcccgggcgatagccgtcgaggtctacacggcgcttgaccgcatcttccacctctctggcaacatggagcgcccgacactggaatccctgatgattggcaagcccattcctcctgccacccctggcgccctggcgacacccgccgatgtctacgcggcgctcgaccgcttcttcctcctctttggcaacatggagcgcccgacactggaatccctgatgattggcaagcccactcctcctgccacccctggcgcctgggcgacagccttcgaggtctatgcggcgctcgaccgcttcttcctcctctctagcaacatggagcgcccagcaccggaatccctgatgattggtaatccctctcctcccgccacccctggcgctgcctgggcgacagccgccgaggtcgacgcggcgctcgaccgcttcttcctcgcccgcaccgacctcctgggcatcgtttcccagattgatgaattgatatcagatgcctttaaatgccaaaccgtgtccgaaagagcaacaaaagagatagagttcttcagtggcttcttaacggatactaaggcttccttcaagcactggtcttccagactgaagcaagcactagagaccggtctagtgaaaaccgaggctttctcaaaaaacacacccgggatgtgcttaaatattgctgcaaaagatcaagatatgccaacatctgagcggttccaaagtgtagttacgacggagcttgcaatgaatggcctcaaagtgttgcaactgagtggatcttcaacaagttcaattgcccgatcaactatctcccgggcgacagccgctgaggtctacgaggtgctcgaccgcttcttcctcctctctagcaacatggagcgcctgacactggaatccatgatgattggcaagcccacttctcccgccacccctggtgcccaggcgacagctaccgaggtctacacggcgctcgactacttcttcctcctatctggcaacatggagcgcccgacactgcaatccctgatgattgacaagcccactcctcccacacccctggcgcccgggcgacagccgccgaggtctacgtggtgctcgaccgcttctttctcctctatggcaacatggagcgctggcactggaatccctgatgattggcaagcccactcctcccaccaccccctggcgcccgggcgacagccgccgaggtctacgtgtgctcgaccgcttctttctcctctatggcaacatggagcgcttggcactggaatcctgatgattggcaagcacactcctcccgccacccctcgcgcccgggcgacaggcgcctatgtctacatgacactcgaccgcttcttcctcctctctgacaacatggagcgtccggcactagaatccctgatgattggcaagcccactcctcccaccacccctggcgcccgggcaacagccgttgaggtctacgcggtgctcgctcgcttcttcctcctctctggcaacatggagcgtccggcactggaatccctgatgattggcaagcccactcctcccaccacccatggtgcccgggcaacagccgtcgaggtctatgaggcgctcgaccgcttcttcctcctctctggcaacatggagtgcccagcactagaatccctgatgattggcaatcccctcctcccgccacccctagcgctcgggcgacagccgccaaggtcgacacgacgctcgaccgcttcttcctcgcccgcaccgacctcctgggcattgtttctcatgttgccccctcctttaggatcccttgctctctaa

SEQ ID NO: 11725 - DNA, 1128 bp, Zea mays
  Peptide Sequence Number=SeqID_53504
atgcggcgggagaggctggtccctttgccccaacccgatggcatggcacagccgccgcaaaagtcaaattacacagtggcgcgcgttgaaaatgatgactcacacacacacatcctgccttcctcagtcctcactcggtcactccccccaagaagagaagccaagccaaacctgccaaagacgacatttttcatggacgccggcgcagcaaccgccgcccgggagcgcccggcgccgccctcgccggtgccggtgccgcaggcgtcgccggacccgtccaaccccttccccaccacgttcgtgcaggccgacaccacctccttcaagcaggtggtccagatcctgaccggtactccggagaccgcggtggtcgcggcgtcgggcgggacgcaggcgtctccgccggccccgcagaaggcggcgccggcgcccccgggccccaagaagccggctttcaaagctctacgagcggcggagcagcatgaggagcctcaagatgctctgccccctgctcccggccgccgccgcctttcgccgccgcgggcggctccgccggcgccggattctccccgcgtgggttctcgccgcgcgggctcgagcatgctggatctcccgtcgctcgcgctcgggagccccgtcacgccgctgccgccgctgccgggctcccaggaggccgccgccgccgaggaccgcgccatcgccgagaaggggttctacctccacccgtccccgcgcggcaatgccggcgccggcgccgacctgcagccgcctcccaggctgctcccgctcttccccgtgcagtcgccgtcgccgaccggccggtctccccatgttgtaatcttggtgtttgtaacagtgattcggcgcataagagagggattaattgatcaccgaattccagtgctcttgctagtccctgatgaactgtatgtagcagattttagcttggcattttcacctttccttgctttatccatgtgcttgcttttgacatggtttggtgggggcaagcttgtagatgaagctgtcaaaactcagctcggcgtgagccaagccaagtggacactgaagttgacattgtctattgcagaggtttggttagagaaaggtgtcatttctatcagatga

SEQ ID NO: 11726 - DNA, 366 bp, Zea mays
  Peptide Sequence Number=SeqID_53505
atgcagcgcatactcctgcatgatggatatggatcctgtagcagcagcggggagctcagctcagcttgcctgctctggcttgtcaggctaatgagcgcctacccgtcagggctcatcagatctgttgccctcacacagacatccactggcaactggggacagggtcgccagcaggcgccacggcatgcatgcattattgtacagttgtacatcgacccgcagatcatctcggtgctccgcgccaacggcacgtccggcctggaggtcgcgctgcgggacggcgcctgggcctccgtcccgctcgacggggacgccttcttcgtcaacgtcggcgacaccctgcagtttgtactgcatgctagctaa

SEQ ID NO: 11727 - DNA, 957 bp, Zea mays
  Peptide Sequence Number=SeqID_53506
atggttagaatgaatcaggcggtgcagacgacgttcgattggacgctcgatccatccaagctgcttgttgggcacaggtttgctagtggagcgtgtagccggctgtacaaggggttctatgatgagaagccagttgcaattaaatttatccgccaacctgatgatgacgacaatgggaagacggctgcaaagcttgagaagcagtataacagtgagatcaattcgttgtctcacctgtaccataggaacgtgatcaagcttgtagcagcctacaaatgcccaccggttttttacatcatcaccgagttccttcccggaggctcgttaaggtcatacctaaacaacacggagaaccacccaatccctctggagaagaccatatccatcgctctcgacatcgctcgaggtctggagtacgtacactctcaagggatcgttcaccgcgacatcaagcccgagaacatcctcttcgacgaggactcgtgcgtgaaggtcgctgatttcggtatcgcctgcgaggagaccttgtgtgacgtgcttgtggaggatgaaggcacctacaggtggatggcgcctgagatgatcaagcagaaggcgtacaaccggaaggtggacgtctacagcttcgggctggtcatgtgggagatggtgtccggtagagttccttacgagaacctgacccctttccaggtggcttacgcagtggccaacaggaacttgaggccaacgatttctccagaatgcccatcggccctcgggcccctgatcgagcagtgctgcgccttgcagcctgacaagaggcccgacttctggcagatcgtcaaagtcctggagcagtcccactccatcctctcgcagggtggctgcctcgacgcgcagaagagcggcacctgccaggaccccaagaagcggctcatgcagtggatccagaagctgaaaccaacgcatggcgcctga

SEQ ID NO: 11728 - DNA, 1392 bp, Zea mays
  Peptide Sequence Number=SeqID_53507
atgcacggcaacaacggcagcggcgagcagcactcgccgaggtcgcccaagtcgtcggcgtccccgcgcggcgggggcggcggcggcggagcggcgaagctcccgagcagcgcggcggcctggctggtggacagccgctgggcgctgtcggccgcgctgagcctgctgctgttcctggccgtcgcgctcgccgtcacgtccttctcctcctcctcgtcgccctacatcgtctccccgtcgtccttcttctcctccctccccgtccccgtccccgccagccgcgccgccgccgccaaccactcccagtcccagtcgccgcctcctccccccggcgccggcgtgccgcggctggcctacctcatctccggctccaagggcgacctggaccgcctgtggcgcgcgctgcacgcgctgtaccacccgcgcaaccagtacgtggtgcacctggaccgcgaggcccccgtggcggagcgcctggagctggcggcccgcgtcgccaacgccaccgtcttccgccgcgccggcaacgtccacgtcatccgccgcgccaacatggtcacctaccgcggccccaccatggtgtccaacacgctgcacgcctgcgccgtcctcctccgccgcggcggagcctgggactggtttatcaacctctccgcctccgactacccgctcatgacgcaggacgacatcctgcacgtattctccacggtgcccaggaacgtcaacttcatcgagcacaccggctacctaggctggaaggaggggcagcgtgctcggcctctgatcgtggacccggggctgtacggctccaagaagcaggacatcttctgggtgtcgcagaagcgggagctgccgacggcgttcaagctcttcacgggctccgcctgggtggcgctgacgcgggacttcgtggagtacacggtgtgggggtgggataacctgccgcgcaccctgctcatgtactacgccaacttcgtctcctccccggagggctacttccagacgctgctctgcaacgcgccccgcttcgtgcccaccgtcgccaaccacgacctgcaccacatccagtgggacgtgccgccgcgccagcacccgcacccgctcgcgctcgccgacatgcccgccatgctcgccagcggcgcgcccttcgcccgcaagttcccgcgggacgaccccgtgctcgacgccatcgacgacggcctcctcgcgcgcccgcgcaccgccaacgccaccgcggccttcgtgcccggcggctggtgcggcgccgacgccgagtgccgcgccgtcgacaacgactgggtgctcaggcctgggcccggagcccagcgcttccggaggctcatcgacaggatcgtcaggtcagaggccttccccaacaggcagtgcaagtag

SEQ ID NO: 11729 - DNA, 804 bp, Zea mays
  Peptide Sequence Number=SeqID_53508
atggagcgtccggcactagaatccctgatgattggcaagcccactcctcctgcctcccctggcgcctgggcgacagccgttgagccgcccaaggtcgacgtggcactcgaccgctttttcctcgctcgcaccgacctcctgggcatcgtttcccagattgacgaattgatctcagatgcctttaaatgccaaaccgtgtccaaaagagcaacaaaagagataaagttctttagtggcttcttaaaggatactaaggcttccttcaagcactggtcttctagactgaagaaagcactagagactggtctagtgaaaaccgaggctttctcaaaaaacacacctgggatgtgcttaaatactgctgcaaaagacccatcagacactctagttccaagtccagctatgagtgaaagttataaaatcttaaaggatctgtcatcaagatatgatatttatgggctcaatgaatccaacaccgaagatcctctcgagtggagtggatcttcaacaagttcaattgcccgatcaactatctccagggcgatagccgccgaggtctacacagcaatcgaccgcttcttcctcctctctagcaacatggagcgccaggcactggaattcatgatgattggcaagcccacttctcccgccaccccgggcgcccgggtgacagccgccaaggtctacgtggcgctcgaccacttcttcctcctctctggcaacatggagcgcccggcagtggaatccctgatgattgacaagcccactcctttgccacccctggcgcccaccgacagccactga

SEQ ID NO: 11730 - DNA, 453 bp, Zea mays
  Peptide Sequence Number=SeqID_53509
atggcaatccccctcctcctgccacccctggcgccccgggcgacagccaccgaggttgacgtggcgctcgaccgcttcttcctcgcccgcaccgacctcctgggcattgtttcccagattgacgaattgatctcagatgtctttaaatgccaaaccgtgtccaaaagagcaacagaagagatagagttcttcagtgccttcttaacagatacaaaggcttccttcaaggcgacagccgccgaggtctacgaggtgctcgaccgcttcttcctcctctctggcaacatggagcgcccgacactggaatccatgatgattggcaagcccacttctcccgccacccctggcgcccacttctgtagactccttgattcatgtgatggtcttcgatcagaccatatgtctgcaaaactacttaaacaggcaaattcttccagttctggtagtcaatag

SEQ ID NO: 11731 - DNA, 285 bp, Zea mays
  Peptide Sequence Number=SeqID_53510
atgaccatctcgtcgaagttcgagctcctacccaactctagtgacaactctgggcaacccagaacatcgcctaaatctccggttcatcgtcaatcagtgaaaaaactgagatgtctagcagcagcccaggatcgaagagctcggttggaagctgaagagaatccccagtggtaccccattcccaaaggcactccagtggccatcagtcgttgtctgaagatgcaacgacattctcagagctccaaggaaggtgcagcagcgatggcgctgcaaagttatatataa

SEQ ID NO: 11732 - DNA, 873 bp, Zea mays
  Peptide Sequence Number=SeqID_53511
atgctggggcatcacgagcacgggatgtcgcgcccacacccgggtgctcgagcccacgtgcagcgcgtgcgccgccgtccccgccacccctcctccggacacggccacccctccggcgacgtagaacacgccgccggcgcccatgcccgcgcagccgtacctccggcgcagggcctccgcgacgatgcaccatgcttcggccgccgggtcgtactcctcgaccgcggcggtgcgcaccgagcttcccgccacgtagatccgcgcgcccacggcggccgccgcgaacttgctccgcgggaacaacgtcggcgcgcacgctcgctccgcgcacgtcagcgggtccacccgcagcgtggcgccacggtcgaccaggtacacgtgccgccccaccgccacggcgagcgcgtgcgcaaacgcagtgccgccgcagtgcgtgggcaggggcagcgcggcgacctcgagcgaggacgcggaggcgtggaggtggaggagaagtttgagagcggaggaggaggacacagcgaggaggcatgggcggaggatatccagcaggagctcgtcggggagtcccgcgatggggggttcgggctcgggatcctcgacgtcgggggccgtgaaggggaccgggacggcggtgtggcgggcggggtcggcggggatgcaggaccgcgtgaaccacgagagggcgcgcgggtggcagctctacgtggccatggtttcctggctgatgcaggggcaggcatcgcgaggacaggtgcgagggcaggcggggcacgcgaatcacgggagcggagccacggtgaagctgtggacgcctactttactctcttatggagtagtaaagatatcagattcaacaccaaattaatatag

SEQ ID NO: 11733 - DNA, 174 bp, Zea mays
  Peptide Sequence Number=SeqID_53512
atggcccccggtatggaaggcagtcaatcagatcgtgcggaggcagatttagtgcttggtgggtgttgtagccaaacaagagagaagtgctgctatgtgcaaaagctagtgagcgtgatcttgagcaaaggtgctagtgttgtgttcatctaccgtcaagctatcaacctgtga

SEQ ID NO: 11734 - DNA, 1311 bp, Zea mays
  Peptide Sequence Number=SeqID_53513
atgtcctatataaatcttccgagtctccaggttctgcatgctccatcctcatccaaagttgtgttacatgaatctccaactctcaagtctgctgacaaaaaaaaggccaggaagaaaagaaaaaaaggcgtttcctttgagattcttgctggcaataacatgaacatggataagacaccaatcgcaggcgacggcggcggcgatgcaggaggcggcggcggcggctccggcaatggtccggagatgcaatcctcgttggacgcggtggcgccttcgccgactcctcatacggagttggacatcagcagcatgccggacacccccctacgcaagcccggccaccggcgcgcgctctcagagatcatcggcctccccgacgacctggacctcggcggccccggcgccggcgacgcgcccgcgctgtcggacgagaacgaggaggagctcttctccatgttcctcgacgtggataagctgaactcgcggtgcggggcgtcggagtcggagccatcgtgcgccatggccggcggtccgggagaggcaacggagacgtctgcggcggcgtctggggcagcgcaggggcagatgcatcatcacaaccggcactcgatggacgcctcgagctccatcgacgcagagcatctgtttgggacaacggtgacggagggggtgtcgccggcagaggcgaagaaggcgatgtctgccgcaaatcttgccgagcttgccctaatcgatccaaagaaagcaaagaggattataaataatagacagtcggcggcaagatcaaaagaaaggaagatgaggtacattgctgagcttgagcggaaggtgcagttcatgcagagagaagccacagcactggcaacccagctggcattgctacagagagacacggctgggctgactgttgagaacggcgacctgaagatacgtctggagagcacagagcagcagatccacctacaagacgcactgaacggggccctgaaatcggagatgcagcggctgaagatggcgacagggcaggcgggcaaccagatgatgaacttcgccgaaccgccgcacacgttcggcggtgcgaaccagcaggtcttccaccacccgggccaagcagtgccgccattcctggtggcgatgcaacagcagcagcagttgctgctgccgcacatgaaccagccgttgcaccctctgcagagccagcagctgcatcaggcggcgacgctcagcatcgacatggaagggctgccggcggctccacctggccagtggcaatggggtggtgacacgtggtcggagagcagcagtagctga

SEQ ID NO: 11735 - DNA, 804 bp, Zea mays
  Peptide Sequence Number=SeqID_53514
atggtctcccgtaccagcaaccagcagctcctgctgagcctgttcgttgtccttggaatccaccaactctcctgctccctcgccaccagcagcaaccaaactaccaagccaccggcagccgctccgtgccggccggaccagtcctcggcgctgctccggctccggcgttccatctccaccaccaccgactccacgtgcaccctcgcgtcgtggcggaacggcacggactgctgccgctgggagggcgtcgcctgcgccgccgccgccgacggccgcgtcaccaccctcgacctcggcgaatgcgggctgcagagcgacggcctccacccggcgcttttcgacctcacctccctgaggtacctggacttgtccacgaacaccttcaacgagtcagagctcccggccgccgggttcgagcggcttaccgagctcacccacctcaacctctcctacaccgacttcgtaggcaagataccgcacgggatgcggcggctcagcaagctgggcgacaacgactactccctgccgctcggggatgggaggtggcctatcgtagagccagacatcggagcgctcgtcgccaacctcagcaacctcaaggagcttcacctcggcaacgtcgacttgtctggcaacggggcagcgtggtgcagtgccttcgctaactccactccccagctccaggttctcagcctacagaacacccacatcgacgctccgatttgtgagtcgctgtcagccattcgctcgctgaccaagatcaacctgaactacaacaaagtgtttctggggctggtgtggtag

SEQ ID NO: 11736 - DNA, 114 bp, Zea mays
  Peptide Sequence Number=SeqID_53515
atgctcagctacaaccattatttgttgatcagcctaacactatacatgagcccccaccgtgaagagcaggtggtcccggaggatgattactacgaggagttcgatgaggtctag

SEQ ID NO: 11737 - DNA, 276 bp, Zea mays
  Peptide Sequence Number=SeqID_53516
atggggaagaagggggcgaccacagggcaccatgggacagggagccgagcgccatggggcgatctcgggctgcagttggccgtgcctgaaggggaggcgagccagaggaggggtgcgcgcgtccaggtgcccagggagaaaagcatagggcgtcgcgccatggacgctggtgagctcactgctcgagctcggaccagaggaggtgctgcgcccatggaggagaggaactcggctgtggaggttgctgggagaaggggcgtcgtgcacatggagtag

SEQ ID NO: 11738 - DNA, 132 bp, Zea mays
  Peptide Sequence Number=SeqID_53517
atgcggccgagcctcgccatcatcgagctcgtcaacgccttcgccctctcgccatcgaggagggagccacgccacgttcaccttatggtagttgtcgcagagatacctattagtgtgattatgatgacttaa

SEQ ID NO: 11739 - DNA, 672 bp, Zea mays
  Peptide Sequence Number=SeqID_53518
atggcgatgcttgacgacggcgatccggccacggtggccatggctggccgggccacgggacgcacggggcggccgcgcgccacgcgctgcgccgggacaccgggctcggccagagaaggggaacgacgggctcaggcgggctgcgcgtcacgccagaccgcgatttgcagagaacctcatcgagacgggctcggccatggctgcagcacgactgcgcgccgcgagcagggcccggggtcggtcgcgcgcgcagtggagaagacaaggaggcgatgggaccgaggccaggggagggaatcgggtgtttggagaagaagacgtgcggcggtggctaaaacgcggctgggagctaggggaaagcgtgcaggcacgcgtgggccaacaggtcgcgctgggcgctgcccacaggcgcgagcatgcaacgagctagggtgggccagcgacaggggcgcgacgcgctgggccaagcgggggcgctggccgagcaggccgctaactccatgcgcgggagtgggctgctggcgcacaggggccacgcggccgagatgggccgtcgcaagccgagggggggagaagggcggcctgggagcgggcgaacgcttgggccgcgcaggggcgcagcgcgctgggctgcgggaaggcctgcacgctgaagagcgcgagcggggctag

SEQ ID NO: 11740 - DNA, 627 bp, Zea mays
  Peptide Sequence Number=SeqID_53519
atggcgaggctcggccgcacggcgaaggtgctgcgcaggttcacgacgtctctcctcctgatgacgtcggtcgtgcatggtggggcatggacgcagaacacgacgaactgctggcgaagacttcggtgcgatgaacgacgatggcgatgctcgacgacggcgatccggccacggtggccacggctggccgggccacgggacgcacgaggcggccgcccgagctgcacaccgcgggctgcgccggcagcgcgtcgcgcgctgcgccgggacgccgggctcagctggagaaggggaacgacaggctcaggcgggctgcgcgtcgtgccagactgtgatttgcagagaacctcgtcgggacgggctcggccatggctgcagcatgactgcgcgccacgagcagggcccggggtcggccgtgcacgcaatggagaagacaaggaggcgaggggaccgaggccaggggaggtagagggagatgggcgccgtcgaggctggcctggcagtttttttggcggcgtgggcgcagggaatcgggtgtttggagaagaagacgtgcagcggcgactgaagcgcggctgggagctaggggaagcgtgcaggcgcgcgtgggccagcagggtgcgctag

SEQ ID NO: 11741 - DNA, 876 bp, Zea mays
  Peptide Sequence Number=SeqID_53520
atgcagtcggcatgcaaccgtgccaagtgggcgcacccctccgactccaacgcgcccagcatggaggcccaggcccacacgtcatgcaaccggcgcgccggttgctacatgcgagcaactgcaccgccactcgcgccactaccgcgcctcctcgactgcggaaccgggtaccgcgactcgaggcaaccctgcggaccgggaaagggggataccccgaaagggatccttctccgcgaaggaaacgggccccgagcccccctactgatcagaggttcgaaggctggcccctcgaaggggttcaacagccgcctcagagcgctcgggctccgcgcccactactggtcagagggctcggactcgggctcagccccggaagacgacgaactccgcttcgcccgaccccagggctcggactcgggctcagccctggaagacgacgaactcggcttcgcccgaccccagggctcggactcgggctcatccccggaagacgacgaaactccgcatcgcccgaccctagggctcggactcgggctcagccccggaagacgacgaaccccgcttcacccaaccccagggctcggactcgggctcagccccggaagacgacgaactccgcttcgcccaaccccagggctcggacttagccctggcctcagccgacggtctctgccttgctcgacccaagggctcggactcgacctcgacctcggaggagcctccacctcgcccaacccagggctcggaccgaccacgtcacaggaggcgccatcattaccctaccccaagctgactcaggctacggggaacaagaccggcgtcccatctggctcgctccgccaaacaagtaatgatggcgccccgcatgctccatga

SEQ ID NO: 11742 - DNA, 909 bp, Zea mays
  Peptide Sequence Number=SeqID_53521
atggatcctccgctgcgtcacgctcgccaagtcgggccacccgccgtcgatctgcgcagcgtctgcgcgtcgtcgtcaaaacccgcgaagcatttcctggccgccagcttctcacgcacgccagcatgcattcttcttcccccgtccgagctcgagcagtcgacaccaaggctggagtccgagcttgcctctgccctggtcacgctggtggcagaagttctcgtcgtcggtggagatcttggccagtcctgcagggagccccacccgcgaagttctccaccatttcccctgcacgcatcagctggacaccatccgagctcccctggagcaagcgcgaggaatcccccatggccgacctcccatattccctctcggcctgctcttccccaggtccggcgatccctcctggacgcccaaatccacgacacccctgctcctgccttcgcgggcgtcaacaccgtcgaggcatcgactccgacctccattcctgcgttcgagctcgagcaggcgtcctggcgcgccctcttccatggattcgccccttcttggctcctcggtgcttggcggcaggaaggccccttctatctcctccccaatgccggtgcctctccctctcggccccctgcctctgctcctccatggtggagtgctggcacgtacaccatctcagggcgctggcctctgctccctgctgcatctcctctcggcttcctctctgcagtagagagcgcatggacgtgctcggtgcttcatcgcccagccatggtggaagtcaccgagccatccctccccgctggacagcaccaaagtttgggtcttcggctcgcccaggcagcgaatgccgctccggcactgttcctgggcactcagcgcccagccttctgtaggagcagcacactcctcttctga

SEQ ID NO: 11743 - DNA, 1077 bp, Zea mays
  Peptide Sequence Number=SeqID_53522
atggcaccctgcatactctgtgacgacggcggctctcagcccccttacggaagcaagaggacgtcagcaaggattcaaccgctccgacagctgtccctccgccaggctccatcgctcctccgacggccacgacatcacaccagctgggtgccaaaatctctccggctgccacaatggcatggccctcttagagaaggttggccgcgcggggacgaggacgagatacgcgctcgcttgaagctgctcgctccctctcccgcgtggacgcttgtaaccccctactgcaagcgcacccgacctgggcgcgggacgaacacgaaggccgcgggattcccacctctctcacgccggtctccggccgcctcgctctcccccttcgcgctcggcctcgcgctcgacccatctgggctggggcacgcggcgacattcactcgtcggcctagggacccccccggtctcgaaacgccgacaagtagagaaagaagacgaagtagaaagaaactcgccctgcagaccatacccatcacctggtcgtttgctgtgtggggtctggacctagtcgaccccttgcagaaggcacccgggggctacacgcacctgttggtcgccatcgacaaattctccaagtggatcgaggtccgacccctaaacagcatcaggtccgaacaggcggtggcgttcttcaccaacatcatccatcgctttggggtcccgaactccatcatcaccgacaacggcacccagttcactggcagaaagttcctagacttctgcgaggatcaccacatccgggtggactgggccgccgtggctcaccccatgatgaatgggcaagtagagcgtgccaacggcatgatcctgcaagggctcaagccacggatctacaacgacctcaacaagttcggcaagcgatggatgaaggagctcccctctgtggtctggagtctgaggacaacgccgagccgagccacgggcttcacaccgttctttctagtctatggggccgaggccatcttgcccacagacttagaatacggttccccgaggatgagggcctacaccgaccaaagcaattga

SEQ ID NO: 11744 - DNA, 528 bp, Zea mays
  Peptide Sequence Number=SeqID_53523
atggggctcggtgtatgcggctcgctctgccgaggtggattgccccttggggaggagtgcgatgatgaggaggataatgttggtttctattgtgattatgattatggtttctgttgcctgtacaaggagcaggagcgccaatgccaggagcaggagcagcaggactcttccccctcgcctcagcaggaggttgagtctgggagcggggtagctgacgacctcgatcagaagtactaccctggtctttcgaccgacagttccgaaggtgtgattgtctcaacggttggtgagggcaatctcaggatgagtagcatggtaaacctagtcgtcgtgctgaacaccaagctggagcacacccttgacaagttgggcaatgctcgggcggagattgcggaactgcatgctagcgcgcggagcgccgcaatcaggaggatgggtccctcgttcctatcgagatttaacacccttatcgcttgtcgccccgtggtcattatggttatggcacccctgactgcaggacccagatag

SEQ ID NO: 11745 - DNA, 444 bp, Zea mays
  Peptide Sequence Number=SeqID_53524
atgtggcccacgcgtcagccgctttctctaccatgtgctcgctccctctgtctgttgggcccgtgcagtcagtcgtctccctcgcaacaaactccaagcatggtgggagtgagccgaggaccacggtgccgttcgcacagatctagctacggcctcaaccaccacgattgccaattaataaaaccgtgcgctggtcaccttcttcctattttcccagctgtgtccatcggttgcacacaaatccatgagggagggcagcgcgaggagaaccaaaaccagggcggagtgggaagcaccgtggacccgcatcctcgtcggcattccgttccttgggtgcatgccggagggtcgtctgggagtggggagtgtggtgttgacctcggacggaggagacctctgctacatcatcggcaatttctcgctggtgtgggcatgccaccgtag

SEQ ID NO: 11746 - DNA, 561 bp, Zea mays
  Peptide Sequence Number=SeqID_53525
atggccttcatgcggggcggaagcaccagagggcgctgcacgtggagaggcggactaacaacagcgctagattgctctggcgagcaatcacgcaaacaacagggcagtacacaggaaattaggggtccaggcaggtttctcacctcgaggggaagtgatagagtcacaggacaacggcggcggagctccggctgcacaagaaccactccggtgagcgcggaccagacagatcggagagggggagggcacaccgaagggtgtcccgagaagctgatggcaaggcgaagcttaccgtggctctggacggggcacgggcgcaacggcggccacggaacaggcggtggacgtcgatgggcggtggaggaggttctcagttcacatgggcagagcgagagagagggtgagagagttgggcaaagggcgcaaatggaagaggggaggtgggcgagcagggcgtggggttcaaaaggggcgctggggctcgatcgtggctggagaacgcgaggacgtgggcgcgtccacagcagggagatcgtgggcgagatgttagggacgcgctga

SEQ ID NO: 11747 - DNA, 156 bp, Zea mays
  Peptide Sequence Number=SeqID_53526
atgtcgtgcgatagcaggctccacgagaagagggtgaagcatgccatgatcatcgaggactgggatcgtgcgacgggggtggggaacacgtggcaggggcggaggggacggggcatgggaggtgtggacgctaaccttagggtcttaatagagtag

SEQ ID NO: 11748 - DNA, 264 bp, Zea mays
  Peptide Sequence Number=SeqID_53527
atggtctatgatcctctagagagttaccaagagattcgcttgccacacatgtttgtctgcacaacttcaatctttgtgagttctcaaatggctgaagagaaaaatagtgaggaacttgcccttgttgtgtatcatgatgcaatggagaggtccaacgctgagaaggttaccaaagatattacgtctggcctatcagatgaaattgatgatagcaaggattttgattttgaagaagatgtggtgatactaaagattgacccatga

SEQ ID NO: 11749 - DNA, 489 bp, Zea mays
  Peptide Sequence Number=SeqID_53528
atggccaccctgtggcaggttttcacctgctcaggtaaagctgttgataaagggattccaagaactgaggatcctggagaaggggaaatccatccaatacaactacttgaacccaaccgcaataggtcccaccatctggctgcccatctgttctctacatttggtcttgaatgccactcgttaggcatggatattcatgactccatgacactccccaaggacaagcccttggagcctggcgtcgtaataacgatcgagcccggggtgtacatcccggcggccccggtcctgaacgagcgcgcgccgagcaggtaccgcggtatggggatccggatcgaggacgaggtcctcatcaccgacgacggccacgaggtgctgacggcgtcggtgcccaaggaggtctcgcacctgaccaccctgatgaacatgggcaggggcggctcggctgcggacgcccatggccatgagctgcgagccgcctgcagctag

SEQ ID NO: 11750 - DNA, 249 bp, Zea mays
  Peptide Sequence Number=SeqID_53529
atggaccacggcgaggtattcacatctccaccactctgtgtacccatgaagctcatcgtggcaaccatttggccaattcgggcatgtttgaatgggaacgcgggctcggtgtcacggtttccgccgtgcgcgtggccgccgccggtcatggccagtacgagccacggggtgatcgatggcgagcgcgccatggccatgggtctgattggagaagaaacaaaagccgagggacctatgcgtgattgttag

SEQ ID NO: 11751 - DNA, 546 bp, Zea mays
  Peptide Sequence Number=SeqID_53530
atggcggctaggttcctcatttctggattggggaagacagagcaagacgcgcaagctacgacggctagggtttctggattggggatgaagcacaccttggtggagctggtggtggtggtggaggttgttgttgtcgttgtctttccaactgtgcttgtcttatttctcgacgtatctccagccggtcctgacgtgtggcatagaaatcaagggtacatcagatttccactattaggtaagtgtagagaagtgttggagtctgatttagggaacatcggttgtagtgttaaatgccattatccaagttgggataacaattgcgggtacacaaggtgccaaaggttcaacacaaaccaatcaaaagaacaagttaggtctcaaaagaaaggggcaaaaaggaaactgaaggttgccctggtctggcgcaccggacagtccggtgtgccaccggacagtgtccggtgcaccagggtgaatcagctcgaactcttcaccttcgggtttcccaggcgcagctccgctataattcaccggactgtccggtga

SEQ ID NO: 11752 - DNA, 435 bp, Zea mays
  Peptide Sequence Number=SeqID_53531
atgaacagtccctgtccagtgcccgatctccttccttttctggcgaagccgaccgttgtgccctcggcacccttggcgcaccggatagtccggtgcgtccaacatggtggacttgaggctcatccccctaaggcgcatgctgttgccgaggctgaggatgctggggaagttcctgtcgacggtggcgacccatggtgtggcgttgacgacaatgtcatcgtagggattggagttgctggcggagcttacgacggagacaccataggtggcagcgtgagcatgacgaacgcgtggaagagggacttggcatcgttggtgagaggtgcgttctgcatgaaggatacaaagatgacgtcggtaccgtcgtggatggtagcctcgaagcccgcgagaatagcggcgacggtgtactccgccgaccagcagatcttgtag

SEQ ID NO: 11753 - DNA, 351 bp, Zea mays
  Peptide Sequence Number=SeqID_53532
atgccggaccatggtggcggcattacctcactcccccggtggcggtggcgagtccatagacacggagcacttggaggactggctcaaaggagggtattggggtctggtctgcagggagccgtgagggggaagatggctggagggggcagcggagtcgccgaacctaggcaccatggaagagtagctcggcgagcagggagctgctgccccggggaagggctcagtcatggcgagaggaatggagaggagagggaggcagccgaatttctagcccgagcgtacgtcggcccgagcggggattccgcaactgattcggttgcggcggcacttgcttctcggaggcgaccatag

SEQ ID NO: 11754 - DNA, 492 bp, Zea mays
  Peptide Sequence Number=SeqID_53533
atggatcctgcgtcgccgccgaggggtgaaaatacgacgccaaaagaacttccgattgacgtgctgctggccggtctacacaaagcggtggagggcctcaacgaagcagctgcggatggactccaagcagcagttgtcgatggcttgcttgcggcggcggatgccctatcccagacgcggaatcgtctgcatggtgaagtcgcgtccgggataggtgtcgccgctacaggtcttcgacatgcagctaaattcctacgcgcggtgacctgttctcgttgcggacttgtccacaaagactacgactccattgcttgggatgagggtcacaataagtttgattgtcatgtcctcttccatgactcgtcatctcgtcagaagtggcttctgaagaatgctagagtggatggctccgatggtaacgacgacgtctcaagctttgtggcagactccatcaccgaagaggctgattccatcgccaagacgacaaagtga

SEQ ID NO: 11755 - DNA, 180 bp, Zea mays
  Peptide Sequence Number=SeqID_53534
atggagaaggaggtgctggtccagcttggggaggcgctgcggccggctgccaccggggttcaggaacgtggagaggatgatgaaaatggtgagtatgacgacgaagacgagttggatgaacaggacatggaagccagtgttgcttccgaggatgaggatagtgacaaatatttatattag

SEQ ID NO: 11756 - DNA, 2124 bp, Zea mays
  Peptide Sequence Number=SeqID_53535
atgtcgtacgaccagtcggctttccaggtcgactacatgggcgtcggcgccggcgccggcgtcagcgcgtcccggcggcggttcatgccttcggagtcgctggcccgcggcgtcatcacgcacggctcggcgcagctgcgcaccatcgggcggtcgctccgggccggcgccaccatggcggccgtgttccaggaggacctcaagaacacctcccggcgcatcttcgacccgcaggacccggtgctggtgcgcctcaaccgcgccttcttcatctcctgcatcgtggccatcgccgtggaccccatgttcttctacctgcccatggtcaccgacgagggcaacctgtgcgtgggcatcgaccgctggctcgccatctccaccaccgtcgtgcgctgcgtggtggacctcttcttcctgggccgcatcgcgctgcagttccgcaccgcctacatcaagccgtcctccagggtgttcgggcgcggcgagctcgtgatcgacaccgcgctcatcgcccgccgctacatgcgccgcttcttctccgcggacctcatgtccgtgctcccgctgccccaggtggtcatctggaagttcctgcaccggtccaagggcaccgccgtgctggacaccaagaacagcctgctcttcatcgtcttcatccagtacgtcccgcgcgtggtgcgcatctaccccatctcctcggagctcaagcgcaccagcggcgtcttcgccgagaccgcctacgccggcgccgcctactacctcctctggtacatgctggccagccacatcgtcggcgccttctggtacctgctgtccatcgagcgggtcagcgactgctggaggaacgcgtgcgacgagttccccgggtgcaaccagatctacatgtactgcggcaacgaccggcagctggggttcctggagtggcgcaccatcacccggcaggtgatcaacgagacgtgcgagcccaagcgggacggcagcatccccttcaactacggcatatactcgccggccgtcgtgtcggacgtgctcaagtccaaggacaccacctccaagctgctcttctgcctctggtgggggctggccaacctgagcaccctcgggcaggggctcaagaccagcatctacaccggggaggcgctcttctccatcgcgctcgccatcttcggcctcatcctcatggccatgctcatcggcaacatccagacctatctccagtccctcaccgtgcgcctggaggagatgcgcgtgaagcagcgcgactcggagcagtggatgcaccaccggctgctgccgccggagctgcgcgagcgcgtccgccgctacgaccagtacaagtggctcaacacccacggcgtcgacgaggaggcgctggtgcaaaacctgcccaaggacctccgccgcgacatcaagcgccacctctgcctcggcctcgtccgccgggtgccgctcttcgccaacatggacgagcgcctcctggacgccatctgcgagcgcctcaagcccagcctgtgcacggagcacacctacatcacccgggagggcgaccccgtcgaccagatggtcttcatcatccgcggcagcctcgagagcatcaccaccgacggcggccgcacggggttctacaaccgcagcctgctcgaggagggcgacttctgcggggaggagctgctcacgtgggcgctcgaccccaaggccggcgcctgcctgccgtcgtccacgcgcaccgtcatggcgctctcggaggtggaggccttcgcgctgcacgccgaggagctcaagttcgtggcggggcagttccgccggatgcacagcaaggcggtgcagcacacgttccggttctactcccagcagtggcgcacgtgggcagccacctacatccaggcggcgtggcggcggcacctcaagcgcagagcggccgagctgcggcgcagggaggacgaggagctggaggaggacgaaggcaagtccaacagaatcaggaccaccatactggtgtcgcggttcgcagccaacgctatgcgcggcgtgcaccggcagcgctccaggcgggcagtggccgtgtccgagctgctgatgcccatgcccaagccgcgtgagcccgacttcggcgacgactactaa

SEQ ID NO: 11757 - DNA, 537 bp, Zea mays
  Peptide Sequence Number=SeqID_53536
atgtatgagcatgaggaaagttatgaagaaaatatttatagggacttgaaaaaggattctgaaggaagctctgcctcgcccgaccccagggctcgagctcaacctcgacgctggacgacggactccgcctcgcccgacccagggctcggactcaacctcgacctcggaagacggactccgcctcgtccgaccccagggctcggacacagcctcgggcctcagaagacggactccgcctcgcccgaccccagggctcgggctcaacctcgatgctggacgacggactccgcctcgctcgaccctagggctcggacacagcctcggcctcggaagacagtctccgcctcacccgacccagggctcggactcaacctcgacctcggaagacgaactccttctcgcccgaccccagggctcggactcagcctcgacctcgaaagacggactcgacctcgacctcggaggagcctccgcctcgcccgacgtagggctcagaccgaccacgtcacaggggggccatcattaccctacccctag

SEQ ID NO: 11758 - DNA, 537 bp, Zea mays
  Peptide Sequence Number=SeqID_53537
atgacgtggcaacttggggagggcgcaacggcgacctgggccagagccgcccgcggccaggagccatggaagctggggcgaccgggcagagaagggagaagcaaagagagagcgcgcatagggagacaaacgccttggagaagacaccagcgaccgttcctggatccggaaggagccgagcgccatgggaccaaggcggggtcacggcaggagaaggggctgggcgagcagaggaaggacgctgagagcaggaggaggtcgacctgggagatgaagaggacgctcggccatggaaaagtagggggacgcggcggcccagggaagaagctggagctggagcggggaaaggaagccgctgcgcagggagctcgacggagaggagcgcgcaggggtgaactcgcctgggcgcggcgagctgctcggcaggggaaggggcgagccagcagagggaacgagggcgcacagactggggaaagagcgcagggaggaagacaccaggtagctgagcaatcccctggagaagaagaccgcgcgtga

SEQ ID NO: 11759 - DNA, 267 bp, Zea mays
  Peptide Sequence Number=SeqID_53538
atggctgccagtgcagggcccggcgcacggcagaggagggccatgcacccgctggccacgacggcggctgcggcgtcgggcttgaggaggccggagatggatgcagaggggtcagggatggggtggctatccatagctgaggcggtgtgtcagcctagcgggacagccagagggtggggcgacgtggagcccggcgacctcgggggcgggttctactcacttgggccggagggacgaaggcggatgggcagcatggcgaagggatga

SEQ ID NO: 11760 - DNA, 1155 bp, Zea mays
  Peptide Sequence Number=SeqID_53539
atggcgcggtgccaggggaccgttgagagcctctgccaggggctgctcgacctcgacgacgacaagttcggtgcaatgtgcagcgccttcggctacctccaggagtggccggacctgggtgccgccatgtgcggcgccaatctcgccgtgccgcctgccgtggcgacgccgagcgccggcgacggcaacgattcctcctcttgcagcgtcagcggcgggttgaggaagaggaggccggacgcgtacctcgatgccaagggtggtgcgaacggcatgaacaagagacccagagggaagcagcagccgtctggcctctctgagatcgcggcggcgcccgggaaagggaagcaggagaggccaaaggctggcaccaagaagaaggccgaggctgcggcggcggcggcggctgccggccagaagaccgactacatccacgtccgggcccgccgcggccaggccacggacagccacagcctcgccgagcgggtgaggagggagaggatcagcgagcggatgcggtacctgcaggagctggtgcccgggtgcagcaaggtcacgggcaaggccggcatgctcgacgagatcatcaactacgtccagtccctgcagaagcaagtcgaggtaccgacccaccggcaccgtcctgcttcatcttccccgcttctcccagctagccagctagttattccgcgatcgctcaccgccgggtctccttgcgcgcagttcttgtccatgaagatcgccgcttccaacccggtggtgagcttcgacatcgtcgaggacctcttcggccgccagctgaagcaggcgtgcggcccggcggccggccagctggagccgtcctgccttcagatgagcatgagccccatgcagcaggtagtgcacccgtctgcagcggcgggctccactggctttgggccgctggacatggtcctcagcaacctgtacgcgcccgccgccgcaagctgccctgtgtcggctgccccgtcggtctcggtggccgccggaccgtcgaccatcgagccgtgcctcaacgtgaatggaactgctgctgcctgggatattggctcccagaatttgttcagcggatttgatgcacaatttcagtcggtagaaagtggctgcttgctagacaacctcaaaatggaaatgtga

SEQ ID NO: 11761 - DNA, 666 bp, Zea mays
  Peptide Sequence Number=SeqID_53540
atggctggacctgctgttctcaatgagcgtatcctttcttccatgtcccagaaacatgttgctgctcacccatggcatgatttggagataggaccaggggctcctgaattcttcaattgtgtggttgagattcctagaggcagcaaggttaagtacgagttggacaaggcatctggtctgatcaaggtggaccgtgttctttattcctctgttgtttacccacataactatggcttcattccacgcacactctgtgaggataacgaccccctggatgtcctcatactgatgcaggaacaagttgtccctgggtgtttcctgcgagctcgtgctattgggctcatgcctatgatcgatcagggcgagaaagatgataagattatagcagtctgtgctgatgaccctgaattccgtcactacacggacatcacggacctcccaccgcatcgccttcaagagatccgccgcttttttgaagattataaaaagaatgaaaacaaagaggtcgcagtgaatgagttcctgccagcgaaagatgccatcaacgcaatcaagtactcgatggcaataatttgtgttatcagaacagagctcactaaaccagtttggatgttgtactgcagggacctgtatggctcatacgtcatcgaaagcctgaggaagtga

SEQ ID NO: 11762 - DNA, 2634 bp, Zea mays
  Peptide Sequence Number=SeqID_53541
atgcccgacataccgagggatgtcgtcgagcactcgctggatatccgagctggagcccgacccgtgaagcagcctctgcgccgattcgacgaggaaaagcgcagagccataggcgaggagatccacaagctaatggcggcagggttcatcaaagaggtattccatcccgaatggcttgccaaccctatgcttgtgagaaagaaaggagggaaatggcggatgtgtgtagactacactggtctaaacaaagcatgtccgaaggttccctaccctctgcctcgcatcgatcaaatcgtggattccactgctgggtgcgaaactctgtctttcctcgatgcctactcagggtatcaccaaatcaggatgaaggagtccgaccagctcgcgacttctttcatcacgcccttcggcatgtactgctatgtcaccatgtcgttcggcttgaggaatgcgggtgcgacgtaccagcggtgcatgaaccatgtgttcggcgaacacattggccggacggtcgaggcctatgtcgatgacatcgtagtcaagacgaggaaagcctctgacctccttttcgaccttgaagtgacattccgatgtctcaaggcgaaaggagtgaagcttaatcccgagaagtgtgtctttggggttccccgaggcatgctcttggggttcatcgtcttcgagtggggcatcgaagccaacccggagaagctcgcagccatcaccagcatggggcccatcaaggacctgaaaggcatacagagagtcatgggatgtcttgcggctctgagccgcttcatctcgcgcctcggcgaaagaggcttgcctctgtaccgcctcttaaggaaagccgagtgcttcacttggacccccgaggccgaggaagcccttgggaacctaaaggcgctcctcacgaatgcgcccatcttggtgccccccgctgccggagaagccctcttgatctacgtcgccgcgaccactcgggtggttagcgtcgcgattgtggttgagaggcgagaagaggggcatacattgcccgtccagaggccagtctacttcatcagcgaggtactgtccgagaccaaaatccgctacccacaagttcagaagttgttgtacgcggtgatcctgacgcggcggaagctgcgacactacttcgagtctcatccggtaactgtggtgtcatccttccccctgggggagatcatccagtgccgagaggcctcgggtagaatcacgaagtggacagtggaaatcatgggcgaaacaatctcgttcgcccctcgaaaggccattaagtcccaggtcttggcggacttcgtggctgaatgggtcgacacccagctcccaacagttccgatccagtcggaactctggaccatgttcttcgacgggtcgctgatgaagacaggagcgggcgcaggcctgctcttcatcttgcccctcggaaagcacctacgctatgtgctacgcctccacttccaggcgtccaacaatgtggctgagtacgaggctctggtcaatgggttgcgcatcaccattgagctaggggtccgacgcctcgacgctcgcggtgactcgcagctcgtcatcgaccaagtcatgaagaactctcactgccgcgacccgaagatggaggcctactgcgacgaggttcggcgcctggaagacaagttctacgggctcgagctcaaccacatcgcccgacgctacaacgaaactgcggacgagctggctaaaatagcctcggggcaaacaacggttcccccggacgtcttctcccgagacctgcatcaaccctccgtcaagatcgacgacacgcccgagcccaaggcaccctcggccgagcccgaggcaccctcggcccagtccgaggtaccctcggctcagtccgaggcaccctcagctcggcccgaggcaccctcggttcagtccgaggtaccctcggctcccgagggtgaggcactgcgcgtcgaggaggagcgaagcggggtcacgcctaatcgaaactggcagaccccgtacctgcaatatctccaccgaggagagctacccctcgaccgagccgaagctcggcgattggcgcggcgcgccaagtcattcgtcttgctgggagatgggaaggagctctaccaccgcagcccctcaggcatcctccagcgatgcatttccatcgccgaaggtcaggaactcctacgagagatacactcgggggcttgcggccatcacgcagcacctcgagcccttgtcggaaacgcctttcgacaaggtttttactggccaacggcggtggccgacgccactagaattgtccgcacctgtgaagggtgtcagttctacgtgaggcagacccacctgcccgctcaggctctacagacgatacctctcacctggccttttgttgtgtggggtctggacctcgtcggccccttgcagaaggcacccgggggctacacgcacctgttggtcgccatcgacaatttctccaagtggatcgaggtccgacccctaaacaacatcaggtccgaacaggcggtggcgttcttcaccaacatcatccatcgctttggggtcccgaactccatcatcaccgacaacggcacccagttcaccggcagaaagttcctggacttctaa

SEQ ID NO: 11763 - DNA, 1686 bp, Zea mays
  Peptide Sequence Number=SeqID_53542
atgccgaccatcacgcactacgtgctggatcccttcctcgagacagggtcgcctgcgcaggccgagaaagccacgcccaagccgccgccctcgcctccagacaaggccacacctgtaccggtggctcctattagggcacagacgtcgccggcatcactctatgccacgcctgagagcaccaccttgcccgactcaccttcctcgttccccgggacctggtcgccgtacattatcaaccataagaggcggggggcctcccttgccaagaccgttcctcagggtgacgttggaagtgagggcagccagccaaagctcccagtgatactgcctgctctgcctaaagggggtgaacccactgcagtggaggagcctgagtttgcgtttcagcaatcagggaatgatcaagctgaaggtgacagtggtgtggacgaggcccccatcaatgggaaaaatgaaatgctgctgaagggcaagggacctgtgacagccaaaaatgagcacgagcagcctgagtttgagtttcaccgtggaaatcttgaagcactagtgaggcctgttaatgttggaaggcctttgattggcggagcacccaaaaatgatgagagtgacaccttccttgaacttcaggattccatgagtgtggctagcaatactgaaactgatgatgctggcacccaagagtggtggtggaaaccgagttcccctcttgggatctctgttggcacaccctgtgctgaattctatgatgcatttgaagaaatatcaagtgatggtggaactcgatcttcacgggccatggatgatgacctccgtgaaatgaggttaagcctgttgaccgaaattgagaggaggaagcaagcagaagaaacacttgagatatggcagaaggaatggaagaagctgagtcaccacctatcacatgttgccttatcacttccatctccaagtatagctgaggatactgatgattcaagcgtcgatcctggtgctgagttgtgccagcaaataactgtttcacaacttgtagctgctgctatttcccaggattttgctcgtgctgaagttgcttcagagatggaagccgtgattgccacaaagaacttcgagattgcaaggctgtcggatagggtccagtactatgaagctgcaaacagggaaatgtcccaaagaaaccaagaagctatcggccgccgctgctccaaccctcctgcaccgcccgtccggcgccgccaggcccgcctctgcgtgccgctgctccaggccgccgccgctccaggcagctactctccaggccgtcctccctccaggtcgctgcactccaggccgctccaagccgctgctcttgaggtcgtcctccagccccgcctcagagcctctgtgtgccgccgctcgaggccgccgcgctccaggccgtcctccctcctgcgccgcccgtccggcgctgccagcccctccagccccgcctctgctgtcccactgcggcaggactacagagtacagagattgactgtcccactgtttgagacgtcaaggcaacaacgcaaggagcgtaagaagcgacagaagtggttctggggttcagttgggcttgcagtcacccttggtgccacggccattgcctggtcttatctaccttcatcgcagccccgagctagtgcagattcaaatagtaccgtcagtgactag

SEQ ID NO: 11764 - DNA, 669 bp, Zea mays
  Peptide Sequence Number=SeqID_53543
atgaccaaggttgggagcgccggggaaccggccgaggttggggtttccatggagagtgacccgattgtgggaggggaggcgccgtcccgcccggggtgggaagcgagccggtgggcgcccgtggaggctgcgctgaatcggatggttagtgtctcttggcatgatgctgtaggtgttcttgctatttggaagcgtgatgctgaaattatgtggtttttgctgggtgcggttggcaactctctgctttcgatggttcttaaaaagatgctaaaccatgaaagacccgcaccagctttgcggtctggccctgggatgccatcgtcccatgcacagtccatattctatgctgcgaccatcctggctctttcattgtactactggcttgggacaaattatctgaccatgattcttgggcctgcaactctgtcggtggctgcctatctgtcttggctacgggtgtctcggcgccttcatacactaaaccaggtcatggcgggagctgttgtaggatctgtcgtcggtgctctatggtttgtgctctggcattcgcttgtgcaggaggcttttgcttcttctctgctggtcaggattgcagtcgttcttggatcatcagcattttgtgttggctttgtcatctacatgattcgtcactggctcaaggatgagtaa

SEQ ID NO: 11765 - DNA, 489 bp, Zea mays
  Peptide Sequence Number=SeqID_53544
atgggcaatagtaacaaacgcaagcgcgagccgactcctccgttggaggatttcggtgactcggaatactcggagaaggagttctcctccgagtccgaggggtctccggctcccgtctctcccccggcgtcgtctgatgattcagacgactcccaggggattgccgcggaagtctggacgtacatccgggtcgtcgagcattccgggctcgagggctcggatgagtcggagtactcctcggatgaggaggactcggacggcggcgaggacgaggacgacgacgacgacgatggcgacgacgacgacggtggcgacggcgacggtgacggcagcggctgcggcagtggcagcggcggcggcgacgagagcaagggcagcaccagaggcggcagcagcaagggcagcaccagggtcggcggcggtggcagcagcagcaagggcagcaccagggtcggcggcggtggcagcagcagcaaggccagtggctaa

SEQ ID NO: 11766 - DNA, 1101 bp, Zea mays
  Peptide Sequence Number=SeqID_53545
atgtcaagggaggcggcgaggacgaggagccgggtcctggtggttggcgccaccggccgcctcggtggaagcatcgctcgggccagcctcgccgcgggtcaccccaccttcgcgctcgttcggccccaccacttcgcacgccccgattcccccgtgcttgggccgctcgtagccgccggcgccactctgctccaggggtcactggaagattactcgagcctgctcgaggcggtgtgtcaggtggacgttgtcatctgcgcggtgtccacgaagcaggtgctcgagcagaagcctctgattcgggctataaaggaagctggatgcgtgaagagatttattccggcagaatttggagcagatccaacaaaggttcaaatttgtggcatggattatggcttctatgagaagaaaattgaaatccgtcattcaatagagagtgaaggcattcctcatacttacatatgctgcaacttctttatgcgctatttgcttccttcactggtgcaacctgggctagatgctcctcctagagatgaaatcaaaatatttggtgaaggaaatactaaaggtgtttttgttaaagagaatgatgttgctaaatttacaatatgcaccatagaggatcccagaacattgaacaagacgttgtatctgagacctccaggaaatgtcttctcaatgaatgaattggctgacctctgggagtcaaaactcaagaaatccctgaaaaggttatatgtaacagaagagcaacttcttaaagaaatccatgatgctccatttcccttgaagatggatttaatctttatatattcagcgtttgttaagggtgaccacacgtattttgaaattgacttgtcaatggaaggaactcaactgtatccccatatggctggaatggctagagtaggagatgttgttgttggagaattatggttttctttgctatatgacccaattattcacaattcgaacaaaatcattatgccagcttctacgtacgaatcacacagtatttgtcagtcttattcaattcaattttacagctggaacaataacaatgaacaatcttatgcagttatactcgatatgtactcttag

SEQ ID NO: 11767 - DNA, 303 bp, Zea mays
  Peptide Sequence Number=SeqID_53546
atgaacgtttgtgagccccccataggtgaagagcaggtggccctagaggaggactactatgaggagttcgacgagatggtcaataccaggaagggaggcagtgtcgatctatctactcgcattcgtcaaaggagggcaattgctaatccagaaccagagatgaatcctcctccgaatccttcgcctgctgggactgatgtcgtggttgccgctcagatgcagctgctgcagcagatggctaatagtatggtggagattgaaagggaaatgtgcccttgggccatttctaaagtattttggtga

SEQ ID NO: 11768 - DNA, 573 bp, Zea mays
  Peptide Sequence Number=SeqID_53547
atggaccagcgcgcacgcatgccaagaaccctggccatgtcgcctgcccacgcgccccagctcccttttgagcatcgcccacacccgctctctctcccctgcctcatttcgcgcaagctcaccctctctcgtgctctgccctcaccgctcgtgctcgccggagttccgtgcccgtcgtgccggccgtctggcccatcagaagttgcgccaagcctccctgagcaccgtcccgagtatcgcggctggaaccccaccagtgagttcgtcgagttcttctcaccggtcctggccaacctcggtgacctcggagcccctgtagcccacacctgccccagctccggcgacttcactgccgaggagcaggagcggtgctgcccgcagcccgcctgggcccatttgttggccgcttatgcccctggcactaggcctgaccggccagtccgcctcgcacccccgatcactgaccgccctagcccactagtcagtgtgcgcccccgcgcccgcccgcgggatctattctcggccgttgatctgagatctgatggccgagaaagcccgataccccttcgtgtg

SEQ ID NO: 11769 - DNA, 381 bp, Zea mays
  Peptide Sequence Number=SeqID_53548
atggcggtggccggtaggggaccgtggatccaggagagctgtgagaggggaggggataagggttcaggcgaagtgggtgaggccgagatggaatgcgataaggcgggggccgcgaggcggtggccagccgctcttaacacctctaggctttcgtttggattctaccgcctagctcctgaggacatagctctagcttctgcttcaatggatcctttggcacctgagctcaacgatgacgatgagccagtcactctcgacttctctactcaggtcgtcggagctatcagtgctcagccactagtgcctccagtgtctgcagttactactcctgccatggccatcaatgttcctgctccaacaccagcagccttggcaccttag

SEQ ID NO: 11770 - DNA, 171 bp, Zea mays
  Peptide Sequence Number=SeqID_53549
atggtgtttggtctgagggctcaggaagctttacggggttctagggaagctagccgaggagctggattggatggaggtgggccgaagtggctatctatcttgtgtgagttccaagtgaagatatggtcgggtgtgggagatatggtggcgccaagtcagagtgttccttga

SEQ ID NO: 11771 - DNA, 639 bp, Zea mays
  Peptide Sequence Number=SeqID_53550
atggctacggcgaagccctcggtcacaaacgcgctcgctaacctatccgttgagagcgcccccgcggcgcttcccaagctttcgttcccgatactggtgaatagttgcactgggaaaatggggaaggctgttgctgaagcagctgtctcggctggtcttcagttagttcctgtatcattcagtgccattgaggtccctgatcgaaagattgaaatatgtgatagagaaatttttattcatgacccatctgaaagtgaaaaaattctgcctaccattgttaaagaatacccaaatgtcatagttgtagattacactgtgcctgatgctgttaatgcaaatgctgaactctattgcaaatttggtttgccatttgtaatgggcacaactggtggaaataggcaactcttgcacaaaactgtgcatgatgcgaatatctacgctgtgatatcccctcagatggggaagcaggttgttgcttttcttgctgccatggaaattatgtcagagcaatttcctggtgcattttcaggttacaagctggaggctgatctaccacaggcatcatcgtaccaaatgactgtctcacaccctgctgtgccacgttgtggctgcagcatcgctgaggaccacgccccatag

SEQ ID NO: 11772 - DNA, 1722 bp, Zea mays
  Peptide Sequence Number=SeqID_53551
atggcgtaccagaggaagaacgggtccctgttcaactcaccggcaacgacggccgcagctgccatccacagctacgaccggggagcagtgcagtacttggattcacttgtcaacttgttcggcagctcagtgccagcaatgtatccacggatcttatacgcccggcttcgtatggtggatgctttagaaaaaactggcatctctcggagcttttccagtcctggcttggccaacgacgaggagataatgctggacatgacgacgtgcgcaatggcattccgtctccttcgtatgcacggatatgacgtctcctccgatgcgtccttgggccagttcagcgaagaatccagtttccatgattccatacaagggtgtctaggcgatacggaggcgttgctggaacttcacaaagcatcgcaggttcagatcagggaacaagagacggcaatcctacgtagcattgggtcgtggtcagctaaactcctggagcagcaactgcgttccaacaaggtatcgaggaacatagaccccgctgaggtggattatgcgctcaaacatcccttctacaccaccttagaccggctggagcaccggcggaacatagaacatttcaagacaacggccatccaggtgctcaaatcagcataccgagcttgtgtcccagcaggtgaggaaattgcagccctggcagctgctgacttccatgcctcccagactgtgtaccaagaagagctacagtgcctggagagctgggtgaaagagctgaggctgcaggagctggagttcgctagaataatgccgctgatctgcttcttccctcctgctgccaccctgttcccctgcgaacaacatgaggctcgcatggcaatgagcaagcacaacatcctgttgaccgtggtggatgacctgttcgatgtcggggggtccagggaagagatggagaacctcgtcaagctggttgaaatgtgggacgcccataaccgagttggcttctgctctgagcgcgtggagattgttttccgagctatctacgacacgagcaaccatctggcagccaaggctgctgcagtacagaagcgcaacatcatccatcatctcgccgagctgtgggcgaacacggtgagggccatgatggctgaggcgaactgggcgatgacagggcacctgcccaccttcgaggagtacatggcggccggcgagccgtcgtttggtcttggacccatcgtcctcgcgtcgctctacctcgtcgggccggagcttccggaggacgtggtcacctcccaggagtacaacgagatgttccggcacatgaacgtctgcggccgtctcctgaacgacctccagtcatacgaaagggagaaggaacaaggcaaggtcaacagtgtgctgctgctgctagcactggaggaggagggcggctccatcgaggctgtcaagagggaggtgaggagagccatcgaggcctccaggattcagctgctgcggttggtgctcaggaatgaaagcgaggtgccttggccttgcaggcaggttttctggaatatatgcaaggtggtgcaccagttctacgtccacgtggatggatatgcgtctgccaaacagatgatgcactcatgcacgccgggaacgcggtggtgcatcacccgctgcagatcccacgctcgccggcccacatataataagttcagccagctgtccttgggcgttggtgttcattgttga

SEQ ID NO: 11773 - DNA, 507 bp, Zea mays
  Peptide Sequence Number=SeqID_53552
atggggagcattgttcaatttttgctgccaatgtatttccttgaaaggaaaagaagagaaagaaatcgagttctgagtaatgatactgcaaatgtagcaagtgccaatggtggaaatacttctcaggtagaagaaaaggttcttgctcctagttacaagttggacaatgcagagacttcagtttcagctgttggccaccatacgaaatcaagcatgcaccatagactgaaaatatggatcagcagcgggcataatggaataatgggaaaatatgggaataagttagaattgggtatgccccatgaagctaggccattattattagatgaacatgcaaaacctggatggccagattggctcataaatgtggcaccagaggcagtgcgaggttggtttcctcggcgccaagattcatttgagaaattagacaaggttggacaaggaacttatagcagtgtctacaaagcccgagatcttaaaactgacaagtttgtcgcactaaaaaag

SEQ ID NO: 11774 - DNA, 1494 bp, Zea mays
  Peptide Sequence Number=SeqID_53553
atggtgcatcccccaactcaagatgatgaacaggaggcgtgtgatcaagggggagcacaagatgatcaagtaatggaggaagaagaacaaccgacacctccaactcaagtccgagcgatgattcaaagggatcatcctatcgaccagattttgggtgacataagcaagggagtaactactcgatctcgattagttaatttttgtgagcattactcttttgtctcttctattgagcctttcagggtagaggaggccttgctagatccgaactgggtgttggccatgcaagaggagctcaacaacttcaagaggaatgaagtttggacgctggtgcctcgtcctaagcaaaatgttgtgggaaccaagtgggtgttccgcaacaaacaagacaagcacagagtggtgacaagaaacaaggctcgacttgtggcaaaaggttatgcccaagtcgcaggtttggactttgaggagacttttgctcctgtggctaggctagagaccattcatattttgctagcatatgccgctcaccattctttcaggttgttccaaatggatgtgaagagcgctttcctcaacgggccaatcaaggaggaggtgtatgtagagcaaccccctggcttcgaggatgaacggtaccccgaccatgtgtgtaagctctctaaggcgctctatggacttaagcaagccccaagagcatggtatgaatgccttagagactttctaattgctaatgctttcaaggttgggaaagccggtccaactcttttcactaagacttgtgacggtgatctttttgtgtgccaaatttatgtcgatgacataatatttggttctactaataaaaagtcttgtgaagagtttagcagggtgatgacacagaaattcgagatgtcgatgatgggcgagttgaactacttccttgggttccaagtgaagcaactcaaggatggcaccttcatctctcaaacgaagtacacgcaagacttgctgaagcggtttgggatgaaggacgccaagcccacaaagactccgatggggaccgacggacacaccgatctcaataaaggagattccgactatgctggatgtaaggtcgataggaagagtacatccgggacgtgccaattcttaggaaagtccctggtgtcatggaactctaagaaacaaacctccgttgccctatccatcgctgaggccgagtatgttgccgtaggacagtgttgcgcgcaactactttggatgaggcaaaccctcagggactttggctacaatctgagcaaagtcccactcctatgtgataatgagagtgctatccgcatggcggataatcctgttgaacacagccgcacaaagcacattgacatccggcatcactttttgagagaccaccagcaaaagggagatatcaaagtgtttcattctcaaaggaggtttgaaagggaaaaggtggacttggaccatgaaagacttccactgcactccgatgagagg

SEQ ID NO: 11775 - DNA, 708 bp, Zea mays
  Peptide Sequence Number=SeqID_53554
atgaacaggatcgtggcggaggcagctttgtcgccgctacggttcgccaacgggagccagccgtataacgagcgcagggatgatacctacggggtggtgcagtgcaggatggacttggatccggtccactgcaccgactgtctcaactacctcattcagaagctgctgactaggtaccctaacaacacgattgcctctgcccgagggacgagctgttatgcccgatatcaaacagatccatttgacgccatattggatcctcctgcagttgtagctccgccgtctccaccatcttgtaagaaggacgccagcagacggcgtctgatcgtcggcctggaagcggccgccgctgctactggcatcttgttcctgttatcccttagcgtccagctgtggttcttctcgcgctggtggcagagaagcaggatcgacaaggacgacatggaagacaaattcaagaacggagccggacccaagagattcagctacaacgtgctagccgcctctactggcaacttctccgacgaacagaagctaggagaaggcgggttcgggtcagtgtacagaggcttcttggccgagctgaacctccacgtcgccatagaaagagtgtccaagggatcgaggcaggggaggaaagagtacgcctccgaggaggttgaggcaccgcaacctcgtgcagctcattggatggtgccacagccatga

SEQ ID NO: 11776 - DNA, 198 bp, Zea mays
  Peptide Sequence Number=SeqID_53555
atggccagttcaaaggataactctgatgtctcccctaataacatcatcaagccaactacgaatgacctatcagttaaagaatatcaaaggctagaagatgctaggaaaatgatgctggcagaactcgatgatctgtttttggctgatttcaaggtcgaccgaaaccagaagctcatccgactgagggaatacaacctg

SEQ ID NO: 11777 - DNA, 411 bp, Zea mays
  Peptide Sequence Number=SeqID_53556
atgatggatctgtggggctggacgtcggtggcatcgggaatgggcctggatctgggtctggacctcgggctattcgtcgtgcggagcgccggagggatggcggccgccaagggtgcgccggcggagatcgagtcctgcatcaggagcctcgaggaggagcgccagaagatcgaggtgtttaggcgcgagctccagctctgcgtgcgtctcctcgtcgatgtgatcgacgagttgaaggatgaggccgccaagaaaggcggagacgcggaggccaaggccgacgacggcgataagcggaaatggatgagcaccgctcagctgtggctcgacagcgacgccaaatccgacgagatcaactatgagccatgcaaggatttgaagatgggccggggtgggatgatttgggagtag

SEQ ID NO: 11778 - DNA, 159 bp, Zea mays
  Peptide Sequence Number=SeqID_53557
atggcggccacgggtgccaccaatgtcaacctctctgtgctgctcatgcaggattcatcgttttgcacaacatcgctgccacttcgtgtgctgctcgaagctggagtggatggggctctcattgttcacatattaatcatatctcattttgttgacaag

SEQ ID NO: 11779 - DNA, 966 bp, Zea mays
  Peptide Sequence Number=SeqID_53558
atggctacctcccttggtcagtgtcctcctcttcgttgcgtccctcgcacgtgcaccctcctcttcgctgcatcctctgttggcatcctcgcacgtgccgcctctcctcatcgcgctgaccacctcctaactgcccgcgctgatgcccagcagcgcctcacccttcaagcttctcccgtcatcgctgccgtcaacaccccttgccagaatttgctagaggcagtgcgaattcgacatggggctctgttagagccaaaatggggcatccctaaaccatttccagtcaagtatgttgcaattggaaatgaagattgtgagagaaagttttatagaggtaattacctcaagttttacaacgctataagagaggtctatccagacattcaactgatttcgaactgtgatggctcgtccggaccacttgatcatcctgctgacatatacgatttccacgtctatgccgatgctaagactctgttttccatgaagagcacgtttgacaagtcaccccgcagtggacccaaggcttttgtcagcgagtatgcagtttggaaaactgacgccggtagaggaactctcctggctgcattggcagaagcggctttccttactggactggagaagaacagtgatgctgttgagatggcttgccatgctccactattcgtaaacgatgatatcgagaaaaagtggaacccagacgtcatcgtcttcaacacctggcagcattacgggactcctagctactggatgcagaagcttttccgcgagtccagtggcgccatggttcatccgacgacgacgatcagttctggcagctctgctgattctctagcagcgtctgcaattacctggaaggattcagagaataatgactcgttcttaagagtaaaggcaagactacgatctgtactcataccagaagctcttgtgcagattgtaaactttggatctggatgctattag

SEQ ID NO: 11780 - DNA, 858 bp, Zea mays
  Peptide Sequence Number=SeqID_53559
atggaaggaccgccccgtaccctcatccacctcctgctcctacttctctgcatagccagcaaatgtctaggaggagcgtcaggtctgaattcaacccagatggtaaccctcaaggttgatgcctcgccaaagcttgctcgaaagatccccgatacattccttggggtgttctttgaggagatgggccacggaggagctggtgggatatgggcagaactggtcagcaacagaggtttcgaagcaggaggccccaatactccgtcgaacattgacccctggctcatcgttggggacgactcctccgtctatgtggagactgatcgttcctcatgtttcagtcgaaacattgttgctctaaggatggaggtcctctgcaatgactgcccggctggcggtgttggcatttacaaccctggattctggggcatgccctatgtttggaccagaagagggtctttgatcatccaggctctcttgaaatattggttctgcagagttgcaggggattccaagtggataaaggtggagaagaagttggttgctaaaggaactaacagaacctcgaggcttcaaataacatccaagaagaaaggaactgtttggttggaccaagtgtcactcatgcctgcagatacatacaagggacatggttttcgtaaaggacttgtgtccatgctgatggatctaaaaccacgattcataagatttcctgggggttgctttgtggaaggtggttggctaagaaacgcattcagatggagacaatccattggtccatgggaagagaggccaggacacttcggagattgttggcagtactggaccgacgatggtcttggatattatgaatttcttctg

SEQ ID NO: 11781 - DNA, 306 bp, Zea mays
  Peptide Sequence Number=SeqID_53560
atgcagcctcggcacgttctcctctccatcgttgccgcggccgcctggggtctcgccgggaaaagtggtccgctgcggatgctcctgcgtgggggtagccctgctcgcccggcgtccccaaccctgcgtacagcgctggcgctgttcctcttctcctccctgttcgcccaaagtagtgcgccgtctgggcgctgctgttctgggagctcgctgcgccatggtggccctcggacgctccctggactgccttgcgaggcgagaggattggcgagggaggttgaagatggactgggcgccgtagattga

SEQ ID NO: 11782 - DNA, 300 bp, Zea mays
  Peptide Sequence Number=SeqID_53561
atggagaggaggggaaaaggggacgactcgacgaggctgtgtatagattccaagagcacgggatgcgcggtgtttactaataagcagggtgatgatcaaatcttaactacttcccctggaatcccaacgaatctaacggatatggcggcaatacaggcgactagcagcatgcaagccacccagggcgaaagaagaggacccagtcccgggagccccactgatcagccggctgtgaaattggcaacgttggtttctcgcggccggttatggcaaatgaataaagaaaaggattacaaatga

SEQ ID NO: 11783 - DNA, 999 bp, Zea mays
  Peptide Sequence Number=SeqID_53562
atgcattggagaagcaccgcaaggcgcaggcgagggaggagctgccgcttgaagcctctcccagcacagaagacgatgacaacgacgacgatgatgaggggatggaggtccgcttgggcttcagccctgaagctggactttggtccacaccagcctcagcggggctatccggtggtgcgaaagtgcccgcatcaggggcgacagcgtccctacacgaggcggggggcatcgtccaagctagggtcatcctccatcgtcgccgaggaggcggtcgtggaagaggtcaccttggcctgccccaacactaagcttcgagctcgcaaactggcttttatcgccaccaaggcggtgaaacacgacgctgggacgtcggccggggctgcttcctattcccactcgtggctcgatgctgcgcagaaggctatccagcgcgacatcgaagttgcccggcatgaccttgaggggcaggccaggcaggatgctatcattgtcaaggtgacatcgcctcccctggtggccttggtcgaggccatcactgtctctttcggagaagaccaggggtggcgaatgccacgtcgaccgtggcatcgcccaccatctcagacctcctgcacgccatccccgactccccgatcgctgtttgggtcctcaagcgaacttgtccacatggggtcggaccctttggctaggggaggtccgaccctgatgtggatggatgaggatggcaagcccttctttgtcctcaatgatgtggaggagcgggagatgtggggccaggatatcacacgaggcagcgacctgaccgatctgtgcgtggagttggcggatgaggccacggctacgcgcgggagggtggctccgctggaggaagaggccgagcggtcggcagccgcaggccttaaggcccatgtgggagagctcgagaaggacctagatacttctatacatacctctcagacgctgtcccaggccgtggaccagaagatggtcgagctttag

SEQ ID NO: 11784 - DNA, 870 bp, Zea mays
  Peptide Sequence Number=SeqID_53563
aaggcgcccaggggcttcacgcacctactggttgccgtcgacaaattctccaattgggtcgagaccgcccccgctcgccaacccgccctacctctccgcgccgctgcaaaccgtccgccatccccgcttgcccgaccgccggattctgcccccgccactaccaaacgcccgccgctaccgcacgtccgcctgcccgccgcagcgcacgctccgcgaatcccgcacgcccgccgtcgcgaatcccgtcgctaccgaaccgcctgcacgcccgccgccacgaatcccgccgctaccgagccgcccgcctaccacccgcacgcccgggaaccctacggccgccgcgactgccgcatatccgcccccacgccaccagccatgccgcggaacacccgcctccctacgccgctaaacaactgtcgagatcgtcctctcccctcctctgccgccaccgcctcctggtcccgcacatcagcctcgcctccgcccgttgccacgaccgcatcaccaagaactctagcgcccccgaacccgatcgacgccatggtgtcaaaggccagcaagaggaaggccatcggagagatagttgaacagataccagaagaatctggtagaagctatttagaaatatgcgacgatcttgagaaaaaacctcccaagattatgtggaatcaatcatttgatctgcgctcccccatcgccaccagcgatgacgccacccctgctgcatccatgggtgccaggaaagacggcagcactaagacaattagcaaggctcttgttcttggtgttaacgtcaagatgattgcgggtgatcagcttgctattggtaaagagactggaaggaggcttggcatgggcaccaatatgtga

SEQ ID NO: 11785 - DNA, 546 bp, Zea mays
  Peptide Sequence Number=SeqID_53564
atggggactcaccagcgattttggagcagcgacacccgaccatggaagagcttggttccgcggcggacatcagtcttcggtgagcaatcgccgcagcttgggatgagctttcttcacacggactccacgaccagcttccccgtgccacgaggaatccccacggtcgccccacgagagcagaggcccggtcatggcaagatccgggtgcggctacccacggcaatgccagcggcagaaggagtggaatggctgcgaggcgcggcgaatctagccatgggtcaactgaaagcgcaggtggtcggccatctatatagggcgaggaacgagccttgcggcggcaaggatcgatcagagcctgaggaaccgcgcggagttcaaccgaagccgttcatggcctgcgagatctacagggagacggcgctaacgctaggggctcgcgcgacaatgactgaacgcgcgcgacgcccagcagagaggctgacaccactagcccacatggcggtgactcaaccctcagaacgacgcccacgctgggccagctggtga

SEQ ID NO: 11786 - DNA, 111 bp, Zea mays
  Peptide Sequence Number=SeqID_53565
atggcgaacccgcgctatgctatggctagacatcttcatgactccatatcgctgattgatgatccaatggctcagattggagggtacccctttagccggggaacttcataa

SEQ ID NO: 11787 - DNA, 540 bp, Zea mays
  Peptide Sequence Number=SeqID_53566
atggggggggggggggggggggcggggcggctagggttttgggtggtgagggctgcaaagcgtaacgggcctacaatgcattgtgatgcctgctggccaggtgcgatgaacctgcagcagtgcagcatgcaagccaatgtggtggatgagttgagtacgtacgtagaccggcactctgtcgtggacctcacaaagagtgagatcgagggtcttgggaccatcaagccctcccttcttcctctccccaaggacgccgccctcaaggcggagaggaagaggaagagggagaaggagaccctagcggcgaacaagaagtgcttccaggcaagaaaaaggcaaaagaaagtcgagcgtgtggctcgcgctaggtcagtgaggagtatcaccccctccaccgacatggagtacatgacctccatggcttccggcggatctgtggcgccggcgtcggtgggaaagttgtctctccatgacggggctaagggtggctctagcgtttgggcccaggaggagacactaccggtggtaccatggtgttag

SEQ ID NO: 11788 - DNA, 579 bp, Zea mays
  Peptide Sequence Number=SeqID_53567
atggcgaaccttgctgaggacctcttaccgatggaggagcaacggaggtcccggcccacgggcggggtggatctgtggggccgaacagctccgttgaggaattccgatccatataagccaagttctcggacgatgttgccatcctcgtactccttgatatatggcgaagctccagatccaaatcccaagctggatatgccgacgcggttgagcttccagtgtggcggccatggcgatgccgccaagatgccccacgctcatgagcattgcacggtctacgggctttcgataggatggtcgaagggtcgcgagcgcacgggtcttatagccacggcggcggcgctcggttcctcacccttctcttggttcgctctactcgtacgagaccatggccgcgacatgggattcaaggggcgaggcccagacttttatatccccgatggaggccaaaacatccccgcagattctggtgcagagtcgctgagattgcgcccagttctgttgcgttcacgtggaggagatggtcctgacagatgtggcccacgcggcagacgtacaatgcgagactgcacggggtga

SEQ ID NO: 11789 - DNA, 642 bp, Zea mays
  Peptide Sequence Number=SeqID_53568
atggcgacgacgacggacctggggttcgaggcgacggagctccgcctgggcctgcccggcgggggaggtggaggggagccggcgctgggcggcgaggggaggagctcttcctccgcctccggcaagaggggcttcgccgagaccatcgacctgaagctgaagctggagccagcggccgtcgtggaggcggaggaggaggaggaggaccacggcgttgctgttgcccttgagaaggaggaggaggccgggaagatgaagcggtccccgagccagagcagcgtcgccgccgccgccgccgccgtgctggctgaccccgccgagaagccgcgcgccgccaaggctcaggtggtgggatggccaccggtccggtcgttccggaagaacatcatgtccgtgcagtccgacaagggcgccgccgccgccaacggcgacaagtcctcgccggcggcaggcggcggtgccgcgttcgtgaaggtgagcttggacggcgcgccctacctgcgcaaagtggacctcaagatgtacaggagctaccagcagctgtccaaggcgctcgagaacatgttcagctccttcaccatcggtactaaatttaatttgacagctgctactactactaccataattactacatcgcggtaa

SEQ ID NO: 11790 - DNA, 2577 bp, Zea mays
  Peptide Sequence Number=SeqID_53569
atggagttggaccggctgctgctcgaccagctggctggcgaggccctgcgggagctgctgcacgccgtccagggcaccctgttctgccgctccactgccgagcgcctgcgccggagcgtcgagccgctgttgccgctcgtgcagggcctcggcccgcacgcccagcgctccgcgggggacctcggcgagctcgcggcgcgggtcagggaggcgctcgacctggcccgccgcgccgccacgtccccgcgctggaacgtctaccgctccgcgcagctgtcgcgccggatggaggcggccgaccgcggcatcgcgcgctggctggagcgccacgcccccgcgcacgtcatcggcaacgtgcgcggtctccgcgacgagtcccacgcgcgcatcgcccgcctcgagcgccgcgttgacgagatcgccgccagcgccgcgcagccgccgcccccagccctctccgtccccgtcgcgccgcacaagggcgtgaccatgccgatggaggtgccaactcacaagggcatggctatgccgatgccgatgccggttcctgtgcaggcggtgcccgccaaagccggggtggtggccatggacatggacctcaccgagggacacgaaaacgaggggatggttggcgccggcgttaaggtggccaaggaaaaggtgaaggagatggttatgagcggcggcggcggcggctgggaggtggtcggtatctccggcatgggcggcagcggcaagaccacgctcgccatggagatcttcagggatcataaggtccgagcctacttcaatgataggatcttctttgagacgatctcacaatccgcaaacttggaggccatcaagatgaagctgtgggagcagatcagcggcaacatggtgctcggtgcatacaaccagatcccagaatggcagctcaagttaggaccaagagaccgagggcctgtccttgtgatccttgacgacgtttggtctctcccacagctcgaggagctcaccttcaggttccctgggtgcaagactctagttgtatcgaggttcaagttccccacactggtaaaacagacatacgaaatgcagttgctagacgaggcggcggccttgtccgtcttctgccgtgccgctttcgatcaggagtgtgttccgcggactgctgacaagagattggtcaggcaggtctctgcagagtgcaggggccttccactggctctgaaggttattggtgcgtcattgcgcgaccagcctcctaagatctggctcagcgccaagaaccggctgtctcgaggagaggctatttccgactcccatgagaccaagcttctagagaggatggcggcaagtgtcgagtgcttgtcggagaaggtcagagactgcttccttgatctgggatgcttcccggaggacaagaagatcccccttgatgtcttgatcaacatctggatggaggttcatgatcttgatgaaccagatgctttcgccatcttggttgagctttcgaacaagaaccttcttaccctcgttaacgatgcacagaacaaggctggagatttgtacagcagctaccatgactactcggtgacacagcatgatgtgctgagagatcttgctcttcacatgagtgggcgtgaccctctgaacaagcgtaggcggttggtgatgccgagaagagaagagacacttccaaaggactggcagaggaataaggataccccgtttgaagctcagatagtttccattcatacaggtgaaatgaagggatctgactggttccagatgaacttccccaaggcagaagtgctcatcctcaacttcgcctcaagcctgtactacctcccgccgttcatcgcgtcgatgcagaacctgaaagccctggtgctgatcaactacggcaccagcagcgcggcccttgacaacctatccgccttcaccacgctgaacggcctgaggagtctctggctggagaagatcaggctcccgccgctgccgaagaccaccatcccgctgaagaacctgcacaagatctcgctcgtcctctgcgagctgaacagcagcctgagagggtcgacgatggacctgtccatgacattcccgcgcctctccaacctcacgatcgaccactgcatagacctaaaggagctgccagcaagcatctgcgagatcggctccctggagaccgtctccatctccaactgccacgacctcaccgagctgccatacgagctgggcaagctgcactgcctcagcatcctccgggtgtacgcctgcccggcgctgtggcggctcccggcgtcggtgtgcagcctgaagaggctcaagtacctcgacatatcccagtgcatcaacctgacggacctcccggaggagctcggacacctgacgagcctcgagaagatcgacatgcgggagtgctcgcgcctgaggagcctcccgaggtcgtcgtcctccctcaagtccctcggccacgtcgtgtgcgacgaggagacggcgctgctgtggcgggaggccgagcaggtcatccctgacctccgggtgcaggtggccgaagagtgctacaacctggactggctagcggactga

SEQ ID NO: 11791 - DNA, 447 bp, Zea mays
  Peptide Sequence Number=SeqID_53570
atgacgggaatggagaatgtggtcaagggaacgaacgacgacgtaatggagaaggatgagagcgaacgacatgccaatggggatgaacctgtcggtgacagcaggatccctcgggggaggcggtggggtccttcgacggtgtctttggggactaggccgaaaaccctagcaagcgaggtgtgggcgcggtcatgtgaagcggtgcggggcgaattttttatgcctgttgaaacgaggcgtcggggggaagcgcggtgcatggaagccgacccagaagctgggcgtttggcatgggttgcccgtttctgccagccagaaggcacccagaagttgtcccaaacatgggttttgtcttgcctaaacctagtattcttgtccgctatgaggcatacacgttggttggacaaaaaaactaaactcaataactcatttggctcgaatcgttag

SEQ ID NO: 11792 - DNA, 528 bp, Zea mays
  Peptide Sequence Number=SeqID_53571
atggatggcaacggcacggcgtattattttatggtcaaggtcaatgactccccggccggttgccatcggccagtccaaaattttgaccagctcgtcccccccggcgtccgcgcccccccggcgtcccgcactcggcctcgcccggccacccccgtgccgtccccggccagccgcgcccggccccgctcggtcgccccgccccttccccccgccctcgcctcggccccgcccgacgagccgcccctgcccctccccgcgcccggccgcccccggcgagccgcgctcggccccgcccggcgagccgcctcggccccgctccggcgagccgcccccacccccgacctcgcgccgccccagcgagccgcccccgccccgccccggctcggccgcccccgccgcgccgccctgcgccgcctcggccccggccgtgccccccgccccgcccgtgcttcgcctcgcccgtgcgccgtgctggccccactacaagagacacagtcattttcggcggccagaagccgccgaaaataa

SEQ ID NO: 11793 - DNA, 720 bp, Zea mays
  Peptide Sequence Number=SeqID_53572
atgggctgcaactacaaccatttgtcagcccaggaacggatggatggatcacaggaggaagggtcgcccgaggagagagttgaggccctaaaccctctacctccacgacggcgcgccgcacgcagagatttgcccacgtcctcaatctgcctccacgacggcgcgccgcaccacgacttcaatctcctcccccacgacctcaaccgctctgccagagtcaacaccgtccagctccggtcaccggttcatggcggcggcagcggtactccttcggcaggcaaaggagcaaagttggaggcgacgagggtccagatccggccgccggtgggctccatccggggtttggaagcgccaccggtccagatggcgcagctgatggcctcgaccctggcggagaaggggaggccggccctggccccggcccctgtctcgacctcgacggtggagcaagtacctgcatgccgagggacacagcgcgctcgacaggggcaggtggaggccgcggccgcggacccggcagtggaggcgccgcgcgccacgaaggggcgaaagccgccatcgctggcggcggaggggcacgccgcggcgggtcgcccgtccgccttgctcccgatgctggaggagctgcgcgccacgacggagcagacgcgcgtgcatctggtggaggcacgtgcccacgtacagctcgacggcgcaggcaaccccgatgacgcactctag

SEQ ID NO: 11794 - DNA, 336 bp, Zea mays
  Peptide Sequence Number=SeqID_53573
atgcacaatcggttggttcctctcacaatcgacgatcagattctagagaatgtgtcaaatggtactgaattccacgctgtaacttcatcttacaacacagcacccctgacatgtattctggttctattgggaatgctaaaacgaatatcccagcatatttctctgttcccagagtttgctgtctctgtgcttggcagggaagatggctaccattgttactcaattgttcctgtgtgtccctgctatttgtttgacaggaaattgtgcatcgcattgttgtttgacagagaattggctaggttcactgtaattttaagttgtagggctgcacaatga

SEQ ID NO: 11795 - DNA, 2403 bp, Zea mays
  Peptide Sequence Number=SeqID_53574
atgcccagcagcgcctcacccttcaagcttctcccggcgccggcgccgtcatcgtccctagccagtgtttctgaacctgagctgcgaagtgtggtgggtaaagagatcatgggaaataacaacgtcactggacaacaagtatcagaagagaccactaatggagctgacaaaatcgttgagccttcaaatagttcacctgggcccaacggcacaaacgacactgagaaggatggcgctgagtatgtcaactggtcaaaatcctcaaaggaacccgtcattaccaatgctgaagataagcagatggcttcatatcaaaaaaaatcaccagataaggttgaaggcttagatgagaaaagcaggagctcaattcagtataacacatcaacacgagatgatcagactagtaacttacaaaaagctctgaattctactgacaaaaacaagcattctggtacagatgatgaaccattgaggaaagaagcaactgaaacagccatattttcttccgaaacaattgctcttgtcagtaccactgaagatgtgacaagctacaaggatagctcaatctataacgaagaaattgtaccacttatgcatgggactacagaaacaagtgaagaaactatccaaggcaactacaaatcattgttacaagaaaaaatagaaggttcactagaagaactggaagaatctagcagtcatgacaattcccccatgggtggtagtctagctggtgaaaatacaactgagaacacagaacaaggatacattgaggtggcaacagtagaggaaattttggtggtaatgcaaggagaaactacatcatcaactgaatcaattgtcagcacttatcttgatgctgatgactctgagatcaaggaagtggttatagaagataagcctgtacaaaaagagagtctaccagatgtgcaaccatcagatggcacaaacctagagatatccaagaatgacaacatgcaaatacaaataccacatgaccaggaagaaaacagagcaataagcaaaattgcaacagtaaatataatgactgaaagtgatgaggcatttgaggatgataataatatccttgcattaggaaatcaggatgaagataatgcagtaagtacattatgtggtaatctctataatgatgaagttgttgcaaagtgtcaaccatatctaaaaaatccaacttcgatgaatgatccagaactggaaaatgaacaaaatgaaagggtagttggttcaagacgacagagttcagtttctgttactacaacaatgaagcataatggcataggaacaatatacaaggaagaaggaatagctgagaaaaatatcacggcttggaatctagaagataattttgcaacagagaacaaacctgaagaacattatggtaacttagtcagtattactgaggtcaatggaaaggattttacaggcttacaatcatctttgtcagatcatcattatattgggaatgaagagatacaaagaaaagtcagtggagtatccggaatagtagagtttgataaagagacagtaaaggaaattttagaagaagataaggtaaataatgtagaaggtctaggcctccattttgatgcacatgtagtgacaaaggagggaggagacttatccaatttaccaaaggccataccattaattcctcttcaatcactagaagatattgacaggaaggtatatagaaccagagataagcaagaaactattacaaactcgcaagttgaccaatctcaactgatactgcttgaaaaatacgaggttttgaaacttgagaatggcgagattcttagaaagtgtatgcagttggtggaagatagctctaatgtagtcataatctctactgatggtatcaaccatgagaaagtagatacaaacactacatcttcagattttacctttgaagccaaccactaccaaaaggaagtcacagaaggcatttcagctgcagcctttactgctcaatgcaatcaggtgaaagtcacaacatgttttggtacggctactgaggaacaacatactcatcagacatcaactccagggagagaagccagtgaagtgactccattacttcagggagcgcaaaatataggtttttccaattgtattgagcagcatagccatgtacacatggaaatccccacagccgacattgctgtaatgcaatttaaaattgaggctgatgaagaatctgagaggagcccactgttaagccccagggaaccaacaggaggagacttcagaatagcaaatcattctgcaagatttaagaaaccatttgagagcttgctgatgcagagcgaagctggtatatggtctccattgaaggaaccagaatcgaactcgaagagtaataccatgttccccaagatataa

SEQ ID NO: 11796 - DNA, 987 bp, Zea mays
  Peptide Sequence Number=SeqID_53575
atgaccggcgcaaaacgcgtgcgctgctgtcggcctccctggcggggctcctcgacatccggacgatcaaagaagcaagaagatacttatgtgctgatatcactcagcataaaaaagttgatgcctatcttggaaacgctatataatgcatcaaggaagacttcaaatcagatttacatgctgttgattattctcctgatcctcagtcaagattcaaccttcaatgctagtgtgcacaaattggtgcttcctggtgttccttggtaccatgaacgcctgatgcatcaaacttctatgggatctttgatggttgtaatactaattcagaccatcaagtacaacctctccaagctaagagatgtctaccttcacacaaactgtcttgcaattttagcaaatatggctccgcatgtgcataggctgagtgcttatgcatcacaaaggctagttagtctctttgacatgctttctcgcaagtatgccaaactagctgagttgaaaaatgacaagtctctgaaagttatatctgatcagatggaagcagacaacatcgcagatgatatgtctacagagcttcacatatatacagatttcttgagaattgttctggaaataatcaatgcaatccttacatatgcattgcccagaaatcccgaggttgtatatgctgtattgcatcgacaagaggtttttgagccatttaaaaatcatccacgttttaatgaactgcttgagaacatatacactatgtttactcagttgcggtttacatatgagcaagaaagccaccctgaggaattctttatcccatatgcatggcgccttgtcctgtcacggggattctccttcaatcccagcgccataaatctcttccctgtggagattcaccttgaaggggaagagggtggacgaattgtgcaagggttcagagattgtgctattataggtggtagattactatgtaggctatacacaattctttcataa

SEQ ID NO: 11797 - DNA, 339 bp, Zea mays
  Peptide Sequence Number=SeqID_53576
atgacgagggtgaccgtcgatgcctgtctgctgccacctgaccagtacggtcgcgtgcccgtcgacccggatcccgctatctgtgttaacatgtgtggtgcacgatgcctaaatgcttgcagtgataaaaatgtagtgatgtggcgtctctgttgctgcaattgccaagtggatgaaacagatcggtgtgagagtcatgtcaaggccacaaccaacaaaattgacggggtgacgaagggtttgagggattctgctactgcaaaagtcgagccacacgatgatgctccccctatcgatgtcgatgttctatccttggatgatctgataaaaaattgttga

SEQ ID NO: 11798 - DNA, 345 bp, Zea mays
  Peptide Sequence Number=SeqID_53577
atgaggaattacagcaaacttgtgagcatcaggcttggcgggaagcagctagagggagggacggcttggaggcctgataaaacaccaaggataggctatagatggatccgacagttcctagccccctgctattataccctcttgctgatgccaggttttattgaagttgtatattattatttcttctctagccaagttcatagaagtgttgtgtatggagatcagccaaaaaacagcgatgtgcacatgccagacatggatggctttaagcttctagagcttgtggggcttgaaatggacatccctgtcattaaaactgtgcccaaaggatacttgaactcatga

SEQ ID NO: 11799 - DNA, 1005 bp, Zea mays
  Peptide Sequence Number=SeqID_53578
atggccatcacgccggcgggaatcacggcgggcaacacgcgatgcgggggaggggaggatcgcggagcagaggggcagaaccgtgcaccacggactgcagcggcgtgcggcgagcagggcttggcggctggcggcgagtggcggactgcagtctgcggtctgcggcggcgtgcggcgagtagggtagaccgtagacgcgtattcgaggccgagaggtcgtcaggcatctacatcatcaaccttgggaagacatgggagaagctccagctcgcggcaagagttatcgttgccatcgagaacccgcaagacatgatcgttcagtctgcccgcccctacggccagcgtgctgtcctcaagtttgcacagtacactggcgcccatgccatcgctgggaggcacacccctggtaccttcaccaatcagctccagacctccttcagtgagcctcgcctgctcatccttactgacccaaggactgaccaccagccaatcaaggagtctgctctggggaacatcccgaccattgctttctgcgacactgactctcccatgcggtatgttgatatcggcatcccagccaacaacaaagggaggaacagcattggatgcctgttttggcttttggccaggatggttttgcagatgaggggcactatcctccctgggcacaagtgggaagtcatggttgatctattcttctacagagatccagaggaagcaaaggaacaggaggaggaagctgccgtggcccctgagtttgccgcaatcactgattaccaaggggctgatcagtgggtgggtggtgaccagtggaccgctgatgtggctgcgccatctgttgctcctactggtgctgaatggggtgctgctccagctccggttcctaccggtgatggctgggatcaaactggggcccctgtacctgctgatggcgctgttcctcctgtgattgctcctactggttgggatcaagcagcccagcccactgcccaaggctgggagtag

SEQ ID NO: 11800 - DNA, 369 bp, Zea mays
  Peptide Sequence Number=SeqID_53579
atggctgcttttagtcccaagaattcttatggtgattttaagttggagagcctagtggaattagctaagctttatccagatgactttacttcagaagaactaaaggatcttgctcatgatcttgagatctacattgataatgtacaagctgatgacagattttccaacctgaataccttaaccgaacttgctaagctgatggttgatacaaagaagcaccttgctttcggtttggtttatcgacttttaaagttagttcttgttctgccagttgctactgcatccgtggagaggttgcttttgtatcctaattttgatgtttgcttggaagctggagcttttgagtcacgttgctcagagtttctttaa

SEQ ID NO: 11801 - DNA, 228 bp, Zea mays
  Peptide Sequence Number=SeqID_53580
atggcggcggcggcagcagtcggaggtgcggtgcgcccgctgtcccagaaggagcaggacatacagatgatgctcgctgccgacgtccacctcggcactaagaactgcgatttccagatggagcgctacgtttttaagcgacgcaccgacgtgtgttctatgagctttagatggttcgcagtaatcatcagagagatgttcttagtaattcagctttcggaaggctag

SEQ ID NO: 11802 - DNA, 468 bp, Zea mays
  Peptide Sequence Number=SeqID_53581
atggcagccctgtcatatgcccactcccgtgaacagtactctccatataccccagactatggttatccaacaaacttctacaatatatatggaggagctcagtacccgttttatggaggagcaacagctggcatggtgacaggaacaagtcccttttatccatatttccaatttgggcagtcaggaaacactactaccaactatacaagtggacaaggctacaacttgcaacaatacccacaaatgttccacttctcaactgtatcttctacagctgcagctgtgaccggctttgctcagcaatatggaggaccattgtcactagcagcaagccctcaagcccaagcaggcatgactatggcactcacagctccaaccctgccaactccaacacaggctgctcatccttaccggttgattccctcgcactttgcagtttctgctgctccagagcaacccttggcctaa

SEQ ID NO: 11803 - DNA, 183 bp, Zea mays
  Peptide Sequence Number=SeqID_53582
atgggcacggggcaatgcactcatggatccaaagccagcggctgcttcaccttgaatgccggcagcgacgtcatggggactctcaaggctatagtctgcgtctgtagcctaagtcgcggaaagcttgcggaattgcatgctggtgtgttctgtgtacggttttattctccggcagccgagtag

SEQ ID NO: 11804 - DNA, 876 bp, Zea mays
  Peptide Sequence Number=SeqID_53583
atggccattgaggtccccccacttgtgcccaaaaagccaccgtccactgcccccctccccgggctctggcggcacgtgcggcccagtattgtgtaccggcgcagcaggaaatttacgctgcacgccctgcttcccgccttggacagttggactcctctgcagtttgtgcttgctggtgaagtaagatgtctggtactacaccgcacactgttgtgcgagattgtacgtacattagagagtagaagattggcagcggcgagagcaaagtgcagcgagcagcaacaggctggtggtgggtggcaccggcggtgcccgtgccccgcagcaattcgtgatacagcggcacggcgccagtgcgggcgcggggccccccgcggcggtcaaatcattgcgggggtgcggatctcgaggcatgtgggagtgggccaagcctccgcagattctgaggctgggctgctgcggctggggtgggagtggacagtggagtccgctggtgcagtgcagcaggcacgggcagaggcaggcgcatcgcctcgtcgtcttccgtctcgtccacggtccaccaccaacgaagactgctgctttgttcccgtccgcgcgctccgtacagcggcagcccataccagcggttcgttacctaacgagatcctccagccagagctcagccagaggtgtatcgctggcgcgcgcggcacgcgctctggaacgccacgtccgtcctccggggccgggccgccgtcgtccgcgcgcagaccgcagcatacggtggcggagagacaaagaccgacggtcaagactggcctactcggctgccggagaataaaaccgtacacagaacacaccagcatgcaattccgcaagctttccgcgacttag

SEQ ID NO: 11805 - DNA, 624 bp, Zea mays
  Peptide Sequence Number=SeqID_53584
atgtgtacaggcaacttggatgaaaaagtatctgaaagagtcttgtatgagattcttattcaggcaggccatgtagtaggcctacatgtacctagtaataaggagagtaacagtcgcaaaggttatgcttttgctgagtatgaaaccgaggatatcgcgcaatacgctgttaggcttttctcgggacttgttcggatcaatggtaaaacgctcaagttcgtgattgctggtcatgacaaaccgtcttcaaatgacaataagtcggtactgctcaatcatgtaccctcttcaaatggcaataacccagtaatgcctaagctcaaccctataccgttgccaaaaccgactcaaatcatgcgttgtagtgatatgcctgtgtctcatatcccagcatatccggtgctttaccgggtggaccagtacacagccatggcaaggtttagcaacagtacgtatgcttacaataggcaggaatttggttctgttctgaacattgcgcagagaggtcctgttatgaatgcctttgcccatgaggctgcgaatcagccaatcatgtatgttgagaacgtaggtgcagaagaacgtagtatgttaagagtaggcaggttccacataggttcttga

SEQ ID NO: 11806 - DNA, 546 bp, Zea mays
  Peptide Sequence Number=SeqID_53585
atggctcccggtgctctaacccgcctcctccgcgtcgcgtccactcctcgcatggcgcgccccttcgcagcaaagtcccgcgcatctcgtcggccgcaggatccggagcttccgacgggggacgagaacgacttcgccggcagcgaggttgccgcccccaccgagagcatcgacaagccgctggccgaggtgctaaaggagctcgggaagagggttccggactccctcgtgaagacccgcgtcgaggataatggcttcactatgaagtacatcccatggcacatcgtgaacaaaattctcaacatacatgctccagcgtggtcgggtgaggtccgcaacattgtgtactcatctgatgggaaatcagtatctgttgtttatcgagtgactcttcatgggattgatgcagagggcctcattttcttccggcacaggcctgaccagacgagccacaggttgaagagcttgcacatgccctgcagcccctcttgccagcacaggcgcctgctctgcatgtgcaggctcttcaacctgtggctcgtctag

SEQ ID NO: 11807 - DNA, 426 bp, Zea mays
  Peptide Sequence Number=SeqID_53586
atggtaaatcaggggcatggggaggtgggttacctcgagaagacgactttggagcgcttgagcgacggcgagaacacagcgggccccgggtcgacggtggcggcgacacgactacacaacgaggagttccgtgagtgcaagcagagaggaatagagagagaaggggcaaaccaaggggtgtcctgggtttctggtgtgcaggcgaagctcaccgtagcaacgaacacgacagaggctcgatggcggccacaaaacggacccgagatcatggcagatggtggtggcgctcctcgggcatgtgttgtgcgagatcggtgcgagagctctgcagaggtgcgctactgggcgaggggagtgagtgagtgggacacaggctcaaaaaggggtcgggcgcgtccacggcggagtgcgcgagcgggaggttag

SEQ ID NO: 11808 - DNA, 1794 bp, Zea mays
  Peptide Sequence Number=SeqID_53587
atggccaaacggtccgtccggcccgtgtccgatgaagcccggcccgtgctcggtgaagccctgcccgttttgggcccgcgccggcacagccgcgctggtgatctgggtgatcgacgcccctacaccttgcgctactctcatctttctcttcactccgccttgagagacactaggagaccaggttacgagcttaccaagggggggaagctcataacagtccattaccctaatcaagatcccggctctgatcggagtcaacaaatggactctgaagacaagatacacgaccacttggagatcacgtctaaatgcgaccatgaagtgcttcttaaaaatgaaaaagaattcaagccgatttacgtgccaatgtcatttctaaaggcgatcacgaaaaacttctctgatactctggaaatcggcactggcgggttcgcagtggtttacaagggactgcttaaaagaggtggaaccgtagccgtgaagaagctactgaatacaatttgtatggatgatagtcaatttcaaaaggaggggaaaatggaaagctacaagggaaagcttatcctggcagatgagagacagaggtttctctgctttgaataccttcctaatggaagccttgaaaagtatatcaatgatgcgtctggtggcctagagtggaataaacgctttaaaattatcaaaggaatttgtgagggcctacaatatcttcacgagaacaatattgttcacttggatctcaagcctcccaatatactgctcaacgataacatggtcccgaaaatatctgattttggtctctcaaggtgtttcgaagaaatgcaaagtcgaactatgacgtcaacactagttggatccgttggatatttggcaccagaattctttagtggacaggtttcaaaaaagttggatatatatagccttggtgttgtaatcgcggagatgctgactgggcaacaaggacattgcccagttgaaaatcgaattgcggggtggttggacacggagaacgcgaacatcactgaccacgacacgctcgcggatgaagtaaaggccaatctccacgtgcttcgtgtgctgatgctgcacatgattggtagagaggcagatcacattgacgttgtcgcagtagacgaaggtggagcgcttgagggcattgtggagcttctggagaagctgacggagccaggaggcctcggccacgctgttggccacaacgcggtacacggcctcagcgctggagcgggagatgatgggctgccgcttcgaagcctaggagaggaggtgcttgaatgctggagacaacgatttggagaatcatccccagacacagataagctgttggaacaagtaagagtatgtgctaagataagaatgagctgtgggaaccttgacccagaaaagagaccagatatacaacagatcaccgcaatactcagtgagccgtctgactctgatgagtttccggaggtcgacttcgaggaggttttctcatcttttgtgagacagcagcagcagcacaatggaagcatgcaaacaaagagatccaagcactcatggtggtgggactcccatattagttccaaaagcagcaaatggttgtctgacaatgtagaagccctatttgccatagatgtctcttctgttatgggaaatgagaacaccacactcttctggacagactgttggactcttgggcgctctattgaaaatcttgcacctttggttcttgcacaagtcccacttagagctaaaaagactcgtacaatggctatagtaatggctatagtgtaa

SEQ ID NO: 11809 - DNA, 1131 bp, Zea mays
  Peptide Sequence Number=SeqID_53588
atggagccccgcacgctctatgacgatggcggctctcagccccttacggaagcaagaggacaattgaaccccacccgcggccgccgccgcagcaacgtcggcaatccgagacgccggaggcctcctcctctcctaataccgccccccctcgggaccgggagggagtccgccgcggtgcggatcgcggccacggccacggaaaacaccggggcgcggctcatggaccgcatcgtcggcggcaagttcaagctcggccggaagatcggatgcggctccttcggcgagatctacctcggtgagcggaccgactccgctcttccccgatcccctattgcttccttcctcctctccctccctctccccgcgcgtttggtttctgcttgggtgttgtcatctgttattactactgtgcctgacctgctctttgctgtcactgttccagccacgcacgtggacacctacgagatcgtcgccgtgaagatcgagagcagcaagacgaagcatccacagctgttctatgaggcgaagctgtacaataccctccaaggaggaagtggcattgccaacgtcaagtggtgcggtgtggatggagaagagaatgttctcgtcattgatttgctggggccgagtttggaggacctgttttgttattgtggccgaaaattcacgctgaagactgtcctgatgttggctgaccagatgaaacctgagagaaagcaggggaggaggaagcaggggaggaggacctaccaaggaagacctgccgccgtgcagggaggggcgcgcctagggagctgcagccgcgcgcagggagcagggaggagccacgcgcacaggaggagccgcgcacggacagggagcagcagccgcgcgcatagggaggggctgtcgcgcgcgcacatgaggcagcgtccttatctattcccctatgttcctactttccttacctattcccgcgccaaaagcccaaaacgcgcgccaatttgggttctgctcgcggcgactaaggccaacaaccccaaggtcaggcgtcgcccagggggaagaaggcgtcgcccagacgcctacctcgccaaggtggacgccatgctcgttcttacctgggcggcgccgacgcctagcaaaatctag

SEQ ID NO: 11810 - DNA, 438 bp, Zea mays
  Peptide Sequence Number=SeqID_53589
atggagtactatattggccctgagggcagagggactgttgaagaaattagcactaaattgaaggagggttgcccaagttacttcaatgaatcaaactacaaatattacttggcagtggagtgccttgagagagcatctatgattaataaccctgatgagagagatattcttgctagagatgctttcaatcttttgactaaaattccagaatctactgatttgagtgtcatatgcaagagatttgagaacctaagtgagagtgaatttcaagctgaggttaaaaaggtcactagttggttccctggttgtgtgcacgcgagatggactgacctatgggggttggatcctcgtgtaggggctgggagggctcaaagcacgagtaaagatccagcctatagagggctaaccctcatgctgcactggagtcagttttcgtga

SEQ ID NO: 11811 - DNA, 1035 bp, Zea mays
  Peptide Sequence Number=SeqID_53590
atgccccctttatcttctccttccatgctcctcctcccgcagcaccacctccaaatcttctcgggcctgcctctgcctctgcctcctgaggtgctgaacgacagctctgctacttctgatctgcatgatggccgggaaagcagcatgccggagtcatggagccagctgcttcttgggggattagtcggagatcacgagagatacaacgctgccacagctttactgtcaaaaggattagaggagcgacctgcagcttacaattgctatgaccctggacatggtggtggtgaggagatccagacatcggggaccaacattaggtctcatcaggtgagccaggcgctcttagcgtcgtcctctcctaggtcctgcatcaccacaagcctcggcagcaacatgctggacttctcaaacaccaccgtgccgccggcaccggatctgaagaatcatcactccgataactcttctgagggtaacagcgctggaagtggttcggctccaaagaaggctagggttcagacctcttcttcagcacagtctaccctaaaggtaagaaaggagaggcttggggatagaatcactgcacttcaccagatagtgtccccatttggcaagactgacactgcctccgtcctacaggagactattggctacattagattcctcctgagtcaaatcgagtgctggaaagcccttcgaatttctgcagctctcagcttcccttacttgggccatgacaacggggactccatgcaacaacataatactaataacttgctgctaaaccatagcactagcgatgccatggtacaagttcaaggtcctccgatgaccaatcaggagggggaggtctatggcaatggcattgaggagggcagcaggaaggatttgaggagcagggggctgtgcctggtgccagtgtcgtgcacgtcgcacctcgccgacgacaacggcccctcagacttctgggcggtgtccgcggcgccgtccccgcctcctccgcctccgccattcgccggcatcatctggcgatag

SEQ ID NO: 11812 - DNA, 1245 bp, Zea mays
  Peptide Sequence Number=SeqID_53591
atgacgatgccaaacgacggaggtagtggtagtggcaagagcatgggggccagggctgtcacagcgagcgagcacggcacacgtgggaatgtgacgtatgtcacgaaggacaaggctcatggcgcgcgatcgaaggccacgaagggccaactggccaaggcagggcccgtggaggcaggtatagtgtcaggtgggaggggcagcacaaccagtgtgttgctggtacaagtgggggatgaaagaacagggcgcctgggtgtggtagctggcgttcgcctggggttgctaggcggccggagcggcggctatgccaacgatgaaggtgggggcgaaccaagccaggaggacacccgtgtgcacgtcgggacagcctggggcggtggctacggccagggccatggagggcaccggaagcagaacaacggagagctggacaagggagggggggggggcggggttggacacagccccgacgaccaggggaggggcgaccgccactggcgaagaagaggaggcgtcaggtgggccggagctggcgtcgagcgacactcaccgtgggacgagcatgaagtgtggctcctgccggggaagaggccgagcaggggccgcgcgtcggcggggaggccaggagtggcggcggggtatgaggaaggagagaatagagagaaaacttgctctgagaagctcacaaaggcccttttctcctttgcgactcgactagctcctgttatcatatttgtggacgaggttgacagcttacttggtgcaagaggtggtgcatttgagcatgaagcaacaagaaggatgcgcaatgaattcatggcagcttgggatggtctcaggtccaaagagaaccaacggatccttattcttggtgcaacaaatcgtccatttgatctggatgatgctgtgatacggcgtttacctagacggatatatgttgaccttccggatgcgcagaaccgaatgaaaattctaaagattttacttgcgaaggaaaaactagaatctgattttaagttcgatgagcttgcaaatgccacagaaggctattcagggagcgacctaaagaacctatgtgtagctgcagcatataggccagtccatgaactactagaagaagagaaaaaggttagctcgtctgtttcttatgatgcaacaagtatgaatgaattgagaaaatggaacgagcagtatggggaaggtggcagcaggactaaatcaccatttgggtttggcaactga

SEQ ID NO: 11813 - DNA, 743 bp, Zea mays
  Peptide Sequence Number=SeqID_53592
cttgctactttgcttctattgcaacacagattggagaggagcttggtgatatatatgattatgttgcaccatgctttccttctagatatgaaattttccagctcatggtaaacctatacactgagagattcattcagatgcttcgacttctcagtgatagagcaaacgatattcaaaatataaacatcttgaaggtgactagttgggtcgtacaatatcaagaagatttgattggtcttggtgtggatgaatcacttgcccaagtttgttctgaaagtggtgcattggatcccctcatgaacatgtatgttgagcgtatgcaggcaacaaccaagaaatggtacaataacattttggaggctgacaaaacacaaccaccaaagagtagagaggatggaaaactatatacacctgcagcagtggatctattcagaatattgaccgagcaagttcagatagttagagacaacagcacatatgtcatgctatatcgcatcgctcttgcggttattcagttggagaatggaaaccctaaccctaatcagggttggaaggatgttgagattgcagcgaaactcggcgaaaacactcgacaacagctccttggtgaagatgtcggcaaactgcaacgtggtggggaggctgagaatctgaacgtcaccagcggcgactcgctcgcggacgaagtacaggtcgatctgcacgtgcttcgtgtgctaatgctgcacgggattggtggatag

SEQ ID NO: 11814 - DNA, 768 bp, Zea mays
  Peptide Sequence Number=SeqID_53593
atgatgccaaacggcggaagtggtggtagtagcaagggcatggggggctatgctagtgggggaagtggagggcaagtgaagggagtagagtgggtcggagctgtcgcagcgagcgagcacgacacaagtggaaaggtggcatatgggtcaggaagagcggcggtggccgttgaggatagagaggggagcgccgttgagaggcccaaggcgggaaagaagagggcgagatggcgcaaggggtcaacgcaggctgagtggcagcgcagagccacgacaaggggcagtaccagagagcgtggagttgccgacaggggaagggagcagtccggctgctggagagggcagcaggaccgcagaagcgccgtgaaagagggcgttggtgtggagggcatgcgcaagggagtggccgcactgggtggcgacgcagagccacagcaaggggcggcaccagggatcgtgggggtcgccggcaggggaagggagcagcccgactgcgagagagggtaccaggagcgtcgtggaagagggcgctggcgtggagggcgtctgcgggaatgccgacgagttggcccggcgtcgagggagacgccgcccatgcgaagcaccggcggcagcagacataggccatggtcggtgatggggctgcaccgcgcatccgccggtggccgtgcagagaggtcgtggagggcgtcgcgattggaggcgcggccaccggggggcgcggcgtcgggggcgcagccgtccagcgggaagcacgcgccgtcgtag

SEQ ID NO: 11815 - DNA, 273 bp, Zea mays
  Peptide Sequence Number=SeqID_53594
atggctgtggatttgcctttgggagcatacaaggccattgacaagattagaaaagggttcctctggcaaggaaggagaaatatcaatggaggacactgcttagtggcctggggaagagagacgacgctgatgacctggagtcttggagacgccagaagtggatgtggagccggcgcggctgaactgcaggagtcaccggtgaatgcactagagactggacagccaccactggacgacgggcaggggcgcaggcagagcttgggttacgactag

SEQ ID NO: 11816 - DNA, 291 bp, Zea mays
  Peptide Sequence Number=SeqID_53595
atgaagttgtgccagctatacagtcagtgccttcagctgttcaacacaccgcttaggccggtgaccctagatttctctacccaggtcgttggaccaggtagtgctcagccaccaatgcctctagcgtttgctgtcaccactcttgccatggttgtttctgtgactactccagctccagcagatcctacatcgcagccagcatccgagtcagcaccagctctagcctctaccacagatagtggatctgagactgattccgacaccttgctcgcgtttgcactgcttccttag

SEQ ID NO: 11817 - DNA, 351 bp, Zea mays
  Peptide Sequence Number=SeqID_53596
atggaggacaggaaacacaagattggtggatctcaggttgggagtagcagccgtccccgctactcgggcaacccacctcagccattcaagcaagggaggaaatcaatatcagcgtcagagcaaccaggcacccggtcttcctgccccaacaaccaaccagaacaaccaagcagctccagcaatgcaatgcagcaaggaggcaacacccatgggcagcctcatgcccagtatggaaaggtgaaccacttggaggccgacacaatccagaagactctaggagtggcactagtcgaccgttgcgcgaaggagccgttgctccgctggtgcactggacagtctggtgaattatag

SEQ ID NO: 11818 - DNA, 237 bp, Zea mays
  Peptide Sequence Number=SeqID_53597
atgcaaagaaaaaggaaaatgttgggagaattagataatgtacaaccaaaaccttctagggatctcatggaacatagaaaaataattaaagagtactgtaatctcgctgacgggaagtacatccttgcgccggagcaaggagttgctcaggaggtagcccaggatccagcaccaaagcctgccatcgaggatctgcctgccccagctttggaaggcaagccccggttttatgcataa

SEQ ID NO: 11819 - DNA, 426 bp, Zea mays
  Peptide Sequence Number=SeqID_53598
atgttgtatgagttggatgtgttgaagggtgcgtccatgctgtttggtgcaaagcatcttgtagtgggagtgatagccatgtcgtatgagttggatgtgtcgaggggtgcaggtcttgccttggcccaattgatggatgcatttattctttgggacacttatggttatccaattgatttgactgaggtcatggcaatcgactatgggctaactgttgataagaaggggtttaatgcttctatggaagaagcgaggcaaaaagctagaaatgctcgtaacaagtctggagggaactctattgctatggatgcgaatgctacagcgcagttgcgcaaactggggcttgccagcacggacgatagcccaaagtttctgtggcccaagattaaacctaattctatcctatctttaatcgaagtcagttaa

SEQ ID NO: 11820 - DNA, 2196 bp, Zea mays
  Peptide Sequence Number=SeqID_53599
atgttgaactttgctctaagggaagtacttggtgatcatgttgaccagaagggttcaattgttctaccagagaagctaagatttgatttctctcatggaaaacctgtccagcctgaagatctgaggaaaatcgagttcatagtgaaccagcaaataaaggacgagctgggtgtgtatgcacttgaaataaaactagaggatgcgaagcgcataaatggtcttcgtgctgtgtttggtgaaatctaccctgatccagtaagagttgtatcagttggtcgcaaagttgaagatctgcttgcagatcctgatagcaaagagtggctatccatatcgactgaactatgtggaggtacacatatcacaaacacaagagatgctaaagcatttgcactcttatctgaggagggtattgcaaaaggagttaggaggataacagccgtgactgctggatgtgccacccaggctatggagttggcgtcatctatcgattctgatatcaataaagcatctcagttggagggagctttgttggaaaagaaaattgcttccatcaagagtgggctggatgcagctgctatccctgctgcgagaaaagctgatttgagaggcaaggtttcaaagttagaggatgattattataactgttgcacgtcacaggacgaacttaggaaggcaaagaagaaaatgggggagcaaaatatacaaaaggctgtgaagtccgcaatggatgctgcagaagctgctctttcaggaaataaaccgttttgtgttactcatgtggatgtgggtcttgataccacggctgtccgtgaggcggttatcaaagtcatggaccagaagggtttgcctataatgttattcagcaccgatgaggcatcaaacaaagccgttatctatgctggtgtgcctcccaatgctcctagcggcttcaaggtgttggactggctaacaccttcaattgcgccactcaagggaagaggcggtggcggcaagaacggcgtcgcccagggccaggagcgctatgggagaggagacaagtcttatcccctgtttgatggaggtgctgttcgagtcgtagttattgaaacaacgataagtatggtgaaaaatgcatggcaaaggccaggctcgggcaagaccaaggttcctcctgaggccttggttgagcctgcctcggggcatgcagtggtacagggaggggttagcatagttgtcggagtggccacctacggaattcacggggagttgttgccggggcagttggccgaagccgagcttgggcgaagcggagttttcttcgaggttaaggccgactttgggcgaggtggagttccctcccgaggctgggcacggggctgtcctcctgtccgagatgggcttggacgaggtggaaaccgctatttggtgaagaggggacatcggggcttggtggatgatgggctgcttcgcccctgctccctcgggacgcaccccgagtggctcaccccttgggatgagaaggagccgaccccgcctgcaggctatgtggcgacaatctacacgacggtctgcgaggaatacctcgggatcgagccccattgggacctgttgctccacctcttctgcgtggagccattctcccgcccttcggaggtgaagaagagccactggttctacctccgcaatgatgacgggaggttgccggagtacaccaagcgggtcaggctctatgaccggggggctaccgcggccgaggtcgtcgttgccttccattatcggagggtgctaccgctggtggagcggcacctgcgcatggatgagatgacgcccgaggcctccatggagagttctcggatggcatcggtcgccctctccaccgacaagctcctcaagcgggagagggagggactgccactggaggcatcccctagtagagacgatgacgacgatgaggggatggaggttcggctggtcttctgccccgaggtcaggatctggtctgagccatccttagtaggctcgtccgttggtgcagacgtgtcggtgctcgagcttgaggcatctgtgcctctgcccgagataagggcgtctaccgagtcgggacctatcctcgcaaccgaggaggaggcagcggtggtggagcgggctgccgacccactcccggtgccaacctcaaggacaaagggcccaaggagccaagggcatgccctggtctag

SEQ ID NO: 11821 - DNA, 174 bp, Zea mays
  Peptide Sequence Number=SeqID_53600
atgccttctccatttcccgagagcgacgagttcgtcaccgaagacatgggcacgggcgctgatgactcaccggacagtccggtccttatggagaggtactcaggaaaaaggcccgagccccctaaggtatcacaatatcatccacataatcaggataacatcatcgtatcataa

SEQ ID NO: 11822 - DNA, 297 bp, Zea mays
  Peptide Sequence Number=SeqID_53601
atggattctattcatgtccagaggaagaagctggttctggcgaaccgggcccgcatggcagagctaaggcaggcacacatgcgttggctgcatatctgtcacctgatgcccctgggtcccacggttcagtcacttagactgaagaagttcaactcagctgaaaaagctcaactacaacaactcaactacaactggagaagttcaacacagctaaaaaagctcaactcagatgaagaagttcaactcagctggaaaagctcaactgcagctaaagaagttcaacttgagagcacctag

SEQ ID NO: 11823 - DNA, 294 bp, Zea mays
  Peptide Sequence Number=SeqID_53602
atggcgcctgaggccgggcttggctgctgtcagcctcactctgtcgagtggctcagcagtcggtgcggcgcaggcggcgctgtcctcttgtcagaccggtcagtggagcggcgaagtgactgcggtcacttcggctctgtcgactggagggcgtgcgtcaggataaagctttgtgctgatgggggttaccagctgagatttaggagtcttgagggtacccctattatggtccccgacagtagccacgtaataaacccaccacatgcagctactggggaaaggtcgctagcctaa

SEQ ID NO: 11824 - DNA, 825 bp, Zea mays
  Peptide Sequence Number=SeqID_53603
atgattttgcagagacgtttaaagaatcgaaaaccaaaattaatagataaaatagaattacaggaattctcacttggttcttgtccacctaccttgggagatcagggcatgcgttggattacttctggtgaccagcaagtcatgtgcttgggatttgattggaatagccacgagatgagtgtaatgtttttggcgaaattagcgaagccactgattgggacttgtcgaattgttataaacagcattcacatcaagggagatcttctactatcacccatacttgatggggaagctatactctattcttttgaatcaaccccagaagtcaggattggggtagcatttggaagtggtggaagtcaagcaattcctggtatggagttaccaggtgtctcgacatggctggtgaagcttttgactgaaaccttagggaaaacaatggttgaacctcgccggctatgtttttctttgccatcagtagatctaaggaaacgagcagttggaggtgttctctcagttactgttgtatcagctagtaacctctgtaagagcacagctaatgatatagggaactgccaaagctcaaatggaggggccacgtatggaattgctgataacaaggtatcacagacatttgttgaggtagaagttggcaatttgatgagaaaaacaagtaccagtaagggtctaaatcctacatggaacagtacatttaacatggtacttcatggagagacaggcattgtcaagtttcttctgtatgaattggattctggcggtgtcaaattcaattacttgacaagctgtgagataaaggtattctag

SEQ ID NO: 11825 - DNA, 1278 bp, Zea mays
  Peptide Sequence Number=SeqID_53604
ttaactgtaagccttgtgctaaaagaatggcagttctctgatggatcggttacattgagtaattctctgggcaatggacttcaaagctcatttgatggatcgacaaagcttcagtccacaacaggaaggaaagttagggtcagagttgttgagggcagggcacttacagctaatagtaaatctggaaaatgtgacccttatgtgaaactccagtatggaaaggctctataccgaacaaaaacactgacacatacggtccgaccagtttggaatcacaagtttgagtttgatgagatctctggtggtgaatatctgaagatcaaatgctataatgcagatatgtttggtgatgaaagcattggtagtgcgagagttaatttggagggacttttagagggtgctacccgtgatgtttgggtcccacttgaaaaagtagattcaggagagataaggcttgaaatagaggcaataaagaatgatcacaacaatagcttgcagcgattttcgaaacactgcaaaatgagctcaagcagtaaagctggatctggttggattgagctagtcataatcgaagccagagatcttgttgctgcggatctgagaggcactagtgatccttatgtcagggtgcactatgggagcaagaagaaacgaaccaaggtcagatgtttctcacagtctgagttcagaaagagttatggcctcctgacagcatacttatcattgatgctattatgtatggagaagtcacagtttgttgaagcttgtcttgttctttctacgcaggtcatttacaaaacactgtctccacagtggaaccagacattcgagttcctggaaaccggagaacccctgattttgcatgtgaaggaccacaacgccgtccttccaaccgccagtatcggccattgcaccgtcgagtacagcatgctgtctccaaaccaatccgctgagaaatggataccgctccaaggcgtaaaaagcggagagatccatgtaagggtggcactgaaggtatcagtaccaggttcggagaagaagaacatgctcggggcaggtccgttcggcaaggggcacaagatgtcgacacagatgagagacagcctgaagagattcacgggcttgatcgacgacggcggtgacccggaggcactggcactagccgtggcggagatggaaggcatccagggcgagcaggaagagtacgtcgaaaccctggagcgggagaaggcgatgctgttgcacaagataaatgagcttggttccgaaaatcattag

SEQ ID NO: 11826 - DNA, 402 bp, Zea mays
  Peptide Sequence Number=SeqID_53605
atggcctgcgttccttttcaggcacgcccggctgcggcctgcgcggctgcccgggtggccaggttttcaggggccgtgtcgccggacaatgggctgcaggagaggacgacacgccgatcaaagcagagtgatggatacctgaaagctaccactactagtgctagtgccagtgctaccacgcgtccacgcctcatgtcggcagtcggcagtagcaatgccgttgccaacacaggattacagaacactggaaaccaagccgaggtaaaggtgatcggtgttgagctatcgaagctccaaggaggaccacgcaagcgcatgccaatgtcattcctgcagcagggtaggctctacgacgcggttgacggcggagccttctacgatgacatccaagtcgacacctga

SEQ ID NO: 11827 - DNA, 372 bp, Zea mays
  Peptide Sequence Number=SeqID_53606
atgagttcattcttcgatgctgatgaagatgaagctgagaaagatattgtcggcacaccattagcgcagaaggttcctttaagcctgccctggcagaggacaaatgaaaagggcctgctgaatttgaagaagccaaacaagcgaccgaagatgatacaccacttggtcagggaccttttgaccaatacctgggtgggcaaagaagtatgtcgttatacggcggactatgttggttttctgaagatggaggccatgctttcaactatgtctaatgaagattttttagattgcttaacttatacacatgttaagggtctattcctaagcaagaccttaaagaacaagaggaatgtcgagggcgaagctgcatag

SEQ ID NO: 11828 - DNA, 483 bp, Zea mays
  Peptide Sequence Number=SeqID_53607
atgtacctgctcggtaaagcctgcgtgcagcaacatgtggacctcagcacagatgaaatcctaccgctcgatggactgcttttggggcttctaactcaccggcttggcgtcagggtggatcttcagatggttccttgtggtgtgggtggtctgggaggagcccgctctaacctaaatggtcttcacagagatgctgactgccccataaggatatactctagtcgtctttgcaggtgccatggtactcgaggtcgaggggtcgtttctcctatcgtccgggagccgaaggggattgagaccgagtacccaacattggcgcccgcctctagtgattccacgaccacatcagcatacaccatgccacccaagaaaatagtggcaattggctccatccttgcactgatcgatcccaatcaagggaacgaagctctcatcagagaagcaaggaaccataagaagaaagccactagcccaccaccctga

SEQ ID NO: 11829 - DNA, 414 bp, Zea mays
  Peptide Sequence Number=SeqID_53608
atggcgtgtggactccaggaggcaagtagggagcccattggacctgaacaacttgccggaggagtacggcaagcaagcggtagagagctccacgaccaccgccacatcaagctcccatgcaggacagggataaagaagaagggcgatggagggaaagacgatgctgcaaaggtgtatgagtgccggttttgctccctcaagttcggcaagtctcaagcgcttggcggccatatgaaccgccatcgacaaggcaagatcatacaccactatagccctagctcattacacaatgcttacatttccttgtattttatggcgggggagactgaaaccctcaaccgtgcccggcaactcgccttcggcaacaaaagcctcgccgccatcggggcgcaggcgcaaatgacgatgacgtaa

SEQ ID NO: 11830 - DNA, 450 bp, Zea mays
  Peptide Sequence Number=SeqID_53609
atgacgcttggttccagccaccatctagctcgtccttcggggaggttgagcctaggaaaatctcacctcgtcgagtatatcctgctgcttgggattggagttgagtccgaccaaggggccacagtgcaacaaagggatcacttaattcacttagtaatcttttcatttgatcttttattagaaaagatattcaatctagaagtaattcccaaggtcatcccgctaaatgaacctcgactgagtgtatggattcgatcatgggctcctgggtctgcgttcgccccaactccaagtgcgcccgatcaaccaaatgaccaaaactactctatccaaccaaaaagattgtcccactaccccgaccgacttgatggactcactcagggcttaggggtctacgtctgccctattgtgctcgatcgactagatggcaaaactactctgttcaactaa

SEQ ID NO: 11831 - DNA, 579 bp, Zea mays
  Peptide Sequence Number=SeqID_53610
atggcgccctgcgcgtccccgtccgccctcgcgctctccgccagcacgcgggtgacgacgacgtctcagattgccagctgcgccttcaccctgggcacggtcgccgtcctccccttctacaccctcatggtcgtcgcccccaacgccgacatcaccaaacgcaccgtggagagcggcgctccctacgtcgccctgggcctcctctacgcctacctgctctacctgtcctggacccccgacaccctgcgcgccatgttcgctagcaagtactggctccctgagagatgggatgggacgacttggcagttggcgggcatcgtgaggatgttcgcgagcgagatgaccgtcgcctccgcgtggatccacctcctagcagtcgacctcttcgcggcaaggcaggtgtaccacgacggcctcaggaacaacgtcgagaccaggcactctgtctcgctgtgcctgctcttctgcccggttgggatcctggctcatgtgctgaccaaggattcttccattgttaccatgtggagatgtggattgagcggaattgatagggtttaccgtttgattcaccaaatgtaa

SEQ ID NO: 11832 - DNA, 423 bp, Zea mays
  Peptide Sequence Number=SeqID_53611
atggcgaaggcctggtacggcgagatcggtgaggcttggacggggttcgggcatgtctccgatgaggcacgacggcgagcggtggtgctgttgtgcgggcggacaggggttcttgacgtcggatggagcttcgacgaggggctcctgtcgcgttgggtcagggtcgcggcaccggagtcggctgtcgcggcagtcggggcgccggtcctgggcgtggacggattggggcaggggcgcgctcgggctctggcgacgcttgggggcgcgaccgaggtagacctgagcgcggctggggctgctcggctggggcgcctggggcggggttgcgcgacctcttgctgctgcagccgctcggccggggcgggtcacgtggcgcacgcgctgtggctggcgtgcagcagagagagcaggggagaggaatga

SEQ ID NO: 11833 - DNA, 324 bp, Zea mays
  Peptide Sequence Number=SeqID_53612
atggggagagggagaggtaagaaacagtggcattacactccattatacgaggtgaagaaacggacggtcggcacaggcgtttctgtcgcgggcgcgaggtcttcagtgttgagcgcgcaggggctcctgtcgcgctgggtcagggtcgcggcaccggggttggctgtcgcggcagtcggggcgccggtctgggcgcggacggattggggcaggggcgcgctcgggctctggcgacacttggggtccgactggtcgatcggcggggcggggcgcgtgggttgcgcacgcacctgggcgctgcgcgcagggcgcgacagagaatga

SEQ ID NO: 11834 - DNA, 327 bp, Zea mays
  Peptide Sequence Number=SeqID_53613
atggcgaccaccgcccatggatccccgacggggccacaaagggatgacccgtcgccgatcgactctaacaacacgcatggaacactgcaaggaggaacacagggaggagcggagaggagcggcgagagcaccaacacgcaaggaacactcccaggaggccgccgccatcgccaccgccgcagtgaacgccaaccaagaagtcacagtaggtggacctggaccaaaaatgttgaggtgcgttggacgaacgccgtcgggctgggcctggccaggccaggccagctatgctgctgctgtgctgcacgagctggccgtgcgtcgggctag

SEQ ID NO: 11835 - DNA, 2106 bp, Zea mays
  Peptide Sequence Number=SeqID_53614
atgccgttcggtttgaggaatgcgggtgcgacataccaaaggtgcatgaaccacgtgttcggcgaacatattggccgaacggtcgaggcctacgtcgatgacatcgtagtcaagacgagggaagcctccgacctcctttccgaccttgaagcgacattccgatgtctcaaggtgaaaggcgcgaagctcaataccgagaagtgtgtcttcggggttccccgaggcatgctcttggggttcatcgtctccgagcggggcatcgaggccaacccggagaagatcgcggccatcaccagcatggggcccatcaaggacttgaaaggcgtacagagagtcacgggatgccttgcggctctgagccgcttcatctcgcgcctcggcgaaagaggcctgcctctgtaccgcctcttaaggaaggctgagtgcttcacttggacccctaaggtcgaggaagccctcgggaacctgaaggcgctcctcacgaacgcgcccatcttggtgccccccgctgccggagaagccctcttgatctacgtcgccgcgaccactcaggtggttagtgtcgcgatcgtggttgagagacgagaagaggggcatgcattgcctgtccagaggccagtctacttcatcagcgaggtactgtccgagaccaagatccgctacccacaaattcagaagctgctgtacgtggtgatcctgacacggcggaagttgcgacactacttcgagtctcattcgataactgtggtgtcatccttccccctgggggagatcatccagtgccgagaggcctcgggtagaattgcaaagtgggcggtggaaatcatgggcgaaacaatctcgttcgcccctcggaaggccatcaagtcccaggtcttggcggactttgtggctgaatgggtcgacacccagctcccaacagctccgatccaaccggaactctggaccatgttcttcgacgggtcgctgatgaagacaggagcgggcgcaggcctgctcttcatctcgcccctcgggaagcacctacgctacgtgctacgcctccacttcccggcgtccaacaatgtggctgagtacgaggctctggtcaatgggttgcgcatcaccatcgagctaggggtccgacgcctcgacgctcgcggtgactcgcagctcgtcatcgaccaagtcatgaagaactcccactgccacgacctgaagatggaagcctactgcgatgaggttcggcgcctggaagacaagttctacgggctcgagctcaaccacgtcacccggcgctacaacgagactgcggacgagctggctaaaatagcctcggggcaaacaacggttcccccggacgtcttctcccgagacttgcatcaaccctccgtcaagaccgacgacacgcccgagcccgagaaggcctcggcccagcccgaggcaccctcggctcggcctgaggaaccctcggcccccgagggtttctactggccgacggtggtggccgacgccactagaattgtccgcacctgcgaagggtgtcagttctacgcaaggcagacccacctgcccgctcaggccctgcagaccatacccatcacctggccgtttgctgtgtggggtctagacctagtcggccccttgcagaaggcacccgggggctacacgcacctgttggtcgccatcgacaaattctccaagtggatcgaggtccggcccctaaacagcatcaggtccgaacaggcggtggcgttcttcaccaacatcatccatcgcttcggggtcccgaactccatcatcaccgacaacggcacccagttcaccggcagaaagttcctggacttctgcgaggatcaccacatccgggtggactgggccaccgtggctcatcccttgacgaatgggcaagtagagcgtgccgacgacatgatcctgcaaggactcaagccgcggatctacaacaacctcaacaagttcggcaagcgatggatgaaggaactcccctcggtggtctggagtctgaggacaacgccgagccgagccatgggcttcacaccgttctttctagtctatggggtcgaggccatcttgcccacagacttagaatatggtccccgaggatga

SEQ ID NO: 11836 - DNA, 708 bp, Zea mays
  Peptide Sequence Number=SeqID_53615
atgcagtcgacatgcgaccgcgccaagtgggtgcaccccttcgactccaacgcgcccagcatggaggcccaggcccacacgtcatgcaaccggcgcgccagttgctacgtagtgaggctgacagcagccaagtccggcctcaggcgccataggaaactccgcttcgcccgaccccagggctcggactcgggctcagccccggaagacgacgaactccgcatcgcccgacccaagggctcggactcgggctcagccacggaagacgacaaactccgcttcgcccgaccccggggctcggactcgggctcagcctcggaagacgacgaactccgcttcgcccgaccccagggctcggactcgggcttagccccggaagacgacgaactccgcatcgcccgaccccagggctcggactcgggctcagccccagaagacgacaaactccgcttcgcccgaccccagggctcggactcgggctcagccccggaagacgacgaactccgctttgcccgaccccagggctcggactcagccctggtctcagccgacggtctccgcctcgcccgacccaggggctcggactcgacctcggcctcggaagacggactcgacctcgacctcggaggagcctccacctcgcccaacccagggctcggaccgaccacgtcacaggaggcgccatcattaccctactccaagctgacttag

SEQ ID NO: 11837 - DNA, 948 bp, Zea mays
  Peptide Sequence Number=SeqID_53616
atggcggtcgcggcatgcacggacgcggttggagcagatgcggcaagaacgggagcatggtgtggattttgggaggccgcggttggagcgcccgtgggtgaggatgccggtcgcggctggagtgcctacgattacgggtgggttcatggcaagcggaggggttgcgagatttccgaggcgctcgggtcggttgcaaactccacggtaatggaggcgtggcggaagcgacgtggggagggagattgcgaggaggcaatgggcggagcagcgaagtggggagggaggtcgcgggtagatacgaacgagcggaggcgtggcggaggcggcgtggggagggaggttagggatggtcgtctttttttctttttggcccttttggggaaagtttttcacaatgggatactgctggacaagagcgcttcaggacaatcactagcagatatatactaccgcggagctcatggaatcatcattgtatatggcatgaaagaccaaaaacgcgtcaataatgtgaagcaatggttaaacgagattggtcgatgcatgtcacaagttaacaagcttcttgttgggaacaagaatgatctagctgctaataaagttgtggcaactgagacaacaaattcgattagtatcgatgggcgtattggtcggtatcgtctggttgtggctccaacgacacacgctaccgatcggtcggttcagctaccgatcgaagacgcccttgctgatagcattgatcggatgattagagatcagctgcaaatatgtaagaacatagggacaggccccttggtgctctcccgacttgagagcaaggaacgacagtttatttccttcattcttagcacatgcagcttcactatttataaccactgttgggggccttcgtcctccgaaggtcctcaaaaacatgatttgacaatgttttccgagtggattatgtga

SEQ ID NO: 11838 - DNA, 753 bp, Zea mays
  Peptide Sequence Number=SeqID_53617
atggacaccaagccttttcttttgtgcctcctgcgcttctcgtgtgccggcggtgccgtcgcttgcctccccgcgtggaccgtcctaagagaagagacgctgccgtgtctccgtcgcaccgaagcaaacgcggggccaacggccaccaaggcctccgcgagggcgaggacagcgatgacccacgcgggacgcgcacgcggctttcgctccgcagctctcgacgactaccttttcaaacttctgcttattggtgattctggtgttgggaaatcatgcttgcttctcagatttgcagacgattcttatttggacagctatatcagcacaattggggttgatttcaaaattcgcacagtggagcaagatgggaagaccataaaacttcaaatttgggatactgctgggcaagagcgcttcaggacaatcactagcagctactaccgcggagctcatggaatcattattgtatatgacgtgacagaccaagaaagcttcaataatgtgaagcaatggttgaacgagatagaccgttatgcaagtgataatgttaacaagctccttgttgggaacaagagtgaccttactgccaacaaagttgtggcaactgagacagcaaaggcgtttgctgatgagatgggcatcccattcatggagacgagtgccaaaaacgccatcaacgtggagcaggccttcatggctatggctgcatccatcaaggataggtacagccaatgtgccaagtggcaaatgtga

SEQ ID NO: 11839 - DNA, 467 bp, Zea mays
  Peptide Sequence Number=SeqID_53618
gactctcgcccctacaacagatcacggaccgtccgcgccttcgcggaccgtcgacaccagaggggccacctgtcagtctccctcacagttgccgagaatccagatccggtagcagcagcagcaggtttgagcctgcaagacgacgaccagacccatgatgccaagtctcccaaggagacctggactggaggaggaggacctacctacccggcctccagctctctcgtctcttcctcctcctcctcgaagctccgatccgatcccccaatgtctgacagcagtccagctcccggcgcctactactccggccctcccgccgcgccgccgcccgagtctaagcccgttgacggcggccaggtcaacgccgatgttcctggctactactcctccgtccctgctgcgaaatctggcgccggcggccagggcagctccgctgctcctaaggaatcgggcttcttcgccagctg

SEQ ID NO: 11840 - DNA, 1439 bp, Zea mays
  Peptide Sequence Number=SeqID_53619
atggcttggcaccttgatatccttgtcatggtcactacttgtttgatttttttctcaataagcgagcaatcttcacagagcgagctgctgcagcagctcaggaagcagctggagtaccctaggcagctggaggcttggggcagcccaagcagcgatccctgctacactcaacccactgcagtgcttgcggtcacgtgtgaggaaaatgccatcagagagcttaagataatcggtgacaggatcaccaaaccgccaaagttcagtggcttttctgttcctaatgtcaccctctcagaagcctttgttttggattcgtttgttactacgctggcaaggctaactaccctaagagttgtcatcctggtgtctttgggcctatggggtcccctcccagataagatccaccgtttatcttcactggaagtgcttgatttgagctccaattttctctatggatcgatccctcccaagctgtcagtcatgtcgaagctccatactgtgacactggatggtaactacttcaatggaagtgtgccagactggcttgactcattctcgaacctcactgttcttcggttgcagagtaaccagctgaaggggtccataccggcatcgattggcaaagctgccatgcttacggagctcgcgcttgccggcaatagcatctcgggggatgttccaaatttagtcaacctaaataagcttgagatgctggatttaagggacaacaagttggatggagagcttcctgagatgcctacatcagtggtaacaatcttacttagtaaaaattcactaaagggtgaaattcctgagcagtttggtcagttgaaccggcttcagcaccttgatgtctcgttcaacttccttgtggggagtcctcccgcagagctgtttgctctccctaacatcagttatctgaatttggcggcaaatatgcttagtggttcattgttaagtagtttaacatgcagcagcaccctgggatttgtggatttgtccactaaccgactcacaggcgatctgcccagctgtctgaacggtaatttgaataacaaggtcgttaagtttgatgggaattgctttagagttgaccctgcccaccagcatgaagataaatattgccaacaatctcataatgggagaggatcaaaaaaggatgttggacttgtagtcactgttgttggcatattgtttgttattcttgtgctttctctgttgttaatggcttccaacaaaagaagctgtcagaaagttctggccgaacaacagatccagcaaaagcatacacaagataatttgttgtcaggaatgtcgtctgaactgctggtgaatgcaaggtgcatatctcaagctgtcaagttaggaacacaaatacaaccgtcatatcacatattttctttagaagaactcaaggaagcaacaaagagctttgaaag

SEQ ID NO: 11841 - DNA, 390 bp, Zea mays
  Peptide Sequence Number=SeqID_53620
atgatctgctcccattctccagtgaaacaacgatcaagcattggtgatcctgagatcgagctcttcaagttctacaaggttgaacaccctgagcatctgtttggtgaaggcaagctagagctgtctcctgagtacttctccgtaaggatctgttcgttggattaccacccgggaaaacagtgcaaccatgagggtgggatcaaggtacggcgttgttcccacagctgtttcctgagggcggagagtatagtctcggaaagggaatcacatcttatgggtaaaatggttcgagatactatggttccatttatggatttggttttagttgatgatgatggttatattaatgatgtttctaactatggattttggtattttctctatgaggag

SEQ ID NO: 11842 - DNA, 486 bp, Zea mays
  Peptide Sequence Number=SeqID_53621
atggggtttcgtcgcgatgacacttgggaggtcgcagccatgcaagttctcaccactttatgtgggcaccatttgatggagatggcgattcaccttgtaggactgttccctgtggaaaggagagatgatcccatgtggctcgattgtttggaccacatggaggaaatatgtctcatttgccccaaggtcgtgcggagtcaagcaaaagtgcagctaaccgcccttgccctgaccttccgccacaccctcagcgatagggaagggtatgtcgtcgacgtatctgctgagctagtggagaaggacatgcaaattgagcagatgggtacccaaatccaccagctccaagaggaggtgcatgagcggggtatcaccattgagattttggagaaccaactccatgatctccagatagagcttgatgatgcaaatgagcatatagagacgcaccatgagcatcaggcttccatagacgcgcagatggagtag

SEQ ID NO: 11843 - DNA, 375 bp, Zea mays
  Peptide Sequence Number=SeqID_53622
atggctggtgcagaatatgttctctttttcaatacgtatgatgaatcgaaagggattgatatgttgtgcgactccgtatccctaaaacgcgcggccgacacattctctctcctctccgtatccggctccgtttccagcaacactccccatcccactccgcatgcagtctatgacacctggggcccgccagcaggcgcgcgcgcccgcgagagagctgcggagaggagagagaaagcgtggaaatggggagtctgggtacacgccgtgcgttttacggagccggatacggagcctgctggacagatgaatagtgtgctagactccgcaaaatacggatccggagccgcatgcggagtgctgctggagttggtctaa

SEQ ID NO: 11844 - DNA, 114 bp, Zea mays
  Peptide Sequence Number=SeqID_53623
atggggaagacaagcttcttcgagcctgacgatgaagcttcagggcttgccatgctcttcgtcgtggccatgaatttaccagaggatgagattaataaaatggagaaggtgtaa

SEQ ID NO: 11845 - DNA, 966 bp, Zea mays
  Peptide Sequence Number=SeqID_53624
atggaggaagacgatgagttcggcgacctctacacggacatcctcatccccactcataccccccaatccacctccgcgctatccaaccctgttctagtcgaaaccctacaccgcccgcctccacaccctaatcctacccctgtggcggtggcagcagaggaggtcgacgatgactggctcctaggagggagcgaatccatacctagggtcgacccgaccggcgattggaccgacgaggacgacgatggaggggagcccgcacctcccgcaaagcggtccatctctgcggatgatatcaatccgctcatgggggtggtgcgggggattccgggccggttgggctctcgtcatcatcggcagatggtgcggccgggagcgacgagggcttgcacgagatctgggggcgagggcacgacagatatccatgcgcgggcgtgggagggagcggtgggaatgagcggagcggaggatgtcgcgggaggcagaaccgtggagattggactctgtgctaccatcatccacgctagggacatcgaccacctgcttgactacagccccgtgctcgagaagttcgtcagcatcgccatcatctacttcaccaaccctgtccagaatttcggattcgcaactacatcctctacagatagggacgggtacgggaggttgagggcggtggaggtggccgtgaggaggtgccggagggaggccgccaccgtggaggtagaggtggtggtggcgcgacagaagagatgcgcaaggaaggcggctgccatggtggtggtggtggtcgtcggtggtggagaggtgtggagaggagattggagcaccacggtgtcgaagaaggcgtgggttgcagaaacggaggcggacggtgtagattcagcgaagcggactgacggtgtagatttaccaaaggtagaaccagagaggcagcctaccacttacagccttaatagagtagtatag

SEQ ID NO: 11846 - DNA, 471 bp, Zea mays
  Peptide Sequence Number=SeqID_53625
atggcagccgccttccttgcgcatctcttctgtcgcgccaccaccacctctacctccacggtggcggcctccctccggcacctcctcacggccacctccaccgccctcaacctcccggttggtgaagtagatgatggcgatgctgacgaacttctcgagcacggggctgtagtcaagcaggtggtcgatgtccctagcgtggatgatggtagcacagagtccaatctcctagaggcaggggaacatggcggcgcagccccgcgagagcgcgacggtgtctggaaagcaccagaagtcgaggtagagggtgcagagggaggcaaggtggaggacgtctacgaggaggcgaggttgacggaggtcgttgagactgaatcccctaacggtgataatggagacgttactggagaaagagagttagcacctatcaagctttcaggttgtggcattcccctagctcttcaatcataa

SEQ ID NO: 11847 - DNA, 135 bp, Zea mays
  Peptide Sequence Number=SeqID_53626
atggacagtgcaaacaggattaatgagaggtgcttggaactgcagaagaacaagaagagtaccaaaactaagcttgaggatgataaacgaaaggcatatgagagtgaagtatctccagagatttcctcacaatag

SEQ ID NO: 11848 - DNA, 399 bp, Zea mays
  Peptide Sequence Number=SeqID_53627
atgaataagaagaaagaagagtccagtccagttggagttggagacgagtgcttctctgtccaacctcgactcggagtggaatgcgcgtccgaagaaacctcatgcctccgcctgcaaggccggcggtcgaacggcggcgcggcggcgcggagcaagcaggaggaggaggggggcgcgaaggtggtgcggtaccgcgagtgccagcgcaaccacgcggcgtccctgggcgggcacgccgtggacgggtgccgcgagttcatggcggcgggcgcggacggcacggcggcggcgctcgcgtgcgccgcctgcgggtgccaccgcagcttccacaggcgcgaggtggagcagcagcccgccgccgactgctgcgactgctcctccaccacctccggcgcctga

SEQ ID NO: 11849 - DNA, 840 bp, Zea mays
  Peptide Sequence Number=SeqID_53628
atgacgacggcgataaagaaggggccatggatgccggaggaggacctcgtcctcgtctcctacatccacgagcacggccccagcaagtggcgccacgtggccgcgagcacggggctcatgcgctgcagcaagagctgccgcctccgctggaccaactacctccgcccgggcatccggcgcggccacttcacggcgcgcgaggagcgcgtcatcgtccacctccactccctgctgggcaaccggtgggcggccatcgcgtcgcatctcccccagcgcaccgacaacgacatcaagaactactggaacacccacctcaagaagaagaaggtcgtcgtcgaggaacagcagcgagcggctgcagcagcagccaaacgacacgtcgacgacggcggcatcaccaccagtcgtagtccccgcctgctcgccaaggacgatagctatggctacgactacgacgcgcgcccagctgcagcctatccctgtaccatggacaacgtatccaagcctctcaaagtcaaattaggttgcatgaagagcgcatcgtcatcatccccgccggcgcaggatggtagtagtagtatccgtcgtcctttcttttcactcgaccaaacgtccggcagtacggcgccgctgccacccatctccaacgttgtgccgcagccggtgttggcgggacagggacgacacggcgggcgtttcttccacgagccgccccagcagcagctgtcctcaataatggagaactggttattcctccccaagcagcagcaccagcagcagatgacggcgagctctccgactccgacggctgctgctcactgtccatgctgttttagctaa

SEQ ID NO: 11850 - DNA, 1455 bp, Zea mays
  Peptide Sequence Number=SeqID_53629
atggcgccccgcggccgcaccctcctcccgctcgccgcggccaccgtcctcgtcgcttccaccatcttcctcttcgccgccgccggtgcgcgctggcggcccgccgacaccgacctccccgtcccgccacacgccttccccacggccgtccccgcggccgtgaccgcttcttcttactccaacgccaccgccggcaaggagctctcctttctcgacgagaacggccgccccgatgacccctcctccgcctcagcatccagctccacctccggcgccaccccggccgctggtgtcgtcagatgtgacccccgcgacgccgtcagggtattcatgtacgacatgccgcccgagttccacttcggcctcctcggctggtcgccgccgtcccctgactccgtctggccagacgtcaccgccgcctccccgccgccgcgctaccccggggggctcaaccagcagcacagcgtggagtactggctcacgctcgacctcctctcctcctcgcccccctgcggccgtcactccgcagtgcgggtctccgattcccgcgatgccgacctcgtcttcgtccccttcttcgcgtccctcagctacaatcgccactaccggcccgtgccgcccgagaaggtcagcagggacagggtcctccaggagaagctggtgcggtacctcgcggcgcggccggagtggaggaggtacggtggtgccgaccacgtcatcgtcgcgcaccaccccaacagcttgctgcacgcccgggcggtgctgcaccccgccgtgttcgtgctgtcagacttcgggaggtaccctccgagggtagctagcttggagaaggatgtcattgcgccctacaagcacatggctaagacgtacgccaatgactcggccgggttcgatgaccggccgaccctgttatacttccgtggagcaatttacaggaaggagggagggagcattcgacaggagctatattatatgctcaaagaagaaaaggatgtttacttttcctttggaagtgtccaggaccatggggccagcaaagctagccaaggaatgcactcatcaaaattttgcctaaatattgctggggacaccccttcttccaatcgtctgtttgatgcgatagttacccactgtgtccctgttatcatcagtgacgacattgagctaccttatgaggatgtgttggattattcaaaattctccatctttgtccgttcgtctgatgctgttaagaaaggttacctgatgagactgctcagtggtgtaagcaagcaacaatggacaaagatgtgggataggctcaaagaggtggataaacattttgagtatcagtatccatcacagaaggatgatgcagtccagatgatctggcaagcattgtctagaaaggtgccatcaattaagctgaaggttcacagatctaatagattttcaagatctaacagaggaaaataa

SEQ ID NO: 11851 - DNA, 1902 bp, Zea mays
  Peptide Sequence Number=SeqID_53630
atgctggagctggaagaaggcccaggaaggactccgtccgggtacggcggcggcgttgggcgcgatgcaaaaggcgaaagaagcgaagaagataaggagggaccaagaccaacccagtgcaccacacaaggcattgtcagcggcggcggcggcggcgggccggcggagactcccaggccaggagcagtctgccgattggaaggggagatgaaggccacgctcaagggccgctacgagggcgacaaggccacggccgccaccaccctcgccgcccccgccggcgacctccgcctcaaggcctccgccaccgaggccgccttcaccaacggtccttccctgcgaggcctcaccctcaccctcgagaagcccggcgccttcctcgttgacctcaagccccacaaccaggatgtgcgctttcagttcatgaactccgcgctcgtgctcgacaagcgcgtcagcctcacctacactcactccactagcctcgccgcggcccccgccgccgcgccgccctcccgcaccgcgctcgactgcaccgtcactttcgaccccgccaacaaggtcagcctctcccactcgctaggctccggcggctgccgcctcaagtacacctacgcgcacggggtcgaccgcctcaccaccatcgagcccctcttcgacaccaacaagaacgcatgggagttcgccatcaccaggaagttcgccggaggggacgccgtcaagggcacctaccaggcctccaccaagctgctcggcctcgagtggagcagggactctctcgccggcggctcctttcaagaccggcggccggctgcggctgcgacggaagaaaagtcactcactcacggtcacggatggacgaccatctccagttccagttccaacaccaccaactcccatatggacgccaagccgcgcaacctgggcggctcgctgccgacgccaacggcgacgcgggcctcctcggtgccggtagttgacctcgcgaggctcctggacccgtcgtcgcacggagacgaggagtccgccaaactgaaggcggcctgcgaggagtggggcttcttccaggtgatcaaccacggggtgcccgacgcggtggtcgcggacgtgaaggcagacctgcaggccttcttccgcctcccgctcgccgacaagcgcgcggtggcgcaggagcccggcgggatcgaggggtacgggcaggccttcgtggtctccgaggaccagaagctggactgggccgacatgcttttcctgtccacgcagccgcccgagtaccgggccccgcgcttctggccggcgcgcccggccacgttcggggactcgctggcgcgctactctgccgaggtgcagcgcgtggccgcccgcctgctggcgtccatggccgcgaacctgggcgtggcggacgccgcgaggctggccagggtcgccgacgcgcaggccgtgcgcgtcaactactacccggcgtgcccgcacggcaggggcagggtgctgggcctgtcgccgcactcggacgccgccggcctcacgctgctgctccaggtcagcgccgtcccggggctgcagatcaggaggcgcggcgcgtggatcagcgtcgaccccatccccggagcgctggtggccaacgtcggcgacgtcgtcgaggtgctcaccaacggcaggtacaagagcatcgagcaccgggcgctggttagccccacccaccaccgggtgtccgtcgcagccttccactccgccaggttcggcgacacttacgcgccgcttgaggagacgattgtcgatggtgatgagccagcgaggtacaggagcattggcgtcgaggactacgtccgcctggtgctgtctagtaagctccaaggaaagaacataatggacgccatgaagatcaatccggtcactgaatga

SEQ ID NO: 11852 - DNA, 1293 bp, Zea mays
  Peptide Sequence Number=SeqID_53631
atgtcctctgcctctggaggttcgggggcgccatcgaggccccggaagcagagcaccgtcggcatcctcgccttcgaggtcgccagcctcatgtccaagcttctccagctgtggcgagccgtgggtgacgctgccgtcgcacgcctcccgccacgagaccatgaacctccacggcgtcccgcaagatggtctccgaacgacgacgactttccttgtcggcctcgcccgcgccgagctcgtggacacgctcagggccgcatccgactccgtgaccgcgctcgccgcgcggtgcgcggaccccagcctccgcgacttcagggacgccttcctggagctggccgacacccggccgcgaccggcaccgctgggacggcgcccagctggaaggagatggacgcgagggcgagcaggatggggaagcaggtggccaccaccgccgcgctccggagggccatggaggagctggccgaggccgagcacggcctccggaagcttgtcgtcctccagtgcgccgccaacagcctttcggcgagcaagatctcggcggcgtcggagcagcagcaggtggtcttctccaagaggcaggaggtgaagcacctgaagcagacgtccctctggggctccaccttcgacgctgtcgtcgcgtcgctggcacgggcggcgttcaccaccctcgcgcgcatcaaggccgtcttcggcgccggccgggagcagcgccacccgccgctgtaccgcagcctgacactctcctcggcggtgcacccgtcaggcgacgcgcggtccccgccgtcgcgcaagtccatgtcaatggaggaggtgctgctgttcgacgtggacaaccagccgtcgttcgctccgaaacggcaggtgcggggcggcgggttcctggaggacagctcggcggcactgacgcccccggcggggacgctgggcgcggcggcgctgtcgccgcgctacgccgggctgctccgggcgcggctgcgcggcgcggtgcccgcggcggacccggggctcgcagggcagtggtgcgcggcgctggctgggatcctggagtggctggcgccgatggcgcacgcgacggtgcggtggcaggcggagcgcagcctggagcagcggggcgggagcggcaacggcagcgtgctgctgctgcagacactgcagttcgcggagcgcgacaaggtggacgcggcggtggtggagctcctggtggggctcaactacgtgtggcggttcgagaaggagatgagctgccgtgctatgctcgcctcgcccgcccgcccgcccgtccgatga

SEQ ID NO: 11853 - DNA, 606 bp, Zea mays
  Peptide Sequence Number=SeqID_53632
atatacttcaagaggaagaagacgggtgggatttctttcaataccactgttcctttgactcatattgatgagaagctgtgctatcagattctgcacgagtacaaaattcacaatgctgaggtgggtggacttgcttttggccgggtgttattccgtgaagatgctactgtggatgatctcattgacgttatcgaagggaaccgaaagtacataaagtgcgtctacctgaacttggacagactacttgcgagaatgtgggaggagatgggcctagtgagggtgtatacaaagccacagggccagcagcctgatttcacagaccccgttgttctttccaccgacagaggtggctgcacggtggaggacttctgcaatcatatccatagaagtttgctcaaggacgtgaagtatgtgctcgtatggggaaccagcgcaaggcactatccacagcattgcggcctcggccatggccttaacgacgaggatgtcgtccagatagtaaagaagaaggaaaaggaggagggtgggcgaggccggttcaagtcgcacacgaacgcacctgaccggatatctgatagggtgaagaaagccccactgaagacataa

SEQ ID NO: 11854 - DNA, 354 bp, Zea mays
  Peptide Sequence Number=SeqID_53633
atggctcttttggatattgatcccttggctttgggacatccctcgccccttgggcctttaagacacaaagggctctcagggccatcaggggttcttgggtgcgttgcgctgtccaaggcccttaatgaggccctgtccaaaggtgtcagggttgttggtccgtctaaggctgatgtggctaccgtggaattatctgtgaccatgcgatatgggaccattgcttcgggacccgctccctgcttggagacaagtctggtgctgccacgtgtctcagaagagaagatgctcagggactactaccatgggtctgcatacccccacgtgtaccgtcaggaccccatgggcaggtcctga

SEQ ID NO: 11855 - DNA, 3972 bp, Zea mays
  Peptide Sequence Number=SeqID_53634
atgttcaagcttcaccgccaccgctcctccgaccgcgtcggcgagcgcttcgacttcagattctccaacttccgcgccgtccaggtccccgccatttcagacaggctcttcctttccatagtctccgtagacaatggaaaaacaattgcaaagtccactaaagtagcttctcgtagtggaatatgccagtggcccgacaccatcttggaacccatatggttctccaaggaccaagtctccaaagaatttcaagagtgccagtacaggattattgtttccctgggatcggcaaaatctggcattcttggggagattcttctaaatctctctaattttctgaatttggccgatccaaccgctatctctttgccactgaagagatgcaactctggaacagttttgcagcttaaggttcaatgtcttggcacaaaatctaagctgagtggtgtcagatcattgagggacatggctcctcgtcttgatgaccgtagtccaacgccaaccaatgacgagctggacaacaggtcagattgctctgatggtatgttcaacaagggtgttcattcttcatctgaaaatcatctgggtggaacttatcaagatgaatctggaaacatggaaacaggtttctcagcatcagggtcccatcggagttctaattctggagatagtactgcagatagaacaaacttctctcctagagtcaactctaatggagggctttttgtgggaaggcaggattctgctagttcctatgctagttatgttagtgccggcggtggtgatgatgggcttagatccaacaattcatcttttagttctcggacttcaggcccaaatttgctgcaagggagtactccaaaaacattttcgaatgacctttctcagttatctatgggggcgtctgactcatccaaagattttcttgaagctgctgaagaaacaattgaggagctccgtgacgaggcaaaaatgtgggaacgccactctcgcaagttgaaggctgatctagagatgctgaaaaaggagtgttctgaaaaatcaaagcaacatgctgaactagcagttgagctgtctgctgcacaagctgaacgggattcatataggcatgaaatagaagaattaaagtcatccttacaagatgtaaacacacgacagacaattacaggaacacctaaacgttcagactggatagacctgcagaaggaacttgaaggtgaggtgaagtttcttaaagaatcgaatacagacttaaccatacaactaaacaggactcaagagtcaaatatagagcttctttctattcttcaggaactggaggaaaccattgaagaacagagagttgaaatatctaagatttcaaaggtcaagcagactgcttatcctgagaatgggctgttagtaaaaaaagacagagagtgggctaagaaactgtcaatgaaagaggatgaaatcacaattccgagggagaaatcggatcgtgctctcaacattggaaatgcagatggtgcagcttccaatgccatttatcttgatttggagaaagaaaatgaaattttaagggctaaaatacaagagcttgagaaggactgctctgaactaacagatgaaaatttggagcttatatataagctgaaagaaaatggtctgacaaaaggtcagatgagatacagagaaaatgtgctgacccttgagctgaaggtgctaaattttaggtctcaaacctgtgagctagaagaaaagttccgaaaatgccaagaggagctggaacaaagaaatcttgagttatctgcgctgagaagaaagataaatggtttacattctaatgaactggaagtttgtgaatctggtgcgacatggaagtaccaagctagaatagcagatctagaggatactgaacctgagacagatacacttaaggctaggtttgaactgcagctacaggaaaatgatgaccttcgtcgttccaaggttgagatgcagaattttatttctgagtttcaggcagagaagagtcagcttgaggaacgcctgtccgcgtcgcttaaagaaagcagcatcacatctaaatgtctggatgaagtgcggaaagatatccttgtgctttccagcagtatagattcccatgtttcaaccaataaacttcttgagaggaacttagttgagctagagagctgcaaagctgaactagagttgcatgtatcggagctggaacaggaaaacatcgagttgtcagaacggatatctggacttgaaacacaactgacttacgtgacaaatgaaaaggagtcaagcgagctgcagttgcatgactccagatctctcatcatcaatctcaaagataaagtagagtgtcagcaatcagagatggaaactcaaaggctccagtttaagcagaaacaacaagaatctcaaagaagattgtgcgaagcacaagatgattctgaagttctgagaagatctaattgtaaactacaatctacggttgagagtcttattgaagagtgcagttctcttcagaatctaattgctgatctgaaaaggcagaagttggaattacatggtcatcttacgcaaaaagagcaggaattggatgagtcgaaaaaaaagaactttgagtttagcaaaacagtggagttccttgaggcaaaacttttgtcactacagaaggacatttcttctaaagaacaatctttattgtcagaattggagaatattttccaggagcacatggaacaagaagaaagaattaatcgcgcacatttcatgctcaataagatcgagaaagaaaagactcttgaagtagagaatcttgaaagggaggtcgtcagcctcgctgcacaggtctcctccacacacgaggagcgagaaagtgccactctgaatgctattcaagaggtatctgtcctgcgagcagacaatgctaaacttgaggctaatctccaagatgttagtgaacagctgagatgttacgagtctcaattggaagaccttcgtaaggagtctaaaagtaaaattaaaggattggttgattcccttaatgcctccaaacaaagcgaggaaatgttgacatcagatgctgaacatatgaaaaagttgatggaagctgctaaatccaatgaagatgcactaaggaagacttctaacgaactagaactgaagcttaaatccagtgattatgtgaaacaacaaatgctggaagaaatatctggcctgaaacttcaggttcagaaaataatgaatcttcaagatgaggtttccaaacttcagagttctcttgatgaggccaagttcgaaaaagggaaacttgaggagtttgtgcgctcggtgactgaggaatgtcaagaactaaaagcacagaaggctatgctaacagataaagtttcttatatgcaggagaccttgagaaatggtgaagaagaaaaccgaaacagaatagctatgcatgcaaagctcatgaggttggagagtgatctaacagcattagaagcatcacatgtacatgaagcagaattaaagaacgaactcagtaggatcaagagatcaaacagtgagtatcagaggaagatacaatctctcgggcaggaaaatgaggatctcactaggcgagttcaaattatggaaaagggttttgagcgaatgtcccacgctaaagagaaccttggaaagcaggagattggaggagataaccaggaagccatccagtcaacaattcagttactggaaattaagcttgcagaggcattggaggaaaataagatatacagagctcaacagaagagttcgatgtctgaggggcaacctgctggtggagatggcaaggagggcaataccgacaggattttgcagttggaaggagagctgagagatatgaaggaacgattactcaacatgagcttgcagtacgcagaggtagaggctcagagggaacggtgggcatcatcaagccgtgctatgctccagcaccagtga

SEQ ID NO: 11856 - DNA, 1287 bp, Zea mays
  Peptide Sequence Number=SeqID_53635
atgggagatcccaggccgaggagaagcccagcagcccccactctcgccgacaagctgcggaagcactccacgtggctcctcctcctgctctggttcgccgtctccctcgccctcttcctctccgccacgccgcccgcagctgctccgctccgccgctcctccttcctccgctccaagccccgcgccctcgccgccaccggcgcagccgcggcgccccccgtccgcatctacgtctacgacctccccgcccgcttcaaccgcgactgggcggtcgccgacgcgcggtgcgcgcgccacctcttcgcggccgaggtagcggtgcatgaagcgctgctcgcctacaccggccgcgccgcgcggcccgaggacgccgacctcttcttcgtccccgtctacgtctcctgcaacttctccacgcccaacggcttcccctcgctgtcgcacgcccggggcatgctcgccgacgccgtcgacctcgtccaggccgggatgccgtattggaatcgctccgccggggccgaccacgtcttcgtcgcctcccacgacttcggcgcctgcttccatcccatggaggatgtagccatcgccgatggtataccggagttcctgaagaggtccatcctgctacagacatttggtgtacagggccatcacacatgtcaggaggtggagcatgtcgtgatcccacctcatgtgccgccggaggtggagcatgaactaccagagccagagaaggctcaaagagacatatttgccttctttcgaggcaaaatggaggtgcaccccaagaatattagtggccgcttctacagcaagaaggtgaggactgagcttctacaacattatggtcgcaaccgcaagttctaccttaagagaaagcggttcgacaactaccgatcagagatggctcggtcattgttctgtctatgtccgctgggatgggcgccttggagtcctcggctcgtggagtcagtcctcctaggctgcattcctgttataattgctgataacatacgtatgccgttcccttcagtcctccagtggccggagatctcattgcaggtggctgagaaggacgtagccaaccttgaggtggtgcttgaccatgttgtggcaaccaatttgagtgtgatacagaagaatctgtgggatccagtgaagcgaaaggctctggttttcaaccgtcccatggaagtgggagatgctacatggcaagtgttgagggagcttgaggttttgctggaccagtctcaaaggaggagatacggtggatcctggagggcgtga

SEQ ID NO: 11857 - DNA, 165 bp, Zea mays
  Peptide Sequence Number=SeqID_53636
atgacacccgcagccgccggcaccgtgtgcctcctcacttggaccacacagtggacttctatccgtgcctccataccactagatttgagatcgagcgaagctaagcttttcatcaagatggcgcttgttgttatctatggatctctctaccccatacttccatag

SEQ ID NO: 11858 - DNA, 1815 bp, Zea mays
  Peptide Sequence Number=SeqID_53637
atggcggcggcggcgactattctattgctcgctcgctcgcttgcccgtggggccggccggtgcgtgggccagctggcatttaatcttgatgtgcccatccgtatggacgaggaggacgacgaagacgactggacacgactgaatcgtgtgatagctaggctccgccactgggattcggtcgcggtcgtggaaagtcctcgtcctcctccgccgccgccgcaggccaaggaggagaagaggtccgacgccaccaagccagagatcgccgcatcgatggtaggaagcgctctcccaatagtcttcgaaagctttccgtcgacgcaaagagaagcggcggcggcgggcgtcaaacaggaggagcgcaggctggaggcggccagggcggagatgggcgaggtgagggaggagaacgagcgcctcaagtcgatgctgtcccgcatcgtcggccagtaccagtccctgcagacgcacttcctcgacgtcgtcaaggtgcgcgagctggcatcatcgtcagccaaggcggcggcagagaacaagatccccgcggcgccggctctgctgcccggcaccgacgacggcgacgaaccctacgacgacctcgtctccctgagcctcggcacgagggcgaatagcagcggcggcggccctcgccgcaaggggcacgacgacaggtcggcgtcctcgtctggcaccgctgacgagatgcccaataccgccgacgacgaacgccgccaccagatctccctcggtctcggcttcgcgcgcgggcttccgccatcgggcacggcggcggccgcggacgacgacaaggccagccacgacgcgtccacggcgccggtcctgaacctgagctccgacagcagcggcagcgccggggacaccgacaccacgaagcctgccctggccgccgcgggcgccgcccgtaagagcccgagtgccggtgccggagacgggtcagctgacgacgaggtgcagcagcaggccaagaaggctagggtttccgtcagggtcaagtgtgacactcccacgatgcccgatggctgccaatggcggaagtacgggcagaagatctccaaggggaacccgtgcccgcgcgcctactaccgctgcacggtggcgccgcactgcccggtgaggaagcaggtgcagcggtgcgcggaggacacgtcggtcctgatcaccacgtacgattgcgcgcacaaccacccgctcccgccggcggcgacggccatggcgtccacgacctccgcggcggtggccatgctcacctatggatccaccacctccgccgcctcggcctcgctcgtccacggccaccaataccactcgctggcggccgccgccgggcttctcggccccaccaccatggtctccaccgccgcgtcctgccccaccatcacgctcgacctcacctcccccgccgcgccgcactccctcgtgcactcctccttgccctacgccgccgccgccgccgcagcagcagcggggttcgagtccaaggcggtccccgcggcgtggagcagcgggtacctggcgtacggcggcgcccacccgtcctacgacaccaagatctcgtcggcgttggggcacctgttcggtggaagcctgggcgtgccatcgagaccggaacagctgtacgcccagtcgtacctgcagagagctaatagcctgggcgacggccatggtgcggtggcgcccgccgtcacggacacgctcgcgaaggcgatcacgtcggatccgagcttccagtcggtgctggcagcggcgatcacgtccgtcatggggcgcggcggagccgctgctacccagaagtga

SEQ ID NO: 11859 - DNA, 681 bp, Zea mays
  Peptide Sequence Number=SeqID_53638
atggccgatgactacttccagttcggattcgacggccaggagatggtgggcgctcccgctcccgcctgcggcggctacgactgctcggcgccggtgttcgccaacagttcttcagacgccgccgccgccgtcggcaatggcatgagcctgctgagctatggcgtcgacggcgacggcgacgggaggaggccgatgagcggaccaccatatggcaccggtgggaacggcggcggccggccgccgtcgtcgtcacggattgggttccggacgcggtcggaggtggacgtgctggacgatggcttcaagtggcgcaagtacggcaaaaagacggtcaagagcagccccaacccgaggaactactaccggtgctcggcggagggctgcggcgttaagaagcgcgtggagcgggacagcgacgacccgcgctacgtcgtcaccacctacgacggcgtccacaaccacgccgcgctgggcccgggcgccgcctcctacctgtgccaaccaccgcctccgcgcggcgcaaccgcaaccgcaaccgtaacgcccttctcgcctccacgctcggcctcggcgccggcgcccctggctgcagcgcccagctggagcgccgcctgtgacgcgtgggaggcgcagctgcacgccgcggcggcggctgctcactcgtcggagtcgtcgtactga

SEQ ID NO: 11860 - DNA, 492 bp, Zea mays
  Peptide Sequence Number=SeqID_53639
atggtgcagagggtcgtcttcttcgcagcagacctagatctcgctttccaggagagactccgtcagggaggagagatcatagggtgtcttggcgtcggcaggccacccaagatgcctctagttgacgtagagcctaagagaggaattaatggaattaggaggcaggcggcataccatgcaaaagcggtaccggttttgcgtatgcgtatttggaatgtccggtccaggcgggcaatggtccgtcgtgatgccagactatctgatggtaagtctggactgtccgattgtgttcgctactattgggacgccacgtggtggtcctggtgcagccttggactgcccgacagggaaagctggatggtccgcgtaagggccagactattcgggcaaaagctcggacggtccaaccgtgtccagggcgtcaatctaccaagcatggacgacggtggtggtatttgccctggatatgagttcattggcataccatattga

SEQ ID NO: 11861 - DNA, 435 bp, Zea mays
  Peptide Sequence Number=SeqID_53640
atgggagcgccgaatgaggaggtccaggtccagcccagcccagccacgcccacggaggcactccccttgcctgccggtgccggcaatgcgatgcgaggtccacgaactgtggaggacgacgaggacgaggacgacgggctcatcctcatcatcatgcgcttccatcgagccgataacggaatcatggctcgctcgaccagtgccccgggaggcacagactcggtctggggttcacagaaggaaacagtacatttggaacggacattctgcaatagacagttctctcagatttgtagctttccacttactctcgggaaagcaagcaacagaagaaaagggactataatacagaccgatctgggcctttcccattggctcccacgtgtaaaagggaggaacaagaacccatcaggaaaaaaaagggcggttgattga

SEQ ID NO: 11862 - DNA, 315 bp, Zea mays
  Peptide Sequence Number=SeqID_53641
atggccacaatcttcgtcattaggggagggtgcgcttggtcgtcaagcgcgacagagagcttgaccctgatgaggaggaagcaggtgtgcttggtggtcattggcgctgtggatggggtcgtcgcagttggggcacaagatggcgtggagaggagaggagccagacttgggagacctcgccctgcgtgttctcttgtcttctcccttgattttcgtgaggcttcagaagaagaggaaactccttcagattaccaggtcacctctcctaggacctttatcacaatgctcgtggttcatgcttgttccattttctaa

SEQ ID NO: 11863 - DNA, 192 bp, Zea mays
  Peptide Sequence Number=SeqID_53642
atggcggagaacccgcagctgtttgggaatgggatgccggtgccgttctacagtgagatgttcgtcctcgcccgggatggcgtcgagttccacgtcgacaagatcccatcaaacaaatacaatggatcgaaggggactggtgtcggcccaacattgaggatggtgcgggaatacgggatggccacgctatag

SEQ ID NO: 11864 - DNA, 258 bp, Zea mays
  Peptide Sequence Number=SeqID_53643
atgggcgcctccacgacgggggatcatgagcaggaggttggggacgagctgacaggtggggtcggcgggacagagaggaacggcgcgcttgcgagaggaacggggccgacaaacctggcccatgggacagtttttcaattcaaattcaaatcaagttttaaattcaaaccaaatcaaacctgtgcaacaattcaaagaatatttggaactcaacatgatgcaacattccatgactcatctgttttgtcaaaaacataa

SEQ ID NO: 11865 - DNA, 459 bp, Zea mays
  Peptide Sequence Number=SeqID_53644
atgcgccctgcatcaccacagggcatcccggctgctggaagagaccctgacggagacgacgacaacgccggtggcagtttgagccacaacacagagctctcggaggagcaggagccgaccggggcagctaatggcctcgacctgaagtgttatccttgccgtttgaccggcagcgctggaggtgtgattatctcgctcgttggtgagggcaatcctaggctaaacaacatagtgaacctggtcgtcgtgctcaacaccgaggtggaccacgcccttgatgagttgggcaaggttcgggcggaggttgcagaattgcgtgctgagcgcacaacatgccactatcaagatggtggttctcctgccccttttgggattcagcacccttaccgctcaccgcctcgtggtcactttgattatggcacccatgactgtagaacccagatagatttggagccatag

SEQ ID NO: 11866 - DNA, 399 bp, Zea mays
  Peptide Sequence Number=SeqID_53645
atgtcgaagatgaagcaccccaacggcggcaattcttcctccctcggcctctctgtaccccagatggatcgtgattctctctctcctcacgctgatgtcttcatggctcccataccaggtgcccgtacaaggtggatgagggcacgaccggttttatataaggctggagcagggcggtgtcgaagattgaatcacaatcgattccaagcgcagtttgcggaacagaatccccaagcggactccaatgttcggcaaaacccacgtgatggcaacgggttgagagaagcaggtgcccagtgtgacaggcggccgaggaaggcagagttccatgcagaggttgttgcccagattcgatttcgcttggccgaaagctccgacctccacggattactgcgttga

SEQ ID NO: 11867 - DNA, 333 bp, Zea mays
  Peptide Sequence Number=SeqID_53646
atgacggtgaggtcgacggagccagggcgggtgcgagttatagcggttccgaggctgccggggttggccaaaaatgtcgaggagggctcggcgaacatgctggtggagtttcagccacgtgaccaggctcagagatgggagaatggcggaggcagagctctaggcgggtcggggcaattccgctcgaggtggcttggcgcggctcctggtgggtcggatggccggtacggcgagcacggaactctagcgaagcagagcgtgatagagggtgagcttgcacgaaatggggcagggagcgagtgcgggtgcaggcggtgctcaaaagggagctag

SEQ ID NO: 11868 - DNA, 261 bp, Zea mays
  Peptide Sequence Number=SeqID_53647
atgtcttccgggtgccgcggagactggtggccagcagagcggcgggtggagcgtcgccgtcgcccggtgccggcggggctaaagaaaaagaagaagaaggtggcggtggcgaggctcggcgcacgctgcggcgcggcgcgcctactacccacggcgatcaacgacctcctcgaggcgccgcgcatcggctccctccgcgggccggccggtgccgccgactgcttcggcacggttcgcgccggtcgtcgcgtcggcctctga

SEQ ID NO: 11869 - DNA, 279 bp, Zea mays
  Peptide Sequence Number=SeqID_53648
atgggccctgatgctatcccaattgaggtgtggagatacctcagggacatagctatactgctgcaactcaaccaccctcaaagcttcccgaagggaagggaggaccacaacctctcgggatcagtcctggctaaccacaaccatctcatgcggccgtactatgaagctatggagagagttatcgagcatagtctgagaggaataacgatgaactctttgaaccaatttggtttcatgcctaaaaggtcaattgtagaggcaagtgatgaagcagtatag

SEQ ID NO: 11870 - DNA, 984 bp, Zea mays
  Peptide Sequence Number=SeqID_53649
atgggtattgatagacaagatgtccgtattgtttgccacttcaacttgcctaagtcaatggaatccttctaccaggagtcaggtcgagctggtcgtgatcaacgaccttcaaggagtgttttgtattacggattagatgaccggaggagaatggaattcattttgagaaaccccaaaactaagaaatcacagccgtcttcctcttcaaatgagctttctgagaaggctctagctgacttcagtcagattattgactactgtgaaatttctagctgccggcggaaaaagatcattgagagctttggagagaaagtacaaccaactttatgccaacgctcatgcgatgcttgcaaacacccaaatttagtgttgtctcgtctggaggaactccgtcgtgtgcccaactgtcgctttaataagatctctccagtgtttcaaagctcagttaaagaagcacacttggacacagaattctggaatcgtgaagatgaggcgagcttatcagctgaagacatatctgattctgatgatgggaatgaggtagtgagtaatatagccatttcaaaggttccggcaaaagctggtctggatgcaaaatttaaagcactggagcgtgctgaaaatgcttattaccaaggcaaagataaatggttaaatgggagtgctatccatgatattgcaccagccattgcctgtatggttggccgtagagccatctccaccagaactgtagctcaggcgcttgataactggcagtgggttagtgatattgagagccctctttctctgattggtctgcaacagtatttgaagttatgggatgctttgagggggttttgccaggcagttttggtatcatattttgtcgctcaagggctgggtgatctcaatcctgagaatgataaaagctcctttgttgtatggtggggaaaggctcttaaaaagtgcacaggagcaggagaaaagacttcaataacatcataa

SEQ ID NO: 11871 - DNA, 291 bp, Zea mays
  Peptide Sequence Number=SeqID_53650
atgcagccatggggccagcaaactctgttggcggcgaggcgaggaacaggggtgggagaatggtggtacatgaacgtcgatgacgacaggaaccggaacccgacatcacttatagaggtgaagagcccctggatcgggatatccacctccgagctcatgctcctcctcctcaatccgccaatgggatctaaagaggtcctgtcgctgccgtccccacgagccgcatggattttcggtggcccgctcaggcaacagcgcggcaggaagaggctcccgacgggcggtggctag

SEQ ID NO: 11872 - DNA, 201 bp, Zea mays
  Peptide Sequence Number=SeqID_53651
atggagaggatggatgggagggagggtagcggcgccggcgcggtcagagtattcagcgctgcgtccgtcggcgtcgcgggtcggtatggactggccagagcgaggctggtcgagtggagtgaacggctggaggagtcgaggagagctggaggctttgacacgtcttatccgggttgggccggccgcggctgtagaccgtag

SEQ ID NO: 11873 - DNA, 2160 bp, Zea mays
  Peptide Sequence Number=SeqID_53652
atgatgctgcatgactgcaagcacgacgccaacaacgttcttcactatctaggcttagatcatgttggtcatataggtggccgccggagtgttttgatgacccaaaagatgaaggagatggatgatgtcattagacgggtgcatgctgcgagtcttcaggataatctggacagaacacttttggttgtggttagcgatcatggcatgactgatgggggtaatcatggaggatcttcatatgaagaaactgattcacttgccttttatataggacacagcgttgagagcccatattgttcaccctatgaccagaatgaagcacttcaagtggatcttgccccaactcttgctcttctatttggtgtaccaattccgaagaatagttttggtgtcgtgcttccaaagcttttaaattcgttgacagatgaccagaaactaaggatgttagagcttaactcatggcaaatcttaagattgctgcaagcacaagtgtctgctttctgccttgaagattgtattaatgtggagagcagtattgaacttgacatccttcctgaatctattgagcaaaagttatgttttttactttctaaagccatttcttctcatcagtcttcacgtcttcatcgaggttctgatttcaagtctgttgaagccgggtactatgggactgctgcagataactaccacaccttcttaagaaatgcgagtgagtggttgtctcacagagcaaccgataaaccattatatttacttgtctctgcaatcatgttgatgacaatgtcatgccttttcctcatgggtactgtgtcttacctatttaagggacgatctctgagtcaagctgatcaccattcagagtcatatttggatcaacgctggcaccttgatgaggttctcgttcttgctgggatgtttctctatgtcatcagtcttggctcaagttcttttgtggaagaagagcagtatacatggcacttcctcacttctactctgtatctaatatttctggccaaggcagttcagtcaatgctaaaaggatcaaatccaacacttggtcataaagcagaaggaaatagctttgacagaagtagctttttctatgctacaagctatgaattaacaccaggcaagagaaatggttacaagttatgtactatccttgttgttcttgttgctggaagagttataagagcttggcatcaaggtggaatcaactgggttcactttcctgatatttccaagttactggcgcaagctgacccttctgttgtaaagtctcttcagattatctcagttcttgcagttgtggtattgttttcaatttcactcactttactcagagcaagaccagagtttgttataggagtatggttgacccacatttcttgtggatttttggtcctactgcatgtttggggaaatcatattggtacttcattaccaattaaccataccacagcatcggtagctcgacaattttatgtcattgctagtgtttcagtatctgtcactgttcttgcttcaccttgggtatttccaatattttctagggaagcaaaatcaccgtcctctggttctagtcctgtaaaggcaatacatggcatcagaaaatcacttgttctcactggaatgacatacacagcgttctggggccttctgcaattgcttcttcaacaaccaatcaatgcaattcctcttttcctcattttattgcaaacagtctcgagtgcagttcatttttctctggacaaaacattacataaacaatgggtacaggttgtggcaatgcatttcttgggaatggctggtcacttcggtcttgggaatacaaatagccttgccagcattgatgttgcgggagctttcattggcatttcaagttactccacagttctttctggtatactgatgtttatgataacatatgcatcacctctcatgttataccttgggttggtccttcatgcatcggtgaaagatgtcgatgatgcctccaatctacggcagctgaaatggagctatattctagacaaaattgtcacattgccatgtttgtttcctttgctcatcaattctcttgcgttgacttcatacaccattgttttgctagccatgaggaatcacttatttgtttggagcgtattctcaccaaagtaa

SEQ ID NO: 11874 - DNA, 189 bp, Zea mays
  Peptide Sequence Number=SeqID_53653
atgaagggtgtcggaggagaaaacttccatcctgaagtcgaagcttcctataacaatccatatcatgttgaaaacatatggagttatggtgatagacccaagttgtcacttctgatcagtgctgcagagggcgctttgactaggccagcgattgttcacgatgggcgctacccacgcgtgcggcgctga

SEQ ID NO: 11875 - DNA, 1341 bp, Zea mays
  Peptide Sequence Number=SeqID_53654
atggttgaggtgatgatggtacccagctcccacggctgcggcgagggtggtggtgtaggaagcgacgggaaggcggaggacgggcagcagcaggggcagggacaggggcaggtgctggcgctgctgctggccgcgctccgcaagtcggtggtgctaccgtgccagatggcggacgccgacgacccatcgggggcggcgtgggggatggagatcggctggcccacagacgtccgccacgtcgcgcacgtcaccttcgaccgcctccacggcttcctcggcctccccgtcgagttcgagctcgagatccccggccaggtccccagcgccagcgccagcgtgttcggggtatcaccggagtcgatgcagtgtggctacgatgacaaggggaactcggtgcccaagatccttctgctcatgcaagagaggctgtacgcgcaggatggactcaaggcagaggggatcttccggatcaccccggaaaacagccaggaggagcatgtcagggagcagctcaacagcggcatcgtgcctgacgacatcgatgtgcactgccttgctagtttgatcaaggcctggttcagagaactccctgaaggcgtgcttgacaggctttcacctgagcaagtccttcactgcaacacagaggagcaatgcattgagctcgtgaagcttcttccagcaacccaggctgcacttcttcattgggtcgttgagctcatggctgatgttgttgaggaagaggagtcgaataagatgaatgcaagaaatgttgccatggtttttgcaccaaatatgacacaggggccctattcttcattctcatcttcgttatcttcatctggtgaacttgacgaggatgatggccatgaccaacaggatgatgaaaatgatagtggcagtgagaaaaactataatggcagtgctaacggaagaccaagagatattgacaaggccactgcactaagagtagacagtgagcagctaattggtgtgtccaggaggcacacatcaaccgatttccatctgccttacattagatacagtaacgacagtgaagacgtatcactggatgatattgaggaatgtttcttaagaaggctagaatggaaatcagtgagggaaagtgttgatgaaggcgacagtagaaactctcctccctcagagaaagaggcagagtggcttagctcctctgagaacgtaacggaagctagcaacgcaattggtgaagaaagaggcagaacaagcaatgccactgatgtaagtttcaatgagctgaggcaaacggaaaccagaattgaaatgacgagtgctgcaaaaggggagcttattctttgctcataa

SEQ ID NO: 11876 - DNA, 201 bp, Zea mays
  Peptide Sequence Number=SeqID_53655
atggatagtgtggtcctctcgtggctcactggcaccctcaccatcgagctaaagggcatcgttctccgcaatgagcttatcctcgaggagctcaccctggagactaagacacccgtcatccggtggtcaggccccctccatgggtcaggcctcaccttcatcaacgggggcccctacgcgccctcccaccaacaccactga

SEQ ID NO: 11877 - DNA, 1467 bp, Zea mays
  Peptide Sequence Number=SeqID_53656
atggcgcagtcgaccgttggcagcctgagagccgttggcgcaccggacatgtccggtgcacaccggacagtccggtgccttcttctagccgttggctcggccaccgccccgtgcgcactggcgcaggcccagcgccagcggcagccggcaggtgccagccagcctgcttgcctgcctgcctgcgcagctgctcccgctggcggtgctgctgtccgctgctgctgctgccggccgctgcagctgtgcaagcgcacgcagattctgcagcgcgcactctgctctgcgcctgccctgaacactgaccgaagtgacccatcctctgcgccgactgcaccccacaccacccccccacctcagctcaccttgcgctgcccctgtgcctgctgcatgcctgacaccggcgccatatgcatgatagcggatgatgatactagcacgtcttcccgttcccgagctgcctctgacaccagcacaaacctggagactactactagtattggagtcccctccatttccacctcccttgccactgaagcgagagctctcggagccgtcgtcctctgtctctcatccttcttcgttgttgagcaaagcgggctcgaggaggagatgatgctgagcgggcacggcggcgggaggcgcctgttcacggcgtcgcagtggcaggagctggagcaccaggcgctcatcttcaaatacatggcctccggcgcgcccgtgccgcacgacctcgtcctgccgctccgcctcgccaccggcgtcgacaccgcgccctccctcgccttcccgccccagccttcgccgtcgcgggaggcccacggagactccaagtactgcgagaagcacatccaccgcgggaagagccgttcaagaaagcctgtggaagtgacctcccccgccgcctaccgcccgtccgcgttctccatctcgccgcctcgcgcggccgacgcgccgccgccgccgccgggcctcggccacccgcagcagcagcatctccgccacggcgctctctctccagcaggccgcgcccacgccgctggcgctctccagctccacctcgactcgagcctgcacgcggcgtcgccgccgccgtcctaccacaggtacgcccactcccacgctcactacacgccgccgccgccgccgtcgctctacgactacgggcagtccaaggagcttcgggaggcggcggagctcaggcggcggcacttccacgcgctcggggccgacctgagcctcgacaagccgctggccgacgccggggccgcggagaagcccctgcggcgtttcttcgacgagtggccgcgggagagaggcgacacgaggccgtcgtgggcgggggcggaggacgcgacgcagctctccatctccatccccgcggcttcgccctcctctgaccacgctgcctctgccgccgcgcgatgccacaacggttgctcctattggctgctgcaactgcaacgctag

SEQ ID NO: 11878 - DNA, 786 bp, Zea mays
  Peptide Sequence Number=SeqID_53657
atggcgtgccaccaaaggtcgacgagcctgccttccatgcctcgctccaccgactccagcagcgtggggcaagagcaagagctgcaggccctgaaggttggcgcctcgtcgccctcggcgaccatcgagaccacgcgcgacggtctgcggaggctcggcgacctctacagccgtgtggagaagacgctgcacttgcccagcaaccagctggccttgcgccgccgcttgacccagcagcaacaagggaagacggcggcggaggaagagctcgacaggtctctcgcgctgatcgacctctgcggcgccacgcaggagagcttggcggagctgaggacgcgcgtccaggacctgcgcctggcgttccggagaggagacgccgccgacggcggcgcaggtatccagctcaaggccgagtctttcgtccgtctggcgaggaaggcacgcaggcctcctctgaagaagacgacggccggcaacggcaaagccactgctgaagatgggtgccgagtggtcaggctgatggcggaggccagggagacggctgcccgtctgcttgagtccgtgtcacgcctcttgccggagcagatcggcagtctgaatccgaacgcgagcagatggtccctcgtgtccaagaggttccggaagagagaggctgtgtgcgaggtcgaggagcggcagctgcaggcgctcgagcgcggcgtgggagacctcgcggatggtgttgatgtcctgttcaggaggttgattcaatgcagggttgctctcctcaacatccttagctcctag

SEQ ID NO: 11879 - DNA, 2373 bp, Zea mays
  Peptide Sequence Number=SeqID_53658
atggagcacgcctcgcctcgtccacggcggtttgacgacattgtcctctccgtcgacttctccttcattgatcgttgtgactgcgtctccgacttcgtctatggcgccctccttctgtgccaccgtcaacctggcacctctttatattgtttggacccggtaatttatgatgcctcagcaattgaatggttgtgtgacgattgtcctccaaaacataatgaaggtaagctcaatgatattttagaggaaggggaaagtaaaaatgaccacttaatttatcaactagaaagtgctgatggttcaagtcattcagcttctgatcttactgtagaaacacaaaaggcagtgggtgctgttgggcctaccatgaacacaatggagtgtctggacctctcaatgggaaaagatggctgctctttttcacagaattgtgttgaaggcttcacccaaggaacaaagtctgactttttttcttcaatcaatgatgttgagacatcatatccatttgttaagggtagttcttgtcctacactaccgaatatggagcaaaaagatggtgtattggaaaatgcggaacaacctcatcttttggagatggttaatcttgatggtacaagccattcacttgtggaccctccattagaaatcaaagaacaaggagcggaagctggcttatttgcttcagttgaagatgtcgagcaaacccatcccattttaactgatgaaactagtcctatatggtcaagtgaggagcaagtagacggttcttgtcctgcatcggaaagccgggagcaacctgttcctttcaaggtggttatactcggaccatggcatgatgtgccaaatagcatcctaagatcaaggcctccttcaaactactcacagtccatgcaaggatcagatctatatgttggaaatgtggatgtattggatctttctaaggagcagttggactcgaggttaaaacctgaagaacaaggagcggaggatggcttatttgcctcagtggaatatgttgagcaaacacatcccaattttactgaggagaaagtagatggttctattcctacaccagcaagttcggagcaacctgatcagttggaggtggttagaccatgggatgatgcgccgaatagtaccctaaggtcaaagcctccatcaaactactcacagccaatgcaaggatcagatctagatgttaggaatatggatgccttggatccatctaaggagtggttggactcaaggttattgtcaaatacggtagagccatcaagttcctcaaatggaggaggcacatctgttgagaaagacaacattgaaaaaacagaacgcttgtcaggcattgacaccgtcacccctggactggataatgtccagggatcaaatccctcagcagagccatcaagttcctcaactggagaaggaaactcagctgttgaaaaacacagtgctgaaatgacagaatgcttgttaggcatgggaattttgaaccctgcactgcataatgtccaggtattgagtccctcgacaccaaaagaatgcttggtttctagcgcagacaagtcagatgtagcaaataggtcagatgaaattaatcacagtctcgatgattttaaccaaagtaatcccaagccagtgctgaagggaagagtctccaaaatgatgtgcccaagacttgcgtttcaactgccaaaagtgttgcctgtatgcgaacatcacaaaagggagatgtcattgccttccaagcatgttagtccacggaaagcaacaaaaagtagctttagaaagcaatatgaaggaccaaacagacatgtttcacgtcatactgaacatcagaaaaccaaactcgttatgaaggacagaaatacaggtcctgctcatatgagaagttgtaggccaacaaagcaaattgattgtacttgctcaagtgcttccttggattcatctacaaagactaaggaagtaaatgatgcagaaccaagatgttctaaatctgtaaaaacttttgagaatgtcatggccaagaaaagaaaacgacctattctatcatatgatgaagatgccaaggccatgcagatggaagtgaggatgcgcaggagacacagggaaagtggtgtgatgaagctgcgaagatccacagaaaattctgatgaagcgatgtgtccaggaaattcaaataatcaacttaccaatgatcatacgaaggcaaggaagcagagaagggccaacaaagacaataaaacaccaccagtgaacgctagtgttccatgcacacagattgatgctgcacgattagcatcagatcagcaaagctttatttgcacgcgacccattgatagaccttactggacgtatgttacatgcctttaa

SEQ ID NO: 11880 - DNA, 375 bp, Zea mays
  Peptide Sequence Number=SeqID_53659
atgacccctccggccctccgatccctggtccctgcccagctcgtcgtcacatccaggtggggtcttgtgtttttcaggatattaacgttgatgtttttaaacaacttgatcgcaagttcacggtcatgttacgtgagcatggtgctcgaaaattccggcacacggcaaaagcatggtttgcaagcatggtttgccgagtatcgacagttgtctaaccgcgctggtattccctttgccgagtgccacctaatacgctcagcgaaggacctggtaatgggcccacagggagcttctttgccgagtgtcagtatagtggacactcggcacaggctccgtcaccgtgacggtgacttttctctactgagtacgggctaa

SEQ ID NO: 11881 - DNA, 567 bp, Zea mays
  Peptide Sequence Number=SeqID_53660
atggcccctcctaccagggcatctcttcactcgctgtgcgtcactggaaacctggtgccgcgcgtcagcgcgttcgtctccatcgccaacggatgcaccggagttcgtggggacgggcactcctgggatctcggtcaggccgttgctcggccttggtataagactgtcccctggcatgcgtcacggctccgttttgacccacgccaaaagcttagccaccgtgcccgccgtcgagttcttagagagaagcgccgccgggtgtattgtcgtgccgcgccgcgggtgaaagccctcctcggcggcgttccgttccctgcacgcggtcgtgtgggtgcgtcagcgcccggggaatcctttggtgcccgcgggacgagctgggcgaccctgaaccgaggggaattccacgccggagtacaagtctgggcgggattatcacctccccgtggccggctcgctagcgcagacaatcaccgatcttggttggagttgttatgggaaatcgagaggaagctcagcttcaactttggttgtcaggcgactgatgaagcccttgccatggtacagtag

SEQ ID NO: 11882 - DNA, 252 bp, Zea mays
  Peptide Sequence Number=SeqID_53661
atgactaagacaaggcgagccactaggcgtgtgaaaaaaacgtttcgaggttttttcaagacgctcgaaagaaaaggacgtaccttcgaaggccaggggaatgaagtgatgaacgtaggaggtgaatcgaaggagtgccacgccatatcagagggcagcaggtccatcgggatctcgggagcaatggtttggaggcaggcgcgtaactggtctatggactctagcataaccacatcaccctcggatgtgtag

SEQ ID NO: 11883 - DNA, 462 bp, Zea mays
  Peptide Sequence Number=SeqID_53662
atggtggtggtggacatggtggaggaggagcccagcgagatcgagggagtcccggttcccatcgacacctccaagcccaaccccaacctcgagttcgtcaacctctacctcgacatgaatgacatcctacacccttgcttccaccccgaggatagcgtatgtaatcacaaaacaatcaggctacaactcgacgcctttgtggtaaatcttattggatttgtgcttggcttgtcgaccgtgacaaggtgggtggagtggatctcgcacatcgtggtaggcggtgggtcgctaccagaccccaagcaggtgctcaggatcatctgtggcatcgtggtcttgcccatctaccagttcgtcgacagccgagaacctttctctgtcccatcgaccagcgcatcaagctgttacgtaatgttccctctttccccccaacacacatgttggatatataggtgtgggtag

SEQ ID NO: 11884 - DNA, 258 bp, Zea mays
  Peptide Sequence Number=SeqID_53663
atggctcgctgctcgccggtggcaaggcctgagaagcacgttcgtcggatgcgatacgagaacgcggctacgttccaaatggccatggaaactcatctcaaaaatggtgtcgcgttgcctagtgacaaatgcgtcatgcgtgccggcggtcgttgttgtggtcgtctcatgcctgacagaagtgcgttatttggaggcagggacttgtttggtctaaaggcactccatccagcaatccagccagtggaaaatatataa

SEQ ID NO: 11885 - DNA, 1209 bp, Zea mays
  Peptide Sequence Number=SeqID_53664
atggacatcgccaccaagttcgcctctggccaggaggcggttgaggccatcttccggaaggacaagcagccccagggccgcaagccggaagatgttcccgaggcgtccactcagcgcagcaccaagaagaaaggcaagaagaagtcgcaagcaaaatgcgacgccgccgacgcggaccttgtcgctgccgctgagtacaagaaccctcggaaacccctcggaggtgacaatctcttcgacaagatgctcaaggagtcgtgcccctatcatcaggggcccgtcaagcacacccttgaggagtgcgccatgcttcgacaccactttcacaaggctgggccacctgcggaaggtggcagggcccacaacaacgataagagggaggatcacaaggcagaggagttccccgaggtccacgactgcttcatgatctatggtgggcaagtggagaacgcctcggctcgacaccgcaagcaagagcgtcgggaggtctgcttggtaaaggtggcggcgccagcctacctagactggtttgacaagcccatcaccttcgaccagggcgaccaccccgaccgcgtgccgagtccggggaaatacccgctcgttgtcgaccccgtcatcagcaacgtcaggctcaccaatgtcctcatggacggaggcagcagcctcaacatcatctacgccgagaccctcgggctcctgcggatcgatctgtcctcggtccgggcaggcgcggcgccttttcatgggatcatttccgggaagcgcgttcagcccctcggacaactcgatctgcccgtctgcttcgggactccctccaacttcagaagggaaaccctcacgttcgaggtggtcgggttccgaggaacctaccacgtggtgctggggaggccatgctacgccaagttcatggtcgtccccaactacacctacctcaagctcaagatgtcgggccccaacggggtcatcaccgtcggccccacgtaccgacacgcgtatgaatgcgacgtggagtgcatggagtacgccgaggccctcgccgaatctgaggccctcatcgccgacctggagagcctctccaaggaggcgccagacgtgaagcgccatgccggcaactttgagccagcggagatggttaagtccgtccctcttgaccccagcaacgacgcctccaagcagatccggatcggcttcgagctcgaccccaaatag

SEQ ID NO: 11886 - DNA, 201 bp, Zea mays
  Peptide Sequence Number=SeqID_53665
atggcggggagtgtttcggccagaagttcgataatggagacggtggggagcgttcaagaggagccgaaagcggagcaccacttgcgtcactggatggctcgctgtgggcgattgaccatgcctattgacaacgagacggtctgggcctgggtaggtggtgcggctggaccggagactctgttcgaccagaacatcctctag

SEQ ID NO: 11887 - DNA, 228 bp, Zea mays
  Peptide Sequence Number=SeqID_53666
atggcgttagtgcaggtgtgtgtgtgtgtgtgtgcggtgcggtgcaaggggggaggggaggtggacggctttggaggggaggcgcatcgcgcattgtctctgccggttgggtggggcggcgggatgggatttctggtaggggtgggcagcgggcggtacaaacgaccttccattgcgcggatccacggcacggtacaagaattccatggatggcaggcagaggactag

SEQ ID NO: 11888 - DNA, 261 bp, Zea mays
  Peptide Sequence Number=SeqID_53667
atggggctagctaggcttgagaaggaagctaccgcgtgtatgtgcgcgtccaccggcgcgcggctcgatcgtcgctggctatctagtggtggtggtggtgtgtgggctcttccggccctggggcgcaaaggaaaagctggaggccggagcaataaaggatctactaccggcatgctactaactgataggttgcatgtaggacagcacacagcagacgtgaagccagtaagcgacacggagcacgtattactgtactgctaa

SEQ ID NO: 11889 - DNA, 234 bp, Zea mays
  Peptide Sequence Number=SeqID_53668
atgaagatgtatggaattgctagtatgagtgatgatataatcttgtatgattttgtatgtgaaagattagaaaatgaggtaattagtgtaactaagttgatgaaaggtggaattgacatatggatgaatgtgatgaaatgttttggttggaaacgtttgaataggtaccaaatgtgcattttgccaaaaacaatggaaccgtcgcaaccacgaacccccaatgttgtggcataa

SEQ ID NO: 11890 - DNA, 1887 bp, Zea mays
  Peptide Sequence Number=SeqID_53669
atggagaacagtttaaaagccaaacttgctattttcgtggtcactatccttgcgacttcaatggttataggtgatggggttttgaccccatctatctcagttctttctgcggttggtggcatcgattccttggggcaagacgctgtggtgggaatttctgtggtaattctggtcatcctgttctgcgttcaacgatttggaaccgacaaattgggatattcatttgccccaatcatatgcctatggtttaccttgctaagtggtagtggtttgtacaacctcttcacatatggttggggtgtattacgtgcgtttaatccgttgtatatagtgggttacttcaaaagacgcggtaagaacgggtggatatcacttggagaagtagtactttgcattacaggaaccgaggctatgtttgctgatctgggtcacttcagtgttcgagcagttcaaattagtttctccactattaccttgccttctttacttactgtatattgtggccaagctgcctacctcacaaaacaccctgaacacgttggggacactttctacaaatctattccagatccactctattggccaacatttgtggtagcggtagctgcttccattattgcaagccaagctatgatatcaggagcattttcaattatctctcagtcgttaacactgggatgttttccaagagttaaggtggtccacacctccactgagtatgaggggcaggtttatataccagaagtcaactacatgctcatgattgcctgtgttgcagtcactgttgggttcagaaccacagtaaacatcggtcacgcatatggaattgctgttgtagctgtaatggtgatcacaacatgtatggttactcttatcatgcttgttatatggaagacaaacatattatggattgctctcttctgtgtgttcttcggcactatagagaccatatatctctcatcagtcttgtataaattcgttgaaggtggctaccttccactggtcttctcacttatcctaatgacaatcatgggaatatggcactacgtgcaccaaaaaagatacgaatttgagctcaacaataaagtttcaaaggaatacattaagcaactggtggaagatccaaagataaaccgggtaccaggaatcggtcttttgtactcagagttggttcaaggcatacctcccatatttcctcatttcatttccagcattccttctatccattcagttctagtctttgtctccattaagaaacttccaatcagcaaggtaacaccagaggagcgttttctcttcagacatgtggaaccaagagagtatcgaatgttccgttgtgttgttagatatggttataaggatttcatgggaacacctgtagagtttgagcaacaactggttgagaagttgaaggaattcattcgtcatgaatatttcatggctgaaggagaggccgtagctgtagagaactcgccccagagctccaatattctggtaaatcaaggcaaagacaaaggaagtagtagaagggctgtttttgtggaggaaacactgaaccagctcaaccaatctcgtcgttcctcagcctccatccagtcattcaatatggccaaatcaaataactcgtcgagtgggatcgtatcaccagcaccacccatactgggagctgaagaagagattcaatttgttcagaaagcaaaggatgaaggaattatttacctcctaggagaagctgaagtgatggctaaacccaattcttcctacacaaagaggatggttgtggattatggctataattttctgaggagaaacttcaggcaaggggagaaagtgatgatgataccacaagccaaacttctaagggttggaatgacatacgagatttag

SEQ ID NO: 11891 - DNA, 276 bp, Zea mays
  Peptide Sequence Number=SeqID_53670
atggcagaagctaataaaaggctggagcttgatgcaaagaataattctcaagcatatgatattgaagtactcaatgattctgaagtcattgaaatggatttgatgttaggtgtagctgatcttcacatacctcaagctctggctgctgctgaatctgcaattgctggcaatcagccaccaattatggtagctggcagcagtagtagtagcgaaatggaatcagatgatagcagtgatgaggaaagcgatgatgatggtaatgatgataaggaatga

SEQ ID NO: 11892 - DNA, 246 bp, Zea mays
  Peptide Sequence Number=SeqID_53671
atgaggagatataatatcaagttagattcaagaaatagaagctggaggagagagaaaatcaagttaaagattgaaattaatatgacaagatcaagattgggtggaaattcgaggaaaatgaaaaattaccaaaatgtccctgaattttggtatttctgcgatttagcccgctctcatgagcttaagttcagccttcgggcttttgaaaaagatgtattcatatccttcgggaaaggctttgggtaa

SEQ ID NO: 11893 - DNA, 1470 bp, Zea mays
  Peptide Sequence Number=SeqID_53672
atggtgaagaaaaccttaggccgccaaaagattgagatggtgaaaataaaagatgagagcaatctccaagtaaccttctcaaaacgtcggtctggtctcttcaaaaaggctagtgaactttgtactctttgtggtgttgaaatcgccattatagtattttcacctggcaataaggtcttctcttttggccaccctgatgttgaaaacattctcaaccgttatgtccacaacacaaaggatacttctccaacttggcagctcattgaggctcatcgtaatgctattatccttcggctcaacgcgcagcttactgagatgatgagccaaatagaagcccaaaaaaagcgtggcgaagagcttgacaaaatgaggaaagcaagccaagagcaaaactggtgggagtcccccattgaagaacttagcctcccacaactccagtttctgagatcagccatggcagagttgaaaaagatcgtgcaaagggaagctgagcaacttatcattcagaatacaaattgccagcagcttttccctgggagttcaagccaaggaacgaacacaaattcaaaacagtttttcattgggagttcaagtcaagaaatggatacaaatcgacaacaattttttcctgggagttcaagtcaaggaatggatacaaatccacaacagtttttcactggaagttcaagccaaggaatggatacaaatccacaacagtttttcactgggagttcaagccaagggatgaatacaaatccacaacatccaccacagttcttctctcccccacaacatccaccacagttcttcactaggagttcaagccaagggatggatacaaatccgttcactaggagttcaatccaagggatggatacaaatccacaacttttcaatgagaagtcaagccaaggaatggagacaaatccacaacatccaccacagttcttcactgggagttcaatccaagggatggatacaaatccacaacaatttttcactaggagttcaagccaaggaatggatacaaatccacatctaccacagttcttcactgggagttcaatccaagggatggatacaaatccacaacagtttttcactaggagttcaatccaagggatggatacaaatccacgacagcttttccatgagaagtcaagccaaggaatggatacaaatccgcaacagtttttcactggaagctcaatccaagagatggatagaaatccatcattgtttttcattgggagttcaagccaaggagggactcctaattatgagacaatgaacaacaatatgggattgaatgcaaataggatgggtggggaatacattgatccgaatatgatagctccaactccaaattacaatcctaatcgtcctgctgaaggacacatcaatcccaaccctgagggatccgatattcttgctccaacttctcctggatttggtagtgggcttttctag

SEQ ID NO: 11894 - DNA, 591 bp, Zea mays
  Peptide Sequence Number=SeqID_53673
atgggaagctcaagcaaagatcttctacggtttgaacaccataaatactcttcttcacccttagaatccgctctacttgtttgtaagaaaaaggactcggaacctcaaaatcatgaacctgattcttccaagaaaccccccttcactccttttcctaaaagccaagttttggggaaagtgaaagatttcttgggagtcatggcagaagctaataaaaggctggagcttgatgcaaagaataattctcaagcatatgatattgaagtactcaatgggaatgattctgaagtcattgaaatggatttgatgttaggtgtagctgatcttcacacacctcaagctctggctgctgctgaatctgcaattgctggcaatcagccaccaattatggtagctggcaacagtagtagtagcgaaacggaatcagatgatagcagtgatgaggaaagcgatgatgatggtaatgatgataaggaaacatcttgtccaaccgaacatgaaacatccaacacggtcaaagaggatgctgtccgtgaagcaacggggaaaagtcgatcaaagaagcggacgaggatagttgagctctcttga

SEQ ID NO: 11895 - DNA, 1229 bp, Zea mays
  Peptide Sequence Number=SeqID_53674
gtttggaaagtcttatgggtgttcgagcatcagaactagtcaagaaatcgctcgctgcgtgtttcagtttaagcaagtcccaggtggataggatcatctcgaaagggggttcatcatataaactttccatcgaggtttacgctgaccctgatggcagtacctgcggattggcatctgggaagttattggggagggttacggtgcccttggatttacgtggagcggaatcaaggtcgtctgttgctcataatggatggattgatataggccgaaacaaaagcaacaagaatggatcctctgcgcagatgtttttaactgtcaggactgaacctgacccgagatttgtgttccagtttggtggtgaaccagagtgtagtcctcaggtttttcaggttcaggggagtgttaaacaggccgttttcacttgcaagttcggttttagaagctccagcgatcggaacttgggatcaaggacatctttgcctgaatcgaacacttcaagaaattggctaccatctctaaaaacagataaagatcaatccgccaaagaacgaaaaggctggtcaattacagtccacgacctctcaggctctcccgtagcaatggcatcaatggtaaccccatttgtcccttcccctggctcggacagggtcagccgttcaaaccctggagcatggtcaattcttcgtccagaatgtggaacctggaaaccctggggtcgcctcgaagcctggcgtgagcctggtttcactgacgcccttggataccgatttgacctcttccatgatgatatcgtggccacaggaacaaccaccaccgtcgccagttccaccctcagcaccaaacttggggggaaattcaccatggatatgacaacaaacataacaactccatcagtaagcccgcaaagcagctgtgacctggggtcaggctcacgtcccgggtcaagaccaggatcgggatcagggtcagatttcgggtttgggttgcccctttccccgcagagcatgtaccggggtggatttgtgatgtcgtcaacggtggaaggtgtggggaaatgcagtaaaccggaagtggaagtaggagtaaagcacgtgacatgcacggaggatgctgctgcctttgtggcgttggcagcggctatggatctaagcatggatgcttgtcagtccttctctcaaaagttacggaaagagctgagacagcaaagtcagaactttgtagattaa

SEQ ID NO: 11896 - DNA, 225 bp, Zea mays
  Peptide Sequence Number=SeqID_53675
atggacagccgtatcatcgtcacgacgcggctgaaactgaaagacgtcgcccggcactgcgcgggaccgaggaatgtggccgaggagcttatctacgactacgagctcaagccactggatagtaaggagtctaagcgactcctctgccagaaggatgaatcgatgaggattaggattggtctagtaacaagggaattggaggggatctctggccaccaaatctaa

SEQ ID NO: 11897 - DNA, 795 bp, Zea mays
  Peptide Sequence Number=SeqID_53676
atggaggcgacggccgtgagcttggcgaggtccgttctagacggcgtcttaagcagcgccggttcttccctcgccgatgaggtcgcgcgcctcattggggtcccgaaggaggtagacttcatccgcaacgagctagagatgatgcaggccttcctgaaggtggcgtccacggtgtatcccgaggccaccgtgcgcaacgacatcgtgaagacgtgggtgaagcaagtgcggtacctcgcgtgcgacgtcgaggactgcctgctcgacttcgcgctctacgccgacaggaggtcgtcctcgcggctcggcgcctggctccccagcgccatcgccgagcgccgccgcatcgccgggcggatccgggacctcaaggccagcgtcgaggcgctgaaccagcgcaaccagaggtaccagatcgccgccggccccggcgctggcgcccatcatcatcagtcgcccgcgctgcacgagcactacgagcactcggccgagctggcgttccaggtgtcggacatcatcggccgggacgacgacattaacgcggtcgccaagatgctcctctcacgcaacaacggcgcgctgcgcgtcctgtccgtgtgggggatgggcggcatggggaagtcgtcgctggcgcgcatggtacacaacgactcggacgtcctcgccgagttcgactgccgcgcgtggatcacgggtgccgcacccgctggacaaccccgacgtgttcaagcgccggctaaaggaggagctcgccgtgccaaacggcctgaagatcgaggatcacctaggggataa

SEQ ID NO: 11898 - DNA, 153 bp, Zea mays
  Peptide Sequence Number=SeqID_53677
atggtgctactcaaggacgaggtgggattcacggacgcctatgtggacatggcgattttcggtgcgattgatccaagctggtacatggattttggtgccaccagtcacatcactagagagttagaaaagctcaaaaccgaaaacaagtattaa

SEQ ID NO: 11899 - DNA, 456 bp, Zea mays
  Peptide Sequence Number=SeqID_53678
atggggttccttgacgtcgtcaagcccaaggtggcgtcggcagcactggtagacgacgctgcgggcctcgaggcctgcaaggtggagcccgacctggaggagagtggcgttgcgttcggtgctggtgccgcgccgccgccggccctcgcgtccaagaagaagagggtcgtggggatgtcgtccaagaacctgatggccgagcgccgccgccgcaagcgcctcaacggccgcctctccatgctacagtccgtcgtgcccaagatcaacaagatggactggacgtcaatcctgggggacacgatcgactacatgaaggagctgctggagaggatcaagctgctgcaggaagagatcgggcagcagcagcaggaggcgtcgggcatgctcagcgtcttctacgagctcaaccccaatgagatggtggccaggaacaccccaagagttctatattcataa

SEQ ID NO: 11900 - DNA, 963 bp, Zea mays
  Peptide Sequence Number=SeqID_53679
atgcccagccctagcctctacagactacagctgccgcgtgatggagggggtgcagctgacgctcgagcagagggctgccgaagcacaacagggcagcaggagaggagggcgacagcgatggagaaggtggcagatgaacttgttgctgagtttacagaccccaacaataatattgaggcaccagatcctgataaccctaacgcgcaacaatatgatgagaaaaatatacgacgaagagtttatgatgctttgaatgttctgatggctatggacattatatctaaagataaaaaggagatccagtggaagggcttgccgcgtactagtataagtgacattgaagaaatgaagacggagcttgtgggactgaaaggtaggattgaaaagaaaagtgcttatctacaggagctacaagaccaatgctggaggggggcctctacagactacagctgccgcgtgatggagggggtgcagctgacgctcgggcagagggccgccgaagcacagcagggcagcaggagagaagggcggcggcgatggagaagatttgtagagcacataagtcaactgtcatatgcagcagtcacgttcaataagctgttagctgtagcagtatttatgttttatgtatcacctacccaatttgtgattttcatatctgtgggcttctttttctggcatatcaagtatgtaggtctgcaaaacctgattcaacgaaatgaacagtcatatggttcaggaaacacgccttctggtggagtggctttgccatttatcctagttcagacccgacctcatgctaccgtggaagttgagatatcagaagatatgcagctggtgcattttgacttcaatagcaccccattcgagctgcacgacgactcatacgtcctaaaagaaatgcgattctgtggaagagaacaacatgacagcactcaagagtcgatatcaaatggagggtga

SEQ ID NO: 11901 - DNA, 486 bp, Zea mays
  Peptide Sequence Number=SeqID_53680
atggagaagaattccacgccctcaaacagtgccacaagctcggactgcgagatctgtccgtcgctgttggcatcgaacttgcgccccactccgacgatcaccaagagggggctaaatctgtgtgggagggagcggggcagagggaggactatgggcacggcgcagtcctcccggacgttggggcggggattacggtcacgtgctgtcgcgacgggcggttatcccggtgtcgagtgcgggctgttcggcaggcggcaatcacaccgagtgggggcgacatgggtcgggcgggatgcgaggcatggagggcgtggtggagaaggggtggtgaggccagggcacaacgagagtggtgtgcgggagctgagggcggggacaccgcgagagatgtcagagggagacacaggcgggggcggaggcaatagtgggatggtggcgcagggcatggggaaggggaccgtgtggggaagggcagtgatggcatga

SEQ ID NO: 11902 - DNA, 1332 bp, Zea mays
  Peptide Sequence Number=SeqID_53681
atggcccgcaccgcggcgccggccgcgggctacggagaggacggagtgtaccgctccccgcgcccggccgtgcgcatcgagtccgacacaggcctctccctcaacgacctcctcttccgccgcgccgacgtgtgcccctccgctctcgcgctggtcgactccgccaccggccaatccctcaccttcgccgcctttcgctccgccgtcctcaccacggccgtcgccctctcctcgcgcgcgggcgtccggcgcggcgacgtcgtcctcttcttcgcccccaactgcttcctctaccccgtctgcttcttcgccgtcaccgccctcggcgccgtcgctaccacggccaaccccctctacacccctcgggaggtcgctaaacaggccaccgactcgcgggccaagctcgcaatcacggtctctgaactccttcccaaaatcgtggacctcggcttccccaccatcctgctcgacggcggcggcgacggcgacgcggccagtgccgccgcctccaagcctcagggagccagcgtgacgctttactcagacctcgtttccggggcgcgggagacggagtaccgccgcccgccgacgaagcagagcgacacgaccgcgctgatgtactcgtccggcacgacgggggcgagcaagggcgtaatcctgacacaccgcaacttcatctcggcggcggccatgatgacagcggaccaggacgcgctcggagaggggcccaacgtcttcctctgcttcctgcccatgttccacatcttcggcttgtccgtcatcacgttcgcgcagatgcagcgtggcaattccgtcgtcgtgatgtcgcggtttgacatggactctgtgatggccgcggtgcagcggcaccgtgtcactcacctcttctgcgtgccgccggtcatgatagcgctcgccaagctcgggagcgttgggaaatatgacctcagctcgctcaggttcatcggctctggcgcagcaccgctcggcaaggacgtgatggagggagtggccaagaattttccagaagctgtgattgcccagattgcacctgccgagcttgaagggctacttctgtctcatccagaaattctggatgctgttgttatcccgttccccgatgctgaagctggtgaagttcctattgcttacgtcgtaaggtcctctgagagttctttgactgaagttgatgtccagaaatttattgaaaagcaggtcgcatactacaaaaaattgaggagggtgacctttgtggacagcgtaccaaaatctgcttcagggaagatcttgagaagagaactcatctctaaagtcagatcatccaagctatag

SEQ ID NO: 11903 - DNA, 591 bp, Zea mays
  Peptide Sequence Number=SeqID_53682
atggcgcctcctgttgacgtggctggcctgcgccctaggttgggcgatgcggaggctcctccgaagccgaggtcgagtctgtcttccgtggccgaggccgagtccgagcccctgggtcgggcgaggcggaggtcgtcggctgaggccagggcggagtccgagccctggggtcgggcgaagcggacttgccggccgcccggcgccccgcgtccccatccatcgatcgcccgccaccagccgccgccgccgccgctgctgctgtgcgctgcgcctggcggcgcgtcggcgcctgcccgcagcatgagaagcaggcggtggtcccgcgccgcggtgctcgcgtggctagtgctggtcgcggccgccgcgtgcgtcgccgacgagtcgcgcgcggtgcccgccgccaggaaccggaccgggaccgggaccgcggccgtcagtgtcaggcagcagcagcagcagcggggcgcgttcgacgtcgtggtcgccggcctcgtcagcatcgggctcggccgccggtggcgcgccggcggcatggtggacgaggacaagcgccgcgtgcccacggggcccaacccgctgcacaaccgatga

SEQ ID NO: 11904 - DNA, 423 bp, Zea mays
  Peptide Sequence Number=SeqID_53683
atgacacaggcctgggtacagctgctactgttccccgcgccacctaccaatcctaatgggatgcgcaaacaacaaagcgcgtgctggacctcgagaggaaactacacctcgcccgaagccgacctcagcctcaaaacaaactccgcctcgcccaagcccgggcttggctacctgctccctgcgaatcccgcagaaggccactccttcaactttgataatgttggtgatgaactttacgacttgctcggaggtgatcctcgacctcgtgctatggcacgccttaatccatttggtgaacttaccaaccgtggcctggacgtgcgtgtagcccttaggtgcctttctgagaggtccgaccagatcgagtccctagacggcaaatgtccaggtgatggcgatggttcggagagcctatgcgggtag

SEQ ID NO: 11905 - DNA, 339 bp, Zea mays
  Peptide Sequence Number=SeqID_53684
atgcctcggtttcgtcgcgcaagggagcacgaaatgaaatggtggtggggctttggttgcgtagaaggggcaccagagcgggcttcggcgccgaacaacaacaaatggcaacgaacagggacgaactccggtgcaaacgattccggtgagatgagctcgacgctgtcgacggcggcgagcaacaagcgacagtggaggatggtcagacaattgcatggcgtcgatcttcagcacgacgaggctgagcagtggcgtgggcgaactccggcgagcatggacgatgtcgacttcgacgttgtgtggcaagcggcgtacgacactggcgagcggcaacggtag

SEQ ID NO: 11906 - DNA, 120 bp, Zea mays
  Peptide Sequence Number=SeqID_53685
atgcctccacacatgcatatcttcttcctggttgagctcaaccttccccaaggtatcccaaaggagaaggtagccccagataagtgcatggaaaagcacccggagaacactgcaaaatag

SEQ ID NO: 11907 - DNA, 408 bp, Zea mays
  Peptide Sequence Number=SeqID_53686
atgggtagcgtgctcactggggttagagttgaaggtgcagttatcctcggtgaagggcggatctggggtggcggtcctctacgacgagaaattccgccgataccagacaccaatatgagcggcgcgacttcactcccccttccaatacccggagacaacctcgcggcacagtttcaagctacgacggtcggcgaattgagcaccctccccttgcggtggcgctacactttccctcctttcttgtttagcggtggtgcttgggtgtccagggctcgggacggcgcagataggctccagaaactaaataggggcgtggatggtggccgaggtggggttggcgagctagccggctccgaggaagtcgtcgcggacgttgcgcacgcgagcgaagatagggagaaccggtag

SEQ ID NO: 11908 - DNA, 453 bp, Zea mays
  Peptide Sequence Number=SeqID_53687
atgggtagcgtgctcaccggtgttagagttgaaggtgcagttatcctcggtgaagggcggatctggggtggtggtcctctacggcgagaaattccgccgataccagacaccaatacgagcggcgcgacttcactcccccttccaatacccggagacaacatcgcagcgcagtttcaagctgcggcggtcggcgaattgagcaccctccccttgaggcgacgctacactttccctcctttcttgtttagcggtggtgcttgggtgtccagggctcgggacggcgcagataggctctataaactaaatagggacgttgcgcacgtgagcgaagataggggagaaccggtagtagtgactggcagggggccccaccgaccagtgattgcggcgtgggcgagaggcagccacggtgcgggccacactggtcagcatgcagcaacggcgcgggcataa

SEQ ID NO: 11909 - DNA, 3840 bp, Zea mays
  Peptide Sequence Number=SeqID_53688
atgccggagtcctggagacccgccgaggcgaatgcctcgtcgcagccggcggcaggcacgtccggcccctcggctcagagccctggcaatgacgccaagggacgcgcggcgggggaaacccccggcgcggcggaggcggcggcgacgcgagtgccgttccacaagctgttcgcgttcgccgactccaccgacgtggcgctcatgctcctgggcgcgctcggggccgtggccaacggcgccgcgatgcccttcatgaccgtgctcttcggcaacctcatcgacgccttcggcggcgcgctcagcatccacgacgtcgtcaaccgggtgtccatggtctctctcgatttcgtctacctcgccatcgcctccgccgtcgcttccttcgtccaggtgacctgctggatgatcaccggcgagcgccaggcggcgcggatacggaacctgtacctcaagacgatcctgaggcaagagatcgccttcttcgacaagtacaccagcaccggcgaggtggtgggcaggatgtcgggcgacaccgtgctgatccaggacgccatgggcgagaaggtcggcaagttcatccagctggtggtgaccttcttcggcggcttcatcgtcgccttcgcgcagggctggctgctgaccctggtcatgatggcgaccatcccgccgctcgtcgtggccggcgcggtcatgtccaacgtcgtcaccaagatggcgtccctgggccaggcggcgtacgcggagtcgtcggtggtggtggagcagaccatcggttccatcaggacggttgcgtctttcaccggcgagaaacgggcggtggagaagtacaacaagtccctgaagagcgcgtacaagtccagcgtccgggaggggctcgccactgggcttggcatgggcacggtcatgctgctcctcttctgcggctactcgctggggatttggtctggcgctaagctgatcctggagaaggggtacaccggagccaaggtcatgaacgtgatctttgcggtcctcactggctctctggctctaggtcaagcgtctccaagcatgaaagcgtttgccggcgggcaggccgctgcatacaagatgttcgagacgatcaacagagcgccggaaatcgacgcgtacagcaccacaggaaggaagctggaggacatccggggggaaatcgagttcagggacgtccatttctcctatccgacgaggcctgacgagccgatattcaggggtttctccctcgccatacccagcggcacgacgatcgcgctggtaggccagagcgggagcggtaaatccactgtcatcagcctgatcgagcggttctacgaccctcagctcggcgacgttctgatagatggcgtcaatctcaaggagttccagctgaggtggatcagaagcaaaatcggccttgtcagccaggaaccagtccttttcgctgccagcataaaggagaacatagcctacggcaaagccagcgcgacagatcaggaagtcagagctgccgctgagcttgccaatgctgccaagttcatagataaaatgcctcagggtttcgatacctcggttggcgagcatgggacacagctctctggtggacagaagcagaggatcgccatcgcaagggctattctgaaagatccaagaattctactgttagatgaagctacaagtgcgctggacgccgagtctgaaaggatcgtgcaggaagctcttgacagggtcatgtcgaataggacgactgtcatagtcgcacaccgtctgagcaccgttagaaacgctgacaccattgccgtcattcatcaaggaacactagttgaaaagggcccacacaatgagcttctaagagatccagaaggagcttacagccaactgataaagctacaggaagcaaaccagcagaacaaccggaagggtgatggcaatgctcgtctaggcaaacagatgtcgatgaacaagtcagctagcaggaggttgtcccgtgataacagtagccaccattcgttctcggtgccgttcggtatgcctcttgggattgaaattcaggatggttcatccaacaaactgtgcgacgagatgccacaggaagtgcctctcagccggctcgcgtctcttaacaagccagagatcccggtcctcgtactaggttccattgcctcggtcatcagcggagttatcttcccgatcttcgcgatactcctgtcaaatgtgataaaggcgttctatgagcccccacatctcctaaggagggactcacagttctgggcttccatgttcctggtgtttggtgcggtgtacttcctgtcgctccccgtcagttcctaccttttctccatagcggggtgcaggctgatcagaaggatccggctgatgacgtttgagaaggtggtgaatatggaggtcgaatggtttgatcacccagaaaactcgagcggagcgatcggtgcaaggctgtcagctgatgcggccaaagttagaggacttgtgggagacgcgctccaattggttgtgcagaactcttcgacactagttgctggtttggtaattgcattcgtatcaaactgggagctatctctaatcatcttagctttgataccactcattggcctaaatggatggatccagatgaagtttattcagggcttcagcgcagactcaaagatgatgtatgaggaggcaagccaggtggctaatgatgcagtaagcagcataagaacagtggcctcattctcagctgaagagaaggtcatggatttgtacaagaagaaatgtgaaggtcccctaagaacaggaatcaggacagggattataagtggcatcggttttggagtttcctttttcttgctgtttggggtctatgcagctagcttctatgccggtgctcggcttgtcgaggacaggaagacaacctttcctaaagttttcagggtttttcttgctcttgcaatggcggcaattggagtgtcgcaatcaagtacccttacatcggattcttccaaagcaaaatcagcggcgtcctctatatttgcaatcgtagaccgaaaatcaaggatagacccaagtgaggatgcaggggtgactgctgagacactacgaggaaatatcgaattccagcacgttagcttcaggtatcctaccaggccagatgtccagatcttccgggacctttgcctgacaattcatgctggaaagactgttgcgcttgttggggagagtgggagtggcaaatcaacggcaatttcattgctccagaggttctatgacccagatgtaggccacatactactagatggcgtggacatacgcaagttccagcttcggtggttaaggcagcaaatgggcctggtcagtcaagaaccggccttgtttaacgacacgataagggcaaacattgcctatggaaaagatggacaggcaacagaatctgagatcgtatctgccgcacaactggcaaacgctcacaagttcatcagctcggcgctccagggatatgacacaatggttggagagcgtggagctcagctgtcaggagggcagaagcagcgcgtggccatcgcccgtgcgatcgtgaaggaccctcggatcctgcttctggacgaagcgaccagcgcactggatgccgagtccgagcggatcgtccaggacgcgctggacagggtgatggtgaaccggacaacagtggtcgtcgcccaccgtctgtcgacgatacagaatgcggatctgatcgccgtcgtcaggaacggggttatcatcgagaagggaaagcacgacgccttggtcaacgtcaaggatggcgcgtacgcgtccctcgtcgcccttcactcggcagcctcttcatag

SEQ ID NO: 11910 - DNA, 1503 bp, Zea mays
  Peptide Sequence Number=SeqID_53689
atgcgcatccgccgctacgccgcgcgcctcctctccgccaccaccgccgccccctcctcgccgccgcggccgcccgccgcgtcctggctccacaccgacgacgacgacgactgctgcgccttctgcgagctcagccgcccggccccgcaggagggccaggacgccgtcaagcacaaggggcacattgccggccgggtgccggaatccgatgtcagagccgatgagcgcgtcggcctacaccagcgaccgcctgctcccgaagttaaaaaatgcaagattgatcatgtacctcctgtggataaatcttctgtcgggctgcaagttgtgaaatgtgcttctgaggtcagtggagctgtggcgaaaccagaaggtggtactcctgctagcgaagctgctgctggtcctgcagcgaaagctggtgcttttgttgtcaacgatgctgctagtgaacagggagttcaatgtatagcttctccactgggtggtgcctccaagctggaggaggttacagcagggaattcttttgcgaatgggccaaccactgaattaggagttttcaagggtgcatcccttgctaatgaattggctgatgtgccaggggttacgagcattatgccagaagttataggcaaacctagtactgacccaggggctataaccaccgtggtggaagttagtgatataggttctgtcgttcatgaaaccactgaactggaatctgcaggggaggattatattgccagtgaagctgctgctgaaccagaagatgctggcagagcttcttgcaatacagatgatactgctgctttagatgagccactgccgcctagttgtgatccgaacataggcaatgcgcaggttggaaatgcgatggacaccgttgccagtacagtgcggccttctcgatgtgatgctgcagaagaaggtgcttctgtgaattctacagccaatggtcctgttagagccagaggaccaaccgttaagggaggagtgcccaaggataaatctgttgcacccagtgttttacgtgtattggacgtagtgactagaagcattggtaaatcagggagaacagatgttatttgttatgctaggcggacaggtaagaggaagccagagctgcaggaagtgaagacggaaaatattgacttggaagatggtgttctatgcgagaaagaggaggcactgttgagaactgattgttgtgaaagtgtcttgtcaacagccgggtccatagatgttaaacttgccgacataaagaaagaccttatggataattcagctgcaagcaaggttacaaagatgaagagaaatatatttgaatgtaaaattgattactgccacatgacattcaagacaaaagctgagcttgctgcccacaagaagaacatgtgcacagtcaactcatgcagcaagcatttcagatcccacagttacctgaggcgccacgagagcgcacacaacgatgatatgccttacaagtgcccatgggatgggttgtaa

SEQ ID NO: 11911 - DNA, 2037 bp, Zea mays
  Peptide Sequence Number=SeqID_53690
atgcccggcataccgagggatgtcgccgagcactcgctggatattcgggccggagcccgacccgtcaagcagcctctgcgccgattcgacgaagagaagcgcagagcgattggcgaggagatccacaagctaacggcagcagggttcatcaaagaggtattccatcccgaatggctggccaaccctgtgcttgtgagaaagaaaggggggaaatggcggatgtgtgtagactacactggtctcaacaaagcatgtccgaaggttccctaccctctgcctcgcatcgatcaaatcgtggattccactgctgggtgcgaaaccctgtctttcctcgacgcctactcagggtatcaccaaatcaggatgaaagagtccgaccagctcgcgacttctttcatcacgcccttcggcatgtactgctatgtcaccatgtcgttcggtttgaggaatgcgggcgcgacatatcagcggtgcatgaaccgtgtgttcggcgaacacatcggtcgcacggtcgaggcctacgtcgatgacatcgtagtcaagacgaggaaagcttccgacctcctctccgaccttgaagtgacattccgatgtctcaaagcgaaaggcgtcaagctcaatcccgagaagtgtgtcttcggggtgccccggggcatgctcttggggttcatcgtctccgagcggggcattgaagccaacccggagaagatcgcagtcatcaccagcatggggcccatcaaggacttaaaaggcgtacagagggtgatgggatgtctcgtggccctgagccgcttcatctcacgcctcgacgaaagaggcctgcctctgtaccgcctcttaaggaaggccgaatgcttcgcttggacccctgaggccgaggaagctctcgggaacctgaaggcgctcctcacaaaggcgcctatcttggtgcctccaactgacggagaagccctcttgatctacgtcgccgcgaccactcaggtggttagcactgcgattgtggtcgagaggcaagaggaggggcatgcattgcccgttcagaggtcggtttactttgtcagcgaggtactgtccgagaccaagatccgctacccacaagttcagaagttgttgtatgcagtgatcctgacgaggcggaagttgcgacactacttcgagtctcatccggtaactgtggtgtcatccttccccctaggggaaatcatccagtgccgagaggcctcgggcaggattgcaaagtgggcggtggaaatcatgggcgagacaatctcgttcgcccctcggaaggccatcaagtcccaggtcttggcggacttcgtagctgaatgggtcgacacccagctaccgacggctccgatccaaccgaagctctggatcatgtttttcgacggatcgctgatgaagacgggagccggcgcgggcctactcttcatctcgcccctcgggaaacacctacgctatgtgctacgcctccatttcccggtgtccaacaatgtggttgagtacgaggctctggtcaacggattgcggatcgccatcgagctaggggtcagacgcctcgacgcccgcggtgactcgcagctcgtcatcgaccaagtcatgaagaactcccactgccgcgacccgaagatggaggcctactgcgatgaggttcggcgcctggaagacaagttctacgggctcgagcttaaccacattgctcggcgctacaacgagactgcggacgagctggcaaaaatagcctcagggcgaacaacgggttcccctggacgtcttctcccgggatctgcaccaacccttcgtcagatcgacgacacgcccaagcctgaggcgccctcggtccagcccgaggtaacctcggcctccgtgggcgaggcactgtgcatcgaggaggagcggagcggggccacgcctgatcgaaattggcagaccccgtacctgcaatatctccgccaaggagagctacccctcgaccgagccgaggctcggcgggtagcgcgacgcgccaagtcgttcgtcttgctgggcgatgagtag

SEQ ID NO: 11912 - DNA, 402 bp, Zea mays
  Peptide Sequence Number=SeqID_53691
atggacgacgtaaatccggcgaggctccatggatggcgaacggcgtacgaatgcgaacgtttcggcgacgagcttcacgacggggagcaggcacggcgcgagccggggctcgacggcgggtacgtggcgttgctgcgggtgctgcgcggacgagctccggcgcggtgggcacgagctccggtgacgccgtcacgctatgcacgagaagcagtcttcggcgtggtgcacagcaatgcgaagaggcaagcgatggcacgacgctctacgagcaggaggcagggcgtatgcgaagcagcagaaccgaaatcgccatcaatggtgactgttacctgtacgagaggaaattgccgcacgggagtgggaagaggaaaggtcgcgacagtagggagagaagaggaatga

SEQ ID NO: 11913 - DNA, 162 bp, Zea mays
  Peptide Sequence Number=SeqID_53692
atggcggtgacggtgctcctgctttcggtgagtcttcggcgaggtgctgaactcaaagggttttatgtcaggggctctaagttatctttggtccaaatcgggtctgtcagtgaagtgattggatttgaggttgatttcgtgatgaacatggggaagttctaa

SEQ ID NO: 11914 - DNA, 615 bp, Zea mays
  Peptide Sequence Number=SeqID_53693
atgggtagagcgcaagcacgctccgagcccccctcggaggacttcggtgactccaagtactcggaggagacctcctccggggctgatcgttcgcctgctccggtttctcccccagcgtcatccgaggacttggatgactccatggggctgtccaccgcggctcgggcgtactggtgctctatcgagcgcgtcgggctcggtgggtcggatgagtcgggggtctcctcagacgaggcggactcctccgaggagtggagcggcggcgatggtgatgacgagggcgacaacagcagcagcggcgacgacgtcggtagtgacggcagcaagggcaatgacagcgagggcgacagtgaaggcagcaatggcgacagcgatggcagcagcgacgacgtcgagggcggcagcagcaagggcgacggtgacaacggcagtggcaacgacaacggtgacggcggaaggggcaacggcggcagcggggacggtgacggcggcaggggcgacagcggcagtggcgacggtgacgacggcaggggcgacgacggcaacaacagcaagggcgacagtggcagcagcaaggccagtggcataatgacactggttgaaatattagtatag

SEQ ID NO: 11915 - DNA, 750 bp, Zea mays
  Peptide Sequence Number=SeqID_53694
atggcggggctgtcgctactgtgcggtgactgcggcgcgcagctgcgtagtgtggaggaggcgcaggcgcacgccgaggccaccaaccacgccaacttcgtcgagtccaccgaggccgtcctcaacttcgtctgctccgactgcggcaagccatgccgctcccagaccgaggtggacctgcacaccaagcgcacgggccatacggagttcgcggacaagaccgcggaggcagccaaacccatcgatctcgaggcgccgcttaagccggcctccgaggatgtcatggacgtagacacgtcggcttcggcgagtggggagccacaagagatggttgtcccggaggtgaacaaggagatgctcacggaccttgagggcatgggtttctcgacagcgcgcgccaccagggtgcttcacttctccggtaatagcaccattgaaggtgctattaactggctttctgagcaccaagaggacatagatattgatgagatgcctctggtaccagccaactcaaaaacggaggataacaagcccagcctgactcctgaggaaatgaagattaaagcacaggagctaagggatcgtgctcgtaaaaagaaagaggaagaagagagaagaatggaaagagaaagggagaaggtattgtttgaactctcgtctttaccttactgctacttgggtgcccgtctgttgcacttgttctctaatacacaaatattgaagtttgatactatttacaatttacattga

SEQ ID NO: 11916 - DNA, 318 bp, Zea mays
  Peptide Sequence Number=SeqID_53695
atgagcagcgtccatgacagcgccagcgtcgtggtctcgtgcccgccgaagaagaaggtcttgcactcgtccacaagctccctcgtggtgagtcgccgcaacagcgacaggaggtcctcctccgtcctgcagcttccggaacaccgcacgctggcctcgtcgtcggtcaccccgaagcggccacgtgctttctggacaactagaggcaaggccatggaggctgacacacgggacccgcccgttggcgcccacgatccaaatgggtggacgaccactagcccaccagggcccacccgtcggcgccaaaggtttggctag

SEQ ID NO: 11917 - DNA, 1170 bp, Zea mays
  Peptide Sequence Number=SeqID_53696
atggcgtacctccctccccacaagcgccaacccagcaccacagcctccacgcccatccccgcacccaacccgccacctccgtccctctcctcctccctccgctccctctccctctcctccccgcgcggccgcggccgcggccgcggcgcagtcggacgccacccgctcgcttctacaaagattttccgcgctgccggctgcatctcacgttggttccctctacctcccttctcccctgccggcgacggcgaggagtacatcctacgcctcgagcccttcccttgtccccccatcgagcacaggaccggtgccaaaccccttgcccttgtcgtcgcctccaccccaggacaaggctcttccggctccactgcggcggcagtcacctccatcgccgagcagtttcttcccgatctccttgccgccgcggagagggtcaaggcagaaggcgcgcctaaggatgagttggtgaaactgagtctcgttgcaagactgggaacggtgctcttcgagtgccagcccggtggatcgcccgtttcactggacgaactccgtcaggccgctaaagcaggggaagatggttccaggagccagttgcgtaaaacgttctacaccagtttgtctagtgagtgtctggatgatatggagcgaaccatggtaaagaggattgggctggattttgattcgtccaagaagcactatcatgtgaaggtttctgacaagaatcgaagtgattctacaatatcttgcaaatgcaccgtggaggaagatgggagtcttgctatccataaggttgaattgaatcagtctgaagtggaaaatgcagtaaagagcttggtgtctactgctattattgatcctaatgtgaaagggggagttagatggccacttggaaaggaatcaattggcgagaggttcagcatagttggggtgtggcacacggactacaaagctttcagaaacgagaccatgaggctcaagctaaggcatgctgacagattcgatcaccgtacctcgactgggggagtttctgatgaagttacattcaaactaactgctatatcttgcaaactggaggaagatgatctggcggagagcgctgtgaaagagatgctggagtctgcggtccaaatgctatgggacaatgcgctcaactaccgggtcgtgccttga

SEQ ID NO: 11918 - DNA, 1158 bp, Zea mays
  Peptide Sequence Number=SeqID_53697
atggcaagaacgagaggatcagtcaagaaagtcaccaagcctgttgaagaacaatcatcctctgaaactgtagtttgtgagtctgaatcctccatgccaacggagaaaaaggagccgataatatttttaatgaaagcagccaaagatcaatttcaaaacaatatcttaaagcaaaacttccatccagaacagggtattctcctttcgcaacagcaagacttgggcaaacaagtctctagaaccatctctaagttgaagtgggaggctttttgcatgcatcctggaaactattctccttcattggcacgggctgttggtgaaggatttatgtgtcaaaggagcattgtgaaggggttcacatcaaaagaattgctactaccctctactcatagcaccacagtcaaccctgatggaatgtgcctgatacattcaattgtcaagggcagaaatattgatgttggcgcaatactacaccaggaaattgctgattgtgccacaaggcaaactggaattttggttttcccatcattggtcttggaaaatatgggcccgatcaatgaaatgtctattgaaagaatgactcgtggaaaaaatacaccgacaatgaaggaggcagagattagcaagacaatgaagggaaaaaccaaagcaaaaagcaagggaacaaacttgactgcagagacatccttactgctcaaaatgaaggatatcgagaagttgaaagaaaaggactcaagggacgttgaggactgcatgcgaaggattgacaacatggtcgaaggtgacgtcattactggtcaagaggcatcttctattgaggaagaagttactgtggaagaggaggatgtccatattggagttgtgaacgagaagaccgaggaacaaaatactgagacagaagctattgagaaagaatctggtgaggacattgtcaatgcattagattttatggatgcaactaatgataatctggagcaagatggagctagaacggcgaaagctacagaggtaacaagtgaggagcaccacagttcgttggctatagtggtctataccagaccactcaaggtgacccctcctacacaagaagcaaccgataatgttggggtagcaccaaaaattgaggaacgattcgagaatcgtacgaagcccaaataa

SEQ ID NO: 11919 - DNA, 312 bp, Zea mays
  Peptide Sequence Number=SeqID_53698
atggaaataaagagaagaccgagggaggcgtatgttggcgatgttgaccagcaggttgatgatgaattcgatgaaaaggatgatcctaatgaggcagacttgtggaaaagaagaactgatgacgaggaactgtcgtctggtcaaaaagttggacgccttcagctttttgacattacagatagaaagaaaggtggatctcctatgactactgaagctgcagaaattatggagaaactaaaggataaaagggcggagtatgaagcgatcgcttcaagtgatagttctgttaatcttgaggacattgataattga

SEQ ID NO: 11920 - DNA, 306 bp, Zea mays
  Peptide Sequence Number=SeqID_53699
atggggttgatgaggctacatggaagcccgacgaggctacgcgaaaatagtactcaaatctcttcacagaaaagagacccaagtatccttattattccaatgtggctcaacgagctagtaaacaaattatgttccatgaaagttcagtattgcaaagctaattcggggatcttaaagacgtcggagagcgctcacactatcaacatcaacaactcggtattttatgatgatcaatgtttgagctatggcatgtatagggacttcgtcattttgaatgtatgtccttatgatagtgctaaaggatga

SEQ ID NO: 11921 - DNA, 279 bp, Zea mays
  Peptide Sequence Number=SeqID_53700
atgacagggagttccagtgcgcgctcatggctcaccacccatgtcgatccccatcaagaagttgtcctggaagaagagcacccgcatccgctggcctccaccgacgccaccacctcgcctgtgaaccagttctcgttgaggtcccagccaaagagcaagttgatgcactatcaaaggaattgtttgcgctttcaaccgtcacaggctgcatgggtgtatgacagttttggcggtatccattgtttgaacgatgggagtatagaggacttctctgcataa

SEQ ID NO: 11922 - DNA, 2250 bp, Zea mays
  Peptide Sequence Number=SeqID_53701
atggcgaagaaaggggcgaagagaaagcagcagttgccgccggctcccacggcgaagaacgggagcaaggctgtgctcccactgaaggccgcgaagagagcgcccaagaagcagaaggttctggagtcctccgacgattctgatacggagcagcagcagcagcttcaggaggaggactccgacctcgacgtttcctctgattccgacgccgaggagctctctgggtcggacgctgaggctgacgagctctcgggctcggacgccgatgctgacggaggctcgacccgcggcgacgacatggatgatgacgacgacgacgaagatggtgaaagcgatgatgactctcttgcggacgacttcctcgctggtagcgacgaaggaagcgcattatctcctcaaggatttaatgagcttcggacgaaggtcttgagtaaaatatcacgaaggcacaggacgcagcctgtaagaaattacaattatgcccttacaaaagattacaattatgactcagacccttatggactaaaaaagggtggtgactctggtctggagtcagatgggtctgatgaccttgaggcaaagtcacgagcaattgacgagcagaaactcaaggcggaagaagatgcagaggaggaacttcaaaccaacataagatcagaatctgatgaattcagattacccacaacagaggagctggaggaagaggcacacagaccgcctaacctaccaaatctcaaaaggaggatatccgaaattgtacgagtgctctcaaacttcagcaaactgaggcagaaagatgttccgcgaaaagattatatcaatcaactgaaaactgacgtcatgtcatactacggatataatgattttcttgttgaagcgttaattgagatgttcccagctgttgagcttgttgagttactggaagcctttgagaaaagaccgcctgagtgcttgcggacaaatacactgaagagccggaggagggatcttgctgctgctcttataccaagaggatttaatttggacccgataggaaaatggtcaaaggtaggattagttgtctatgactccaccatttcagctggtgctactactgaatatatggctggacattacatgaaacaaggtgcaagttctttcttgccagtgatggcacttgctccacaggagaaggagcgaattgttgatatggcggctatgctgtcatatacaatgaccaatattagaattgattattctcttatttacagagctgctccaggcggaatcatctatgcaaatgagttcaatgagaaaaggttgcatgggcttatgggaaacatccatcgaatgggcgtgacaaataccataatttgtaactacgatggtaaagagctacccaaagttcttgggatgaattcggttgacagagtattgctggatgctccctgcacaggaactgggaccatttggaaggatctacagatcaaaacttcaaaggacattgaagacatcaggaactgtgcctttgtccaaaagaatgaggcagtgattgactatgcacttaaaaagagaaatgtaaaacttgtgccttgcgggttggattttgggcgtccaggattcatccggtaccgggaacatcggtttcatacttctttagaaaagacaagaagattttatcctcatgtcaataacatggatggattttttgtagccaagctgaaaaagttaagcaatacaatcccggtgacttctgagcagcctaaagcgtccgaaggagcagctgagaaggccgatggagaagatgagaaagttatttctaatgaacaggagacagctgttcctggtaaagatgaaaaaactgtgcagatgataaatcataaaaagagtaaggtgactaataaaagaacaagtgtgaccaaagaggctggagggcataaacgtgaacctaataggtcaggaaagcatctcaataaaaataaggataccgataccaaggaagttgatggccctgaaagcactgaaacaaatggagatgggaaagaagagcaacgtgaacaaaccaagcaaacgagccacaaaaggaagatagattctgttaaaactaaaaaatctggccctgtgagcttctcgggtgttcaagagaagaatcaggtgagtggcaagaagacaaaaaggaaatggcaattcaagctgaggcgagactgggaagctgaaaagaaaggtaccaagaggagtaagacgagtgacatatctgtcagtgggaactga

SEQ ID NO: 11923 - DNA, 729 bp, Zea mays
  Peptide Sequence Number=SeqID_53702
atgaaatatgttgatcatcctccctccaatccaaagaaaattacaatcaaatcaagtcaggaagtattcactgttgaaatccctcgccctaggaataatgccaacaagccgaggcagtcgattgctccagatgttgatacatcaaaacaaatgaagcaactttatgttaggcgtaatacaaagcggtctgcaggacgcgggaaaaacaaactgacaatcgacatgtcagatttgatgagaaaccaatgtctcctcagcgacaatcgccacatatattatctagaccatcttcatcacgaggcaactccagagaacaaatatgacacttcacgtattaaatactttgataaagagacaattgatgcactgaccaaggctgacaggaggaagcctcgtcatgctggcgaaacgtatggtcattgtcatttttgtagcaggacagacacatgctatgttgctgctcctaaacagccagcaaatgatacgttccatattcatgttcctcgcatgaaagatttgatctctagcaaggttacttgccttccaccgccataccgttcaagttttgactctttgttgaaagctcatgacaaagaggttgacaagtattgtgcaaggcttgaacattctcaccgcaaattagtatcaaatcagctccagctagctgagatatttgcagacatgatcgatgatgtcattcgtcttgggtcacaggttcaagaatcctag

SEQ ID NO: 11924 - DNA, 507 bp, Zea mays
  Peptide Sequence Number=SeqID_53703
atgactccagcaaaatactcccatattttgcttgaagatttactgacaattaatatagaaaaagtcatggaattggatgtacccataaatattgtcacagactcaagcaaatctctggaacacaacttcctcatgaaagaaatattgtcacaggctcaagaaatattgtcacaggctcaaacaaatttgattctgcagatccacttacatgacaagatgaagtgtgtttggaacttcttatacctcatattttatggttcggtggagatcgccgccgttgacgtttcgatcgccatatttaaccagctctccaaggaacaccataatcaatgcgaaccgttgcccgcacatggatatgagatggttattgtaatatatgacatctatctgttgtacaatgcccatgcccttacagctattctcctagaatattcgcaacaacggtctattccttttgcctatatatacacctcaaggtctggtgcttccaaggcagtagaatgttaa

SEQ ID NO: 11925 - DNA, 351 bp, Zea mays
  Peptide Sequence Number=SeqID_53704
atgtggatttcaattgtcaatatccaaattcaatggcacagtcggttagaaagaagggcacacgctggtcatggaccgtggtggagcacgacagcaccagcgacccggccatcggcccacgtcctcactggctcctggctgtgggacttgtccctggtcctggccgcctacttcacagcggactcccccgccagataccacatctgtggtgccaccgccgtggagctcggtgccggcacggggctcccgggcattgccgcaacggtctacctcggcgccgcgcactgcgtgctcgcagacgtggtcgcgctgctgcgggcttcttatccaacacgatcgcaacagggttag

SEQ ID NO: 11926 - DNA, 570 bp, Zea mays
  Peptide Sequence Number=SeqID_53705
atgaggaagaagttctacattaaagcttacctcaacctaagagaaaagcttatcttaagagggaaggtgtgttgtgtgctaaaaagcctagaaatcaaccatgtgatgaggatgagctcaccttggataagatattcatgtgttgattgcttatatggtgctttacttggtatccttatagtgtatagtgtgtcatacgcatcacggtttgattctttacactatgcaccccacagacaattggacaagccaaggaaggaggcaagacaaactttgaggtaccgagtgcacgggagaaggtcaaggaggctgaggtacctaaagccaggggtgaagaagaagacttgcaaagtcaagagtctagcacttgaagtgataccaggggaagcaaacaaatccaagaagaacaaggacaaggagaagaagatgaagaatatttcatccactctagatcaaagaacaactgcaagaactccaagaaggaggagtgtcaaagcaagaactgcaagaactctaggaggtggttatctcctcctccaacaatggcacctctcgatcaagctcaagtag

SEQ ID NO: 11927 - DNA, 180 bp, Zea mays
  Peptide Sequence Number=SeqID_53706
atggcgcctcgcaagccctgtgacgacggtgactatcagctctattgcggaagcaggaggacgtcaacaaggactcaaccgctccgaccgctgtcccttcgccaggctacgttgctcctccgactgccacgacatcacaccagccgggtgcctccatctctccggatgccacattggcac

SEQ ID NO: 11928 - DNA, 219 bp, Zea mays
  Peptide Sequence Number=SeqID_53707
atggggccgtcgccgccagagaagtacaaggttgtggagcagatcgaccctgaacaagcgatggacgccgaggtggtggagcagatcgactgggcgcctacaggcttcgccgccaaggccgccgcgctcttgtatctcttgcgtgccttcatgtcacagcgcatgggcctcgaggcaccggctccggggctacaaaggcacgccagtgtgggaggctga

SEQ ID NO: 11929 - DNA, 1416 bp, Zea mays
  Peptide Sequence Number=SeqID_53708
atgaagtgccgaggtgatccggcgatcgccgccgccgccgccgccatcggcgtgctctgcgtcgcgtcggcggtgctcctgggcctggtcgacggcgccaccgagggagaggagcccacgacgcagctcttgaacggcttcaccgcggcgcacgcggcgggcgcgccggcgccgttccagcccgtgctgtacgcgcccagcggcgccttcgcgctcggcttcctccgcgtcggcgcggggtcgctcgacctcgccgtggtccacctcccgtcctccttccccgtctggcgcgccacgccggcccgcctcggggactggtcgcgcccggccacgctcacgttcgacggcggcctggagctcacgggccacaacggcggcatgctgtggcaaacgctcggcgccgtcggcgacgtcgtcgtgctgctcaactcctcgaacctcgtcgtgcggcggttcgagaagaccctgccggagtgggagagcttccgccacccgtccgacacgctcgtcctggggcagaacttcacggcctcctcgccgccgctcgtctccgcgaaccgccggttcgcgctgcggctcggcaaggcgtacatggcgctgcacatggagttctacggcgggcagacggcgccggcgtactggaggcacacggccctgatggcgcagccggagaacgccacggagccgccggtgtacggcagcctcgacgcccgcgggttcttcggcctgtacctcgagggtggcggacagagggtggacgtgctctcgttcgacacgttcgcgcagaacctcaccgccgcgttccggcggatgacgctggacgacgacggcaacctccgcgcgtactactgggccagcgggtccaaggcgtgggcgtcggactacagggccatctcggagcggtgcgacctgccgacgccgtgcggcgcgtacggcctgtgcgtcccccggaaggccgagtgccagtgcctcgacaacagcacgagcaccgccggcgccgccccatcgtgccacgcagaggagaccgccgacctttgcgccggcaatcaactgggtctggggttcgacgtggtgcggcggaagcgggtgtccgtggcgtacaaggaggagctgccgttcgagacgaacaggacggcggaggagtgcgaggcggtgtgcgccggcaactgcagctgctggggcgctgtgcacagcggcgcgagcgggtactgctacctcatcgacttccccgtggagacgctggtgtacgaggccgacgaccggaaggtgggctacttcaaggtcaagaagccgcctgcacggccgggcgacgccctagcctcggcggtgctgtcgctggtcttggtcggcctggccgcggccggagcttgcatcgggttaggtctgcaaacgggtgggtgtaagcggctattttag

SEQ ID NO: 11930 - DNA, 240 bp, Zea mays
  Peptide Sequence Number=SeqID_53709
atggaggtgctcgaggaggagctcatgccgcggagggggagccgaagtgtaggtggagccgagggtgggggcgatgaatacagcgatgtggaggaggcggatccggagggggaagagcgggagaggaggagacaacgatgttgggggcacggacgcgcggtgaggcgggagagccagggcgcgggtgtgaactacagtgggttggacgtgcagcgattttgggcatacagaaaaggttga

SEQ ID NO: 11931 - DNA, 324 bp, Zea mays
  Peptide Sequence Number=SeqID_53710
atggactccccgaccttctccagcgacaatggcgacgcctccagcgacggctccagcgacaacgaagaacaaacagagtttcctgagggagcgagcagcgacagtgaagaacttgagggagcgagcagcgacagtgaagaacaggcagcagagttttttgagggagcgagcgaccagatcttaatggacagtgtcttcgtgggggacgacgactcccaactcgcgttgcagattgtccggaacttaatggacggtgtcgctggcctggagaagcgtgtcttcgactccactacggaggcagggcacgacgacggctgcagatag

SEQ ID NO: 11932 - DNA, 279 bp, Zea mays
  Peptide Sequence Number=SeqID_53711
atgttgcgactaacagcttgtgtgagcaacaccatttatggcttgagcaagagcatctatgtaaaggaaaatgaaagaaatggttttgaccatatgttagcacacatggttcaacgggcatacaaagggaaggaaactgtaagtgttccgattgacaatgtcatgaaagtatggaaagcttatgccaagcttgtggatataattgatgtttatgattatgcatgtattatgcacgtgaaacgtttaagaaaagggaatgaaatgattgtcggaagctag

SEQ ID NO: 11933 - DNA, 372 bp, Zea mays
  Peptide Sequence Number=SeqID_53712
atggatgctttggtactattggatgaagtttgtgagaataaaggaaatatcattgccccaaccaaagcattgattcgccgagctacaacaaggacaagggtggagataagtaccgaaagttgtgttcccccacagctaactactcgccgtacgcttaagaaatggcttgctcctttgagaagtacttcacctcttacttttgcccttccccctgcttctgttgtatcagttgggtccaccaattctatagatttcccaacacacgctgtagatcctcttgtggccaaaactgcactgaagccagttcgtcaaagtcagccagagatctttcttagttctttacctgacattatcaggacctcatttctatga

SEQ ID NO: 11934 - DNA, 318 bp, Zea mays
  Peptide Sequence Number=SeqID_53713
atgaaggaggcagagactagcaagacaagaaggcaaaacaaagttagaaaccaagggaacaaacctgactgcagagacatcattgttgcacaaaatgcctgtaacaactctattgtagctgcattaagtcagttaagccagaccccactcccaaaatttccaatgttcctaccgatcatccgatattgtgaactcttatccgaggaagatgacttaggggaccaagacagatcagtggaatcctctcccattctgtacgtctttgatgatgagaaagaagaggacttaagggacattgaagagtgcatgttgcattag

SEQ ID NO: 11935 - DNA, 993 bp, Zea mays
  Peptide Sequence Number=SeqID_53714
atggagctggagcaccaggctctcatatacaagtatctcaatgccaaggcccccataccttccagcctgctcgtttccatcagcaagagcttcaggtcatccaacagagagcttgacagactctctaacgcagtgagctggaggcctctttaccaaggctacgcaaacgcagactccgacccagaacctgggaggtgccggcggacagacggaaagaagtggcggtgctccaaggaggcgatgcctgatcacaagtactgcgagcgccacatcaataggaaccgccaccgttcaagaaagcctgtggaaaaccaacctagaaaggccaccaaggaggtgactaccgctgctgctggctcgttgccgtgtgccgggccacaaggtagcttgaagaaggcaaaagttaatgactccaagccaggcactggcagctattggacagatagcttaaacaggacaatgctgagcagagagaaggcaaacaaaccgacggacgacgagtctttgctgcttagttcgacgaagaacagtcagcccaccttgtccctgctcactcaactgaagcagcagaacaaaccagataagttaggtcccacaccggaaaatgagccgaactcggacacgatgttgaaagcctggggtggcagccaccacaagagcatttcctccacacagcgccatgacgctgaatccctccaatcagtcctccaaaatttcagcctagcccagaatgacaggttggagtcagaaaagaacagatattctgattccgtgctagtctcatcggctttctattctgcagacggtccacaaactacctgccttacacctaacatgacacaagtgcagcaggactgcatatcaagctcctgggagatgcctcaaggtggacctctaggcgagatcttaacgaactccaagattagtgaggacttaagcaagtgtggatctaggtcatatggttggctattgaatcttgaccatgcaccatga

SEQ ID NO: 11936 - DNA, 438 bp, Zea mays
  Peptide Sequence Number=SeqID_53715
atggcccaagggcacatttccctttcaaggctccgcccgctggcttacgtcatgggcgataggccacatggcagcatcgggcctccgcctgagcagagagcggaagcgcacagggtgaggctgacagcagccgagtccagcctcaggcgccataggaagctccgcctcgcccaaccccagggctcggactcaacctcgacctcggaagacggtctccgcctcgcccgaccccagggctcggactcaacctcgacctcggaagacagtctccgcctcgcccgaccccagggctcggactcagcctcgacctcggaagacggtctccgcctcgcccaaccccagggctcggactcagaccttggaggagtcaccgcctcgcccgaccttgggctcggaccgaccacattacaagggggtacatcattaccctacccctag

SEQ ID NO: 11937 - DNA, 933 bp, Zea mays
  Peptide Sequence Number=SeqID_53716
atgaccgcgtcaaaaaagggaccgggaaagaggatactccgaaagggatccttctccgcgaaggaagcgggccccgagcccccgctactgatcagaggttcgaaggctggcccctcagaagggttcgacagccgcctcagagcactcgggctccgcgcccactactggtcagaggttcgaaggctggcccctcggaagggttcgacagccgcctcaggccactcgggctccgcgcccactactgatcaggggttcgaaggctggccccccaaagggttcgacagccgcctcagaacacgcagagcaagggatgactctgggtacgtccgatacatggtcgagactcgggctacgctcccgagggctcggactcaacctcgacctcggaagacggtctccgcctcgcccgaccctagggctcggactcaacctcgacctcggaagacggtctccgcctcgcccgaccccagggctcaaactcagcctcgacctcggaagacggtctccgcctcgcccgaccccagggctcggactcaacctcgacctcggaggagtcaccgcctcgcccgaccttgggctcggaccgaccacgttacaagggggtacatcattaccctacccctagctagctcaggctacggggaacaagaccggcgtcccatctggctcaccctgggctcaagcgctcctccgacggccacgacatcacatgaacatggcactaacacctctccgacagccacgtcggcatggccctcgtacgagaaggtggccgcgcgggaggacgagctgacgaacatgctttctccctctctcgcgaacgcttggaccccccggggtcgaaacgccgacacctggacacgtatcagtaccggacccttgcctatccttgacataggccagggtatcccctatcccgggaccttgctgtag

SEQ ID NO: 11938 - DNA, 339 bp, Zea mays
  Peptide Sequence Number=SeqID_53717
acaactggtcaagccaaggatggaagcaagaagagcttcgaggtaccgagtgcacgggagaaagtcaaggaggccgaggaacccaaagccagggttgtggtggaagaagagcctaaggagttgtatcaccttgttggaggaaatggtgtgattttggagaacagttctgaggagattctggcgacgcccactcagccaccaacacctcatgcctttgctactggagcttcttcttcgacaccacctgtgctagtagcccaagcccctactcctgcaggtgatgatcctgatgattctggtgatgatggaggcaatgatgatgatgaagaggataactag

SEQ ID NO: 11939 - DNA, 3120 bp, Zea mays
  Peptide Sequence Number=SeqID_53718
atggcgtgtacgagcgatcaacgcgatcttcctcaagggccgaaggagcttagtggtacgctagcgtcgcatcgcatgggagaaagaacgtgcgttcgtgcctgcgtgcccgcgagattgtcatcgtttgagaatcaattagcatttcttcggtgcaagggttctcagcagagagttggctacacgaaagatttgtcccatcgtatgaacggattcccttttttattattacatgtgggtaaatatgagacatgtaagatgacggaaaatatgtcacatataatacttgagaagaaaccactttcttacgtggcacaaagtcaaatttatgctccaagaaatagtgatgcagccaacccagtgataataaatcgtgaactaaaaattggagaactggataatagtactcgtggatggagatctcagccaaccatttctggaatttgtttttatccatatgcgccctcgaaacaacctgagcaagcattcactttggggaacagaatgatatcgcacggtttaggatgggagaattattatattgagcatattcctattccttctggttatgcggaatggggtacaataattcttgcaaaacattcttttaatttaagaggagatggagaaggcatggattttatctatggggccatttattgttctttattaggacaatattctatctcaccttcgctactgaaatctttgctggaaagatggaatccagattcaaacacttttttattctacgatggcgagcgtactgtaacactcttagatttgcattatattatgggtttaccagtggatggggaattttatgaggagtatgtcccttcacatcatgagcgtgaaccatccatgttattatatcccaagtgcttatcacaacttttggaggtttgggatgaattacaagtggggggagaagtatcgctgcaagaatggtgtgactgttttcataacgggccaaggggactttcacactctgatgatatggaactttcgcttatttacaaagcagctttcatagcgatatggctttgcggctttgctattatcggagggggaccacgaattcgtcgcggggtattggtgatggcttcatggatagctttggggcaacgttttgctttggcacaaccagctttgtgttccttatattactccctgagattaatcagtacagacccggttagcccttcttatatgaaaagaccttggcctgttcattatctcattggatggatgggagtttacttaaaacacgcttttgttaacaaagtgacgaagccacgcattccttattatgaccatcctaccaggaaacctatgctagtgaacatgttatttcgaacttctaaacatttcaatcctgaaagtgcttctgattttctgcgtaaagattctaacatcctttggcacccatacaaaccccactctgccaaccatctacgcacaccaccttcgtcctggatcagcaaaatattttgtttatgcattcggcgtggcttgcttccttttaggcgtgataacatatgcattgcggagccgtaccatccagatcgtgtaactcgacagtttaggcttgatcagatcgtcccatatcttgtactgaagagcgtgtatacagaagatgattttggggtcgcttactcttactgggcacatcttttacgcccaataaatcaggatttcagttgtctccctaatgagactcgtattggcagctgcacaatatattggataaattggtatagaaaattttcagagccttttatctcggtattgacgaacttgcgctgtggttgtgcacgtggtcgtgtacattataatgatagaaaaagactagcagcaggcaagattattcctcgtcgtctttctccatctgattttgtggtgatacgagaagtgcgtgaggagcagcatactaagtatattgcatttatcaaggctagcgagaagcactctgagataaatcttatggagggttcttctttgcaacacgtatcgaccgataatacatcacagaaagactccatggatgatcaggtttacatgcagcctgaagacaacagaaagcggagactatctaaagacactcttttatgtgacagtgaagaatctttaaccaaaagaaaactcgatttttttcggcctgttggtggtgacaccggcacagctacacttactccttacccaactattaccggaaacgaggattttgttccatcgtcttctaacgttgcacaagtaggagatggtgatgatgatgtgaccaatttttgcttgacaagacgagagccaccaacttgtgacgttgcacaagtaggagatggtgatgatgatgtgaccaatttttgcttgacaagacgagagccaccaacttcaccttttattgattcttgtgtcgacacaacagagttagctgaggattattcaagcttcccctgtgccctaccctctgttgttaactttagtgacattgattcttttcttgatggttgcgatcaattgttcaaaaaccaacctttgaatataatttctcctgttgagatacaccctagcatggacaccgttgcaacactagaagattttttcctcaagccagccaggcaagcgttggcaaatgttcttgatgggctaaatgcccatactttgagagatcctgttcgttgcgccagtctgcgcctcgcttcgtcttgtcttacgggacaatttgctagcattgcaagaattaaagctatgctggacaaattaattaccatttccgaacagctgcagaggacgtattctaactttgaagtggcaaaaaaacaagacgaagaaagcactactgaaatcaagcaggcgcttgacattcaatgggaagctcttcgcactgttgatgaggaattggcctctgctgaaaagcagcggacagaaaccatgacgactattgagaaacttaatcaagttttaatggaggtgaggaaattggagcaggacttgtgtgatgcaattgcagacgcgagcaagaaggctattgatgtttttcagaaggaaacaacggaactgaatcagcgggctgagcaacttcttattgatttaaatagctgtcgatctagcaataactag

SEQ ID NO: 11940 - DNA, 438 bp, Zea mays
  Peptide Sequence Number=SeqID_53719
atgggttgccctcgagagcgagctgctgtcgccaatgtgttcatcgcctcgctcttcctcctagctggtcaagccggcggcggtcactctcgcggggctgctgctgtggcgtccgcggatgacgacgacccctgctcggaggaagtggtggaggtgttccagggcagcgccgggagcctgcccaacggcatcccgtcctacagcgtgaccatcaccaacacgtgcctggactgcaccgtgtgcgacgtccatgtctcctgcggcgagttcgcctccacggaggtcgtcgaccccagcgatttccggcgcctgtcgtacggcgattgcttagtcaggaacggtggaccgatcggccccggcgagaccatctccttccagtactccaactctttcgtttacaaaatggacgtcgctgcggtctcatgcgtcgacgtatag

SEQ ID NO: 11941 - DNA, 297 bp, Zea mays
  Peptide Sequence Number=SeqID_53720
atgtatacgtatgagcatgaggaaagttatgaagaaaatatttgtagggacttgaaaaatgaattggaagctttaaccatcttctttggtaagccttacacttcacatgagcccccaaccagatactctggattcatttatgatgatggtttaatgatgatggctacacttatggtttctggtattttcctctctgaggaggttgtccacattgcaaccaatgctcaagagaagatgacgacaatgtggaggacttttagtagttccaagactttgaggagttctagactagattag

SEQ ID NO: 11942 - DNA, 1104 bp, Zea mays
  Peptide Sequence Number=SeqID_53721
atgagcgaggaggagaggaaaggagggggcggaggaggggacgacggagcggcggcggccgcgcgagcggcggagcaggcgcgggagctgcaggacgcggcggcggcgctgctgacgcgcacgcgggcggaggaggaggcgctgcgccggcgcgccgccgcgctgcagggggagctaaggcggctacgcgaggccgccgcggcgcacgcggacagcgaaaaggttgaggaggacttggatcgagcaacgtgcctcattaccgaaggagacgttgcgtcgctgctcccgagcaagacgcaaggcacttttctgaggatgttcttgggaccagtaaatctgcgggcaccaaggaaggaggtgcagctcaaggtgaaggaggagtacaatagctacagggacagaactgccttgctgtttcttggttttccagtgattttgttgttccttcgacaatggttatggaatagatgctttccagcattgccagttcagctgtaccaggcttggttgttattcctgtatactagtttagctttgcgtgagaacatactgcgagttaatggaagcgatattcgtccttggtggatacttcatcactactctgccatgctgatgtctgttataagtctcacatgggagataaaggggcaacctaattgtgcacgcaagcagagaggcgtggaactttttctgtgctgggccataatgcaaggatttgtcatgatgttgcagaatagatatcagcgtcaaagattatatactaggattgctttggggaaggctaaaaggatggatgttgtatggggagagactgctggtgttgaaggtcaattgttgctgttgtgccctctcctttttctattgcagggatttgagggttatgttgggtttttacttcttcgcacagctcatactggtgtcgtccctgagtggcaggtggtggtctgtgggatcctgctgatttccatggcaattggcaacttcgcaaacacattggatacattgatggccaagtctcggttcaaagcgaagatgaagaaatcaaagggcaaacgggatcttgacacgtgcccctcaccaacaggtaggagtccaagagtataa

SEQ ID NO: 11943 - DNA, 408 bp, Zea mays
  Peptide Sequence Number=SeqID_53722
atggctgacatgcacacagtaagaaaaaattcacctaaagtatacactccaaagggaggatggcacgagattgacagtgtcgatggccggagcggggagtggcggagatggcacggcaggggcggcggcgcagggtggcagtgcgcaggggcggcggcgtgcggcccggcagcgtgggggtggcacgcggcccgacggcgtgggggcggcgcgcggcccggcggcgtgggggcggcgcactgggctggcggggcacaggggcggagggcgcaggggcggcgcgcggtggagatagaagagaagaagagaagaagtgagcgaagagaagaagagagaaagacgaccggtgtattattcagcgtctttgccgagtgccagatcgcgggcactcggcaaagaattttttaa

SEQ ID NO: 11944 - DNA, 291 bp, Zea mays
  Peptide Sequence Number=SeqID_53723
atgtacccgctcacactgctccatggtcatctcgcgctcctcgccaccgctgacccgctgctcgctgcccttgtcgacgcttgctttgagcttgcttggcacgctgacgtgatgaaacatgaagccctctttgtgcagacattgccctaccttgtggccatggcgctcaccactagctctagcgccaagatggtcctctactgcctcttcgcgctccgtgacgcgctgccactgctcaactacgacaacagccagagcatctctgacttcaagatgctcttgttgtgctaa

SEQ ID NO: 11945 - DNA, 156 bp, Zea mays
  Peptide Sequence Number=SeqID_53724
atgcccgggccgctcgccgagccgttgcagttggcggacctgggggcctccgcctggatctgcgttgatctgccacgttggagacctggccaacacgcgcaggtcctgaaatcgttcagttcgtcccttcttcagcgatttgagtttcttggttga

SEQ ID NO: 11946 - DNA, 258 bp, Zea mays
  Peptide Sequence Number=SeqID_53725
atggaaccgataagaaaatactgctaccaaaagatagttttctttgctggtaaccaaaggtatagggtaaaactgcttaggattcttgacctgagtcagaatcaccctacaactgtgccggagggcatcaagaatttcactgcactcattgagcttgatctgtctgacaacaatataacagcactcccagcggagctgggattgcttgaagctaacctgcaagtgttgaaactggatggaaatccgctaagaaggtaa

SEQ ID NO: 11947 - DNA, 639 bp, Zea mays
  Peptide Sequence Number=SeqID_53726
atgagtaacacgctgcttcgggtctgcccgtccgacctgaagatgccattcacgatgcaagcgcccaaggaggtgcccccggactaccagtgcaaggacaagtttctcgttcagagcgtcgcggcggcggaggggacgacgcacaagggcattgtccctggcatgttcagcaaagcgccaggtaagttggttgaggagttcaagttgagggtggtctatgtccctgccaaccctccgtcaccagtgcccgaggaaacagaggaagatgacggatctcttgattcagatgtggaccatgaagtggggacaccatcgacgtccaactgtgcagcaggacaagggcatacatgtagatcacaagcttcagatgacgagggtgactctacatccaagttaggactggaaagtagatatgcagaggaaaacaagatggttcagaaagacctgatacaggatgcctctatatccgagttagaactggaaagtagatatgcagaggaaaacaagaagatccagaaagagctggatctcctccggaagacacatgcatctcctggggacttctcggcgacgtctgtgctgcttgtcttcttgttatcttcacttgttggatacctgatgttcggaagcaaaacttag

SEQ ID NO: 11948 - DNA, 411 bp, Zea mays
  Peptide Sequence Number=SeqID_53727
atggacatgggggacctgcgcacggcgcgaccgtcgccagtgcggtggacggactgccacaccctgaccgggcagcaagtggcagttcgcctcctccgccaggctggtgaacacccttctcccccgaatgctgaaggaagaagcgggagcaagggtcaaccgaaggcacctctggtctggcgcaccggactgttcggtgtgccaccggacatgtccggtgcaccagaggactccaactcgaaactcgtcaccttcgggaaattccagaggcgactccgctataattcaccggactgtccggtgtacaccggacatgtccggtgctccaaggatgagcggcctcgcaaactcggcaacctcgagaatttacttcggctgctccgctataattcaccggactgtccggtgtaa

SEQ ID NO: 11949 - DNA, 1398 bp, Zea mays
  Peptide Sequence Number=SeqID_53728
atggagagcccggaatggaccatcccggcggaatcggaggtggcggcggggggcaaggccggccgcggcaagaacgcccgccagatcacgtgggtgctactgctcaaggcgcaccgcaccgcggggaagctcacgggcgccgctccgtccgtgctttccatcgccggcgccgcgtggaggcgggtggcggcggggcggaccgacgaagacgaagacgaagacgccggcgccgcgccgcccggggagagccccgcgctgcgcagcaggttctacggcttcctccgcgcctccctcgtcctgtccgtgctcctcctcgccgccgacgtcgccgcacacctccagggctggcacctcgccgtcgacgtccccgacctgctcgccgtcgagggcctcttcgccgccgggtacgcgtcctgggcgcgcgtccgtctcgagtacctcgcgccggcgctgcagttcctggcgaacgcgtgcgtcgtgctcttcttggtccagagcgccgaccgccttatcctctgcctgggttgcctctggatcaagcacaggggcatcaggcctgtccccaaggctggtggcaaagggtcagacgacgtcgaggccggcaccgggaacttccccatggtgctcgtgcagattccaatgcgcaacgagaaggaggtgtaccagcaatctattggtgctgtttgcggtctggactggccaaggccaaacttcttggtgcaggtgctagacgattctgatgacgctgccacttcaacacttattaaagaggaggtggagaagtggcaacgggaaggcgttcgcatattgtaccgacaccggttaattcgtgatggctacaaggctggaaatctcaagtcagccatgaactgcagctatgtaaaggattatgagtttgttgttatctttgatgctgattttcaaccccagccagacttcctgaagcgaactgtgccccatttcaagggcaatgaggacgttgggttagttcaggcaaggtggtcttttgtgaacaaggatgagaacttgctaactaggctgcaaaacataaacctttgcttccactttgaggtggagcagcaggttaatgggatcttcctcaatttctttggattcaatggaacggcaggagtgtggagaataaaggcactcgaggattcaggtggatggatggagaggacaacagtggaggacatggatattgctgtccgagcacacctcaagggttggaagtttctgttccttaacgatgttgagtgccagtgtgaattgccggagtcatatgaggcatatcgaaagcagcaacaccgatggcattctggtcccatgcagttatttagactctgctttgtggatattatcaagtcgaaggtgtggacctttccttgctctctatga

SEQ ID NO: 11950 - DNA, 522 bp, Zea mays
  Peptide Sequence Number=SeqID_53729
atggtgaaggccgtcaagaagctctcgcgtgccttgctcgtcgtggcgggcggggcagctgcggcggctgccctcggcaccggggcgcacctgctgttcttcggcctcatcctcatcgggacggcgaccgcgggcgcgctcaagacgtggatcgcgccgaggggtcgtggtacaaagaagccgtccggcagcaagaccatgtcgtcgtcgttgctgcggctgcatgagcagctcgacgcagcggccaagggcacgtacgtccttggccaggacctcgacaccgtcagcaacctcgtggcgcggctctccgatgccatcgagcgggacaacgccatggcgaggtggtgcgcggagagagcggacgaggggagctcggtgctggagatggctaacgagctgaggcggagctgctcgagctctagatcgctcaccgacgaactggaggagcacgtgtccatgttccttgccaccatacacagggctagacttttagtcattagagagttctccaagaaggcatga

SEQ ID NO: 11951 - DNA, 549 bp, Zea mays
  Peptide Sequence Number=SeqID_53730
atggcgatcattctctactgggtatacacagttaccttctcgcccatcgtgctctactgggtgtacaccaacggctaccagctggtccttcactcgcttgagcggtacaggctccacacactagacgaggaggaggagaacttcgtcagcctatgcaccgttgtatgtggcatactccaacagcatcttgtgcatgccatcaacgtgatggtcttgttcatggttcatttttcaactgccttctatcagaaagcatccaactttccagattgcaatactgtgaaagaagtgcctggtagattacaacaattcgagtcacggtggcatggtctaggtttttcgacatatagctccgccaatgtctgggagcttgagttgtgcgcacttggtggtttgtttatttcgttcgatagagctagcccaacttggagcaaattgcctcgtgtgatggagaatgatgttattgctcgctattacggacaaggcaaggggattgttgttaaggctatatacgaccgtgaggcaacgccctacaacttctctatgtag

SEQ ID NO: 11952 - DNA, 210 bp, Zea mays
  Peptide Sequence Number=SeqID_53731
atggcacataagtttgatctttggatcacttgggaggttttgattgcaacccaggtccaaaggaggacactggaatgcggaggtttttgggtggcgttttcgaggggctttttggcgggattcaatgcttataagtgtgttcccctattccttcttaataaatcttgggtgtggaaattctcttgccatgtcttccaaaaaatagtctag

SEQ ID NO: 11953 - DNA, 435 bp, Zea mays
  Peptide Sequence Number=SeqID_53732
atgggcaagagcaagaaaggtggaagttcctcacaccattccggcgataagcggaagcgcgagccgactcctccctcggaggacttcggcgattctgagtactcggaggaggagttctcctccaagtccaagggttcgccggtccatgcctctcccccggtgtcgtctgacgactccccggggatcgccgcagaggtgtggacctacatccgggtcgtcaagcgcaccgggctcgagggctcggatgagtcggaggtctcctcggatgaggagaactcctcagactcgtccgaggagggcgacggtgacagcgatggcgagggcgacgacgacgatggaggcgacggcgatggcgacgacgacgaaggtgatggcaagggcagcaaaggtgacggcaaggacgacagcaagggcagcaacaaggctagtggctag

SEQ ID NO: 11954 - DNA, 360 bp, Zea mays
  Peptide Sequence Number=SeqID_53733
atggcattcgcattgctggtggcagcagcgagagcggagagtgctggaagcactcgcagcccagccgcagccgcaggcggaggccgagcaatgggaggaggatggccgcgtcccggcggggccttggcggcgccgcgcttgctcctccgagcgctgctgctctgctccctcctcgcgcagccgcatccgtcgcgcgccttcttcttcttcggcggcgtgcgcaccagcttgcacgtcccccaggacgacgtggggatgggcacccggcggcttcaggctagggtgttgcagctcgccgtccctcttctcatgatgctgtcttttgcggctacctctgtctctgctggagttgttatgtga

SEQ ID NO: 11955 - DNA, 213 bp, Zea mays
  Peptide Sequence Number=SeqID_53734
atggatgagcagcagatgcatgcgaccttaaggtcagattactgtggcagaaagatgatattaatcatgctttgtgatgttggccactacaaatgccatcacaagagggacacggacaactgcatcaatttgaagaatggttctcctggggatgtatctattataccagaagcagacctaccagaaactgtccaggtgataagatcatgttga

SEQ ID NO: 11956 - DNA, 1452 bp, Zea mays
  Peptide Sequence Number=SeqID_53735
atgggcatcttgtacaagcaagagcgcgtagtgcgtttccaatgtggcaaaatggattcaggaaaaaccaaacgattaaggccatatatgtttgggagatctacacttcaagaatttcagatgactgttctagttggaaggaaccaaaaagatttgaaccataacatttcggaattcgatttcgaccctaagttagcgtttggtcctagaaccggttgggatggagcggctccagcatcgtcagagaacggctccgtccgagagattttggaggacggatgtacaatatacaacaacaaggcaggcggccgcgttgcatccgaacaagaggcaaacaccgatcactcgaaaggatcaagaaccattggcgttgtcgtcgttctcggtgcccaagaaaccaacctctggttcgtccaaaagaagggatccatggagatgccgccggggagcgtccgtggatccttgggcatagaggaagagtacaggagcactctgccaaggcaacctgatgcagaaatggaggagcgcactactcaccaacaggacctcgtctctccagtccttcacggggggagaacatccgcatgggttcagctcgccatggcggactacttcgacgccagcgccgaggcctcggagatgtgcaggcagctgctcaggaacatcaagagcacccagagcaactaccgatccatggacaccttcctttcgagcatggcagcagacgacgccaccacggccggcgagcccgtcgccagaatcaaccctttccgcaccacgacgagaggcagcttcaggcagatccacgacaggtactccggcgtgctccagagcatccgagcaggccacaggcgagtggcgagggagctgaaggtgctcagggccgtcaggaggctctcgaggacgtgcctcgtcgtggcctgcagcgcggccgcggcggccgccatcggcgcggcggcgcacctgctgctcttcggcctgctcatcgggccggcggcagccgcagccgggggcctctacccgatggcactcaagaggcggaccgcggcggcgaggaagcagtcgtccagcaggagcaggaccatgtcgtccctgctccgcctgcaggagcagctcgacaccgcggccaagggcacgtacgtcctcgggagggacctcgacacggtgagccacctcgtggcgcgcctctccgacggcatcgagcgggagaacgacatggcgtggcggtgcgtcgggagggcgggcgagacgtggccgccggcggcgctgcaggaggtggttggcgagctgaggaggagctgctcggtgtcctcgaggctcgccgaggagctgcaggaccacgtgtgcctgtgcctcgccaccatacagaaagctagagttttgctgatccaggagatcaatcagcctgccattgaacgtgaatcgcgagctagtatgtggtatcccttctaa

SEQ ID NO: 11957 - DNA, 763 bp, Zea mays
  Peptide Sequence Number=SeqID_53736
ggtgaaaataagagggcgtcctgatgaagatgctgtcctctgcacaccttgtgcaacttactccatgaagtttgttggcacatcaaattctatgtttttgataccacctggggaaccatctgctaaatgcttaagaccagacaacaccagtggcaatgctaatgcgttggctgctaccattaaactggcaccggggagcattgaattggtccgagtcgctccaagactagataaacttaagagccttctccgggagcggccctacatacttgatgaggatattggggatgatgacctccaacataagaataagaaggggctgtacacatggcaagacctctgcaaacttatccaggccagtgatggcgagctgttagatgcgttgaatgccctctcggctgttgacattgatggattctggaggacagttgatgccagttctgtgaacacgattcttgacatgatcctgcacaactctgtgttgcgtgatttggccattaaaggcaatgccagaaaagtgatgtgctctctgtcatgggatctgatggttttacgcataatatctgttactgatctgccactggcgcctgctgagaggttcgcagcacttttccgtgagcgggcaaaatgggaatggaaagacctgcagccctacatcagggacttgcatgttccaggtgcatcgtcggaaggattgcttatcaagtataccagaagaagccaaccaaatgctgaagctgaacctatttttactgcaagataa

SEQ ID NO: 11958 - DNA, 1116 bp, Zea mays
  Peptide Sequence Number=SeqID_53737
atgtccgagcgcatcgacctcaacaacacgtcccaaaccctggcgccacccaagcgcggccgcggccgcccccgcaagaaccccccgcctcccgctcacccgcgccctccggatcccgacacccccatggtcagcggcttcgctccgggcgacatggtctggggaaagaagctcaaccacgccgcctggccgggcctcatctactccgccggagggaacagcaccggccacgaggcccagctcctcgtctcctacttcggcgacaaggccttcgcctggtgcgacgcagccgagctcaggccctacgagccctacttccccgtcgccgagctctacgacgacggcggcgaggactttgacgccgccgtcgaggcctctctcgacgagttctcccgccgcgtcgaggccgccctcgcctccgccgcccgccccttcgcctccgccgatttcctcgcctcgctccacgatctcgccgcggatcgcatgggcttcaccaacagggtgcaagccgccgtcgccaaggcgcatctcagagccttcgacgccttcagggctctgccggacccacctcagtacaccttggagctcggtctactcccacacgtcccgctcccgctgcccgatcctaaagctgacacggatgccgccgccgccttcaccacccccgcatccagttccaggaggggcaggaagaggaaggaggaactcgtcaaggacgacgactccgatgaggactgggaccccagcaagaggggtgccaccgacttggattccgatgtggacttcgaccacaggagggggtccaggggcaggggcagggggagggggggcagcagcggtggcagcggcaggcctcgaggaaggcccaggaaaacagatgcctgcagggacgcaccacagctcaaggacgaagatggcattcaagagtatccatcggctgatgagatgttgctgcagcttctgtccatcgccactgatcctgtaaatggcaattatgactctgctcctgtgatcgttagcttcttctcaaagcacaaggactccaaggcgcctagtgtatatgaagataaagagctgcttgagaattttggttgcaagaagggaaatgcaccatga

SEQ ID NO: 11959 - DNA, 3027 bp, Zea mays
  Peptide Sequence Number=SeqID_53738
atgcccggcataccgagggatgtcgccgagcactcgctggatattcgggccggagcccgacccgtcaggcagcctctacgccgattcgacgaggagaagcgcagagtgattggcgaagagatccacaagctaatggcagcagggttcatcaaagaggtattccatcccgaatggcttgccaaccctgtgcttgtaaggaagaaaggggggaaatggcggatgtgtgtagactacactggtctcaacaaagcatgtccgaaggttccctaccctctgcctcgcatcgatcagatcgtggattccaccgctgggtgcgaaaccctgtccttcctcgatgcctactcagggtatcaccagatccggatgaaagagtccgaccagctcgcgacttctttcatcacgtcgttcggcatgtactgctatgtcaccatgtcgttcggtttgaggaatgcgggtgcgacgtaccagcggtgcatgaaccatgtgttcggcgaacacatcggtcgcacagtcgaggcctacgtcgatgacatcgtagtcaagacaaggaaggcttccgacctcctctccgaccttgaagtgacattccgatgtctcaaggcgaaaggagtcaagctcaatcctgagaagtgtgtcttcggggtgccccgaggcatgctcctggggttcatcgtctccgagcgaggcatcgaagccaacccggagaagatcgcggccatcaccagcatgggacccatcaaggacttaaaaggcgtacagagggtcatgggatgcctcgcggccctgagccgcttcatctcacgcctcggcgaaagaggtctgcctctgtaccgcctcttaaggaaggccgagtgtttcgcttggacccctgaggccgaggaagccctcgggaacctgaaggcgctccttacaaaggcgcctgtcttggtgcccccggcggatggagaagccctcttggtctacgtcgccgcgaccactcaggtggttagcgccgcgattgtggtcgagaggcaagaggaagggcatgcattgcccgttcagaggccagtctacttcatcagcgaggtactgtccgaaaccaagatccgctacccacaagttcagaagttgctgtatgctgtgatcctgacgaggcggaagttacgacactacttcgagtctcatccggtaactgtggtgtcatccttccccctgggggagatcatccagtgccgagaggcctcgggcaggatcgcaaagtgggcggtggaaattatgggcgaaacaatctcgttcgcccctcggaaggccatcaagtcccaggtgttggcggacttcgtggccgaatgggtcgacacccagctgccgacggctccgatccaaccggagctctggaccatgtttttcgacgggtcgctgatgaagacaggagccggcgcgggcctgctcttcatctcgccccttggaaagcacctgcgctacgtgctgcgcctccattttctggcgtccaacaacgtggccgagtacgaagctctggtcaacgggttgcggatcgccatcgagctaggggtcagacgcctcgacgcccgcggtgattcgcagctcgtcatcgaccaagtcatgaagaactcccactgccgcgacccgaagatggaggcctactgcgatgaggttcggcgcctggaggacaagttcttcgggctcgagctcaaccacatcgctcgacaattcaacgaaaccgcagacgagctggctaaaatagcctcggggcgaacgacggtccccccggacgtcttctcccgggatctgcatcgaccctctgtcaagatcgacgacgcgcccgagcccgaggcaccctcggcacagcccgaggcatcctcggctcagcccgagctcgaggcaccctcggctcagcccagggtaccctcggcccccgagggtgaggcactggacgtcgaggaagagctgagcggggccacgcctgatcgagattggcaggccccgtacctgcaatatctccgccagggagagctacccctcgaccaagtcgaggctcggcgggtagcgcgacgcgccaagtcgttcgtcttgctgggcgatgaagaggagctctaccatcgcagcccctcgggcatcctccagcgatgcatctccatcgccgaaggtcaggaactactgcaagaaatacactcgggggcttgcggccatcatgcagcgcctcgggcccttgtcgggaatgctttccggcaaggcttctactggccaacggcggtggctgacgccactagaattgtccgcacctgcgaagggtgccaattctatgcgaagcagacccacctgcccgctcaggttctgcagacgatacccatcacctggcccttcgctgtatggggtctggacctcgtcggtccattgcagaaggcgcccgggggctacacgcacctgctggtcgccatcgacaaattctccaagtggatcgaggtccgacccctgaacaacatcaggtccgagcaggcggtggcattcttcaccaacatcatccatcgcttcggggtcccaaactccatcatcaccgacaacggtacccagttcaccggcaaaaaattcttggatttttgcgaggatcgccatatccgggtggactgggccgccgtggctcatcccatgtcgaatgggcaagtagagcgtgccaacggcatgattctacaggggctcaagcctcggatttacaacgacctcaacaagttcggcaagcgatggatgaaggaactcccctcggtggtctggagcctaaggacgacgccgagtcgtgccacgggtttcacgccgtttttcctggtctacggggccgaagctatcttgcccactgacctggaatacggctccccgaggacgagggcctacaccgaccaaagcaaccaagctagccgagaagactcgctggaccagctggaggaggctcgggacagggccttactacactcggcgcggtaccagcagtccctgcgacgctaccacgcccgaggggtccggtcccgagacctctag

SEQ ID NO: 11960 - DNA, 903 bp, Zea mays
  Peptide Sequence Number=SeqID_53739
atgatcgcgtcaaaaaagggaccgggaaagggggataccccgaaaaggatccttccccgtgaaggaaccaggctccgagcctccctactgatcagaggttcgaaggctggcccctcggaagggttcaacaaccgcctcagagcacgtgggctccacacccactactggtcaggggttcgaaggccggcccctcggaagggttcaacgaccgcctcaggctactcgggctccgcgcccactactgatcagaggttcgaaggctggcccccgaaggggctcggactcgggctaagacccggaagacggcgaactctgctccgccccgaccccagggctcggactcgggctaagacccggaagacggcgaactccgctccgcccgaccccagggctcggactcgggctaagacccggaagacggcgaactccgctccgcccgaccccagggctcggactcgggctaagacccggaagacggcgaactccgctccgcccgaccctagggctcggactcgggctaagacccggaagacggcgaactccgctccgcccgaccccagggctcggactcgggctaagacccggaagacggcgaatctccgcctcgcccgaccccagggctcggactccgccctggcctcggccaaacgatctccgcctcgcccgacccgggggctcgggctcggcctcggcaacggaagacagactcgacctcgacttcggaggagcccccacgtcgccctgcctagggcacaggtccgccacgtcaacaggaagcgccatcaccaacctaccccgagccgacttgggtcacgaaggacaagaccggcgtcccatctggccagctccgccggatgggcaatgatggtgccccccaagctctgtgacgacggcggctcttag

SEQ ID NO: 11961 - DNA, 195 bp, Zea mays
  Peptide Sequence Number=SeqID_53740
atggctagaatcaggtctattgctaggctgataaacgaagagggagaagagtctattcccgaaatggatgatgttattgctgaagctgaacatgttattgccaaagctgctagtgaagacaaagaggatgatggcatcttgagtccgagcaagcctagccatgttgaatttggaaaatccactatgaaagcataa

SEQ ID NO: 11962 - DNA, 255 bp, Zea mays
  Peptide Sequence Number=SeqID_53741
atgcacagtgacaaccaaagcagcgaaaggctagaggaggcggcctgggtcgacaagtggggacgtgaggagagcataccgtggatgcgcggcggcaaggcgacaacatttctaggggctagcaggcaggccctggcagtgacgaactggtggagacagggggcacgaccaaccgttgtcgttgccatacaagtcatagaacacagaataggaggagccactgttgccgttgccggatggggtcagacgacctaa

SEQ ID NO: 11963 - DNA, 543 bp, Zea mays
  Peptide Sequence Number=SeqID_53742
atggctgcttatactactcaggctccaatgaagcaaggacaggcttctacaggcaagagtcagcccttatctgtcaaccgggggcaagtcaaccatgtagaggtagaagctgaacctagtgaacctgaaatccaagaagaagtgctagttgaaggcaaagaagttggggaagaaaccgaccgtgctgtcttcaacctcttctccgtgatggctgcaacagaatccgcgtcagtcggcgggggctaccggtcatggcttcctcttcccgtcgcggacacgccctctataaaatggtcgcgccgccccgcatcccggatccctggtgctgaggcaatccaaagcgtagactcgcgcgcgacttatttggacccggtgcagtctggtattgaaggaattgctcgtcggagcaggctgtgcgccattgtccacctcgcgtcatgggcaggcgtcaccatggtccttcccctgcgccaccgctacgccctgctctcgggggaagatggctctattgtcgctaatctcgattttgacgacagggattag

SEQ ID NO: 11964 - DNA, 289 bp, Zea mays
  Peptide Sequence Number=SeqID_53743
atgaagggtgtatcacgtttcgggaagcactcgcgctataattcaccggactgtccggtgtacaccggacagtgtccggtgcgccaaggaagagcggcctcaggaactcgccagcttcgggaaactccaacgcgcgcgcagaagtcaggcgcgcccatactggcacaccggacagcaaacagtacctgtccggtgtgcaccggacacccaggcgggcccacaagtcagaagctccaacggtcagaatccaacggcagtgatgacgtggcagggggcaccggactgtccg

SEQ ID NO: 11965 - DNA, 513 bp, Zea mays
  Peptide Sequence Number=SeqID_53744
atggccccctgtgacgtggtcggtctgagccctaggtcgggcgaggcagaggctcctccgaggtcgaggtcgagtccgtcttccgaggtcgaggctgagtccgagccctgggtcgggcgagacagagaccgtctttcgaggtcgaggtcgagtccgagccctaggtcgggcgaggcggagaccgtctttcgaggccgaggctgtgtccgagccctgggtcgggcgaggcggagaccgtattccgaggccgaggctgtgtctgagccctggggtcgggcgaggcggagtccgtcgtccagcatcgaggttgagtccgagccctggggtcgggcgaggcggagcttcctatggcgcccgaggctggacttagctgctgtcagcctcactctgtcgagtggcacaacagtcggagcgacgcaggcgacgctgttttcttgtcaggtcggtcagtggagcggcgaagtgactgcggtcacttcggctctgtcgactgaagagcgctcgtcaggataa

SEQ ID NO: 11966 - DNA, 489 bp, Zea mays
  Peptide Sequence Number=SeqID_53745
atggatcgatctgctagtgctgggctaggatctcggggaatttcgcataattcctcgggtgggaggagcggatttgggttcgatcgtgggttgctagggtttgggagaggcaggcggcgaacacgattaggtgggagcccgaggaggaattcgttggtatactttggcgtcggcgtgaggaaaggggatggaggaagcaacgagccgcgaagctccgcctcgcccgaccccagggctcggactcaacctcgacgctggacgacggactccgcctcgcccgaccccagggctcggacacagcctcgacctcggaagacggtctccgcctcgcccgacccagggctcggacacggcctcggaagacggtctccgcctcgcccaacccagggctcggactcgacctcgacctcggaagacggtctccgcctcgcccgacctagggctcggaccgaccacgtcacaggggggccatcattaccctacccctag

SEQ ID NO: 11967 - DNA, 1677 bp, Zea mays
  Peptide Sequence Number=SeqID_53746
atggggaaggggatcagcggcgacgcccgcctcgccgcggcgccttacgaccagtgggtgctgctgagccccgccgggggctcgccgcgcccgcccgcgcgctacaagcatgctgcccaagtggttcaagacaagctgtacgttgtcggagggagtcgcaacggccgttctctatcggacgtccaggtttttgattttaagacatcctcttggtcagcgttaagccctgctagaggctcaaaacatcccaaccatgaaaatgatgccacaggtggatcgttcccagcattagcaggccacagtatggtcaagtggaaaaactatctcctggccgtagctgggagcacaaggtcgtcatcatcattaaataaggtttcagtttggcttattgatgtgcaagccaatagctggtctgctgttgaaacttatggaaaagttccaacagctcgagatggccaatcagtatccatacttggttctcgattactgatgtttggtggagaggataacaagagaaggctactgaatgatcttcatatacttgacttggagacaatgatgtgggaagaagtcaaatcagagaaaggtggtccagctcctaggtatgatcattcggctgctgtttacgctgaccagtatcttctgatctttggtggctcttctcactctacatgcttcaatgatctttacctacttgacttgcaaactggtaggactccattccgctgtctaaaagaaactgctgtatgtcataagctggagtggtctcaacctgatgcccaaggagcacacataactcctagaagtggtcatgctggtgctatgattgatgaaaattggtacattgttggcggtggagataatgcaagtggttccactgatacagttgtaattaatgcttccaagtttgtgtggtcagtggtcactagcgtctcagctagagatcctctagcttgtgagggtctcaccctttgctcaaccacagttgatggcgaaaaagttctaattgcctttggcggttacaatgggaaatacagcaacgagatctttgttttgaaatccaagccaagaaatttagtccaacctcgtcttcttcaatcagcagctgcagccgccgccgccgcttctgtgacagctgcctatgctgtaattactgccacagatgagaaaaccagagatattgttgctacagatgattttgatatcaagagagctcaacctgcaagtaattccaaaaagtttgttgctgaaattgatgtacttaatggagagaatggtaaactagcggctagattggcagaggttcgcgatgaaaactcaaaactaaaggataaattagacatgacaaacttgtcatatggtgaattagcaaaggaacttaaatcagttcaagatcaactagcagcagagggttcaagatgccagaagcttgagtcccaaattgctgctgcacggaagagactggaatctgctggttctttggagaatgaactagaagtattgcatcaacatatatctcaggtggaggaaaccattgcaactactcagagaagaaaatctgggggtgtttggaacatgcttggatggaacaatgctttatgtactcaggggttccgctacagttgtagctttatattttctatttcgcacgacctttttggtcagaaacttgtttaa

SEQ ID NO: 11968 - DNA, 1464 bp, Zea mays
  Peptide Sequence Number=SeqID_53747
atggggttgatgacggtgcttggcttggctcggcttgcatcggcatcgtcgccgtcgctggccttgacgccatcgcccaccggacaaacgagcgcggactccaccacgcgcgctctcgcctgcccgctgcttccttgtccttgctttaaatttaagggaactccccaccagcgccgctccaacaggctacgacgacgcacgcgcgcgcgcatggaagagatccttctccccgtggccgcccacgacgcggcagccttcgtgctgtcccgcctgccccaccccggcacagcggccgccgacgctgccgccttcgtagacgccgccacgggcgcaagcctctctttctccgcgctccgccgggccgcgctgtccctcgcctccgcgctccgcctcggcctcggcctccgccgcggcgacgccgtcctcgtcctcgcgcgcgactcgctcctgctcccgcagatactcctcggcgtcctcgccgccggcgccgtcgtggcggtcaccgacacggacgccacgcccgccgaggtcgccgccgccgcgcgcgcctcggccgcggtcatggtcgtcgctgcgccggacctggccgccaagctctccctcgacgccggcgccgccgtgggcctgccgccgcttctcctcacgtcgcgctcgccggaggatcccgcggcgctctcggccgaggagctcatcgacggcggtgaccctgtcgctgctgaggcggtggccgtgtccgactccgatgtggcgttcctggcctacccgtcggcgagagcgacagccgccgtcgcgatgacgcacgccgacctcgtcgctgctatggcccacgtcgtcgcggacgacggccgggtgtgcctggcgtcccttcccatgtgcagcgcccacggcctgccgctagtcgccctcgggctccccgctgccggagtcacgacggtgctcatgcccccgccatcgtcgcagtccggtacgaaggcggcgagagaggctgtagccgtgcacgccgcgacggacttcgtggcgactcctgaggtggcggtggcagctctcaccgctcccgtgccgctcgacgggaagctctcctcgctgaggagggtaatcgtggcgcctacaccgttggcgccaggggcacgggaggagttccgccggaggctgccgtgggtccagctgacgcagctgtccggcacgccggagaaccaaacagagatgctatcactgccacctgaggcaaaacagcctgccagcagatcaagtatccgcgacaaacgaggctgcctccttggtgccaccaccgaagaagataaacaagattatttcgggagacatattttcgagatcaaccatgagcaagaccttgaggaagcacccggcaactggcaacagacaagctgcctcaaaactgtagcagatcctccgcttacgtttcctgttcggaagctgcttgtcaacctgatgaagcatgattag

SEQ ID NO: 11969 - DNA, 399 bp, Zea mays
  Peptide Sequence Number=SeqID_53748
atgttgttcccccgccggatcaactaccagcagcaggaggaggcggctgtcgcgcagatgctggccaatatggtcatggtgattttgcccagtctcgaggtcaagcctggttccattgttaagtgtgagcctggatatggttttatgatgcacctttcccaggcaaaacttgttgctactgagaaccgattgaagcaagtgcaagaaatgcaatcgaattgtgataaaggcctcaaacacatgagctgtgaagctcctctgttaggacctatggctgagctatggaagctgaagaacccagatatttctaagagcgagtgggcggtgcaagctaccaccgcatcaatctactcgacctgcaacatggtcatgagaacggagaacgtgtcttgcttctga

SEQ ID NO: 11970 - DNA, 723 bp, Zea mays
  Peptide Sequence Number=SeqID_53749
atggtccgactgtaccggtacaacttagcatcgtacattgcccaaggaggggtacgatgcggcttcatgccctcagagggaagtgttatgcaaactattgtggttgttcaaggaaatgagatgttcgccgttcatcggcttgtgaaaccccacctcgtgatcaacacagttttggttgtgttctacctgttcttgcttgtgttcttgattgcgcttggagggataagccttcatggtgaggctagcgagggtaaggcagcaaagaagactgtcaatgatgacatggaagacgacaaatgtgaatatgacgaagagtctccttcgggtagagccacatctccaaagaagaaaaggactaaatgttttgagaaaaagattctggccgcgcaagaacaaggaaaggggagcgccactactactttgtcaattggctatacacgaatccttgaggtaatgtcccgacctctaccattctccactctaagtctcttgggacttgaactaaccagaatgctgatgactgtgaagggcactgatgacggtggccaggctttgacaactacgaaaggcaaggggcctctttttgaggaagaagtgcataacccccacatccaaagtcatgcttatgctgtttatggagtttcatcgacagaggatgaaaaagatgaggaaaaaggtgccaaaggtgatgggtcttctaggcatgagaaattagtcaaatag

SEQ ID NO: 11971 - DNA, 372 bp, Zea mays
  Peptide Sequence Number=SeqID_53750
atggtgaggacgcagggagacctcggcccgacggcggcggaactccggctgcaaggtgaggaagccggtgagcaccgatcgggcgaactagaggtgctaggggcgaaccaggaggtgtcccacattgctggcgaaggggcggagctcaccgaggcaacgggcgcggcagaaactcgacggtggaccacgacgagcttcacgggcgcgcccgcagagcgagagagagagcgagggtgcttggttgagggcgcaactgagttggggagggcgagggagtgtgtgtgggctttagaaatggctcggccgcgtgggggcatgatcgggaaacacgcggtcgtgggagcgtccacggtggagagcgcgtgcggttag

SEQ ID NO: 11972 - DNA, 540 bp, Zea mays
  Peptide Sequence Number=SeqID_53751
atggctggaggccagggaagcaggggcaagcgtcgttcgtctaagggaaagcgtaagcgccctctgagccctccatcggaggactttgggggctcgaagttctcggaggactcctctgaggaggaggaagaggactcctcggacttcgaggagggcagcggcgaggtcgacagtgatggcggtgcttgtggtggcggcagcggcgatggtggcgatggcgacgcagagggcgacgacgacggcaatggcgacgacagcaatggcgggggcgacggtgacggcgataacgccagtggcaagatgccaccagtaattgagatggagcctaggaagaggaaacagggggtcaccatgctcgatatccctccggttgatcccaatagccaactccctttctacggggtgaacgacccttctcaagttaccaataagcagatatccgaggagaatgtcctgagtcgagttgatttgatgttgagggaggctcttttcagagttcgtgtccaaccaacccattcaagacgggagcccaggctatag

SEQ ID NO: 11973 - DNA, 285 bp, Zea mays
  Peptide Sequence Number=SeqID_53752
atgggcagatggctttccaatgacgaagagatgaagaaaggtggggaaatggtggagggaaatgcggcaaacctaccggagctctcgaacggtggcgatgaacagaggacggcacaaaggaaggttgatagaagcactgcctcggcttcggggcgtcctctccggcggcaaacggcgtcggcagctccgatcggtgttatacgacaacgtcgactgcaacgcaacggtggggatctagtggcggggcaaaaagggtcgctggcaagaggaccaacacagttgtga

SEQ ID NO: 11974 - DNA, 546 bp, Zea mays
  Peptide Sequence Number=SeqID_53753
atggcattaggacctgtagtatctgattgctttcatgaacatatatggttgattgttgaaggcaatgtcctagacatcagacagggcagtagccactatatcatccgagacactgttgtatggtttgagtattttagctgtctactcttttatggttcaatcggtgctaccagccttcgccgcgactgtgcgagctttgccattgccaacaacacctcaggcgcaacaggaagctccgcctcgcccgaccttgggcatcggcctcaggaggagatctccgcctcgcctgaccccagggctcggccccccacctcggcctcgaaggtggtctccgcctcgcccgaccctagggctcgggcctcaacctcggccttggaaggtggtctccgcctcgcccaaccccagggctcggcctcaacctcgatctcgggaggaatcgcgtcctcgcccgaccccggcctcggcctcagaaggagtctccgccttgcccgaccttgggctcggactgaccgcgtcacaagggatacatcattaccctacccctag

SEQ ID NO: 11975 - DNA, 525 bp, Zea mays
  Peptide Sequence Number=SeqID_53754
atgactctgggaagcaccgcctcgcccgaccttgggcctcagcctcaggaggaggtctccgccttgcccgaccccagggctcggcccccacctcggcctcggaaggtggtctccgcctcgcccgaccctagggctcggcctcaacctcggcctcggaaggtggtctccgccttgcccgaccccagggctcgacctcaacctcgacctcgggaggaatcgcgtcctcgcccgaccccggcctcggcctcaggaggattctccgcctcgctcgaccttgggctcggaccgatcgcaccacgggggatacatcattaccctacccctagctatctcaggctacgggggaacaagaccggcgtcccatccaggctcgccccgatggataagaagaccaaggttatagtttgtgttgctgctgcacataagttgctgtcaatgatggctatgattattcattctagaaaaagaaaacgaaatgcaaggaggatagggattacctatgcaccaatgcatgaaagggattga

SEQ ID NO: 11976 - DNA, 351 bp, Zea mays
  Peptide Sequence Number=SeqID_53755
atgcaagatgcagcacgacgtgcactttctcagtattgcttgttgttcagcggggtagatgatggccttgacctcaagtactatcctcgccgttcgaccgacagtactggaggtgtgattgtctcgccagttggtgggggcaatctcaggttgaacagcatggtccacctagccgccgtgctcaacaccaagctggaccacgcccttgacgagttaggcaagatgtctgagaacaggagcagaggtgcaaggcgtgctcacccagaacagcaggcaccccaagaagatgcagctcagcagcagttgccagccccacccccgatgacagttgagcagatgttcatgatgtaa

SEQ ID NO: 11977 - DNA, 225 bp, Zea mays
  Peptide Sequence Number=SeqID_53756
atggggaggggctacaggtgctgggaaaacgaggccaggggcggcaccaggacacgggcaggggtttcgccggctgccaggctgcaacgcgcgcatggagagagaaggggagaggagatccaagggagaagacgactgcaaaacttaatagtaaatacgaaagaaacataccagagagaatcaccggagaagaaaagggatgccagagactcgtcggcgacctag

SEQ ID NO: 11978 - DNA, 615 bp, Zea mays
  Peptide Sequence Number=SeqID_53757
atgggaggtcgacaagggaggaggagggcgtctgctgcttgctgcgtttgcagaagaaggcgtcgtggggagcttctgtgcagagaagaccaggcgccttggggagaagaggaggaatcccactgggggaaaggggcgcttgcacagggatggagggtggacgtgctgggcacttcacaggggcgcgacggagaagctcgacaccatggggagttcggcgaggccgcagtggcgcctaggatagaggaaggcgctggacaccatgagagcaggggagccgagcagatagctcgcacggagggagtgcatgcccatggatggagaggaggagctgttgctccctgcgctgaaccagatcggaggggagctcggcgtccaccatggggaggagaaaacgctgggggggccttcggagctccagcgtccgagcagagggaagcttggctccatgggaggaacacacgcgcttggaagaaggggaggaaaggctctgcgcatcctgatgctggcgtgagggagcagtggaagagctgtcctggatgtagctcggtagagggaggaagaagacagggatatgcttctacgctaagggctcctttggatgcttggaaataa

SEQ ID NO: 11979 - DNA, 561 bp, Zea mays
  Peptide Sequence Number=SeqID_53758
atgggagggtggagggtatctgtgcattttggtttcacaggagaaaccttcgtagggaggttgcttaggacaatctgggagggcaatcatggaaccgaggttctgctacctgggcgagtgggaataaggcaagcgccttgggagaaggggagaaatcccgataggggaaaggggcgcctgcacagggatggagggcgggcgtgctgggcacgtcacagcggcgcgacggagaagctcgacaccatggggacttcgatgaggctgaagtggcgccctgcgcctaggacagaggaaggcgttggacaccatgggagtaggggagccgagcagagagctcgcagggagggggtgcgcgcccatggatggagaggaggagctgctgctccctgtgctgaaccagatcggaggggagctcggcgtccaccatggggaggagaaaacgctagggggtggccttcggagctccgacgtccgagcagagggaagcctggctccatgggaggaacacacgcgcctcgaagaaggagaggaaaggctctgcgcatcctgatgctggcgtga

SEQ ID NO: 11980 - DNA, 561 bp, Zea mays
  Peptide Sequence Number=SeqID_53759
atgggcgcgcaccccctccctgcgagctctctgctcggctcccctactcccatggtgtccaacgccttcctctgtcctaggcgcagggcgccacttcagcctcatcgaagtccccatggcgtcgagcttctccgtcgcgccgctgtgacgtgcccagcacgcccgccctccatccctgtgcaggcgcccctttcccctatcgggattcctcctcttctccccaaggcgcctcgtcttctccccacctccgcccaggcagcaggagctcggttccatgcttgcccctggccgaactctcctacagaagctccccacgacgctttcttctgcaaacgcagcaagcaacagacgccctcctcctcccttgtcggcctcccatggcgctactgtccccttggtgtacttgctgcagttccaagccggtcgccggtgctcccttcttcaaccctgcacgacgctcactccctggctctcatcctcgcaacagcctgtgcaacggcctggccgtcggcctcccctagcagcgagaacctgcccccgacactcgccagtgcacgctag

SEQ ID NO: 11981 - DNA, 393 bp, Zea mays
  Peptide Sequence Number=SeqID_53760
atgactgaggaagggaagaaccttgccacagaaagacgaccggagtctccgcctcggtgtaactgtggaaatcgtgctgtgatatgtgaggatactatgaattacttcgtgtgtccagacattaattatagtagttgtatggtcctacacgacattggcgagaggcagagacaaaggagaataaaaagaatgagtgtccggaagagtgcgagtctggtcctgtactatgcaaatgtggtgttgaagttgatggagaaggatgacaacacgtcaaggttgagtgagctcatcgcgctagttgaggcaagattacatgcgcaacagcaggaggatgagtttatgtctcgggccgccgatgaagcagaggccgcttattacaaagcagaaggctga

SEQ ID NO: 11982 - DNA, 273 bp, Zea mays
  Peptide Sequence Number=SeqID_53761
atgcgcgccaacagcaggcccacaacgccaggagagctgaggcgcgggcatccacggtgggcgcgaacagcagtgcgcataaggaatgcacgactaaggaaagtggctagattgatggctaaattgataggccttaatggtagggggattggttaccaaataagtttccccagggcaagtacaagaaaaaataatgcagaaagtaggatagatgctaaagtgcaggacaataatgcagatagtaggatgggtgctaacatgccagctaattga

SEQ ID NO: 11983 - DNA, 447 bp, Zea mays
  Peptide Sequence Number=SeqID_53762
atggagcgcggagaacttgtgctcgccagtgaccgagaaaggggaaaatggcgccgcgatgactctgggtggaattgggaggctgctgtcgacgggcgcaccagacagtccggtgcggcaccggacagtgttcggtgcgccagccacgtcacccggccattagggttcgaccgttggagctctgactggtggggtcgcctggctgtccgttggtgcaccggacaggtgaccgttggcgccgtagtagccgttgcttccgctggcacaccggacagtctggtgaattatagcggagcgcccttggaaattcctgaaggtagcgagtttggcttcgaccgccttggtgcaccggccactgtccggtgcgccagaccagggtgccttccgggttgtcttttgctctattgtttgaacccttttcttggtctttttattggcttattgtga

SEQ ID NO: 11984 - DNA, 528 bp, Zea mays
  Peptide Sequence Number=SeqID_53763
atgatgcacgcgaccactgttccctcgcgctgcctgccaactcctgatgggatacacatacgacaaaagtacaagatgaccctcgggcacaaactctgccttgcccaaagccaacctcatcctcgggacaaactctgcttcgcccgaagcccggcctcggctacctgctccatacgaatcccgcgggaggccactccttcaactgtgacgcgtgggcttgggtatgtgaccgagcccttggccctggcctcggctctaagcagaaatcaggtgtctccaccaagcataagtcaacaacaagtacaagacccatgcttcaggcaataccatctacaagggctcggctttgccttctcaccggctttctctcgcccgtaccaggataaacaacttgtgtcaccttgcatcacctatctggccaaggcacacatcattatttcactagttgtcttcggccttctcttccaattgaaaaaggcagcaatggaaacaatggcgcctaagactggggtgaatcaggacttctaa

SEQ ID NO: 11985 - DNA, 3129 bp, Zea mays
  Peptide Sequence Number=SeqID_53764
atggctctggactattcctttgccgcctggtttgttgttgggaacgtgtggatattcggtggcagttcttgtgctgctgatgcaccgaacctgtacaggtatgctgcatttgtattgcaaagtatgcgcagaatgatgagctccgtgaacttccatctgcacactgttttccacaaggaatgtgttgataaatggctcaagataaatgcgctttgccctctgtgcaaatctgagatagcgcgagctcgtctggcgagcctgccggtgggcgcggcgcaggcgcaggcgcagccggcgccggtgcgcgtgggcgtcatcctcaacctgacgtcggcggtcgggcagcggcggaaggtgggcattgagatggccgtgggggactactacgccgcgcggcccgccgcgtccaggaccagggtcgtgctcagcttccgggactccgccggggacgtcgtcggcgccgcttccgccgcggtggacctgatcaagaacgagcaggtgcaggccatcatcggcccgcagacgtcggcggaggccgagttcgtcgcgtacctcggcaaccggacccacgtgcccgtgctctcctcctcggccacctcgccggtgctctccccttcacagacgcccttcttcgtgcgcaccgcggccaacgactcctaccaggccgcgcccgtcgccgcggcgctcgccgcgctcggctggcacgcggcggccgtcgtctatgaggactcgccctacgggtccggaatcctccccgcgctggccggcgcccttcagggcgtcggcgccaggatcgcaggccgcgccgccgtgccgagcggcgcggacgacgaccgcgtcgacgcggtgctctacggcctcaaggcgatgccgacgcgcgtcttcgtcgtgcacatgagcgcccttcccgccgcgcggctcttccgccgggcgaggcgcgcggggatgatgacggaggactacgcgtgggtcgccaccgacggcgtcggcggcgtcgtggacgcgctgggcccggacgacatcggcgccatggacggggtcgtcagcctccgcccgttcgtgcgggtgacggagcgggtgagcaacttctccgcacggttcagggcgaggctccggcgggagcacccgagcgccgacatctacccgcacgacccgaccgtcgtgatgctctggtcgtacgacacggcgtgggcgatcgcggcggcggccggtgtctccagcccgacgtttcagacatcgcagcagagcgcgggggtcacagacctggaccggctccgcgtgtcggcgaccggagcggcgctcctcaaggcggtgcgcgagacgaccttccgcggtctcgccggtaacttcaccctcgtcgacgggcagctgcagccgccggcgtacgagttcgtcaacatcgtcgggaaaagctcgagggcggttgggttctggacgccagaggctgggatcacgcagactctgggggccgaagccgccaaaaaagggctgaagaaaatcctttggccaggcgattccacgtccgtcccgagaggttgggtcgtgtcgcccaacggacgtaagcttcgcgtcgccgtgccggtgaagcatgggttcaaggagttcgtcgacgtcgccggtgagtcgacgacgggaggacatgcaaacgtcacaggctactgcatcgaggtgttcgacgcggtcatgagcaagatgccatatccggtgagctacgagtacgtgccgttcccctacagctccagttcctacgacagcctcgtgtcgctggtgccgagacagatagccgacatcgtcgtcggcgacgtgacaatcacggcgagcaggatgggcagcgcggacttcagcatgccgttcacggactcggggtggtcgatggtggtggcggtgcgcacggaaacgagcacgagcatgtggatcttcctgcggccgctcaccaccagcctgtggctcgccagcctcgccttcttctgcttcaccggattcgtggatcaacccgagttccgcggcacgccgtggcagcagttcggcctcatcttctacttcgccttctccaccctcgtcttctcgcacaaggagaagctggagagcaacctgtcgaggttcgtggtgatcatctgggtgttcgtcgtcctgatcctgacgtcgagctacacggcgagcctgacgtcgatgctgacagtgcagaagctccagccggcggtgaccgacgtgagagagctccaacggaccggcgcctacatcgggtaccaggagggctccttcatcaagaattcgctcaagaaactaggcttccacgaggccaagatgaggagctacagcacggcgggggagtacgccgacgcgctgtccaaggggccggccaacggcggggtcgccgccgtgttcgacgagatcccgtacctgaagctcttcttgtcgcagtactgcgacggctacaccatgtttgggccggtctacaagaccgacggcttcgggttcgtcttcccgataggcagcccgctgacgccggacgtgtcacgggtgcttctgacgctggcggaaggcgagaagatggcgcagatcgaaaagaagtggttcggcgagccgggagcgtgcccgagccagggcgccgccgccctcggctcctccaacctcagcttccggagcttcggcggtctgttcctcatcaccggcgtcgtgtccagcctcatgctgctcgtctacctcgccaccttcatttaccaggagcgcggcgaggtccggccagagccggaggaggaaggctcggggagctcgtcgtcggtgcgccggctgcgcgcgtggctgcggcacttcgaccagaaggacctcaagtgcgccacgttcagaacgggggaccacgactccgtcagggatggtgggaaccagactcagaggtgggcggagtccgtcaggtatggccgtggcggaaacgggtcggtgcaggcggcaatcgaggaggaagccgtagcaatgggcatgagccctctcaggttcggcacctccaccccgtcggagacgatgaacgccggctcgtccccggcgtcagagttcgggacctcgttcgagcagaggatgcaggaggcgccacactctgtgtcggtggagatgccaagatcgacgccctcttaa

SEQ ID NO: 11986 - DNA, 1623 bp, Zea mays
  Peptide Sequence Number=SeqID_53765
atggcgccggagaagccccggaaggaacaggaggaggagttgatgctggaggatggaggcatcgaggagagcccgcgccgcagcttcgaggactgcggcgactccgaggaggaccgcggggagggcgatgacgaggaggagcgggacagcgaccgcgacggcgtcggttcgacgcgctccttcctgccccaaaagtggccgcagagctacagggaaacaactgacacctacacaatcgctgcatcaccgagctttggttacttaggttcttctacaagcaaatactcgctcctcgaccttggtcgcagtattctgggctctgacctgaagtcacctctaatatcggccaaggctgattctgtcagaaacttgccgaaaacccttggttcaatgagagatgggagagtctcgtttcaattgcaacacacgggagaaatctacattagtcaagggtgcaatgtgacgcaaacagtcttcaacgggattaatgtgcttgctggtgttggccttctttccactccgtttacaattcatgaagctggatggactggccttgcagttctagcatgctttgcgattgtttgctgttatactggaattcttctaaaacattgttttgagagcaaagatggtatctcaagttatccagacattggagaggctgcatttggaagaattggccgtgtgttgatatctattattttgtataccgagctatattcatactgtgtggaattcatcattttggagggtgataacctcacatcaatttttcctaaagctggttttgattggcttgggattcatgttgatggaaaacattttttcggagtgttaactgctattttagtcttgccaacagtatggctgcgagatcttcgagtactctcgtacctttcagcgggtggtgtgattgcaactcttctcgtattcctgtccgttggtttagtcggtgttaccgatggtataggcttccattcaactgggaaggcagtaaactggagtggcatgccttttgccattggtatttatggattttgctactccgggcattcggtatttccaaatatctaccagtcaatgtccgatagatctaagttccctaaggcactgttcatatgtttcgcaatttgcacagcaatatatggctcttttgctgtcattggctttctcatgtttggaaagaacactttatcacaaatcactttaaaccttccaaagcattcgtttgcctcagaagttgcactatggaccacggtgatcaaccctttcaccaaatttgccttgttgttaaacccattagctcggagtttagaagagttgcgtcctgaaggttttatgaacgaaacatcatgcgctattatactgaggactgcccttcttgcatcaactgtatgcattgcctttcttctgccgttctttggtcttgtgatgtctctcattggatctcttcttagtatacttgtggcagtcataatgccacccttgtgtttcctgaagatcgcgcagaacaaagcaacttgtgcacaggtaatcgcaagcatttgtatcgtaatgttgggcgtcatcagtgctgccctggggacatactcctccgtgaaaaagattgtagaaaactactaa

SEQ ID NO: 11987 - DNA, 810 bp, Zea mays
  Peptide Sequence Number=SeqID_53766
atggatccagaaattgtcgattctttgatgccaccgtcagctgcgccgtcgtcgtccaatctaactccaacgtcccacgattttgagcatatttctcctaatgttccttcttctagaccaaaccagaaaaggtctggtaatttcactcaagaggaagacactttggttgtatccgcgtggctaaacattagtttggatgctgtgaatggcacaaatcagactcgtggtacattttggaagagagtttataattacttccacaccaataagacatttgattctgctcgatcacagagttcaatatctcatcgatggggttctattttggaggcagtaaacaagttctgtgcttgtatatcagatatcgaaggtagaaggcaaagtggtgtaaccttgcaagacaagattgttcaagcaatgactctgtttaagtctagagacaaggataacaagtcattccaatttatgcattgctggaacatattgcgtaatcaaccaaagtggcatgagaagcgaaaacagatggaggaaatcaaaaaagtttcacataaaaagcgaaagacaaatgtggattctattcctggcatttgcactcaaatatccgaggattcaagcaactgtaatattgttaatgagaatacaagggcagaggatgaacctcctaaaaggccaagtggaataaaaaaactaaagaagcacaacgtcgaagtggatccgattcttacttggaggcttctaagcatttctgggataaaaagaaagagttggatgctgaaaaagaaaagaaaaaagaggatagattccaactag

SEQ ID NO: 11988 - DNA, 143 bp, Zea mays
  Peptide Sequence Number=SeqID_53767
atggcgcacatgagccgcgcccagtcgcccttgcctgcccaggttcttcgcccagccgcaatccgctccattgaggacctcgaggatctgaggctcgaaagcttctcagatgtcgccgtcgtagctccatcgagggccctcct

SEQ ID NO: 11989 - DNA, 2346 bp, Zea mays
  Peptide Sequence Number=SeqID_53768
atgggcaggtacagcgacgggaaggacagcggcgagaccggcggcggcagctacccgctggtggcggtgtgcatcgacaaggacaagaacagccagaacgccctcaagtacgccaccgagacgctcgcccacaggggccagaccatcgtcctcgtgcacgtcaacaccaaaggcacctcgggcgagcaccatccttcatctccatgccgcggcgagcatcgtccatgtcagcttcgttcccgtggggtggcggacgccgccgggtacaagcagccgacggacccgcagatgaaggacctcttcctcccattccgctgcttctgcacgcgcaaagacatccactgcaaggacgtggtgctggacgaccacgacgtggccaagtccgtcgtcgagttcgccgcgcacggcgccgtagagaagctcgtcgtcggcgctagcgctaggggcggcttcgtcaggttcaaggcggaaatctgcaacaccatctccaagtccgcgcccgacttctgcaccgtgtacgtcgtctccaagggcggcaaggtgacgtcggtgcggcaggccgtccggcaggcgccggcagtgtcgccgctccggaccatgatccatgggcccaagccggaaccagagccggtgcacgcgcagaaatggacgcctccgcctccgcctccagcggttcaagacaaccacatcatgtcgccgttcgcgaggacgacggggcacagcgccgggtcggcgcggaaggcgttcccggacttctcgctgccggagtcgtcggacatatcgttcatcgggtccgccccccgcaggagcacggagcggtacccgccgcggctgtccagcgggtcggacggcgtggaccagcagcagcagcacagcttcgaggcgtcgcgcacgcccagccggtggggcgactcgttcggcaacgacagcacgtcgcactcccagaccagcacctcctcctggtgctcgcagcctccggacgagatggaggcggagatgaagcggctgcggctggagctgaagcagaccatggacatgtacagcacggcgtgcaaggaggcgctgagcgcgaagcagaaggcgctggagctgcagcgctggaagatggacgaggagcagcggtcgcaggagacgcggctgacggaggagtcggccatggcgctcatcgagcaggagaaggccaaggcgagggcggccatcgaggcggccgaggcgtcgcagcggctggcggacctggaggcgcagaagcggatcagcgcggagatgaaggcgctcaaggaggccgaggagcggctccggtccatggccgccggggcgcgcgagtcggcggtccggtaccgcaggtacaccatcgaggagatcgagatcggcaccgaccgcttcaacgaggcccgcaaggtgggcgagggcgggtacggccccgtgtacaagggccacctggaccacacgccggtggccatcaaggtgctccgccccgacgcggcgcaggggcggtcgcagttccagcaggaggtggaggtgctgagctgcatccgccaccccaacatggtgctcctcctgggcgcctgccccgagtacggctgcctcgtgtacgagtacatggccaacggcagcctggacgactgcctgttccaccgcggcggcggcgggccggtgctcccgtggcagcaccggttccgcatcgcggcggagatcgcgacgggcctcctgttcctgcaccaggccaagccggagccgctggtgcaccgcgacctcaagccgggcaacatcctcctggaccgcaactacgtgagcaagatcagcgacgtcgggctggcgcgcctggtgccggcgtcggtggcggacaacgtgacgcagtgccacatgacgtcggcggcgggcaccttctgctacatcgacccggagtaccagcagacgggcatgctgggggtgaagtcggacgtgtactcgctgggcgtgatgctgctgcagctggtcacggcgcgttcccccatggggctgacgcaccacgtcgggcgcgccctggagcgcggcaccttcgccgacctcctcgacccggccgtccacgactggccaatggacgaggcgcaccgcttcgccgaggtctccctccgctgctgcgagctccggcgcaaggaccgccccgacctcgccaccgtcgtgctccccgagctcaaccgcctgcgcgcgctcggcgaggacagcatggactcctgcacgaccatgagcggccgcggcggcatgcacagctcctcctccgccttccacggcaacccctattcgcagccacgacacgtaattaaagccactcctagttcttccttgcagaatcgtcgtttcctctga

SEQ ID NO: 11990 - DNA, 741 bp, Zea mays
  Peptide Sequence Number=SeqID_53769
atgtcgttcgtctgtccgacgcagcgaaacacggtttcattagacgtgacttttgctgagactgtctgtcatccagcttgcacatggtttgacgcgacacgcgcgctgcctcgccccccgtcagagtcagagtcaccggccggcctgtctgaactctggactctgaacaagccgcggccaggcgcgcgctgccaagcggcgcagcctttgcttgcggctcaaacaggaccagtggaactgtctcctccttcgccacacgcagcggacggagggcaggagggttcaattcggcgtacctcaggccggcaaaagccgagacgcgaacgcgaccctaccggctggccacgccgattgcaggccacaacctttcacggctttgctctctgcgcgccggggggagcggagaggagacacggtgaccacgtggaacgtgccaagcgaacacgctgtgcggccgtgcctggcacggtgcccaggctacgaacagtacagcccttgctgctcagggccaccgtgtggcacgggcatggctgtcatgtgaccgagctccagatcctagcctggtcggctggtcccccggcctgtggcctgccgggctgccgcagcgccatgcgccgcccgtgcaccggctgccggaacaaggtgcggaggctcgcggcttttacgagcccggccagcagcagcagccatgaatgcgtcgccggggaacacacgaggatgtcccacgtctactcctcgtag

SEQ ID NO: 11991 - DNA, 159 bp, Zea mays
  Peptide Sequence Number=SeqID_53770
atggctgggctgatgatgtttactctttttttatggctctgccgtttgcttcttttgggcctgcgattgcgagacagcgagaggcgccgccgctttggagggacgtacagcgagaggtcattcttcggcataatttatcttatgattgttgaaacatga

SEQ ID NO: 11992 - DNA, 300 bp, Zea mays
  Peptide Sequence Number=SeqID_53771
atgtccggtgcacaccggacagtccggtgcccccttccgaccgttggctcggccacgtgtcccgcgcagaacgcgcggccgaccgttggcccggccgaccgttggctcaccggacagtccggtgcacaccggacagtccggactgtcagagccagaattgtcgtaggtggcaagaactcctgcaataactcccaagaggagaagaacggcaagcgtgctggacactgtcatggagacgacaagggctttaactcctacccccgtgaagaaggttaccgaaactgttacgactcatgctga

SEQ ID NO: 11993 - DNA, 585 bp, Zea mays
  Peptide Sequence Number=SeqID_53772
atgcccagcttcaaagtcggaagcgtcgagcaattccagggccaagagagggaggaccgtcactgggataggctcctgcggtactgcgctgacaacggctcctatcaaggatgcccccttccaccaccagagtctccttattcagacgacgccagattcttttccaagtacgacgaagaccaaggtggaccttctgggcaggactacagccaagagcctgcctactgcaactacaaccaagagcctgcctactgcaactacgacgaccaagagccttctgacttcggttcggggcatgacactggtgttgctcaacctgaacctgcttcggagaatcaagagtcatggtccgaggagttgcctgaagacgagagccagccattcagcaacccccaagcagatgttgaggagacgccgaagcaggacggcgaggaaggggctgcagctgcacagggagacgcgcaggccgaccagtcgttgaccaacgacgacagtcagctccaggacgcaggcgcggggaagtacaccttccctcccggttggtgcgacgtttcgagcatcccggcaacgggctggggcgactga

SEQ ID NO: 11994 - DNA, 2328 bp, Zea mays
  Peptide Sequence Number=SeqID_53773
atgggtacaaaaatatacacctttgtaggcaaccagggcatgcaaaaacctaggttaaaaaaggaagaagccgattataactttcttgattaccatgagaaagttattgatggcttctatgacatctttggctcctctattgaatcctctaggcaggggaagatgccatcattagcagatctccaaacaggcataggggacctaggctttgaagtcattgtagtaaaccgagccattgatagtaccttgcaggagatggagcaagtggcacagtgcatcctgttggacttccctgttgccaatattgcactcttagtgcaaagaatagctgagcttgttacagataatatgggtggacctgtcaaagatgctaacgacatgctcacaaggtggctggagaagagtactgagctgagaacatcgctacaaacaagtttgttgcctattggttgcatcaagatagggttatcacgtcaccgtgccctacttttcaagatccttgccgatagtgttgggattccatgcaaacttgtcaaagggagcaattatactggtggtgatgatgacgatgctataaacataattaagatggacaatgaaagggagtttttggttgatctgatggctgctcctggtgctcttattccagcagatatcttaagttggaaaggcaattcgttaaattctaatcgaaaactcggcctgaatcgaacagctggatcatcaagtactgttgatgctaatgtggatcctactgtattgccacttgaacctaaaggtggccaactgcctttgttcagcagtggtgattggatgtcagacattgattctggatatgaggcagcagaaattgcagcttctactcaaacctcttcgggtgtcacaccatctgtttctgctggaagtgtttttggcagttcatggatgctggttaatcatgaccaatcagatggaccatcaacttctgctggtacatcatcgcagcagaaagttgtacctcaaagcgagcatcagcggaatttaaaccgccttccagatctgcaggaaattccagagtcaaaatacctttttgctgatcttgttccttctggggataataagtctaagaaaacttcagtaccattcaaaggaccagatcataggaacaatgagttgcaaaagcgcagagagaacattgtccctaatgctggaagaccacagcagcggttagttatgaagaattggtctccttacaatgatgtttccaacaacaaacagtacaattatgtcgaggattcgtttgctcgtagaaatgttggtaataatgctgcatcatcatcatcccagatgccacgaccagccgtaagatctaaccttaattctggattgcataatgatgcatcatatcataattatgatagcattatggctggtacctctgccatgaagattacatctacagctgagaccgggaaggttcctgaaagggttctgcgtggtgatttggacaagggtcaaacaaattatagattggaggatcaacatgtcatagttcaaccaccacagggaagacttccatggggtaatcctgcagaaggaagagttccaatgaatagagttcagagtcaagcaaaacaacacttggaaaacatggatgcaaagcaagaccataagaaattgctccctgatccaaaaaaatctccccttgacagattcatggacacatcattgccttcaagaaacatggacatgaggtcacagaggcttgacttcgatgatgtctctgagtgcgaaattccttgggaagatcttgtgattggtgaaaggattggcttaggttcatatggagaggtttaccgtgctgactggaatggaaccgaagtagctgtaaaaaaattcttggatcaagatttttatggcgatgctctggatgagtttaggagtgaagttcgaattatgcgtcggctgcgccatccaaatattgttctctttatgggtgctgttacacgccctccgaacttatctattgtatctgaatatcttccaaggggaagcttgtataagatccttcaccgccctaattgcctaattgatgaaaagcggaggatcaagatggcccttgatgtggccaaaggtatgaattgcctgcacactagcatgcctacaattgttcatcgagatctgaaatctccaaacttgctggttgacaataattggaatgttaaggtttgtgactttggactttcgcggttgaagcacagtacatttttgtcatccaaatctacagctggaacacctgagtggatggcacctgaggttctgcggaatgaacaatcgaatgaaaagtga

SEQ ID NO: 11995 - DNA, 132 bp, Zea mays
  Peptide Sequence Number=SeqID_53774
atggggatgggtggaattgggccctttgatctgaagaggtggttacgccttatatactgggacagagggagtatcactttttttgtcatattatcaacactaggtgaagactcgtgcgttgctacggagtaa

SEQ ID NO: 11996 - DNA, 147 bp, Zea mays
  Peptide Sequence Number=SeqID_53775
atgggctgtgcagggcccaacgatggagagatgaagcttcctccacggcagctgagccctagccgcgagcgtcttggtgtggcgcccaatcgcccaagtatctcccactgcgtcgcccgtggtctgcaagatgagtcgcaccgatga

SEQ ID NO: 11997 - DNA, 1608 bp, Zea mays
  Peptide Sequence Number=SeqID_53776
atggcgatggcgatgccgatggcagtggcgcgggtgaccagcctcgcctgcgccccccgacaggcgcagcatcgccgccgccatagccttgccccgccgtgcgcctcgggtgcggtggaggtgcgggtctgcacgaaccgcacgtgcgcgcggcagggtgggcgcgaggtcctggctgcgctcgcgggactcgcgccgccggcggtcgacgtggcctcctgcgggtgcctcgggcgctgcggcgccgggcccaacgttgcggcgtccgtccctgggagcgccgcggtgttcggccacgtgggcacggcggcgcgaggcgcgcagctactggagcacctcctcggccccgcggaattcgatgcggccctagggctcaccgcgctggccacgagggagaaggcggaggctgccctcgagaagggaaacgcggacgaagcggaagcccttctcaccgaggttattgggttcaatgcttgtggtggtctgcatttggtgtacatgagcaggtctaaggcgagattggaaattggggatatccctggtgcacttggggatgctgaggaagcaataagaatagctcccagatttcctcaggctcacttattgcgaggcgacgcactttttgcaatgggtgaatattctgtcgcggaagatgcctatgcagatgccttggatcttgatccatctattcgccggtccaagtctttcaggatgttcctcgccgacaagtacagctcgctgctgcccttccaccaccaccattccaagcccagccgacgccagcagcagaagggggaggcgcaccggttcggcacggcgctggccgcgcgcctccggggcctgctgccgctgccggcctccccgctcgcggcgctcgtgcgggtggccgacctcctcgcgctcacgctcgccgaggcggggcccgcgctcgcctgctccggcgagggcgccgccgtcgccgcccacctcgacgccggcgtcgcgctcctcgacgcctgcaacgccatcgccgcgcggctcgacggcctccgcaggcgccgtctcctcgccagcctcgcgctccacctcctcctctcctccacctcgccgtccgggcggacgcgcgcgcgcgcggcgctcgcggaccgcgaccccccggcccctccgccgctcccttggctcccgttcgagcagccccgcgggcagctcacggccgccgcgcgcgtcctcgccgccgtggacgccgtctcctcgctcgcggcggcggccgcggctaccgtcctcgccggaggacctgccaccttcccctgggtctccggcagcggcggcgacctcccctgggcggagccgttcaacgcgctgtccggccagctcgcggcgctcggcgccggcgaggtgcgcgccgtcgacgaggccgtccggaggctcgcgtcggcgctggactccgggaccgacaacgagggggccgtgcgcgccgcggcgcaggaggttgggaggcgcaccgaggagctcgcgccgcggctggaccgcctgtctgacgccgtcggcggcgtgttccgcgccgcgctgggcctccgcaacgccgagcttggatgcttaatggtgggacccgcggggaagcccgtgtag

SEQ ID NO: 11998 - DNA, 918 bp, Zea mays
  Peptide Sequence Number=SeqID_53777
atgccttccacttccctcgccgtccccaccggcgccgtcggcgtcgccggctctcgccgctatccattcatcagcaaccgatcagcctcaagcgccccgcgcctccgccgcgcgccccggctcgtcatggtctccgcctcggcgtctctcgaggccctcatctttgattgcgacggcgtcatactggagtcagagcacctccaccgccaggcctacaacgacgcgttcgcgaacttcggggtgcgctgcccgccgggctccgcccgacctgctgtactgggacgaggcccttctacgacaacctacagaaccgcatcggcggagggaagcccaagatgcggtggtacgtactttggggaaaatgggtggcctccttcaaagatctttgagacaccaccttcgactgactctgataaggagaagctggttgatataattcaggattggaaaacagagagatacaaagaaataataaactctggaactgtgaagcctagacctggtgtcttgcagttgatggatgaagtaaaggatgcgggtatcaagcttgctgtttgctctgcagcaactaaaagttcagtcataatgtgccttgaaaaccttattggacttgagcgatttaatggcctggattgcttccttgctggtgatgatgttaaactaaagaagcctgatccaacaatatatataacagcatcagagaaattaggtgtggaaagcaagaactgccttgtggttgaggatagtgtcattggattacaggctgcaaaaggagcaggaatgtcatgtataataacatatacaccttcaactgctagccaagatttcaaggatgcaattgctacctatcctgaccttaataatgtcaggcttgaggacctcaagctattactccagaaaactcttgttactggatag

SEQ ID NO: 11999 - DNA, 438 bp, Zea mays
  Peptide Sequence Number=SeqID_53778
atggaggtggagctcccatccacggggaacaggggaggcaatgaaaatgcactcggctgccctcgggaatcccgcgaaatccccctcgcgttcagagcctcgtcgggtggggttgttgcggacctgcagagcgcaggagcagccgccgtgcggggtactgtagatggcagcgccagcgcggggcagacgggcgtgattttcaccacggaaataaagaagaagggaaaacatggaagcttggcctccggtcgtgttcctctgaatatggacaggcagcagccctgggaaccatggcaattgcacagccaggttcaggctacggcgagcagcgcaagcgcagatggatttcgaacatggcaattgcacggcgcaggtgctgaactgcgccgtgcaattgccatgttcgaaatccatctgcgcttgcgctgctcgccgtag

SEQ ID NO: 12000 - DNA, 444 bp, Zea mays
  Peptide Sequence Number=SeqID_53779
atgtggccgctctcatcgagcgcagaagggcgactgatggtatggtacctcgccgacctcaaacccagcagcaggagctccagtggcatcgtgagctaccgggtacgtaagcaggagacggtgggaaagatccaggtccagccagggttcttgcaaatccatccatccaatccgccgcctacatcccgctgggcgctggccatggccatggccatcccattctacctcggcccctacttcgtcatcggcagcctagtgcgcctggtgtgggaccgcctggacccgggcagggtcaaggcgttggtgccccccgtcgcgtcgggcctcatctgctgcggcgacggcatctggacgctgccgcagtcggtgctggcggcctggcgctcggccgctcgccggcgtcaagcctcccatctccatgaagttcctgttccccagacctag

SEQ ID NO: 12001 - DNA, 3638 bp, Zea mays
  Peptide Sequence Number=SeqID_53780
atgtcggcggcgctcgcggtgacggacgaggtggccctgccgatccgggcggtgggggatctagcggccgccgccgaggtctcgcgggaggaggtcgccgtcatcacccagtgcgcggcgctcgtcattaaaaacgtggaaagcttgagggagcaattggttgctgaaatcaggcgggtgctgaaagctggtggaagagtattggtgcagagccctgcaccctcatccagtcagaagccgaacactgatattgagcgcaagttactgatgggtggatttgctgaagtgcaatcttctgctgcaagctcgcaggatagcgtgcaatctgttacagttaaggcaaagaaggctagctggagcatgggctcttcttttccccttaagaaaacaacaaaagcccttcccaagattcaaattgacgacgactctgatctgattgatgaagacagtctcttgactgaggaggacctgaagaaaccacaacttccagttggtagagcaacaaaacccgtcaacttagttcaactcccaaagaaagcatgcaagaactgtacttgtggcagggctgaggccgaggagaaggttgggaagctggagctcactgcggagcagatcaataaccctcagtcagcttgtggcagttgtgggttgggtgatgccttccgctgtggaacctgtccctacagaggtcttccaccattcaagcctggcgagaagcctggatgcctcttcttaattgagacgaaggacgtggacacggacaacctatacattttcccgcctcccgcgctcccctgctcgcttcttctcctttccctgctctgtttccgagggacggcggccgccaagaacaattgtccagccacgagccaagaacaggcgccttactctagcgccatgtcgtcgtcgctagtgtccaccccattcgccgccgcggcgcagaagcagctcctggcggcgcccgtgccgctgcactcgttcctcctgagcagccgtcgccagcagccgcggcgcgccggcgccatccggtgcgcggtcgccggcggcaacggcttgttcacgcagaccaagcccgaggtgcggcgcgtggtgccggccgacccgcggggcctgcctcgggtcaaggtcgtctacgtcgtgctggaggcgcacagctcaacgctgacccgcgccgcgccgcgtcgttcgaggtcgtgggctaccttccgcgccgacctcgccgacgtcaacgtcttcatcggctccctcatcttcgtcgaggagctggcgctcaaggtcaaggccgcggccgagaaggagcgcgaccgcatggacgccgtccttgtcttcccctccatgcccgaggtcatgcgcctcaacaagctcggctccttcagcatgtcgcagctggggcagtccaagagccccttcttccagctcttcaagcgcagcaagtccaactccagcaacttcgccgacagcatgctcaagctcgtgcgcacgctgcccaaggtgctcaagtacctgccctccgacaaggcgcaggacgcctggctgtacatcctcagcctccagttctggctcggcggctcggcggacaacctccagaacttcctcaagatgatcgccggatcctacttgccggtgcttaggggcgccggcatcaagtacgacgaccccgtgctctacctcgactccggcatctggcacccgctggcgcccaccatgtacgaggacgtcaaggagtacctcaactggctcaaggaccccaacgcacccgtcatcggcctcgtcctacagaggagccacattgtcaccggcgacgacggccactacgtcgccgtcatcatggagctcgaggccaggggtcacattgtctggggtgccaaggtcattcccatcttcgccggcggcctcgacttctccggtcccacgcagcgctacctggtcgacccgattaccggcaagccgttcgtgaacgccgtggtgtctctcaccgggttcgcgctcgtcggcgggccggcgaggcaggaccaccccaaggccattgccgcgttgcagaagctcgacgtgccgtacattgtcgcgctcccgctcgtgttccagaccacagaggagtggctcaacagcaccttggggcttcaccccattcaggtggcgctgcaggtcgcgctgccggagctcgacgggaaatcacatgcattgcataggagagtggagcagctctgcactagagctatcagatgggcagaactgaagaggaaaactaaggaggacaagaaactggcgatcaccgtcttcagtttcccacctgacaagggcaacgtcgggactgcagcatatctgaatgtgttcagctccatctactctgtgctgtcagacctcaagaaggacggctacaacgtagagggtcttccggacacacctgaagccctcatcgaggaggtgatccatgacaaggaagctcagttcaacagccccaacctgaatgttgcttaccgcatgaatgtgagggagtatcaggcgctcacctcctatgcctccttgctggaggagaactgggggaagccacctgggcacctcaactctgatggcgagaacctccttgtctatgggaagcagtatggcaatgtcttcatcggagtgcagcccactttcgggtacgaaggcgatccgatgcggcttctgctctcaaagtctgccagccctcaccatggctttgcagcatactacacctttgtcgagaagatcttccaggccgatgctgtcctgaactttggaacacacgggtccctcgagttcatgcctggcaaacaggttgggatgagtgatgcctgctaccctgacagtctcatcggcaacatccccaacatctactactacgccgcaaacaacccgtcagaggccacagtcgccaagcgccggagctatgcgaacaccatcagctacctgaccccaccggctgagaacgccggcctctacaaggggctcaagcagctggcagagctcatctcttcttaccagtctctcaaggacactgggcgtggtcctcagattgtgagctcaatcatcagcaccgcaaagcaatgcaaccttgacaaggatgtcccactgcccgaggaaggggaggagctcccaccaagtgagcgtgacctgatcgttggaaaggtgtacgccaagatcatggagatagagtcacggctccctccctgcggtctgcatgtgatcggcgagccgccaaccgctattgaggcggtggccacactggtgaacatagccgccctcgaccgccccgaggatggcataatctcgctgcccggcatacttgccgccacagtgggcagggacattgaagatgtgtacaggggaagcgacaagggcatactggctgacgtcgagctcctgaggcagataactgaagcttcgcgtggcgccatcactgcctttgttgagaagaccacaaacagcaaagggcaggtcgtcaatgttgccaacaatctcagtaacatacttggcttcggcctttcagaaccatgggtgcagtaccaagacaatgagctgggcagcggcagaggctactgggagacatcggaggagaacctggacaggctcagggagctctactcggaggttgaagacaagattgaggggattgaccg

SEQ ID NO: 12002 - DNA, 594 bp, Zea mays
  Peptide Sequence Number=SeqID_53781
atggagctcgaagctgaccgtgacgccgccgccgcgactttgcaggctccctggcgacttcgggttcgatccgctggggctgggcaaggacccggcgttcctcaagtggtaccgggaggcggagctgatccatgggcggtgggcgatggccgccgtgctgggcatcttcgtggggcaggcctggagcggcatcccgtggtcgaggccggcgccgacccgggcgccatcgcgcccttctccttcggctcgctgctgggcacgcagctgctgctcatggggtgggtggagtcgaagcggtgggtggacttcttcaacccggactcgcagtccgtcgagtgggccacgccctggtcccgcactgccgagaacttcgccaacttcaccggcgaccagggctacccgggcggcaagttcttcgacccgctcggcctcgccggcaccgtcaaggacggcgtctacgtccccgacgtcgagaagctcgagcggcttaagctggccgagatcaagcacgcccgcatcgccatgcttgccatgctcgttttctacttcgaggccggacagggcaagacgccgctcggcgcgcttggcctatga

SEQ ID NO: 12003 - DNA, 372 bp, Zea mays
  Peptide Sequence Number=SeqID_53782
atggcgagacgggaggaggacgggaggaatccaatgcggcccgtcgggaaggtagtggtggaccggccacggcatgtcggcatgacggccgtcacttgtggcgggttggcagtggccaatgcccagcagccccaacaaacagagaaattagtagatgccaagaaaaggcgcatggagcagcagcagctgctccggccaccgcgtcgcagtcgacgcgcaccgggcagtaatattctaccaccgtccccgcgctcgcgtccctgctgtagtggtggctgtcctgatggcgacgcccacggccgacgtacggatccaacgaagaggtcgtcgccttctgccattccaggaccaggaccagggcagggtgggtag

SEQ ID NO: 12004 - DNA, 2751 bp, Zea mays
  Peptide Sequence Number=SeqID_53783
atggacctcgacccggcctatcccccatcagcctgcgccgacgcctggccctttgactcgctcaccacgtccctgctcttctccccgcagctcacgccgataccggccaactcatccttctcctggctcaccccacactcgccgctctggctcttcgaggaccgccacctgctcccgctcgacgcgcccgccgtcttcgaagaggtccagcggccacgctccgggaattctcacacttcaagcaagccagctgaacagatcagtcacagatggcagtttcatctgtccctggacgaagatggcacagacaactccagcttgttcaaggagaagctgacacacgctcttcgctacttcaaggagtccacagatcaacatctgctggtccaagtctgggcaccagtcaagaatggagaccgctatgtgctcactacttcaggacagcctttcgtgcttgaccaccagagcattggcctacttcagtacagggctgtatccatgacctacatgttttcagttgatgcggaaaatgttggagacctgggcctacctgggcgtgtctataagcaaaaggtgcccgagtggacaccgaatgtgcagtactatagcagtggtgagtaccaacgacttaaccatgcgatcagctacaacgtccatggtacagtcgccctgcctgtttttgatccttccgctcactcgtgtatcgctgttgttgaacttataatgacatcaaagaagataaactatgcctgcgaggtcgataaagtctgcaaagcacttgaggcggtaaatcttaaaagcactgaaatacatgaccatccaaatgtccagatatgcaatgaaggccgtcaagctgcgctggtcgaaatactggagatcttgaccgtagtatgtgaagagcacaagcttcctttggcacagacctgggttccttgcaagtatagaagtgtcttggcgcatggtggtggtttaaaaaagagctgcttaagttttgatggaagttgcatgggggaggtctgcatgtcaactagtgatgtggcgtttcatgtgattgatgctcatatgtgggggtttagagatgcctgtgtcgagcatcacctacagaggggacaaggagttcctggaaaggcgtttatctcacacaaaccttgcttttcaaaagatatccgcaagttctgtaagttggcatatccccttgtacactatgctcgcatgtttgggttggctggctgctttgcaatatgcttgcaaagttcttatactggaaatgatgactacatattagagtttttcttgccgcccgattgtagtgacgaagatgaccaaaatgccttactggagtctgtattaactctgatgaagaggtgtcttcggagcctaaaggtagttggtgacagagatttgagtggggtctctcttcaccttagcaatgtgctaaaacttgagaatgaagaattcaagacagatgcacagtttgataactctgatggttccctttgccaatcacctaacggtgatagacatggaggatcccatgagtttgatggtgggaacaagaaggttttggatgtgccagagggacaattgttgactgatgacttctctcaaggcaatggtacttctgctggcagaccaaatggtagcggtgcttctgattcttctgtgcttcacaaaaccaacaaaccccctgaaaggaaacgtgggaaagccgaaaagactatcagtttagaggttcttcagcaatatttttctggaagcttgaagaacgcagctaaaagccttggtgtttgtcctacaactatgaagcgcatttgccggcagcatgggatttctcgttggccatctcgaaaaatcaataaggtcaaccgatctctctcgaaactaaagcaggtaatcgagtctgttcaaggctccgatgcggcatttaatctcacatctatcacaggtcctctccctattcctgttggcccttcattggattctctcaatgtagagaaattaactcaaagtaaagtggcagaactttcaaatatcgctgttgatggtgacagagattctttgcaaaagtcacttggaaatgatggccattttggtatagtcatgccccagcaaggatctacagaccataacaatgacacacagcttgaagctgacaaggcgtctcactcgagaagttcgtctggagaaggcagcataaattcacgcacttcggaaggctcatgccagagaagtccagcgaaccagacatttgtttgcaagccaattgcttcaacattcgcagaacctcaacttaatccagaggagttcaataaagagcctttccaagaaccacaactaccactttccaggatgctcattgaagattctggtagctccaaagatttgaagaatctcttcacttcaacatctgaccaaccatttttggcccctcccaataatttggtgccaatgaagcattcagggtctgtaacgataaaggcgagttttaaagaagatattgtgaggttccgtttctcatgctcaggcagtgttattgtattgaaagaggaggtagcgaaaaggctaaggatggatgttggcacgtttgatatcaagtatctagatgatgaccatgaatgggtaaagttgacgtgtaattcagacttggaagaatgcatggagatctcacggctttcgggtagccatgtcatcaggttatctgttagcgatattgcgacacactttggcagttcttgtggaagctccggttga

SEQ ID NO: 12005 - DNA, 330 bp, Zea mays
  Peptide Sequence Number=SeqID_53784
atggccgacgtggtgcctcaatcctccggaactggaatcgtgcgccgtgtgacaattcgttttcgtgatttttccacagatggtgggcatggtgcgcactgcgcagtgtcactgccgccataccggaccggcctggggaagaacggcaacagcgacgctggctggctgcccctctgcgggcagctactgacgtccctttcccatgtgttccatttgcacactcgcgagcgctctgctgccatgaacatgagcactgctgtgatttggactgccagttttggtgcaaagggggaaggaacttcagcaatcttggttcaggatcagagataa

SEQ ID NO: 12006 - DNA, 2043 bp, Zea mays
  Peptide Sequence Number=SeqID_53785
atggatggcaacgctagtgcctgtccgctttacatcagtctgcagaaggaacaggaagctggcccattccagtcccaggcttcgatccagatcctatcctggatcacggaggctttacttgccatctgcactcgtgctcaagcacatgctggaacagtgctgtctcactcgctccgctctcctccccgagaccaggaggccaagccaagaaccgcaaaccctcaggccgtggccatggcgcaaggagcaggacgggacccggaggagctcttcgaggagctgtggcgcgcctgcgcggggccgctcgtggagttgccccagaccaacgaaagggtcttctacttcctccagggtcacctagaacagctgcaagagccgacggacccggcgctgctggctgagcagatcaagatgttccaggtgcccaacaagatcctctgcaaggccgagacagaaacggacgagatgtacgcccagatcactctgcagccggaaccagatcaagtggatctaccccaattacctgaaccgcccctgcaggagacgtcaaggcccgtggtgcactccttctgcaagatcctcacaccatccgacaccagtactcatggcggtttctccgttcttcggcgtcatgcaaacgaatgcctcccagcactggatatgtcgatgccgaccccgacccaagagctcatcacaaaggacctacatggatctgaatggaggttcaagcacatatacaggggccaaccccgtcggcaccttctgactactggatggagcacgtttgtcacatcaaagaagctgattgctggtgacgcgtttgtctacctgaggttaagccaaagccaatacatcgtcaggctgaacaagtacctggaatctagtaaaattggattcgatgtgggcatgaggtttaagatgagttttgaaggggatgacgtccctataaagaagttttctggaacagttgtcgataaaggagatctttctccacaatggcaaggttctgaatggaagacattgaaggtcaaatgggacgaagccacaaacttaaatggccctgagagggtttcctcctgggaaattgaaccattcgatgcatccgcacctgccatcaccatgcccgtgcaaccatcaatgaaaaacaaaaggcctagggagacagctgaaggcctggatattcatgcactggaacctgctcaagaattctggctctctggaaggcctgaacagcatgagaagacaagcgtaagctccagcgaacccaaacatcaagtcgcttggacaagtgaacgcgcaggatacagtgccatgagcagttcaatctgtcagaattctgcagtaactgggagctggttcaagggcttcaattcctccggctcacacccttccctgccagagatctcccagaaactgtttcaggtcaccagcaacgacgcgagggttcctccttggcctgggctctccgcttatcatgctgacgagccctcttccaagctgtcctgcaacactgctctgtgcagctaccagaccgaggaggtggctccaagattttccaatgccgtcgaagaggaaaagaaggagcccggcatgttccgtctgtttggcgtcaatttgattaaccatgctaggagtagtgctaccgctgacaagacgagtgtgggagcaggggaaacatcggcgcgagctgctggttcttttgaagactctgctcagctatcaagagtgacgaaggatcatacgcacatggtgaacggaagcccccgagaaatccaaagccaccagagttgcagtggaaggagtcgtatcaagctgatgggtgaggttggagagatgtttgagatcaaagaccttggctccaaagagaaagaggaatggaaggttactttcattaacgacgagaatgagacaatggaagtcggagctgttccttggcaggagttttgccagatggtgaggaagatcgtgatccattccattggagacaggggccatatggaggcttgcccttgcctggggcaggatgggaagagggactattag

SEQ ID NO: 12007 - DNA, 786 bp, Zea mays
  Peptide Sequence Number=SeqID_53786
atggaggcggtctcaatgtcgccgtcaaccgtctcctcccacacccacgacgaccacgacgccgcttccgtcaccgaggccatgtccttgcaggaaggcctcctcttctccgacaccctcaaggacctgaggaatctgcggtcacagctgtactcagcggcagaatattttgaagtattttacaggaacaactcgcacaaatctactgtgatgacgagtttgaaagattacacagttgaggcccttgttagcacagtggaccatctgggttttgtgtcatacaaggtggataaccttgtcagcgagaaagctgtcgaggttaaggagactgaattcctagtgtcttcagttgaacagagggtacgaatttgccaacagacaactgaccaggaggcaagatcccagcaagctcttcttatcaaggcgccaaagcgtgaaccatctcctacacctaacgatcggtcgcggtcgttatcgccttctcgtaaagcacgagctaaatctccatctcctcgaatcgtgaacacaaatactgcaagagaaacaagggcaggctccccgataccaaattccagcccgatggcacggtccgcctctacggttgcaagaagaccgccttcgaactcgaggcatttgagactagcttccatgcagttgcacagcgactgggagcagcaggagagaagctcaagcaaaggcaggaggggtttcctcaggtcgctgctcacgaggcgccggtggaggaacgacgagtcgtccttgtacagttacttggatgagtactga

SEQ ID NO: 12008 - DNA, 123 bp, Zea mays
  Peptide Sequence Number=SeqID_53787
atgacgatgctacatggcaccactgataagcataggcggatccagaggggaggctgctcgctgccctatttccgtcgccgacccattcccgatgcgacgccacccgacttcaccccttcctag

SEQ ID NO: 12009 - DNA, 381 bp, Zea mays
  Peptide Sequence Number=SeqID_53788
atgggaacaaatgggcatctcgacctcgacacgggaggtaaatctgtcgatcaaaaggtgccaaaggttcacaatagaccaataaaaagacaaagaaagggttcaaacgaagagagaaaaagtcagtcgaaggcagccctcgtctggcgcaccggactatccgatgcaccactggacagtgtccggtgcaccagggaatccaactccaaacttgccagtctcgggaattctgagagccgctccgctaaaattcaccggactgtccggtgctacaccagactgtccggtgtgccagcggagcaacggctacttcgcgccaacggtcttctgcagaacgcattcagtgcgctacagtgcgcgccagagtcagagcagcgttag

SEQ ID NO: 12010 - DNA, 849 bp, Zea mays
  Peptide Sequence Number=SeqID_53789
atggagtcaccgttccgggccgacgtggtcaaggacaaggcggcgctggtcaccggcgggggatccggcatctgctttgagatcgccgcccagctcgcgcgccacggcgcgcaggtcgccatcatgggccgccgccgggaggctgttggtttcgatggagatgtccgcaaccaggaggacgcggccagagtgcttgctgcaacagttgcacattttggcaagctcgacattcttgtgaacggtgcagctggcaacttccttgcttccccggaggatttgacgcccaagggattcagaactgttcttgagatcgacactttgggtacatacacaatgtgctatgaagccctcaagtatctgaaaaagggtgggccaggaaaaggcccgtccactggtggactaatcattaacataagtgcaacactgcattacagtgcttcttggtaccaaatccatgtctctgctgctaaggctggggttgatagcatcacaagatcactggctctggagtggggaacagattatgacattagagtcaacgggattgcacctggaccaattcaagacaccccggggctgaggaagcttgcacctgaagaaatgagcaaggggcttcgagaaatgatgccattgttcaaatttggggagaagcgggacatagcaatggctgcgctctaccttgcttctgatgcaggcaaatatgtaaatgggacaacactggtggtcgatggaggtctttggttaagtcaccctcgccatattcccaaggaggaagttagggagctgtcgaaggtggttgagaagaaggttagggcctctggtgttggtgtaacatctagcaaattgtga

SEQ ID NO: 12011 - DNA, 1104 bp, Zea mays
  Peptide Sequence Number=SeqID_53790
atggcctcctcgctccgccatttcgcgggcctcggctgtttctccgccgcggcgtctagctctgcctccaccagcttcctgcccggctacgcccccgacttctgcgtattcgtggcgctccgtccgatcaagccgcccgccaccgccgtagcgaaccctcccgcctctccatctccgctggaggaggagcaccggcagcaggccgccgttccatggcacagcgacgacccgccagcaccatccgttcctgcgccgctgcgggtggggatcgtcgggttcggcaactttggacagttcatcgcgggcggcgtgcagcggcagggccacaccgtgctcgcggcctccagaaccgactactctgcctactgcgcccagcatggaattcgcttcttcaggagcgtcgacgcgctgtgcgaggagcagccggacgtgctgctcatctgcagctccatcctgtccacggagagcgtcgtccgagccatccccttccacaagctccgccccgacaccatcgtcgccgacgtgctctccgtcaaggagttcccccgcaatctcctcctcgaggttctcccaccaggattcgggatcatctgcacacacccgatgttcgggccggagagtggcaaacacggctggggcaagcttcccttcgtcttcgacaaggtccgtgtcgcggacgacggggatcaggcggcaacgtgcgaccggttcttgagcatatttgagcaggagggttgtaggatggtggagatgtcgtgtgccgagcatgatcgctacgccgcggggagccagttcatcacgcacacaattgggagggttctgtcacagctgaacctcagttcaaccccaatcaacaccaagggctacgagaccctgctgcaacttctcgacaggctggaaatggcatttgagaaggtgagacagatgttgtctggcaggctccacgacttcataagaaagcagattgtggagagggcggacccttcaggaaaattggcaaatggcaggtccagttctcctgcagcgcaccacttatcgacattaacagaagaaaataagacacgtgtatcccccgctcttactctagcctctcctacgctttag

SEQ ID NO: 12012 - DNA, 534 bp, Zea mays
  Peptide Sequence Number=SeqID_53791
atgacgatcgtagagatgcatgtgagcatcgactgcgatggctgcgaggacaacgtcaggaaggccctggaaaagctcaaaggagtgcaccacgtaagcatcgacaggatgcacggcaaggtgactgtcactgggtcggtgagccagaggaaggcgctccgcgcggcgcggcgcacgggcaagctcgccgtgctgtggccgtccgcctacaacaacccgtcgtaccaccaagcccacgcgatgcgggcctactaccagtaccagtaccaggccaataagcccgcgcaagcgcagcagcaccagtactacagcagcgtccagcgcgccggcaagaacagcggcggcatctcggcggtggctacgaagccggcggggcatcagtacccccagtccaaggccagctcctacaactaccatgtccacgggtactatgactccgagctgtacgggtactaccacgaccacgagcagcccggcgacgtagtgccagccgccgtgcggtcctactcagcgacgagaaacgaatcaagctga

SEQ ID NO: 12013 - DNA, 176 bp, Zea mays
  Peptide Sequence Number=SeqID_53792
atggccggtatatatggaggctggcagagggatggcagcgacgacgtggagatagaagcgtgcgatgagaggctggcctctcggccccatctgtcggcgccggttgccacaccctacggcatgcccaacaaggtggctaactggccgtgcgagggattcagcctagccgagcacag

SEQ ID NO: 12014 - DNA, 645 bp, Zea mays
  Peptide Sequence Number=SeqID_53793
atgaaggcccccaacacctttggaagccaacttcagcaccaagcatgttacacatctggcatgggcgccatccatgggaccatcacctgcacacataagcgcaagggcaagtgggagcacactctggcaaacagaagtccaaggggaggtttgaaaaggaggctctcaagaagaagtgcctctagaaattcaaagatcaaggagcgcgccttccttgcctccctgaccgacctcggcctcgacttcgtcgagtcggcctcttctttgagcgatgaggagctcgagaggcacattgggtacaagctcaatgggttgtgcttcatcgccgacaccacaaaaggcctttgtaccatggaccgtggtgatgatgtggtgggtagcggcggcaaggacatcagcgatgactccatttttgaggtatctcattccgccgatgatctcaccgctgaggtagaggagctaacaactgctttggctagtcaggatacattgattaggcttgcttctcgtgagaggaaagactttaaatccaagtatgagagcacgcttagggagcttgagtcaactagagcttctgttgtggtgtctaacgagactgagtttgatgggtgtgccctacacatgtcgaacatcaccacattgtag

SEQ ID NO: 12015 - DNA, 405 bp, Zea mays
  Peptide Sequence Number=SeqID_53794
atggaagtggagtcgagggcgcatgcgcgctgggcagcgcggggagcgattgctgggccgggggccaagcggtggagagggagacacgaggctgctggtgagggggtcaacaacaggatggggatgggactgcgtggcaaggatgagatctgcggcgcagtgcagcgaggagtcgccaaggatgaggtgtgggtgatgccgaaagcagcaggaagcgtcagggcggcggttgcgccgagcaccgcggggatctgcagacctatgctggaggggacagcgacgacgcggctgtccgcgccggagaggtccgcggcggcgtatgctgtggagggcgcgcttgggccggtcgcgttgtctgccatggagactccgacggctggggtcggggacgcgcgtcggcagtag

SEQ ID NO: 12016 - DNA, 567 bp, Zea mays
  Peptide Sequence Number=SeqID_53795
atgacgaaaatcataggggaaaacttaccaagaatcacgcgcagggaatctagtggcacgacaggatctagcccaaggcggtggtgcaggtcgtccagtcacgacgactgttcgtcggtgaggaagcccatagtgacgtgcactggtggtcgtgccggtggcgcgtctcccgtggccgcgcgattaggccgagctcggcatcaaacttgtctggtcgtcgctaaggaagcacatggccacagtgctctcttctcacccgcagagacccagccgaaaggggggtgcacaccggcggtggccacaggcgtgtaccggcaagccaagcctgagttggttgcacgatccgtggggaaaggagacctggatgccgagacccgcacgtcagcacgcaaaattctgggctgggccgcggaggaagcggacgcgcacgcgattgggaggctgactagcgggcccagtgtcatccacccaagcagcatggcgactagggtttggcgtgtgcaagcgctgctgggctggttggatggctgctgggccacacggctgagggagaaatgggccgaatga

SEQ ID NO: 12017 - DNA, 180 bp, Zea mays
  Peptide Sequence Number=SeqID_53796
atgaaggcatgggagagccagtggtatgagtgcaacgaagaatggagttgtgtccaagattacacgcggtatgatagagtgatgggaatggtaaaggaagtaacaaataagaacacaacaaaggatagagttaaaaactctcagatgacaaagaagaggacacgaccaagggaaaagtag

SEQ ID NO: 12018 - DNA, 240 bp, Zea mays
  Peptide Sequence Number=SeqID_53797
atgcagaggagggcgcgggatgcagaggacggctgcgcgggatgcagaagggggcgcgggcaccagcaccttcctcaaacggcgcgggcacgagctccttgctcacgcgggttgcagatggcggacattgcagacggcggcgcagattctccggcactcgtctccggcggcgcgggcgagtctgaagagcggatgagtgtgcagtcagcaaggagactctgcgccgtaggggtactttag

SEQ ID NO: 12019 - DNA, 342 bp, Zea mays
  Peptide Sequence Number=SeqID_53798
atggcacgcaacacactaaataagatcggacgtgggagcaagctggcaggtgggtccctatcggtgctccttcctttgatcgtatgcctggcagcctgggtgaaaccacgttttttcttcaaccttgagaacgtgtgcggtgcaacacggggaggacagggatcgttgatcggtgtggagactcgccggcggcatgactgcctcggcatacaacagcagttcgccggacaggaggcggcgcaccggcactgggagtggcaccggcaagcaggtcgtgcccgcacgcagcatgcgaccatggaggagggagaaagagctaatgtcgcgcgggggtcttcatga

SEQ ID NO: 12020 - DNA, 342 bp, Zea mays
  Peptide Sequence Number=SeqID_53799
atggcacgcaacacactaaacaagatcggacgtgggagcaagctggcaggtgggtccctatcggtgctccttcctttgatcgtatgcctggcagcctgggtgaaaccacgttttttcttcaaccttgagaacgtgtgcggtgcaacacggggaggacagggatcgttgatcggtgtggagactcgccggcggcatgactgcctcggcatacaacagcagttcgccggacaggaggcggcgcaccggcactgggagtggcaccggcaagcaggtcgtgcccgcacgcagcatgcgaccatggaggagggagaaagagctaatgtcgcgcgggggtcttcatga

SEQ ID NO: 12021 - DNA, 225 bp, Zea mays
  Peptide Sequence Number=SeqID_53800
atggcgtgcagtgtggcagaacgcaaaactccgacgagcagcacgtacagccacatgcatagggggcgaggcagcggtgttgcttggctgtgttgctatggagatgagggggcgctcggtatcgggcgtagcaaattaggccagaggctggtcagcagcgagaggctgcgtgctgacttccgatcgaaagatgcaaaggagaagaaacataaaaaaaatgactga

SEQ ID NO: 12022 - DNA, 1800 bp, Zea mays
  Peptide Sequence Number=SeqID_53801
cgccgcccgccggccgctgaccctccgccgcccgtttctccaccatggtacgccgcgccgcggtcgacgctcccggccgcgaccccgcccccgggcgaggcggatcctctcgtcgtcgcggcgtccgagattgcgctcggcctccccttccacccagcgccgctcccggccgccgcgcccgcgcccttgctccgcctcctcccggccttcacccccactcactttctctccctacttcgccgcaacccgctcgccctccagccgctcccgctcctttccctcttccgcgtcctcctcgcctcgccgccgggcctcttccgtcacaccccagcctccttcctctccatgtctcacctcctcatcgcccaccgcctctctcaccttgcactccccctcctccgccttctcgtctcccgccttggccgcgactccccgccgcggctactcccgctacttgtctccgcagcctcaaccgacgacccggcgcctctcgtgtccgctgtcgccaaagtatacgccgatgagggcctcctacccgatggatgctccctcctcctcctcgcgctccgccgtggcatccgcgtccccatgccagcgtggtccgatctcatgaatcggctcccatctgttcccgaagcctacgccttctacctgcacctgctcgacgccggcgtgcccccggaggccaggcagtttaacatgctaatgcgtgacatgattagatcaggcaaacttgccagtgcgcggaacgtgttcgatgaaatgttgaggaggggtgtgcagccaacggtagtgaccttcaacaccttgatgtctgggatgtgcaaggcgtccgatctgaacaacgcaaatgctctgcgaggcctaatggcaaaggcaggaatcgcaccagatgtgtacacctatggtgcttttatacaggggctgtgtaagacagggaggatacaagatgcaatggagatgtttgaggaaatgtgtgagagaggtttgaaccccaacactgttgtgctcactacattgatagatgcacattgcaaggagggggatgtgacagctgggttggagttgcgctgggagatggccacaaggggtgtcaaggcggatttggtggcatacaatgctttggtgaatggtttttgccgagtgcgtgatatgaaagcagccaatgacattgtggaggagatgagaaaggatggtctcaagccggacaaggttacttacaccaccctcatcgatggttgctgcaaggagggggagttagacacagcaatggagatgaaacaagagatgtcagacgaaggggttgcgttggatgatgtcacatacactgcgctcatctctggactgagcaaggctggccgttcagttgatgcagaaaggatcctatgtgagatgatggaggctggtttgcaacctgacaacacgacatacacaatggtgattgatgccttttgtaagaatggtgatgtgaagacaggctttaaacatctgaaagagatgcagaataagggcaaaaatccaggaattgtgacatataatgtggttatgaatggcttctgcagtctggggcagatgaagaatgcggacatgcttctgaatgccatgcttaatattggggtgtgcccaaatgatataacatacaacattcttttggatgggcattgcaagcatggaaaagttagagatactgaagaactgaagagtgcaaaaggaatggtttcagattttggggtttatacttcactaatcaatgaatttgtcaagaaaaagtcagctaagagttaccatgataatggatag

SEQ ID NO: 12023 - DNA, 615 bp, Zea mays
  Peptide Sequence Number=SeqID_53802
atgaagtatatgggggagcttggattgaacttcgaagtataccgcaatgatgaactgaccatagaagatgtgagaaggaagaacccaaggggaatacttatttctccaggacctggtgaaccacaagattcgggaatatcattgcagactgttcttgaattaggcccaaccatcccaatttttggagtttgcatgggtctgcaatgcattggagaggcatttggaggaaagattatccgtgctccttctggagtgatgcatgggaaaagctctccagtttattacgatgaggaattaggaaaggcattgttcaatggcttgccaaataaaaccttccgagttgacgccgccttggcaccctttgcttccatggacagcccttttactgccgcgaggtaccacagcttggtcattgagcaagaaaccttcccacatgatgctttggaggctactgcatggactgaagatggacttatcatggctgctcgccacaagaagtacaaacacatccagggtgtccaattccacccggagagcatcatcacccctgaaggcaagaaaatcatcctcaactttgtcagattcattgaggaactggagaagcagcgttcgtag

SEQ ID NO: 12024 - DNA, 264 bp, Zea mays
  Peptide Sequence Number=SeqID_53803
atgaaaagggagcaggaggagaccatcaccgtcccagacactggtacatggaggtcagttcattatgtagcgtttctcatgacagttgaggctactgagattggagagaccatgttgcagtatgggcttgaacctcaggagtatggccctgtcatcgacgggtcgttttactgggaatcagccactcatcagtgcactgctatcattggagcacttgcttcagcggcagcatatgggatggagaaggcagttcaagctagatag

SEQ ID NO: 12025 - DNA, 927 bp, Zea mays
  Peptide Sequence Number=SeqID_53804
atggcgaggccgctccgtcccgcggggtcgcccaacgtgagagcccacgcacaccaccctcttctcctactaattcttttgctcttcctctcctccactgccattccttcctccaagagaacccagccgaagttctctgccgtcttctacttcggcgactcggttctcgacaccggcaacaacaaccatctccccacggtagctgtggcgaaccatgctccttacggaagggacttcccagggaagaaaccgacggggaggttttccgacggccggcttatcccagacctcctcaacgagaggctgcagctcaaagagttctcgccgccgtttctggacgcaaggcttccgaacagcgacgtcgcgacgggggtgaacttcgcttcggctgggtcaggattcaacgaccagacgtcgcggctgtccaacactctgccgatgtcgaaacaggtggacctcttcgaggactacctgctccggctcagaggcatcgttggggacaaggaggcttccaggatcgttgccagatctctgatctttatcagctcggggaccaacgatttctcacactactaccgttcgccaaagaagaggaagatggagattggtgactaccaggatattgttctccagatggtacaggtttatgtcaaggaactgtatgaccttggggggcgacagttctgtttggcaggccttccgccgtttggctgcacacctatccaaatcacgttgagcggagaccctgacagggcatgtgtggatgagcaaaactgggatgctcatgtctacaactctaaacttcaaagacttcttgcaaagttgcaaggctcactccatggaagcagaattgtgtacgtggatgcatacagagctctcatggaaatcctggagaacccggccaaatatggtaatgctttctgttaa

SEQ ID NO: 12026 - DNA, 393 bp, Zea mays
  Peptide Sequence Number=SeqID_53805
atggacgtggggtcatcggagagggcgcaggatatcgcgcaacaacgggaggggatgctgaggagatgttgcacgtcctcaccgaatccgagtacgagctctcgctcaccaacctcgtcgagaaggccgcgggcgggggcggcggagccgaagctacgccccgcacccaagacagagggaaaggaccggagcgccgcacagccagcagcagctaacgtcgatagcgaggagtcccgggcggaggtagttggtgggggcagcttccacagcatcaacgatggcgtcttgctcaccttctacatgtcgcgggcgcccacctgggagcttcatcgtgcgccttgctcgaacgccgtcgtccgcctccatctgccggagccccaacatcgcatctga

SEQ ID NO: 12027 - DNA, 327 bp, Zea mays
  Peptide Sequence Number=SeqID_53806
atgcagcggcacgactttgtgaaccagcggtgcgccacgctccagcgctacctccgccgcctcgccgtcgtcggccatagccccgttctccacgcctccctcaccgccaccgggcccaacggcatacccacttccgacgcggtaagaccgcctccagtggaggaggagattgacacaaagtaccttgtgcacaaggccaagcttgaggacctggagaaacatctggtgacagcatctcagcaggccacatactcggaccattttgctagcatatggacaaagcgtgaaaatagctacaccattgagaatcatgcgaccggcgtatag

SEQ ID NO: 12028 - DNA, 1062 bp, Zea mays
  Peptide Sequence Number=SeqID_53807
atgaagatcgtatacaacgttgcaacgcagattaactcgacggacagccgctccagcgcggctgcgtcccaaaccgccgacgaaactaaccttgaggcagctacctccccggagatccggccggatgctcccccgccaaaatctccggctcccgcagcgagatcgcacggccgacaacgtacgcgtccccgccccgcccgcccgtacggtggcgacgagccctggcggccggcaagcgtgtcgagccaggcgaggcttagcttgcttttgtcgcgcccgggctggcgcagcagcgccctcggctcccgggctaatgcggatttgggcggcggtttggcagcgtcggcgtgccagccagttcgtcgtgcgcggctaccaccacccatcagcaccttccacagccacctggcctccggcactcccacccatcaggactcatccccaccagttgcaatcaatcagctagcgcctagcaggagcagcaaaccaatcaagaagccccccacgtccaccaccgacgacgaagacgacagcgtcatgggcaacagcttgcggtgctgcctggcctgcatggtcccctgcggcgccctggacgtggtccgcgtcgtgcacctcagcgggcgcgtcgacgagttcagctgcccggtggccgcggcaaccgtgctcgccgcgaaccccgcccacacgctcaccacggcgtggtccccctccggcgcgccagggtgcggctcccggaagctcgccatcgtgtcgcccgactccgacctcaagcgcggccgcatctacttcctcatcccgtccgcgaccctgcccgccgaccggaggagcaagaagcagagcagcaagcggccgagccagagccagagccagagccagagccgcctccgccaccacgccaagaagcagagcgccggtggcacggcggagcaggacaactacctgagggagctgctctccgaaaaggccgcgtcgggcggcggtcaccggaggcggcgcagcggcgcccgcgtcggcgtgtggaggccgcggctcgagagcatcgtcgaggaggcctccgactag

SEQ ID NO: 12029 - DNA, 480 bp, Zea mays
  Peptide Sequence Number=SeqID_53808
atgaggaagacatttctgctgctagaagcaggtggtgctttggatcagcaaccaccaacagacgagacgcagtggttgttctgctgggcatgcacaggagaaaagaggaaggtacgggtgcagctatataagctccaggaagcagagagccaggcatctctacttgaaagctgcttgaagagtttgtgcacagtgggtctcctactcggctattcagttctcctgctctactctccggaaaccatggctgttgtggagctgaaggttggaatgcactgtgagaggtgcatcaaggccatcaagaaggcaatcaaaactattgacggtgagcttattacttgcttatggtcaaacatggagagctatcgccttgagacggagataaacaaggtcacggtgacggggagcgttaccccagaggaagtcgtcaaggctctccacaagatcgggaagacggcgacatgctggacccaagactga

SEQ ID NO: 12030 - DNA, 477 bp, Zea mays
  Peptide Sequence Number=SeqID_53809
atgcctgggatgaagaagaagttgtcagcaaaatcacagcgtggtggctttctcaagaaggagtcactgggtgatggtaaaaccgaatgttctaccctcgtaaagccacgtccgcccatcggcttcagggtctcctggtggtctgcgcactcgggtctagtcccgataggtcatgagtgcgccgcaggccagggtttgtgtgggtcccccctgaccccattttgtctagagccctttttttggtatggggcgctttccgtgcaattttcactcgtccgccatactcgtgtggggcgagccctcgagcccctgctcgatgaaggggttcgtctgggtggcttgtcccgtctttttagttttactctcccctcgtattccctccgcaaggatgggggaggtgagccgaaacatgctttcctcgatgggctagcaatgtcgctcgaggggtttgttcggatgcgggtggttctaggatag

SEQ ID NO: 12031 - DNA, 612 bp, Zea mays
  Peptide Sequence Number=SeqID_53810
atgcgggtgctcggggtggtccccgcggcgctcctcatcgccgccgtcgccgcgctcgccgacgtctccgtggagttcatgctgcggtacacggggcgggggtggggcggcggcggcaaggacgaggcggccacgtcgtacgcggggaccatgggcgacgccttcggccgcgccggcgccgcattgctcaacgtcttcgtcgcccttaccaccacgggcacgctcgtcgtctacctcatcatcatcggggacgtgatgtctgggagcgtcggcggaggcgacgagcacgccggggtgctgcaggagctgttcggcgcgcggtggtggacggggaggcagttcgtgctgctcgtcaccgccgtcttcgttctgctgccgctcgtgctccgccgccgtgtcgcgcctgggctcaatggacaatggtggactggtgatttgttcattagtgttcatgtgtgggccgacaataatggactaatggttaatttcggatatccaacgaattacccgcggatattctctccatctagtttatggctcggcttgaaggatgttgagattgatgtgatatcgcttgcacatgcacgacagtacaggcttggacatgattga

SEQ ID NO: 12032 - DNA, 564 bp, Zea mays
  Peptide Sequence Number=SeqID_53811
atggcgagcaaccgcgccttgttcgtgttacctatgctgctcgccgtggccgtgcttctccccgaacaaatcgccctctcttcggcagacttccctctcggccgccaggccacagtgcaactgcctccggcgccctaccagccgggcttcgccgcgagggcggtggtgctcgatgccaagcagggccatcggcagccggcctttgccgcggccgtgagcgccgaggccggcgcgggacggtgcacgtgctcgctggtcgtccttctgggcggcgttaaggtctgggcctccgaccatctcgagaagttcgtcccggctgccctgtgccggcttgagctcacggaggacggccagctgcggctgacggacggcgccgggaaagtcgggtggctgtccggcacggcggggcaaggcgtcaaggtgatgcaccgtgatctctgtctactctttctccattgtttgtttacttcgttcgtcgtcgtccattgtctggccattgttctgcgtttgctaccaggaattaatgattgggatttgttcgtagattttcggggtagacgataa

SEQ ID NO: 12033 - DNA, 954 bp, Zea mays
  Peptide Sequence Number=SeqID_53812
atggaactatcaaatctaacagtggaagatctctaccatcaggcgctgcacttggatcgcaggaccggcaacctcgtcctcctcgacgcccagaactgcaccatgtggcaaagcttggacgatccgacggacacattcctacgcggccagcagcgcaggctgcccgtgtacttgatcgcgcccacgacaaatatggcggcgtcctcggtgttctactccttcgagcttgacggcgacaggatagccacctacgtcaacttcggggacaccaggtactcctactgggagctcgcccctccagccaaccggaccatggcagcggcgaggctcaacggatctggactgggaatgctggacctgcggggcgtgacggtggcgcagatcacgccaccggtgaagaaaccgccggtaagcttcttggcgctgggtggcgacggcaacctggtcatgtattactacgacactcggcaccagaagttcagggcctcgtacaaggcactcgggttctgccagctcccgctctcgtgcagcgtccacgaggtctgctcatcggctgggaaatgcaaggacttctccgagtacgccgataggccggcggcgcgcgccggcaacgccagcagcagcaacccccgcgaaggggccggcgataaagcgcgtatggtccacttgaggggcgtcaccacggtgctccggaccgcgtcgccgttggccaacgtgacgctccgggagtgcgtggtgcagtgcgcgcgcaacctctcgtgcaatgccgcactctacgtgagggacaatgccggcgtcgctgcggccgaccacggcgtgtgttcgcactacaaggtgacggcaggggccagggaggtgactgacgggagccgccggtacagctactgggtgaagttccctgaagcggcagcaggaggtgacgaggaggatgacgacagtttctcccggcactag

SEQ ID NO: 12034 - DNA, 171 bp, Zea mays
  Peptide Sequence Number=SeqID_53813
atgggcggtggtggagcgccactcgtcacacgagcgggcgccttggcagcgagggcaccgatggcacctaacactcctattggttttgaatttgtgattgattttgacaagaaaaactcattgaatgactttattgattggtaccataacttgagaattattctcaagtga

SEQ ID NO: 12035 - DNA, 264 bp, Zea mays
  Peptide Sequence Number=SeqID_53814
atgggcagcgcactcgctgcactcaggaacggagccaacgtgaaaagatacttcgtctggttgttcctggacatgtttgagctgttggcgggctactactcacgatacgacctctaccatgtcgatttccaggacccggagctgccgaggacgccaaaactctctgcgttgtggtacgacgagttcttgaagaatgaaatcgacataatagagaatgttgtcgtcagcgctactgacgatgcgcgctgggcatgctgctggtga

SEQ ID NO: 12036 - DNA, 504 bp, Zea mays
  Peptide Sequence Number=SeqID_53815
atggtcatcaacggtcaagaccgtcatcgtggccccgaggaggccatggcgacttgcttgaaggttcacatgtgcttggcctgggaagagggcctgcttgtgggcatctctttcggagcaaaactggcaacttgcttgaaggttcacatgtgcgcacaaggaccatatgagaagtttctaaaccaattatatatgttagtaaggcacatgtgggatttcaaggaagaggaagacagacggctgctactgctgctgacatttgtgacgccaacgtcgaggactgagagatttgtttgttccattctgtttcattccctgtttgacgcagttgatgatgactgtctggttaagtttggcagatgggaaatggaagtggttgctactccttctgttgaacatatgaaggctacgagaagtgcaaatttgaccttctgtgaggagggatggttgcttttctgcactactataatagtggggtcacggttagctgcatataatttttag

SEQ ID NO: 12037 - DNA, 246 bp, Zea mays
  Peptide Sequence Number=SeqID_53816
atgtcaccgccccccgccgccgcccccacacctcccttcaccgccccccgccccgcccccactcgtccaggctgcgacagtggagccgagcgccagccaagggcagccgagctagagattgaggtgagccctggcttggctaagtcgaagaaggcgtcaaattccaagctcgaagaaggtgtcaaaatcatgtgtgttgggcttgcagaaagcccagtgatttcaggtggtgttatacagatgtag

SEQ ID NO: 12038 - DNA, 444 bp, Zea mays
  Peptide Sequence Number=SeqID_53817
atggccagaggcgcctgcgtcgaggcagtcgcgcccgtgccagggccagcagcgcctgcgtgccggggtcggacgcccgcgctagtgcctagccaagcgccgttgtcggccgagcggagccgtcgtgccctcgccagggcggaccgagccgcgctcgggtgcccgcaggctggaacgcccgtacccgtgccagggtcgagcggccgcgtatccgcgcgccatgagccgtacaccccatgtcgatgcgtgttgggagcctgcgcgcgtaccgaggggcccgccccatgtcgatgcgtgttgggagcctgcgcgcgtaccgaggggcccacaccggggcccgtctgtgccggtgccgagcacgcagcccacaccggaggcatgcccgcatcatgccagtggctcaccaggcacgcggggtccccgaagggcctcaacgctggttag

SEQ ID NO: 12039 - DNA, 489 bp, Zea mays
  Peptide Sequence Number=SeqID_53818
atggtgttcctcttcacaatgcagatcaactcgttcatacaaccaaatcatacatttagtgattctaaaacaaagacccggctatcacctaccacccacgtcaccggaatcaacctttatgacaccatgaaaagcgggacgcggcccatcggcgccgcgccggtccacgacggcgtgcaggaggaggagccgcagcagggagacgacgaccccatcgccacgcgggcgctgttcgcggagctggacgagcgagggaccacgtcggagctggagaacctggcgctcaacatccaggggcttggcaagcgcaggcaggacgggggcgagaagcagagtggccgcgcgcggagccagcagcagcacgggttcgagacggcggaggtcaccgacgacttttgcgaggagcttctgaacgaagggatgaagggcggtgcggaggctgagacgcggcggctttggggtttggggggaggtgggagcgtgagatga

SEQ ID NO: 12040 - DNA, 1782 bp, Zea mays
  Peptide Sequence Number=SeqID_53819
atgaccacctcgtcctccgggagcatcgaagcaccggcgaactcgaggcccggctcgttcgcgttcgcgagcacgagcacgagcacgagcacgagcttcacggacatgctgggaggatccacggacgcggccggtggggcgtcgaggtacaaggccatgaccccgccgtccctgcccctgtcgccgtcgtccttcttcagtaacaaccccggcggcctcaaccccgccgacttcctcgactcgccggccctcttcagctccagttgcagcggcgcgcgctgccgtgctgctcatgttcctgggaatgctaatgcgctctgcacattccagatcttcacctcgccgacgacgaacgcattcgcctcgcagcagttcagctggttggcgacgtcgggcgcggagcaaagcggcaaggacgagaggaggccgtcgtcgtacccggacttctcgttccagacagcgccgacgaccgaagaggccgtgcggacgacgacaaccttccagccaccgattccagcggcctcactgggtgaagaggcgtatagaagtcagcagcagcagccatgggcctaccagcagcagcaacctggcatggacgccggatccagtcagcaggctgctccctacggcgagccgttccaggctgcctcgtcggacgccgccacgatggcgccgcacgtgccggcgagcggcgggtacagccaccaagcgcagcagtcgcaaaggcagtcgtcggacgacgggtacaactggcgcaagtacgggcagaagcagatgaaggggagcgagaacccgcgcagctactacaagtgcacattcccgggctgccccaccaagaagaaggtggagcggtctctggacggccagatcaccgagatcgtgtacaggggcacgcacaaccacgccaagccgcagaacacgcgcaggaactcgagcgcggccgcgcagctgctgcaaagcggcggcggcgacgcgtccgagcactcgttcggcgggatgctgggcacgcccgtcgcgacgcccgagaactcctccgcgtcgttcggggacgaggaggccggcgtgggctcgccgcgggcaggcgggaacgccggtggcgacgaggacgagccggattccaagagatggaggaaagacggtgacggcgtcggcgagggtatctccatggccgccaaccggacggtgcgtgagccgagggtcgtggtccaaaccatgagcgacatcgacatcctcgatgacggctaccggtggaggaagtacgggcagaaggtggtgaagggaaatccaaacccaaggagctactacaagtgcacgacgcccgggtgcccggtgcgcaagcacgtggagcgcgcgtgccacgacctgcgcgccgtgatcaccacgtacgagggcaagcacaaccacgacgtgcccgccgcgcggggcagcgccgcgctctaccggcccgcgccgccgccgggggacaacgccggccactacctcggcggcgcggctggcgcggcgcagacgggcatggcctaccagctggcggggcagcagtacgggttcggcgggcagttgggctcgttcggcctcagcggcggcgcgccggctcagagcagcggccccagcgggagcctcgcgttatcctccggcttcgacaacccgatgccgatgggttctttgtacatgagccagagccagcagcaggggcagcacgacgccatgcacgcgccgagagccaaggaggagccccgagaggaggacatgtttttccagcagtccatggtgtacactgactga

SEQ ID NO: 12041 - DNA, 480 bp, Zea mays
  Peptide Sequence Number=SeqID_53820
atgccggactggctacagtccgtgcagctctggagtaaccagcaacagccctccgcctccccaccgcagcaccaggatgagctgctgctgccgtgcaggccggtggcgctcaacgcctgcaggaagcccgggggcacgttccagccgttcgagaaggaggagaagaagaaggacaaggaggagaagcagcgcgccgagctggagctggagctgccgttgccggccgcggcgagctcggccgtggtcggggacagctgcgacagggccggcgccaccgacaccgacacggccgagaacaataaggccagcagcaccaaaggcggcaaggacaaggaggctcagctgtcgtcgcaggcgcccagccggaaggcgcggcggtgctgggccccggagctccactgccggttcctgcaggcgctttttctttataaacctgatattcacaagattaacaggttttatatcaaaacaacagtctga

SEQ ID NO: 12042 - DNA, 321 bp, Zea mays
  Peptide Sequence Number=SeqID_53821
atggctgaaggggtatgtgtggagcaacccaatcacaaacttacgactcagattaaatctcctaaaaaccaaaccaatcaacggtcctcaaactatccccttacgacgccagccaaggcggcggcgcccctacacatggcagaggccatgccggagtgccccaatcggtcctccattgccccaaaccttaatccacctagcccttctcgttgcagacatcattgcaaacacattggtaggtatactaccaaagggcgcagcataaagggctccgcccgtgacaaaggtttagggctccatgacggtgatcaacgccggtga

SEQ ID NO: 12043 - DNA, 261 bp, Zea mays
  Peptide Sequence Number=SeqID_53822
atggcgctgccgcgtgagagtgtgagtgatactgagagactgcggaataaagggctaaccgtcaatgacctaggacaagtggtcgaggtgggcgcataccaggttagcacatacagtggaattgaggcaagtgtggaactatttttgtatatggaaattctctattttcgtgttgtgacggtatcgctcgaagagaagcctgaaatgaagcataaatcctttaggaaaagtgtgaaaaaggataaatatagatgttgttaa

SEQ ID NO: 12044 - DNA, 303 bp, Zea mays
  Peptide Sequence Number=SeqID_53823
atgacgaatgggcaggtggagcgcgccaacgccgccaccgtcgacccgagtctccgtcgcgtccccgtcgccgccgaggagtccccggagcccgccttgagattaaccccgccgccgagccgccccgccgtgaaccgcccccctccggtgcctctgccccgacccaaaccctaccggagaactccccgcgccctccccgacctccccgaccactcggattgccccagagccccgtcagtcgcccgcgcccctcgtctctggcgagccctccgccgcggggacgagcgccgccgccccagctag

SEQ ID NO: 12045 - DNA, 427 bp, Zea mays
  Peptide Sequence Number=SeqID_53824
gcatccccgccgcgcccgctgcggcgccatccctacccctgacagccgttgcgagatgaacgttgccctctgtgctgccccctgctacactatggcctaccatggttcgagggcattgtgcccccttccagtgtctgttctagtcatcccagagatcttctctgcgccgtgtgtcctgcttgcgagtttggtgcccggcccttttccgcagctgattaactggctgccgccacaaccgaccagcaagatcctgaccgccgaggagagcagcagtccggggatgcttcccaccactccttcacggatcccatcgttcatcgcccacgaggtacgctggcagacactcgatgcagccttggtggcggttgacctcagcaaacgggggtgtgaccttgcccagtcagatgaccatcagcaaccgtgctag

SEQ ID NO: 12046 - DNA, 261 bp, Zea mays
  Peptide Sequence Number=SeqID_53825
atggcgggcggaattgagctcgccggagctaaggaaaactggctagccggtgagggctatcatgctgacacagatgacaagaagagggacgggttcaggaggggcctcagtactaagctccgcgaccgtctcaacacagtcagggccaacagctacaatgagttagtcaacatggccatttctcaggaagactacatcacagcccgcctggcagaaaagaagaagaagacccctatggcaggaccttcggctcagccttag

SEQ ID NO: 12047 - DNA, 465 bp, Zea mays
  Peptide Sequence Number=SeqID_53826
atggccgacggaatggtgctaaggcggcgccgcagaccagtcgacaaccactctcgccggatctgcccatgccttagccagtgccgtccacaacgagttcaaggtgccataatgccttatttcatcggtccacaccttcgaatctcgcagcaagggtggaatttcatgtttggggcgaataccagaaaaaggacattcctatttcaagaaaaatataaggatgttgaacatagtacaatagatcttttcaaggagacgcattacaacaagaataaaggttttagcgaaaattttaagaaagctattgttgacatggaagaaatggtggtagcaccagttcaatatggacaacaaccgaaatatcctattgaagttgtttctaatgtgctaccgggctctagtgtgttcctacacaatattggtcttcagtctgcctccaagaaaagatccacaacgacagtttaa

SEQ ID NO: 12048 - DNA, 120 bp, Zea mays
  Peptide Sequence Number=SeqID_53827
atgacacgggatgaagaacccacgctccgggaagtcctccgggacacaccgggcgacgggagcggatgggcggcgagctcaggatgccgtcgtcgccgtttaccgaggctgttggattaa

SEQ ID NO: 12049 - DNA, 198 bp, Zea mays
  Peptide Sequence Number=SeqID_53828
atgggcgcggggctgcggccgtgggcgcggggcggcgcggcgtgggaccggcagccgtgggcgggggcggcgaccgtgggctcggacgagtgccctagtggccagggtgtcatgctccacaagatcgtgacagccataggaagtggtgtatcggtttctaaggcgcatcgtctttggaaggctgtagtcgggccgtga

SEQ ID NO: 12050 - DNA, 198 bp, Zea mays
  Peptide Sequence Number=SeqID_53829
atggaggcgagcacgacagggaacaaggcgaggtcgctaccgggtgaactttattgcgtggactactttgcggtcaggacggctgccgcgatgcacacgacgttgccacgccatgacaccaccacgacgagaaacagaggcgtgcacagggaagtcggcgcgcaggggacggcagctgtaagtattggcaatctatga

SEQ ID NO: 12051 - DNA, 1017 bp, Zea mays
  Peptide Sequence Number=SeqID_53830
atgccaccagcggcagccgcagaggcggagcaagggggctgggcttctatcagtgttggaccacgcgatggcggattgcttgtgctgctctttgattcttttttagtggaagtggcggtggggtttgggggagctgcaggcaaatacccaatttctttcttcgccagtttttccttgcgataccagtcgcctgaccgtacatcggtcggttcagcttcagcgccgaaaaagcatagcgcttcctcacggggccgacgccgtaacttctcgtcgtcaacgtgcaaggattttctccgcaagtttgtggacagcgagcttctgacgtcaagcctagaggactggttctccggtcacagcgaagattgtggtttcaggaagccaggtttcaacgttcctttcgagcttacagagttacagaatttcgattacgctctggagggcgttacttttcagcagctatttggcggagtggtaaaagtgcaaggtgatttgaacaagctggattttgatctcaacaacgtttttgattgtgccgctgaatggataaagaaacattccagaatttcagtctgttccgtagaccgagtatggaacaaacttgggaatgctaactggggagacattgggacccttcaggttctcatcgcaatatttcactcgatgatccaattttacggagagcctaagtattctctcgatgaactggcaacggaacatagttcaaggctacaaagccgaagatcagaaagacatctggttgacagacaagctaatggcaatggtttatttcgattccaacagcgaagtcattctcctgaaattgttgagttacaggaggaagcagcagttgatgtgaaaccacatgaaaccttaaggcttgaaatagggtatgttgtattgatggatgatgcttacacacagaaaggttttcaaatcagtgacatcctaacaggcagtgatcctcctatttatacttctgctcctgtggaagaacctaccaaaacttgttactgctag

SEQ ID NO: 12052 - DNA, 426 bp, Zea mays
  Peptide Sequence Number=SeqID_53831
atgtcctatgccttgctcgttacctacgagggggcggcgaaagccttgtctcgtgaggggtgtacgcacttcgaagtcttcgatcgggtaaccgaggattttgatagtggaatcttccaagttggagatgaggtactaaagcggtccgctagggcgctttacgacaggatgtggggccctcacggccgcgacactatccgagagagggctgaccgagcattggcgcagatgattaatgatgaagaagtcgaggactttggcagccttgaaagctcgatgacccagacagagggcacggagacgagggctgaagggcactcagcgcctcaagctggccctagcgaagaccctacagcggcgactgctctggttggtgaagactctgcagcggcggctgctccttcgcaggtggcggggtcacgttag

SEQ ID NO: 12053 - DNA, 1380 bp, Zea mays
  Peptide Sequence Number=SeqID_53832
atgggcgaaacgatctcgttcgctcctcggaaggccatcaagtcccaggtcttggcggacttcgtggctgaatgggtcgacatccagctcccaacagctctgatccaaccgaaactctggaccatgttcttcgacgggtcgctgatgaagacaggggcaggcgcagacctgctcttcatctcgcccctcggaaagcacctacgctacgtgctacgcctccacttcccggcgtccaacaatgtggctgagtacgaggctttggtcaacgatttgcgcatcgccatcgagctaggggtccgacgcctcgacgctcgcggtgactcgcagctcgtcatcgaccaagtcatgaagaactcccactgccacgacccgaagatggaagcctactgcgatgaggttcggcgcctggaagacaagttctacgggctcgagctcaaccacatcgcccgacgctacaacgagactgtggacgagctggctaaaatagcctcgggtcgaacaatggttcccccggacgtcttctcccgagacctgcatcgaccctccgtcaagaccgacgacacgcccgagtccgaggtaccctcggcccagtccgagaaggcacccgggggctacacgcacctgttggtcgccatcgacaaattctccaagtggatcgaggtccgacccctaaacagcatcaggtccgaacaggcggtggcgttcttcaccaacatcatccatcgctttggggtcccgaactccatcatcaacgacaacggcacccagttcaccggcagaaagttcctagacttctgcgaggatcaccacatctgggtggacttggccaccgtggcttatcccatgacgaatgggcaagtagagcgtgccaacggcatgattctacaaggactcaagcctcggatctacaacgacctcaacaagttcggcaagcgatggatgaaggaactccccttggtggtctggagcctgagaacaacgccgagccgagccacgggcttcacgccgttctttctagtctatggggccgaggccatcttgcccacagacttagaatacggttccccgaggacgagggcctacatcgaccaaagcaatcaagctaatcgagaagactcgctggaccagctggaagaggctcgggacgtcgccttactacactcggcgcggtaccagcagtccctgcgacgctaccacgcccgaggggtccagtcccgagacctccaggtgggcgacctggtgcttcggctgcgacaagacgcccgagggcggcacaagctcacgcctccatgggaagggccgttcgtcatcgccaaagttctgaagcccggaacgtacaagctggccaacagtcaaggcgaggtctacagcaacgcttag

SEQ ID NO: 12054 - DNA, 297 bp, Zea mays
  Peptide Sequence Number=SeqID_53833
atgcaggcggcatgcaaccacgccaagtgggcgcacccctccgacttccaacgcacccagcatggggccccaggcccacgcgtcatgcaaccggtgcgccggttgctacgtgcgagcaactgcaccgccactcgcaccactaccacgcctcctcgactgcggaaccagtaccgcgactcgaggcaaccctgcgaacgacccaacagtgctagccaggcgcgacgggaccgggaaagggggataccccgaaaaggatccttctccgtgaaggaaacaggccccgagcctccctactga

SEQ ID NO: 12055 - DNA, 750 bp, Zea mays
  Peptide Sequence Number=SeqID_53834
atggccccatcggaccgtcggaggggtaccctcaagacgcctaattctgagctggtaacccccatcagcataaagctgcagaggcctgatggggctcggactcgggctaagacccggaagacggcgaactccgctccgcccgaccccagggcttggactcgggctaagactcggaagacggtgaactccgctccgcccgaccccaggggtcggactcgggctaagacccggaagacggcgaactccgctccgcccgacccagggctcggactcgggctaagacccggaagacggcgaactccgctccgcccgaccccagggctcggactcgggctcggccccggaagacgacgaactccgcctcgcccgaccccagggctcggactccgccctggcctctgccgaacgacttccgctccgcccgaccccagggctcggactcgggctaagacccggaagacggcgaactccgctccgcccgaccccagggctcggactcgggctcggccccggaagacgacaaactccgcctcgcccgaccccagggctcggactccgccctggcctctgccgaacgacttccgctccgcccgaccccagggctcggactcgggctcggccccgaaagacgacgaactccgcctcgcccgaccccagggctcagactccaccctggcctctgccgaacgacttccgcctcgcccgacccaggggctcggactcggcctcggcaacggaagacagatttga

SEQ ID NO: 12056 - DNA, 864 bp, Zea mays
  Peptide Sequence Number=SeqID_53835
atggcggatgaatcatggaggattcctatgttagtgcaagaactggcggccaaggtgcagcaaccaccaagcaggtacatgcagccggagcagtatcatcctgtcagcctagacgttggtgccgagacactggagcccatccctgtgatcgacctcagccggctgtcgactgctggtggtgccgacgacgacgagagcggcaagctccggttggccctgcagacctggggggctcttcctgtcagggtagaaccggaagacgagaggaatctcgtccattggcctcagcatcccaaaactttcaggggtcttttacatgagtacacattgaactgcaagagaatcaaggactgtatccttgggacaacagccaagactttagggcttggcgaagactgtttcgccagatttaactactacccgccgtgtccaaggccggatctcgtctttggcgtgaagcctcactcggacagtagtggtgtccttaccattcttctcatcgacaaagacgtcagtggactgcaagttctcagggatggcgtgtggcacaataatgtcccagctagtcctttcatgttgctgattaacgtaggagacttcatggagataattagcaacggggtcttgaggagcccggtgcacagggcggtgagcaacgcggagaaggagaggatctcgttggccatgttccacggcctggatcccgacgaagagattgagccggcgcccgctgctcttttaagcgagaaccagccggcgcggtacaggacactgaaggccaaggagtacctgctggccgggttctatgaacattttttttgtagattcatcgagtctgtgaagatccatctaaacgaggtttga

SEQ ID NO: 12057 - DNA, 306 bp, Zea mays
  Peptide Sequence Number=SeqID_53836
atgcggagttcgtcgtcttccggggccgagcccgagtccaagccctggggtcgggcgaagcggagttcgtcgtcttccggggccgagcccgagtccgagccctgggtcgggcgaggcggagtttcctacggcgcccgagaccggacttggctgctgtcagcctcactctgtcgagtggcacaacagtcagagcggcgcaggcggcgctgtcctcttgtcaggccgcctccatgtcgtagcaaggttgctatggagcgtcgaccacctcgacctacagctcaaaggttgtgcatactttccaggtaa

SEQ ID NO: 12058 - DNA, 1183 bp, Zea mays
  Peptide Sequence Number=SeqID_53837
tgccaaggtcgtgttcgggctcaacgcgctcaacggccgcgtcccgttgccggacgggtccatgggagggccgtgggactacaccaacgcggcgtcgctgatccggtacaccgcgaacaagggctaccgaatccatggatgggagcttgggaacgaactgagcggcactggagtgggagctcgggttggcgcggaccagtacgccgcagacgtgatcgccctgaaagcgctagtcgacgacgtgtaccggagcgagccatcgaagccgctggtggttgctcccggaggattcttcgaccaagcctggtttactgagcttgtcgtcaagaccgggccggatctactgagcgtggtcacgcaccacgtctacaatctaggaccaggcacgctcgcggctactttgcgtcgttcatgcgacctccagcggctgctcaagtccacggggacgtcggctgtggcgtgggtcggggaagccggaggcgcctacaacagcggccgccacctcgtcactgacgcgttcgtgttcagcttctggtacgctgacgagctgtccgatcagcttgggatggcagcgaggttcgacaccaagagctactgcaggcagagtttggtcggcggcaactacggcctgctaaacaccacgacgttccagcctaaccctgactattacagtgctctactgtggcatcgcctcatggggaccaaagttctagcagtaacattcagcggcacgaacaagatccgcgcgtacgcgcactgcgcgagagattcaccaggaatcactctgctgctgatcaacctgagcggcaacgccaccgcgcgggtctcggtgacggcccaaggggctgccgcggcgcacgcgcacaggcacaggcacgacgcgaggaagcacggcggcggcaggaagttccggcacgtgcacgtccccggcttcgccggcggcggcgaggcggcggcgggcgccgtgagacacgagtaccacctcacccccaaggacggcgacctgacgagccaggtcgtgatgctgaacggcagggcgttggccaccgacgcggcggggaacatccccgccctggaggcggtcgaggtggacgcggcgcggcccatcgccgtcacgccctactccatcgtgttcgctcgcgttccgcatttcagtgccccggcgtgtagggtagaccggtag

SEQ ID NO: 12059 - DNA, 171 bp, Zea mays
  Peptide Sequence Number=SeqID_53838
atgaaggtagaccctgttgatggcgtggcaagcagtgttaacggcttccgtccaaaagcactcggggggagcggagaactcgtgcttgatcccttcctcttcaaggaactcctccacttgaaggttcttgaactcggatccgttgtcggctccttatcttcttcactttga

SEQ ID NO: 12060 - DNA, 723 bp, Zea mays
  Peptide Sequence Number=SeqID_53839
atggccgcctcctccccccgcgcgttgcaatcgctggggtccgccgcctcccgcttcctccacgcgcggggcttcgccgcggcggccgccgcggcgccctcgccggcggtcttcgtcgacaagagcacccgcgtgatctgtcagggcatcacggggaagaacggcaccttccacaccgagcaggccatcgagtacggcaccaacatggttggtggagtgactcctaagaaaggtggaactgaacatttagggctcccagtgtttaactctgtagcagaagctaaggctgaaacaaaagccaatgcaactgttatatatgttccaccaccatttgccgccgctgctataatggaggcaatggaggctgagctcgaccttgccgtctgcattacagaaggaatacctcagcatgacatggatgggactcaaatattggtaaatagatgttacatccacaagcctgggcgtattgggatcgtatctcgttctggtactttgacatatgaagcggtgtttcaaacaacagctgtaggattgggtcagtcaacttgtgtaggcattggtggtgacccgttcaacggcacaaattttgttgattgccttgaaaagttcgtcaacgaccctcagacagaaggtattgttctcattggtgaaattggaggtacggctgaggaggatgctgcgacattcatccagagtattttaaagtacccatatctgtga

SEQ ID NO: 12061 - DNA, 1383 bp, Zea mays
  Peptide Sequence Number=SeqID_53840
atgacgggaaagcggaggagcgccgagcgcgcgcaggaaggcgcagcggggcgcggccgcgggcgccgcgcgctgggccttatccgcgaccgccgggcgcgggtggacacgttcggcaggcggaaggagacgctcaaggccaaggcgttcgagctctccgtgctctgcggcgtcgacgtcgcgctcgtcgtcgccgctgcggacggcgacggcgacgcggccgcggacgtctgggagtccaccgagggcgctgtgctggcccggtaccgcgcgctggacccggaggtgcgcgcgcgggcgcgccacacgcaccgggcatacctcgagggcgggctgggcaaggaggaggccaagctcgcccgcgtgcaccaggcagggcccaccgccctcgacccctggccctgggacaaggcgctggacggcaccgccacggcggaggaggcgcagcggctgctcgaggccatcgacgccgcgatacgggcctcggaggacaggatgagggcactgggtctgccggtcgacggcgaggacgttgtcggccctggcgccgcgctcgagatgatcgcgacgctcgactctgctggcgtggacggttacccgctgcacccgcccggcggcggcgacacctacgacaaccaggccatatggagcaatgagggcttcaacgcgtacaacttccagcagtgccccgccggcagcagcagcgcgggcatggagggttaccacctgcaggtggcgccggaaatgtacaccggcagcggccacaacaacggtcgcatcgcgaccgacgcccacatgtaccagccgcccgatgccggcacgatgcagcacggctacggcttccaccaatgcgcaggcatcgactgctttggcatgcctgctggccaccagatgcaggagttgccgggctggggcactgcccaggccaatatggccatgtggagaaccgaggagccgcggcatgccatggtgcctgtccattatccctccgcccaaaccggcctcagctacatggaaacgctggcggcactcggtgcccagggcggcggtggcttgtcctttgccatgggcaccagctgcaacttcgtcaacgcgccacctgtacttcccctcgccatgggcaccgccggctgcggcggccgcgacttcatcaacgcgcgaccagtagccttctcccacgccatctgtggcaccagcgacaactgcaccgacacaacgccagccgggccgctcgccatgagctacggcgccgacctgacgatcgccggcgggtacgcgacgcagtggcaggcagggcgcagtggccaccagtccggcatcgagctgctgcgttaccttggtaggttggaggagaacacgcagctgcatctatggggaaactaa

SEQ ID NO: 12062 - DNA, 2337 bp, Zea mays
  Peptide Sequence Number=SeqID_53841
atggcgaccaccatcaccaggctcttgcaccacctggcgctcttactcctcgttgtccagttcgccgacgcagttttcgtcccaaagaccaagaactacgctgtgctgaagcctcagtcatggggcaccacctacatagtccatgccaacttcctcgccaagccgccccacttcggctccctgaaggagtggtaccgttccatggtgaccacccacgcctcttccactcgggcggcgagctccagcagcatcctgtacacctacgacaccgtcatgcacggcttcgcggtccagcttactggcgacgaggcccggctcatgtccagcgcgcccggcgtgatcggcgtgtacgaggacagggtgctctaccctcagaccacgaggtcgccggggttcatgggcctcgaacccggcaacggcgcctggaagcagaccgacttcggtgacggcgtcatcatcggtttcatcgacggcggcatatggcccgagagcgcgagcttcaacgacagcgggctcggccccgtccggtcggggtggcggggcaagtgcgtcgacgcccacggcttcgacgccaacttgtgcaacaacaagctggttggagccaaggccttcagcgctgctgcggacgccgtggcgggtaggaagagccgtggcgtcccgtccccgagggacaaggatgggcacggcacacacgtggcctctacggccgccggtgctgaggtccggaacgccagcctctacgcgttctcccaggggaccgctcggggaatggcgcccaaggcgaggatcgccatgtacaaggcatgcagcgagaatggctgcatgcatgcggacatcgtagcagcggtggacgctgcggtgaaggacggcgttgacatcatctccatatccctcggacgaagttttcccatagccttccacgatgacgtcctcgcggtcgccttgtttggtgcagagcgcaaaggcgtcttcgtcgtcgtagccggcggcaatgccggcccgcaggcagctagggtggtcaactcagcgccgtggatgaccaccgtaggcgccgccaccgtggacaggctgttcccggcgcacctcacgctcgggaacggcgtcgtgctcgccggccagtccctttataccatgcatgccaagggcacgcccatgatcccgttagtgtccacggacggcatcaattcgtggacgcccgacacggtcatggggaaaatcgtggtgtgcatgttcggagcaagcgacgcggatggcatcttgttgcagaatgctggtggagcagggatagttgatgtggattcttacgagtggtctcgtgatggttccgcgctttattccttcacccttccgggtctcacgctcagctacaccgccggcgagaagctcagggcgtacatggtctcggtgccctatccggtggcgtccttgagcttcggctgtgagacggtcatcagccgcaagaatcgggcgccggtggtggcgggattctcgtcgcgtggccccaatcctgccgcacccgagctcctcaagcccgatgtcgtcgcgccgggagtgaacattcttgcggcctggtcaggcgacgcaccactagcgggggtcttcgttcccgatgggaggagagcgaactacaacatcatatcggggacttccatggcgtgcccgcacgtcgctggcatcgcggcactgatcaagaagaagcacccaagctggacgccggccatggtacggtcggcgctgatgacgaccgccgggacggtcgacaacagaggcggacacatcctcgacaacggtcacacggacacccttggccgcaccgacaacgtcagggtcgcgacgccgctggtggccggtgccgggcacgtccacccggacctcgctctggacccgggcctcgtctacgacgccggcgagcgcgactatgtcgacttcctgtgcgccctgaactacaccgcggaacagatgcggcggttcgttccggacttcgtcaagtgcacgggaacgctcgccggcggccccgccggcctgaactacccgtcattcgtcgtggccttcgacagccgcaccgacgtcgtccgcacactgacgcggaccgtgaccaaagtgtccgaggaggcggaggtgtacaccgcgactgtcgtcgcgccggagcacgtgaaggtgactgtcacgccgacgaccttggagttcaaggagcatatggagacgaggagctactcggtggagttcagaaatgaagccggatggcaccgagaggcagggtgggacttcgggcagatcatctgggcgaacgggaagcataaagtcaggagcccggtggcgttccagtggaagaactga

SEQ ID NO: 12063 - DNA, 1194 bp, Zea mays
  Peptide Sequence Number=SeqID_53842
atggggctatctgtcatccccttcatcatcgctcagttccccaagatgttgaagatgcaccgcgagcagcgcctcgccatgctgctggcccttgtcgtgtcgttcgcgctcatgcttgcctactgcctgctgttccgcaagatcgacatggacgagagtcggtccctgtcccgcgccgagctccacgccctcatcgtcggcatcaaacttcgaggaggctcagcgtgcccgtggggtggcgccttctccagcaagttcatccatgagtaccacgaggtacaggagaggacagcctcccagtgggttattaggaactgtgcactgactgaatggaatgggactgtgcagaggacgaggcaggagcacgacgagctggtcaacagcgaggtcgtctccgccatcatcttcgccagcaggaagaagcagaggacctgctccctcaccttctccgaggtgtacggctgcgtgacgatgaacaacacactgtgcctcggcgtgctcctggcgctcatctacttcaggaacctgacgtgggacttctcatcagaggtgctcatcatcctgctggtctgcgtcgtcacgaccctcttcaccagcttctggaccacggtgtggcaaacaaacttgtcggggaccataattaggggtaccctcaaggctcctaattctcagctggcagtcaggcccgacctcaggcaccataggaagctccgctccgcccgacccagggctcggactcgggctaagccccggaagacggcgaacaccgctccgcccgacccagggctcggacttgggctaagccccagaagacggcgaactccgctccgcccgacccagggctcggacttgggctcagcccctgaagacggcgaactccgctccgcccgacccagggctcggactcgggctaaaccccggaagacggcgaactccgctccgcccgacccagggctcggacttgggctcagccccagaagacgacgaaccccgcttcgcccgaccccagagctcggactcagccctggcctcagccgacggtctccgcctcgcccgacccaggggctcggactcgaccacggccacggaagacagactcgacctcgacctcggaggagcctccacatcgcccaacctaaggcgcgggccggccacgtcaatgggaggcaccatcattaccctaccccaagctaa

SEQ ID NO: 12064 - DNA, 855 bp, Zea mays
  Peptide Sequence Number=SeqID_53843
atgtcgcccaacagtccaacaccatgcccctgccccacgctcgagcgcggctcccgccggttcctgccccacgcccgagcagcaaccacagatctcgcccactccttagcagtcatcgtggatctcgccccgccgtgcccccgatccatggattcgcgttctccctccgccctccgcccaccgtcgtggtgcccgcccccaacgcccctgctcccaggccatgatcctcaccctcgaccaatgcatgccccggtcgtaacctccgcgcgattcccgtcgcgcccgcctgcctacgcccacctgccacccgctaaacccggcgcgaaccgcccgcacgaccgccgcgactgctccgcacgaccgccacgaacatcacgactgctgcaaaccacccgcatgctgcacctccctacgcccgcctgccagccgctaacctcgccgctaaccccgccgctaaccgcacgcacactgcaaaccttccgcacgctgcgcctccctacgcctgctagccgcgaccgccgccaaccctgccgcgaccgctctgcgaaagctgcaaatgtcgcattccgccggcacgcccgcgcacgattcgctccgagctcaataccccgccgcaaaggtgcaaacatgagctccgtacatgccgcaaacaaacgccctgatcaatccgccgtcagcaatttgttcccctgctcaatccccggccccttcatttccccgcctcgcccccttcattcccacgccagtgtgccactggagaggaaggacgaaggagaaggagattgccccgccatcggagaggacagatatctgatattgctcaaccgcgcaggcctcgaccaaggtatgccatga

SEQ ID NO: 12065 - DNA, 171 bp, Zea mays
  Peptide Sequence Number=SeqID_53844
atggacaagacccatttccatttgctagtcactgactttcaatccactaatttacctgattcagatgttgactctgatgttactctcattgagaaacatgttataactatctgtggagacattttcattcagatagagaagatcagtgtttatggtgttatggctatctga

SEQ ID NO: 12066 - DNA, 366 bp, Zea mays
  Peptide Sequence Number=SeqID_53845
atggacatggcgccgatgcggtcggtgccaagcccgatggagtcaaaagactgcagcagcgtcctgtacccggcgtcgactagcaagtacggcagctactactgtcatgtcgtgatgcagcctattgctgacgtcagccgcagccgccgcatagccgtcactcatcgtctctcccagtcgccctcggccgtcagcgcctcgcctgctcgccgagtcgccatcgtcgccaaattgttaagtgatggaatccttaatagtccattcactgcgcaagggaaagggaggagtgaaagagatgagactgattcagagagcaactcctttggcaagaatgatgaaatgtctgaggatgagatggcggtgtag

SEQ ID NO: 12067 - DNA, 576 bp, Zea mays
  Peptide Sequence Number=SeqID_53846
atgacgacggcagccctcagctcccttacggaagcagcgggacatcagcaaggactcgaccgctccgacagctgtccctccgccaagctccgttgctcctccgacagccacaacatcacaccagcagggtgccaagatctctccggctgccacattggcatgaagggccagggccttctcagagaaggttggccgcgcggggacgagggcgggacaggcgctctcttggggccgctcacttccctcacccgcgtggacgcttgtaaccccctactgcaagcgcacccgacctgggcgcgggacgaacacgaaggccgcgggactttccacctctctcacacccgtctccggccacctcgctctccccccttcgcgctcgcccacgcgctcgacccatctgggctggggcacgcgacacactcactcgtcggcttagggaccccccggtttcgaaacgccgacacctaccttaataaaactctaaggaggacaaatgcaataggaagcaatcaaagctctaaggagcacgcctactataaaaccctaatcaaatctttaagaagcaaagttttataa

SEQ ID NO: 12068 - DNA, 537 bp, Zea mays
  Peptide Sequence Number=SeqID_53847
atggcgctccctgttgacgcggcgggcccgcacccgaggccgggcgacgtgggggctcctccgaagctggggtcgagtctgtcttccgttgccgaggccgagcccgagcccctgggtcgggcgaggcggaggtcgttcggcagaggccagggcggagtccgagccctgaggtcgggcgaagcggacccgagtccgagccctgggtcgggcggagcggagttcgccgtcttccggggcttagcccgagtccgagccctgggtcgggcggagcggagtttcccatggcgcctttggcaggtcctagctgtctgtcagtcttactctgtcaagtgcactgcagtcggagtggcgcaggcggcgctgtccttctgtcagaccggtctgtggagcggcgaagtgacggcggtcacttcggctctagggggcgcgcgtcaggataagggcctttatgctgatgggggttaccagctgagaattaggcgtcttgagggtttcatcgggcttgttgtgaaagctctccttggccgctttgagtag

SEQ ID NO: 12069 - DNA, 246 bp, Zea mays
  Peptide Sequence Number=SeqID_53848
atggccgacgctaaaatagggaagggcctgcaggtaacaacggggaggatcgtcagcggccttggctctgcatttcctcgaacacgaggggcgcgaagcgagggcgcgaggacgctggtggtaggccgagcagcacctgcgctgggcgaagaggcagagtgccatggggagcagaaggtccaccatggaggggggtggagcaggggacggtcggtcctggacaccacgacgcggacaggaaggtag

SEQ ID NO: 12070 - DNA, 1737 bp, Zea mays
  Peptide Sequence Number=SeqID_53849
atggagctagaggcccgtcagctggtcgcccaccgcggcggctgccggtgccaacgctggacgtgtgagagggcggagggccgtctgactagtctccacctcggaactcaacgaaacggctgcgcggttgcttgggccgcgggaccgggggctgatgcgatcaccggtggcggtgggccgccagccactgccgctgccgctgccgccgccgccgcatgggcgatcttccgggccggggggacggtcggggagccatcaactcaactgccagacaaacaacattataatccagccaagcaggtcaaagatatttccccagaggcccacccgccagtgactgctctcttggtggttacctatcgctcgtcgacatgtggcccttcgaagcgcgggcttgctcatgcacgcagagagaactccactgagggcacatcaaaccgagaaagcggcaatcgaaaacgatgcgtcgatggcaaaagcaagagcctcctcaagctgacagagtggccgcctgcctgcctgccgtacaactgtacgagctgccgagcacggggcagcaagccgccgccgcttctgctcctgcaagctctatatttccaggcctgctacagtgcacccatcgccagcatgaagaaggcggtgtcagtgagaggaggtgggaagggaggcacagcccctacggacctcctggtctgcttcgccgctcggcagcacctggcgctgatgcccaagcccatctgcagtccgtctcgggccaccatggacaaggcagccgccgcgcgccggcgccagctccagctccagctgccgggcgccagcgctgctgcaggtggtgcgagagtgcgcggcgggagtagcccgatgttccgggggtccaaggcgaagcagagggcggaggaagaagaggagccgcagtcgcccaaggtcacgtgcgctggccagatcaaggtcagccggcccaagaaggtgaagccggcctcgacggcagcggcgaagcacagtagcgacggcgccggcggcgccaggagctggctcaccgtgatggaggagatcgagcggcttcacggccgcaggaagaaggcgggctggctcgagaacctcgggatcaggcggcacgcgctgccgttcgtaggcggcgcgctccggagcctacggtccaaggcacgctgctttggttccctccatgccgcggccgtggactcctccgttgactccgacggcaacggcaatggcaacgacgcggcggggcgtggaagtgagcgcggagccggagggagcgccgcggccagcgtattctacaagtggctcatggtgctcgaaggcgaccaggagcccctggagcaagacgaaaccaggtacgacgaggaattcggtcagggagaagacgtcgagcggcaggtgggaaaggagacggacgagggcacgaacgggccgacgtccgcgccgccgccgaacgcgctgctgctcatgcgctgccgctcggcgccggcgactgggctgtccatgtccagaaggaggacgtgtgagcagttggctggcgtggtcgaacaagggaaaggggccgcgggcggcgtgccgggagacgctgaaacagaggaggacaaggaggagctggcgttcacgtgcacagcgcccggcttcatgaagctgtcactggacatcgccaaggagacgtgggtcgtcggtggccgggacccgatcgcgaggagccggagctggaagagatcgcttcactaa

SEQ ID NO: 12071 - DNA, 759 bp, Zea mays
  Peptide Sequence Number=SeqID_53850
atgagagggtttgagagaaaaggggtccggcagtacaaccggtcagaggtgccgaggatgcggtggacggaggagctgcaccggcagttcgtcgaggccgtcgagtgcctcggtggccaggacgaagcaactccgaagcgaattcttcagctgatgggcgcgaagggagttagcatatctcatatcaagagccatcttcagatgtacagagcctccatctccagcagcagcagtacccatcatcagcccagcctccagaagtcgacatcaaccgcagcgagcaacaacaagcgcgtgttcttcacgcgtgaagattgtgcgtcacaggaaggcaacgctccagcttcagacaagaacatctataccaccacggtccgtggttgcggccagtactcatcaccgtaccaaataccgtcgctacagcaagtgttcagatgctgggaacaaaagagagggcgtgttgcttggaactccgacgtgctaacaacagagaagggggtgattattaggccaagtcacactaggaagcacgagacgcagcagcacacgggatgcgacctcacgctgtcgatcgggctgtgggaggacgcgagcagcagcgacgacgccgacggctcgagctccatcagcgaggagctgctgcctgctccggcagcgggcggcgctcgccgcgtcgccgccgtagtgaaggaggaggaggagagcaagccggcggctctgaacctggacctgaccatctcgtcgtcctggctggcctga

SEQ ID NO: 12072 - DNA, 771 bp, Zea mays
  Peptide Sequence Number=SeqID_53851
atgaccgcgtcaaaaaaggtgcgccacgtcgttcgatttcatatccttttcctcttcctctttctctctcttgctacagggaccgggaaaggggatactccgaaagggatcattctccgcgaaggaagcgggccccgagcccccctactgatcagaggttcgaaggctggcccctcggaagggttcgacaaccgcctcagagcacttggcctccgagccctcctactaatcagaggttcaaacgctggcccctcggaagggttcgacagccgcctcagagcactcgggctccgcgcccaccactggtcagaggttcgaaggctggcccctcagaggggttcgacagccgcctcaggccactcgggctccgcgcccactactgatcaggggttcgtaggctggcccccgaagggttcgacagccgcctcagagcacgtagagcgagggatgactctaggaagctccgcctcgcccgaccccagagctcgggctcaacctcaatgccggacgacggactccgcctcacccgaccccagggctcggacccagcctcgacctcggaagacggactccacctcgcctgaccccagggctcggacccagcctcgactccggaaggcggtctccgcctcgcccgaccctagggctcggactcaacctcaacctcggaagatggactccgcctcgcccgaccctagggctcggactcaacctcgactccggaaggcggtctccgcctcgcccgaccccagggctcggactcaaccttga

SEQ ID NO: 12073 - DNA, 156 bp, Zea mays
  Peptide Sequence Number=SeqID_53852
atggctgggacgccgagcgccatggaaaagcagagttccatggatccagcggagaagaggacacgcgcagagaaggggctacggctgggaaatctggccaggtgcggccgcgtgaggctcaagataattttcgtgactattctggccacgatgtaa

SEQ ID NO: 12074 - DNA, 309 bp, Zea mays
  Peptide Sequence Number=SeqID_53853
atggctgggacgccgagcgccatggaaaagcagagttccatggatccagcggagaagaggacacgcgcagagaaggggctacggctgggaaatctggccaggtgcggccgcgtgaggctcaaggtgcgccatgggagaccacgggaaggaagggcctcggctggggaggagagaggagcgctccatgggaggtcaggggcgagcaggcagcagaggatcgcggtggagaagaagcctgcacgccagggaacctcgcgagctcacgaccggggaggagaacaccgagcggaactccggcgggatttgtag

SEQ ID NO: 12075 - DNA, 309 bp, Zea mays
  Peptide Sequence Number=SeqID_53854
atggctgggacgccgagcgccatggaaaagcagagttccatggatccagcggagaagaggacacgcgcagagaaggggctacgactgggaaatccggccaggtgcggccgcgtgaggctcaaggtgcgccatgggagaccacgggaaggaagggcctcggctggggaggagagaggagcgctccatgggaggtcaggggcgagcaggcagcagaggagcgcggtggagaagaagcctgcacgccagggaacctcgcgagctcacgaccggggaggggaacaccgagcggaactccggcgggatttgtag

SEQ ID NO: 12076 - DNA, 3210 bp, Zea mays
  Peptide Sequence Number=SeqID_53855
atggaagggacggcggcggaggtgggcggcgctggcgctgacgcggccggggatgtgcagattaagggtgccaaggagaatgcgcagcccacggcggcgcagcagcagcagccgtccggcagcgaggcgctggagatgccggccacgccactccagcgggacatagactggtccgagcatttctccttcttcacctcgctgggtgggttcgggggcagctcggacggcgcgaggggcctcaccagcgtcggcctgtccaattccgagtccaggccagacagtgtggcacagcgtggcttggaccacgacactgaagagagggtggaggagctcacattgaagaattgcatcaatactggtatccagcctgaggtttctgctggtgggagcacaagcagcagggataggcctacccgtattaagggcctgtggggtaattttacacggatcgcccggagaactagcgatttggccagcagggaaaacaccgcactgagttctggcgacattgcaaacttgagggctggtgatgcttctagcatggaaaagctggcgacgagccttgccagcaatatcatctcaaggaacaacaatgcgtctggcaatgaggcacctatgagtcatgttggatatgtcaataatgagttcatgatgtgcagccagcagattctcttgtctccatggtctaatcaggataatgctcttaaagtaagcagcttctcaaataggattcttaaccggatgagaagtaagactgtggcaccctcatctagggttctacgatcaccacttcaaatcaaatcaaaaggtaaaggggttgtgtgccaaggtgcacgggaggagatccaagtgcaagctaatgcaagacccagagaccctttggacaagattccgactattcctagctcaattcatgattgtatggccagagtggaccatatgcttttcagtactggtggaaatgttacaaaatcccactctgagggatctagcctgagggaactgattaagcctgggtggcaaacaatgactaagtttgagaaaatgcatttgtttaagcagatcattgatcttgtggataagtgtcatgcacagggttttactttgcagcatttgcgaccatcatattttatggtcctttcttcaaatcaagttaaatatatcggctcttataccacacaagatttgccaacatcaatcaaacaagaggttgctagagaagatcttgtgaatagaaaaagaacttttggacagagaattgatcaccaagagtctaatgaccatggaaatttgacgctgaagtatcaaaaggttgatgagcaaggctcagtcgctatcaggcaaccagcaaatacattttggaccgacaaaatatgtgacaatcaaaatgaagatgtcaatcgaggtgttttgaggcaagaaaattttagccacactgccagagaaggttttaagttggtcgaaccatatggcagtaatatatcttgtgctcagcatgtatctagttctgccacccaacaaccagcatttgaattgaggaatcttgaggaaagctggtacaaaagcccagaggagctcagtcaatttaaaggcacattcccatcaaacatctacagccttggggttcttctatttgagccagcatactgttttttcagagagattcttggatgtgacttgataaatgggggtcaggatttgtcgttgttagatgaggcaccagtttccatcggtgaagatgacactgaatctagtttgctacttaacttcctttctcaattgaaagaagaaaaggcgatgcagtctgccaagttatcggcagagcttggaagcttacaaacagatatcacagaggttgacaaaagacactcagcaagaatgagattgagtttagatgatacagatgtactgccaagttctagtgctttgtcaggagcttctgtgagtgcccttcaaggtgcattgctgtcaggtttgttaccagcgtcatacaagtcgagcatatatgaggagagggtaatgaggaatttggtgcagcttgaaaatgcatactactccatgaggtcctcgctggacacctgtgaaacaaatgtaatcaaacggccagataacgaggctttgagggcccgtgaaaatttccatcaacttcatagtgattctgatgccaaggacgagaaaacagatcgtcttggatgcttttttgatggtttatgcaaatatgcccggcacaataggtttgaggtacgaggaattttgaagaatgcagatatacttaactctccgaatgtcatctgttcgttgagttttgatagggatgaagaatattttgctgctgctggagtttcaaagaaaataaaaatatttgaatttgatgcactcttaaatgatcgtgttgatattcattacccactgatagagatgcctagcaagtccaagcttagctgtgtctgttggaacaactatataaagaactacctggcttcaacagactatgatggcactgttcagttcgatgcacatgttccactgaaaagcttaagggcttgtttgggggtggattatgtactggggcggctatgggatgccagctctggtcaaggattcacacagtttacagagcaccggaaaaggacttggtctaaaaattgtgttgatacaatcagaaatgtggccaatgtatgctgtgtacaattctctccatactcctcccgcatgctagcttttggttcagctgattacaagatatactgttatgatctgaggaacacaaggataccttggtgtactattttgggacatgggaaagctgtcagttatgtgaggttcttggatccatacacacttgtctctgcatcaaccgacaacacattgaagatatgggatcttaaccagactaattgcagtggattatctaccgattcttgcagcctgactctgaatggtcataccaatgagaagaattttgtagggctatctgttcatgatggatacataacttgtggctctgaaaccaatgaagtgttttcttactacaaaactttccccatgccaataacttctcataggtttggttctattgacccgataactggacaagtgacaaatgaagacaaccagcaatttgtgtccagtgtttgctggagagggaagtcaaacatggtagtggctgccaactccagtggtagcatcaaagtgcttgagcttgtgtga

SEQ ID NO: 12077 - DNA, 270 bp, Zea mays
  Peptide Sequence Number=SeqID_53856
atggcgcccacgcccggctcggccgccctcgccgtcgcccgtgttcgcccgcccgccccggcgtgccttgctcgtgtcgtgatggccccggcgcggcctcgagctcggccagcgcacggccccgacgcgtgcgcgactcgttcgcagcacgttaagcgtggctttgcgcgtggcaatgagactgatggttttcgttatgactatggtaatggagaagatgaagccgtggaaggagacttccaggagttccaagactacgacgagttctag

SEQ ID NO: 12078 - DNA, 216 bp, Zea mays
  Peptide Sequence Number=SeqID_53857
atggaggatcaactagaatcgtctgtaccagagaagctcattcgtggtgtcaactgggtgccagattcaagcgacgaagaagacaaggatcaacaggagaatattgctgccgaagaagatgacgttgatgttcatgctctaatgcaacttgcatcaacagagtttgcattcgagctaatgaacctgatatcactaacaaaaaccgacacatgctaa

SEQ ID NO: 12079 - DNA, 543 bp, Zea mays
  Peptide Sequence Number=SeqID_53858
atggctggtaaacaccctcagaccaacagacgggcgcggttcaagtcaaggcttcgtctacccaagggacgcgaccttgcccgagcccagcctcgggccggagcagtagtcccggatgaattcacgcctcgcccgaggacctcctcaggcagcgagcacaccctcggctctcccgaagcctggctcggggaaaacagtgccgctcgccccgctccgactactgtgccaaccacccaggcgaagctgacaacaagtcacgatcaaccaccgagttcggcctcgggcgcaacaggaagctctgcctcacccgacctcaggctccggcctcgggaggaggtctccgcctcgcccgaccttaggctccagcctcggaaggaagtctccgcctcgcccgacctccggactcggcctcgacctcggtctcgagaggaatcgtgtcctcgcccgaccccggcctcggcctcaagagaagcctccacctcgcccgaccttgggctcggaccgaccgcgccaacaggggatacatcattaccctattcctag

SEQ ID NO: 12080 - DNA, 465 bp, Zea mays
  Peptide Sequence Number=SeqID_53859
atggagaagcctcgtcgatgggatcgtctaggtgcgcgtcgacgtccatgggtccatggagaaccaccgcacgtgcggccgcaccgtccccaacaacaggagaaggaaaggcgaggtgcacgcgtgaagagctcctgcgccgagcgcagtggatccatggaggagggcgacggcgggcgggcggagggggcgagaagagtggatcctgcaccgtgcaccatggatccgcgggaggaggacaacggggggcgggcaggtgggtggagaggaggggcagttggtcaaggtcaacgagggtgtagcgcgcggggtactcataggtgtgctagagagcaaggagaagagctcgcggagtggaggtcctggaggtcctggagacaggggatgcgggtgtggaccgacgccgtcgcagcagcggttgcaaggacgaaggcgccgtcacatgtcgacctctcgagagactga

SEQ ID NO: 12081 - DNA, 405 bp, Zea mays
  Peptide Sequence Number=SeqID_53860
atgggggaggaggagcgcatccatggaaagaagaatggggcgctggggagggcgtgcaaggaggggaggtcggcctgctggggaggttcgcaggggcgtgcgccgggaagaggacagggagcgccgaccatggagaggctcctggcgacctgcagggagggagcgccatggggaagctcgagcttgagtcatggagcaggagaggaagaaggggactcggctagagcaggcttgcgcgagggagaaggagcagggagggcgctcggccatggagggaagctcggctgcttgagctacaccggcgccatgggaggtgctgcactggtgtgcatgaggagctggaaggaggatggcgtggggagaagaagccagggagaaataaagtggcggctagggggtaggtga

SEQ ID NO: 12082 - DNA, 366 bp, Zea mays
  Peptide Sequence Number=SeqID_53861
atgaccttctccgtcggcacgccaccacagaagctgtcggccctcgccgacactggcagcgacctcatctgggtcaagtgcggcgcgtgcaagcgcaacctctgcaacgacctgccggctcatcagtacagcgctgctgctggcgccgagtgcagctacaagtactcttacggccttgccagcatcgtcctcggctgcaccaacatgtcggagggcgggtacggctcgggctctggcctcgtcggcctcggccgcgggctgctgtccctcgtatcgcagctcgagtgtcaggagcactatataagaagcaccagccttgtaggagaggccagcagcagcatccttaccagcacacagtggagctag

SEQ ID NO: 12083 - DNA, 243 bp, Zea mays
  Peptide Sequence Number=SeqID_53862
atgaacagtggactgaacaagatcgcgggttcagtgcatctgtcgcctccggtgatctccacgccgcgatccgcggcggtcaccgcgattcatgctcaactcgggcaggatattactgtggacgtgaaaagatcggagggagagtggatcgagccgaccccaccgtacccacttgctcggcgacgtggtcgtgcgaccgtcaccgaggttgccgctgtttacttcggtcacgccacgccatag

SEQ ID NO: 12084 - DNA, 468 bp, Zea mays
  Peptide Sequence Number=SeqID_53863
atggcggcctgcatagtcatcgtggcgtccgaggaggagcacggcgacgacattgcccttgcgcaggaggacatggagtgcaaggcccgagatgtccctggtggtgcgtcggccctcggcaacaagcgacctgcacaggcatccggcgaaggcgaggagcacgagaacagtggtccaagtgacaagcatggcgggtgcggcaaaggggagcgcgacggccatgtacaacaggctgaacacaacgtcgtacatgacggatgcatagagcgcgactggccagaaaatgaggaagagattatggttgaagaagaagttgtcactccagctgagaatcctccaaccgagaataacttctacttcgacatccgtggagtagacccagaacctcttgcaacacaaggcaaggcccgttgcattatccctttccccgtggttttaaaatctttatcaccttatatgatgcattag

SEQ ID NO: 12085 - DNA, 228 bp, Zea mays
  Peptide Sequence Number=SeqID_53864
atggacaacggcaaggatatacatgatgcagaggtggaagcgaagcggctggtgaaattcttaccggccctggagttgcgaagctgtccgccacgcagtgcagtgacaagcgacgatatcaagatctcgacgacgatttcttgttctctcccaaatccacgctcgccggtgattcccagcagtttagttggtcgtattctcaagaactccgtggcacaaggattctag

SEQ ID NO: 12086 - DNA, 210 bp, Zea mays
  Peptide Sequence Number=SeqID_53865
atggcgtgcgggtacacgtgcatagcaggaggaggacgagtggtgccaaactttgttgtgcccatcaatggggtgctcgtgaagtgggggaagctgacaggtggggctaggcgagcagtgaaaggggaagggaggggtgaggctggcagtcaggaccaggcggtcagcgacatagcggggcatgagcgcgggcgggctcagctgggctag

SEQ ID NO: 12087 - DNA, 234 bp, Zea mays
  Peptide Sequence Number=SeqID_53866
atggacccgctcctctctagtctctatgccgctttgactataaccgttcgctcgcatctttgcaagcagcaggccaaggaccgacgaaacggtgctggtggatggtgcaagaaaaaggagacggcgaggagcagatgctcgcgcgaagactgcggcgcggggcgagaaggtgtggggttttttttacgagctaacaatcttagattgggaagtctacagtttacaacatactag

SEQ ID NO: 12088 - DNA, 1002 bp, Zea mays
  Peptide Sequence Number=SeqID_53867
atgagaaaaccttccaagggatgcaaggagagggacgcgaattaccaccggaatgatcacacagatgaccatggcggcaagcacttcttcaaggttttggttggtgatttccacaaaagattggtcataccgggtaaatttgctaaacatttcgcagacaaggtagaaggaagtattacgcttgaatcacttggtgggtatacttttgatgtccaagttgcaaaggatctgggcagagtagtgcttcaatccgccgggtggaagtcgtttgttagtgcccattacttgaaaaagatggacttcttggtattcaagtacgacgggatgtctcggatgaaggttctaatattcgatcctagtggttgcgagaaagtaccaccaagttttgtcgcagaaaatgctagtagtggtggagttaagagagaagcacccattggcctttcaggcagctatgctcgtcttcccatgaaagcaccagaaactaaaaggaaatcatggaagcaaatggacaggagtaggatcattatgaatgcatcaagctccctgtccaactcatcaggaggcatggcatcttcagaagatgatgaagcacatcctgttccgagttacatgctcccacaaggcaccaggcttgatagattacaaaagaagattctgaaagagcgactccgagacatttgttctgaaatccccatctatgtgtgtgtcttgaagaagacaaacatttctggacactctcaagccctggaattctccatcaactattctgatttatatcttccattcaagagcagagagttgattcttcggtgccatggcaatagctgggaagtgctgttacgcgttaagcttccgggagctccacgcaaatgcaaaaggctttgcaaagggtgggcacggtttgcaggcgacaacagtttgcagctgggagatatctgcctctttgagccacttgataccaagaatggcacgatgaatgtgcatatcattcgcagagactga

SEQ ID NO: 12089 - DNA, 1032 bp, Zea mays
  Peptide Sequence Number=SeqID_53868
atggaaacttctaaatctcctcaatcgtcaaagaacagtcatattgtggtgccttctgatagtaatggcccccgatttgacaatgatggtttttcttcagaagctgcatcaaatcaaatggtcgttttcaactctgaagcaggagataaagagcaagatgaactgggggaaaaccgtttgcagaagtcaatcataacaaggggaatatcgccatctattggagcattcactgtccaatgtgctaaatgttttaaatggaggcttattccaacgaaagagaagtatgaagaaattcgtgaacgtattatagaggaaccttttgtatgcaaaagagctcgtgaatggagacctgatgtaacatgcaatgacccagaagatatatctcaggatggtagcaggctttgggctattgacaaacccaatattgcacaaccccctcgcggatgggaaaggcagattaggataagaggtgaagggggtaccaaatttgctgatgtatactatacctctcctactggaaggaaacttaggtctctggttgaagtcgataggttcctccaagagaatccggagtatggtgctcagggtgtaactttagctcagttttcgttccagatacctagacctctacggcaggactatgtgaaaaagaaaccgaagttgataaatccaagtgatgaagcaagtatgattgcctctaagtcttttcaaccagaagaagtcgagggagccgcggaggtagcgcaagatctgcttgagagcggtgagatggggcttccgccgggtgtgcatgtgcaggcacacctgctggacgacgtaggcgatgtcgggcctggagaaggtcaggtactggagcgcgttggtcagactccggtaggatgtcgcgccggcgtctgggggcccgtcgtcctcagagagcttcacctgagtgtcaacaggcgtggagcagggcttgcagttggacatgctagcccgctccaggatgtcgatggcgtactggcgttggtggaggaactgaggaagagaccctga

SEQ ID NO: 12090 - DNA, 204 bp, Zea mays
  Peptide Sequence Number=SeqID_53869
atggcctggatgaggaacactgtggcctgcctcctcgccttcatcgcgaccatcgagttcctgagcttgcaccggggcagcgggcgcatggacatgggcgctgccatggccacgaccacaggttcttgtgacagcgtcaggctcttgcacaggtggacggatttgctggagtacaacctttttttaaatcccaaagacatttaa

SEQ ID NO: 12091 - DNA, 612 bp, Zea mays
  Peptide Sequence Number=SeqID_53870
atggcgggcggaaatacgctcgccggagctaaggaacggtggctggccggtgaggccccagcggccttcaccggcgtgcggcggggacgtgcccttctccggcgcgcggcacggcaagggtccccagcggccttcaccggcgtgcaagggtgtccaggcgcggcacggcacggcacggcgcgtgtcccagacgtgcgcgggcagatccttgccgtgcgcgggcaggtccccggcgctcgacggcgccccccgcagccgcaggagccgttcgcccggaccgcacgacaggcggatctcggcctccgcgggcgctccggtgggcggatctcggcctgcacggtgtgctccggcgggtggcttctacgcgggcggatctcggccgccgcggtgtgctccggcaggcggatctcggcctccgcggtgtgctccggcaggcggcttctacgcgggcgcttcggcgggcggatctcggccgccacagtgtgctccggcgagcggcttctacgcgggcgagctcgacgcgggggtgggcacggccgggagcagccagccgcaagcgagctcgacgcggagcgagcgcttctccggcgagctcctcgagaggtagcttaa

SEQ ID NO: 12092 - DNA, 282 bp, Zea mays
  Peptide Sequence Number=SeqID_53871
atggacaagatcaaaggcttgagtagcggaggaaaaaggaagacgagagtgacgactgagctgacaagcatgacagaggcgctcagaggaaccccggtgaaacccatagcctgggcagttgctacaaaacacgagggcgatgccagtgaagaagcttctctcaccgatgaggcacctacatcagaagtcatgctagcccggaagagaaaagcaggaagctctttgtcgatagagccaaaccatctctctgatgaacttgaaccaaagctggaggatgcttag

SEQ ID NO: 12093 - DNA, 1902 bp, Zea mays
  Peptide Sequence Number=SeqID_53872
atggagctgattccgtcagctggcgcaaggtgcgccaggatgaccaaggaagctccaccggccaggtgtgcggatccatttgtctatcctggagcaagaactgtgccacccgatgcacataagcgcacggcagaagaaaagcaccttctttcatgtagtgctccgcctccgcgtgagcaccaaaagttttttgaggtgcctgtcaccaatgccagaaaagttcatttacaaagctacgaagctgcaaccagtgggactactttgcgtggtagaatgtttcataaaaatacacgtgcaagaacaaggagtctttccccaggcccaagagggcatgattttgcttccagttttgcaagtccaagagacgttggagttagttcaaggtcagtggttaaaaggatggatgatctgaacagtcggtcccaaccctttttcgcgagcagtctgtctcaacccttgcctcgtcctccagctcatattgctagttgtctcattccttcatctcccattgcttctgcccaatctcaatcacagtggaaaaaggggaaggcgttaggtagcggcacatttggtcaggtttacgttggattcaacagtgaaagcgggaagttttgtgcaataaaggaggtaaaagttattttggatgattcaaagtcaaaagaacgcctcagacaattgaatcaggaagtagatatgcttaggcaactaacacaccaaaacattgtgcaatactatggaagtgaactgactgatgaggcactgtccatctatcttgagtatgtttctggaggttcaattgataaattgcttaaatactatggtccttttaaggaacctgtgattcgtaattatacgaggcagattctttctggacttgcctacttgcatggtaggaaaactgtgcacagagacgtaaaaggagcaaacgtacttgttggcccaaatggcgaagtcaaacttgctgattttggcatggctaaacatataacatctttagccgaaatacactcattgagaggaagcccatactggatggctcctgaggaaaagttgtgtgaagtccttcaaattcttcaggttataatgaataaaaatgggtacagttttgaagttgatatctggagccttgggtgcacaattattgaaatgggaactgggagacatccttggcatcagtatgaacatgtacacgcaatgtttaagatagtaaacactaaggatatgccagaaatcccagagagactttctaaagaagggaaagatttccttagtttgtgcttaaaacgtgatccggcacagcgcccatctgcaactcagttgctgcgccatccttttgttcaagacaatcaggaaatcagtggggccaaatgcaacaccactttgagaaatggactatcttcgcctgcagaggcatgtcataaaaaagtggcttacatgctgtccaacaaagaaccttcattgaagagaagtgttgctcctctgcgggacattggagggataagagcgcgaggttttacgggatcttcctcagcatgcgtttcaccccacaaaacttccaggcacagtaacctgcatttactgaccatccttctttccggttcatcccatcacacccagtaccttgacttctgccatcatccatcctgcagcaggcatattgatgtgagagcaaacatgtctctcccggtgtctccatgctcaagcccgttacgccagctgaagcaatggaactggagctgcgttgcttccccatcacatctggcattctcctcgggatctgtggcccacaacacagtcagtgacatgcagaaccagatgagaggaagcgacccagttccagatccatggcgcgacatcagccacagacgacaaagcccatatgactccccaaagagattctga

SEQ ID NO: 12094 - DNA, 903 bp, Zea mays
  Peptide Sequence Number=SeqID_53873
atggcgaaggagacggagtactacgacgttctcggcgtctgccccgccgcatccgacgaagagatccgcaaggcctactacatcaaggcgagacaggtgcatcctgacaagaatcccaacgacccacacgcggccgagaacttccaggctcttggagaggcttaccaggtgctgagtgaccctctgcagaggaaggcctatgacggctatggcaagaacagcgtatctagggagaacatactggatggtactgtggtgtttacccttcttttcgggagcgagctgttcgaggactacattggccatcttgcaatggcaacaatggcttcctccgagttgacaagcgataacgacacccccgaaaagcttcaggataggctcaagacaaagaaggatttgctaatcgtgccgaagctgaggcaaagaagctctcatgcacttgtcagtcttctgatcccagcagcaaaggagcttggcaagaaggccatgtacctaggagtgccattcgtagccgagtgggtcaggaacaagggtcatctgtggaagtcacagatcaccgcagcgaaaggggccttgcagctgttgcagttgcaagaggaggcctgccggcagagtagcaaggatggcaatgccaccgagcaggatgtcgacttgcagatgaggatgaacaaggacctgatgatgagctcactgtggaagctgaatgttgtggatattgaaatgactctgttgcatgtttgtgaaatggtgctgtctgaaaacaatgtcaagaaagatgatctgaaggcccgagcaacggccttgaaatttcttgggaaaatatttatgggaatcggcaggctgttccgatgcttatgcaatccggcttatgatgttgatgatgattttgagccccacaaatga

SEQ ID NO: 12095 - DNA, 381 bp, Zea mays
  Peptide Sequence Number=SeqID_53874
atggctccttctcaaaggggccaccgaccaccgacccccgccatgtcctctaaaaggaggaggtcggccatgagggtaggagacttgcacgttctcaatgaactttctaggctccgaacggccagccgcgacgctgattgggtccccaaggcgatgattcgctttaggaacctcgactttgtcctctacggtaatgaggagaggggcaaccagtttctggtcacctccaaaagcaatgacatccagtttctgcccctcctccacaccttaacctcgtcggccaggaaacccaaggaacccaccgaggcgctgcatagccccacgttgctagcagacaatcgcgtgtccgagctactcggcttcccggaggaagcaagctaa

SEQ ID NO: 12096 - DNA, 2526 bp, Zea mays
  Peptide Sequence Number=SeqID_53875
atgacgaagctgacctcggagctactgcggccggtggttccggcggcggcgctggacgaggcggcgctgctgcgctacctggtggccaacgtcccgggcttcccgggccccgcgcccgcgctatcgctgacccagttcgggcacggccagtccaaccccacctactgcatccacgcctccgcgcccggcggggggcagcccaggcgctacgtgctcaggaagaagccgcccggggccatcctccagtccgcgcacgccgtcgagcgcgagtaccagtcatttcctatcgggaagcaggttctcaaagctctgggggatcacacagatgttcctgtcccgaaggtttattgtctctgcacagatgcaagtgtaattggaactcctttctatataatggagtatctggaaggaataatatatcctgatagcgcgttgccgggggtaactccatctaaaaggcgggctatatatttgtctactgccaaaactttggctgctatacacaaagttgatattaatgccattggattacaaaagtatgggagaagagacaattattgcaaaagacaggtagaaagatgggagaggcaatatcttgcatccactggcgaagggaagcctgcacgttaccagaggatgcttgatctagctcgttggttgaaagaacatgtaccagaagaagattcctcaccaggaccaggaacaggccttgtgcatggtgattaccgccctgataatctagtttttcatccaacagaggaccgagtaattggcgttattgattgggaactatctactttggggaatcagatgtgtgatgttgcttatagctgcttgccatatattatcgatgcagcacccagtgcaaggacttcttatggagggtttcaagatactggcattccagatggaattcctcaactggaagagtacctttctatatactgctcttttgctgcaagaccctggcctgctgcaaattggaagttctacattgctttttctttgtttcgtggggcatctatctatgcaggagtatatcacagatggactatgggtaatgcatcaggtggtgagcgcgctaaatttgctggcagggttgctaacgctatgattgactgtgcctgggacttcataaatagagtaaatgtcctgcaagaactgccttctaagggttctcaagtcttaggagcatcgtggcaagaatttcacagagaggaagaaagttcaacttctgaaaagaatcaaggaaaatttgttcctagtgaaaaggttatgcagcttcgaaagaaactaataaagtttatcgaagatcacatatacccaatggaggctgagttctacaaacatgcacaatcaacctcaagatggacaattcatccagaagaagaaaatcttaaagcattggcaaagaaggagggcctatggaacttgtttattccgctagacagtgcagcgagagctagaaagctattgtttgaagaccattctcaaatttcccttggaagttcgaataatcttttgctgggcgcgggtcttacaaatcttgaatatggatatctgtgtgagattatgggacgttcagtttgggctccacaaatatttaactgtggtgcacctgatacaggtaacatggaggtcctgttgaggtatggcactaaggagcaacagaagcaatggttagttcctttattggaagggacaattcgttctggatttgcaatgacagaaccacaagttgcatcttcagacgcgacaaatatagaatgctcaatatccaggcaaggagatttttatgtgataaatggaaggaagtggtggaccagtggagctatggatcctaggtgcaaaatcctgatattaatgggaaagacagatttttctgcacctaagcataagcagcagtccatgattttagtggacatcaacactcctggggtgcagataaagagaccattgttagtctttggttttgatgatgcacctcatggacacgcagagattacatttgaaaacgtgcgtgttccagtaacaaatatcctgcttggagaagggcgtggttttgagattgctcaaggaagacttggtcctggaaggttacatcattgcatgaggctagtaggagcagcagaacgtggcatgaatctgatggtagagagggccttaaacaggaccgcatttggaaagaggattgcacagcatggttcctttttatcagatcttgcaaagtgtcggattgaactggagcaggcaaggcttttagtccttgaagctgccgatcaactcgatcgacatgggaacaagaaagcacgtggtatcctcgcgatggccaaggttgcagctccaaatatggccctgaaggtgcttgacatggcgatgcaagttcacggcgcagctggtgtctcgtctgacacggtcttgtcgcacctatgggcaacggctaggacactgcggattgcagacggccccgacgaggtccatctcgggacaatcgccaagctggaactgcggagggctaggttgtaa

SEQ ID NO: 12097 - DNA, 651 bp, Zea mays
  Peptide Sequence Number=SeqID_53876
atggtggtccggtccattcctaagctgaccgagtcggaggcaaggacggtgtcccaaaacctctacaacttggtggagagagctgtcgtacaacaagctgagatcgactgccacgctgccgccgccgtgcaggtgcaggggcgcaccgcgcaggggcggctccacggctgggctctgtcggccgtcgcgtgcagccgtgcgtgcatggggcaggccgcaggggcgcacgctgcgcagcgcgcaggggcggctgggctccgccgctccggtcgccgggtcgtgtgcaggtgcaggggcggctccgcctccggtcgcgcgcaggccgcctgggactgggactctgggagccaggagggagagacggcggccagacatggagagacagagacggactcgattttaggggtggtggcgggcgcgacgaccaacaccaacggcaccttctccatggagctggacatgaccaacgcgctggccgcgttcatcggcggctgcacgctggtggtggacacgccgctcgtcaagtgcaacgccgacctcaccgacgtcggcagcctcgtctcctacctgcagggcccgctcacgcgcctgctcggcggcatcttccacctcttccccgccggcttctccttccacgtccgacgagcctga

SEQ ID NO: 12098 - DNA, 513 bp, Zea mays
  Peptide Sequence Number=SeqID_53877
atggaggacgacagcaccgaagctgcatcctcagcccgtgctacggtaccgccgccgggctggacgcgtgcgctcgccaacaccggcgcgtcgggcctcgcggccgccagcctcgtcctgctcctgctctacctcaccggccgcttcctctggctctacaacaagaacgccgcgagggcagccgattcctcgcggacgccaggagcagcggctggtgcgtcgacgtcgctgctgccagcagcttctcctccgccccgccgcgacgttccgctgccgtcgtctctctcgaccatcccggtgttcttcgtcttgcacgtggccgcgcccggactcggcggcggggagaaggcggaatgcgcggtgtgcctggcggagttcggggagtgggaggccggccggcttctgccgcggtgcgggcacgctttccacgaggagtgcatcgccacctggctccgggtcagcaccacgtgtccactctgccgggccgccacggctccttgtgcatccgtttga

SEQ ID NO: 12099 - DNA, 117 bp, Zea mays
  Peptide Sequence Number=SeqID_53878
atgagcctaggcatagaggagaacgtcggtgaagtcttcgacgaactaggcatgacttcgatggctcaacgcactaatggcgagcagcacgacacaacgacgatgaaccgtcggtga

SEQ ID NO: 12100 - DNA, 456 bp, Zea mays
  Peptide Sequence Number=SeqID_53879
atggaagtgattgacacgggaactcctctcagtgttccagtcggtggagctactctcggacgaatttttaacgttcttggggagcctattgacaatttgggtcatgtggatactagtgcaacatttcctattcatagatctgcgcctgcctttatcgagttagatacaaaattatctatctttgaaacaggatcggaagtatccgccttattaggcagaatgccctccgcagtgggttatcaacctacccttagtacagaaatgggttctttgcaagaaagaattacttctaccaaaaagggatctataacttcgatccaagcagtttatgtacctgcagacgatttgaccgaccctgctcctgccacaacatttgcacatttggatgctactaccgtactttccagaggattagcttccaagggtatttatcccgcagtagatcctttagattaa

SEQ ID NO: 12101 - DNA, 258 bp, Zea mays
  Peptide Sequence Number=SeqID_53880
atggctcaccggagttactccggcccgcccgagacgttctcactgccattctcccctctctgcctgtggattcatgacctcttccctgccattgagttcgtcgtggcgccctctccctctctgcccaactccggcgaccccggagccactctagctcgcgccagcctcaactccggcgacctcaccgccgtggagaggagcgacgccgcctgcagccgtctgttttccccctggtctgatcccctccgttcgatttag

SEQ ID NO: 12102 - DNA, 246 bp, Zea mays
  Peptide Sequence Number=SeqID_53881
atggcaagcgaggacgcgcgcgaccaaagggagtgccgcgccttggatggaggagtagagagaaaagcagggggcgagcagggagaggactcggtgacctcaatcaccatggggcgcgaccaagtgaaatccgagcagagggcacagctgcacgcgcaagcagggagaggggcaccgcggcgagctcgagggaggcaagctgagggagagagaggaggggccgctgggctagatatttggaattga

SEQ ID NO: 12103 - DNA, 345 bp, Zea mays
  Peptide Sequence Number=SeqID_53882
atggttgaattagaatatgacggtgacctcactgatggggacgacctccagttcctcgttgacggggaactagactccgacactagcacggactggtcttggacgtacgatggagaatcgttggatgtggagtccttcgacaacaatgatgacccgatgtctggacattggatgggcatcggctcctcagatgacgatgacgagaatgacaacggcagcagtgactacggcagcagtgacgaggacaacgacggcagtggcaacgatgacagcgatgatgatggcggggcctgccaatgcaatgagatgcctcctgtaacacccaaggtgttaccgtatgcttaa

SEQ ID NO: 12104 - DNA, 99 bp, Zea mays
  Peptide Sequence Number=SeqID_53883
atggaggaagcggatgaatccgacatccagggcccacatggacgcgaggggagtgagcacgcgacaaatgctttcaaatataaagctcatacacactaa

SEQ ID NO: 12105 - DNA, 354 bp, Zea mays
  Peptide Sequence Number=SeqID_53884
atgggctccttcccccttgcaacagtaaccacggagaggaaaaagggtggcgcggcttaccggcggcgttcgggctcgtcgggcgggcgtgtgctccggctgctcacggcggtagggctcaaatcaaaatggcacaagggagcttcacgggatgctaaggatgatataggtacaaaggaatcgatgaatggctcaccgtggggctcggtctacgtgcgacggcggtcggttgaagtccggcgatgtcgattcagcgtctccggtgaggggtgtgccttgggtagtttggccactttttgttattttgaccaagtggtttttggcgccaggcacaaagattcaaagggcaggtga

SEQ ID NO: 12106 - DNA, 405 bp, Zea mays
  Peptide Sequence Number=SeqID_53885
atggggcagaagccgtcgtacctcgtgctgctcgtcggcctcctcgccatcgccatgctctgcgccggcccgggtcacgcgctgcgccaacggaacgacgccaacggcggtggcctggagttctccttgggctccaaggcggccacggcgggggtgaagaccgagccgctggacccgtccctgagcgacgactacgaggtttgtgcggttatgggttctggagatggctgtttcgtggctggtgggggcaggatggttgcggtggggctgcgcgctgctgtctggggcgggttgtggttctggtggcgcggatttcatgtagttgctggtcggctgggccctccaaatctccctggtgacgcggatttcgggggtgtttggttagagggactaaagattctctag

SEQ ID NO: 12107 - DNA, 363 bp, Zea mays
  Peptide Sequence Number=SeqID_53886
atgttgcaagaacagttacaagctgagagggatctgcgagctgcattggaagttggcttgagcatgccttctggacagttttcaagtgctcgttcgatggacatgaagacaaaggcagaacttgaggagattgctcttgctgaagctgatgttgcaaggttaaaacagaagccacagttcaagctatctaaacatccaaagttacaacaacgtcaacttgagggcaagctaaatcttcaggggacgacgacggaggcgcagaggctaggggagtggaggctcgaccgggtgcgggtggaagtagagatggcaatgggtacccgaaatccaacgggtttttaccccattaaggtacgggtttga

SEQ ID NO: 12108 - DNA, 372 bp, Zea mays
  Peptide Sequence Number=SeqID_53887
atggaggatctatatgctaaaaatgaaaatgagcatggaggcaatgacgatggtgcaatgagccacacacgcacactacacagcgcctgctcctactccacctttccgctcaatccatcacgcctcgcctctactaaggcggaagaaaacaggttggagctgttgtacattcagtggactgagcaccataaaaggttgtccaatttcttaaggacaaaagctgaaccacctatttactacatgccaactaaaccaattattgacgatctagccattgttgagcagaacaaggaaaagctgaatcaatatattgagcgcgtggcagctggagctgccctcctgacgccgcgcgcgccgccggccggcagctag

SEQ ID NO: 12109 - DNA, 363 bp, Zea mays
  Peptide Sequence Number=SeqID_53888
atggcgcagcggacgccgtgggcgcgggcccacgcatcggagagaggggggctgactgcatggaacggtgacgggggagagggagccgactttgggtcgaccgccggtgaaatcccgcggcggttctccgccgggagtccagttttgcgacgagggagtggtggcgaggcacgggcgagggtaggggatcttggaggtggggtcaatttgaccggtggaggcctagggtggccggtccacggcgggtggcgggcgctcgcggtggtgaagtcgctggcgaggccaccgggcgcaataggcgacgagcaggtgtgcgctaggcttgtgacagggcgacggaccttaagagctagagcaatttga

SEQ ID NO: 12110 - DNA, 330 bp, Zea mays
  Peptide Sequence Number=SeqID_53889
atgcagggttcttgcctgaccgccatcgcagcaaaatcaaccaaggacctccctacactggccactcccctactgcccttgcccctttcggcaatagcaaactacccaagtgattcaggggtaaacaagagatctaatgggattcacatgatcatggatcgacgactcacatttattcgcgaaggggtatctggcaatatgatcctcagtcgttcactccgcatcccacggttccgattcaacagaacgacgagttgggctgaagaaaaatataaaaatcagaatggtcgtgcattagggagttggccgagaggacttgaggaattttaa

SEQ ID NO: 12111 - DNA, 270 bp, Zea mays
  Peptide Sequence Number=SeqID_53890
atgaggaatagagtgaagggaactggcgtacgcgaaggcgagaaacatgggcacggcaagacgagaaagagatggtttgggaagatgaacatggctctggcggcagctgcccgttggggcagagcaacgtggggaggcatgggctggggcgcgctaggccgagctggcctgacagcctgggcgtgtggcgctgggctacgacgcaagagcgctggggaaggccaggtgggccgcacgcgcaggccggctatgggggaggagctaggatga

SEQ ID NO: 12112 - DNA, 195 bp, Zea mays
  Peptide Sequence Number=SeqID_53891
atggcggttgtaaatattggtgacgttcccaccctggctgtgtggaccctggccaatgtggctggtcattctgcagagtgtcgtgacattgtgcttgcaaatggaacatttgccatgaagaacacaactttggacatgtatggaggtcctctctctgatggtgtactagctatatttctggagaagcttctctaa

SEQ ID NO: 12113 - DNA, 408 bp, Zea mays
  Peptide Sequence Number=SeqID_53892
atggtggacgacggctgtgtcttctctggcgtgcacacggtgcggggcgaggacgggaactctaagggtgtgcgagtgagggacgggaggggagtgagtgggggcgcaactttggaaggggtcaggcgcgtggggagcgatctaaggctccaagtctatcttggtcctatagtcaggggtgccataagcatgatgaccacgtggcggcgagctgtaaggttgctaagtcccaacaggggtggaggaaccatcctcctgatggcggtgctctgcgcgcttatcatgcagtcccgcagtatccgtacaagccttgcccaacttgtcaagggcatggtccagctcggtgttgagcatggtgaccagattgaccatgctactcaatctaggaatgccctcaccaacgggtga

SEQ ID NO: 12114 - DNA, 210 bp, Zea mays
  Peptide Sequence Number=SeqID_53893
atgtcgctgcggccgagcgaactggcgaaattacgccggagtagcttcaaggcgtcggtgagcgcagccgatgggctgcggcagcgcgtaagcgtcatggatagcatccgcgaggcgagccgctgtagcgccctccggaagaagcgctccttcgaggcggtggcgcttgcgcaatcgcacccgctggcacttgagaagacgattgaataa

SEQ ID NO: 12115 - DNA, 252 bp, Zea mays
  Peptide Sequence Number=SeqID_53894
atggcgacaagcaaatccatggcgcgacgagcttcgcccacgcccatggccactatctgcgccatgcaatcccccattctatgcgtgccctccctgactgctgcaccgcgctccgcagcaggccgccagcgagctgctgttgtgcgccttggcgccagcctctgtgagacgctcgcccgccctgctcaggaagatcgtcccgggccgtgctcgccccttgcgcgtcgctctgtcaccattccggccagctag

SEQ ID NO: 12116 - DNA, 723 bp, Zea mays
  Peptide Sequence Number=SeqID_53895
atggagagcagcagcaagggcatgtgcaccgtcgagaggcgcggccgcgtgcacctcatcaccatgaccggcgccggcgagcaccgcctcaacccggacctcctcgcggcgctccgctccgctgtggccgcctccgctggcgccggcgcgctggtgctggccgcggaggggaagttcttctccaacgggttcgacctggcgtgggcgcgcgcggcgccgcccggcctgcacggcgccatggacggcgggctccgcgcgctgctggccgacctgctggcgctgcgcgtgcccacggtggcggcggtgacgggccacgcggcggcggccgggtgcgcgctggcgctcgcgcacgacgccgcgctcatgcgcgcctcccgcgggctcctgtacatgagcgaggtcgacgtcggcatcaagttcgtcgacttcgtggccgccgtgctccgcgacaaggtccccgacgccgcggcccggcgcgacctggtgctgcgcggggaccgggtggccgcggccgaggccgtgcgccggggcctcgtggacgccgccgtggacggcggccccgaggacgtggtggccgcggccgtcgctgaggccgagaggctggccgccaggggctgggacggggaggccgtcgccgagatcaggaaggccgcgtggccccagctgtgggcccaggtcaaggaccacggcgccgggccggcgccggcgcggccgcggctctag

SEQ ID NO: 12117 - DNA, 1044 bp, Zea mays
  Peptide Sequence Number=SeqID_53896
atgggtgcgcggcggcggcttcgccagggctctggacggctccagctgctgttttccttcctcgtgctgctgctccaggcacaggccagcgtcggcgcggcttcgatcaacggtgaaggtgcccaaaaactgaacagagctgaactcgaagttgcctgtgaagattttagcaacatcatcaatacttttcctacctgtactgtattcaagggcatattgtcaagcggggttgagattggtgttgtctccactaccatatcgtcgagcaaagactggtccaggagtgcggaatcatgcttcaagaaaaagatagatagactgtcaagggtcaaccacaagaacttcatcaacctccttggctattgcctagaaaatgagcctttcacgagaatgatggtgtttgagttcgctccacatggtagtctctcacagcaccttcacgtcaaagagtttgagcatctggactgggctgcgaggatgagggtcatcatgggcgtcgcatactgccttcaatacatgcaccatgagctcagtccacctatggcgatccacgacgtgcggtctgacacaaccttcatttcagatgattatgctgccaagattgcagatgttggtgtatggaacgagcttgctgccaaagcgaaggctggaaaggaggacggcagcagccgtgctgaagctcctccggatctcccaagcaacgcctactgcttcggcgcgctcatgatcgagaccatatccgggagggttcctgacccgtatgatcacaaacccatatgcagctgggcttctgagcatctgaaagacaagaactacggcaagctcgtggacgcgtcgctgaaggagcacaaggaaagcgagctggaggccgtctgcgaggtgatccaagagtgcatcgaccctgacccgacgcggcggccgtcgatgagagacgtcgtgggcaagctgcgagacgctctcggcatctcgcccgaggcggcggcgccgcggctgtcgccgctctggtgggcggagctggagctgctgtcggtgaagtcaacctag

SEQ ID NO: 12118 - DNA, 1386 bp, Zea mays
  Peptide Sequence Number=SeqID_53897
atggagcagtggcgcagaggcggctggcgcactggcctgtggagcactggagcggcggtgacgcactggcctgtgaagcaatggagtggcagcgcactgccctatgggcggagggaagagggaggagggagcgcactgccctatgggcaaatataccatcctttgaaattcctgcatttcaatccatacattgatatgctggtagaacatagaagatgctcacacacatgcttgaaacaggtacacattgggaattcaccaacctatagacttgaaaggaagcttggaaagggaggatttggacaagtatacgttggtcgacgtatttcagctcctcgtctcagtgaccgtaaccctggttcaaatgctttagaggttgcactgaaatttgaacaccaatccagcaaaggttgcaactttggagctccttatgagtggcaagtttacaagtatgtccatggtgatgtgaagcctgagaacttcttgcttggtcctcctggtaccccagaggagaagaagctttttcttgttgaccttggattggcaactaaatggaaggatgctggtacggggcaccatgttgaatatgatcagagacctgatatttttaggggaactgttcgctatgctagcgtgcatgcccacttgggaagaactgggagtaggagagatgatcttgaatccctcgcatacactcttatttttcttctccgtggccgcctcccttggcaaggataccaaggagagaacaaaggttttcttgtctgcaagaaaaagatggcgacatctccggagtctctgtgtggaatctgtccacaacctttccggaattttgttgagtatgtcgtgaacttgaaatttgatgaagaaccaaattatgctaggtgcatctctctttttgatggtattgttggcccaaatccagacataagaccgataaacactgatggtgcccaaaagctagtatatcaggttgggcagaagagaggtcgcttaatagtggacgaaaatgatgatgagcaacctaagaaaaagatcagaatggggatgccggcaactcagtggattagtgtctacaatgcccgtcgacctatgaaacagaggtaccactacaacgtagccgataatagattggtgcagcatattcaaaaggggaacgaagatggcttgtttattagttcagttgcctccagctcaaacctgtgggctttaattatggatgctggcactggttttacatctcaagtatacgaactttctagttactttcttcacaaggaatggataatggaacagtgggagagaaatttctatatcactgcactggctggtgcgaataatggaagctctttggtgattatgtcaagagcatcgcttaagcgatga

SEQ ID NO: 12119 - DNA, 702 bp, Zea mays
  Peptide Sequence Number=SeqID_53898
atggacgagtttgacagcggcgggcggagcggggacagggcgggcgccgccgccgccgccgccgcaggagacgacggggccactcctccgttgccccagacggaccttatagtggggacttgtattctactgatgggagcgtggtctgttgcccttgaatggcgttgtccttctgacgtctctcgtagggtcgtgcgtagccgcactcccggtatggcgtaccgcttcatccgtgtggccccgcagggtagacttacagtatgcttcggggtcgtgtgtggagcagcttcgtcttctgtcatgagccttgcatcaccttcatgcgtgcgtaggcatacacccggtatggtgtatcgtctcgtcctttctggtatgtgggttactgtagagactctagtgctgaggtcccccatgactggggttgatcggccccacaaggcagtggggatgcgcctgagatcgtacgcggcggcatacaatcatgttggtcgtgacctctcggcgcccttcggtatgccgtgcctatggtctggacgtgggagaggtcttgtcgtgctaacgtgggtcagcagtactggatcggcccttccgccttgcagggttgctcgaaggagtgatggtcggcggctccgcctcgcagggttgctcgaaggagggatgatcggccgctccgcctcgcagggttgctcgaaggagggatga

SEQ ID NO: 12120 - DNA, 258 bp, Zea mays
  Peptide Sequence Number=SeqID_53899
atggccgccagctccgcccccgccaactccggtgccggcgcgtcccctccggggattgcgggtgacggggatcacagctgggaggccgcacacgccccttccctgtccacgcactccccaccccgcaccaaccgcctgcctcatctgcaggatggctgcctccgccggtacccgacgctgtacggcagcgacgaccggatccaggcgtgtatggtggagctgggcgtgccgctcaccaagcacccagggttccactag

SEQ ID NO: 12121 - DNA, 523 bp, Zea mays
  Peptide Sequence Number=SeqID_53900
atggcggacctcctcggtgacccggcgtggccgcaactccacccgcggctctgcaccgacacgccaaggtcaggcctgcagtgcgagctcgcgcccgacgatgcgcgcgtgctccgcgccacctacctccacctgggccccgacgtcgccacctcggcctacaggcccggggccaggctcgaccccgcctcgctgcgcggcctgccgcacctccggatgctctccatcttcggctgtttcggcgtcgcccaggcccccgtcgagttgccgcccgcgctgttccccggaggggacacgccagcgtcggagctggcgggggcggagctggcagccatcttccgggtgatggcagacctcctcggcgacccagcgtggtcgcagctccacccacggctctgcaccaacacgccaaggtcggccctgcagagcgagctagcgcccaacaaagcgcgcgtgctccgcgccacccgcctccacctagaacgaatcaagctgacccagggcctgtcgtccgggggccagg

SEQ ID NO: 12122 - DNA, 636 bp, Zea mays
  Peptide Sequence Number=SeqID_53901
atggcggacctcctcggcgacccggcgtggctgcagctcaacctgcggctctgcactgacacaccaaggccgggcctgcagtgcgagctcgcgcccgacgacgcgcgcgtgctccgtgccacccgcctccacctgggccccgacgtcgccaccctgccctgcaggcccggggccaggctctaccttgcctcgctgcgcggcctgccgcacctccagacgctctccatcttcggctgtttcggcgccgcccaggcccccatcgagctgccactcgcgctgttccccggaggggacgcgccggcactggagctggcggccatcttccagtgcgagctcgcgcccgacgccgcgcgcgtgctccgtgccacccgcctccacctgggccccgacatcgccaccccaccctgcaggcccggggccaggctcgaccccacctcgctgtgcggcctgccgcacctccggacgctctccatcttcggctgtttcggcgccgcccaggcccccgtcgaggtgccgccctcgctgttcacgtcgtcgtcctcgctcgagcatatcgtgctcaagtccaaccccagcctcacctcccacataccggcgacgttggttatcattgtttttaggaaaatggcgtattag

SEQ ID NO: 12123 - DNA, 513 bp, Zea mays
  Peptide Sequence Number=SeqID_53902
atgagatgcagagttgagtgtgcggacctgctgcgggacaccgagaggggaggcggtgatgtaggagacgactcagtcgaagaaggcgaaggggtcgtcggcctgcgcggtggcggccaggaaggcgacgatgacgactacggcgaggaacggtggccccattgcttgctaggtcaagaaggaaggggagaccaaggggagggcttacctggtggtgctcgtcgccggcaaaggggccgaagtagcgcggtagcgatgaccggtgcagtcgtcggtgggtgctgggttacgcgcacgcttgctgggccaatggggtttagggatttgagcggggagacgacgttgggagggagcagcgacattggggagagggcggcggcatgggcgtctgcaagacggcgaagagcggagcggtggctcggatttgggggcgaggtgagtgacgaatttgggtgggatttggggtggggcgcgtggacggagcgaggcgaggatggacggcggcgggtgtga

SEQ ID NO: 12124 - DNA, 270 bp, Zea mays
  Peptide Sequence Number=SeqID_53903
atgaagaatctttacacagttctaaagggagaacacgcgataggtacaacgggagaagccatcgaaaaggatcaccatgtgcagcactcaagcaggatcaaggccgccgacaagggggtcggtgccaagatctatggcgccgaccccctggaactcgacacatcagctgccacgtatgaaaatgctggcgccaaagaaggtggtgccagcatgcgttgcctcgacgccaatgatgatggcgccgagcaaagggtctattttttgaaatga

SEQ ID NO: 12125 - DNA, 1002 bp, Zea mays
  Peptide Sequence Number=SeqID_53904
atggggggaggagtcatgcgcaccgccgcgaaggtgggcatcgccaggggcgccgcggcggtggcagcggcgaaaggcggccggttccgccacgccgcgccggccttcgccacggcccccgccgccacgggttccgatgcggcgccgcttgtctccgcctccggtggcgaggtgccccccgccgcggcgcagtgggcggcgtcctgggagctggacgattgggaattcgcagactgcggggacgttgccccggcggctgtggtggcggagagggaggcgacggcagcggccgcgaagcccaggctggtcttcgcgccgccgtcgagggaggaggccgaggaggctacgactgagctcagggacgccataggcagggcttatttcaacgaatcaccagttgaggttgttaaggaacaagataaagagtttaataaactggcaactgatgccataattccttctatgcctggacatgtggttcaagctttttacattgctgaaatcaagcacagaggctcaggtttgtgcaaaggcctgtgtaaacatactgcactactcatttggggagatcagagtgttgtcgcctcccttgcatcagatagaaatgtctgggatgcagtattgaagaatgagaaggttatggaattttataagactcaccagacaactccagttcagacattccctgaggaagcagccacagcagagtcgcctgggaagtttgaagatgccacctctgaaaatgcatccaacagcgaactccccacgggctcaggcgcaagtttcgcagatttcgtggacaatgcgaagaagaaagtgatggatgtggtccacaatataaccgactttttcagggacttgttcaatgactcagccgaggcccagaccggagcaggcccttcagctgagaagggcttttctgcaacagagatggctgtgggaggatccttcatggctctgaccatagcggtcatcctagttgttctgttcaagagggcatga

SEQ ID NO: 12126 - DNA, 276 bp, Zea mays
  Peptide Sequence Number=SeqID_53905
atgtcaatcaacagacttcgttcgaccaggcgcagagaagggagtgatgatgcgaaggctagagacgaaggctacaattcggcccagtacgccactagtccatcagaagacgtttgcgagggctcaccaccagggacagggccgtactttggaccacctgcccttggatgggtcacatataacgagaagccacatagcgggatgggtccacctgacgagctgaaggggtatcgcccaccgtgggccacacgatcagatatcagtggccaagattag

SEQ ID NO: 12127 - DNA, 222 bp, Zea mays
  Peptide Sequence Number=SeqID_53906
atggccgaggggttggcgcagtcggtattggcggctcggggcgtcgggtcctcggagcgggatggtgcggtgcacggggtcgggtacagggcgcggggggctgatggcttcagttggcggcgggcggcgattcagatatctattatatatattccaaaaattcatactaaaatcaaagaaattattaacattttaaaagacgtttttcgcaaaagatcataa

SEQ ID NO: 12128 - DNA, 252 bp, Zea mays
  Peptide Sequence Number=SeqID_53907
atgaccgctcgccttcaccgcttaccgggctacataaacagtttgcgagatgaagatattacaccgtttattgcttttgcaccaacctgctgccacaaatttctaccttcgaagaaacagaggttgtcgaagcctaaccgtgttggcaagaaacttccaaagttaccaaagaaggttgctgagacccccctcgtcttcatctatttgctttacggaaataatagaggtatttgcaaatttcattttatttga

SEQ ID NO: 12129 - DNA, 1667 bp, Zea mays
  Peptide Sequence Number=SeqID_53908
atgagccatcatgagttcctccaacaggagagtggcccggacgtcgtggaacgtcggaaaggggcgaccgaggcgaagatgacgttcgatgtcggagaaacggtcgctgaggccgcgcagaacgttgaggaccaacgtccggtcggagactgtggcgccgcgttccatggccatttcagcaaggtccggggagatggagccggagatccaggacttgacaacgcagtccatgcgtgcccagtcggggaagtgaggcgcgggagtgtcgtcgaggatgcggctgtccagggagtatttgccagtgacgagaaggaactcatcgcgccagcgggtgtagctgttgttggcgaggtcgaggacgacgtgaacgagactccggatgttttgcacagcgacggcctgggagtggaggttgatgatcgcagcagcctcgtgaaggaggatggcgtcgtggaggcccttgtcagcaccacccgctggatcagagaggtgggactgattgtcgtcgacaggactgccatcggtggcagtctgagcagcgagggcgcgcgcatgtgctgcgtgctcgagagcagcgcgaacacgttcggcggcaacatcgcgctcctgggccgcggtggccgcctcctgctctgcctgaagggcttgggcgagtgcagcatcacgcctggcagcagcctggaggcgagcttcatgctcggctgcgacctaggtcgcagcgtcgtcgaggagaggtggctgttccagaccagccatggccaggggagggcgctgcctggatggcgcgcagaggggaggggatcctgcgcctatatggcagggaacacatggctgatatatcagctaacaccgtctgccaggcggtcaaaggcaatgccttgcacgcctagtggtactgttgttctatatgatcgtaaagttgtccggaacttccgtaaagatggccataactggaagaaaaagaaagatggcaagactgtccaagaagcccatgaaaaactaaagattggtaatgaagaaaaggttcatgtgtattatgctcgaggagaggatgatccaaatttctttcgcagatgctactggctacttgacaaagagttggagcgcattgtcctcgtgcattatcgtcaaacatctgagagtagaaggggtgacgatggatccaacagggaaggccacgacaacgacgaatccaaccatgaagacgacgacccagccaaagagacggcggatctagctgggaaggtcgcaacaacgagggggagggggtttgacgctggtgatgggagaagagcgaagagggaggcgctcctagggcgtcagcgctggcaaggaggaagtgagcagacggtcaacggcgtgtcgagactcgacgacgacgggtcaggcggtcagcggcgctggaggcgcgacgtcgatggatctgggggctgctcggggaagggtgaagggagggatatcaccatctcaggggccaggatatcacaggaagacacggagaagacactgctgggtgaggagagccgccgccgatgggtgaggagaggtggcagccaggtgtggaggattgggggctgcctccgggagggaaggacgaacctctcggggacgacggcgcagaaggccctagcggttgctgagggggacagaggtggcggctggtgggg

SEQ ID NO: 12130 - DNA, 459 bp, Zea mays
  Peptide Sequence Number=SeqID_53909
atggagtggtcggctgtgccagcatgccgtagggagactagggagcgcttccctgcagagggccggtctgcagagtgtgctgcagtggggcgcctccctgtccttgaagagcaccatgaacgtattgctgggtctggtgggccagcagcgcctggtgaggagcgatggagactggagcagcgtagaaagcctactgttgctgggccgtcggaggcagcagggcctggtgctgcgccaggagaccttgttgctgctgtggggtcggcgcccgtgggccgggccacatctagatggccccagtccaaggattttggagggagggccacaggccggaggcactcctgtgctggccgccgggaccagcgcctgggaatggaaggataccctggcggccttggccacccctcttgctgcgacggttggggtggccggaacgtggagccgaaggcgccttgttga

SEQ ID NO: 12131 - DNA, 306 bp, Zea mays
  Peptide Sequence Number=SeqID_53910
atggcgggtggcgccggcgggcgggacccgctcgtcgcctccgagatccacggcttcctcacctgcgcagacttgaactttgacaagctgatgatggaggctgggacacgctggttccggccgaatgagatctatgcggtgctggcgaactatgcaaggttcaaggtccatgctcagcccatcgacaaaccaattagtatgtgttccacattcgccataaaccccttaccttactgcaccctgcacatgtgtttgtttctcgaatacgcaggaggaactccatatccttatattaagaaagggtga

SEQ ID NO: 12132 - DNA, 1808 bp, Zea mays
  Peptide Sequence Number=SeqID_53911
aagcttatgctaatcctggccttagtcaagtatcagagagttactttggatctctgaaagatcaagcaaaccatgctccatctcttttaacatcagatctggattcacaatcaaagcaacatacaaattctttgatgaaaactccggtgtctgataacatgccaaatgatgtacctgctaggcagaacagtcttgggttatggaaatacttggatgatgatattagtttagatgataatccaagctcgggcatactccccactgaacaggtgactggcgaaataccctttcagatcactgagatatcctcagaatgggcttattctgttcaattctcctgggaaatgttgtacttcactttttcatctgttaagaactacccaaataattgcttacttcctggtttggtggatgtggaggtccttgtggttggatgtttccatgagaactacagacatctggctgggaccaatctcttctgtgtcattggtgaccagtgtgttgatgcaaatattgttcaaactggcgtttaccgtttcattgctagaccacatgctcctggacgagtcaatctttatttgactttggatgggaaaacaccaatcagtgaggttttgagttttcactatcgtatggtgcctgacagtcaaaacttggctgaggatgagccccaaaagtcaaagcttcagatgcagatgagactagctcgattgttgttcaccacaaacaagaaaaagatagcacccaagttacttgtagaaggaagcaaggattctccttggatttccgtgattcttctggttggacagctttgcattgggccgcatactgtggaagtgttgggggtgtcgccagcgggcaggcgctctgttcctgctcctgctctagttgtggagcaggctgggcggttttcttttgctagggaaaaaatggttgctgctcttttgtctgctggagcaaatccaagcttggttacagatcctactcatgatgtccctggtggacaaactgctggtgatctggctgctggacaaggttatcatggcttagctgcatatctttctgagaaagggctgactgctcattttgaggctatgtcactgtccaagggtaagcgatcaacatcaaggacagagtcactaaaacggaataccaaggaatttgaaaaccttagtgaacaagaattgtgcttacgagaatctttagcagcctaccgcaatgctgctgatgctgctagcaacatacaagccgcactcagggagcgaactcttaagcttcaaacaaaagcaattcagttggccaatcccgagaatgatgcatctgcaatagttgctgctatgaggattcagcacgcataccggaactacaacagaaagaaaatgatgagagctgctgcaagaatacagagtcatttccgaacatggcagattaggaggaacttcatgaacatgcgaagacaagctatcaaaatacaagctgcatacagaggtcaccaagtgagaaggcagtaccgcaaggtattatggtccgttggagtagtggaaaaagctatcttgcggtggaggaagaagagaaaaggcctgcgtggcattgcaactggaatgccagtagcaatggccacagacgcagaagcagcaagcactgcagaggaggactactaccaggttggtcggcaacaagccgaggacaggttcaatagatcagtggtacgtgtccaagctttgttccgttctcatcgggcgcagcaggagtaccggaggatgaaggttgctcatgaggaggccaaggtggagttcggtcgaaagtag

SEQ ID NO: 12133 - DNA, 279 bp, Zea mays
  Peptide Sequence Number=SeqID_53912
atggatgatgttggtgaagaatgccaccgcttgttcggacctgatgttgttcaggggtcagacctcgatccacttggagaatttgtcgatggcaaccagcagagcttgagcgggcaggtgggtctgccttgcgtagaattgacacccttggtaggcgcggacaattctagtggcgtcggccaccgcggtcagccagtagaaaccttgtcgaaaggcttttccaacaagggctcggggcgctgcgtgatgaccgcaagcccccgagtgtatttcttgtaa

SEQ ID NO: 12134 - DNA, 162 bp, Zea mays
  Peptide Sequence Number=SeqID_53913
atggcgtggctgtcgtggcgatcttctttcggagagctgagggtaatgcttccccggggtgccccctgggccttatatattcggccgtggggcgatacatgtggatatgataacaacgtgcgcctaaaagatagtgaactgttcgagtctatctccctatga

SEQ ID NO: 12135 - DNA, 438 bp, Zea mays
  Peptide Sequence Number=SeqID_53914
atgcgcgagggactgagaggtgggccccatggggcgaggaggcgaggaggtaagggcggctgccggctggccaccgcgtcggctgctacgggccccgaccgggctgtccgcacggagcaggccgtgtcgtgccgggccacgtgcctggccagcggcccaggcacgacctgctccactgggctgtgccagcccgggcccatcccatacgtgccgggccgggcgcgaaccgggccaaaaaacgggcctcaggccgggttaacgggcccgtgcctcatgtacatctatatgtggcaccggccgccgagtgacaggacaggagacgaggagccaaggatatcacaccacgttttaggcaccgggatactgtatatacacgtcatctttctttcagcgcactgtcccagtcccagagatgaaataacgtccccatgcatctaa

SEQ ID NO: 12136 - DNA, 408 bp, Zea mays
  Peptide Sequence Number=SeqID_53915
atggtgcttcgcgatttagggcggccggcggtgctccggtgtgaaattccaggggcacacgccgaggtttccgcgtggcgctacttctactgccttctaacaactccagagaaggggtcggtgcaaaccttgatgttccggctgacgcagaggcccgatcccatggtggcgcgccgtccgcagttcgtggtctgcgccagagctccgccggtccagcaaccctctctctccctcacgattcttatggcggtactggtgagctacacaggacgaggggaacagaagcgatggaggaggggaggtcatgggcgcgcccagcttttatccccaacggaggcggacaccgagcccaacgctctgtaccacgcgcgcaggcaaggacccgacgtggatttcggtttctgttga

SEQ ID NO: 12137 - DNA, 1305 bp, Zea mays
  Peptide Sequence Number=SeqID_53916
atggagattaaatctttagaatccttatcaaatggtgctggaactgctgaaagatctaggatgagcctaagatttccaagcgagttagcgatgaatctcatggatcgcaacgtgaaccctgaggaatcgaaggtcccaacagcaaaagacagagacccaagtcttaaaactgctccatcagagaggaaggacggagaggagcagcagcggagccaaagggtttggcggcttcgtcaagaaccacggattcagttctcgacacagttgtcattgtcatcattgtctaattccagtgatggcgaggagattgcaacttcttcatgtcctgacaaggggtgccctttggccatccttcatttatgcctaaagagttttaagcaggatgctactgaggaggatgcagctaaatggaagcttgacgggacctttgttctttcagacacagaatggggtgattcttcatatgctagttctctcagcgaacagtcatctacaatcagtgcccccagtacgccattcactcagcctgaggatcttgacagaacagatatctggatttcatctttagatcttgatgccgaggattgtgccttgctgccagagccagacaaggaacaatttccagatatactcggttttgatttccccagcccttctttcagcgcaatcagaagcctccagtttggttcttccagctttagtgctggaatgtttttgagcaaagaagccaacgactctgatgagccaatattctggccatttgagggcacctcctacaacagtcctgaatttgacagatttctgactctgtcgcctcgtagaaacacaatggatcccgggtacgctcaagtccgtcactcgaatccattcttgcggaggctccgtaacagcacactatcttcagtaaagaagtgcattgaactgcaccaaaggaccagaaattcagacgcaaaaggaagcgtggcgtcctcctgccaagagaagattcagaagacggctgcagttgcctccaggttaacaaaagcatctgcaccctccagttacagtcatcaccagatgccgagcatctgtcagaaaagaaggccgcctcacttgaaactcggtggtccaagaaagattacctctccacagttgcaggcagatcgatctagtaataagaagattgaagcagcaggcgtccaaaaagtagcggataagaagagtcggatcgaagagttgattggattggatgagtttgacggcaacgaaggcattggctcgggttcgtcagattaccagtttagtctatggatatctccaagatag

SEQ ID NO: 12138 - DNA, 561 bp, Zea mays
  Peptide Sequence Number=SeqID_53917
atgacacttaattacccgtggaaaaccctggaaacaggggcgacagtactccaaaagcatgcactatctactaaccctaatgcacttaggtcggagtcgacgccaaagtttgacccgagggacgcctacaaggcccttgctcctctgcattgggatgcagaggagtgggacttcatagttgtctcaaatgacgaggcctccgtcactgatggtggggacctccagctcctcctcggcgaggatctagaggagagcaaagatgacatgttcccttggaatcatgcagacgaatccttagagggcatggaggacgatgtgtccttcgaggaggacccgatggcagaggagcccttgatcgttaggttctctaatgatgatgatgatgaagaggatgacgaggacaccaacaaaggagctggcgacacccacggctccaccgatagtgacgacgagggcaacaacgatgatgatgttgacaaagaagtcgacgatggcagtagtagtgaaggtgacggcgaggccgacatagctcctccgtccaagcttcgtaaggtccagtag

SEQ ID NO: 12139 - DNA, 885 bp, Zea mays
  Peptide Sequence Number=SeqID_53918
atggaactagaacatggatacaatcaagatcctgccaccaaggaattgctatcacaattgagtttacatgatgggcctctgggacctttcacttcacatcagggtgtcattcgacataagggcagactttggcttgctggtaatagtgcattgcaacagaaggtgctgacggctatgcatgacactgctattggtggacattcaggtgtacctgttacttatagaaagttgaaacagtttttctattggccaggcatgaaagctgttgtacatgcctatgtgcaatcttgtgctatttgtcaacaagccaagcctgacagatccaagtaccctggactacttcagccgctggatattccttcacaatgggctaaatggttatcggttgctgagtattggtataacaccggtgaacattctgcgattggccgaactccatttcaagtggtctatggatatactccgcgacactttggtataactgcagaatccatagtgccagtaactgaattggcagattggcttcgtgaaagacaactgatgactaaagtcattaagcttcatctgaccagagcatgtgatcggatgaagaaacaagcagataaacatcggtcagagcgatcgtttgaagttggtgaatctgtctatcttaaactgcagccgtatgtgcagtcttcagtggctacacgttccaacaacaaattaacattcagattttttggtccttatctggaacgtgtaggagcagttgcttataggttgcaattaccacatcacagtacagttcacccggtattccatgtctcacaacttaagcgagctctgggttgtgatcgtgatcaactgctggtacctcaactaccacaaggaaatgtatccctttag

SEQ ID NO: 12140 - DNA, 252 bp, Zea mays
  Peptide Sequence Number=SeqID_53919
atgaaaccattgaaattctcagaggaccgagggaacgctatgagatccaccataaacatcgttactgatgaagctctgattgtagctgcaaagctctcatatcaatgtatcagtgatcgatttctcccagataaggcaattgacttgattaatgaagcaggctcccatgttaggctacagcaagcacatgttcctaaggaagctagagaacttgacaatgcaaggagctcaaacaaatcactaaacacataa

SEQ ID NO: 12141 - DNA, 330 bp, Zea mays
  Peptide Sequence Number=SeqID_53920
atggtgtcggcacttcctaagggccggagagatctccagcagccaactgccccgcacgccacgccaagaggtgcgagcaccggtgaacgcccctgggccaaggctgggacaccacagcctcgtgagagcaccgcggtggcgcttccttcacctacccacgacgcgatacgactgcaaggagacgcgtacgcggggaagaagaagcaggggagaggtagctacgagaggggctatatactgacgggatggtgcggcccaggcgagatccacgcgattggttaccgggtcagccgacaggaagcctcccgcgagatctccggtgaacagtaa

SEQ ID NO: 12142 - DNA, 834 bp, Zea mays
  Peptide Sequence Number=SeqID_53921
atggccgaggatggtgccgacgacgggcaagggatctacgacccgttccttgtgccgaacgacgacttcgatgacgacgtcctgtacttgctagacatgaacgacggcggcggcatggacccgcggccgctgcagggagcagcgacgcaaagcgccatcgtcgtcgcaggtccttccggcgacgacaataataatctcctagagtggccaccgacgtcgacgctggactccgtcgtcgtcgacaacagcgctcctacgcacaacgccgtgcttgccagcgatcctactactactgctacaagcggcgtgcaagacgacgccggcgctgcagggcttcaagcaacaaagttgggtatccatggggtcgccgccggcgtgttccaccatgcaaccctagagttgtatcgcatagactccaacggcctggcagcgacaatgacaacacaactgacgcatcagtcctacgtggattttagtggccgggactacgtgtgggtgaagcactacctgacggactacgcccggcagcgtgctgccggcggctacatggtcctggacgactctatctcagcgttccaggatgccctgtgcaccagcatggtctgcgctggtcacgcccgtgaagcggtagcactagagattaatggcggccgtcctgctggtgatgacggcggcggcgttgtgcgggcaccagcagctatggtcgaggaaagcagcgtgccggcagttgcagggccgtctaaagcagttgataataaggagcaaggacgacgacgaccagagattcgcccggctgccaagactgtactcgcggtccaggcctacatgcgctag

SEQ ID NO: 12143 - DNA, 339 bp, Zea mays
  Peptide Sequence Number=SeqID_53922
atggctgtgagtccaggaccgaaaggattaaaatgcagggaatggggtgtcatgcaaagaagtcgtctaagggagagagcgagcaatcttcagctggacgatattgcgcgctacttccacctgccgatggtggaggccgccaaggaactctgcatctgtgccactgtcctcaagggcaccagccgtaaattccatatacgacgctggccttaccggaagattaagagcattgatagtcagatcgctaagctgacaaggggcaatggcggcccagcagccatggcggagatagagaggctcaccgattacaggagaagaatttacgccggtctggaatga

SEQ ID NO: 12144 - DNA, 216 bp, Zea mays
  Peptide Sequence Number=SeqID_53923
atgttcccttgccgcattccgccttgtgtcgtgccctacttcacctgcgcaacggttgacgcaccattcggattgggacttggggctctgggccgcaagatcacctactccggtgagagctccgccgtggagagaactctgtgccacggtgaccctatgctccgtggtagaagatggtgcaggagcgtagatttattggcgaccgggcaggattag

SEQ ID NO: 12145 - DNA, 663 bp, Zea mays
  Peptide Sequence Number=SeqID_53924
atggccactgctgaaggtcaccaaatgggactctctcttccgaacgaaagtgttggctatcatcaagtcgtaggtcttattctacgtgctacgggatttgataactcaacatggatttaccttgctcctggcaagctctttggtgggaaacacttcatgaagccattcaaggctatgtttccacgtcttaaaaaccatagtatgatcagaagtggaaagctggaagaaaatatccgagggctagcagggtcagcagttgattacatggtctgtctcctgtcggacatttttatatatgatggtccgagcaacttcgcagacaatctcatgggtcatcgtctatactatggtttccgaaccacgatcacaccaaacaagaaggcccttgctcggatattcatggacagggaggaagggcacacatctgcatttgaggagagggtcaggcaggtcatgctcacccattttggcgccccccacaagcgcatccatccagagtctttctacacaaacccatggccagagtgcttctgccagacgaaagctaggaatcatgctgaccggtgcccacacaacagtgtaaatgatgtccttgaaagttggttccataataaagaagatgtagaagtggaagctactaatcaaactgactccaccagctaa

SEQ ID NO: 12146 - DNA, 765 bp, Zea mays
  Peptide Sequence Number=SeqID_53925
atggctatgcaggtgctggtgctaaccaaggccagcaggttacgacataaattgctactactcaaggatgttgttgcaaatgagttgtggagaaccgtagattcaaatggttggagagcatcttctgcaccacgcatctgttggcctcccccaccagctgaatctgagagcaatgggtacttgcgtgtctggtgcaacggcggcttgacccaacaacgcagtgcaatatgtaatgctgttgtcgtagcacgaatcatgaatgctacactagtgctgccagagttagacacaaattcattttggcacgatgagagtggttttgtagatatatatgatgttccccacttcatcaacacattgaaatatgatgttcgaattgtcatgagcattccaaaaatcactgcacaaggaaagaccaagaagctcaaagcatataagattttacctcctagagatgcacccgttacttggtacagaacaactgctttggagagactaaggaagtatggtgcaatatatttaactccattttcacaccgtttggcagaaaaaattgatgatccagagttccagagattgagatgcagggtgaattatcacgcactacgatttaagccaagtatcatgaaaacaagtagtgatatagcgaataagctccattcagaaggccatttcatgtcaattcatcttcggtttgagctggatgtgcttgcatatgctggtaggcttaggaaagtgcctataccccaacttatttgggactaa

SEQ ID NO: 12147 - DNA, 546 bp, Zea mays
  Peptide Sequence Number=SeqID_53926
atggagagcaagctgtcctcggcggtggcattcgtggagggggacgtgcaggacgcctgtagcatctgcctcgacgccttctgcgacagcaacccctccgtgatgaccaattgcaagcatgactaccatctccagtgcattcttgaatgcagaactcgaggaagctgcatgcggacctcgaccagccagatgttgcctccgcgaagctcctgccatgtctcgagatgttcagacagggagcagaggaacaagagaatggtgaacaaagacgaggtgatcatgccggaagtgtccgttatctggcagtcaatctgtaggctgttcgaggaaggtctccggaacatggagtggttgactagcgatggtgcaaatgtcgttgccgagatagagtacggcgtccttgaacacctcatacgtgagatggtggacgaactcctccgaggagtgtctgaacccgcacaacatcctctcccactccgacccgtctcgaagaaactgctgggtggcaagaatgttgagacaagacgagcaatcggatgctactga

SEQ ID NO: 12148 - DNA, 336 bp, Zea mays
  Peptide Sequence Number=SeqID_53927
atgggcgtgggagtggaggcgagcagcggcggtggctacaggattgggagagtagagaaggggaacgacgatggttgtgcgattgaggaggagagaacagcagaacggacggacggacagatgggaggcacgatactacggatgagtccgagcaagcagccaaggcgagggccagcgctagatgcggacgatggcttgggcgtcggccagaccacggccaaggcgaggctggagctgggggaaggagatggcgtgcagtgggtacggggaatcgagcgctgcaacagctgggaagttgcgagctacagggcgtgcatgaaggcagaagcaagctaa

SEQ ID NO: 12149 - DNA, 273 bp, Zea mays
  Peptide Sequence Number=SeqID_53928
atggagagctcgatagaggtcctggcgcgtagggagcaggcagtgggcgaggttcagttcatctcgccaccggcgaccacgcgctcggattcacgcctaacgctacgatttgtgctcaacggagtactgatagttgctcggggtagtaaatatcgccttgtggatgaacttgagccactgtttcactctggccgccgtgtcctcctgaagacccacctgccgggaactgtttttattttgatatttgtggagcagagcctgactctcctatga

SEQ ID NO: 12150 - DNA, 573 bp, Zea mays
  Peptide Sequence Number=SeqID_53929
atggcgctggccgtcatcgccctcctctggagtttgccctggcccacgcttcctgcatcacgcccagccgtgcctgctcccctcgccgcgcgtccctgctcctcggtctcccttatctccttgcccagcgccggtcgtgagctcgcccatggtgcccactctgcgccagttcaccggacgtgcgcccttgagtcagtcgttgttcccgcgagcttcgttggtcgtgcgcacgcccttctcggtttttttggtgcacgcgccgttcgtcggccgcccaagctcgtcatcgacctcgctggtgtcgtcgaaccgtcgaaccccttcctcagtcgcgtcggcaacatcgctgattcctccatgatgcttgtcaacaaacttcgcttcatcggttcctcgtcttcggttcagctcatgatgaaagaggtctcaataggtctcagtgtttgcgggactgtcttcaagggagaagctcaaaagatacaaaggttgacacagcgccgaagctgtgaagcaggaaagcttcggcatgttcgcagaaaagggaaccgacttaaagatgaaaaggccatttag

SEQ ID NO: 12151 - DNA, 429 bp, Zea mays
  Peptide Sequence Number=SeqID_53930
atggccaccactgacattggccgaactttgggatcaaatttgagtaggatccaatgcttagcggcccggccaattgaactagaccacactagatcaccgggaacaccgtggattgccctcgagaacgaggaagaaataactgttgaagaggaagagactactccatcaacagaaaatccacctgtcggggactgtttttactctgacatctgtggaacagagctcgactctcctacaacacaaggcaagccccggtaccgagcaggtgacttgcacgagaagagtctcggtgtagtgtctccgtctgagtcgtttaaggaccgtctcgatgtgaggaaacaacaaacttctgctgtttttgctctaaggtggtgcctaaagaagaacctcaacagtgaagccacgggaggatgttggcttctcatttga

SEQ ID NO: 12152 - DNA, 270 bp, Zea mays
  Peptide Sequence Number=SeqID_53931
atggggaggggaaagttcaagggaaagcccaccggccgccgcaacttctccacactagaggagatcggtaacgacgcgcccgcccaccccatggtcccatttataggtcgaattcgatttcatatctggagcgtgccacgatttagctttatttctccttcactgtcagagatcttcacggaaaaggctgctggtacttcaggtcgccctcgcacctttatgaagacaggcaaggctaagagaattgatctttttatgggcgaagtgtga

SEQ ID NO: 12153 - DNA, 1158 bp, Zea mays
  Peptide Sequence Number=SeqID_53932
atggcgtctccgccgccggatctactaatcgacgacgccaccgccgagattctccttcgcctcccaccggatgacccagcgtgcctcgtgcgcgcctcccttgtctgcaaggcttggcgggagctcctctctagccccatcttcctccgccgctaccgcagattccacggcgcgccgcccctgcttggcttcctctacaacatctacgacgaacgcccctgtgctcgattcgtcgtcgccgccgacgccgccaccaccttccccttctctgcaccggcgttcgaccaattcgatttgtggttcatcgagtgccgccacgggcgcgcgctgctacaaactttcgagcggcatgcgcccgcgcgcctcgtcgtctgggacctcatcacgggcgaccagcagcacataccaatgcccgtgcccgggtacccttacttctgccgcaccgcagctgttctctgcgccgcggatggctgcgatcatcttgactgccacgggggcccatacctcgtcgtcgtcataggcgcctacgaagaagatactctcaggtgggcgagcgtctactcatcggagactggcgtatggactacgtcatcctccattcaaattgatgcctacgtcgagcaaaggcccagcctccttgccggtgacgcgctctactttagcgcacaggaaggcaaaataattgtcaaatacgacctcaatggacagagcctacatgtgatcaatgcgccggatatgtttgagccaacagagggcattgctgtgaccgtggaggacggtggtttgggactcgccggagtgaaggatggcaacctccacctgtggtcatggcaggctggtcctggcggcattgcggaatgggtgcaaggcagaatcgtaaagttgaggacgctcttccctattcttaaaccgctggactcacttgatgtgattggcttccaagagggcacagataccattttcattagcatagatatggaggtctttgcagtcacgctcagatcggagcaggtgaagaaggtaggcaagacgggctccaaatatgccatggcaccctatgtgagcttctacactccagatgtttgtgttgtctgtgatctgcaaaatttagtcaaacagaggataaatcttgcaaagggcagattgctatcaccatga

SEQ ID NO: 12154 - DNA, 384 bp, Zea mays
  Peptide Sequence Number=SeqID_53933
atggtgagcttggccacggcgcaggcggtactgcgacaattacacggtgatggacagcgcttggcgaggaattcctggtgcctgcccgacaatccgactccggagcgccctgaggaggtctccgatcacctccgacggacacgcagggaggcgaatgcggctgtcgacggtgatggtggatctctcgtgctctgccccctcccctttctctcagctggctaccgaggtgggtttaaggctatggcggcggacctactgggtcttataggcgcacggcacggggtactcgatccgcagattacgacgctgaccggcgaggcttccgcggcgatcctgcgcgacgcgcgcggagttcgttgcgcgccgggcaaggaggacgactga

SEQ ID NO: 12155 - DNA, 387 bp, Zea mays
  Peptide Sequence Number=SeqID_53934
atggcggcgcgggaggtgtggctggagcgcgcgtggcggacgcgcaagcagcggcgccagctgcaggaggaggttcccgtgcccgtggtggtcctcggcggcggcgggggcgactcaccggcgagccgcggcgtggcgatggacatggaggaggtccgcgcgtgccgggacctgggcctcgaccttccctgtgactggaccgtggagatcccatcctgcgcgctctccgtctccggcgtcgacaccgccagcagcggcggcaactcgccggcctccggcagctggcgcatctccagccccggggacgatcccaaggacgtgaaggcgcggctcaaggtgtgggcgcaggcggtggcgctcgcgtccgcatctcgtctcggttcctga

SEQ ID NO: 12156 - DNA, 477 bp, Zea mays
  Peptide Sequence Number=SeqID_53935
atggcggaggttgtacgacggcgagaaattacttgcgcgaatcaacactccgagtctggcgacttcatggatgctccaaagattcgcggcgaaacccacggtcgaagcgccgaggatgattcgccactgtgggcggagatctccgacggcggccctccctggctctctctccctgcacgcatgggaggatctcgaccagaatctggccgtaacaaccatgcgatgaccgcaaaatccgttctgattaacaaggtgaagaggctctcgagctggggggtccacatgtctgcggtcttataccccaagccagggaagtccgaggagggggaaagaaaggacccggccagcagaactccccggcaatcgcgggtgagcgcgcagcggtcttcacggtgttctgttgaggaagaagctgacaactgggtcccgcaagtcatagacgccaaaagagatgagaagacggctgtgcgggagtga

SEQ ID NO: 12157 - DNA, 465 bp, Zea mays
  Peptide Sequence Number=SeqID_53936
atggcctgcgtgccctggagctggctgttgaaggcggcgacgacggcggcgggggccgtgccccctgttctgctggaagtggacgaggccgcgggggaagacgaagacgtcccccgtggcgacggtcttgctgaggagcctgttggcggtggtgaggaagccgacctcgagcgtgccctcgaggacgaagatgatctcggtggcgcgcggtcgatgcgcgccatggagacgcccagcgtgttcacccccgggaacttgtccacgttggccgccgtcaccgcggagcccgccgggttgttggtgttgcccgggctcctcagcccgtcgaagaagaagtcgtccgccgagacgttcgcccttgcacgggaacccgttcagcttgaccgctgcaccgcatggcgggccggcatgggtcagcaggagcagcacagcaagtggggcaacagagaccagttccagggatga

SEQ ID NO: 12158 - DNA, 234 bp, Zea mays
  Peptide Sequence Number=SeqID_53937
atgacgctcttcggggccacgccgcccgtgcccaccgacatcctcgccaaggcattccgggtcggcagcggggaggtcgagcacatcaaggcaaacttcgcacccaatgcttattatatgtgtgcttgcaaattgtttgagaaattaagacatatacccgctaattggttggctgagcacagcaaaccagacgggcgcgagcctcttcggccagcctgtgtcttctacgtgtag

SEQ ID NO: 12159 - DNA, 156 bp, Zea mays
  Peptide Sequence Number=SeqID_53938
atgccgagtcagctcccgttggaaagggtgagggccccaagaaatggctgcatccatgacggcaaaagcgcgctcgatcagctcacctgtcgaaacaatgtcatcaagacacagagtaccggaactacctaccgcctcaagaaactaaacacctga

SEQ ID NO: 12160 - DNA, 807 bp, Zea mays
  Peptide Sequence Number=SeqID_53939
atggcggcgctgccggcgtcgcccagcggggcgcccctgcgcgcgccacttattgtatcccgcattgtggaatctggaatgcttgccaaagggaggaggttagctggaaggggtggagaaatgtctgcacattatccatttggaccacaggacgatgatgcaattattaaacacaggcttctgactaggacgacgaccactaggggtgaaccaccactaaagaagcttcagaagaagttcatgtcctttgccactgagatcgagaaggatgcagataacataactgactgcgaaagactgtacaaggcctttctacatgaaattaacacctttgagctacctcttctgaaaagcaaggctgtggttgatgcaaacatcagggagaaggaaagctttaatgagctgcaggttgagattgagcgacagattttgcaagctaaaactgatattgaggtccttaagaagcaacttgagcagagcaagatcgagaggcagcacaaagaagagtgtgaagccatcaggaagctgatctgtttgcagcctccacggtcagaaactgaaaaactcattgcagatcttgagaaggaaatagctgatttggaggatgagaatgtagcatgcacaaggactttggaactgaggaagaagcagtttgctcttcttctacatgtggttgaggaattgaagatctccattgaagatgagcaaaagagtatagcagatgagctgagagccatcactggagagcagaagatgagcacaggagaagggagtgtcggcgcttcagattccatggtggttgactaa

SEQ ID NO: 12161 - DNA, 540 bp, Zea mays
  Peptide Sequence Number=SeqID_53940
atggcccaagtgcacatttccctttcacatggttgtctggcccatgagcttacttgctcggtgaacttgacagcaaacgactaccatgataaaggagttattcggactatggagtcaagtactgaagttgtatctggatccttcttgtatgtatatgttgggggtctccttctcccgaaggtcctcaaaacgctcattaaccgttctattttgttatctgtacactgcaaggttaatgccgaaggttgcctttggatagaacgtgcaggctcggccccagaagacgacgaactctgcctcgcccgaccccagggcttggactcggcctcggctccgaaagacgacgaactccgcctcgcccgaccccagggctcggactcgggctcggcccaggaagacgacgaactctgcctcgcccgaccccagggctcggactcgggctcggccccagaagacgacgaactccgcctcgcccgaccccagggctcggactcgggctcggtcccggaagacgacgaactccgcctcgcccgaccctag

SEQ ID NO: 12162 - DNA, 378 bp, Zea mays
  Peptide Sequence Number=SeqID_53941
atgggcaagagcaagaaaggcagaagttcatcgcatcactccggcgacaagcggaagcgtgagccgagtccccccttcgaggacttcggtgactccgagtactcggaggaggagttctcctctgagtctgaggggtggccagcctacgcctctcccccggccgtcgagcgctccgggctcgagggctcggatgagtcggagatctcctcggacgaggaggactcctccgactcgtccaaggaggggagcggtggcgacgacgatgacgagggcgacggtggagacaagggcggcggcggcaacgacaagggcgacggcggcagcgacaaggatgacggcggcagcggcagggccagcggcaaagcgccgctggcttaa

SEQ ID NO: 12163 - DNA, 222 bp, Zea mays
  Peptide Sequence Number=SeqID_53942
atggagagtcatgatctccgggcaaaaagggaatcacggcttgtgggtggcaatgagaatgatggttttggtattgactctggtgatgcaatgcggctggacatgccttggtcgctcgtggtcacctccaagcatctctcatacgcccgcaccaagctcatggatgtctacagcttggtgggggcactagagctcgatgtcggtcttcaatggctcacctag

SEQ ID NO: 12164 - DNA, 531 bp, Zea mays
  Peptide Sequence Number=SeqID_53943
atgccccctcctataagacagcccaacccctcggccttgctctctcgcacgcccttcacactcatcgatgcctcgacgccggtgaacgcccgagaattgagcatgccaccgcccgccagtgtcgtccgagctcgaccactgtggtccaaccaccctagcccctctccgtccgatcgagcttcaccattggcttccccagaggccaatgaaactcctcgagcccccaacccaaacgctacctcatcgaagacaccggatcaccctcgcgggaattcgcccgcccgtcggagcacatggtccaggcaccgtcgttgctcacagccacatgctctcgtcgccagagcaccgccagtcacctccaacgccgaccagcacatcgacgtgactgccacagactccccgacctcacccgacccttcgtcagaactctaccgctgccgagaagtcgtgcaccgtgattatctctttggctactatattggtgaacccagggaccgtgggttggatgccaggaaaatccaaaggggttaa

SEQ ID NO: 12165 - DNA, 648 bp, Zea mays
  Peptide Sequence Number=SeqID_53944
atgacggtgggaggcgcgtgtcgaggaagctctggatcaatcccggtcacgaacagcagcgtctgcaccacctgcgccttctcctcctgcgcgagaaaagatagaaagcgatgggctttcgtgtctggctctgctgctgcccatctagggcacaagcacggtgacggtggtgttgagcatgacgaggtagtggtggaagccaaggaggatgacttccgctgcattgcaaacaagggggacagcgtcacacgtctgtttgaccgtttgagcgagggcgtggcaggcggtggaacagccagcttgtttttgttttatttgttgcggcctcgcggcgatgggagcggcaggtgggtggagaagggttttatgatagaagctaatggcggcatagatgaggataagctcataagaacacgcgatggtggaaaccagtggtgcgggttgatttcgagtaaatgcaatttttttttaaaagtggtgctttatatgagtagagaagagcttttggaggaggatgttgctttgaagaggttcaaatcatacaaaaacagtgtgaaacaggtctccaagatcgggaatgctctcactttagctgttgtacttgcttgcagctacgagcttgctgtgttggcgactagcacaaaatga

SEQ ID NO: 12166 - DNA, 855 bp, Zea mays
  Peptide Sequence Number=SeqID_53945
atgcgacgggacgacgccggcggcgtaaccggcttccacgacttgtttgactcggtgcgccgctccatctccttccggcccgccgccgcagccccggaagcccccgcgggcccattcgtcgcgggggctggggggatcggtgtgcggatcagctcttgcctccggaagtcgcgggggatggggctgctcggtctcatcaccaaaaacccctcgccgccgcgccgcatgctaccgccgatgcccgatgagtcgggcggcggcagcggaggaggtgggggcgacgacgcaggcggagaggagaacccgccgatccggtggcggaagggggagctcatcggggccggtgcgttcgggcaagtctacctcgggatgaacctggactcgggcgagctcctcgctgtcaaacaggttttgatcggcaggagcaacgcgacacgggagaaggcccaagctcatattaaagagctcgaagaagaagtgaaactgctcaagaacctgtctcaccccaacatcgttgtgagtggatgcaaaatttttgctttcactaggtatcttgggactgttcgtgaggaagacacgctaaacattttgctggaatttgttcctggagggtctattcagtcacttttggggaagctcggttcattcccggagcctgtcattaagaaatacactaagcaaattttgcaaggattggagtatctgcatagcaatgcaataatacatagagatataaagggtgcaaacattcttgttgataataaagggtgcatcaaacttgctgattttggggcatctaagcaagttgcaaagttgccttccaatgtatctctttccattgttatcgcatcttag

SEQ ID NO: 12167 - DNA, 1602 bp, Zea mays
  Peptide Sequence Number=SeqID_53946
atgggtgcggcgcgtccgcggcgctggaagctcccgttccaccgcaccaccagcgcgccgtgctcgccctcgtccaggtcgtcggcgccgccaccgggccccgcctcgcccgcgcgctccgaggcttgggtggcccagccggtgcccgaggcgttcctgtgcccgatctccggcgcgctcatggccgaccccgtcatactgccgtcggggaacacctacgagcgggcctgcctccaggcctgcgctgagctcgcgttcctgcctccgggcgccgaggccgggggcctccgcaccgtcatccctaacgccgcgctcaaggcggccatcggcacctggtgcgcgcgctctggacgggcggggccgccgccgccgccgctctctgccgaggcggcgaggcaggccgtgctgcgcgctatgcctccggcggccgccaggaccactgccaggcgcgtggcggcggtgatggccgcgagcacatccaactcgtccacgtcgtcgtacgggtcggcctcggagatcaccgcggcggaggacgaggcggaggcggaggcgccggctgacccgctggaggacgacgtggtgggcaaggtgatgcgcgcggacgacggcagcggcggcgtggtggccgcggcgatgggcgcgctccgtgaggcgacgcgggagggcgcggagcggcggctggcgctgtgcacgccgcgcctcctcggcgcgctgcgccgcgtgctgctgctcccgcgccacgccgccgcccgggtggacgcggcggccgccctggtcaacctgtccctggagcccggcaacaaggtgcgcatcgtgcgcgcgggggcggtgccggcgctcgtcgaggtgctgcggtcggccgcgtcggcgcccgaggcgcgggagcacgcggcgggggcgctcttcgggcttgccatccacgaggacaaccgcgccgccattggcgtgctgggcgcggtgccgccgctcctggacctgctggcgtcccgcgcccacccgccccgcgcgcgccgcgacgccgggatggcgctctaccacctcaccctcgccgccgtcaaccagtccaaggtcgcgcgcttccccggcgcgcccaaggcgctgctcgccgtggcctcgggcgccgccgacccgggccccgtccggaggcttgcgctcatggtggcctgcaacgtggcagcctgcgccgagggccgcaacgcgctcatggacgcgggagccgtggcgtccgtctccgccatcctcctctccgacggcggcgcagcggcggcggcggcgggcctggaggagtggtgcgtgtcggcgatgtacgcgatgagccgtggcagcctccggttccgcggcctggcgcgcgcggccggcgcggaccgggcgctccggcgcgtggtggccgacgagggcggcggcgtccggcgcgagatggctcggaagaccctccgcgccatgcggggcgacctcgacaacgacgacggcggcaccgagtataacaacgacctgaccggcagcagcgccgagtgcgaggactgcggcgggagcatcgtgtcggacgggctcatgtcgttcaggcgccggcagcgcgagctcggcaacaccgccgagttctga

SEQ ID NO: 12168 - DNA, 111 bp, Zea mays
  Peptide Sequence Number=SeqID_53947
atggagccaggaataatgagtgttggtgcttctggtttctgctgggacagttctcgtccagtggagaaagaggctgtggatatcaggattgcttggctaggtttgatctaa

SEQ ID NO: 12169 - DNA, 2229 bp, Zea mays
  Peptide Sequence Number=SeqID_53948
atgaggatcgtggtgtggttccggagggacctcagggtggaggacaacccggcgctcgcggcggcggcgcgtgccggtggggaggtggtgccggcgtacgtctggtcgccagaggaggagggcccttactaccccggccgcgtatcccggtggtggatcagccagagcctgaaccacctggacgcctcgctccgccgccttggggcgggaaagcttgtcacgcggaggtcggccgacgccgccgtcgcgctgctccagctggtccgcgacaccggcgccacgcacgtctacttcaatcatctatacgacccgatctcactggtcagggaccgccggttgaaggagatgctggcggctgagggcatcgttgtgcaatctttcaattcggatctgctgtacgagccatgggaagttgtcgatgatgaagggcagccattcaccatgttcgacccgttctggaacaggtgcctcagcatgccgtatgacccccctgcaccgcttctgcccccgaagaggatcaattcaggtgacttatcgatgtgcccatcggaggatctgatctttgaggacgagtcagagaggggaagcaacgctcttctggcccgagcgtggacgccagggtggcagaacgcagacaaggcgctgacggccttcctcaacggcccactggccgactactcagtgaaccgcaagaaggccgatagcgcgagcacgtccctgctgtcgcctcacctgcacttcggcgagcttagcgtgcgcaaggtcttccacctagttcgcatgaagcagctcgtgtggagcaacgagggcaaccacgctgccgaggagagctgcaccctgttcctccgttccatcggcctgcgggagtactcccggtacctgagcttcaatcacccgagcagccatgagaggcccctcctggcgcacctcaggttcttcccctgggtggtggacgagagctacttcaagatttggaggcagggaaggaccgggtacccgctcgtcgacgctggcatgagggagctgtgggcgacggggtggctgcatgaccggatacgtgtggtggtggcaagcttcttcgtcaaggtcctccagcttccatggcgatggggcatgaagtacttttgggacacgttactggatgctgatcttgagagcgatgcgctgggctggcagtacatcactggctctcttcctgatggccgggagcttgaccgcatcgacaacccccagtttgaaggctacaagttcgacccgcatggggagtacgtccggcgatggattcctgagctcgcaaggctgccgacggagtggatacaccatccatgggacgcgcctgtctccgtgctgcaagctgcaggaatcgagctgggctctaactaccctctccccatagtggagctggacgcggccaagggcaggctgcaagcggccctgtcagagatgtggcagctggaggcggcgtcgagggccaccatgaacaacgggacggaggaaggcctcggcgactcctcggaggtcctgttccctcaagagctgcagatggaggtcgaccggcagccagccccagccgaggcagcagccaacgtgcacgtgcacgtgccgatgcctgcccggaggcgcggggaccagatggtgcccaccatgacgacctcttcgctgaacagagctggaacagaggtctccgccgatctagtagtagcgaacagcgaggaggaggacaccagggcgcaggttccgttccacgcgcatctccatctccacccccgagccgaagccccgccagctgcgcgtagaaccaacaacggcgctcgccagcacgacgtcttccagcagcgtcggaaccacaggcgagatgctctgcttgctccgtcggcgtcggaggcttcgagcagctggaccggcagagagggcgccgtggtcccggtctggtcgcctcctgcggcgtcgggccattcggacgccttcgccgccgacgaagctgacgtctctagtaggagctatctgggtaggcatccgcagtcgcaccgcctgatgaactggagccaactatcgcagtcatcgacagcagcagaagattctgtgcggccaaacttaatcgagctgaagattctcttgttggaacatcacgataccaaataccacatatacgattacttacacatcaacttgattgcggcaaagccttactacatggaaaggcgcaagagacagaagcgcgatgattga

SEQ ID NO: 12170 - DNA, 1146 bp, Zea mays
  Peptide Sequence Number=SeqID_53949
atggagcaaaaggtgaaataccctaccccaacttgcttgttactaaaaggctttgctgttgtcgttgataatttgcatgcactttatttttgcattccattcagggagcagttactggaatattatgcaaataacaaaactccaggtgacgttgaggaaaatcttttgacttgtttggccgacctttttatgcagtgttactacatagtgttttgtatatcacgtgaaacttctgcaatctgcacgatattgcaaattgccaccataaagaacgaagagataagccaagcaaagaaaaagaccggtgttattgctccaaaacgttttgttcagagagtgaagaaacagaatgagttgtttcgcagctacatgcaccaggatgcacacgagttcttaaattttcttttgaatgaacttgttgatattctggaaaaagagtcaagtgctgctaaggactcaccccaatcatcatctccagaaaaagctccaaatggcccagttcaacctttagccaatggagttaaaaaagaaccaccagttactctggtccataaaaatttccagggcatattgaccaatgaaacaagatgcctaagatgtgaaacagtaactgcaagggatgaaacgtttcttgatcttagtgttgacattgaacaaaatagttctatcacaagctgcctgaaaaatttctgttctacagagactttaaacgcagaggataaattcttctgtgacaaatgctgcagtttgcaagaagcacagaagagaatgaagatcaagaaggctccccacatactggtgatccatctaaagcgtttcaagtacattgagcagcttggccggtataagaagctttcataccgggttgtattccccatggaactgaagctcagtaatacatctgacgatgtagacactgagtattccctctttgctgtcgtggtccatgttggaagtggccccaaccatgggcactatgtaagccttgtcaaaagccacaaccactggttgttcttcgatgacgaaaacgtcgagatggttgaagagcagaccctacaaacattcttcggttcctcacatgaatactcaggcaacacagaccatgggtatatcttgttttatgaggggcttggtgggaagagttag

SEQ ID NO: 12171 - DNA, 594 bp, Zea mays
  Peptide Sequence Number=SeqID_53950
atgggcgtaattcaggtcaaggctccgtccactcaagggacacaatctcgcctcgcccgagcccagcctcgggcaggaacagtagacccaggcgccataggaagctccgcctcgcccgaccctagggcctgggctcaacctcgacctcggaagatggtctccgcctcgcccgaccccagggctcggactcaacctcgacctcggaagacggtctccgcctcgcccgaccccagggctcggactcaacctcgacctcggaagacggtctccgcctcgcccgaccctagggctcggcccccgcctcgacctcggaagacggtctccgcctcgcccgaccccagggctcggcctcaacctcgacctcggaggagtcactgcctcgcccgaccttgggctcgggctgaccacgccacaggggggagggggacgaataggatggccggaggcgtcatagttccgagcgatggtcctgccgccgaccacggcgggagcctgacgctgtcggtgttcatgacctgccttgtggctgcctcgggcggcctcatcttcggctacgacatcggcatctcaggtctgccactccttgcgctttag

SEQ ID NO: 12172 - DNA, 756 bp, Zea mays
  Peptide Sequence Number=SeqID_53951
atgggggagatagatgatggtgcggcctgctccgtccgtcggccggaggcgccacgggcaggcacagcgaggctgaagcctgatgctgttcctgcgggcggcggtgaaagcgagctcacctttggtcgtcgtgaggacaccagcaggctccaaatccgaacgctcgtgctccaactttggccggtcaccatcctctacaccgagatcttcctggtgcgcgggtccttggccaccatctctgggcgccgctgcccaagtccgaccacagcccctacctcgacgccgcctgattcaagagccacgctcggcatcatccctggcggccgagctccagaactttcggggaagatcgccgctgaagctcactggggagcacccttgctactcgacgtgagcgccatatctcccagtccgtgggctagtcggcgtgggttggctcaaggtaccgaatcaagtgcatttatctcgttcaatacaatgcctctgcgcctggcgaaagaaatccgtcgggggttaccatggggcagcgaattcctcactggcattgtgtgttccactgtgcaccgccaggcgtcgtggacaggaatcctaggagcccaatcgccgggccttctccggtgtgattgtgcggtgcgaaggggcggcgccgccgcacactgggttggggtggagaagtcggtctggcgccgtcggattagactgaagaccctgtcttttccagcatttgacgcccagtccagagacataggaaattga

SEQ ID NO: 12173 - DNA, 1203 bp, Zea mays
  Peptide Sequence Number=SeqID_53952
atggatcccacgacctccggggagcgccacctctgccgcattggggtctcgagaggggatgatcccgtaggtgcgctcggggagtcccaacacagcttcgggttcgggggcacggggaagttctcccaccagcgcaggtttgtcaactacggcgtcaagttcggcgtcggcgacacggtcgtctgcgccgtggacctcgattccaagcccatgacatcgatagggttcgcgagaaatggcgaatggcttggtattgcgaggcattttgatgcgggtgagaaagggcttggtctggttgacgctcctctgaggctgatgcgatggggattcgcactgtttccccatgtcctgctgaagaatgttatcgtggagatgcagttcagtagggaggatgggctgctgcctgttgatggttatgaaccctgggcctcagctttttctcaaaggaattcagaatttggcccttcgtttgagcaaaataaatgtgaggtcatgatgatggtcggtcttccgacctctggcaagtcaacatgggcagagaaatgggtcaaggagcatcaggagaaacgttatatccttctcggaactaaccttgtattggagcaaatgaaggtgccaggattattgcgtaagaataactatggtgagcgttttgaacgactgatggattgtgctacatggattttcaacaaactgctgactagggctgcaaatacccctcgcaacttcattatcgatcaaacgaatgtttacaagaatgctcgcattcgcaagttgaggccatttgctaactaccgcaacactgttgtggtcatgttcccaactccaagtgaactgaaatccagggcagcgaagcttttcaatgagatgggaaaggaaataccagctgaagcagttaacgaaatgacagccaattttgtcctaccactctcgaaggatatgcctcattcgaaggagccttttgatgaggtaatcttcacagagctttctagggatgaggctcagagaaccctagatgatatgcagcgtgtgttgccaagaaatgtgaccccaagctatggaaactctggcaaccaaaaacattatagttcaacatatgctgggactgctgctccacttgatcctgaagccacttgtgcaaatcaagccttgtctgcacctgttaactacccatttgtctatacaactaagtgcagttcatag

SEQ ID NO: 12174 - DNA, 1104 bp, Zea mays
  Peptide Sequence Number=SeqID_53953
atggagccgttcatgcggcgcttcttcccgcgcgccctggagcggatggcgtcggccaaggggaacgagtactgcatctacgacagccagacgctgacggccttcacgtcgtccctgtacgtggccgggctggtgggctcgctcgtggccagccgcgtgaccaaggcgacgggccggcgggccatcatgctcatgggaggcgccctcttcttagccgggggcgctgtgaccggcgccgccgtcaacatcgccatgctcatcgtcggccgcattctgctcggcttcggcgtcgggttcaccagccagaaatgccatggaggcatggacaagaaatctacaaatggccagcccttcagaatggtggggctaaaactgagcaaggtcctcaaagcacaaagtgatgtggaactctcccaacttcgaaaagaggtcagcgagctaagaaaagacaccgcgaaaaacactaaaacgctaactactttgtccaaagattttcttgaatgcaaaaacatggtcaagggtctaacggagcagaaggatgtaattcagtctgtcttggaggccaagtataaaaggattagtgccgaagccatcaagaaacaggaagaaaacaattcagaaatttttgggcttctacatcagcttgtcgaagtggattctctctacgacatatgctcatgctgcaagcaacacatgtatgataccttatctttggttagggcacgaccgaagcagatgatcttcaaggatgcggataccagcaaagctcttagatggatggatggcgaggttaaaggtttttcccctgtcttggattcaagtggtgactactacgccttggccaatgcacgaggcattgcctgcattctagagaaggctgattgctcccacctaaagatgatgacactaggacttaaacactttggtgaacaacatccaaaccccttcaaacataaggatgtgcagcaaagggggaatgaggtagcacgggccaatgtcaaagctaatatgaaaaaagttgtgttggtcacttgcttcggattgctatgtacaatcataaaaaggcaacacaatgttaaaaagataatcaatcttcattcttaa

SEQ ID NO: 12175 - DNA, 420 bp, Zea mays
  Peptide Sequence Number=SeqID_53954
atgggagccagcggctccaagcttgagaaggccctcggagaccagttcccggaaggccagcgctacttcggcctcgagaacttcggcaacacctgctactgcaacagtgtccttcagaaatctggccaaacagcaatatcgtgcatagggagcagcactgctagaccacaacactatcgggatgagaagttgcactgtcaggctgagaagtggcaccgtcgtgctgctccgagagatttcagatttggcttccttcagatatttgggtatctttttggtctgattgcttcctctagagactcttttagagaattcaatcaagagttgattgagggtcaactaacctcgataaatacccctaaattagctcctggtgatgggtccttagcggaatcaaaggttgagatatctccaccataa

SEQ ID NO: 12176 - DNA, 540 bp, Zea mays
  Peptide Sequence Number=SeqID_53955
atgggccctgctcctcttcagcttcccctccgcgcaggctcacctttggtcgtcgtgaggacaccagcaggctccaaatccgaacgctcgtgctccaactttggccggtcaccatcctctacaccgagatcttcctggtgcgcgggtccttggccaccatctctgggcgccgctgcccaagtccgaccacagcccctacctcgacgccgcctgattcaagagccgctcggcatcatccctggcggccaagctccagaactttcggggaagatcgccgttgaagctcactggggagcacccttgctactcgacgtgagcgccatatctcccagtccgtgggctagtcggcgtgggttggctcaaggtaccgaatcaagtgcatttatctcgttcaattcaatgcctctgcgcctggcgaaagaaatccgtcgggggttaccatggggcagcgaattcctcactggcattgtgtgttccaccgtgcaccgccaggcgtcgtggacaggaatcctaggagcccaatcgccgggttcaaagtag

SEQ ID NO: 12177 - DNA, 174 bp, Zea mays
  Peptide Sequence Number=SeqID_53956
atggcgcacacctccacggcccagattcggtcaccaaatggtaccccggtcaaatctctcaactatggcgacggcgtactaactctccttaccctagtctcaggcatggctgaagatcgtcatggatgtacaatggctagagttagaatggactttattctgatgagtgggtaa

SEQ ID NO: 12178 - DNA, 219 bp, Zea mays
  Peptide Sequence Number=SeqID_53957
atgggctcgaaaagctggggaggggagggtttcgagtcacgcatcaactcactgtgccacaagcaaccctatggcgccgaggtaacacagctcggcgccataggctatggcgccgaggagccaggctactttgcttttcatatcctaactgacgctcagaacttctatgccatgggtttgccaggaattcgtataaaaatgcagctatccgtgtcataa

SEQ ID NO: 12179 - DNA, 597 bp, Zea mays
  Peptide Sequence Number=SeqID_53958
atggtggtctgccacgcgctagagaagcgctacagagcgcaggcgagggaggggctcccgctcgagtcctctctcagcagtgaggaggtggatggtgacgatgatgacgatgatgatgaggggatggaggcacgggcatccatcgagcctgctcccgtccctgccgaggcggaagaggcagagctcgtggaggaggaagtcacgccccttcctgtggaagccgttgtcgtccctgtgggtgtgccgttggggtcccctcagtggccgcctgttgggccgcccctagcgtggacgtctaccgagggtgacccgtacttcatccttgatgacatcgaggagcgggagttccgggaagagttccaggcattgggccaagaagcgctgcagcgccactggaccacgttgtttcggtcgaacgagcagctggcacgaaggattgccgaagtggctgacctgacgtcccgatgtgagggactgaaggaggagggtgcgaccgactacgaggaggccagcctgctaaaggctaaggtccttcacctaaaggcagagccagaccaccacgaggaggtgctgcagcgagcgcaaaagggcttctag

SEQ ID NO: 12180 - DNA, 651 bp, Zea mays
  Peptide Sequence Number=SeqID_53959
atggcggcctgcacgactgtcgactccttggtgtggcaggacaccagtgcaaacactgcagtctctgcccttggcgagatgcccacaaggatctttgttacaaagattcatagagagacataccttactaataatgaggcgatcgtaggggaatttgaagtatattcttgccaaatgatatccaccgagcaaaccattaaggtgccttcagaaacctccacgttgcttcaggttgtcacctctgttgaggatgttattttggttaaggatgtatcgtatgatgaggaagctaccttggttgcgcaaagtacttttgtggagtccatctttcttaccaccatcgaagactgtccttctcattctatggttgaggaaaatacgaaacctgttttggtggaggacggatcagatgatgaggaagctaccttggttgcacaaacgacatttgagggcccaatctttcttaccaccatcaaagatggtccttctctttctatggttgaggacaatacaaaacctcgactagtagaggatcctccgatagtgacaatattttcatctagaggatcctccgtagtgacaatattttcatctattgagctagagaggatgaggatcttgcatgccctctttaagccccctcaccattga

SEQ ID NO: 12181 - DNA, 2439 bp, Zea mays
  Peptide Sequence Number=SeqID_53960
atgaaagagtccgaccagctcgcgacttctttcatcacacccttcgacatgtactgctatgttaccatgccatttggtttgaggaatgtgggtgcaacgtaccaacagtgcatgaaccacgtgttcggcgaacacattggtcgaacggtcgaggcctacgtcgatgacatcgtagtcaagacgaggaaagcctccgacctcctttccgaccttgaaacgacattccggtgtctcaaggcgaaaggcgtaaaactcaatcctgagaagtgtgtcttcggggtcccccgaggcatgctcttggcgttcatcgtctccgagcggggcatcgaggccaacccggagaaaatcgcggtcatcaccaacatggggcccatcaaggacttaaaaggcgtacagagggacacgggatgccttgcggctctgagccgtttcatctcgcgcctcggcgaaagaggcctgcctctgtaccgcctcttaaggaaggtcgagtgcttcacttggacccctgaggccgaggaagccctcgggaacctgaaagcgctcctcatgaatgcgcccatcttggtgcctcccgccgccggagaagcactcttgatctacgttgccgccaccactcaggtggttagcgccgcgatcgtggttgagagacgagaagaggggcatgcattgcctgtccagaggccagtctacttcatcagtgaggtactgtccgagaccaagatccgctacccacaaattcataagctgttgtacgtggtgatcctgacgcggcggaagttgcgacagtacttcgagtctcatccggtgactgtggtgtcatccttccccctgggggagatcatccagtgccgagaggcctcgggcaggattgcaaagtgggcggtagaaatcatgggcgagacaatctcgttcgcccctcggaaggccatcaagtcccaagtcttggcggactttgtggctgaatgggtcgatacccaactcccaacagttccgatccaaccggaactctggaccatgtttttcgacgggtcgctgatgaagacaggggcaggtgcgggcctgctcttcatctcgcccctcgggaagcacctacgctatgtgctacgcctccacttcccgacgtccaacaatgtggccgagtacgaggctctggtcaatgggttgcgcatcgccatcgagctaggggtccgacgcctcgacgctcgcggtgactcgcagctcgtcatcgaccaagtcatgaagaactcccactatcgcgacccgaagatggaatcctactgcgataaggttcggcgcctggaagacaagttctacgggctcgagctcaaccacatcgcccgacgctacaacgagactgcgaatgagctagctaagatagcttcggggcgaacaacggttcccccggacgtcttctcccgagacctgcatcaaccctctgtcaagaccgacgacgcgcccgagcccgaggcgccctcgacccagcccgaggcaccctcggcccagcccgaggcaccctcggctcggcccgaggcaccctcggctcggcgcaaggcatcctcggctcagcccgaggcaccctcggcccccgagggtgaggcactgcgcgtcgaggaggagcggagcggggtcacgcctaatcgaaactggcagaccccgtacctgcaatatctccaccgaggagagctacccctcgaccgagccgaagctcggcggttggcgcggcgcgccaagtcgttcgtcttgctgggggacgggaaggagctctaccactgcagcccctcaggcatcctccagcggtgcatatccatcgctgaaggccaggagctcttgcaagaaatacactcgggggcttgcggtcatcacgtagcgcctcgagcccttgttggaaacactttccgacaaggtttctactggccgacggcggtggccgacgccactagaattgtccgcacctgcgaagggtgtcagttctatgcgaagcagacacacctgcccgctcaggctctgcagacgatacccatcacctggccgtttgctgtgtggggtctggacctcgtcggtcccttgcagaaggcgcccgggggctacacgcacctgctggtcgccatcgacaaattctccaagtggatcgaggtccgacctctaaacagcatcaggtccgaacaggcggtggcgttcttcaccaacatcatccattgttttggggtcccaaactccatcatcaccgacaacggcacccagttcaccggcagaaagttcctggacttctgcgaggatcaccacatcagggtggactgggctgccgtggctcaccccatgacgaatgggcaagtagagcgtgccaacggcatgatcctgcaaggactcaagccgcggatctacaacgacctcaacaagttcggcaggcgatggatgaaggagctcccctcggtggtctag

SEQ ID NO: 12182 - DNA, 774 bp, Zea mays
  Peptide Sequence Number=SeqID_53961
atggccatggcgtatgatggaataggggaaggtgacggtggcatatgggcaatagatgaatggcagtgtcgttggggcactggtatgcgacatgccataagatgtccgcgcagtggctactgctacgggggaagaagggcggttgctaatgttgcctgcatggttgccacggatcgcgtgagctcatggacgactgctaccaaggactcgagcatgaggggaagtggaggtgccgtggatgaggatgtggcgggtctgggcaccgaagttgtggagatcgggagcgtggcgaaggaggaccaggaccccagcgcttgggcaccgtcgtcccagactttagggctgctggcagggcacggcactggatacctaactgcttgctttgcactgatggttggaccagaagggcgagcagttggtgtcgaacatatcccagagttggttgctacttctactgaaaacatcaagaaaagtgcagcagccccacatctaaatgatggatccctcagtatacacgtttctgatggcagggaaggttggccagaactggcaccctatgaagccatccatgttggagctgcagcaccgcagatccccgaggcgctgatcgagcagctgaagcccggcggcagaatggtgatccctgtcgggacagtcttccaggagctgaaggttgtggacaagaagttggatggcactgtcagcataagagacgaaacgtctgtgcgctatgtgccgctcactagcaaggacgcccagttgcacgcaagctga

SEQ ID NO: 12183 - DNA, 396 bp, Zea mays
  Peptide Sequence Number=SeqID_53962
atgggtcggcgcgagacggagcgcgaaggggggaagaaagggcagccggagcgagagagggaggtggaaatcccgcggccttcgtgttcttgtcccgcgcccaggtcggcgagccagatgggacgccgatcttgtttcccggagcctgagtcagcttggggtagggtaatgatggtgcctcccgttgacgtggacggtccgcgccctaggttgggcgatgtggaggctcctccgaggtcgaggtcgagtctgtattccatggccgaggtcgagtccgagcccctgggtcgggcgagatggagaccgtcggctgaggccagggctgagtccgagccctggggtcgggcgaagcggagttcatcgtcttcaggggctgagcccgagtccgagccctag

SEQ ID NO: 12184 - DNA, 315 bp, Zea mays
  Peptide Sequence Number=SeqID_53963
atggcgcgctgcctcgtgcgtcgttcacgtgctgtttgcgcgttgttcgtgcgtgatgggctcgtggtcgcgtgctggttcgtgccggttgcctttggtgcaatctatgctcagcaactgcttgacttatccccacataaagctagtccactacaaccagacaggacacttgctgagtatgttgatgtgtactcacccttgctctacacaccaacccccgcccccccaggttgtccgcattccaaccactgctcaggagaagatgaagccgtggaaggagacttccaggagttccaagactacgacgagttctag

SEQ ID NO: 12185 - DNA, 420 bp, Zea mays
  Peptide Sequence Number=SeqID_53964
atggggcgagctcgggaactggagagggcgcgcagggagatgagcttgaggacggcggcgcgcgtgggagcttcatggcgcgcggcggccatgggaaccgagcttgaaggagcgtcggccatgggaccgagctcagcagggaaatctagtcgagcgcaggaacacgctatgggagcagaggagcgcgcgcgcaggaaccaagctcgaagaggacgagcaaagatgggagagactcgtccggcagccatggcgagtttgggagactgcgacgcgctgggaaatgggagggaagaggagcggccgagctggggcagagagaaacgctggcgagtctgcggcgccagggagcagggcgcgacgctagaggaagataaggaggggatggagaagagctcgtctgggcgacgacttgaagattga

SEQ ID NO: 12186 - DNA, 234 bp, Zea mays
  Peptide Sequence Number=SeqID_53965
atgggagtggagggatggcgagagtaccgtaccctccgtggcaagaggctggacggtggtgtatctgtgctcttggttggcgtgaacccggtctgcatacccttgagagtcttttctttagtcgggttacgagtcactttgattgtgattggtgttaagcgcagacatgggaatactgagaagagtaatgtacttgtaacgacacacctacactcaggtaagaaggtacactaa

SEQ ID NO: 12187 - DNA, 216 bp, Zea mays
  Peptide Sequence Number=SeqID_53966
atgcctcagtggggattaaatgctccgacatctccaactcagggatctagggttgtgggccacaacacaccaccaccgacgataccaacaccaggagaagcttctataggggagggagctactacagaagagactccaaaccagacagatgactttgtaaacaatttcttggcttctggaggtagtggtcacaactcaaatgacccctatatgtga

SEQ ID NO: 12188 - DNA, 987 bp, Zea mays
  Peptide Sequence Number=SeqID_53967
atggggaactgcttggggggcagctcctacgtcaacaaggtctcctccaccgcaaagccagagagtcctcctaaggtgcagagcccgtcggaagtggaccggagcgacgaccgcaagctgccatcgaacccgggcgaggtagaggccctgcggcggggcgcgtcggcggcgacgcggcggaacccgctcgtggccttctccttctccgagctcaggacggtggccaacgacttccggaaggacgcgctcatcggcggcggcggattcggccgggtgtacaagggttccttcgcgccgccggccggggcgggcagacccgagcggcggcaccctcccggtgccggtgggccgtcaaggtgcacgacggcgacaacagcttccagggccaccgggagtggctggcggagatcgcgctgggcgcggcgcgcgggctggcgttcctccacgacgcggaagccccgccccgtgatctaccgcgacttcaagacctccaacatcctgctggacgcccacttcaacgccaagctctccgacttcgggctggccaaggacgggccagtcggggagcagtcgcacgtgtccacccgcgtcatgggcacctacggctacgcggcgcccgagtacatgatgacgggccacctcacggcgtccagcgacgtctacagctacggcgtcgtgctgctcgagctgctcacggggcggcgctcgctggaccgctcacgcccgccgcgggagcaggcgctcaccgactgggcgctcccggcgctgccgcacaagaagcgcgtgcagggcatcgtggacccaaggctggcgggcgccggctgggacgacccgccgcccgccagggccgtgcagaagacggccatgctcgcgtaccactgcctcaaccgcaaccccaaggcgaggccgctcatgcgcgacgtcgtcgcgtcgctggagccgctacagcagccgccggaggacccaaacgcccacgccgccttgtga

SEQ ID NO: 12189 - DNA, 456 bp, Zea mays
  Peptide Sequence Number=SeqID_53968
atgtcgattatgcgcgagttgaactacttccttggatttgaagtgaagcaactcaaggaaggaacgttcgtatcccaaacgaagtacactcaggacttgctaaaaaggtttgggatgaaagatgcaaagcccgccaagacgccaatgagaaccgacggtcacttggacctcgacaagggagttgctctaaagaagcatttgagtagacgactaattacaggaaactcgagctttagtagagtggatactctatggtgtctatgggcccaacgctatgacctgcagatcgctcctttggccgtagattacactgtttacgagtctaacaatctcgaatcgatctcgatctcgtccagccgtcagctagaaaacgggcgcgagaggatacctggatcagataagaagctgggacaagatgggtggggacgtagtgggggtgacctcatgattggctag

SEQ ID NO: 12190 - DNA, 423 bp, Zea mays
  Peptide Sequence Number=SeqID_53969
atgcagctcagcgatatgcacaccacgcttggatacatggatgagtccattgcctcctatggcaagggtctcaagatccagatggatgcgctcgacgagcatgatcctcgcattgtagagacctgcacgttcttagatgccaaggagatccctaatgattgttttgtttggttggttggagacatgattattgaggaagctcttccaacgtaccagactatgcttgataacttcaatgatgccaaagatgagacaagtgcaagccccacggcttgggttgttaggacgagggcatggactgatgaagagaacatgcatgatgatcttctcaacaagaaacccctcaaggaaaagccaaaaaagtttggagaagttaggctcggtctggtctgggagcaccggaccggggttcgtgccacctag

SEQ ID NO: 12191 - DNA, 357 bp, Zea mays
  Peptide Sequence Number=SeqID_53970
atggggaggtgcgtgccagggccggagggggcagcggtggtgtcgtccatggcggccagcatggccgcagtggtggtggcggtggagacgtccatcggggcgacggcttgcggctcggcttggagtgtgcaggttcttgttggggtcgcgtggcatcgggattggcgcggcttcctggcgacctggcgcgtcggttgcgcaggcgaaggggcgctcggggacggtcggtgtcgcggctgcgtcgggcagcgcgcggtcgggctgggtgctgggcgcggtccgctgctctccctggcgcggcgtcaggctgttgtttctgcacttcaaaaccagccaattgttaatggtttcatctga

SEQ ID NO: 12192 - DNA, 336 bp, Zea mays
  Peptide Sequence Number=SeqID_53971
atggcactggtgccactagggatgagccccatcccggtgtcagagccgcctgcatcgatctccgatgccctccccgtgctagattccgccgccgatcgactttgtcgcctggaccagggcctcggagcccgcctcgaagtcgagggccacatgctctaccggacggtggtggactacgtcctgacgtgctttcggagtcatgaccccaccatatcattggcgtcagtgattgatggtccagtagccaccgcagaggacgccgcccgggagagcgtacaagaggtagcggagatggtcgtcacatgcttccagcgtggtcctgccgacgcggagtag

SEQ ID NO: 12193 - DNA, 399 bp, Zea mays
  Peptide Sequence Number=SeqID_53972
atgtcgtcctttgttgactttggcgtccgcagcggggtatatgaacacgatgatggggctcatgggccctgtactactcatggtggtcatgggtattggcggcggcggcggcgttcggcatcccaagagccccgccggcgttcggggtccgaagaggggctccagaggagtactgtgagtggcgcggactttggggcgcggcgcccagtcatcgctgcgcgtgggcctggcaccccgctaggcccacacggcagcggcggcagccgactgcagaggatctcattcctcctgctggggccagctgcggccatccacctcggcaacaccaactcgtgcatcgccgcctacgactttcgccccgggagccacgagtactaccagctctgcatcccctcctag

SEQ ID NO: 12194 - DNA, 507 bp, Zea mays
  Peptide Sequence Number=SeqID_53973
atggcggagctcatcaaggagccgcaccagtgggacatcaggcaggacgcggaggcgctgcgcaggctaagggtgtcctgcgagcacgccaagaaggcattgagcgaccaggaagagacgatggtgcagatacatgtcaccggtgtcgagtcatcggcgcccctcgcgggccaagctggaggagctcaaccaggacctgttcgacagggtcatgcgacttgtggatggggagtgggtggctgccccggccccacgacgagagccgcaaggacatggtcgatgagatcgtcctcgtcggtagcggcgcgaggatgcccaagctccatcagctcgtcgaggactacttccatggcaggcagccaaacagccgcaagggagtggaaccagaggacgccatcgttcgaggcaccgccattctttcccgtcctaaggcggcgtgctacctggaggagtgctttgactttctttacggcaaggacggacttcctctgggatgtcatgtcttga

SEQ ID NO: 12195 - DNA, 1158 bp, Zea mays
  Peptide Sequence Number=SeqID_53974
atgggtcacgattcatgtcttcggcccatcttccaagcggcccgggaaaacataacggcggccacgcgctgcccgctcctcgatttcgccggcctgctcgccgcgcggggcctccgcctcaccgtcgtcacctcgcccgccaacctcccgctgctctcgccattcctcgcggcgcaccccggtcacgctcgccgtctgacgacggcccccatcgtcgccgtcgtcgccgacttcttctgcgggtgggcgcagccgctcgcccgcgacctcggcgccgcgggcatagtgttctcgccgtccggcgtccttggcgccgccgtccctcactcgctcttccggcgcctggtgaggcggcctgctgctgccgaggagtccagcgtggtcacgttcccggcgatccccggagaaccggtgtaccagtggagggaggtctccatgctttacaggtggttcgtggaaggcggggaagaagacgagcaggcccgcgagccggtgaggcgtaacttcctgtggaacgtggaggagagctgggggttcgtgttcaacacgctccgggcgctggaggggaggtacctggagcagccgctcgaggacctcggcttcaggcgcatgtgggcggcggtgctgaccccgggcgtggcggcggcgctggccgaggcgcttgagcgcagcgccgtgccgttcgtctgggtcgtgggcgccgggagcagcggcgtggtccccaaagggttcgaggtgcgcgcggcgtcggcgggccgcggggtggtggtgcgcgggtgggcgccgcagctggcgacgctgcggcacccggcggtggggtggttcatgacgcactgcggctggaactcggtgctggagtccgccgcagcgggggtggccatgctaacatggccgatgacggcggaccagttcgtgaacgcgcgcttgctcgtggacgaggcgcgcgtggcggtgcccgcgtgcgcgggcgggttcggcgtcgcgccggacccgggcgagctggcgaccgtgctggccgacgtggtaggggagaaggggcgcgacgtgagggcccgcgccaaggagctcgcggcggaggccgcgcgggcggtgatggaaggcggcagctcctacgctgatttggacggattagtgcaggagattcggaatcttcgttga

SEQ ID NO: 12196 - DNA, 207 bp, Zea mays
  Peptide Sequence Number=SeqID_53975
atggcggcgtggaaggcgcctgccgcgatgttgttggtgcagctgtccaacacgggtatggtgctgctttccaaggtggccatcgacggcggcatgttcgtcttggcacttctcacctaccgcagcctcttcggcgccgccatcatcctccccgtcgcgctcctccaagagaggtacatcaatatcatctctgacgatgttaggtaa

SEQ ID NO: 12197 - DNA, 129 bp, Zea mays
  Peptide Sequence Number=SeqID_53976
atggagggctctgccctctgcacgcagcggaccaatggcggaggttcaactccggtagtggtatatggtcgagttagtataagacgccaatttgggttaaaacatacttataggagtgagagcacctag

SEQ ID NO: 12198 - DNA, 429 bp, Zea mays
  Peptide Sequence Number=SeqID_53977
atggccgtctctgatgatgaaactgttgagattgacggcaacgaggagcgatggttgtgtgggttggccggagatgacgatgaggatgacctttgggaggatgctgcagcactcttcagccatagcagtgagcatcccatccatgtcggtgatgaacaacaagtctgtggtgaggaaggtcaaggtgaaggggacgaacacagtgccaagcgttgtcgtccttctacttctacagtctggttagatttcgagaaacttttcaaaattgtgaacggtaagaaggtaagctcaaaaagaagaatatcacggtttcgtccacaacaaagcaaatggatacaacaaaagaacctcccaagctattgggcccacatgcacctgcccttgtctgaaagacctcagactgctatgcatgtgcaccagataacttaa

SEQ ID NO: 12199 - DNA, 732 bp, Zea mays
  Peptide Sequence Number=SeqID_53978
atggacacggcaccaggtcctaggtgtggttggcaagcaaggccgcgtactccaaagcgcgacgccaggtcggcgaagcgggccgcgctcgtcgacggggccgtgcatggcgcaggaggggtcgagggggccgcgcgtggcgtgggtagaggcgtgagcggaggcgtcgagaccgcgcgtggcacgggtagaggcgcgagcggaggtgtcggagccgcgcgtggcacgggcaacgatgcaaggtggggcgtcagggatggagggggaaccggatcggactcaaggagagtcgatatcggtgggtggggaggagccagcaaggggaaacacatcttcgtcgaaaataacatgacgagagatgagtatgaggtgggagacgaggtcaagacagtggggccctgcccagtaactggcagggagagacgcctagaagagaaggcaagtgggttgtgcagtgagggcagcggggagaacaccgagggactcaaggccggcaatgaaggggcccccgtccctggcgagttcgcgggtgtgggagaggaagagctcactgcccgcgcccagcggggacagcagtccagtgcccaagggggccaacaagccgaggaaggagaggaggctcgctgccacgacgacgcgcgcagcgacggagaagcggcggtcggtgtcggggcgggcctaggacggtggtggcacgatgtcgagcagggcgcgggggcgggccctcgatag

SEQ ID NO: 12200 - DNA, 540 bp, Zea mays
  Peptide Sequence Number=SeqID_53979
atggcgcttagcctcaacaagctgttgggcaagagcatccgccatgaggagttcgtgctcctaggtgagggttgtgacctgttcctgctcctgtgcggcagccacaacgaccttagtagtcgtgagggctgcgtccagggtggagtgggcagccgcgacataacagtggggaggagcggtcgacagaggcgcgaaagacgcagagggccaggacgaggtgcctgggatgccactcgctcttgcttcttcctcacgctgctaacatctggtattagagactccttgatcctatcttcgatggcttcctcctctctagttttcacgtcttttgtcgatcccaaccttgttgccgcaatcgccgccgaattcgacaagcggatcttcgccttggacaagaagtgggaacatcgtttcggggctctggagaagacaatcacaggttgcaacgctggcttctctgcattcgtcgaacaagtcttcggcgatttcaccaaccagctcgccaaatcggaattcgcgacgtactcttccatcaactga

SEQ ID NO: 12201 - DNA, 771 bp, Zea mays
  Peptide Sequence Number=SeqID_53980
atgagaaaagattgggagacatataccttcagacgaggtgctcatctccagtccctgtgtgttcgagccgccagtgtagagagaagggtgtcaaagggagagagaagggtgaagaagggagctgccaatcctggaagaagaacagctgtcctggtctccggggtacaggctgcatgtgatgaaacttctgaggaagcagaacaagcatttctccaacttctgttaagttcgactaatggggacaacattgaggttctaaagcagtctgctgtcgcttacttgaacggatctgattatgcatctcaggtctttttgccaagagaacagcttgagaaacaatgttcctatgatgctgcacgacctctgcccttctctagtaatttcagagatgccactgtcagaagtactattcctgacccagatgttctccaaagctttggtagttcatcagagctgtcctcaataataccaaatagagatgacatggttgctactttacttcaacaaacatcacttaaaggattgcctcctcaatggatacgaccctctccaccaagacttgaaatttttgaaggggaattacagtggctgaacatagacaataaccatgagctactatgggacagtaccatgtgtgcagacactagccgaggtgctgtgattcgagatctggtcgaacaagcttgtaaagctccacttgcattggcccagcatgaggttttttctgcaaccttgttctcaaatggatatgctgataatttagtttactaa

SEQ ID NO: 12202 - DNA, 762 bp, Zea mays
  Peptide Sequence Number=SeqID_53981
atgagatacgccgtaccaatgagcatgtactactacggccttcaggacacaacggcgtcatacgccattatattcctcaacttaattccactgacaaccttcattctctcctttgctttcaggatggaggcattgcgaatcatgagcacgtcaggatcgctcaagattgcaggagttctggtgtccgtcgggggcacgatgatcatcagcctatacaggggaaaggtcctgcatctatggagcaaccatattcttcaccatcacaacgaagagcacgacgtcgccgtggatgctgcaagccatcatcggctacgtggaacaatcttgttggcaggcagcagcttcatgcttgcttgctggtacctgattcaggcgaaggttctcaacgtatatccgtacaaatattggtcgtccatggctacctgcttggttggagggtttcagacagcacttgctggagtcatacttcggagggacaagaatgcctggaagataggatgggatataaaccttgtgaccatcgtctactctggggcatttgcaacggcactaaaatacagcctcaactcgtgggctgtatctaggaaaggcccatcataccctgcaatgttcagcccattgtctgtggtgttcactgttgtgctgggctctatcttcatcggtgacaacatcacaatcggaagcctcgtcgggacggttatggtgattgttgggacctacaccttcctatgggccaaagcaaatgagctacatcaagagtga

SEQ ID NO: 12203 - DNA, 495 bp, Zea mays
  Peptide Sequence Number=SeqID_53982
atggaggaaaacaatgtggagagttaccatgaaattaccaaatatctgcggaaggactggaagctagtttatcattgtggaatgacaccacagaagctccctgatcttgttgaacataatccacatatagctgttgaagttctttcaaagctaatcaactctccggacatggatgcgtactttgatgctattgttcatatggatatgagcttgcattcaatggaagtagtaaatcggctcactactgcagtagttttaccaccaggatttgttcatgactatatctcaaactgtattcgatcatgtgaagacattaaggacaagtatatgcaaaatagactagtgagactagtatgtgtttttctacagagcctcattcggaacaggataatagatgtgcaagatctcttcgtggaggtgcaagcattttgcatcgccttctcgcgaataagggaggcagtggggttgttcaggctcctgaaatctctagaatga

SEQ ID NO: 12204 - DNA, 420 bp, Zea mays
  Peptide Sequence Number=SeqID_53983
atggatgggcacgctacggcgctcacgtcccccgcagccggctgcttctcacacaagcgcgcgcacgctcggaatactccgacgacggagttccaggcgaacctagggcaaccatcctccaccggctggcagcaagacgagccccctctccttccggttccatccatccgctgccgccgactaccagatggctacggcggcgctgcacgcaccctcgcgacgatgcggcgagccacactctcggtcgcgctcgggctctccctcatcgccctcctcgctgcccggggcgccgacgcctcaatccacgagtacgccggcggcggcttcgcgccgcgggccaactccttcttcttccacggcgggagcgagggtctctacgcatccgacctctcatccaactcctcatccttcatcaggtag

SEQ ID NO: 12205 - DNA, 1080 bp, Zea mays
  Peptide Sequence Number=SeqID_53984
atggactcaccgctttaccaacagctgcagctcagcccgccttccccaaagccggaccaatccagcagcttctactgctacccatgctcccctccattcgccgccgccgacgccagctttcacctgagctaccacatcggcagttccgccaccgacacccatccacaaactgtggtcaactcgccggagataccggtatttccgctgatggagcagacgccggcgccagctacagagcagggcgctggcgcctgtggtgcacaaggcgctggagtcagcctcgacagggcgtatgccgcgccgaggaaagactggcacagcaagatatgcaccgccggcgcgatgagggaccgccggatgcggctctcccttgacgtcgcccgcaagttcttcgagctgcaggacatgcttggcttcgacaaggccagcaagacggtacaatggctcatcaacacgtccaaggccgccatccaagagatcatggccgacgacgcgtcgtcggagtgcgtggaagacggctccagcagcctctctgtcgacggtaagtacaacccggcggagttgggaggaggaaatgagaagtctaacggtaatgcgtgtagcgagtggaagaagccggccatggtaaggaaggcggcgaccacgacaaagccgccaagaaaatctggcaataacgcacacccggtccccgacaaggagacgagggcgaaggcgagggagagggcgagggagcgaaccaaggagaagcaccggatgcgttgggtaaagcttgcgtcagcaattgacgtggaggtggcggctgcctcggtggcgagcgacaggccgagctcaaacaatttgagccaccactcattgtcgtccatgaacattccgcgtgctgcggcggctgaattggaggagagggagaggtctttgttagctcccaacaatagaggaagaatgcaagaaatcacaggggcgagcgacgtggtaggctttggcaacggaggaggatacggctgtgacgacggcaactactactgccaagaacaatgggaactcggtggagttgtctttcagcagaactcgggcttctactga

SEQ ID NO: 12206 - DNA, 2040 bp, Zea mays
  Peptide Sequence Number=SeqID_53985
atgtcatgtccacacacctcccaacaaaatggcaaggccgaacgtattattcggtccaccaacaacatcatgcgctcccttatgtttcaagctagcctcccaccgtcctattgggctgaagcccttcataccgccacatatcttttcaaccttcatcctacaaaaacacttcaatttcgtacaccataccatgctctctacggatatccatccgaacataagggctatcgttgccttgatttatcttctaaccgtatcattatatcccgccatgtcacttttgacgaaacatcttttccttttgccagcaaccaatgccgcattgaaccaacgtcgcttgattttctcactgacatggactccgtccagcttcctgtcttttctcctgcaggtaactcacacaatgtgcacacgtctcctacacaggctgctgctggccagcaacccagtagtccacgtgcccctgtagtcttgcgcctgcagcctgcaaatggacctccaagcgacagcccgccatctagccctcctgcacagcccacgtgctggcctcgcagggaattggttgggccatccttggctgctgcgcaacccacgtgtgctcctcgtgcatactctccaggcgaggtccaagcaacgtctgggcaaactttgccaactcatgaacttccaccctcaacaacgcatgagcgtcctcctgtttgtgttgaacacacccgtcaccagatcaccactccagctgctccaggaggattggctcccatggtcccagtcgtgtccactcgaactggccaccgtactgcagtctcagtctccccgacggccaatacacatcagatggtcactcgtggcaaatcaggtttccgccttgacactgaccggctcaatcttcatgttgcagctatttcaccggtcccaacttctcttcgtcgtgcattggctgatccaaactggcatgctgccatgaccgaagagtttgatgctttacaatcaaatgagacatgggatcttgtccctcgtccatctggcatcaatattgtcactggaaagtgggtctaccgtcacaagctgcgtccagatggctctctcgagcgttacaaggctcgttgggttcttcaaggattcacccaacgtcctgctttacagactgaatttgctatgaaagatttaggtaaccttcatcatttcttgggtatctcggtaactcgtcaacccagctctttatttctgtctcagaagcattacattcttgatatactggatcgtgctggcatgacagattgcaaaccttgcaacacacctattgatacttcatccaaactctctagtgatggacctcgaatatcagacccgacacaatatcgcagtttggctggtgctcttcagtatctcgtgttcacaagaccagatattgcttatgctgtgcaacaggcctgtctcttcatgcatgatccccgcgagcctcatctagccttggtgaagcgtatattgcgatatcttcgtggtactttggactatggattcttaattcacaagtcttcattggacaatttaattgtttacacagatgctgattgggcaggttgtcctgacacacggaagtccacctctgggtatgccgtttttcttggagataatctattgtcgtggtcttccaaaaggcagccgactgtgtctcgctccagtgctgaggctgagtgtcgtgctgttgctaacggcgtcgctgaagctacttggctccgacagctgcttctcgagcttcacaaccctttgcgtcatgctgctgttgtttactgtgataatatcagtgcagtatatctctccagcaatccagttcagcaccagcgtacgaaacatgtggagattgatctacatttcgtccgcgagcgtgtcgctcttggccacgttcgggtccttcacgtgccgactacttcacagtttgctgacatcttcaccaagggccttccatcttctgtcttcactgagtttcggactagtctgaacgttcgacctcctcccgctccgactaagggggggtgttag

SEQ ID NO: 12207 - DNA, 357 bp, Zea mays
  Peptide Sequence Number=SeqID_53986
atggcgacgcgaccgaactgtcgcattcgcagctctgtggtgtgccagcgcagtgatggacggttttgttcaggaggtggcaatgcagtagggctccaggatgaagagcttcttctgccgcagctgccggcaccgccgcacgctctgcagcaggtcctgcttgtcccccctccgcgacgtgaacgacagcagcagaagctgtttggtctcggccgcggccggggcgggaaggtgcagcccgccgcactcgtcgtcgtcctccggagccggcgggacgtcggtccctgtcgaggctgcggcgaccgcggccgccagcgtcgtcgtagacgacggcacccgtcgcatggtcgggcgtga

SEQ ID NO: 12208 - DNA, 957 bp, Zea mays
  Peptide Sequence Number=SeqID_53987
atggcaacaaggggtagagatatccagagctattgcacctggcgatcacgctccgagtgtgaagatccttcacagaaaggccataaggagcctctacagccgcgctggggctgcatgttctgtagactctcgggccatgtgcccgcacaggagtcgttcgctcgtgctccgagcacggtgcccgcgcgctggggcggcgtgtcgaagccattctggggcccgctcgctaggcgtcgtggtcgcacacttgcgctggggctgtgtacccgagcgacgtcgggtcgtcgacccgcagatgaccgtgccgaccggccgcgcccgcaccgagctacgctcgcgcatgggattcccttgctggagtcgtgcctggccggcgcgcccgcgccctggatgcgccgccgccggggcaccgcgctcggggtgatccgcgccgcagccggcggcctgcacgtccgcatggctgcccgcgtcgccgagctgccggggggagcgtgcccgccggagttgcccggattggagccgaggccgggggccgcgccaccaccggggccggggctgaaggccgtgcctggccgggccgcccgccggcgagccgaggctggtcgctgcgcacgcgcccgcgccgggaccgtgcagtccgcgcgtgcccgccgggtccgcttgcttgcgcgccgcctggggccgccgagaccatgcgctgctgggaccagggccgccggggctaggggctgccagcagccagggccgccgtcgcctcgcgccggggctagaccgtcgcgcccgcgcccttcggaggagcccgggtcagggccggccgtgcgccgccgccgaaggctcgcccgcgagcaccgaggtgcttcgccgcacccgcccgtcgccgaggggctcgcccgcgccgccgggacagtcgcgcgcccgttcgccgtcgaggccgggccggaagccacgcgcgtgtag

SEQ ID NO: 12209 - DNA, 435 bp, Zea mays
  Peptide Sequence Number=SeqID_53988
atggggctgaggagcatgacgacgcagaaccactcggacctgtgcgtgttggccgagtatacgacgatgacagctattgcaggccacggcagcgcccagcaaatgaacctcggaggctcggagccctccatatgccgccttccccactcgggatcttctgtagccgcaggctcgactacagagtttagttccacaagctacaaaattcggctcgccattggcttgcaaggtggagaagtgagccgtggacgctgccccccacttctcatcgccctctttttaatttgcgacgatctttggggtggtgagcggaggaggatttctaactggatggtgaagttgtcaggtgaaaaggacgggcgcgacgaatccgaccatcgatccaacgccgagcgcgcgttggaggagggacctgccaggccccacctgcagtga

SEQ ID NO: 12210 - DNA, 480 bp, Zea mays
  Peptide Sequence Number=SeqID_53989
atggacattgacgtctatgcatttcttggcatggttcttttatttgtcagaatgtgtagagctttaatgcctggggatgaagaaagcatgagtgatgaagctatttgggagacacttcctggtacaccaccaagtgctcgcaacattccaatatttgctcttttctcgccactatttattctgcaaggtgctggtgcctttttctctctagcaagattagtggagaaggttgttctgctattgcgcaatggaccagttagtcctaattaccttacagtctcatcaaaagttcgtgattgctttgcttttcttcatcatggttcaaggcttcttggttggtggtctattgatgaagggagcaaggaggaacaagcccggttgttctatactgaatctactgggtacaatacattttgtggctatccaccagaagtggttaggaaaatgcctaaaaaggaccttgcagaagaggttacatga

SEQ ID NO: 12211 - DNA, 477 bp, Zea mays
  Peptide Sequence Number=SeqID_53990
atgcagcggcggcggggccacacgtgggcaggggtggggaagacggcccaggcggcggcggcgcacgccgcgctcttctgcttcactctcctcctcgcgctcagggtcgacggacgcaccgcatactcctggtggataatattcagtccactatggctctttcatggtattgttgcacgcggaaggttttcaatgcctgccccttctttgcctcatggccgtcattgggcaccatgtcattcgattgttgcggcgcctttactaattgcgttcgagctgcttctttgtatatatcttgaaagcataagagttagaaatcatccatctgttgatctgaagattgtgttccttcccctgttggcctttgaagcaataatccttattgacaattttagattgtgtcattgcaagttatttttccccaactatgacaaagcattgcacataatgacacaaccaggagttgctattgtctga

SEQ ID NO: 12212 - DNA, 528 bp, Zea mays
  Peptide Sequence Number=SeqID_53991
atggcttctgatttatgtgtgctagagggtaatacgaatcctgctcctgctcacctatggccttatcaggggaagttccatcataattttagcaacctgtgtatgcttggtgctgggacctcactgccaggattagtagctgcaaaggttggggcagatgtaacactaacagacattgcgcagaatgcagaagtttcaggacttacatggggagactgggatgaatcggtatttgatttacgtcctgacattattcttggagctgatgtactttacgactcagcaaatttcaatgatctattcgcgacggtgacctttcttctcgaaaattcttctggggcggttttcataaccacataccacaaccgcagtggtcagcatctgattgagtttttgatggtcaagtggggtttgaagtgtttgaaactgctggatggtttctccttcctaccgccatgtaaggctgctttacttcaggggaatattcagcttgttgaaattgcgcttgacaaggaaaaatataaatga

SEQ ID NO: 12213 - DNA, 315 bp, Zea mays
  Peptide Sequence Number=SeqID_53992
atggaccgggtgacgaagctggcttctcagcgtgcggtggtgatcttcagcgcgagctcatgctgcatgtgccacacggtgacgcgtctgttccgcgagctcggggtgaacccaacggtggtggagctagacgaggaccccagctggggaaaggagatggagaaggcactagcgaggctgctgggccgcagccctgcggtgccggcagtgttcatcgggggcaggctcgtcggctccaccgacaaggtcatgtcgctccacctcagcggcaatctcgacacaatgctacgcaacgcgggcgcactctgggtgtag

SEQ ID NO: 12214 - DNA, 756 bp, Zea mays
  Peptide Sequence Number=SeqID_53993
atggcgcctcctgttgacgtggctggtctacgccctaggttgggcgacgtggaagctcctccgaggccgaggtcgagtctgtcttccgtggtcgaggtcaagtccgagcccctgggtcgggcgaggcggagttcgtcatcttctagggctgagcccaagtccgagccctgggtcaggcggagcggagttcatcgtcttccggggctgagcccgagtccgagccctgggtcgggcggagcggagttcgccgtcttccgggacttagcccgagtccgagccctgggtcgggcggagcggagcggcgctgtcctcctgccagatcggtcagtggagcggcgaagtgacggcggtcacttcggctctaccggctggggggcgcacgtcaggataaaggggggcattcggagcataaaggctccagggctttgcgaaatctccctcttcccttacctctttctcccattgcggccgcaacacccatcgaacccgcgtctcggcaattgccttgcgattagcgccgtcgggccgtcctgctgtcccggggtgcctcggttcaactcgccgtcggtgctcccaggctcgccgggcagagtcgacgaccgtcagggcgctaattcctcgccggaggaggatccccgccacaacaccatcgctcacgtgaccaggaacctccgtgcttcgaccttcggcgtcgaattgcgggtccgcggcgatgcttcgccgtggccactgggcggcgccgccgcgctctgttga

SEQ ID NO: 12215 - DNA, 1746 bp, Zea mays
  Peptide Sequence Number=SeqID_53994
atgctggttgagatcggaactgcaccatcagctgaacaggttaaacaatttgcagctcttgtgtcagatggcgcaaagaagcccatttatctccatagcaaagaaggtgtttctaggacgtctgcaatggtctcaagatggaaacaatatgttactcgttcagagagattggctgtccaaaatcactatataaatgggaatggtaaggtcctgacaagtgacaagaccaagcagcacacgggcagcccaagctcctctatgaatcgaactgaaattggtatggtaacggaatctgataggaccatgaacaatggagaatcatgtgagatagacatagagacagctcgtcataatctggaggtcactaatgccctttccgatgaccaaagtactcaacaaggtgaaatgcttgggactgggacagaacccttgtcaaactttaaactggagagtaacccccttaaagcacaatttcctacttgtgatattttctctagaaaagagatgagcaagttttttagaagcaaaaaggtttatccaaaatctgttctgaactcaaggagacaatcaagtagcttgctggtctcaaggagaaaacaaaatttcagcacagagcgtaatggaaccattgactatgaagcagcagagttcacaattttagaaagttcaaatggaacatcatttgacaatgattatattctatcagtttcttcaggtatcactgatggaaaaccttccaacaatggagccttttcgttaattgagaaaaaggaaagggaagtttcagtcactacttttgatactagagcatcggcgagcagttctaatggaaaggttcaggttggatcacaaaaaactgctgaaaagaatggtaccccttatctggagagaaacaattcaaataatgttgatggaagtatgtgtgcatctgcaactggtgtcgttagactccagtcgagaagaaaagcagagatgtttctggttgcttcatttctgcatcatcaagaaaaaatgaatgttcttgtggaacctgatgttcatgatacatttgctagaattccaggttatggttttgtgcaaaccttctatactcaagataccagtgaccttcatgagagagttgattttgttacatgcttgggtggtgatggactcattttgcatgcatcaaacttatttagaacttctgtaccacctgttgtctccttcaatctcggatctcttgggttcttaacttcacataatttcaaagatttcagacaagactcgagagatttaatccatgggaacaacacacttggagtttatataacccttagaatgcgcctaagatgtgagatctttcgtagtggaaaagcaatgcctgataaagtgtttgatgtgctgaatgaagttgttgttgatcgaggttccaatccatacctatcaaaaattgagtgttatgagcataaccaccttatcactaaggtgcaaggtgatggggtgatagttgcaacaccaacaggcagcacggcatattctactgcagctgggggatcaatgataccagatgaggcaagaagcaatgcatgggtttcatttgatggcaaaaggcggcagcaactatcaagaggagactctgttcgtatatccatgagtcagcacccgctaccaactgttaataaatctgaccaaacgggtgattggttccgcagcctgatcaggtgcctcaactggaacgagagattagaccagaaggcactatag

SEQ ID NO: 12216 - DNA, 489 bp, Zea mays
  Peptide Sequence Number=SeqID_53995
atggaacacgacagtgttggtttcgacgaaatagaggtcctgtccgccttcaacttccgcccgccggcggcgctggacatcgggctcaccctcaccgtgcacgccaccaaccccaacgtcgtgcccgtgcgctacgggccctctaccgtctccatcctctacggtggcgcgcacctcggcaccgcccgcctcaacgccggcgagcagcccgccacctcctgccgcctgctccacctcccggcgcgcctcgacggcgtcgagctcgcgcagcgcgcccgcgccctcctcttcgacgtcgcgcgccgccacatggagctggacgcggccgtcgagatcgccggcgaggccgcggtgctgctctggtcccgccccttctccgtccgcatcgacagccacatcaccgtcgaccccgtcttcctggaagtcgtcgaccaggagaaccgcttggagatgcagctctacctcgcttcaattttttttaccaactag

SEQ ID NO: 12217 - DNA, 243 bp, Zea mays
  Peptide Sequence Number=SeqID_53996
atggaggcggcgcggcagcagcaggaggagtgctcgtgcggcggggccgaggccgctgaccagttcgagcggctccacgacgcggtgctgctcgacgtcctcaatcgcatcgacgacgtcaaggcgctaggccgctgcgctctcgtcaaaactcagcttgttaccaggatcgggtcgaggctatcgttactcagtcagatcggtattgatctcccagtgcggaaaggcaagggagtttcttga

SEQ ID NO: 12218 - DNA, 471 bp, Zea mays
  Peptide Sequence Number=SeqID_53997
atgctcgctcggcgctgctttgtccccgtcctcccgtccgcaacccgtgcgcacagccgttacctgctcggccaggggcttctccttcccatttgctctagcgacaccgtcgagacggcagtggcggtggtcccaggcccggcacgccggcgcgggtggctgaggaagctcatacccacgaactacctgccccggagcagctggtgctggaggctgaccgtcctgtcagccaccggtgcgtccagaagaaaaggtggtgagatcacaagtgcacctgacgtagtgtgtccatcccctcaaggtgtttgtttaaatgccagcaagctcaagccttaccagagacatcttcataacaaatacaaggccaagtatatttatgcggaaatgtggtatgcgcatggtacttcaatccagacatccgtgaaatacatgtgttctacaacaggtacaaactcagattattgctactga

SEQ ID NO: 12219 - DNA, 528 bp, Zea mays
  Peptide Sequence Number=SeqID_53998
gacggtcagcctccagcaccagctgctccggggcaggtagttcgtgggtatgagcttcctcagccacccgcgccggcgtgccgggcctgggaccaccgccactgccgtctcgacggtgtcgctagagcaaatgggaaggagaagcccctggccgagcaggtaacggctgtgcgcacgggttgcggacgggaggacggggacaaagcagcgccgagcgagcatggagaatggaaaggaggggatggtagagactcacctgacctgacctggaatcgtgcgtcggcgacggcggtggggacgaaggagatccggcgactgggggacggcgacataagggaatttaatcccacggcgcccgaacacgcagtttcattccgagacattcaacctctcgcccacgatgacgacgacaccgatgctcgccccgccgcacctcgctcgtcccgccccgtcggcgccagccctagccccgcccacgccggacccgccccgccggcgcccgcctcgccctcaccgccctctaagtga

SEQ ID NO: 12220 - DNA, 219 bp, Zea mays
  Peptide Sequence Number=SeqID_53999
atgtcttacgcctcccttgccacccgcgagggtgccgcgaatgctctctcgcgcgaaggctatcgtcaattcgaggtgtttgagcggagcgaccaggattttgaccaggaggcattgagggatgaggaggttgaagattttggaggattggaattctcattggccactctagatgttggcgtcgaggttttgatgactgagcctaagcaggatggatga

SEQ ID NO: 12221 - DNA, 498 bp, Zea mays
  Peptide Sequence Number=SeqID_54000
atggacaaggaccaccaggagtcttcgaaaaacaagaggaagctccgctacggctggtggaccctcatcgtgatacgaaggcccctctgcactagcacgactcgggggtttgaagtttggagctgcaaaggttgcggctacggctgccgctgtgactatgccctcccgcctggggcgcaggttgctgcggttgtggtggtgccttcgcctgacagggctaatcaagatgtggcactaagcagtattgaggcggacgcatctggcgggagtggtcccgaatgtttctgtcgaggactacctgctcgagggtgtcagcaaattcgacactcacacctggctggcgaccaatggttgctgctttcgctggccaagtatcgtctggagcactcgtggaggccgcgactttgtagctacgttctgagaagaaactgctggataataaggttgagcgccttcggacaaacaacaccgaatctatcagagacaagtccgttgtag

SEQ ID NO: 12222 - DNA, 171 bp, Zea mays
  Peptide Sequence Number=SeqID_54001
atggagcgcgtcgtagaggagttcgccttcgtgcaggccaccgtcgctgtcatcgcaacggtggatgggcatgggggtcggcggctggcggaccaacgtgatgggacgaacatgtataaaaatggcaaatataaaatcagaactctgaatgttaatgcaaaatggatgtga

SEQ ID NO: 12223 - DNA, 810 bp, Zea mays
  Peptide Sequence Number=SeqID_54002
atgggagctcagcagagcgtcaacgcagggaaagccaaggtggatatgaaagtcgatctcacccacatgctgtgcgaggcgctgctgctgccgcccctcagaagctctggcgtcacgttatcacaaatcgttggaaggttccttatctgttgccttttcccacagaatatccgtcctgttaataaccagggccactctattgccagagaccatgatggttttcctctgacatgcagtggtaatctccatgacaacatgatcatcttgaagcaagaatctggttatgcagatgtcaatgacaatagcttcttaaaagtaaacttccaaatggaacagggattgccacttgtacctaagtcattgaccttcaatagagttaaatgtgcagtttcaaaaggcattaagttgggtccgacatttttggttactagtttgacaggcggatccattgttggggacatggcaccttatcaagcttttgccataggtggacttggtagtgtccgaggctatggtgagggcgctgttggttcaggaagactatgtctaattgctaactgcgaatatacgattcccttggtgaagcatctggagggttctattttcatggactgtgggagtgacttagggtctgctcgtcatgtccctggtaatccagctctgcggcaggggaaaccaggatttggtattggatttggatacggacttcacttcaacactgacctaggtcagatccgtgtcgactacgctatgaatgcatttaaccgcaaaaccatctattttggaatcaacagtagcggtggctcttag

SEQ ID NO: 12224 - DNA, 291 bp, Zea mays
  Peptide Sequence Number=SeqID_54003
atgacctcgaagttggtactccacatcaagagacatattgacaagtctatagcaatagcttttcggcaatacgcgaacaacgcggccgtggccaggcagtcgtggccaggctgttcggccgaatggccggccgtgggcagggctgagaccagctcgttcgaggccaacgcggccatgggcaacccgctgttcggcgtcggcgtctccagctcgtgcgcttccatcgtcatggcagacaggggagcggagtcagcgggcatggcgacaggggaagatcgagacggtgcctag

SEQ ID NO: 12225 - DNA, 558 bp, Zea mays
  Peptide Sequence Number=SeqID_54004
atgcagatggactttgcaatagaacgagcttggtggtccggaggttccaacaaaacaccattgatgcataaattatggtggggccatgttggaaagggatcttcttaccccgtattcagttatgcccctgtgatgatgagatattgcccttctagtttaaagtgttcatcccaggacttgaggaccatttcgggagcttgtccggcgtccgacacggcacacacggcgggatcggtgccgtgggcgccggccgcgtatcttggcgtgccggagcggatcgaccatccctgcgcgcgacgagaaggaaagccttcacgtggaggcggcagtgaggctagcgctgaggcattgcagcaaggcgctggccgagattgggcaccgagctgtcggaacgcgccaaacgccaagggcgcgtgcctgcccgtgaccgcggcgcacgcgcacatggcctgcgctgcgctgcgcctgcgcggcccctggcccgggcgagagacaaacccgccggctgggacgccaccggtcgtctccgccgctcagaaggagagggtgctatcttaa

SEQ ID NO: 12226 - DNA, 452 bp, Zea mays
  Peptide Sequence Number=SeqID_54005
atgaagcacatattcaagattgctgcaatactggtagcaatctctgctatctggattgctctccttgaaacctccactgttcctcgaagttatacttggctgcttcccatctacttggtagtggctcttggatgctatggcctttttatggttggatttggacttatgttcttcccaacttgtcctcgagaagctgtactactgcaacaggatattgtggaggcaaaggaattcttaggaaagaggggtgttgatgacagcaaccctagggcatatggtgtcgctaagttggccaagtacagcgggtgcaaggccgcaggcctcgccgtgccatacagggattctaatactggccacaattccctgattttaatcacaaccaagctgccagttgaaattaggaaacaaagagcaaaacttagattttatggtcttggaacttatagaggaag

SEQ ID NO: 12227 - DNA, 204 bp, Zea mays
  Peptide Sequence Number=SeqID_54006
atggcgagagtagcatgtaccctccgtggcaagaggctggacggtgggctagaaacgagccgaaccgagccaggctcggctcgactcggtaaggcttggtggaatagcgagccgagccaggctcggcttggtcacttcgcgagctcgataatgaggctcggctcggctcgcgagcctagacactcaagtactcaacaacagtaa

SEQ ID NO: 12228 - DNA, 129 bp, Zea mays
  Peptide Sequence Number=SeqID_54007
atggccagtacgagctgcggggtgatcgacggcgagcgcgccgtggccatgggtctgattggagaagaaacaaaagctgagggacctatgcgtgattgtcattccaatagggaattttgggacatttaa

SEQ ID NO: 12229 - DNA, 159 bp, Zea mays
  Peptide Sequence Number=SeqID_54008
atgcctatggaaaacacatggtccttgcacgaatcaaagagtgacaccattgtgcgggtggtccaacaaggactagtggagagtgccaactcttttatggggcaattccatgttggaagcatattgatcctacaacccaatgaccattgtgctaattga

SEQ ID NO: 12230 - DNA, 1842 bp, Zea mays
  Peptide Sequence Number=SeqID_54009
atgcctcccttcccggcggcgaccaccacctcccacctcgccctcctcgtgctcttctcatcttcctcccttttcttcctctacaaatccctccgcctccgccgcaaaccgtcccccgcccgcactgccactcctacccttctcttcgcctctgtaaccggcacctccaaaaccctcgctgcgcgtctctccgcccgactgaccgccgatgccggtttccccgtccgcgccaccgacgctgccaccttcgaccccgacgaccttccttcagtccatctcctcctgctcgtaatccccacccacgacggcggtgcgacgcccccttctgcggccttcctttcgcgctggcttgaggagtccgccgctgacttccgcgcgggtgcactcctcctttccggtctccgcttcgccgtcttcggggttggttcccgggcctatggggagaccttcaacgctgccgcgaggaacttctcgcggtggttgcgcgcgctcggcgccgttgaagtggttcctctcggggagggcgacatcgatagcggggatctcgaagcggtgttcgaggagtggaataggagggtgctgagggtggtgaagggcgaggaggttggttatggggctaatgaaaaaaacaatggtcttgacgagttggagttggaaggggaggattgggatgacgacgatgaggagatggtggatgcggaggttgacatggaagatattgctgggaaagcaccggcgaggaggaagaacgggaatttggagggtgttctagctaatggagtgcataacggtgtaaaggacatggtcacaccaatcattaggacgagtttggagaagcaaggttacaaaattattggttctcatagcggagtgaagatttgcagatggactaagtcgcagctgcgaggtcgtggagggtgttataagcactcattttacggcatagaaagtcacagatgcatggaagcaactccaagtttggcttgtgcaaataaatgtgtattttgttggagacatcacacaaatcctgttggaaagagctggaaatggaagatggatgaccctcttgacattgtgaatgctgcaattgaccagcatactaagatggttaagcaaatgaagggcgtaccaggagtaaagccagaaaaacttgacgaaggtctgtcacctagacattgtgcgttatctctggttggtgaaccaattatgtaccctgagataaatgctcttgtggatgagctacaccgaagacacatatctacgtttctggttacaaatgctcaatttcctgaaaagattaaggcattaaaaccaatcactcaggattcactcaagtcactgcatgaaaaagatcaaagaacggtttaccgactaacactggttaaaggctggaatgcagaagagatagatgcatatgcgaaactgctagatcttggccagcccgatttcattgaaatcaagggtgtaacatactgtggctcgtcagcaacttcaaagttgactatggaaaatgtaccttggcactctgatgtaaaggaattctccgaggtgttggcatcgaaaagcggtggtgtatacgaagtagcgtgtgagcatgctcattcatgttgtgtcctacttgcaaaggtagataaattcaagatcaacggcaaatggcatacctggatagattatgaccgtttccatgaactggtgacatctggaaagcctttcaatagccgagattacatggccatgacgccctcatgggctgtctatggtgcagaggaaggtggattcgatccggatcaatctcgtttcaagaaggaaaggcgccatggaactgctgccctcagaagttga

SEQ ID NO: 12231 - DNA, 2190 bp, Zea mays
  Peptide Sequence Number=SeqID_54010
atgacggtggcccgcggtccgcccggccgcccctcttccgggctcctgggctgctggcgccgccgcccggcgctgggcttcggcgccaaggtcggcatcgccatcgcgcttggcctctccttcgccatcatctggacctcggtctccccgacttcctcctcccagcagatctctactgagcgctcatccttcgcagctgaagttgccgcaccgccaaccgcctcccacaatcgcgccgccgccggcggcgacagcggcagcggcgggcacgctcaccggaagccccgtcccgtcccgcacagccacaagaagcgccaccctgctccttctggatcccattcccatccccacccctccaatgtcacctcctcgccggataccaccgcagcaaaggacgatcactccgagccggctctggtaactgacccggaaccaaaggaggaacaggagccagacatggagatggaaccggaacaggaagcggaactgcccatgcccgagcagggcggggacaattcggggaaggcccctgcggaggaggatgaggagaagccgccgcagctggaattggaagacgagcccaatgaggttgacggcgaggaagatgatcccgaggcggcgaagaggaaggctccaagtaagaagaggaagctcccgcctctgtttagcccgggtgcacgttaccactggaagctttgcggcgccaatagcggctaccactatatcccctgtgtggatttcgatggggatgggaggcagaggcaccatgaacgcagctgccaaaggtctcctgtgacatgtttggtgtcactccccaaggaatataaacaacctgctccatggcccgagaggaaggacaaggtttggtatgggaatgttgggcatcctaggttgtcaaattatgttaagggccacaattggctgaaccacagtggcgagtacttgatgttcccaccagatgaatgggagttcaaaggtagcgcaagacattatgttgaatcaattgacgagatggctcctgacatcgactggggtaaaaatatacgcataatattggatgtcggatgcaaaagcgctggctttggtattgctctactcgagaaagatgtgataacactatctttaggccttacaaatgaccaaacagaccttgcgcaagttgcccttgaacgtggcatccctgcaacagttggcagtctgggatcgcgaagattacccttccctagtggtgcatttgatgctattcactgtggtgaatgcaatataccatggcattctaatggtggaaaacttctcctagagataaatagaattcttcgtccaggaggatacttcatcatctcaagcagaagtgctgacctggagagtgaagaaggaatatcagcttcaatgaccgcactttgttggaatgcaatagcttacaatagtgacgatgtcagcgaggctggagtaaagatatttcagcgaccagtctcaaatgaggtatatgatctgagagcaaaaaaggatcctccattttgcaaggaagagcagaacaaagctagtgcatggtatactaatatcaaacattgcctgcacaaagcacctgttggtatcgaagaaagaggcagtgactggcctgaggagtggcccaagaggctcgagagtttccctgagtggcttggggaaacagaaacaagggtggcttctgatcataaccattggaaggctgttgttgagaaatcttatctggatggattgggcattgactggtcaaatatccgtaacataatggatatgagggctgtatatggaggatttgcagctgcactggcatctaaaaaggtttgggtcatgaatgttgttcctgtgcatgctgcagacaccctacccataatctacgagcgtggcctgatcggtgtgtatcatgattggtgtgaaccatttagtacatatccaaggtcctatgatcttttacatgctgaccatttattctcacgcctgaagatcagatgtaagcaacctgtctcaattgttgttgagatggaccgtattttgaggcctggaggttgggctatcatccgtgataaactcgagatccttgacccattggagacaatcttgaaatcactgcattgggaaattgtcatgaccttcagaaaggacaaggagggtatcatgtctgtaaagaaaacaacatggcgtccataa

SEQ ID NO: 12232 - DNA, 465 bp, Zea mays
  Peptide Sequence Number=SeqID_54011
atgattctaaaaggcctcaagccaagaatcttcaacgagctaaacaagttcagcaggcgatggcttagcgaactcccctcggtgatttggagtttgaggacaaccctgagccgggccacagggttcacgccattcttcctagtctatggggccaaggacatcttgcccactaacttagagcatggctccccgaggctacgagcatacaacgatctcaacaatcaagtcaaccgcgaggactcacttgaccaactagaagaggcccgggatgtggcacttctacactcagtcaggtgcataaagttcacatacacatataaggaaaatgacccttggggcaattctagaagtatggcgcaaaacagacatgcatcggcctatggtgcaccagacagtgtctggtgcccaggctggcgcacccaacgaactagccgctctcgggaaaacacaacgctcctcgactaa

SEQ ID NO: 12233 - DNA, 402 bp, Zea mays
  Peptide Sequence Number=SeqID_54012
atggaagcaggatcagataaggctgcgtggaacaaagataaggcgaggcggaacacagcgagtgggagcagcacaaatcacatcggcgccggggaggtccccaggagcgtgtgttcctccgggtcgcctcttggagatgaggaagcatgcaagtgggaggtttcgtgtgacggagaagctggcggtggatgcgtaacggaagaggcggcgaccattgcggcgattgaaatgtcacggaggatttgggcgagacaggtggttgttgtgtcgcgatggattcgggtgagacatgaggaaaacgaagatggccaccagtcaaaattggaaaaaaaagaaatattcaagtcagaaatattgtataagcctgatttaaaaataaacgatcgagtaataaacaattag

SEQ ID NO: 12234 - DNA, 2025 bp, Zea mays
  Peptide Sequence Number=SeqID_54013
atggcggcgctggatgacaaggccatgacggacctggagacgctggaggaggaggaagtgctgcgccggttaggcacagcggaggaggcgggcctcaccgacaacgaggccgcgcgacgcctccgtctccacggccccaacgtcgtcgtcctctcgcaccacgagggcagcatgcttcatggattcctaatggcgctcttctcgctctggggatgggatcatgtcttccccaagtacaataacatggtccgggtcatacttaactccatgtcgtgggttacagtactgactatagttgtgtctcttgctatcacctcagctggccaaagatcatgcgagctggccatcataattttcgtagtagctacatgcctcatagcatgctttactgcaatgcttgttttagagtatgctaaggctccgctggaggccaaagcccacgcaccaagggccaaggttctgagagatgggaattggagagatgtacatgcagcaaatctggtcccaggggatatcatatttctcaaagttggggacattgtcccagccaatgctcgcatactccgatttcagaaaatcgacacaatgacttgctgggccaaaaggtctgttgattgtgcgcatggcttcctcctatactatgcttggactgtttcctgtggccaaggaactgccgttgtcattgcaactggacgtggcattcccagaagtacattgcggctctacccacaacgttatgctcgacctgggcagcttaaagaaggagccatgcttactggctgcttctgtgcttccctggtacttgttggcacttttgctgagatagtcttaagatttttgttccaaaaacaaaattacagaggcatgccactcgacgcccattttatgccattgattggtggaatcccgatggcaatgcctacttttttttacctggcattggcattgggatctgtaaggctttgttttctggggattgctagccggggaacagttgcacttgaagatctagcaagtgtggatgtaatcctcttcaacatgactgctgcacgggcatcaagatctcaacatgagttgtacattgaaccaattgatgcagctattctaagcctccttgatgatccggagcaggttgctcatcactgtggcagcagcaaagaagttaaagagaaaataagcatgataatggatgaacttgcccttgatggatatcaggccatagctgtaggacatcaagtagactcttgttgggactttattgcccttctgccttacacagatgaccttagaagcgatagtgctgatgttgtcgatagccttatcgatctaggtttagatataagagtcctcacagaaagtccattgtcgaccacaaagcaggtctatctttatcttctatgtacctcctgcaaagttttgtttttgcaagttcttgttaccattttgctatcttcatatcttagtacagaggacaaaagcgatataatattcaccatttcatcaactgtccatcttgatcctgcaggtctaactccaatcttaattgtaatgaagtttggtgtccgtgtcattttacatttatggaactttgacttgtcaaatatcctggctttcatgattacagcttgtaattactgtacgtcctttgcaatgttatttgaaagggtggaattgaacaagtcaccagataaatggagagttcagaaaatcattacaagcggtgctgcttttggaagctacatagttcttactactgccattttttatagggttgcaacaactgcaaacccttttgcaattagcacagtaaaccaggctattgcactctttgttcattctgatggttgctgtatcataagatggcctggaccttttgtcacatttgcctttgttgtttctcaaacggtggcaacacaaaaagttgtccatggcgacttgaattttgcactaacaaagggaaatatgtttgtgctgtcattttacaggtcgcaaatggagacacgcaaagatgacgaatcaagctga

SEQ ID NO: 12235 - DNA, 498 bp, Zea mays
  Peptide Sequence Number=SeqID_54014
atggaccccagcaacaactgcgccagcgatggcagcggcagtgacggaaacgaggatcgcttggtgaacacctcgtcgcggggcggccgcctcatgccgtcctcgcctacgggtcctcaactcatgtcgttgttcaaccctgctgttgatgccgggagctccgggtcttccttgtcgccatcatcttccggggccttcgaccaggaggcactgcccacaccgaatcgagttcgctgcctccgcctagtccccacgaacaacaccatcatcatggagggtgagctcctcgacgacgacgacaacgaaccaggtaacccctccggcaccaggcgctccaccttcatcgacaacaacgggcccatcaatagggtctccatcgtcagcgacctcgacctcgttttggtcggtgggagccgccgcaggcgccgcgtctccaatgttcagggaaaggaagtcataggtcatctatttactattactcttaatagcatttattag

SEQ ID NO: 12236 - DNA, 966 bp, Zea mays
  Peptide Sequence Number=SeqID_54015
atggcgcacctgacagtccggtgcgccaccggtgcgccaacggtgcgccaccagtgcgccaacgcgctctcgggtttctgcgactgggaaggctctgctgtggaccagcctggtcccacctggcagaggatggaccgagagctgatagcacgaccgccctcacatgtcgcgcttgacacgttcgcccgtgactcacaaggcgcacgcgtgccgccgccgcagacctcagctcaactcctcgggctccccgctgggctggacacgtatcgtagacgtgtcaccatagaaccatgggcaacgcgtgcccactacgaattaaagctactaggagatagccacgtctccccgtgtgtacccgtgccgtgcaagcccggcaattcgttgatctccgaatctcccgcccgtcagtctcgagtctccacacctgaaacgtctgagtccatggccgaggccgaagtcgacgccagggccacggccgacgacgagggccgcggcggcagcagcagcaacgtcgccgaagacgggcagccggctgcggcgaaggggcgcgcgaccatatccgtgacggtggtgctgctcgcgctgctggtggcctccgtggcggcgttcctgacgtcgtcgctgccgcgcgccggcgacggcgacggcgagggggtgcagggagctgctggcagggcgggggaggtcgggaagcgcgccgagcccgtcgagcacgccgtcggcatcccggggttcaacagccggctggacgcgttccgcacctgggcggcgctgacgtggatgaagctccggcggccgcgctgctccgacgagccacggtacgacgacgatggtgccgtcggctctctgggggacgccgctaagaagagcttcgagatgggcaaggagacggtggagcaggcggcggcggccacggcgagggccacgcgggacgccgcagagacggccaaggagaagtccgcttag

SEQ ID NO: 12237 - DNA, 621 bp, Zea mays
  Peptide Sequence Number=SeqID_54016
atgcaggcggcatgcaaccgcaccaagggggtgcaccctttcgacttcgacgcgtccagcatggaggcccaggcccacacgtcatgtaaccggcgcgtcggttactacgtgacaggcggcacctttggcatgcgaagcaggcgacacttcacctccgccataatgaccgcgtcaaaaaaggctggcccctcggaagggttcaacagccgcctcagagcactcgggctccgcgcccactactggctggcccccgaagggttcgacagccgcctcagagcacgcagagcgagggatgaccctgggtacgttcgatacataaccaaggctcaggctacgctcccgagcctcgggcgccataggaagatccgcctcgcccgaccccagggctcgggctcaacctcgacactggacgacagactccgcctcgcccgaccccagggctcggactcaacgtcgacgctggacgacgaactctgcctcgcccgacccagggctcggacacagcctcagcctcgaaagacggtctccgcctcgcccgacccagggctcggactcagcctcgaccccagggctcggactcagcctcgacctcggaggagcctccgcctcacgccgacctag

SEQ ID NO: 12238 - DNA, 2184 bp, Zea mays
  Peptide Sequence Number=SeqID_54017
atggggaggagcagccgcgcctgctccctttctcggttccgcccagctgctcctcctgctgctgctctcgctcggctccgcggccgcccagaagggctccacatggaagaccctgagcgtttctgccgtagcgctcagggttattccagtacttttgttcatcctcatgaccctaacagtaacaatcatctcattgttccaggcaaggctccagtaatcgttgctaagggcgggttctccggtctatttcctgattccagtgattttgcttatcggattcttgggaccattagctcccctgacacagtcatgtggtgtgatgttcggttgacaaaggatggcgatggtatctgcctaccgagcataaacatggataactgcacaatgatagacaatgtttttccagaagggaagaagacctacaatgttaatggtgtatctacggtgggatggttctccgtggactatacgagcactgatctgctgccaaacgtgacactgaagcaatcggtcctatctcgtacccctgtttatgatggttccatgttgataaattctgttgaaaatgttttcacctcatttaacgcctctgcagtttggttaaatgtccagcaagacagtttctacagccagtttaagcttagcatgcgaaactatatcctgtctttatcgaaacaattcattactgattacatctcatcgcctgaagtgaacttcctcaccagtatatctggaagagttagcaagaagacaaagcttgtgttccgctttcttgacgaaggctctattgagccatcgacaaaccagacatatgggtccatgttgaaaaatctaacatttgtcaagacttttgcctctggaatacttgttcccaaaagctatatctggcctgttacaccagataattacctactgccttatacttcagttgttgatgatgctcacaaagcggggctagaaatctatgctgctgattttgcaaatgactttactatcagctataactacagctttgatccattagcggaatatctttccttcattggtaacagtgccttctctgtcgatggtgtgttgactgatttcccgattactccttcagaagcagttggttgctttagtaacctgaacaacagcaagatcgaccatgctaaacctctggttatctctcataatggtgctagcggtgactacccagactgcactgaccaagcttatgaaaaggcagttgccgatggtgcagatgtcattgactgtcctgttcaagtgaccaaagatggcatactgatatgcatgagttctgttgacctaatggatgttactactgttggaaaatcatcatttacttcgcaagtaactaccatcaacgatctgaaggctggtcctggagtcttcaccttcaaccttacttgggatgatatttctaagaacctacagcccatgatatcgaacccaatgagcacctataaactgtacagaaatcccagaaacaagaatgcaggaaatttcatgagattatcagactttttgacgtttgcaaagggaaaggatttgtcaggaatcatgataactgttgagcatgctgcattcatggcagagaagcttggatttggagtggtagacgcagtggtcaaagcacttgatgactctggttatagcaaacagactgcccagaatgttatgattcagtcaaccaacagctcggtgctaaagaagttcaagcaggaaaccaagtacagccttgtctacatgattgaagaaggtgtcagagatgccgcaccttcatcccttgcagacattaagaagtttgctaatgccgtctctgttagcaccacatctgttttaccacagacccattattatttgacaaaccagaccaataagcttgtcacgtcccttcagtctgcgggcctccaagtttacgtctatgtgctcatgaatgagtttgcatctcagccgaatgacttcttcgcagacgccacttcacagattaatgcttatgtgcaaggtgctaaggtggacgggatcatcactgatttccctgggactgctcacagatacaaattgaactcctgcacgagcatgggaaacagcgcaccactatttatgcagcctccgcaaccaggtagtcctgcacaacatcatatgcggcgtggtgcattagagctgaggatttcacattga

SEQ ID NO: 12239 - DNA, 2034 bp, Zea mays
  Peptide Sequence Number=SeqID_54018
atgtctaccttcatcggcgttcttgtctccgatccagggctgcagagccagttcacccaggtgcagctcaggacccttcaaacaaagtttgcatccgcaaagcgaccaaacgcagaacatgtgaccataaaggatttgcccccgatgatggaaaagctgaggggcatccacgaagtcctgtccgaagaagagatcagcgggtttttgagcgagacctatcctgacatgaaccagcctatagaattcgagccgttcctcaaggagtacttaaatatacaagccaaagggagcagcaaatcgggaggcaagaagaagctgaaggggtccgtgtcgtttctgaaggcttccaccaccactctccttcacgtcatcaacgagtccgagaagacttcctacgtgaaccacataaacaatttcctgaaggaggatcctttcctgaagaatttcttgccgctggatccggcatccaacgagctgttcaaccttgttcgggacggcgtgctactttgcaagttgatcaacgttgctgttccgggcacgatagatgagagagcgattaacacaaagaagcatcttaatccatgggagaggaacgagaaccataccctttgtctcaactctgccaaggccattggttgcactgttgttaacattggaacacaagatctgattgaagccaggcctcatctggttcttggactgttatgccagatcataaagatacaactactggctgatctgaatctaaagaagacgcctcagttggcagagttggtggctgatgataatggcaaggaagtagaggagctggtcaccttagcaccggataagatgttgcttaaatggatgaacttccatctcaagaaagcagggtataaaaaaactgtgacaaatttctctactgatgtgaaggatggtgaagcgtatgcttaccttctcagcacccttgctccagagcttagctcaaaaaccatgatagaaacttcagatccaaaggagagggcacagaaagtacttgaaaccgcagaaaagctcgattgtacaagatatgtaacgtctaaagatattgttgaaggttccgccaatcttaacttggcattcgttgctcaaatattccagaacagaaatggtttatcaaccaacactgtggctcccgttattgaagatactcctgatgacgtggaggcatccagggaagagagagcatttcgcctatggatcaacagccttggaattccaacttatgtcaacaatttgtttgaggatgttaggactggatgggttttgctagaggttcttgacaaaatttctccagggtcagttaactggaagcatgcatccaaaccaccaatcattatgccgtttagaaaggttgaaaactgcaaccaggttatcaaaatcggcaaggagctaaacttttctctggtaaatgtagcaggaaatgatattgtgcaaggaaacaagaaactgattctagctttcctgtggcaactcatgaggactagtatcctacaattgctgaggaacttgagatcccactctaaagagaaagagatgacagatgctgacattctcatttgggctaatagcaaggtcaaggaatcaggcaaaaattcacatattgaaagcttcaaggacaaaacgatagcagatggggtgttcttccttgagctcctaagtgctgtgcagagcagggttgttgactggaacatggtgaagaagggggaggatgaggaggagaagaagctgaatgcaacatacataatcagtgttgctaggaagctaggttgcactgtcttcttgctacctgaagacataatggaggtgaacccaaagatgatcctcaccctgacagcaagcatcatgtactggagcctgcagaatcaagggccatacaagagttcaggaccacaggatgctcttctagaggaagaggaaggcgaggaggaggaagaagaagaagaagaggaggaagaggaggaggaggatttcgaaggaggtgtcgaagatggtgtctctgaaacgaccacttga

SEQ ID NO: 12240 - DNA, 315 bp, Zea mays
  Peptide Sequence Number=SeqID_54019
atggcgaggtcgctggttgttttcaacagtcaaccgacagcactcgctagacctaaatcctttcgccatcagatcctgcccctcgctcgccgcccaatcaacagctcagacgttgccgccacatccgagcaaaggtggaggcgtctgcctccacacacctcgccctcgccaccgccgtccctagagaagacacgacggtgcagagaagacacggcggtgcagagaagacacggaggtgcagagaagacacggaggacgacaactgacaccacacccctgcctaagcagtggagagttatatcaattctttcttaa

SEQ ID NO: 12241 - DNA, 519 bp, Zea mays
  Peptide Sequence Number=SeqID_54020
atgccgccttccgcatcgatgccggcgacgcacacggccgtgtacgtggcggcggtgcccctgcgggcgcccaagggccccgcccagctgctgatgtcggcgggctactcgctgggcatgtgggacctgcagcacttcatggtgctcctccgtcccgacccggcgctggcccaggcgctggtcttcgatttccagccgcgggacccggaggacgtcctcgccgcgctcgcggtgctgtcgcggagagagatccctgaagaacgctgcggagggtcccggacgggcggtgctggctcgtggggcactgctgcgacgccgtcggtgccgccacaaggttcagcgagcggtggacgaccggcctggtggtcggggagcacgactgccgggactacaccaacgatggatgatctaaactgtacggactacggtcatatatcggattctataaactggagacccaacacgcaatgcagaaatttcatggaaacgaggagacgttttgaaagggaaaaaaaatga

SEQ ID NO: 12242 - DNA, 294 bp, Zea mays
  Peptide Sequence Number=SeqID_54021
atggatggtacattacagcctgctgttggagctgacggaaggcaagtggaggctcaaggcaatgttcttcttgcatcaattgagaatatgcaatatgctgttactgtagatgttcttcatactgtgttctcatcatttggttcagtccaaaaaattgctatttttgagaagaatggggggacacaagctttgattcagtaccctgcttttgtggttgatgaagggaggagattgtgggaggctgctggtgccaagggattatcctccctggcagcccctcttcctgatacgtga

SEQ ID NO: 12243 - DNA, 579 bp, Zea mays
  Peptide Sequence Number=SeqID_54022
atggtgtttggggaagccgtcgacagcacccaacatgctccgcctacagccatcaccaacctggcacaagttgctgcttacccttctagtcttaaggttagcagcatcccgaacaaagcaaaaagggtgtggggccaacaacggctacaacaacatcagccttgtcgcgacagaagcagcccgtcgaccgtgggaaattctcatagggacattccacgtgctctgaaagggctcaactccggcgccaagacccaactcgtttggcacaagttccattgtgttctaggtagcagccagcgacttccatcaagccctgcctttggctatcaccaaggcaaaaagggacgctacttacccttcaagtcagatgcacaacagagctcaggaggtttaggtcagccttgtaccttccatctgttaagttacatcgttcagaagactgagtacaatgaaagtaaaggccttaagggaacagtgctggtcccggaccacgtcctggatggtctttggccttatgaaggcctcaaacctctaaagctgctaaagcttcaggaagaagggaaaagagaaggatgttga

SEQ ID NO: 12244 - DNA, 813 bp, Zea mays
  Peptide Sequence Number=SeqID_54023
atggacatgggcagcaacagccatacgcccatacctacaggctacagtacaacagagcacaccaaaaaacagggacatgctctggatttggattctggagactggagaccgtacctgcaggctggctgcctgcgccgccacgccggggatggaggaggggccgagggggacgatgccgccgtatcccccgtcaccggtagcgcgccgccgtcacctgcacagtgttccgctagggttcctccctcggcagctggttacctggttcgccgtcacctgcacagtgtgcctgagcgttgctctgttggctcttggttgtgcagcttctgctcacgtggtgggaacggggggaaaggaagctgggctgggccgctgggcaagagaaatcagagaagggagaagaagaagaacacgctgttcttgacaaagaacagcaagatcgatctacacatcaacagcaagcgcttcaatcagtgcatgagatccctgaacgccgtgtgcaagtgcaaaatggtcgtctgcatccgctcccatggacgtcgatttggaggcaccgccgccgcttccgcccactgcagaggcagttactcgtcgttcttcatctccaccggcggcttggccccggcggctggcaccagcgctccccaacggcagggagccttgacggcgctccctggtggccagatccgccggcatggccaccatgcgagggctggcgcttggcatagcaggcgcggctcggcgttcagcgatggcgcgcccggcacaaggagcaggcagaccggtcggccgctcccttctggcgcctcctcctag

SEQ ID NO: 12245 - DNA, 279 bp, Zea mays
  Peptide Sequence Number=SeqID_54024
atgtcatcccctgctcaaccctaccttaccagctcgctccagacttcaatcgaaagtcgtcgtcgttctgcgcgtcagcaagaaattccaagaatcggattaggtatgatattttatgtgttggttgatctcatgcttggaatggatgttgattgctacctcgactgtttagctaggttgacgataaataatcgtgtgatgcggaagaaaaaccaagtcgaccccaagcgcgggctaatctgcaagctgaagctgatgaatcaaactgaagatggttaa

SEQ ID NO: 12246 - DNA, 1656 bp, Zea mays
  Peptide Sequence Number=SeqID_54025
tgggatttggtgggagctgcgctgcagctgcttgccccctcgcgtttctttgctcaattgggggggtcacagcccgcgggtgtcgcgcgtgctcgtgggcggaattcggtgttcttgcttgcgcggtcctcgtccccgtccccttggcgcgattgcggttgcggacgctcgctgcagatcttcgcgcgactccgggagcgccggagatggactgcgggccgcccgaccagctgccgccgtcgtcggcgccggcgtgcttcctcaacctcaactgggaccagtccatggccgccgccacggctggcgaccacctcgacctggtctcctccccggcgtccaactcgacggcggctgacggcctcgctctccacgggatctcgccgcagccgcagtacggaggcactccgctcagctcgccccgcaagctgaacctctccatgatgggccagttccaccactacccgccgatgggccatctagaccagttcctcgccgacccaggcttcgccgcgcgcgcggcgaggctctccggcttcgacggccgccccggtgggagtggctacggcggcgccgtcccgggacagtttggcctccccgacgccggccccatcggcggcgcattgagggagctggagctcgggaacggccgggacgagtcatcggtgtccgatccggcgtccgccagcgccgagatggcgctcaaggcgccttccgatggcaatgcgaagaaacggaaggctagcgggaaggggaaaggcaaggacggccccgggtccaccgccgccaccaaggtacgcgcacaattgcgttgctctggttccccaattcccccaccccacgcggccacgcggttcaggtccggggcaaaaaggtttcactccgggcgcgttccgcaggaggagtccagtgggaaacggtgcaaatcggcggaggagagcaatggcgcggaggagaactccggcaagggtaaggccgccgcgcagagcaacagcgacaacggtgggaagaagcaggggaaggacggcgcgtccaagcctccggagccgcccaaggactacatccacgtccgggcgaggcgcggcgaggcgacagacagccacagcctcgctgagagggtgagaagggagaagatcagccagcggatgaagcttctgcaggatctcgtcccgggctgcaacaaggtggtcggcaaggcggtgatgctggatgaaatcataaactacgtgcagtccttgcaacggcaagtcgagttcctgtccatgaaactggccaccgtgaatccccagctggacttcaacaacctgcctaacctccttcctaaagatatgcaccagtcctgcggcccgctgcagaactcgcatttcccgctggagacctcaggcgcgccgctgccatacctcaaccaggggaaccctctaataggctgcggcctacccaacggcatggacaacagccagagctccatgcacccgctcgacccggcgttttgccggccgatgagctcgcagcagcaccctttcctcaacggtgtcagcgacgcagcgtccaaggtcgggactttctggcaagatgaccttcagagcgtagtccacatggatatggggcagcagagccagcaggagatggctcccacctcctccaacagctacaacgacg

SEQ ID NO: 12247 - DNA, 1026 bp, Zea mays
  Peptide Sequence Number=SeqID_54026
atggccgtgtacatccgcctcgacgacgccgtgcgcgcgcgcctccacggggacgccgccgcggggtgcaccagcagcggcagcgaccacgacgcgtccgcctgcctctccgggctcgtccaggcgttcctcgagacgggcgccagcgcggccgaggcaggcgggccgggcccagcccccaaggagtgcgactccaacaagaaggacgggcccgggcgggcggccgccgccgtggcgtccgtgagggccctgctcgacccgccggccgaggaggacgtgttccggatcaggctggccgcagcggtggcggccgccgcggaggccgaggcggcactccgggcgcacggggcggcgttccggcgcgccgtggcgtggaggctgcgcggcgccgggtacgacgccggcgtgtgccggtcgcggtgggaggcgtccggcggcatcacggccggggcgtacgagtacgtggacgtggtcgcgcccgcgcccgtcggcccgggcgcgcggcagcgggccaggtacattgtggacgccgacttcccccgcggggctggaggtggcccgcgccacgcccgagcaccggtaggaaataacaggcatggacgaagccatgccgtgcgttcgctggaatcgaccacggacccgtggctatccgacgaacgatgcagagacaacaacagggtagagcactgttgcgtggcatggtccgtggctggaagcttaggaggagtggggttcgctcaatggattggggtcgagaaaggcggcgcaaagttattattgccagtgtggtccagtgttagatggataaaacgaataatgcggtggcgaggcgacgagacgagacggatcgcaaccgtcgacgcatgccgcggggtggaggggccatgcggggctcagtccccgctccactccaaggccggcgtccggcagcttggcgaggcttcggcacggcgcctacgcggctgcggctgcgtctgcgtctccgtggggacgatgaagtggagccgccagccgcgcctgttgtaa

SEQ ID NO: 12248 - DNA, 315 bp, Zea mays
  Peptide Sequence Number=SeqID_54027
atggagttggtgctctatacaagggtcttgtgccaaactcagtcaagaacgaaagagaaggttcctatcggcggcaccagctccagcacgggcgcacggctagtagcgacgccgcgcgggcgcccccacggcaacgccaagggccaggcaggctcgtgcgggctccctcttccggtcttccctatcggcggcacctggctcgcgctgacctggcccaatcgcgcccgcctcgcccaggcccgcgtgacagaggataaaggccgggatgccgccgcatatccgcagaccccgccacgcaacgcagacacgcagtag

SEQ ID NO: 12249 - DNA, 339 bp, Zea mays
  Peptide Sequence Number=SeqID_54028
atgcctgcctacgcagtgcagcctgctgccgcgctccgctggtcggccgtgaaaggacccgtcagggggctgagggaagacaccgctcctgcgcccaggtcacggaccgtccggcccaaggccgcggaccgtccgcgcctgaccagagggcaccgccgccggttcttgttgagtgattggcgcccaaaaaaggtgccaacatactttttggcgactctgctggggaccgaggttgcagatctacaaaatcaggcttacatggccgatcctaaagatctcaacagtgcttctccaaacagcgacacaaggctgactaatttatcgggccgcagagcatga

SEQ ID NO: 12250 - DNA, 219 bp, Zea mays
  Peptide Sequence Number=SeqID_54029
atggacctcgatcgcacgctcttcctcctccgctcctacctcctcctggagaaggcattttggagggctgtaacaactgggatgacaaagtctctggcctcctcatctcgtgttgatgatgtagagagtccagttcttgaaagggtgggaatgtgtccaagaagacaaaggcatcgacccgccaactcttcgctacaaattcaaacagcactagggtga

SEQ ID NO: 12251 - DNA, 891 bp, Zea mays
  Peptide Sequence Number=SeqID_54030
atggccgtcggcacggtggcctgcgcttccgtgtggactgtcgtcgtcgtcggagaagagcctaccaagcagggcgacgtctccctgggtggggaggagaaccccgacgccgaggtcgtggagctgcaagccaatacggcgctcgtgttcatcgtcacgtcctcgctcgtccttctcttcctcttcttcttcaactccaactggtccgcctggctcctggtttgcctcttctgcctcgggagtctccagggtatggaattcgtggtatcttctctcgttgtcagactatgccagcggtgtcgcgaggccaaagtgaagcttcctgctctaggaaacgtgaaggtggtcacgctagtggtcctgccgctggccttcatcttcgccgtcacctgggctgcacaccaggactcgccggttgcttgggttggtcagaacctcatggttgcgtcggcgctccttgtctcggcctttttctacgacattttctgggtcttcatatcacccctcatattcaagaaaagcgtcatgatcacagttgctcgtggcagcgatgacgggccgagcctccccatggtactgaagatgccgaaggagttcgattcgtggaatgggtacgacatgattgggttcggggacattctcttccccggactgcttgttgctttcagtttcagatatgacagaacacacggcaaggacttgacagatggatacttcctctgcttaatgattggttatgccttcggattgtcatgcacatacgttggcttgtacctgatgaacagcgggcagccagctctgctctaccttgttccttcaacactaggagttatcgtcctgcttggagcgaggaggggggagctcggtcagctctggaacgccaaggtgtag

SEQ ID NO: 12252 - DNA, 342 bp, Zea mays
  Peptide Sequence Number=SeqID_54031
atgggttacttaataagtagaatttctgggctcctaataaagtgccaagttcattccgacattaaagtagcccctacatcagacgtgaaggacgatagcaaatctgaaactaggaggatcaagatgctctatgacggtgattgccctctctgtatgcgtgaggtaaacatgctgagggaaagaaacaaatcatatggggcaataaagtttgttgacataagctctaaagattactctccagatgacaatcaaggccttgattatgaaactgtcatggggaagatacatgccattctttcagatggaactgttatcacagatgttgaggaaatgaccaattga

SEQ ID NO: 12253 - DNA, 111 bp, Zea mays
  Peptide Sequence Number=SeqID_54032
atgggtgcatggaaagaacaacacgatgagtgtgccgctaaggtaatgaagggtcatagggtccttgattaccttgttttggtgaatacctatgaggagtgggatcattga

SEQ ID NO: 12254 - DNA, 684 bp, Zea mays
  Peptide Sequence Number=SeqID_54033
atggctgatggagctttatggcttctagctgttatgtttcaggccgggcacttgaagatgctcgatggctacattgatttcttcatggaccccagcctgtctgaatgctacctgcaacttaaagaagaactcgataaacttatacagcagaagcttgaagacccaaacttcgacatccacaaggaaggcaagtacatcctattcgccgtacaagagctcgccgccggcgacctgtgcgaagggaggttcgtgttcggccgcgagacgagccgggccaggctccggagccccgaggacgacggcaagagcaacctcataaaggacgggatgaaccccaagagcctgctgcatacgctgctgatgcgggccggccacaccccgcccaggtacaagacgaagcacctcaagacgaacgagttcagggccgtggtggagttcaaggggatgcagttcgtggggaagccgcacccccaccaccagctcgcggagcgggacgccgccatcgaggcgctggggtggctgacgcagacctccggcgtgaatgccatcgaggcgctggagcgggacgccacggatcagggcatactcgtgtgcgaggagggcgtggatttcgtggagcgctctgcttttctagggcacgcgcggatcgcggagagggggaggcggggaacgaattcaagctga

SEQ ID NO: 12255 - DNA, 165 bp, Zea mays
  Peptide Sequence Number=SeqID_54034
atgccggtgggtgcagtagatgctttgggatgcatggcggagctgggggtacggtcaattatagcgagggtaagcggcggtggtgaaattgaccgagcagtactggcggccggagatagggaaagaatccctggcgcggtccaaatctctgcagcaataatgtag

SEQ ID NO: 12256 - DNA, 600 bp, Zea mays
  Peptide Sequence Number=SeqID_54035
atggtgaagggacgcacgggacagcgcgtcaggctctacgtccggggcaccatcctcggatacaagaggtccaagtcgaaccagtacgagaccacgtcgctcattcagatcgagggggtgaacaccaaggaggacgtcgcgtggtacgctggcaagcgcatggcgtacatctacaaggctaagaccaagagcagcgagacccgctacaggtgcatctggggcaaggtcacccgcccgcacggcaactcgggcgtcgtccgcgccaagttcaagtccaacctcccgcctgagtccatggggcgcaaggtcagagtgttcatgattaggaggcacattgagtctgtagcagcaaatagtccctattcagctgagaatcatggtagtttggctattgtggtttgttgtgctcatgttgatactggcctgaattcggtttttgttggagtaaaggtggactctaaatggccatgcttagttcttctctctgagcttaaaatgccatgtgttggcaacttagattgttcatgtactgaacctgttgaagttctaccaaaatttgttgtcgaacggctgaacagttgtcctaatgttatgctataa

SEQ ID NO: 12257 - DNA, 165 bp, Zea mays
  Peptide Sequence Number=SeqID_54036
atgacagatccagagaagctctttgtgctctacagttatgctcacatcaacagaaaagttgatgtcgtggagaaagcttggatggcaatgtctgcgagcatctcttctgatatgggtgttcccgttgataggaacgagttccaggccgcagcccagatcgagtag

SEQ ID NO: 12258 - DNA, 336 bp, Zea mays
  Peptide Sequence Number=SeqID_54037
atggaggaactttcgcgtgagaaggaccacctctgggctctcgatgctgagcactccggtctatccgtggccattgacctcgtgtgcgatcatctcaggattcctcggtcgggggaatcatccgccaagacctcccggatgacgctcgtcgctagctgcatccgtgactggacgctgtcgtgttccggctcgagcgaggatgaaagtaggattgccccgcccgacgtccttcctcgaggttcgatcacgggggtctctggttacgttgtcctaagccaccttcccgtcaagggtgccctaggagggaaggagcgacgtggcatcacgtttcgctaa

SEQ ID NO: 12259 - DNA, 345 bp, Zea mays
  Peptide Sequence Number=SeqID_54038
atggccgggaagaagcgcaaggcggaggcggcacgcctggaggagacggaccgggcgctctacggggccttccggggcgccgccaactcgctctcgcagctctacacgctcggcatgggcgcgcagaaggcctccttccacgccggcgaacgtcacgccatgccttttcctttctgggtggaagcggctgtgggcgtctcactttgtgctttgcaacttgcaaggctcagattagccttggttaggttcagagggatggaaaaactttatgaatggatcctgaggcagcacgaaaatggtttgaggctaacagttgctgatgtagcctcccatatccagacttaa

SEQ ID NO: 12260 - DNA, 803 bp, Zea mays
  Peptide Sequence Number=SeqID_54039
gcggtgtctcagcgggccgccttccttcccctgcacccctcgccggagggggcgggggctccatttttatggagaccatattgcctgagggggcatcgtccgtccctactcaagggaagttctggatcacgctgctaggccccaacgaaaaatctagcttctttctcgatcaaagggaggcattggagcttttcgccggtgatcttctggcagcgaagaatgaggccaccgaagcccacgctcgcgctgcgtcaatccaagacgcccataatgccctggttgagacgacgaggagggatgcagaaatgacaaccctcacatatcttaagagtgcgaaggcaagctctcacctccgtattctagagcgaggaagagaagtcaccgaagcccgagttgcggccttagaggagttagtcggtcgaaccaagaaggaggaaaaactcctagcctatctgcaagctataaaagggaaattcgatgtcgtcgaagggagctccgtcgaggcgcaaagccgcttggaggaactggagaaggaaatgcacctcttgtcggaaatggtgagcgccatccacgagcgcttcagggcaccttcttcattcggacctaagtcaccagtctctcgccttgagagccttgcaaactttgtgacagttgtcccaagtcattgggcccacatgaaccagtccttgccattaatggcctcagatggctatgcacatgtatcgggtctggtgcccaggctggcgcacctgacgaacaggtcgctctcgggaaaacgcaacgcctcgactaaaattcactag

SEQ ID NO: 12261 - DNA, 423 bp, Zea mays
  Peptide Sequence Number=SeqID_54040
atggcgtccctcaccaccacaacctcctcaccggccgccctcccggcggccaccaccgcccccgcggcttcgtccatatctccccacgccggatcgaagcggccgctcctcgcgggcgacgacgcgccctggcgggccaccgcggccacctccgcggggcaggggatccgacccgtcccgcgcatcaaccacgcctccgtcctccgcgtttccacgcaggaagactccgccgcctacgccctcgccatcatgaagcatccggatccgattggcgaggggctggctatggaggcgttcgcggaggcagccgggccggagtgcatcgtgcccggacagcaagcgcctctaaggcttatggggctcaagtttttagttattctatatatggtcttaaggccatttcgtgatggtctggcccgttga

SEQ ID NO: 12262 - DNA, 291 bp, Zea mays
  Peptide Sequence Number=SeqID_54041
atggcgactcgcgccggacgaccgcccactccggcgcccgctcttctgctcctcctcaccttcctgtttctgctgcggggagttcttccatcgcgagccggggacaccgtcgccgccggtcgcccgctgtccgatgcgcagagcctcgtgtccaagcgtggcaagttcaagctcggattcttccgtccagccatacctaattttttttcgtcctccgccactgggtgcaccggacagtccggtggcacaccgaatagtccggtgcgacctgacatcgcagactgtctctga

SEQ ID NO: 12263 - DNA, 162 bp, Zea mays
  Peptide Sequence Number=SeqID_54042
atggatgtgcaagcatatcttctagctgggcttccgtcggactacgaccccttggttacatctataacgaccaaggactacatctccctcgacaacgtctatgctcacctcatcacttttgaggcgtgtcaactacgacatcatgcagatcttcagctatag

SEQ ID NO: 12264 - DNA, 666 bp, Zea mays
  Peptide Sequence Number=SeqID_54043
atggctacgcagcagcagcacgcggggccggcgtccgggtcggcgtcggcgtcgagctctagctcggggctgcaccttcccgcctcgccctcggccttcggggacaccacccacaccaaggttttcgtgggcggtctcgcctgggagaccaacagcggcaggctccggcgcttctacgagcgtttcggggacatactcgaggccgtcgtcatcaccgaccgccactctggccgctccaagggatacggattcgtcggtgcctctcgatttcacttctttttcgctgttttttttttggcttcccgtgtgacattccgtgaagccgagtccgcgaggaaggcatgcgaggaccccacaccagtgatcgacggcaggcgggccaattgtaacctggcttcgttgggtcgagcccagcatcccgtgcaccctgggcggccaagttcagctgggtcctactttggtgtcccagttccaagggctttttatttaggaggttatggccaccaccgaccgtttccacttgggtattaccaaggatttccggttccccagtacagttatccttcatatgggaccgaatacatctctccacaggttgaagtgttaaaagctatcagcttttatattcttgtgctgcataagacagttacacaaacctttgcctaa

SEQ ID NO: 12265 - DNA, 543 bp, Zea mays
  Peptide Sequence Number=SeqID_54044
atggccgtctccgacgatgaaactgttgagatcgactgcaacgaggagcgacggttgtgcgggttggccggagatgacgatgaggatgacctccgggaggatgctacaacgctctttggccatagcagtgagcatcctgtccatgtcggtgatgaacaacaagtcggtggtcaggataacgaaagtggtggcactggccacctgacccgacatagagatagatgtcccaggaggcgtgagaaaacccgcatgtctcagtctcagatatcttttaatcctgatgatagtatgcgtaactgggagtactgtcctatggttgcacgtaatgaattggttcgattgcttgctaggctagaaattcctattagtttgggtgaaaatgctgcatttgaacactacattagaactgctcataatcctaaatttgtgcctgtctctaggcaaaccaccaccagagacatggttaaatacttcactgacaaaaaggctaagcttgttgagactctttcttcttctgatgtgagagcacctagaggggggtga

SEQ ID NO: 12266 - DNA, 579 bp, Zea mays
  Peptide Sequence Number=SeqID_54045
atggcatggctgtttgcggggcggcatgtctgcgtgcccgcgctgtgggcttgcaaggtggcggctgcgttccagctcgccttcgaggagcggtggctgctgcttgcagcggcgcggcctgcagtcataccagtgttgaaagctaagaaagaacgacagcggctggacctggacggtagtgcagaggccagagcccagaggcccagagtggacgccactacggatgccagagcggagggcagagagcagagttcagatctggaccggcacgcacggttgctcggcctccggccctccgctgcttctacacgcgtgtctgcttgtcgcctcatcggtgctctccctccaagagatcgacacagccggctctaccttcgttgctcgtctgctcgacctctattgagcgatggcgcggcgctagagcaactcgcggagctatggcaggctcgcggctctgttaggtcacgactcaagaaggaacgctcaagtcctgagcacgagaaggaacgcctagtgaagtggatcgacacgggatcagaccggcgcaagcccggacggcccgacgaactcgggcagtaa

SEQ ID NO: 12267 - DNA, 152 bp, Zea mays
  Peptide Sequence Number=SeqID_54046
atgaatggtggggtggttggggtatttatagccccaaccaccaaaagtggccgttggaaggctgtctgctcgatggcacccgggtctcgctgtgcacggtcggacttgtactcctcgctttcccagtatgcccgttctcgccagcctgccat

SEQ ID NO: 12268 - DNA, 225 bp, Zea mays
  Peptide Sequence Number=SeqID_54047
atgccccctcaatcctcatggttttgggatgaaaggaacaaggcccaacctgtttcctatgaaactgttgacggcggatacgtggttgtcgatgaaaagctgccaaggttcgcagttcctgacaatgactcatttcaagctgaagccgttcgtgtcgcagtgcaccagggacctcgcagcgtcgacgacatcctcggcctctctaacttcagcacagactactga

SEQ ID NO: 12269 - DNA, 1925 bp, Zea mays
  Peptide Sequence Number=SeqID_54048
atgaagggcgcgtggaggcagagcggcgtggcggccgtggccgaacacctcggccacctcggcggagcagggctcgtcgggcgagcgctgcccgtcaggctctgcctctacggcctcacgctcaccttcgccggattcgcggtcttcctctgcttcgcgccctccctcatcgtgcccccagcctcgtcgccgggcgtggcgtggttcgacgacggcctgatcgcctccgcgtcgccgtaccgcgcgcaggtctcgggcttcctctcgtccctgtttcccgccaactcctcctccacggtgcctcctggtggcgtcgcggtgagctgttcccgaggcaatggctccagcgcggttcggcgcggcgagcagttgggaagcggaggtggagctccggtcagcagcaaggaagcgccagttcccggggatgctactgcggcggtgctgagcggcgcggcgcccgatgatcgtgtgcaaggcggtgccgaagccaagcattccgccgggagtgccgctgtcgagtcgaagggtgggcctggacctggactcgcgagcggtggttctgcccagaatgtcacatcggcgaaaggaggcgtgcctgttcggatcaacggctccgacgacacgaacgcgcgttccgtggatgccggagatggcaacggggtgagagcgagtgcaaggaatactgccggctccacgcaccagttgggaagcggaactgcagctttagtcaatggtgctactgcttcattccttaatcagactgcgagtgaagttgcagcggccatggacggcaatggaagtgcagctgcagtcaacaaccagaccgtcccaattcaggctcctgcagatagcaagagccacagttcagctgcttcagatggcagcaacagtactgcagccaataagcagaatgaatcgaccgctagtcctcaggggagcactagtccggtgaaagatcgatctgcacgaggggccaccccaacagccagtaacagcggtgatgtgccggtggaagcagatgctaatgccggttggcgcatgaaggctgattggattgagaacatggcccgctgcgacatgttctacgggaattgggtccgagatgactcgtaccctctgtatcctgcgggatcatgtcctcacgtcgatgagtccttcaactgccacctcaacggccggcctgacaaagcttacgagaggctccggtggcaacctagcggatgcataatcccaagattgaactcaactgatatgttggagaggctgagggggaagaggctggtgtttgtgggtgattcgctcaacaggaacatgtgggaatccctgatttgtatcttgaggaattctgtcaaagacaagagtaaggtttttgaggtatccggcaggagccaattcagggctgagggctcctactctttcttgttccaggaatgggagatgccaatcagcaacggaaagggtacccgggaaactctcaggcttgacgtcatcgatccagcgttcccgaggaaagattactaccaagagggcaaccgcgtgtacagtgagctggacgtccacgatgcctttcggcgagctctcaacacctgggccaagtgggttgattccagtgtaaaccccaagaaaaccactgtgtttttcagaggctactcggcatcccacttcagtggaggccaatggaattcgggcggcagttgtgacaaggaaacagagccaataacggatggccagtacctcacgccgtacccagagaagatgagcattctggaggaggtgctccgtgggatgaaaacgcccgtcgtgtacctgaacataacacggatgaccgactacaggaaggaggcccacccttcggcctaccgcaagcagaagctgactgaagaggagaggcaatcgcctgagctgtaccaggactgcagccactg

SEQ ID NO: 12270 - DNA, 150 bp, Zea mays
  Peptide Sequence Number=SeqID_54049
aagacttctccccggattcaaaatgcatgttcgaggctggcgatcattctgagatgagtcgggcgatggaagttggtcagcatgcaccagaggttgaggctgctgaagcatcagatgaagatgttgaggcctacatcagcaaagccaccg

SEQ ID NO: 12271 - DNA, 225 bp, Zea mays
  Peptide Sequence Number=SeqID_54050
atggcggtctcaattgctcaccagagcaagttctccgccacgaggccaaatcgcgtcatcaccagattgccctgctgcataatcatcgggtctaggatcgccgggatgcatgtctccggtgggagcactgtcgtgaggcggggcggcggcgcctttgtgtgggggcgaatggaggagataggcgctagagcattgatcctggattggatggctccgattgggtga

SEQ ID NO: 12272 - DNA, 450 bp, Zea mays
  Peptide Sequence Number=SeqID_54051
atggccccagtggttaaaaaaaggaaccatgaaacatttaagaaactcaaaattcgcaccagtagccatcaaggtgaacacaagaaaacagagaaggaaccctggagcgtacccatgaagacgacgaacgggaacatgatcaagatcaacttccacaccagcagatcaaggaacgtgaggcttaaggatcgcaaatcttcttttattccaaggaactcaggcgaattctccccggaaaaaggacctaccgacaaagcctatccactccctacctatccaattccccaagtgaatgcaagatttagactttacaatctctccgcgtctttaaaaccggacagggagagggggggaggggaggggggaggaaagcaaaagggtgaaacaaatattgcgcagaataaagcgaaagggggaaaaggggcaaaagagccggccaaacaaggctaa

SEQ ID NO: 12273 - DNA, 141 bp, Zea mays
  Peptide Sequence Number=SeqID_54052
atggtaggaaaaggaaggggaaattcaggaattctctcaggcgtatggctatggagtgcctgtgctctgattttgttatggcaccaagaacagctgaaatatatgctgaatgtgactaggaaatgccaccaattcagctag

SEQ ID NO: 12274 - DNA, 1062 bp, Zea mays
  Peptide Sequence Number=SeqID_54053
atggccgcgctctacgccctcgtcgcggtctcgctgctgcccgttctcgtcacggcggagtgcgactgctcggacgacgacgccacgggccgcgacaaggcgggagcgctgcggctaaagatcatcgccatcttcttcatcctggcggggggcgcggccggcgcggcggtgccggcgctggggcgcaggctccccgcgctgcgcccgggcgcgggcccgttcctcgccgtcagggccttcgcgggcggcgtcatcctcgccacggggctggttcacatcctgcccgcggccttcgacgcgctgggctcgccgtgcctcgcggcggccggcgggccgtgggccaggttcccattcgccggaacggtcgccatgctcgccgcggtcgccacgctcgtggtggacacggtcgccacggggtacctgcgccggaaggccgcggcggtcggcgacgagccaccgcagctcggcggggacgaccccgaggaggcctccggcggcgggcgccacggccacgcgcacggtgtcgacgacgacgacgacgacctcgtacgccaccgcgtcgtctctcaggtgctggagctgggcgtggtggtgcactcgctgatcatcggcatgtccctgggcgcctcggatttccccagcacggtgcgcccgctcgtcccggcgttgacgttccaccagctcttcgagggcatcggcctcggcgggtgcatcgtccagcgcgatgacaaaggtttcctatctgttccaccgcaggccaaatttcgcctcaggtcaatggtggcgatggcagtcttcttctccctgacgaccccgatcggcgtggccatcggcatcgggatatcgtcggcgtacgacgagacgagccagacggcgctggtcgtgcagggcctgttcgaggccgcggccgcggggatcctggtgtacatggcgctcgtcgacatcctccgcgaggacttcatgagcgcccgggtgcagggcagcgcgcccctgcaggccgcgctgagcgcctcgctgctgctgggagctggcttgatgtccatgctcgccatctgggcatga

SEQ ID NO: 12275 - DNA, 210 bp, Zea mays
  Peptide Sequence Number=SeqID_54054
atggcggccgagggtgagacggtggcactggagttcatacccatcgctgagcgatgcctccagtacctcggcaagctcaagaaaaaggcggtcaaagaaggtgccccatttcttcttatttttgctttgacacttatcacaggaggtcaggaggattgcatgccgcttggcattatggtttatggttatgagaagcacctcaataactaa

SEQ ID NO: 12276 - DNA, 1047 bp, Zea mays
  Peptide Sequence Number=SeqID_54055
atgtccgacctgtcaaggactgttcctcaggagcagctcgtgtcccaggacctgctgcacctctcgccaacgcccgtgatcaaccttggccacctcagccttgatgattccgtgacgcgatctggcgtgatcaaccaaatcgccagagcatgccatgatctagggtacttccaggttacaaaccatgggatcagtcaatccgtcatggattgtgctgttgaagcagcttcagatttcttccaactaccaagtgaggcaaaggaacagttcgcatcacaggacctccgcaaacctgttagatatgacaccagctctaaagatagcattagcatgtcacgggcattcctaaagcattatgcccatccgcccagagactggattcagtattggccagacaaaccaccaatctacagggaatacatgggaaagtatgctgttgaagtaaggagggtggctttgcatctgatgcaggcaatactagaaggcctaggattgggcaaggaatacatgaacgagaaatttcagcaaggctcacaactactgtcagtgaactgctatcctaaagcatcacaagacgccatgactatagggctggctccacactctgattatggatttcttaccatcttgctcacaagttgccagggccttgaagttgttgaccgcagcagcaacaactggaaaacagtccagcaacttccgcatgcgttgcatgtccatgtaggagaccacatggaagtcctgagcaatggtcaaatcaaaacagttgtgcaccgtgctgttttgaatcccgaagaagcaaggatttctatagcaagcattcatggttttgagctacacgagaaggtcgcctgtgccaaggagcttgtggatgaacaaaatcccccaaaatacaaagagagcagctttactgacttcctcgaccatctcacagctaatatggacaacaagaacaggaattttcttgaaagcctcagaatgttaactggtgcgttgatatctgagaaagcagatcgagctaaggtttactgtcacatgttgaactga

SEQ ID NO: 12277 - DNA, 516 bp, Zea mays
  Peptide Sequence Number=SeqID_54056
atggagtgcctgtgctctggtgagcagttgaaggcgtcagatgagaccatgcggtcatctgattctacgatcacaaaggatttctcggccagtgggtactcttcttggaatggagagattgagcagtaccttgataatggcaacatagaggaagccgagttgtcgctccgggagggcatttgcctaaattatgagacatctgcattagttcctaagatgaaaatctcaattgctagaaaaacaggccgtgggaagactcattcacagtgggattccccaccaatgcccttgcatgctgtcagccttctcatggaggccatatatcttaaagcaagagcacttcatgatcttgggaaagataaaggcataaaagaagaaaggccatttcttgtggagatttatgcagatgacataaatccaactacaactataaaagggaagcactacatcggctctgcaagtactttagtgaaaagatttcaccatatgcatgtccatgtttatgacaaatcatag

SEQ ID NO: 12278 - DNA, 861 bp, Zea mays
  Peptide Sequence Number=SeqID_54057
atggcgggccaggtgcagcggacggcgccgtcctcgtcctcgccctcgccgcggcagctgccggtcatcaaccttggcaggctcgggaaggacccggccacgcgggcgctcgccatccaggacattaccagagcgtgccgcgagcagggctgcttccaggtggtgaaccacggcgtcagcaactccgtcatggcaggcgcattcgaggccgcctcggagttcttccagctctcgccagagcacaaggagctgtttgcatcgaccgacatcggaaggcctgtcaggaagaaaatgggggagtatgcagttgaaatacagagggtgtcaatgcagctcatggacgctatcctgcaaggtttagggttaaagccgctgtacatgcaagagaaacttgacaagggagtgcagttcctggccctgaacagctacccacagttctcacatcgaggtgacaaggtcggactggctcctcattccgactatggcttcctcacaatcctgatgcagagctccccggggctggaagtgatgccccatgaccgtgacacctggacgcccgtccccgcgatccccggggccctccatgtccatgttggggaccacctagaagtcttgagcaacggtcgtctcaagtcccttgtccaccgagccattctcaaccctgatgaagcaagaatttccattgccagcatccatggtctctccaaggatgagaaggtctgctgcgccgaggagctggtcgacgaggtgaacccagcaatgtacagggagagcagcttccaggacttcctcgacttcctaccgtcaaatatcaacaactacaagaggtttgttgagagcctcaagatcgacagagcttga

SEQ ID NO: 12279 - DNA, 378 bp, Zea mays
  Peptide Sequence Number=SeqID_54058
atggctggccacatctatagggggacgggactaccagagcggagacgccggaagggccaagacgacgcctataaaaagggcggggcggaggcgcggagcgggagcctgacccatatccaatccatccctccgggcgcggagaggaggaggaagcagagcagcgggcgcggcggacatgacgccgatgcggctggtcgtccgagcctgcaccgcaccccccatccgcgtactggtcatttttgggccttgcccaagggcccaagtcttagcaatcagcaaaggtttacatctacttttgctctgtcggccaataccgctgacagtaaggacaagctcacaagcacgactgcacgagcacaagcacaagcacatacataa

SEQ ID NO: 12280 - DNA, 255 bp, Zea mays
  Peptide Sequence Number=SeqID_54059
atgaccccgctggaactgggctccagagcggtctccgccgctcgagtggccgccgccgcgatctccgccgtgcgtagcaggagtatcttgaagacagtgatggctctggtgatcgtcgtagtcaaacaacgacgacgtgttgtggagcacgaagaggtggtgaaggaccatcatgatgctggagttgaaggtgagcgccagccaccagggccacacggtagggcagcgtctcacaacgagggcttcacgtcctag

SEQ ID NO: 12281 - DNA, 399 bp, Zea mays
  Peptide Sequence Number=SeqID_54060
atgacgctgttgaggatatacgaattcagtgggtggatgaagtgctcaaagccagaagcaattcatgttattctgtcagactactatgatctgcctttcaatgatgcccttgactggagaaagtttgcggttatacttagggagagagatgtgtatcaactgaagaatatcttgaaatctatatcacaggaggagtttatttcattgcataaatctctagttcagaaactggttatgtcaaagcctccagctgtggagaatgctgcagacgggagagctgaaaggatggagaaggtcagagatgaggcacctgatattgccaagaaagaggacaaaaagagtgatcggcatgagaaaaaggaaaggaaattgaaagataaacacaaagagaagaaatag

SEQ ID NO: 12282 - DNA, 933 bp, Zea mays
  Peptide Sequence Number=SeqID_54061
atggaggtcatgtcaccggcgccgccgcaggagttcctgctcgacagcgcggcctctgccgcatacaccccaaagcccgcgatcatgaacccgttcgcctgcaccgacgacgtggcggtgggcaaccccttcctagccacggcggtgacggcgccctcgtcgcccaacccgttcgagcaactccctcccggcgcctccgacgccggccccttcgacctcttcgagcacttcaccagcgctcccaccagcccggcacgggccgccgccatatacgcgcagttcgacagcgtcagcggcggtgccattggcaaggacgacgacgacgacgatgacgtggggttccagccccgcgtgtcttactctatgtccaagcctgcggtggtcaccaccgtgccattcgactgggaagagaagccagggaagccgaaggccgagttcgccagcgtgtccgcgactgtggtggtggaagcgggcgagacggacggcgcggacttcgacttcggcgtcctcctcgacaaggccgcgcaggcggaagaattgacgacggccgacgagctcttcaacgacggcaagatccggcctctgaagcccccgccgcgtttactcgaaggcgggagcgtggggtcctcgccacgatcggccagcgttagcaaagacccggtgttcaagtacgcgccggtgcaacagcgtgccgtgccggagaaaggccggcgatcgcagggcccgtggctgccgaaaggcgacgcctcgtccggcaagcacaagaagcagagcaagaaggcggcgccggcagagggcggcatggcgatgccaatgccaatgccgcagcggcagaacctgatgatgggttgcgtccggctgcacccgggcgttcaccggctggccaaagggttccacggccacgcggcgccaccaggccggcgccatgaatga

SEQ ID NO: 12283 - DNA, 537 bp, Zea mays
  Peptide Sequence Number=SeqID_54062
atggcgaaccgacggtggaagctggaggtggagccgttgttgaccgtcttggattggagccgagccgccgatgaggggagggcagcatgggcctgcgacgaacctatggagtgtggtagggcacaagcagggggtgaagagggtgctagcagtccggttgttgagctcatcgccacgggcaccggtgaccagccttcgagctcaaccaccaccaggcagcagcataagacaggacagagcatcatccgccgccatggattgctggggcgtgacgggcgcaaaactatgtcgccggagattgaggggcgagggtttcgggggaggggcgtaggaggggcctgggtgcgcgccggcatggcgggatgtgtggccgggacggagttgccggggggtggggaggaaggtgacggggctgcgggggaccggggagcactgatggcggagagcggaggaagccgcaggattctaggatggagcgcggagggaggcggatggagcgcgcttgaaagggaattaggcttacacctattttcctaa

SEQ ID NO: 12284 - DNA, 588 bp, Zea mays
  Peptide Sequence Number=SeqID_54063
atggcgaggttgggcacgcccgagagtagtctgaggaatgggcgccgatgtaggatcctgcaccaaattcccatcattgggaggttgttctggctacaaatttgttctcaacaactcgactctgcattctgcccaaatttcccccctgttccatccatgataagctcaaggaaagccttcattattggttggggaactccagttttttcctggaaaatgggccttgtgatgtgtgttgtatcaattattgcttctgttgattcccaactttgtgttagcctttactgctttctaccttatggcacaggtttccagtcccgcgtctccggcgagtcattgccttcgtcttccgaggatgacatggcggcagtggtatccacagtcttgctcatcaccgaggtgactacattgttgcacatgtttgttggaacgagactgccacttgtggtcgtgcttgacttctactggttcttcgtgtcatcgcggtcgctggtactcttctcacagctcctctccctcgttgccacgcaggagagggtggcggcgctggctccggcgcggtggagctgtgtcacacccgggttttag

SEQ ID NO: 12285 - DNA, 372 bp, Zea mays
  Peptide Sequence Number=SeqID_54064
atggcgaggggcatagcgcgggcgtcgtcgttcgggggccgcgccaccaccccgtggtgctcctgcaggcacgtcaccgtggatgtctgcctcggcaaactcgtcgccgctctgctcgtgctccgctccctcaccgcccccgccccccgcttccttcgcgcccacctttcccaaccgaccgcaggagtggtggaactatggcgtgttgagaagttaaaaggcatcaaagttgcatctacttggaatcaatcaaatttggacctatctagtgaggaaatcaaagaagagatagtagcaggtccacccttgtcccgacaatgtaatgctgagctccatacagattatgatggtgccgctgttagatgggattaa

SEQ ID NO: 12286 - DNA, 438 bp, Zea mays
  Peptide Sequence Number=SeqID_54065
atggtgggagcgagtagcggccttggtccagtgcagccaaaggcggaggtcggagtccacattctttatgatttgactggatatctttcaaagttccacggagtggaggttatcatcgtggatttaactggaggttatcatcgtggatttaactggaggttatcaccgtggattgaactcttctatcgcgcaatccatgccctaaacatctcagttcttcagctccccaaatcatggagtacacaactggcagaggagaacaggcaactgaggaatcaagtatcccacatacccccagttggcaagcaatcagttgctgatgctgaaaatgttatcgctgaagatgggcaatcctctgaatcagtcatgactgcgttgcattctgggagttcacaggataatgatgatggttcggatgtctctctaaaattagggtga

SEQ ID NO: 12287 - DNA, 897 bp, Zea mays
  Peptide Sequence Number=SeqID_54066
atggcgtcggcgtcggtgtcggccccggtggcaggggcaggggccgggggcgggaaggacgaggagctcgccgatctggtgcggcgcctcatggacgccctcgctcgctacgctgatcgcctgcccttcgaccttgatcgccagaaacttcgttcacttactacacttgctgcgatctcgatcacacttctgtttgcctggaaaatgttgagagctcctcaagagcaacctcggaggcctcgtaggagagctgccccatcatctagcaacaccagcactagatcgcgaccaggtgctttaaccgtagcagatgcttgttcatcagcagattcaagagcacacgaagcagtcaaccagcttttccagccactgactcttgagcagcttgtcaggcataagctaagcgaagggcgaaggttcacatgccgcttgcttggtgtgattttagaagaaacagctccagaggagcttcagaaccatgtcacagtgaagccttccgtggtggaggttctccttgagattgcaaaattctgtgatgtgtatttgatggagcgcattcttgatgatgagagtgaggcaagtgctgagtaccaacatatttcttcttcttttgtaggaaaggttttatcggccctgagtgaagctgggctttttggtggtggtggcttgataaaagataaggttctcttctgtagcacggagaatggccgtacatcttttgttcggcaactcgagcctgattggcatatcgacacaagtcctgaagttgttcaccaattagctaggtttatcaaatatcaactgcacatctccccgcagcgacctgaaagaatagcaaccaatgttttcaccgctccaagcttggaacagtattttggaggcctagaccagagataa

SEQ ID NO: 12288 - DNA, 1944 bp, Zea mays
  Peptide Sequence Number=SeqID_54067
atgcccccacatgacaattttgtagcacacaagcacccacgacttctgcagtctctttgctggttcaaagccattgtaaaacaccaaaaattccccagggctgctgtggtgccagtgaagctccacctcttgcagaaggtccctgatgtccagttctcaagagcatgggccaccgttctcgatgacctagcccttgtcccaacattcgcaactacagcaggggcaagatccttgatactggacccatccaaccacctatctgtccaaaatagagtattagacccatcaccaaccaagattttaaaagatgaaaagaaaatgccaaaagatgttgagaagactgaggtttctcctgaagaagagaagacatcttctaacaaaaccatggatatcgcagagacaactacacaagttgcaacaactctgcatgctgacttgatggcaaagggtaaaagccgtcgtaaactaggcattcaaaaatcactaactcaagaatgtaaacctgccgagggtgctggcgattctggaagtgataaattgtcttactcactaagtaatattattgatctcaaggacaaactctctcattgcttatcatcacgtttgctccgtagatggtgcatgtttgagtggttctatagtgcaattgattacccgtggtttgcaaagagtgaatttgttgagtatttgaaccatgtcaagctaggtcatgttccaagactgactcatgtcgagtggggtgtcatacgaagttctcttggaaagccccgtcgattgtcgaagcagtttttgcacgaggagagagagaagcttgcgcagtatcgtgattcagtcaggcagcattatactgaacttctatctggcgttagagaaggtctaccaaccgatcttgcgcgacctctagcagttgggcagcgtgttatagcctgccatcctagaacaagggaacttcatgatgggaatgttcttactgtcgatcataatcagtgccgggttcagtttgatcgacctgaactgggtgttgagcttgtgaaggatatcgactgcatgcccctacatcctctggaaaattttcctgaatctctcagacatcaaagtgccatcaatggatactacagccacttatcggaagcaaaatatgaggatcagatgaaagagttggctagcggaggtgcagcaagatccacatcgaatttgaatggtaccgatgcaaccttctataccccttctggtcatccgatgagtaccttaatgaagcaagcaaaggccaacacggcagttaatgaggttgcagttgcgacacaacagtcaatgtacaatcaaccatgcacactttcgcagatacaggaaagagaagctgatataagagctcttgcaaaactatcaaagaatgcagcagattattttataattcttcccctaatcctgctcctactccttaatcttgaaatccaccatgcctatcttgctcttcagctccgagaaccaaaggcgcccaagtggcttggtgaggatatccacgagctgtcggatggtctcgacgaactcgaggacaagtccttcatcgacacactcacaaagaaagtgatacttgatgttgatgtgcttgctccgattgtggaggacagtgttctttgcaagggcaatggagggctgattgttcaccatcggagtcggtcgacgagctttttcctgagcttgcccagtagccggcacaaccttactcattggcacacctctatgggcgttgtgatgtactctgtttcgcacgtcgacagtgccaccatctgcttctgcgattaccacgtgacaggggacgatctgaggaagacgagcacaccaaaggtgctcttctgcccatcaatgttgcccaccatgtccacgttgttaaggcctttcatccacaactctgctccgctagtcttgggtaagactaagccttga

SEQ ID NO: 12289 - DNA, 396 bp, Zea mays
  Peptide Sequence Number=SeqID_54068
atggctgctatcatcgttggctctagaactgaagaaacggcaaggtatacatctccatataggaataggattggcgccgcctgttctttgtccgtgaggcgggagatagatactacgcatgtgccagtgaacaaatggaaagaagctactgaggcggcaggaattagggttcgagaggttctgagagggagaaatgatgatcccggcgaggcacatgccgccgatgatcgtccggaacagcgccgcggcgtatgggtcctcgtcggcgctttcgctcggccaggtcttggtctggtcagtactaggattagagaagtactacaacagaagggccatgtctgcaatatgtatgtactgatcctgcaaggattagctagctttttccttgggaactga

SEQ ID NO: 12290 - DNA, 546 bp, Zea mays
  Peptide Sequence Number=SeqID_54069
atgaccacgatattgtcgctggtctcctctcgaacctacaagatcgtggattacgtcgaagcagatacagctcatctatctgcacctggtcttggggtggaatttgggtcaacacatgaccatgttattggcgacctaccaccagagtttgaaaatatcatgatattcagtggtgctgaaaccgagagtgacattgctcctccagtgctcgaggaaaacaaggatgatgttgtatctgcaacaaaaactgcaaagtccctggatgggtctgccttaaaaacaggacaggaggaggagggtcctgaagaggctgatgctactgaaaaagcaatggaagcggttgacaatgttgtgaagtccctggatccagaggtagaatcaaaggagatgcagaagcagcaaccgcaggattataatagcataagcctcaggaagcttaaagccacgcacaagaaatatatcattactgcaaaggaagaggaggtcaccgaagggaagaggcttcctcttgaggaggtggatgagaacgcctgcatcggccactga

SEQ ID NO: 12291 - DNA, 513 bp, Zea mays
  Peptide Sequence Number=SeqID_54070
atgccgcaagacgacatcgcaacgacggatgatccgcaagcggcggtctctggcggcggcggcagcttctcttcttccttcgattcctttggcgacgccgacgcctcctcctttatcacgtctcagctcatgtgcggcggcgacgacgacgagtccctacaggacaccgcctgctcttctgcagctggccaaaaggttagcaagagatcatcctcttattttatttcaaacagcacagcagacagcacgatggctaccatggagagtttcggcttgaagcaaatggcagccatggatggcgcgaaagagtccaacatgccccaccacctgcagctcatggccaagtacgtggaagctgtgggttcaaaacagcaggtgactggcgtgggggatcaacaagccatcaacagttcaagtaatagcgagaaggcgctgctgtgtgagagcaatgagctgaggaagagagggctttgcttggtccctatctctatgttgatagactatctcggatga

SEQ ID NO: 12292 - DNA, 333 bp, Zea mays
  Peptide Sequence Number=SeqID_54071
atggcggtgatgctgcccaactttaccggtggcggcgcttcttctcgatttcctgcgtgcttggtggctcatgttgcgtggctcacggaattgggtgagcagaagggcaatgggctcggtcctttatatacccgacactgcaggtcgaaggtcgacagatgctcctcgatttccccggcgaagtcagcattgattgttgggcagcggcggtgtctgcatggagtaagggggaggggtagagcgccgacactccaggcccacagccagcgaggcgcgcacgcagcagggccaatggccgagtcgctgaccaagcggccccaccagtcggcgtaa

SEQ ID NO: 12293 - DNA, 2319 bp, Zea mays
  Peptide Sequence Number=SeqID_54072
atgtcccccaacactgcagatgattctcctctcatcgatgtctcccccaagttgttgtccatgtacctggtaaccctccaggagcaatcgtgcttaagaattgcttcattcttggctgatggagttgtacccaatcgtggtgccatattgccagagtcttcaatcaacagcctgacattttcacttaaagagtttgatctctctgttccattagatactgatgaaatcgcaaggtgcagtggaaccaagaatactaacccccaatcatcattttcgggtgcaagactgcatgtggaagacctatacttctgccagtcaccatcaactaagtgtccattgctaaaccttgacagagatccagcttgcttccttctgtgggaatatcaacctgttgatgcgagtcagatgaagtgggctacttggtcttctcacctaagtctctcacttgaaacttctagcacttcaaatggacagagagcagtcagtgattctaatttgtggaaatgtattgaactagatgatatccgatttgaggtagctatggttacagcagatggtgggcctttgttggatgtaccacctccagagggtgttgtaagaattggtgttgctttccaacagttcaagtccaacacctcagttgagcaattgttttttgtgttaggtttttatacttactttggtcaagtagcagaacgtatctcaaaggtcagcaacgctaacaagtctgagtcagtgaagtcatcggctgacaagtcggagaataaactgccaagtgatacagctgtgagtttaactatgaataatctccagctcaatttcttagaatctttgtcagcaagtgatgtacatatgcccttggttcagtttggcggaggggatctgttcctgaaagtttctcaccgcactctaggtggtgcctttgcagtcacgactaatttgatgtggacaactgtttcggtgaactgtttagaaggagaaagtgctattgtttgtgagcatggcactgcagtgactggtgaacacagcattttagtgcatggaaatgggcaccccaagatgagagctgtcttttgggttgatcataggagcaaacaccaggttaaagaacctcagttccttgatataaacatcactcatgtaatgccttacgatatccaggatatggagtgccatagcttgaatgtatcagctaaggtatctggtgttcgtcttgggggtggaatttcttacactgagtctttactgcatcgatttggtatcctgggtcctgatggcggtccaggggaaggtctcttgaggggtttgaaggatttatcttcaggcccacttgcgaagctgtttaaatcctctcacctcactgaaaaggaaggtaaagctcttcacattcgagcttgggtttcggatattgggggagccatcactgtgcagctcttggctgagttccttcagatttgggacttggtggaagaggtggtccttaaagaggggtctgatgaaaggtccaaaattgatgatcacaattcaaagtttgatctcggggtgccagatgatcttgatgtgatggtatcagtagagaagaaaaatgctggcattcaaccttcaggaatctacatatctctggcaagagcagctggaattgaaggtttgcaggcaataaaacctcgtctgagagatcagtgcactaaaaaaggaccatcaaacaatcatgagatgggcagagattttaatagttcaagttctgttggtgaccatggagttgatgtcgaagctaccatggtcattggcgaagacgagattgagggtgccaaatggacaatggataatgtcaaattttctgtcaaagaaccaatcgaggcggttgcaacaaaagaagaactagagcaccttgtgatgctttgcagatctgaggctgatgcaatggggaggatcactgctggaattcttcgtctccttaaacttgacaaatctcttgggcaaggaactatagaacaactacgtaacctaggaagtggaggcatggacaatatcttttcacccaggaggctcagcaggcagaacagttttggtagcataggcactcctcggactccaactatgcaagccattgcagacgtcatgggttcgaaaaccacactggaagcaactatttcctcattacaaggcgagatttccgaatccaaggccaaatgtatggcactgatttctcaggcaagcagcactgaggatcaaaaccgtgccgaggacatcaggcagcttagcgaaaagctcgagagcatgcaatcgttggtgacacgattgagaactttgatcatttga

SEQ ID NO: 12294 - DNA, 2805 bp, Zea mays
  Peptide Sequence Number=SeqID_54073
atggcggcgcttgctaccggcggcggcactggcgaccactccgccatcagcaaacgggacttcctccccggcgagcagtcgtcaatcaagcgcgtgcgctttgctgatctcgtcagaggaaggggatcctctcctgcaagcattcactccccgccaccggccaaatcctgcctcagatttgggcggcaggatgttcctgcagtgaacggcgctgaccataccgctgctgctcccggggattcaattccttccactctgcccgaccaatccggttctaggtggacaactgttcattacaagcgcagactccgtccggcgggtgaagcattacctacatcaaattcaaaggtactttcaagacgcccaacaaccagcgcctctcttaaaatccctcgagcaaccagcgggctactggcaagcatgcaggataaatgctttcgttgccttgctcggggtcaccgtgcaactgagtgcagggacccggtgaaatgcttcaagtgtggtcgttcgggccataaaagctggcactgccctcagaactacaaggcgtccaagaccacaactccacaaccaccctcagtacagccacaagcacctcctccctcggatcattccaatttcccgcctcttggcaattggacgatggccttcagaagcagcaccgcaatacgcccagaggagtctttcgctgtggcgcactcttgcggcgacatggacattgagttggatcatctggcctctcatgctgtctgggcatggctggggcgagacagaccggcgatcggcatcgacgtcatcaagaaagctttctgctctagatttgctgtactgccggttgacatcacggtggccagacactacccagaagacttcttcatcaccttcgtccatcgtcaccacagagatgcagcagtggcgtgtagagattttcagcacggcaatctcgacatccgagtcaggcagtggcaactgccaatacatggtgaccacgacgacctcaagtaccatgttcgtttgtgccttgaaggaattccacttcacgcttggaatgaaagcatcgccaagcgcgtggtggcaagctcctgcgacctccactacatcgacgctgactcccttcaacgtcgcgatgcgaggacactaaacatgtgggcctggaccacagaccctcaacgcatacccaaggtaacctggttgacattgacatgcagatctgcgtcttcgcgcgatggcatggcccctgctccccgacgtggcctgacttttagggtccttgtgcacctggacctggtggaggagcagcccagttgtgatgggcgtatgcgtgctcctcgtcgcttcgattggaagtatggcatcgtggatggtgaaagttcaccacgggaccgcaacgacccacccccatcaagtcgcctcgacaaccaccgtcgagatgatgaggatggtgatgactatgacagtgaacgtcgcggtcgtaggagccgcaagggagacacctggagcgccaggtttttcaggagcctctcacgcgctcctagtgagcgatgccgctcgtcatcgcgccatggtcgccgccgcgacgtcgagcacccaggtcgtcgccgagcttgggaaggtcgctgcgatgccgcgacttcgacgcttgctgccagctcctacagggtacgaggccgcagccgcgtacgtcgcctctggagacgtgtggagcgccgttctaaatcccctacgcgcgccagtcgtttgacccgaactgccccggggagcagcgaaggcacgggtgacacccaccacccctctccacaacctccaaggatgcgtgctgacccaaatttgtgcacagaaatggtgaacaccacacaactgcaagaggcttccgcgcagcacgtcgacaataaccttggtatgcatttacctgcaaatgatttgagtgatgtgcgccctgacccatctaggaaagagaattgctacaatgattctgctggtaggtgcttgattccaatacaagatgtgttcaaatcaatttggacctcttttccaacagattctaggagtatggagaggggtgcagaaggcgtacagcagcagcaccctgatgcccgccctccatcgccgttactggatgctgcaactgatcatggtgagcgcctttctgttgacctggcagcagacaagatattgcagcgcctctctcttccaactgatcctaggagtctgaagaggggtgcagaaggcgtacagcagcagcatcctgatgcccgccctccattgccgttactggatgttgcaactgatcatggtgagcatcgttctgttgacctggcagcggacaagatattgcagcgcctttttaggacgcccgcgcgggcgattctgcccagcacgactactgcaggcatacaagagacaaggaagacagtaaccactgaagtagaagcaagcaaggcaaccccggcactgcgtcgtcgacttcatccggccagcacgaccacggtacgacgcagcgtccgactcgcaaaatctcgtcctatgcatgtaatccagcgtgcccaacgaaacctttgtagaaagctcgggctgctaaatgacgaatcaaataactttgagaccgccttacaaaaattcctaaccatgttccaggggactctgccacaggagacacttgcagccctaacgtccgccttcaacctcgaagggtcgacagagaagagcttcgaggatgctatgattgcgatgatgggggacggagttgcagacttgcaagatggcatcaggagtctgcgcgttgaggagctgcagtcagcagcatga

SEQ ID NO: 12295 - DNA, 1059 bp, Zea mays
  Peptide Sequence Number=SeqID_54074
atggtctccaggcttctcttcggactcgtcgtccttcctctctccctacaatattcctcatcggcgctatccaatccaccagaagagttcggcggcggcgggctgcaacaaccctcgccgccgccgacgtcgtcggggctgcgggtcggattctaccagtacacgtgcccgaacgcggaggccatcgttcgcgacgagatggccaagatcatctcccgagtcccgagcctcgccgggcccctgctccggatgcacttccacgactgctttgtgaatggatgcgacggttccgttcttctgaacagcaccgtgccagggctgccatccgagaaggaggcgataccgaacctcaccttgcgaggcttcggcaccgtcgaccgcgtgaaggcgaagctggagcaggcctgccctggagtggtgtcgtgtgctgacatcttggctctggtagccagggacgtcgttgtgctgaccaaagggcctcactgggatgttccaacagggcggagagacgggaggagatcggtgaagcaagatgctctggacaacctccccgcgcccttcttcgacgctggtcggaacctgtaccagttcttcatccccaagggcctcgatgccaaggaccaggttgttctgctaggagcgcacactctggggacctcccactgctcgtcgttcgcggaccggctgtacaacttcagcggcacgacggcggcggacccgtccctggacaggcgctacctcccgcggctgaagagcaagtgcggcagccccggcgacacgacgacgctggtggagatggacccgggcagcttccggacgttcgacgcgagctactaccggcgcgtcgccaggggccggtcgctgttcgcctccgaccagacgctgatgaacgaccccgcggcccgggcctacgtccagcggcaggccggcgccggcgccggcgcctaccccgccgagttcttcgccgacttcgccaagtccatggtgaagatgggcgccgtgcaggtgctcaccggcgcgcagggggaggtccggaggcactgcgccgccgtcaactag

SEQ ID NO: 12296 - DNA, 2451 bp, Zea mays
  Peptide Sequence Number=SeqID_54075
atggagcaccatataattcagcaagtcggagagcatgagggggaggaggaggaggatggcatgggaacagaagcggcattcgagggggtgcacaatcacgacactttcaggtacaagcacaagaagaggtccaaggtgtgggaggagtacaaacccatcttcctgaacgggaaggttcagtttgcagagtgcctgtactgccacagccgcatgagctgcaaggactccaatggaacgagccatctctggcggcaccagaagatctgccctggcaagagggacgtggtgtttcggcggctcaaggattcctacttcccatgtgttttggtgaatcagagtgaaccggttacaccaggtgattcggtgaatcagattatttcagagacacttgacgacataagttcagtaattcccaatagattcaaatccaaggtgtggagagagttttcacctatctatgttgagggtaagctccaggctgctgactgcgtgcattgccgcaaacgcctcagtgcaaataagtttgggggaagaagccatctgagtcgacatctgcagacctgtcaggcacgaaggggctacaataatcagaagggaacgctttacccttctagtgttcctgatttgaagtccattgggcaagatgagctctcacctgccttggcaaatgggaaggttcacatagcaggatactccagcaaacatctctggtctagtagctctgctgacacttcccctattgtccggcccattcaagtgtcggcgcatcaacctctgccatcacaagattttccaagcctggggaaacagagaacctcatttacaaccacaactagtgacataaggaaggttgaccaaggaacagcttatcaagaactagccaggatgatagtttcgcatggttatcctttatcaattgtagagcatgaagaaatgagaagatttgtaaagagcctcaaccctatgattcatgcagatgcagtctcacacaatgatatagaaggacattgctgtgctctatttgagaaggaaaaggcaaaacttaaagatcaattgaccctttcctcccggcgtgtctctttgtcagcaagcatatggactcctgagggagccgaaccaacagtaaattacctttgtttgacagcacattttattgataaaaactggaaagttcaccgaatgataatcaagtttggcatgtttcggtcctcacctactgatgtggaaaggatggtacatcataaggaggcttgtgtaccagagtctgaatgtggagcatataatgtcatatgggatgccattagagattggaatcttgatcagaagattttgagcttgacttctgttggtgaggttaggaatgctttaagttcctcaaagctgaaggaaatacttgtggagaaaaaatgccttcctatcagaggcaagctatatgatgttgcttgtgttgatgatgtccttaacactattgcttccaaagtgcagcaaaatatcattcaccttgtcggtgacatggtaacagagttttttgttgcacatacatcttcatcgttgaatcaacaacagcttatggaagtcatttcacagatgagtctgaagtgtccacaagaagatgctaagtggtggtacaaattttattttcggcttgaagtttttttgcatttcaataagccatttccttttgaagaagcagcatctccagagcatgtcatagttgctgagtctatttgcaagattttgaggacgttttatcgtgttattgaagtcatttctgcctctagttctccgacagcaaacatgtacttcaatgagatatggaaagtgagaacagtcttgcaagaagaagcatcaagtgagcatgcagaaatcactgcgatggtcgcagagatgcaggaaacattcaatgagtactggcaacattcatacttatggttatgcatacctgttatcctagaccctagattcaagttcggtttcattgagttccgtctgaaacgagcttttggattaaaatcagcaagctacttatctggcatacgtgaaacactccaggaactcttcaatgaatactgcagtccagtggatcagccgaatgtgcgtgtgccaaaaagcgaatcttttagtctagatgacaacgactcatttgaagattgggaccagcacctcaatgagcaagcgagcagtcagaaatccacggaactcgataactaccttgcggacggtttggttccaaggaaggatgacttcgataacctgaactggtggatgtgtcacgccacaaagtacccgacactggcggctatcgtgcaggacatcctggcgatgccagcatctgctgttccatcagaagcagcgttcacaagcagtggaccagtaattccaaagcaccacagcatgctaagcatcaagaccattgaggcacttgtttgcactcgagattggatgagataa

SEQ ID NO: 12297 - DNA, 1011 bp, Zea mays
  Peptide Sequence Number=SeqID_54076
atggagtccatcatagcgcgggcgctggagtacacgctcaagtactggctcaagtccttctcccgcgaccagttcaagctccagggccgcaccgcgcagctctccaacctcgatatcaatggcgatgcgctgcacgcgagcctggggctgcctcccgcgctcgccgtcgacacagcgcgtgtcgggaagctccagatcacgttaccatctctatcaaatgtgcaagtagagccaattgaggtgaacattgacaagctcgatctcgtgcttgtagagaaggacgattctgaaaatctttccagccctagcagcactgcatcatctccatcagcaactaagagcagtggatatggttacgctgacaagattgcagacggaatgacagtgcaagtagggattgttaacctgctactggaaacacatggaggggctcaccgtcaaggggatgcaacatggtcaccgccactagcagcaatcacattccgtgatcttgtattgtacacaacaaatgaaaaatggcaggtagtaaacttgaaagaagcaagagatttctccaacaacaaagggttcatttatgtttttaagaaactggagtggcaatcactgtcagttgatctgttgcctcatcctgatatgttcgccgatgcaagatttaactcttctagtagtcaagacgacaaaagagatgatgatggtgcaaaacgaatgttttttggtggtgaaagatttttggaaggaatatctggagaggctaacatcacggtccagcggacagaacagaataatccacttgggcttgaggttcagctacatattacagaagctgtctgtcctgccttaagtgaacctggcttacgggcctttcttcgatttatgactggggtatctgtgtgcctaaacaggggagatatagatccaaaagctcaacaggtttacttctgtgtgcttttgatattgtgttgcctgcacttgcagaagcagcaggatcttcattggtgtccattatcgtag

SEQ ID NO: 12298 - DNA, 159 bp, Zea mays
  Peptide Sequence Number=SeqID_54077
atggcgctggcttggctcgggcgcggcgctgggcatgcgggggcgcgcgtgagcgtgctctggcgcgggcaggaagcgccgaacacgtggaggtgggggtggggttttggggttacgtaccactcctttgggcagaaagtcggggaagcgagagcgtag

SEQ ID NO: 12299 - DNA, 1998 bp, Zea mays
  Peptide Sequence Number=SeqID_54078
atggcagatgccctcttggtcgttctcagaaaagttgctctgtccttggcagaaggagcactagaaaagattggcaaagaggtggtcgaagcagcacccctcatgacagattttgagcatagcatgaaacaaattgagggtgaactctcggttctgcaagccttcattaaccaagttagtgcacagagagtcagtgacaaggcatttgatgcatggttggaccaagtcagagatgttgcccatgaggtagaagacatcattgatgagtatgcttaccttactgcacaagccgttgatacgagcagcttcttcaagagaaagttccaccagttcaagggcattgcagcatggaagaagttccctggccagatcagtcaagtagaagcaaggattcagaggctatcagaaatgaggaaccgatatggtttctcagtcagtcaactagacaggactaacaattttcagctctccattcagttttctctgtcaaattctgcctacctgatagataactctgagatagtaggaaatgctgatgaaatcggaaaactgacacaatggctacttgaggagaaacaagaccgatctctaattgccatccttggtatgggaggtttaggaaaaactgctattgcaagcaccgtctacaagaaccaaaaaatcataacatctttcgactgtcacgcatgggttattgtctctcagacttaccaagtcgaggagctactaagagaaattataaatcagctaataataaaagaaagagcaagcatggcaagtggcttcatgaccatgagtcgcatgagattagttgaggtaatacaaagctatttgagggacaaaaaatacttcgttgtcctggatgatgtatgggacaaagatgcttggttatttttgaactatgcattcgtcagaaacgaacgtggaagtaaagtgctgataacaacccggagaaaagatgtgtcttctttggcagccgacaactatgtcattgaacttaaaacccttaaagatgctgaatcttgggagctgttttgtaagaaggcatttcatgcttcagaagataacatttgtcctgaaaatataagatgttgggcaaccaaaattgttgcaaagtgccaaggattgccactagccattgtaactattggcagtattctgtcataccgtgacttaaaggaacatgagtgggcatttttcttcaaacaacttagctggcagttagccaacaatccagagctcagctggatttccagtgtcttgaagttgagcttgaatgatctaccaagttatcttaggagctgcttcctctactgcagcatctttcctgaagattataagattagaagaaagctgatttccaagctatggatagcggaaggtcttgtggaagagagaggagacggaacaacaatggaggaagttgctgagtgttacctaatggagctcactcaacgctctcttcttcaggtcacagaaaggaaagcatgtggaagagctagaacatttttgatgcatgatcttgtgagagagataacttcaaccattgctaaaaaggagaagtttagcgttgcacttgcacatggtggtgccagtacaagccaagttgcccatgaagctcgtcgcctatgcatccagagaggtgcccagaccttgaattctctcagtagctcacggctccgctcattcattttgtttgacactgaagtaccatgttcttggatacatgatactgtatcatgtttcagactactgagagtcctatgcctaagatttgtcaatgttgaacaagtgccaggtgtaatcacagaactgtataacttgcgctatctagacatgtcttacacaaaagtgaagatgataccagcatcatttggaaagctcgttaacctacaagttttggatctcagagacacctatgtggaggagttacccctgggaataactatgctaactaaattacggcagttacaggtgtatgcactgacgaatctctag

SEQ ID NO: 12300 - DNA, 1674 bp, Zea mays
  Peptide Sequence Number=SeqID_54079
atggcagatgccctatttgtagttcttagtaaacttgctgattccttgggagaacagacactagagaggattagcacaaagctgattgaagtagcaccagttttgacagattttgagcatagcatgaagcaaatcgaggctgagctattgattcttcaggcttttattgcacaggttgggacaaaagtcggtgataaggcatttgatgcctggctggaccaagtgagagatgttgcccatgaggtagaagacatcattgatgagtatgcttaccttgaggttcaagccgtggatactggcagcttctttaagaggaagttccttcagataaaaaagttcgctgcatggcagaagtttcatagccagatcagtcatgtagaagctcgaattcagaggctaggtgaaattaggaatcgatatggcatcttgtcaggtgaaatagacaggagtaagaaattgaggagccccaatcggctctttatgtcagattcttcttacttaactgataactctgaaatagtggggcatgttgatgaaattggaagattgacacagtggttacttgagtacaaacaagagcgaactcttattgccgtttttggtatgggaggttcaggaaaaactactattgcaagcagtgcatacaagagtcaaaagatcacaaggactttcaattgtcatgcatgggttactgtatctcagacttaccaagttgaagaactactaagagaaatcataaatcagctaatagatcagagagcaagcatgtcaagtgggtttatgactatgagcggcttgaggctagttgaggtaatacaaagctatttgcaagataaaaaatatttcattgtcttggatgatgtatgggataaagatgcatggctatttctaaactatgcatttgtcagaaacaattgtggaagcaaagtgctgataactactcggagaaaggacgtatctagcttggcagttgatcagtatacaattgagcttaaaactcttcaatatgctgaatcctgggaacttttctgtaaaaaggcatttcgtgcatcaaaggataaccaatgtcctgagaaccttaggttttgtgcagagaaaattgttgctaggtgtcagggattgcccctggctattgtaaccattggaagtgttctatcataccatgaattcgaagagcagggatgggaatctttctacagccaacttagctggcagttagctaacaatccggagctgaattggatatctaatgttctgaatatgagcttgaatgatctcccgagttatctgaggaactgctttctgtactgcagtctttatcctgaagattacaagattaaaagaaaagtgatttccaagctatggatagcagaaggtttagtggaagatagagaagatggaacaacaatggaggaggttgccaattattaccttgtggagctcactcagcgttgtcttcttcgagtcacagaaagtaatgcatgtggaaggccgagagcttttgttatgcatgatcttgtgcgagagttaacctccaacattgctaaaaaggagaagtttggtattgcatatggcgatgctagtacaacccaagttccccctgaagttcgccgcttatgcatacaaagaggtgcccaaaccttgaattctataggtagttcgcggtgtaagtag

SEQ ID NO: 12301 - DNA, 195 bp, Zea mays
  Peptide Sequence Number=SeqID_54080
atggcgcacagttgcgacgggatgactcgggcagaggggagtgacgggatagctcgaggcaggcgcaagggacagggtcgcaaggcgccaaggctcgctggggaggagcgcgcagtgattggccgcttgggccataggagggagaggggtgcgggtgcgcgagagagaggagggcaggcatttgtggagctgtga

SEQ ID NO: 12302 - DNA, 579 bp, Zea mays
  Peptide Sequence Number=SeqID_54081
atggaaaccgatctcgctaaggagatctcgctaaggagcctcctagcacagcccctgcctgtctccgctgagtttggcctcctcgaatcccatcttcgatcagataactcggttacgaacaagggcggactgggcggcgctcatcaacaacagcacctcgtaccttggcctcccagtgccaacatcgtgacaggcaagtggatattcaagcccgagttccactctgatgggtatcaacttccacactgggcagcggtggctggagcactagctgcttggcggcggctggagcactggggggcaatggcagcgactggagaactgtggggcaagggcaatggctggttggcggcgcactgtggggcaatggcggctggagcactgggcggcggcgcctggagcaatggcgggttggcggcggcgcactgccctgtaggtggagggaagagggaggaccggaggagggaggagggggaccggcggcgtacctggagggcggtggaggacggccgacggcggctggcgtgtggcgaactagcggcgcgatgcttacaggcggctgcctggctggatggttaa

SEQ ID NO: 12303 - DNA, 282 bp, Zea mays
  Peptide Sequence Number=SeqID_54082
atgcagatgatagccctttgtgtcgataatgtcgagatagccgtagaggaagtagctgatgccgaggacgatgcagtcaacccgccgtggacgagccgtttccagcagattggtgagagagagaggcggagcggcttcgcggtgaagatcgcacgagggaggagaggcttcgggagagggagccgaagagcgtacgacacgggggaggataggcttcgggagagggaggtggagagcacagggtggcggcgcggggcgtggaaggaggcagcagagtactag

SEQ ID NO: 12304 - DNA, 1203 bp, Zea mays
  Peptide Sequence Number=SeqID_54083
atgacttattccatcacgcggctccgctcatttattttgtttgacactgaagtaccatgctcttggatagatgatgttttatcacgtttcagactactgagggtcctatgcctaagatttgcaaatattgcagaagtgcctggcgtggtcacagaattgtataacttgcgctatattgatttttcatacacaaaagtgaagacaataccagcatcattcagaaaacttgtcaacctacaagttttggatctcagattcacctacgtagaggagttgccactggaaataactacgctaactaacttgcgtcatctacatgtgtttgcagtccatgattttcaacaaagatcattgaattgtttaggcgcaacaaaaattcctgttaacatttgtcatctaaagaatctgcaagctatacagatcgttttggccaacaaagatttggtttcacaacttgggaacttgaaattaatgagaagtttggctatagcggaagtgcggcaaagctacattgcagaattatggaagtccctgacaaagatgcctaacctgaataggttggctatttcaacatgcaacatggaggagattcttgattttaaaatgctaaagcccttatcaaatctggttttcttcaagcttgcaggaaagttggagtcaggcgtgcttcctttgatgttgtattattttgagaagttaacatggttacaattagactggtccggtctaaagaaggaccctatgagctccttatctcacatgtcgaaccttgttcatctgttcatgtgcgggtcatattgtggggaacagctaactttttgttcaggatggttccccaagctcaattatctgcaattatctaaaatggagaatctgaattggattgagatagaggatggaacaatgatgtgtctaaataatttgtacttagttgatttagggaatctaaaggctgtgccctatggcatcaagtacatcaggacactgcaccagatgcatctgacagatatgtcaaaggagtttctaggaagtctgcaaggaagcgcgagtcccgttgttcaacatatatgcaacatccatatttttgaatcctctgattctgaagcagtaaataaattcttctttgagccataccttgccaccaagttcggccctggtgcaactaagcatgcccctacttacctgggatcatctggcatctga

SEQ ID NO: 12305 - DNA, 240 bp, Zea mays
  Peptide Sequence Number=SeqID_54084
atgatcccctacccccacccgtgcctcgccaccactcctccgttgcagaaccggaacccggcggagaaccgccgcggggcttcactggcggtcgagccccggctgaaggcaagcaggagcagctccgcgcctccgcccgccgtccgctcggcccaagcatgcgccttccgcttccaggttccaccccccgagcacgcgcagcacgcgccgaggccttttgcttctttgtttgaatgttaa

SEQ ID NO: 12306 - DNA, 3051 bp, Zea mays
  Peptide Sequence Number=SeqID_54085
atgcctacccttctggtcgtcgtcgtcgtcgtcctcctcttgcctaattgcatctccgattcggcgcaggccaacgacgccgagctccgagctctcttggccatcaagaaagattggggcagcccagctgccctcaggtcatggaagaacagcagtgcctctgcttcgtccactacccactgcacctgggctggggttgcatgcagcagcagcggtcaagtgaccgccttctccttccaaaacttcaacataggccgcccaatcccggcgtccatttgtagtctcaagaacctggcgtacctagacctctcctacaacaacctctccggcgagttcccggcggcagcgctccacggctgctcggctctgcggttcctcgacctgtccaacaacatcttctccggcgtcctcccgactgacatggacaggctgtctccggggacgatggagcacctcaacctgtcaagcaacagctttagcggcagcgtgccgttggcgatcgccgggttcccgaagctcaagtcgttggtcgtcgacactaatggcttcaacgggagctacccgggcgccgccatcgccaacctgacgcggctcgagacgctaacgctggcaaataaccccttcgcgccgggccctatccccgatggctttggcaagttgacgaagctcaagttgctgtggttgtcagggatgaacctgactcatggcatccctgacacactctcgtccctctctcagctgacggtgttggctttgtcagacaatagccttcaaggtgagatcccggcgtgggtttggaagcttcagaagcttgagctgctttatctttacggcaacagattcactggtgcaatcgggccagatgtcaccgccatgaacattcaagagatcgacatttcctcgaactcgctcaccgggccgataccggagagcatcggcgatttgaggaacttgacgttgctcttcctcaacttcaacaacatcagcgggccgattccgtcgagcgtcggcttgctcccgaacctcgtggacatccggctattcagcaacagtctctctggccccctcccgccggagctcggtaaacactcgccactggccaacctggaagtgagcaacaacttcctcaccggcgagctcccggacacgctctgcttcaacaagaagctctacgatgtcgtggtgttcaacaacagtttctccggcgcgttccctgcgggctttggggagtgcaacacagtgaacaacataatggcgtacaacaaccgcttcaccggagagttcccgggggcagtatggtcggagttccccgcgctgaccaccgtcatgatacagaacaatagcttcgccggagtcctgccagcggaggtgtcatctaagatcacgaggatcgagatcggaaacaacagattctctggcgcaataccggcatctgccactggcttggaaacattcatggcggagaacaactggttctcccatgggcttccggaggacatgtccaagctcgccagcctcattcagctatctcttgccgggaaccaggtcagtggatccataccagcgtccatcagagcccttgagaggcttaactacctcaatctcagcggcaaccagataacaggagcgatcccggcagcggccattggattgctccccgtactcagcgtgcttgacctctcaaacaacaagctcgacggcgagataccagcggatttcaacgatctccatctctctcacctgaacctctcgttcaatcagctcgtcggagaagtgccaaccacgctagagagccccgtgtttgacgccgccttcttgggcaaccctggcctctgcgccagacagggctccggcatgctcctccagacatgcccccatggaggaggtcatggctccgcttccgccagaatgatcgtcgtcgtcctaatcgcgacagtttccggcgtttctgccatcggcttcgtcgctgtcgtgggatggttcgtcctccgccgcaaccgcaagagcgactcgtggaagatgataccattcgggaccctgagttttagcgagcaggacataatcagcaacatgagcgaggagaacgtgatcggcagaggcgggtcagggaaggtataccgcatccatctcggcggacacgaagcaaggggacacggcggcggggccggtcactcgacgacgacggtggccgtgaagaagatcggcaacgacgtcgacggcgcgaaccacgacaaggagttcgaggcggaggcgaggtcactgggcggtctccttcacggcaacatcgtcaggctgctctgctgcatctccagcgacgacacgaggctgctcgtctacgagtacatggagaacgggagcctggaccggtggctgcacgtgcaccgccgccgtggcggcggcaagcgcgcggccgcgtcgggccctctggactggccgacgaggctgagcatcgccatcgacgtcgcgacaggcctcagctacatgcaccacggcctcacgagccccgtcgtccaccgcgacatcaagtccagcaacatcttgctcgaccgtgggttccgagcaaagattgccgactttggcctcgctcggatccttgccaggggtggagaatcggaacacgtgtcggctgtctgcggaacgttcggttatattgcgccagagtattttagcagagtgaaggtgagcgagaaggtggacgtctacagcttcggggtggtgctgctggagctcaccacaggaagggggccacaggacggcggcacggagtccgggagctgtctagccagctgggcgtccaagcggtacaagaacggtggcccgtgcgcggacttggtcgacgctgaaatccaggacctggccaacctcgacgatatggtggccgtgttcgagctcggagtgatttgcaccggcgaagatccgtcgtcgaggccgccaatgagcgaggtcctccaccggctccggctcctccagtgttgccggaaccagatgtccattgacgacgactctgctaaagacgtgtgtggcgttctttctttggagtccatggtttaa

SEQ ID NO: 12307 - DNA, 2052 bp, Zea mays
  Peptide Sequence Number=SeqID_54086
atggcttctgaccctcccggagatggcaccagtggtgaggagacggcgccgggccctgcccccgccgtggaggcgccgcctgctcccgccgttccggccaggtcgcgctgggccgctgagatcaaggtctacacccgtaagcacccccgcaaaaaccctaaacctcctccagaatcagcggctgaccccgtttctgttccttccccggctccgaatcccctttctgaaaccttatcctcgattcgccgctccatccaccgcacggaggcggtggacgctgcggcgctgtccgatccggcagcgccggcctcggttcccacccgggcgccgtctggggaacgtggcgccgcctctggggatccctcgtctgggctgaaccgggtcggcggcggtattcctaacggccacggcgacgaccgggcggccgccgctgctgtgaaagctgagaaagcacggaaacgcaggttaaggagtgagctgcggcgctgtctggcaggagagctcgaccaggtccgcgtgctctccaggcgactgaaggaggctgccgaggccctggcgcaacaggaggcttctgagcccgtgcctttgcctttgatggtgctgccaacacagcagcaggtggtggatgctgggtatgttcagcaccagttcttggctggtgatatggcggtgcccatgcctactcagattgcagctgccgttactcctgcccgctcgctgctgcatcgcagaccactaaccgtgtcagttgttcataatgaagcctttgagaaggagaaacggacgccgaaggccaatcaattgtaccaaaattcagagttcttgcttgccaaggataggattcctccctcagattcacatgtgcgcaagaaacccaagcaccacaagaagaaacataggtccctagaatctcgtggcgcagactttgatgccgagcggcgcctgtactctcatgcgttcaagaagtcctcatcacttctgagccgcttaatgaagcacaagtttgggtgggtgttcaacaagcctgttgatccagtcacacttggtttgcatgattattttactattatcaagcacccaatggatcttggcacaataagggggcggctgagccgtgggcagtacaggaaccctaaggagtttgctgaggatgtccgtcttactttccataatgcgatgacatataatcccaagggtcaggatgtgcatttcatggcggagcagttgttaggaatctttgaggcacagtggcctgagattgaggctgaggttaactacctcgcatcatgtcctccattgccgaagaagtttcccccgccaccaattgacctgcgcttcctagagaggtcagattcaatgagacaccatgtggcattggacaccaattcaagaccgatcagtcatactcccacttatacccgaactccgtcaatgaagaaaccaagagcaaaggatccaaataagagggacatgacaatagatgagaagcgtaagcttagtgagaacctccagaatttgccgccggtgaagcttgatgctgttgtgcaagtcattaagaacaagaacttatcagttaagcaacatgatgatgagatagaggttgaaattgatagcatggatgctgagacactttgggagcttgacaggtttgtgtcgaactacaagaagaacctgagcaagcaaaagagaaaggccgagcgagcgatgcttgcccgacaagatgcagagttgcgtgcacagcaccctatacaacaaccacaaccaaccccagtcccccaagaaccttttggtgaaaaatctccaaaacaagttgtgaaaggttatccctattttctgctttatcttaaaagcacatgcacattacaaattcgctggaaggcgagcaactgccagcatctgcaccagaacaaaatggtgagaatagacagaatgcgagtagttcaagcaattcaagcagctccagcagtggctcaggatcatcttctagtggctcagacagtgatagctcctcttcagatggatctgatgctggcaattcatcttgagatatag

SEQ ID NO: 12308 - DNA, 357 bp, Zea mays
  Peptide Sequence Number=SeqID_54087
atggacaaggaaaagaagcagagaggaggtggtgcggccgcagaggaggcggagaggggcgacgcgcgatcgcggaggaggcggcccggaggcttcgcgcagtcgaggaggtgcgcgtgggagcctgcggagggacgacgcggaggcttcgcgcagtcaaggaggtgcacgtgtgagccggcggagggacgccgcggtggccggcagagccgcgtcggggccggcggagccgcgcgcttcagcggcgagagttgggagggagaggcagagggaggaagcgaggctggtcgggttggtggcggagctctgcatcggaggatatggcacaaatcacggggaggtgatggtgacggctag

SEQ ID NO: 12309 - DNA, 339 bp, Zea mays
  Peptide Sequence Number=SeqID_54088
atggagactcatgactcatggtgctgctgtgctggggtgtcctcatctactcgaaggagggcacgagacagtagtgtggctcgacggagggcacgaaacaacggtgtggctcgatggagggcactggagacaggacaacagtcgctcgacagaggacaaggcaacgacagtcactcgatagagggagcaggcagcgggatgacagggcattggatggtggctgctcgatggagggcgcagtactatggcgacacacctaaagtggtgacggctagggttaacgagtctgtccgtgtggttttggtgtggccgtgtgtggaactgggcacgagaggctga

SEQ ID NO: 12310 - DNA, 204 bp, Zea mays
  Peptide Sequence Number=SeqID_54089
atggcggtcgaccgcggatgctacatcgaccaaagccagagcctcaatgtccacatggagcaagcaaactttgggaagctgacgtctcttcacttccatgcttggtccaaggttactagggacacggctcaccatgaacaccacttgcacacgcagccggctgatgattggagctcagtaaccagaacgaagtctgtgatgtag

SEQ ID NO: 12311 - DNA, 927 bp, Zea mays
  Peptide Sequence Number=SeqID_54090
atgggctgcacacaagtcacagtgagacaactagacgagcagacgagatgccaagacgtgcggccaagcaggaaacagcgacaggcggcagccgtgcgtccgtgcgggtcggcgcctcgacgggaccaagcggcaagcagaacagcggagcgccggaccgggcggctgaagcgcggaagcgacggagcgtgccgagtccgaggctccgagtggctggagcgtcggcaggagcgactggcggccgagcgggcagctgacagccttcgggcagcgggcgacctccaggcgcttggaggcgtcgcagggtggcgagggaggccggcgtccggagcccgggaggacctcgtgcaccagcaccctaggggagccgcgccctgtgcgggcacgcctgcgtgtagacgacgagcagggcagcgctgctgcagggaggggaccgggcgcgggcggaccgtcggttggcgtggggcagcggcacaaacggccagagcgacacgatgggagcggcggctccgggagaggcgctggacggggatccgccggtcgctcgccttcttcctcaacccgccgctggactgcgtcgcctgcccgccgggcgcgctcctccaggagaacaagcaggtcggcggcccgcgcgcgttcggaggaagacgagcgcccgaggaagacgacgagcagggccaggggacgacaggccggtcgacggacggagcgctgcgcagcgcaccaaagcagccgccacccgccaggcaagaggccacagccaagcagggtctgggcgcggccccggcagccctggcggcgctcggcagtgggggaggagagagccggcggctgggagggagagacgccgtcggttgggggccggcagctgggagaggagggtgggaaaaacctaatctgataccatattggaatgtgaacccctaa

SEQ ID NO: 12312 - DNA, 204 bp, Zea mays
  Peptide Sequence Number=SeqID_54091
atggcatcggcggcggccgtggagtgggaggcggcggcgcggaaggtgctggtggcgcgcaagccctgcttcgggctacctacggcctgcccaacctgcctccccgtgctcctctacctccgcatggcgcaggttcccttcgacatccacgtcgacacctccttccccgatgccgatatacctgaaggcaagtgctgcttatga

SEQ ID NO: 12313 - DNA, 435 bp, Zea mays
  Peptide Sequence Number=SeqID_54092
atgggtcaatctcttctaataaagcaacaacacaactttagatgccttctcggaaacagcctctgtcctggtcatgagatcagatcaactgttgcagacagagtacgtcaaaggcaacgtggaagcaacctattgatgtacacaaagatccttggttatggagctttagcgaggttagtgaagacgggttattccatatctagagatgaagctgcaaaagcattgtatgctatatcatctttgatcagaaataatgtaaatggtcaagaggcattccattcagaaattgggagtgcaatgttgcaggaatggttgacatgtgacaacttcccctattttactgaacatgttggtcaacaacatattgatgttaggctatataagaaggcagtgttttttagtaacacatttggcatactttcagctaaattttag

SEQ ID NO: 12314 - DNA, 576 bp, Zea mays
  Peptide Sequence Number=SeqID_54093
atgtgctctccaatccttggtccctctgaagggatcaaaggctccacagcaaaaggacagcgccgcctacgccactccgactgcagtgccactcgacagagtgagtctgacaggcagtcaggcctcgccagaggcgccataggaaactccgctccgcccgaccccagggctcggacttgggctcggccccggaagatgacgaactccgcctcgcccgaccccagggctcggactccgccctggcctctgccgaacgatctccgcctagcccgacccaggggctcagggctcggcctcggcaacagaaggcagactcgacctcagcttcggaggagcccccacgtcgcccgacctcggacgcgggcccgtcacgtcaacagggagcgccataatcatcctacccccgagccgactcgggtcacagagaacaagaccgggggacgtcagcaaggactcgaccgccccgacagctgtccctccgccaggctccgttgctcctccgacagccacgacatcacgccagcagggtgccaagatctctccggctgccacattggcatgtacttagggcgctag

SEQ ID NO: 12315 - DNA, 165 bp, Zea mays
  Peptide Sequence Number=SeqID_54094
atggatccagacggactggtcgcttctgctaaggccgccgtcctgccgtctgagcagacgatcattgaaaatggatgccacgtgattggcacaaaggttctgctgtcctcttcctcaagaacaaaggtctgccataatgtacgatgtatagtggcagcaaagtag

SEQ ID NO: 12316 - DNA, 522 bp, Zea mays
  Peptide Sequence Number=SeqID_54095
atgaccgccatcgcagcaaaatcatcccgagggcctccctacactgaccactcccctactgcccttgcccctttcgggtaccaggatgatcttcagatgacacgtgtcctcactgctaaacgcagcaatacagacaaacatgggaaccgttggatgttaaaacgacggagagatcaaggtccacagcccatcgtctccaaatcgtgcccatacgcggcggcgccgccctgcccgcggcgcgccctcgccggaggggtgaccaatccacgcgcccatgccccgatctcacaatccgagagcatctacgcgttgccgagtgaaaagcgaacccaggagagggattcttaccgggggtcgcggcacagagagatccggccacggtggagcgggggtctggcagggttctgtcgcagcgacgaggaattccggtgccgtggtgcctccacgcgccacccgaagccccgcgcgtgttcgtggagggtttccaaggattcgaagccccacaccgtggaccggcgatga

SEQ ID NO: 12317 - DNA, 342 bp, Zea mays
  Peptide Sequence Number=SeqID_54096
atgactcgaccacggtggccacggctgaccgggctacgggcgcacggggcggccgcgctggcgtggctagccacacccgcggacggggagaaaggggagaggggcgcccgggatagctcgaccgagccctcgccatggcaagcggtcgccatgctgagcgcaatgaggggagaggaagaggggatggagagaggaaggggaggggctcactatgggcggacggagacgaacgacatgggctcgacgtggccttcggcggacggcggttttcggcgagagagagacgagagcgatggagttgggcaagaactggcgagaggtgcaggcatggggaagaggtag

SEQ ID NO: 12318 - DNA, 477 bp, Zea mays
  Peptide Sequence Number=SeqID_54097
atggctgagccaaccgaaactcatagagggcagggcaagggcacgcgggcccagggactggctcggcggcactggcctgaccgcgatcgcgcatggggaagaagttcagcggcgacgatgactcggccacggtggccacggacgaccgggctacgggcgcacggggcggccgtgatggcatggctgggccacaccctcggccgagccccagccatggcaagcgttcgccacaccgagcgcaatgaggggagaggaagaggggatggagagaggaaggggaggggctcaccatgggctaagtcaaggttgaatggaataaacgattttattgaagcgcgtgaactacaacgcgcatgggagtcacgactgtttaacgttgctgcgcaggggctattcgagggtgtgatggggttgctgctatgcgggatgccgattgcgagggccactagccgctcctatcgtggtgagtgcctgtag

SEQ ID NO: 12319 - DNA, 1956 bp, Zea mays
  Peptide Sequence Number=SeqID_54098
atggaagggacagtaatcagaatagctagtgagtcaaaacgaggcaatgagcaaacagactctttgacagaggtgcctagagctattgggactttagtaacacataatcgtgaagtagaaaacttaattgtacttgaagatgacacggaattaacaccttatgaaggaatggagtttgagtctgaagatgctgcaagggatttctacagcacatatgcaagaagtgcaggttttcggattcggatcagcaggtatactcgctcccgacgtgataattcagttatttctcgtcgaattgtgtgttcaaaagagggatttcatgaaacccgtgcttgtgatggcctccatcctgaacaaaaacaacaagaacgggcaggtactagagttggttgcaaggcaatgatattaattaaaaagtttagtcctggcaagtgggtggtaaccaaattcataaagaaccataatcatggaccagttccaccaagaaaacttgattccagactagtagaccaggactgtgatccaatggagaagccacattctattgaggtggaccctgttgaggagccatttgagggcatggaatttgaatcggaagaagctgcaaaattgttctatgtaaactatgcaaggctaaatggttttcgtgcacgtattagtagatattgtcgttcaaggcgtgataattcaattatttctcgccagattgtgtgttctaaggaaggcttccgtgaagttcggaccaagaaagtgttgacagatgaaggaaaaacaaagcgcccaagaatgataactagagttggttgcaaagctatgattgtagtgaaaaagatgaactctggaaagtggatggtttcgaaatttgagaaggagcataatcattcgctgtcatattctaaaatggtccctagtacctcaaacattacttctggagaaattgtcgatttagctgcaaagggtgcacatcctagtgaagtaaaaaatgaaggatacagtgcaggaacccaatgtaatcctgcagattccctcactatactttataacaacttatgccaggaggccataaaatttgcaaaagaaggttcagtcacagaagaaatttaccatgtggcagtttctgccttaaaagaggctgcagaaaaggttgctgaagtcaaaaggagtcgtccaacattgtcacattgtggtttcgttagagaaagcaaacatgatgtcttacaggagaaaagtatgagtgctttgcaatgttcaaatcaggttgaactgacaagaacatctcctgggtccaggcctcttcaagattctgcatcaaatcttctgctgataccaaccgacattttgactgattcaaggttatatagcggtgtcgatactgctcctctaacaggaggtttccccacaaatgagagtgaaagtacacatgcatcagaaagttcttttatgcattttaagaacacaaagaaaacctcttcagaaaaatctcagcattttttggtatttcattttggaccagaagatgcttatttgttgctggaaccacagaacacttgttttaatcaactcatccatggaaaggagcaaggtatccatggatcttctaaagataccatggttgctattcctgcgatacctcttgcactgtgcatgcctgtgacgcagagcttacctggatcttctacaggtccatttggaggtgttctgtctgaactgaagaaccaaggaacagtccccaaatctatagttcatgctacagctcttgcttgtggtgctcgtgctgttcctcttgaagatgcagcttcgcttattagtgccattgaatccaaaatcagatctggaggggccataatagcgaaacttccttcaaacaacctagcacctctagttcctccagccattgctatgtcatcttctagtgaagatgacgaggagcatgaccacagtgagccctcgcaatga

SEQ ID NO: 12320 - DNA, 1011 bp, Zea mays
  Peptide Sequence Number=SeqID_54099
atgacgggggcaggggaggcgctgaggacggggaggaagcgaggatgggcggcagacgttcgcggtaggggcgagcggtgggatggtgaactttggcgggcggcatgtgggggcgcgcgggtcgcgcaggtctcctcctggtgggggcgcgttgtagcagtcgcggcaactagtggagggggcaccgacgatgcgcgaggatcgatgtggggcgccgacgacgaaaagggcgcgcagatgtggatcctcatcggatgcgccgatggaaggggatcgatgcggggcgccgaggatggaggggatcgatgcaacataacatttctcacactgcaacaggattatgatgaagatggaactctttccttatcagaattctcagacttgatgaaagcttttggtaataaattagcagttgcaaagattgaagagtttttccgtcaagcagatacaaatagtgatggcatagttgacatagatgaactggcagccctactggctgctcaacaagaagaagaaccacttataagtaactgccctgtctgtggtgaagatcttggaaaatatgataacataaatgatatgatacatatgacactttgcttggatgagggaactggtaatcagattatgactggtggatttctaactgacaaacaggcatcttatgggtggatgttcaagctcagtgaatgggcacatttctccacgtatgatgttggtttgcactctggctctacagcttcacatattctggttttcgaccggcgaacaaagaggatagtcgaagaagttattgacagaaaaattgtattgtccatgagggctttataccaatcaaaagtaggactcgctcttataaatacagatacagtgcaaggcctaaaaatgagaagggagaggtcaggcgaggaggatctgggtggccttcgcgggcaagaacaaggacgacgtaggactcaaccattagattccaatagcctccaccgattgagtggtacaataagcccttaa

SEQ ID NO: 12321 - DNA, 248 bp, Zea mays
  Peptide Sequence Number=SeqID_54100
atgactcccgagcatcacgccgaggccggggaggccgagggggggggttgcggcgccgatgactggggcaggggaggtgctgactacggccagaaagctgggatggccggtgttcatcgagttactgattgtgtgggcgctctgaatgcatttgtatccatgctgggcgacaacggtttaccattttacaagctactcatcctcatggatatgtttcgatgggactgcgatcggatgcggaggtctag

SEQ ID NO: 12322 - DNA, 1299 bp, Zea mays
  Peptide Sequence Number=SeqID_54101
atgagacgccgatggggccaagccgagctcacgctggcagtggtggacgccggtcgacggagaggggacctacgaggctacgacgaatggacaggagaggagtggagaggtgaacgagatgtcgcggagagcgaggcaagcgagagcgcttcgaagctggttgagagacgagaaggggagcgattgctggggagtgccggagtggggagcgagcatcgcagtctcgtggagggagaggaggagaatgggacgctgatacagggaccacctgtcagagtggcggggtgggcagaacgaagaggaggcagaactgaaaagggacggtttgatgctcaaaagtgtttacaaccaagtttttttgttcacaaatccatgaatcacatcaggcacacttctgtgttcaaagtgtcaagtatcacaacacataacacggaagctcacgatcaggtggccgatgcgactgaggctgcgaaatttgtcgtgaggcagttgcgttatgtggcatctggcgccttggtccattccgtgacctcgcggttgcgtgctgagaaggctgagctaaaaaataaaattgagcgcctccgaaccgagaacaccaatgatgtgcgggagaaatcggcagccgatgtaaggagccaatgtctggcggataaggcaaacaatcttgaaaaagagaatgatgaactgagtcggcaactaggcgagacctgccgtgagaagctagatgcgggtacgcgggctagcgtgaagcgggcacactcgttgttcgtcgaggcctatcgcgatctaggtgctgagacaacccccttcgataggtccgatgggctgatgtcttatgcctcccttgtcttctatgaaggtgccgccaacgccctatcccacgaagggtgtcaccattttgaggtctttgaacgaagcaatcatgactttgactgggaggttttccagattgaagacatgtccctgaagcaatctgctggaacactatttgaccgaatgtggggtactcacgattgctctgtggttagggagaggactgcccaggcgatggagcaggtctcgctaactactgtggactatgttggtgttgaaacgggcatggaggagcagccttcgtgggtaggggctgctattggtgagcccagcgccagggagacttcacaccattctgctgacgatgttcgaggtgatgtgcaagtgtatagacggggcaatcaaatacttgtggatgttttgttggggtgttgtattgacactaacttggtacctgcacaggttctgatgattggtcctgtgtag

SEQ ID NO: 12323 - DNA, 513 bp, Zea mays
  Peptide Sequence Number=SeqID_54102
atggcggacgacgattacaacgaaatcgacatggggttcgactctccctcatccttcccccctctctgggtgccactattctatatttgtgtcacttcgaactgtgacagcaatgcaagctatgaggatgagcctccagaacctgagattgaggaaggggccgaagaagagcttgagaacaacgaagatgcccctgatgatgtcataggtggagagggtgaagataaggaacaggaaaagaccaagcgtgagcgcaaaacaacaaaatatatgacgaagtatgaacgtgcgcgcattcttggtacacgagccttgcagataagcatgaatgctccagtcatggttgagcttgagggagaaactgaccctcttgagattgcgatgaaggagcttagagcgcgcaagatacccttcacgatcagacggtacctacctgatggaagttatgaagactggggagtagacgagctcattgtggaggactcctggaaacgccaggttggtggagactga

SEQ ID NO: 12324 - DNA, 3129 bp, Zea mays
  Peptide Sequence Number=SeqID_54103
atggacctcaacaccggcatccatctcatggtaacactgtacagctgtgcttatggcagcttgcatggtgtatttgtgcagggtctgcaactgcttgatttagctgcaataggacactttaggctattgagaagagatccaatgggtgctcttggttactcaagttcaaaaccccctcttacaaaaattgttgagtctgctaatgggcgtccacaagatatggacgttgttgctgccatgaggaatggagaagttcttgggcgtctaactgttttaaaaagcgaccactgcccaggcagccacagccttaatttacccgagagggtggagggtgcaccaaattttcgggaaatccctgggtttccagtctatggtgttgcaaatcctacagttgatggtattcgagctgttatccagtgcatcagtacaagcaagggagggcgacctgtgctatggcataatatgagagaagaaccagttatctacataaatggaaaaccatatgtgctacgcgaagtggaaagaccttgcaagaatatgctggagtacacagggattgatcgtgatagggtcgaacgcatggaagctcggctgaaggaggacattttacgcgaggcagaaagatatggtggagcgataatggttattcatgaaactgacgatggagagatctttgacacatgggaaaatgtagataatgaagctgttctgactccgttggaggtatacaaaaacttggtgagtgaaggccttccgatcaaatatgcacgggtgcccattactgatggtaaagctcccaaaagttcagactttgacacgatagccttcaatgttactgctgctagcaagggcactgctttcgtattcaattgccagatgggcaggggcagaacaactacaggaactgtgattgcttgcttgctgaaacttcgaattgatcatggcagacctattagaatcccagtttgtcaatatgaccatgaagatgatgctatttactcaactggaggagatgcaacagatcacaatggtcacttgaattcagaatcatggaaacctcgtactttgacgaagttaaattctggatttggaatcaatgacattcttctgctgcgaaaaattacaagattatttgataatggaattgagtgtaggcagactttggatactgttattgatagatgttcagctttgcagaatattcggcaagctgttttgaactacacaagagtaattaatcaacaacatgttgagcctagagttaggagggttgcattaaatcgtggcgctgaatatttggagagatacctcaaattaattgccttttctgcataccttggtagtgaagcatttgatggtttctgtggacaaggacaaacaaagatctcatttaaaggatggctgcaacagcggccagagatccaaaccatgaaatggagcataagactgcgacctggccgttttttcactgtgccgcatgagcagaaagcaacatatccacctccacaaggtgatgtaacaatggaaaccattgtcaaagctcgtagtggttctgttctgggaaagggatcaatactcaaaatgtacttctttcctggacagaaaaggtcaagcagtgtgaatttccggggtgcacctcatgttattaaggtggatggataccctgtgtatagcatggcaacacccactattgatggagcgagtgatgttttgtcgtatctgggctctaaagacacaaccggaagaaacattgcacagaaggtggtcgtcacagatcttagagaggaagtggttgtttacatcaagggatcgccatttgttttgagagaactagatcaacctgttgatactttgaagcatgttggcattagtggtccaatggtagagaacatagagacaaggctaaaggaggatatactctctgaagttaaacagctaggtggtcggttactgcttcatcaagaagaatttaatgcagccacaaatcaatgtagtgtggtaggttactgggaacacatagatctggaggacgtgatgacaccagctgaagtgtacagcacattgagagacaagggctattgtatcgagtacaaaagaatacctctaaccagggaaagagaagcattagctgccgatgtagatgctatacaatcatcaattgatgaatctgctaggtactatctctttatttcacacactggatatggaggtgttgcttatgcgatggccattacctgcctgggactgagtgcagatgcaaagtttgtaatggaagaaacagcagaaacacactttgtatcaacatctcttgcgaaaaatgtgtccatcaaaactaaaactgacatagcacttaagcagggtgactaccgtgacatattaaaccttactagagtgttggtacatgggcccaagagcaaagaagaggttgacacagttattgacaggtgttctggtgctggtcatctgcgcgaagatattatgcattacaggaaagcactgcaagattgttcacatgacgacgacgacgactgtgatgaggaacactcttatctcactgatatgggcacaaaagctttgaggtggcgagatgtttggatgcctgcatctgcctttgggccaggcagcatcgatgcaaaagggggttcgggccaggctgggccagtacgtgggggttgggcgtacttggggagccaagttgagttggtgcaggcaccccatcgatcagtcatccccaacctcccgcccacgatcccccgccgtggacgcgcccacgtccgcgcgttcttcggccacgtcctcgcgcctgcgccccttttgagccccgcgccctgctcgcccacctcccctcgctcatttgcgccctcagccgagcccccctcgctctctctcccgctctgtgcgcgcgaccagagaactccgccacccgctcacagtcgggtcgctgtctattctgcaatcactgttgcgcccgcgccccatcctttgcctcgccggagctccgccgccgtcgacccgaggttccaccgcaccttcgccgtcctccacacgctctggagttcgcactcgagcgccctctggtgctcccgcgccagcatgatgcccatggccgagtccgctagaccgccctaa

SEQ ID NO: 12325 - DNA, 1122 bp, Zea mays
  Peptide Sequence Number=SeqID_54104
atggaagggattgctaatgtgctaaatcatatcggagcacacaagaaaggaaagcaaacccggattctatggcatagtcttcgggaggaaccagttatctacatcaatggtcgaccctttgttttgcgggatgttgaaaagcccttctcgaatcttgaatacacgaaatctacaaagctcataaaccacaagggaattaaccgggagagagtggaacaaatggagtttcgccttaaggaagatattcttcaggaagcttcaaggtatggtaataagatactggtcactgatgagctgccaagtggtcagatggtggatcagtgggaatcagttgtgtatgatacagttaagactccacttgaggtatatgaggagttgcaacatcaaggctacctagttgactacgaacgtgttccaattactgatgagaaagcaccaaaggaaggagattttgacaacctggtacgtcgaatctctcaagttgatatagaaacagaaattgtgtttaactgccaaatggggagggggcggacaactactggtatggttatagctacattggtttacctaaaccgaattggagcttcaggtatccctagaacgggctctattgggaaggtcttctatgctggaaatgatgtagacgattatatgcctagctcagaagaagcaatactcagaggcgaatatgctgtcattaggagtttagtccgagttctcgaaggtggtgttgaaggcaaaaggcaagtggacaaagttattgacaaatgcgactccatgcagaacctaagagaagctattgctacttaccgcaataacattcttcggcaacctgatgagatgaaacgagaggcatcactttccttctttgtggagtacttggaacgttattacttccttatatgctttgctgtctatgtgcattcggtgagctctgctcaccaaacaacattatcagtagaagttagtttttctgattggatgagagcaaggcctgaactgtacagcattcttcgaagactttgccgtgtttcaaccaagacgttttgtcttgaaggctccctggcctccaccaaatggtacattgacctttgcgcaagattttttcttgatggtagttaa

SEQ ID NO: 12326 - DNA, 289 bp, Zea mays
  Peptide Sequence Number=SeqID_54105
atggctgaacagtacaaaatgcatgtcatgaatgaaatacaatgggattatttttcagttgaattgttagacattcaacatgtgcatattaaattggtttctacagacacatgctttattgatctcaaccttgccaaacgcctctcatggaagctcagaggatatgtcaaggtcatgatcgacaaacagatggaggtgctccgcaagcagatctccatctatgccaccatctgcgagcagcttgttgagatgcatcgcatcctcaccgagcacgaggacaccattgcag

SEQ ID NO: 12327 - DNA, 567 bp, Zea mays
  Peptide Sequence Number=SeqID_54106
atgaagataaaccgggagcatgtgtggactctatctcgtccgagcacgcgttttcaccagagtcgggttcctgtaccacgccgccgcgccgggcctctacagtgtccgagcgcgcctgcagtggaccgaggggcgctcagcagaggcgaggaggggcttgctcggccgacaaccgtgactgcgcaggctacaaggggagtagtgaagatcgacggcgagttgctccacgaccggtctctcccgcttgaggaagttaatcccaagcagtgcagactctccagcatccgtgttgcctttttcttcttgtgcccacaaatagttgttaaaagtcaaatccttgctggtggccgagggctgggaactttcaaaagcggactgcaaggtggtgtccatattgttaaggctgaggaagctgaattgattgcaaggaaattcggaattgtgttcgcctccatttctgtacccatctttgcagctctgtattgtccaacaaaactttgttcaatacaaagtgaaacacccttaagtgagactaggtgtgtgctcatgcgttgccacgagagttaa

SEQ ID NO: 12328 - DNA, 273 bp, Zea mays
  Peptide Sequence Number=SeqID_54107
atgccgatagttgaacagagatatgttcggcttggcctcaacaaaatcaagggagagcagcaacggggaaccaacacgagcgagggcaccggagagagcccagaggcagaggcaatgttgaagaaggggtcactggtgtcgaaggtggagccactatggccttatgggccaataggtggcacacgggccgacgacgagcaacgaggcagcctgagggggttcgagggcgtaggagccattagaggtgccgggccatcggtcgaaccagtgtaa

SEQ ID NO: 12329 - DNA, 1161 bp, Zea mays
  Peptide Sequence Number=SeqID_54108
atgaacccaaatctcatttttgaagattgcgtgccaatgtctggattggatttcaatacgtgctggatgaaacaaactgcagagccagctgaaagctgcaattctggtggtggcgtatcgtttcttgacaatgtcatttatcctttctatgaaatcattgcagcggaagcagccaataataaaaacgggcgtgcaccacattctgaatggagaaattatgatgatttcaatgagtttttctggtctcataagtgcttccacctacgatggccttggaacctgagcgacccgtttttctcgaagcccagtaggaaatataagatttaccttttggacattcatgtattctacactgtattgtctgctatttatggatttctccttggtgcacgtgatcgcctgggagagattagtactgtcgaggctgttcacagattctttgagaagtttcctggagcattcatgcatagacttcatgttgaggaagcaactgctatcttctggtcagggaggggagctgcggggaggggagagggaggagatggttcttcgggatggggagccagcgagccgctgacgccggggttgagcctgcgtgacgagcgcgagtggagggagcggaagatctgctgtgagcaagatgaaggcagcggctgctatctgccttcgctggcggcttgcgaccccagggcggatgccgcgtactgtagctcatggcacgatgatggatttgatccctgctgcgggcaagagcatggatctgggaagaggagggagagaagcggcggcacctatgagagcaatcgccgttctcctgattgccatatgtcaatatggtttgactactatcctacttgcagtgaactagaattgcttttgatgcccaagaatgacgttggagttctaccgattgtgcaatggccagttttcttgcttgctagcaaggtcgcagttgaaactcttgctgcgacagatgttgagactagagtgaaactccgagaacaacaagagaagaccgttggtgaagatgtcggcaaattacgagcttgtcgagacgtgatggacgtggacgtcctcggcaacaacactctcatggacgaaattgaggtcgatctcaacattcttcgtgcactgatgctggatatggttgacggaaagtag

SEQ ID NO: 12330 - DNA, 411 bp, Zea mays
  Peptide Sequence Number=SeqID_54109
atgggactagaggccaggcggggccactgcgccagtggtcgcaaccctcgccgctggtatggctgtgcccccgccttcgatcggctgccttcgcgttggcggcagccggcagctggtcccccaacctccaccccccaactgatttgcttgctctccacaaggcccaccttccgctgcggcgtgatcagctccagcatccgcgtacgcagttacgcacagtcttactgggctgttctacctgtaaccttctccaatcttctgcatatcgctggacaaaagcagccgaactttaggaccagacagattcatctatgtgccaaaatcttattaacagttggcttgcctggatactatgatcccggccggtatcatgatgttgcttctgtcaagagaaatcaaccatttaaatag

SEQ ID NO: 12331 - DNA, 264 bp, Zea mays
  Peptide Sequence Number=SeqID_54110
atgtctcggagaggacaagacaaacaacatggtgaagaaccccagcggcctgtcgagtcaccattgggtggatgcagcgagggccccagtgaagaaaaggagaatggtacaccgcctgctagcccaggagccgggaagggcacctgcctatgcacgtcactaatagaatgcaagcacgaggtcagtgatggagcaaaagcaatagtagacatagggtgcacagtggcccagagctatcacatcaagcgagaaggctccgggtag

SEQ ID NO: 12332 - DNA, 1161 bp, Zea mays
  Peptide Sequence Number=SeqID_54111
atgggtcacgaggagatttttgttaaccaagccaagtgggtctggacacagtggaaggtggatgattctctagatcggtgcaaggctcactgggttcttcggggcttcactcagcgccctggagttgactatattgaaacgtttagtcaactattgcgttctctcactggccctctctcgctcttagccggttcatcagttggatgccaagaatgtgttcctccatgtgacacgcatgcaaagctctccgatgatggtgccactgtcagcgaccccaccgcctactggagccttgcatgcagtccagtaggtctgtctctacatgcacgattcctaggaaccacatttaaccgtgatcaagcggatccttcggtaccttctgggtgtttcttcgacgatcctccacacatgagctcgttatgtagaacgaacttagtgcctggacactcgtcaatctacatgcagtgttccttgggggcagtctcatctcttggtcctccaagcttcagcccatggtgtcatgatccagtgctgaggctgagtcccgagctatcgctaatggggtggctaaggttgaactttgtcttacaggaaatttattcgattaaattgcctgggaatccaaagcttggagagggaaaacccgaaaatcaaaatcatgccataatatttactcgtggaaatgcagtgcaaactattgatatgaatcaggataactactttgaggaggcacttaaaatgagaaacctgcttgaggagttctctctgaagcgtggcaagcattacccttctattcttggtgttagggagcatgtcttcacgggaagagtgagaatgcactatggtcatccagatgtttttgatagaatttttcatataacaaggggtggaattagtaaggcctctcgcagcatcaatatcagtgaggatatatatgcaggattcaactcaactctgcgtcaaggatgcataactcatcatgaatatattcagataagcgagggcagtcagataggttctaggaaccagagacaacaacatggccatgaacagtaccagttgacaaaagttgtgcttcccgcgggtaaccatggcatgttgatatgccacgggagggacatgtacatcatcgacagggagatgtgcagtcggtggttctag

SEQ ID NO: 12333 - DNA, 1803 bp, Zea mays
  Peptide Sequence Number=SeqID_54112
atgtccggctcccagcgcacccgtgtggccgtcaggcgtcagatgcaccacctccgtcgcctcgtccgctctcccctccgccacgtccctccccgcgcggcattctccggcaggccctccgtttcccacggcaacgacgcgtatggtagctcccacgccgccgcttcagacgcgatcgtttgcctcgtcgtcgcaggcggcggaggcctcgaggccgacctcgaccgcctcttctcagccgtcctttcccacgggctcgtctccagcgtcctccgagcgctcacggaccgcggcgtccccgcggagcgtttcttcgcgtgggcctcatccctcggcaggggcttctcccccggcccccgcgcgtacaacctgctcgtcgagaatgccgggaggctggacgactacggcgcgatgtcgcgcgccctggcgctcatgtcagagcggaggctctccctgaccgaccgggcattcgccttcctggcgccgtcgtcgggttcgtcacggagcggcagcgtggaggacgcggcgagagcggtcctgcgtgctctcgatggtgtcggcgggccctgccgcgcttccggcgtgttctcgcttgtcaaggcgctggcgtccatcggagagttcgatgccgctgtcttggtgatcgaagagacggcgaggaaggtgcggtactataacgtcctcgtcgctgcaaagtgtaaagccggcgactttgtcggcgcccgtgaggtgttcgatgaaatgaggaggtcggggtctgaccccgacgccaacacctggaactacctcctcggctgcctgctcaagaaggggaggctcgctgaggcgtgcgggctcgttgaggccatggagaggttgaagcgcagtgagatcccgagctcgctcacgtacgagatcctcacataccatgcctgcaaggcagggaagatggattcggcaatgcagattcttgatcagatgttctcggaaaacctgacgccgaggatcaccatacactctgcattcatcaaggggtacttctacgctgggagaatagaagatgcctgcaagtatgtcagtgacatgagcaccagggacagacattctgtgaaccggaactacagcctgctcgctaagctgctgtggaagtcggggaggaccattgatgcaggcagagtcctatatgagctgatggagaagggcctcagacctgaccattctgcttatgttaaagtggccaaggatctgcacaagatgggcaagggtaatctggcttgtgaactgaagatgatgtttcaaaggttcagcgtcaatagcagatcagaaacacatcatcaacccatatctggctcaaacgtcgtcgatgataaacggtcgatggttttgtcaactgctaccataggtcgctggcgagccatttcggtgccgccccagcctactcgaactaggttgcggcctggtactcgttcctatcaacgagaacacccatatcgactggtggtgattctggtgcatcccttcccatggctttcgctgaagatcgtgtgggggcatatggaggcatcgaacgtgcaactggcggttgttgtgaaggacatccagtccaccatagtagagctcgccaaggttatcatcgactcagtgcagccgatgggaggttgcgagcggtatggatggttgtatgacattccacaggaggagtgggtggagatggccagcatgcatctgcgcgacgaggctcaagaggttttggacaattgggaaactaaggatcaattcatttcttgtccggagttctatgacaccttcacaacaggaatttag

SEQ ID NO: 12334 - DNA, 1173 bp, Zea mays
  Peptide Sequence Number=SeqID_54113
atggcgaaacttcataggcgtgggtgggggatgctcaaccaagctgcatcgctgcttgttggcaaaggtagggatgttggacttaatcagattgcactatttgaaggaaaagttgctggtggaaatggtgaacaagttcttagccgagacatatatagactcggacaactttttgactttttcaggatgttatccttctacgtgacaactgttggattctacttctgtactatgctaaccgtgctgaccgtgtacatatttctctatgggaaaaatgtatctggtaagatggccttatctggtgttggagaatcaattcaaaatagagcggatatactgcagaacgcagccttgaatgctgctctgaacactcaatttcttttccagattggtgtatttactgctgttcccatgattcttggtttcatccttgaatcaggtgttttaacggcttttgttcagtttattacaatgcagttccaaatgtgctctgtattttttactttctcacttggaacaagaacccactactttggccgtgcaatattacatggaggtgcaaagtatagagcaaccggtagaggttttgtggtacgacatatcaagtttgctgagaactaccgtatttattctcgaagccattttgtgaaagggatggaggttgcacttttgttggtgatcttcctagcgtatgggtttaacaatggtggagcagttggctatattttactctctataagcagttggattatggcattgtcttggctttttgctccctatttatttaacccatctggatttgaatggcagaagattgttgaggatttcagagactggacaaattggctgttttatcgaggtggtattggtgttaaaggagaagaaagctgggaagcttggtgggaagaagaactgggcctgtttgggtctatacttaagttgccaaaaattgccacatattctatgtcacacttgcctaaggttaggcgctcaaattctgcgccacagtttaccatgtctaagggaatcttgccacacttttacaagtcattgacgagtgtgacctacgcagcaggaaaaacttgccacagctgtggctacaaaccaaacacatgcctaaccctgtcaaacttgcctaaccttaggtatggcaagttgttgcaagttaggtag

SEQ ID NO: 12335 - DNA, 502 bp, Zea mays
  Peptide Sequence Number=SeqID_54114
atggagtcgctccagccacatctcacgtcgtggccctgttccgatcgcctttttcagatgggtcgcgacgctctccagtcactccagtggccaaagtttgatgtggttgatttccttatctgtgagatcaaggacaccgtggcacaaaccgttcctgatgatgatgatgataatttttgggatccccgcctccgcctcctcagtaggctcattttggccgcagcccagcagcagatgtccgagagaatgctatccctatttcagactattcaggacagacaggatgctctgcagcagcttttggcagacagggctgagcaccggggccttcatgacttcacattcttcagcatactggtgtttaggttcctcctgttcagtctacacctcctccagcacttcaggccgttgttgtaccagcgattcaggcaggaccccactaccttcattcggtccttctccctctccactctggctggtcaccctggatttttcgtcaccg

SEQ ID NO: 12336 - DNA, 4533 bp, Zea mays
  Peptide Sequence Number=SeqID_54115
atggggttcgacccactggagtggtactgccagccggtcaaggatggtgtgtggtcgcatgtggttgagaatgcgttcggcgcctacactccatgtggcactgacacccttgtagtctgcatctcatacctcgcactctttggagtttgcttctatcgtatatggaggacgacgagggactacacagtgcagcggtacaagttacgttcaccatactacaactacctgcttggactgctcgtggtgtactgcatagcagagccgctttatcggatcatcactggtacctccatcatgaacttggatgggcagcctggccttgctccatttgagattgtctcattgatcattgagtctgttgcttggtgctgtatgcttgtaatgattctgcttgaaacaagaatttacatcaatgagttcagatggtacatccgatttgtggttatttacatgatggttggcgaagctgctatgttcaatcttgtgctctctgtgaggcagtactacagttcaagttcaatcttttacctatactgcagtgagattgtatgccagttcttgtttggaattctcatggtggtttatctgcctagcttggatccatatccgggttataccccgatcaggaatgaagtgttggttgataatactgattatgaacctcttcccggcggtgagcagatttgccctgagagacatgccaacatatttgccagaatattcttttcatggatgactcctttaatgcaacaaggatttagaaggcccattacagataaggatatctggaaattggatagctgggatgagactgaaactttgtatagccagttccagaaacgctggaatgatgagcttcaaaaaccaaacccttggctgttacgagctcttcatagtagtctttggggaaggttctggctgggtggatttttcaagattggcaatgatgcttctcaatttgttggtccacttgtattgaacctgttgttagagtcacttggggttcttgctgaggcacagtactttcagaacgtcatgcgtgtgggtttcaggttgaggtccacattgattgcagctgttttccgcaaatctttgcgactaactaatgatagtcgtagaaagtttgcttctgggaggattaccaatttgatttcaactgatgcggagtcccttcagcaagtgtgccagcagcttcacagcctatggtctgctcctttccgcattgttatttccatggtccttctatatgcacagcttggtcctgcagcattagtcggtgcactcatgctggttcttttgtttccaattcagtcccttttgtttgcacttattcgtgctgtcagcaatcagcatgtgttttggcttttccagactgtaatcatcagcaaaatgcaaaaacttactaaagaggggttgcaaaggaccgacaagcgaatcagtctcatgaatgaagtattagctgctatggatacagtcaagtgctatgcttgggagcaaagtttccagtcaaaagtgcaggacatccgtgatgatgaactttcttggttccgcagggctcagttgcttgctgcgctgaatagctttatcctgaacagtataccggtcgttgtcactgttgtttcatttggtgtatattctctactgggaggtgatttgacaccagcaaaggcgtttacttctctttcattatttgcagtcttaaggtttccacttttcatgctcccgaatctgataactcaggtggttaattgtaaggtgtcattgaagcgtctggaagatctcctgttggctgaagagagattacttctgccaaatccacctattgatcctgatcttccagccatttctatcaagaatgggtatttttcatgggaatcagaggctcagagaccaactttatcaaatgtcaatctggatgtacctgttggaagtttagttgcaatagtaggaagcactggtgagggtaaaacttctctcatatctgcaatgcttggagaaataccaccagtatctggatcaggtacctcagtggtcattcgtggatcggtggcttacgttcctcaagtttcctggatcttcaatgctactgtacgtgacaatattttgtttgggtctccctttcaacccccacgatacgagaaagcaattgatgccacttcattgcggcatgaccttgacctactcccaggaggcgatctgacagagattggtgaaagaggagttaatattagtggagggcagaagcaaagagtttcaatggcaagagctgtgtattctgattcagatgtgtacatatttgatgatccactcagtgcattagatgcccatgttggccggcaggtatttgataaatgtatcaaaggcgaactgcagcataaaacccgggttcttgttaccaatcagctgcattttctgccatatgtcgataaaatactgctaattcatgatggtgtaattaaagaggagggtacttttgatgaacttagcaacagtggggagctcttcaagaagctcatggaaaatgctggaaaaatggaggaacaggtggaagaggatgaaagtaaaccaaaggatgttgcaaaacaaactgtgaacggtgatgttacaatagctgatgaaggttcacagaagagccaggatagttctagtaaaacaaaaccaggaaaatctgtccttattaagcaagaggaaagggaaactggggttgtcagtgcgagggtcctttcacgattttcgaaggatatgggtgacattgaccgaaatgtcgctgtatttgtcaatatgtttatggcacaaatatctcagttgctctcaactttcgttctcatcggctttgtcagcaccatgtctctttgggctatcatgccactcctgattttgttttatgcagcttacctctattaccaggcaacatctcgcgaggtgaagcgtctggattccattaccaggtctcctgtgtatgctcagttttcagaggctttgaatggtctgtccacaatccgtgcctataaagcctatgatagaatggcaaatatcaatgggagatcaatggacaacaacattaggttcacacttgtgaacatgggtgcaaataggtggctagctattcgtctggagacattgggtggcatcatgatatggtttacagcaacatttgctgttatgcaaaatcaacgagcagagaatcagaaggcctttgcttctacaatgggtcttcttcttacttacactctcaatattaccaatttactcacagctgttcttcgtcttgctagtcttgctgaaaatagtttaaatgctgttgaacgggtcggaacatacattgagttaccttcggaagctcctcctgtcattgaggatcataggccaccccctggttggccatcatcaggtgtcatcaagtttgaagacgttgtgcttcgatatcgaccagaacttcctcctgttcttcatggcatatcttttgttattaatggaagtgagaaggtaggaatagttggcagaacaggtgctggcaaatctagcatgcttaatgctttgttccgtatcgtggagcttgaacgagggagaatattaattgatgattgtgacacttctaagtttggaatttgggacttgcgcaaagttctaggaataataccacaggcaccagttctattctcaggttctgttcggtttaatctggatccctttaatgagcacaatgatgcggacctctgggaggctctggaaagggctcatctaaaagatgttataaggaggaattctttaggattggatgctgaggtttctgaagctggtgaaaatttcagtgttggacaacgacagctgttgagcttagctcgtgcgctgctgagaagagcaaagatacttgtccttgatgaggcaacagcagcagttgacgtgcggactgatgctcttattcagaaaacaatccgagaagaattcaagagttgcacaatgctcataattgcccaccgtttgaacacggtcattgactgtgacaggttgcttattctaagttctgggcaggttctggaattcgactctcctgagaatcttctaagcaacgaggggagtgctttctccaagatggtgcaaagtacaggacctagcaacgcagaatacctcaagagtcttgtatttgcaagtggagaagagaggtcccggagggaagaaatcaagctgcaagatatccaaaggagatgggttgcatctaaccgatgggctgaagctgcccagtttgcgcttgctagaagcctcacatcatcacatagtgacctccttgcattagaagctgccgagggaaataatattctgaggagaacaaaggatgctgtaatcactctgcaaagcgtactggaagggaagcacaatactgaaatcgatgaatctctaactcagtatcaggtcccagctgatcgatggtggtcttcactttacaaagtgatcgaagggtttggcagttctctttcaatcatatgctttggcctgtgtaatgtgtgcaagaatgataatgccacactgacctaa

SEQ ID NO: 12337 - DNA, 390 bp, Zea mays
  Peptide Sequence Number=SeqID_54116
atgtcgagccagtcggtcgcacagtttctaccgttattgtgtcgcgccgccaccaccataagctgctcgaccaacgcccgccatcgccttcgcgcttaccaccttgggaccacaccgtcgcccatcgactccatcagatcgtgggaccgcgccgctgcctcggctagtgctgtcgtcgcattcaacatggccgagcaccacccactccccgtgccgctccagagccaccctgctgccttcccacgccaccctaagagcgtcgcgtcgccagcccggtttcaccctaccctgctcgccgccccagcgtcggcgctcatgcgcccacgtctagcccctgcgcggcatgagcatcgtgcccctctctgccggtcaccgtcggcatgcgcatga

SEQ ID NO: 12338 - DNA, 450 bp, Zea mays
  Peptide Sequence Number=SeqID_54117
atggcggggtcggttttgtgtgaacgagggagaggcggccaaacggtggaggggagttctcggcgggccggaggatactccggtgagcaatcgcgggtaggtaaatgcgagacatgggaaaataagggcggggctagaacggttaccttgaggggagtcccaggaatgcacgaacggaagctagggcgcggcaaggacgcgggtcgacggcggcagctctctggctgcgcaagaagtgctccggtgaacgcggaccgggcaaaccagaggaggaaagggcgaaccaaagggtatcccgagctgcgggtgatgcggcagagcttaccgagggaacgggcgcgatgccgactcaacaatggtcacagaacgacgatggtccctggtgagcggcgacagagcttggctggtcgcgtgcgcaggccgagagagaggtcaaaaaagctcggctga

SEQ ID NO: 12339 - DNA, 300 bp, Zea mays
  Peptide Sequence Number=SeqID_54118
atggcgttgatcttaatggaggatgaacgtggggagggagtaacggtcgcagtgaaagctccattacacgcgacggaagaaacggctctgcgcgggtcggttcgattgctcggatcgcggcagacgggcgcgtgctgcggtcggctctgtgtgcactgtcgcggcacggggcagggcggcttggccgcttggcatgcaggggcccgtcgcgcggtgcaggtggcgcgcacggcgcggcatcgggggaagaaggggcggggcgcgcttggctgcttggcgcacggctctgctggcgtctag

SEQ ID NO: 12340 - DNA, 207 bp, Zea mays
  Peptide Sequence Number=SeqID_54119
atggccgatgtcgacgaagttgttataatgcgaagtctctggttgcctgtagcattagtcaagacgattggtgatgacttcgcctttctgaccgagggtcaggtggcaaacggtggtcggtgtgactgcccaaagagcgtgggtgtgattgcaaatgagtacatgttctgctcgaaagaaaggtggagctttgggaaggttcactaa

SEQ ID NO: 12341 - DNA, 405 bp, Zea mays
  Peptide Sequence Number=SeqID_54120
atgacctttgcgccgcacgctgaagaccctagtgtggaaaggcagagcgctaccaccaacgaacttgccagctgcaacgctgaatcccccttcgcctcgccggctcccttgtttgccctagctgcgatggcgaatgggccggaagccgttgggggggggtgcatgtggacccgccagacaacatatagcttcgcccctggtgtcgaatggcacgtaaggagaggggagtgggcacctagtggcaaccatgaacaggacacgctacgatctaagcaaaatttgatcgccaaaattggcttctggctgtcaaatgttccgtttctcgttttcgtgaaaatcgctcaaatcgacattaatgcggaatccgtcgagtcattgcaacagaaggaatctatcgcttcctaa

SEQ ID NO: 12342 - DNA, 471 bp, Zea mays
  Peptide Sequence Number=SeqID_54121
atggagctcgccaacgtggggcaccgtggcatcatggggattggggcgtatatgacaccttggttatttactgagataaaagaacaaaggcactgggatatcacatctggcgagagattaaatattcttaaagattttgtgcgttttggtctggaacattggggctccgatttcaaaggtgtttctggttctgtttttgtaggagttgagacaacacgccatttcctcctagaatggcttagttacacctgccgctacattccggtgggtctgctggatgtgattccacaacgattgaactggaggcctccaagctactatgggcgtgatgacctcgaaaccctgatggtctcagattcagcagctgactggataaggatctcagagatgttgcttggcaaagttccagaagggtttaccttcgcaccgaagcacaagtccaatgcctatgaccgagcagaaaacggttaa

SEQ ID NO: 12343 - DNA, 1050 bp, Zea mays
  Peptide Sequence Number=SeqID_54122
atggagatcgacctctacttcggccgcaagcgtgtcgttgttggcgatgatggaaacaagaataaagcagaagcagtaaatgatgataatccagatgaaacatgtaacctaaatggtgatgacaaaacacttctttctagcattcctgaaaatgttgaacctgatcccacgttgtgcaaagaaatagataattcagggggagaacctttagttgttgactcagttgaatctgtggagccaagggcatcaaagaaatcaaaggttgaagttgatgaaactcgggataaacgaatcaaggtcctaccactgaaaattatagattttcgagagaagctgtaccttgctcccttaaccactgttggtaatcttccttttcggaggctctgtaaaaccttgggagctgatgttacttgtggagaaatggctatgtgcacaaatcttttgcaggggcaagcttcagagtgggctttgctgcgacggcatccatcagaggatttgtttggggtgcaaatttgtggaccgtatccagatactgtagcacgaacagttgaacttgtggataacgaatgttcagttgatttcatagacataaatatgggctgcccaattgatatagttgtcaacaagggtgctggatcatcattgctcacaaagcctatgaggattaggagtattgttcaagcggcatcaactgttactgaaaaaccgttaactgttaaggtaaggacagctttctttgagggcaggaatcgtgctgattctttagtttcagatatctacaactggggtgcttcagctataacaatacatggtcgatcacggcaacaacgctacagcaaacttgctgattgggactatatctaccagtgtgcacagaaggctcctgactatttgcatgttattggaaatggcgatgtattctcctttactgactggaacaagcatgtttcagactgctccaaaatttccacttgcatgattgctagaggtgcacttatcaaggaaggatatttctttgatttttcactccaatgcgaaaaatgttcatga

SEQ ID NO: 12344 - DNA, 672 bp, Zea mays
  Peptide Sequence Number=SeqID_54123
atggctgcgaccacgccggccaccgacccgccggatgccttgcttgcagtaacagctgatgctcccactcctgctcgtcccaccccggcggagctggtagcccgcgccgtcgcccccgtcaagcccgccttcctctgcccgcctcccgtccgtgaggcacccaaggaggagggtaaagccgccggcggcggggccgtcgtaaaggtggagaagaagtccaagcgccagctcaagcgcgagcggcagcagatacacgcacaaatatttacgacatctaagtccatcagataccatgtgaagtataatttaatggaacaaaaatctacttctcacctttgtatcgaagtagggaaaagtggaaatgtggactcatgcaaatatggtacttcttgtcatttcagccatgacataaatgcttatttgtctcagaaaccagctgaccttgaaggcacatgcccatttactgcactgggacatttgtgtccatatggactaacttgtcgattccttagtacacataaggataaccttgctcctcaaaatcatccagagggaaattgtgagagaaatcctttgagcaaagaaattcaaaagctcttatggaagagcaaatataaatttcccaaggccagtgcccagatcaaacttcttggtcttaaggtatatagctaa

SEQ ID NO: 12345 - DNA, 363 bp, Zea mays
  Peptide Sequence Number=SeqID_54124
atggtggctccagagaaatctcagattgaaatgatgaagcagagagtggaaggtcagacattctgctcaaacaaggagattaatgcaactacaaccagtcgggtcaacaaaaacagtattgggctggatggtatgaatctttttggggaaatgattaaccttcagctttcaaaccaggaggaagggaaacaggatttgaaacacatgctggatgacttcccaatagagggcaatgaggaagattggcatgggaacatattggagcaggctgagctttaccacacagaagaatatggtgaacatgaatgggagaaggcattaagcaagaaagggaagaaaaaaatagaaggaactttccagtga

SEQ ID NO: 12346 - DNA, 531 bp, Zea mays
  Peptide Sequence Number=SeqID_54125
atgacgcaggagggcgcacagtcaatagaggaagagcagaggcgacacagggagggcatgtgtggccgatggggacaatggtggcaagcaaaggttgtggttgggctcaacgagggtagggagggcgcacagcttgacaggagcgtgggattgtcgggcattcctggaggcccattaactcgaaatggctatgggtgcccaggaccaacattctctcaggtggttaaggaaggagggatggcgtggagaacggaaccaggaggaatagttggaagcgaccccctaaggattggatggaagatgatgacttattggattcagagtttagcagggaggaagacctacgagccaagctctagagagccccaggggaacagactgagcaggatcagcaagaaattggacatcatcgtcaaggaagttttacaggtaacaagattcctcggaggggtggtttctggagagggcgtgggaattttgtgccagccaggggtggctttgggggtgccaaggttcacaataagccaataa

SEQ ID NO: 12347 - DNA, 177 bp, Zea mays
  Peptide Sequence Number=SeqID_54126
atggcgaggctattgaagcaggagggcggcttgcggcgtgcaggcaatggtggtgccctggatccgtatgtttatatggtcgcagacagatcagatgaagttaacgaagctttgtttatagaaatagcgatggagatgtttattgtaaggcaattggacatgccaagttctatctga

SEQ ID NO: 12348 - DNA, 267 bp, Zea mays
  Peptide Sequence Number=SeqID_54127
gaccctgtggtgaaggaatctgtgggagccctctacgaccggaatgtggggccctctcggtcgagaggtggtcagggagcggaccgagacggcgaggggtcagccacgtcaacaggccgttgtgttctgaccgttggagatctgactcgtggacccgtcgggctgttcggtgatgcaccggccaactcctgtatactgtccgagtcgctctcatctggggcaccggacactgttcggtggtacaccggacagtccggtgaaaattag

SEQ ID NO: 12349 - DNA, 2475 bp, Zea mays
  Peptide Sequence Number=SeqID_54128
atggcgtcctcctccgccgccgccgccgcgccgcccgtcgccaagcaggtccgcatcgcccccgacgacgggcatatccagttctccgacggcgactccgattccgaggatgggcacatcaagttccactccgacgaagagcccgacccggctcgccgccgcccggaggtcgtccgctccaccggcgcgccgggtcctccgccaccgcagatgggacagccgtatgcctccggcggagggtatgctccgccgccgtatggtcctggatacggttacgggtacgccactgggcctggtccgggtcctggtcctgattatggcggtattggcatgaacggcggcggtggttatgaaccaggccatggtgtcatgtatgggcaaagctatggtggcagcggcagcggcggcggctatgatgaccagggctatggtggcatgggcagtggtggcggcgctggcggctatgaccaaagctatgctggcataggcggatatggccagagcttctttaacatcagctacgctcgcagccagccacctccaccatctgtctcgcacgagcaacgcctggaggcgactaatgccagggtccactactattccggcaatggcgagcagcagccacccccgcgtggctatggtggtgggtactcctacccaccacagagttcaagatcatataatcagtatgcctatggtggttactatggaggtggttctgctcctgcaccaccagcagacatcccatcctcctccggtgagccagcagcagtgccaccgcctccatctccgcccagggtgtccacctgggagttcctggacccgtttggaacttatgagagctactacgagcaaccaactgctacagcagctccatactctcctggcaggagtttgaaggatgtgcgcgaggaggaggggattccagacttggaggacgaagacatggaggtagtcaaggaagcttatggtgatgagaagcaccctgtgaagggttacatggggaacgggaaggccgcaaagggagagggtaggagcagcacgggggatgaattgccccgcaagtccaagtcatctgaggccagtggtagtggtagcagcttggagcatgacgttcatgtagtggaaaaaagtgttgtcggagaacaagttcgacactcggagccacggcagcatgttgccggtctaccacccacaggatcggaaaagctatacattgatgacactgaggtggtggtggagatcaggactcaattcgagcgtgcctcacaatcagctggtgaggtatcaaagatgcttgaggtcggaaagatgccttactaccagaagggttcaggtttcaaagtctccgcaatgattgtttgtggtataccgacaatggaggaggagtttctgcgttttgaagaggacaaggcgatgggctctggcaacctctcctctacactacagaaattgtacatgtgggagaagaagcttcttgaggaagttaagacagaggagacaatgcgggtactgtatgacagaaaacgtgaggagctgaaaatgttagatgagaaaggtgccgaagctcataagcttgaggccactgaagtttacatcaggaagctatcaactaagattagcatagctatccaggttgtaaacactatttcagaaaagattagtaagttgagggatgaagagttgtggcctcaaacatgtgagctcattcaagggttgatgaggatgtggagcgttatgctagaatgccatcagatacaactgcatgccatatcccaagctaaaaacatagactccatgatagacactgcaaagttcggtgacgctcatatggacttgatcaagcggttagagcttcagctattggattggattgcttgttttgttgcatgggttagcgctcaaaagaattatgttaaaaccttaaaccggtggctgacaaatggtgttatctatgttcccgaggaaaccgaggacggggcgcctccattttctcctggaagattaggagggccaccgatcttcgtcatatgtaataactgggctgccagtgtggacaggatatctgagaaagaagtagttgaggcgatgcaggcctttgcatccaacgttctgaacctctgggagaggcacaggtcagagcaaagacagggtctgatggcgaacaaaggcatggacagggatcttagggtgatggaaagagatgagcagtcgatgcgcaaggccctggaagcgcagaacaagaagctcgtgctcgtttcgagtcagggcagcgtgtccttgtccgcgcaagcgttacatgagcagcgaggccctggcgctgaggttggcagtttgcaatcaggcctgagaaatatcttcgaagcgatggagaacttcacttctgcatccgcgaatacatacagggagctccatcttcgcgccgaagaagagaaagcccgagttgcgcaggagagcggcggcagtgttccctaa

SEQ ID NO: 12350 - DNA, 513 bp, Zea mays
  Peptide Sequence Number=SeqID_54129
atggaacgctgctctccaccccatgtcactatgccagcgctcaaccgtacatacaagaggccaggctatcagaagccgcttcaccgcgccgccaccgccaccgcgaggatgccgttcaagaggttcgtggagatcgggcgcgtggccctggtgaactacggggaggactatggccgtctcgttgtcatcgtcgatgtggtcgaccagaacagggcacttgtggatgcccctgatatggtcaggtgccaggtgaacttcaagcggctctcacttactgacatcaagattgacatcaaacgtgtccccaagaagacagccctgatcaaggcgatggaggaagctgatgtgaagaccaagtgggagaacagctcatggggcaagaagctgattgtccagaagaggagagcatcgctcaatgactttgataggttcaaagtcatgctggcgaagattaagaggggcggtgctatcaggcaagagctcgccaagctgaagaaggcgtccacggcttaa

SEQ ID NO: 12351 - DNA, 1527 bp, Zea mays
  Peptide Sequence Number=SeqID_54130
atgaagctcaccgtcagaggaagatgggctcatcttcaagacttcaacttcatggaggattctggtttgacaaaatacaatgtgcgggatttacttgagcaaatgctaattgacattatgggaacaggggtgcatcagtacccatttctccatgcgcgtgcattttctagtgtggctaaattttcttcactgataagtaaaggggtcagtgaacagtatctatgcaatgcggcccatgcgattgcctcagatgtgccacccccggttaaagttggtgcttgtagggcactggcccaacttttaccagaatctaatcagaatctgattcagccaaacattatgggcatactttcatctcttgttgaccttctgcggcaggcatctgatgaaaccctgcatcttgttctagaaaccctgcaatcagcaatcaaatctggtggagaacaatcaactttaattgagcctgtcatttcccccatcatactggatgtttgggcacagcacattgctgacccgttcatcagcattgatgctgtcgaagtgttagaggctatcaagaatgctcctggatgcttacagccacttgtgtctcgaatccttccaacaattggatccattttagtgaaaaatgctccagttgctgtggttaaagcagtcttcgacacatgctttgtttctactgttcaaattgttcttgaaagtgatgaccatggagagatgcagaatgcgacagaatgcttggcagcattcatatcaggtggccggcaggagttgcttgtctggggtggtgaacaaggacaaacactcaagatgctacttgatgcagcttcaaggcttttagatccagcgttagaaagttcagtatcactatttgttggaagctttgttttgcaactcattttacaaatacctctacacctgtctcctcacataccggaccttattgctgctattatgagacattactctgattacttaagcttctccaagacatgtcctcagttcactctgcctgcaggtgaaattcagggagcctaccagataaaggttacaacgactgcattagctcttctcatatcaactcgtcatcctgagctatccaaggttgaagttcaagggcatcttattaagatcttctcattgctggcagatactttaactgaaattcaggaacaaattggtgctggtgatgacgatgactccgaagaggataatgactgggaagaagttcagaatggtgatgctagtatatcagatgatatcatacactcagcatcggttccttcaatgactaatccatcagttgaacatttaaatgcaatggccaaggtttttgatgaggatgatgatgatagttatgacgatgatctgacaaaaaacgaccctcttaatgaggtgaagttagcggacttcctaacaaacatctttgctaacttgtgggagaataatcgaccaatatttgagtatctttgccagggcctgtcggattcacagagatcagctgttgaaaaggttttgaggaggtga

SEQ ID NO: 12352 - DNA, 522 bp, Zea mays
  Peptide Sequence Number=SeqID_54131
atggtgctaaacgaatcgacgagggactattggtcccagctgccaccccacaggaaccaagtgggcgaggtgggggtccccgagagcaggagaggcgaagctgacaacgggtgcgggggcgcccaagacatcgtggaaggaggggaagggcacaaagtgcttgatgaaggcctttcagtggtcataacgccgactgagaccacacagaaggctgaggacgagtgtgctgttcaagaggtggagcggacgaccaagtccccatcgagcaagtctgcatggcggagtggacgaccaagtccctgtcgagcaagtcagcggggcggagcgactgacctggacctcgaagcgctgggctataaccgcgagcatacgtcaaccacaataaggcacgtcactaggggcccacgcagtagtcgtgggcacgactgtatgcccctttcttataataagcataccacactgtctgatgggacgaggcagccttggtcaggggcgatctcagcaccggagcctccacagtag

SEQ ID NO: 12353 - DNA, 204 bp, Zea mays
  Peptide Sequence Number=SeqID_54132
atgactaatggcggctggaaggatggctcgggtcgggcgctaattaaatggagagggaagggggtccagaagacacgaccaagtaaccaaatccgaaatcccggggcaagacttggccgggagtgcgcgaaatcaccggcggaaacgatggagtccctggttcagcgacaagtcttccgcgagcctggtggagctggtggttag

SEQ ID NO: 12354 - DNA, 1332 bp, Zea mays
  Peptide Sequence Number=SeqID_54133
atggaggcgcacggcgaccagcggtggctggtggattgcctgacggatacgctcgacaccgcgcgcgatgtccgcgccttcgccgaggagtcgctccgccaggcctcgcttctccctggttcgccacctcctacctttaccccctctctcgtggacgattggcttgaacggctggcagcaggctatgtcagacagccagatggcttgcgagagggcatggaaggaaatttgctgaggagggtgggggtggtcatacgacagctcctgcttacctcattggatgattctaatgggaaaattcgcactgctattagcatggctgtagcagctattggacagcaagattggcctgaagactggcctgagttacttccggttctcttaaagttaattggcgatcaaagcaatgggaatgaagttcgtggagcattaagatgcctagcccttctatcggatgatctagatgatatgtgtgttccaaagctagtgccagagctattcccatcactgtatagaataatatcatctcctcatctgtatgaaaattctcttcgtgcaaaggcttttgcaatagtccattcatgtatttctatgcttggatcaatgagtggtgtctataagagagatacagctagtctgatgacttcagtgcttgatccactaatagagcaattctccatagttctaaattatccggtgcagtcccaaaatcctgatgactggagcatgcagatggagacctatcacctgtcatacattcaaggtgcagaaactttggattctattagttatgattctgatggcagtgaaaaaagtcttgagtcattcgagattcagttatttgagctatggacaacaattgtggggaattctagattagcaaaggttattgggggaaacattaaggagctagcatactatactatagccttgcaacagataactgaagaacaggtgcaaaactggtcacgcgatgctaaccagtatgttgctgatgaggatgacctaacctatagctgtcgtgtgtctggatctcttttgctggaagagctagtaacagcttatgaagattatggaattgactcaattgtggaagcttcacaaatgcgttttcatgaatcacgagaattgaaggaagcgggttctgctgactggtggagactgcatgaagcatcactttttgctttaggttcactgtcagaacagttgtgtgaagcacaggttggccggtgtggtgtcgaagagggcgatgaagggagtgggatgacataccctcttggaggggaggcggttgaggtctgggtggcagtattcaacgcctccacccaatag

SEQ ID NO: 12355 - DNA, 408 bp, Zea mays
  Peptide Sequence Number=SeqID_54134
atggggcgcgtccgggtttgcgacgccggggcgaagctcaccgttgccaaccggacaccgcgccgaagttcacgcgcgggcccggagacgagctccggacggcggggattgtgcggcgtgctctggcgtgcgcgcagcggggggagagtggaagaggggtcctgctggagcgcaaatgggggagggggagagggccgagtggggctccggggctccaagtggcccaggggcgggggcggtgcgagagtccccacccgcgcgacccgtgggcgcggggggacccgcggcaacaacgcgcagctctcgggcggcggttaccccgaggacgatggggctgacaaagccggggcccgcgagcagagagagaggggaaagcaggggcgggcgcgcgggaggcggctgcgctga

SEQ ID NO: 12356 - DNA, 306 bp, Zea mays
  Peptide Sequence Number=SeqID_54135
atggagacgcatcgccggagcgcgacgaattggcgcccaagtgccccaccgcccgtgctattacgttctacgcaaagccgagataatggagaacacgaagggaagttccttaccagcgatggagtcacaggaacgcccgcccatggcgcggcgcgggttcacggcggcgtcgcaccacggcgaggaattgcgacgtcacccaccaccaatagcgcccggaactaccttgtgcaccaccagtccgacctcccgaagctcctaggtccagatctgaggtcaattcggtggctacgcggagatgactaa

SEQ ID NO: 12357 - DNA, 450 bp, Zea mays
  Peptide Sequence Number=SeqID_54136
atgtccccgccggattcgtgctaccggtttgctagacggactgtgctgcggggtataaatgtagccgaactccacaccatcctggagaggagccctcgacggaacttgagccacacagcgagcaccaccgagccgccctccttcgtcgttagggctctatgtggcttaataaccgccctactaaccgcagaaaacaacccaccgtgtggctgggtgtgcggctttggcaatggcgccgccgtgctcacaatcatgaccgcgaccgctaggttcgcggggagaagaaggcgctggggcgttgatcttgggatcagcggcttcgacctactaaccgaggagaacaacccaatgtgtggctggttgtgtggcttcagcaatggcgccgccgtgctcacaatcacggccgcgaccgtcggggttcgcggggagaagaaggcatcgaggcgttga

SEQ ID NO: 12358 - DNA, 363 bp, Zea mays
  Peptide Sequence Number=SeqID_54137
atgccgtttcgatccattcgctctcccaccgcgcctgctccatctgtcaagcccgcccccgcgccgccgctcatcactgacggccgcctatgtcagctccatggcctccagccttgcgccctaccctcgtccgcgccaacgccgccaccttcgttggcgccggtcaccttcgaccgcctctgccccacctgtccccggcccctcccgctgtcgtacgcctctgctttgcctagccccagccgccccaaccttgcgcgcccacgtcccgacagtgtccacgtcgccgccactaacctcggggtgaccgtcagactccgtgtttatgacaaaggcatgtgctcctgcgtagtttcggcagcgtaa

SEQ ID NO: 12359 - DNA, 618 bp, Zea mays
  Peptide Sequence Number=SeqID_54138
atggctcccgcactccgtggctaccaccaccgtgagcgcgataccacaatgaaggtcccgacccaatctaggcgtcgactatcgcacaaacaggattccccccatggcagcttcctccactaccactctgcttcttccgcccagcccagtggcggaggacgaaaaaaatttaggtatggctctacacaactcgacggctggaacctggaagtggaaggcgcgtgctcggcgcgtgctgcgcgtgctcgggccgagcggacggcgagcggaggcgcgaagctgctcgccttctcgggctgtcgggcgcttggcggatgggcggacagcgcgctggagtcgcggagcggctcggtccaagccgagcggacggcgggcggaggccggaggcgtggagctgctcgcctgctccgctgctcgggccgtcgggcgatcgccggacgggcggacgacggccggagaaccgtagccgcggcgcaactcggggcctcgggccgagcagatggcggacgacagatagaggcgcaaaggcggagcggctcgccttccaggcgatgtaggctgctcgtgccctcggcggacgggtggacggctcgagcgctcggcgcctcggccggctga

SEQ ID NO: 12360 - DNA, 198 bp, Zea mays
  Peptide Sequence Number=SeqID_54139
atggcggaggatggaaatgggccgaggaaaaagggattaagcccaggtaatgttttgaacatgaaatacacacaccacatttattacatagaatattattttgggtgtgtcatcaatttcaaggatttccttaactcgcaagttaagattttgggtgttacaatagcgattaatgtagaagaatcatatccaatttaa

SEQ ID NO: 12361 - DNA, 261 bp, Zea mays
  Peptide Sequence Number=SeqID_54140
atggggacgcagacggggacggggacgccatgggggtctcgctcccggacctcactgccgccggcctgggccccgcaaccggcgccagagacggggacgtgggcgcggtggaggtgtgcggcgggggcaggcgacacagttatggggagaggaggaggtggatccaaggcgtccatagcagggaaccgcggcgccttcgggcgagatccacggcgggggaaggggcgcggtggaggggtgcggcgggggcaagcggcgtag

SEQ ID NO: 12362 - DNA, 363 bp, Zea mays
  Peptide Sequence Number=SeqID_54141
atggctgaaaaactcccagtgctgctacgctaccagagtcttcatgtgcatacttacttcaagaactcaaggccaaggcgctctccgagcaggctgccgcggtcggcctgcgcgcgcagctggtcggtcgaggagctcgccgccacagcgggggacgccggcctggcggagtcgtcggcgtcggcattcgtggaccctcgctgcgtcgggccgccgccagaccacgcgtgcctgggctgtcgcctcaggccggccatcgtggtgctcctcccctgcaggcacctgtccctctgcaacggcgccatgccatgccctgtgtgcttgtgcgtgcggacggggagcgtggaggccatcctctgctaa

SEQ ID NO: 12363 - DNA, 408 bp, Zea mays
  Peptide Sequence Number=SeqID_54142
atggcctggtgcggcctcgtcacggacccgctctaccgccagcggttcgcgcagaccctggcggggttcctctgccgcgtggacggcgacggcggcaccgagagctcgcggctcacgcgccccaacgccatggtcccggagcagaaggagaccactcggcggttcatcaacgtctccgggatggcggagccgcaccccgacgccttcttgcccttcctgtcgcctccccacggcgaggggctacacgatgtgatcttggacgcccacgacggtctcgtcctcctggcccacgcccgggggcacgagccccctgacctccatcttcttctttgttcccccgctcacctcggggccttctcgtcttccttccgtccgattcgtctagcgccgagtcggattcttggttag

SEQ ID NO: 12364 - DNA, 861 bp, Zea mays
  Peptide Sequence Number=SeqID_54143
atggcgctacgctacggggctggagggacacgtgaacgcagctgcctgcgccgctgcgcgtttgggaatcgggaatggcaacgagaagagagaggggctcggtcgggtgtaagattgactgatgggaaggcgtccacagttccttggcgcacggttttgccgtcgcgctgcgcgcctgccatctccctcggcgctccatccgccaccatcctcgctcgcctccctccgcgcttcctgcagccgcgtgcttcttccttcaacggcgcggatcccccgcgctccatccgcactgcatccgtaaaccgcctccctccgcgcttcctgcaaccgcgcgctccttcaacggcgcggatcccgcaccctcgaatcccgccagcggatcccacaatcaagcagcggcagcgtccttcgatggcatcctccctcgcccagagacgacacgctgtggtatgcaggcggggacatccgaatcgtgtccgtaccgcgcggggtgtcgctgcaggacctcctcgtgcggctcgtcgtacgacgatgacgacgtccttctcttccgtcgccgagatacgtccagagcgtggcaccgacacccacaggccacgacaccaccgctcgctcggtcttggcgtccgcctccacgcactcttcctcccgcaggccatccatccgacccgatccgatccgagcgtccatcatgtgggtgacgtcgatgccgcaggtgtgggacgaggagggcgcgaccaagggcagcgtggtgaccccagcgtaggtcgcggccatgctgggctcgctggcggggtggctgtcccggaacgtgcagcctccggcgcccgggtgtgcggcacctcaggggcttgcccgtga

SEQ ID NO: 12365 - DNA, 1182 bp, Zea mays
  Peptide Sequence Number=SeqID_54144
atggatacgacactcctccggagcaatggccgcctcctgcccttgttccttctcctgcttgccgccgccgatttcacggcggtgcagggccagggggggcagcagcagcagcctggaccagctgggggggcatactactcgcaaagcttcagcccgtccatggccatcgtcatcgtcgtgctcatcgccgccttcttcttcctcggcttcttctccatctacgtccgccactgctacggcgacggctccagcggctactccgcgaaccggccgccggcccccggcggcgccgccgcgcgctcgcggcgccagcgcgggctcgacgaggccgtgctggagtccttccccaccatggcgtacgccgacgtgaaggcgcacaaggcgggcaagggcgcgctcgagtgcgccgtctgcctcagcgagttcgacgacgacgagacgctgcgcctgctgcccaagtgctcccacgtcttccacccggattgcatcgacacgtggctcgcctcgcacgtcacctgccctgtctgccgcgccaacctcgtcccggacgccaacgccccgccgccgccgccgccggccgacgacgacgcgcccgagctgctgccgccaccacccgtgtccgcgccgcctgccgccgccgccgctgcggtggtcattgacgtggacgagacagaggaggagaggatcatcagagaggaggccaacgagctggtgcgcatcggcagcgtgaagcgcgcgctgcgctccaagtccggccgcgcgcccgcacggttcccgcgctcgcactcgacgggccactcgctcgcagcgtccgccaccaccggcaccggcgccggcgccggcgccagcaccgagaggttcacgctgcgtctgcccgaacacgtgctccgggacctcgccgcggccgggaagctccagcgcaccacgagcctagtcgcgttccgctccagccgcggcggcagcacgcgccgtggcgtcagcgtccggaccggcggcggcgaaggcagcagccgcgccgggaggagcatccggctgggccagtcagggcggtggccgtcgttcctgtcgcgaacgttctccgccaggcttcccgcgtgggggtcacggtcgacgcgcaggggcgtcgaggctgacgggtccagcaagggcggtagggcggccggcgccggcgccgccggctga

SEQ ID NO: 12366 - DNA, 378 bp, Zea mays
  Peptide Sequence Number=SeqID_54145
atggcgacggaatcggcggcggagatcgtctgccggctaccggaggagtgcgtggcgcacgccatctcgctgacggcgctcggcgacgcgtgccactcgtctacggtgtcgccggcgcccttcagggccgctgcggactccgacgccgcctgggcgcggttcctgccgccggaccacgcggacgacgtcctggcgtctgcacccgcgttgagcattaaatggttgatggcacggcctgacgcatccatgcatgcgtttctagagtgcatacattttcctcaacaacagggactagctggtgctgacattaggaccgtaggcaaggtgcctatcgatcaacgttttaatggcctttctcgcaaaaaaaaactgttttaa

SEQ ID NO: 12367 - DNA, 1155 bp, Zea mays
  Peptide Sequence Number=SeqID_54146
atggtggcggatggagcgccgagggagatggcaggcgcgcagcgcgacggcaaaaccgtgcgccaaggaactgtggacgcctacgatagctcgagtctgcaggcggctgctgctgctggtggtggtttcttgagaggcgagaccctgaaagggatggcactggaggccgtggtgctatcccagtcccagttccagcaaggcagtcgctttgggtgcggtgccatggcagcaggaggggcttggagtgatctgttgtttagtggaacggaggggttgttcgagatgggtggcgccgccggccgcggctggaacgcggccgcgagctcgccgccgcagctcctgcaggagctgggtgacaacggtgctgccggctcactacctgtggcgtctgcggggagtgcgagtggcggcgccggtcaggatgccccggcaatggctgcggcagcggcgtccggaaggaggaagcggcggaggatgaggccagtgaagaacgaggaggaagtggagagccagcggatgatccacattgcggtggagcgcaaccgccgcaagcagatgaacgagcacctcgccgcgctccgctcactcatgccgccggcccacacgcaacggggcgatcaggcatccatcgtcggcggcgcgatcaacttcgtcaaggagctggagcagctgctgcagtcgctggaggcgcggaggcgttccccgcagtgcgctgcctacgccgtcgatcccgacgacgcggggccgttcgcggacttcctcaccttcccgcagtactcgatgtgcgccgtcattgcggccccagagaacactggccaccaccgtgagggcggcgccgtcgccgagcaggaggcgtccgggtcgaagccgtcggccgtggccgacgtcgaggcgacaatggtggagagccacgccaacctgcgggtgctgtcccggcgccggccgaggcagctgctgcgcctggtgctggggctccagggccaccgcctcaccgtgctccacctcaacatgagcagcggcgcccacatggtgctctactcgtttagcctcaaggtggaggatgattgccagcttacctccgtgggtgagattgcggctgcggctcatcacatcgtcgagaagattaatgaagagcaaaacaaggctgcagcttag

SEQ ID NO: 12368 - DNA, 219 bp, Zea mays
  Peptide Sequence Number=SeqID_54147
atggcacaacaaccagactttggccccacctacaggcttgtaacctcccctgaggcgggccccgaggccactgtctgtacccaggaacaggggtaccccttactatacacgccgattctactcaagcggcggatgtcggggcatagggagataacacaagttataatgagacaatttattggattcaagctttatagaacacataaagggagggtttaa

SEQ ID NO: 12369 - DNA, 504 bp, Zea mays
  Peptide Sequence Number=SeqID_54148
atgggtctgtggtggggtgagtggaggaggactgaggctgtggagtcgtcgtgccgtcgcggcttaaccgttcgtgggagctatatgcctagccaaattatgtacaaaaattatgttatgcatagtcagcacattgcacaggacaataagaaagatgtatacttccagtataaaaacctagccaacttgacaaaggcgtcattaccagagcacatgatcctagagccgggggccagttgtgtggaactacgcataaacgaagccatccagaaccaattctcatttgtagtggcgcattcgaactccacctttacatgcataacaccagccgaggaaggcgctgaccaccttgcggaagagctcccggtcgtaggtgaggatctacgcctacgcaccgcgcctgataaagaagggtggggggcgacagactctgccaagtcccacatcagcgatgatggtctcactaccagagaggaggaaggtgttgtccgctcctggtcataa

SEQ ID NO: 12370 - DNA, 390 bp, Zea mays
  Peptide Sequence Number=SeqID_54149
atgagcaaatggtcttacttcgggaggcagggcgatgctgtggaaggtggggaggcgctctggaaggcgtgcgatggacgaggcgacgctgcgggaggttggcagagcttcgggaggcgtgtggtgggtggtcgtgccctggcagatggcgctacgggcggtggcggcttcgatggagcttcaggaggcgtatggtgggtggcaacgccccgacggatggcgctacgggcggcgacagcttcagctctggcggacgtggcatcgacgaacgagtgtgggtgcgacttctacatggcagtgagggcggcgacgatgaacagcttcggcggggcatggagccggggatgggccgagaaagggcgtcggtcacaggcgatggtggggcggtga

SEQ ID NO: 12371 - DNA, 837 bp, Zea mays
  Peptide Sequence Number=SeqID_54150
atgggagggtccattcatcgtcaagacgaaggcatcccccagcgtgtacggcgcgcagtttgcttcacgtgggccagatctccgatgcagaggaacaaggagggcaggcgagcgggcgagcagtttcaaaagcttagggttttccggcgcacgcaaaggttcaggctgctagagactatttctaaagcattggtcacttctcaggccattgcctctgatcctagcccgctccaagacttctgtgttgccgacaaagactctccagtgaaggtgaatggatttgtttgcaaggaccctatggctgtgaacgctgacgacttcttcaaggctgcaaaacttgaccagccaagggacaccaccaaaagcaaggtgggatccaacgttactctgatcaatgtcatgcagctgcctggactcaacacgttggggatctcgttggctcgcattgactacgcaccattaggtcagaatcctccacacacacacccacgtgccactgagatcctcaccgtgcttgaggggacactctacgtcggatttgtcacctccaaccaagctgacagaagcaacaagctatttgccaaggttctcaacaagggcgatgtgtttgtattcccccaaggactaatccacttccagttcaacccagtacatgacaagccagcagtcgccctcgctgctctaagtagccagaaccctggagctattactattgccaatgcagtctttggatcaaagccacctatctcggatgatgtcctagctaaggcctttcaggtgcaaaaggggacaattgattggcttcaagctcagttctgggagaacaaccactactga

SEQ ID NO: 12372 - DNA, 1536 bp, Zea mays
  Peptide Sequence Number=SeqID_54151
atgatgccgcagcagcagcagcccggcatggcccctcctcctccacaggccgcccccggagcgccgccacactggggcggcatcccgccgcctatggcccctcagcatcagtacgcgccaccaccgacccatcaggccccgcccccgccgcagatgtggggccaggcgcccccgcccccgcccccgcctcaggccgcgtacggtcaggcgcccccgccgccccaggccgcgtatggccaggcgctcccaccaccccaggccgcgtacggccaggcgcctcccccgccacaggccgcctactacggggcggtacccgcgcccgcggcggtggccgcggcacctgtcgggcccagcgaggtcaggacgctctggatcggggatctgcagtactggatggacgataactacatctacgggtgcttcgcatccacgggggaggtgttgcatgcaaattcattgccaatgtggcaggtgcaaaatgtgaagctaattcgtgacaagcatactggacaacttcagggctatggttttattgaattcataagccgcgctgctgctgaaagagttcttcagacttacaacgggacaatgatgccaaatgttgagttgccattccggttgaattgggctagtgctggtgaaaaacgtgatgacacccccgactatacaatatttgttggtgatttggctgctgatgttacagactatgtattacaagagacatttagggcacattacccttctgtgaagggtgcaaaagttgtaacagacaagctgacaatgcgcacaaagggttatggttttgtgaagtttggtgatcctaatgagcaagctcgtgcaatgactgagatgaatggcatgctatgttcttctaggcctatgcgtattgggcctgctgcaaacaagaaagctactgttgttcaggagaaagcacggcttgattttattgaagctttagggcctgtttggagaggagcctacggcgccgcagcccgccacacctgcggcggccgatttgggcgccacacccgcggcagccggagtgtggcgcgatttttgttggtggtcttgacccccaatgtcactgaagatatgttgaaacaagttttcaccccttatggggacgtagtccatgttaagattcctgttggcaaaagatgtggttttgttcaatatgctaacagatcttcggcagaggaggcattggtaattctgcaaggcaccttggttggagggcagaatgtgaggctttcatggggtcgcagcccttcaaacaaacaagttcagcctcaacaggactccaaccagtgggccggggctaatgctggatattatggctacggtcaaggctatgaggcctatgggtacccccagtctcaggaccctaatatgtataattatggagctggagcttatgctggctatccaaattaccaacaacaaccagtagcacagcaaccgccgcagcaacagtttttggcgaccatggtaaagtggaacatcgaccttgtttctgctggatttttgtatctttga

SEQ ID NO: 12373 - DNA, 132 bp, Zea mays
  Peptide Sequence Number=SeqID_54152
atggcgaacgaggtcgcgacaattgaggcgaagaccatcattaccgtgtggaggggtaccctcaagatgcctaattctcagctggtaacccccatcagcataaagctgcaaaggcctgatgggtacgattaa

SEQ ID NO: 12374 - DNA, 654 bp, Zea mays
  Peptide Sequence Number=SeqID_54153
atggctgcctcgacctacttccttcttgttgcttttctagcattggtcacttctcatgccattgcttctgatcctagcccgctccaagacttctgtgttgccgacaaagactctccggtgaaggtgaatggatttgtttgcaaggatcccatggctgtgaacgctgacgacttcttcaaggctgcaaaacttgaccagccaagggacaccaccaagagcaagctacctggactcaacacgttgggcatctcgttggctcgcattgactatgagcccttaggacagaatcctccacacacacacccacgtgccacagagatcctcaccgtgcttgaggggacactctacgtcggatttgtcacctccaaccaagctgacagaagcaacaagctatttgccaaggttctcaacaagggcgatgtgtttgtattcccccaaggactaatccacttccagttcaacccggcccatgacaagccagcagtcgcgctcgctgctctaagtagccagaaccctggagctattactattgccaatgcagtctttggatcaaagccacctatctcggatgatgtcctagctaaggcctttcaggtgcaaaagggtacaattgattggcttcaagctcagttttgggagaacaaccactattga

SEQ ID NO: 12375 - DNA, 876 bp, Zea mays
  Peptide Sequence Number=SeqID_54154
atggtgtctattggagcgaatgccgaacacaacctcgatcagactaatctggctacaattaaacatgttttggtgcaggctcagactcttccctctacagcgaagtccaagtcccaacgaagtcaagggcgcgacttcgcgcagtcgagggtgcaactcgcagcgttggtcacatctcaggccattgcctctgaccctagcccgcttcaagacttctgtgttgccgacaaatactttccggtgaaggtaaatggatttgtttgcaaggaccccatggctgtgaacgcagatgacttcttcaaggcagcaaaacttgaccaaccaagggacaccaagaacaaggtgggatccaacgttactttgatcaatgccatgcagttaccaggactcaacacattgggcatctcgttggctcgcattgactacgcacccttaggtcaaaatcctccacacacccacccacgtgccacagagatcctcaccgtgcttgaggggaaactctatgttggatttgtcacctccaaccaagctaacaacaacaacaagctatttaccaaggtcctcaacaagggcgatgtgtttgtattcccccaaggacttatccacttccagttcaacccggtccatgacaagccagcagtcgcgatcgctgcactaagcagccagaaccctggagttattactattgcgaatgcagtctttggatcaaagccacctatctcagatgatgtcttggccaaggccttccaggcgaagaccatcgaagatttcggggactggatgaccaagactgcgaagaccccaaggctttgtctccctcaatgcaagaaggggcccgtgtacaatccgacccatgttgtaaggccccgcccgtag

SEQ ID NO: 12376 - DNA, 438 bp, Zea mays
  Peptide Sequence Number=SeqID_54155
atggggcactgtgaatttgtcgccgttgatgaatctttaccacggatccgccgcgcagcgtgggcgagctcgcaacctcctcaacagccggtgagaacttctcctatagctccgccatgggctagtaatgctgtagctcgggttcgatttgtgaatgggggcgtggatggtggaatcgactgtgaccggcgatggtgttcgccgcggattattactgtgtattttgcatatatgtttggtgtaatgttaattttgcctatacaacatttgtctgtattgctacgactagcagtgaggttacgaggatctgaagttcatcctgtcacctggaatctcaagtcccaggcaagttgtgcccttgatcacttctttttacctactcatgttctgattaatcataatgatctgcataggttaaattttgatgggacccaatag

SEQ ID NO: 12377 - DNA, 435 bp, Zea mays
  Peptide Sequence Number=SeqID_54156
atgggcatcgggctctgctgttgtggggaggagaagctgcaagggaggggcacgtccatggcagggaataagggagctcagatggcgtccatggtgaggggcgtggtcactagggctccagggacgagcaggagcagagggaggaagatggctggcgaggagctcggagccgatgccccgacggcgttgacgaccgtggaggcgcgagcaggggggcgcgccggccatggggacctcctgctcagcgcccgagcgaaggagaggctaagccgcaggggaagctgcaggggaggctgccgtgaaggagaaggggacagggagaggagtggctgctcggatgatttaatgggacgctgctggcagctattggctcgtgccgaagatacaatttttgctcctacgaattttgtctcatcggagaacagagcgaaatag

SEQ ID NO: 12378 - DNA, 396 bp, Zea mays
  Peptide Sequence Number=SeqID_54157
atgggcatcgggctctgctattgtggggaggagaagctgcaagggaggggcacgtccatggcagggaataagggagctcagatggcgtccatggacgagcaggagcagagggaggaagatggccggagaggagctcggagtcaatgccccgacggcgttgacgaccgtggaggcgcgagcaggggcgcgcgccggccatggggacctcctgctcagcgcccgagcgaaggagaggccaagccgcaggggaagctacaggggagggtgtgtggcgccatgggagagggaggagatcccctacttgctgtcgttttggagaaggagaagttccacgggagagacggctgggagaaaaagaaagggtggcggctggttgatttaacaggacaccgctag

SEQ ID NO: 12379 - DNA, 270 bp, Zea mays
  Peptide Sequence Number=SeqID_54158
atggcgaagatatctaggtgcgtaccagaggcggggatggagtttggagaaccgaccacggcgcagagcgggttggcggcggtgatgttgatccggcgagcaatttcgacggctcgggtgacaattctcgagtggcgtggctacgaccaccttcccccaggtctgaaggagcccctgggcacaattctgaggcagtggtcgatggaagtcgaagttccccagcggcgacaccctcctcttttcccggtggttgtggctctcggaggctag

SEQ ID NO: 12380 - DNA, 633 bp, Zea mays
  Peptide Sequence Number=SeqID_54159
atggacgcgacgggacagcaggagcagcatacaggaagtgcaggcggagatctctacggagtgcttctttactacaagtacgccgaggtgcctgacgccgccgcgctcgccgcgttctacgaggcgcactgccgcagccttgcgctcgtcggccgcgtccgcgtcggccccgacggagtaaacgcgacgctcggagggcagatgaacgcgctggagaagcatatcgcggagatgagctccaacgacttgttcgtgggcacagatttcaagctggcgtcctgcgacgaccctgtcgacgagagggtcgcccgggagtgcggcttcacctcactctccgttcgggtcgtcaaggagctagttaccctgtgctgcaaccccgcattggcacccccagagatttcgagtgctgggagacacttgtctgcggccgagttccattcggtgctccagaatgttggtactgcacaggaggtatacgctgtgaaatggcatcagcttatattcgctcaaaaggtgaaggatttgagaacgtttttcagctatatggaggcattcagcggtatctggagcaattcccagatggtggctattttgaaggaaagaattttgtatttgaccacaggattctactga

SEQ ID NO: 12381 - DNA, 378 bp, Zea mays
  Peptide Sequence Number=SeqID_54160
atggcccccaagagagcgaattcgaaggccaccgtttgcatcgacgacgcagcgaaggcggcccttctagcggtaaagaaaggcaaggctcccattgcagacgacatccctcaggaggccttcgacgaagatgcagtcaacagcaaaaggcaacgccaggacaaccagcctacgccagagggcaccgcgcgcacctgtagttccgtgggggcaccacaagcagcctcgctaggcttcattcacccagaaggcgaagacaccgtcgaagacggcgaaatcataggcatttcagctgaagaccaattaaagctacgagccctgtgcatcaagaacattcacctacaaaagcaaaaagaaatactcgcagccaagtgctag

SEQ ID NO: 12382 - DNA, 324 bp, Zea mays
  Peptide Sequence Number=SeqID_54161
atggcaatgccaccacccgtggcgcctgctgccgctgcaagacctccctcgccaccgcgcatgactaaaacgacgatgatggggtccagcggggccgcccaggagttgtcggtagacgactacatggtggagagcgttaccatgtttgacacccagacagggctgccgtgtgctggggtagaggctgggcatttgaaggtggtgccatcaacagtggctgccggcctggtgggtgcaacaaagggtgatgcggtgaagggcggcacatggactttggaggacccgtggtcaaggttttgcgccgccaccggaggcgggggctaa

SEQ ID NO: 12383 - DNA, 564 bp, Zea mays
  Peptide Sequence Number=SeqID_54162
atggagaaagagaaagaggacctcgaccgtcggctagttgatgagaaggaagatgcggagaaagcccgcgaggaggctcaagccacccgcgcggaggcccaagctgcatggaggatgtgggggcttcgctttctggggtggttgcaagacaagctggagtccctcccgtccattgtgatgggtctcatgtcctacgcgtctctcgttacctgtgagggggctattaatgctttgtcccgagagggatgcaggcatttcgaagtcttcgaccgagcgaacgaggacttcgttcgtggagtattccagattgaagatggcatgttaaagcactctataggggcgctttatgataggatgtggggcccccacggccgttgcatcgttcgggaaagggcagaccgagcgctggcgcatgtgatgaacaaggaaggcatggaggacctcgctggccttgaatgctcggtgtcccagaggagtgcttcggtggaggcgggagccgaagagcaaacgacgcttctaggcgatgctgatgagggtctcgcggcagcagacacttcggcatag

SEQ ID NO: 12384 - DNA, 306 bp, Zea mays
  Peptide Sequence Number=SeqID_54163
atgagacatgaagaatggcaccatgtcatgctatatcatttgaccaaccttgacgagtcgagacagcaggaggaccatcatacgggggaggaggaccatcgcgccatagctatcgagactaagcttccatgccgtggtggaggacctagcctcaactgcggcagcagcagccgcatgctggagcaaacactggcactagtagaagctcgagaaaaggattgccgctttggtagaacaacccggctggagcaaatagcgacactgatagacatggagaaggtgctcgaagctacagccatggcgtaa

SEQ ID NO: 12385 - DNA, 279 bp, Zea mays
  Peptide Sequence Number=SeqID_54164
atgaggctggcagcgtggtggagaagctacgttaggggggcaggggcaggcgtggggcagatgaggatttcggcgcggcgtggggcgagcgaggatttcggcgatgatggcggctacaacacggtggggatgagccctggcaggctggcacagagggagaggtttttggggagcgagatgcgccgggccgggcggggccacgagaatgaccccgagttgaaggatactttggctgaacttgaagtagttcataagataatagatgaagctattgatgag

SEQ ID NO: 12386 - DNA, 2253 bp, Zea mays
  Peptide Sequence Number=SeqID_54165
atgacgggggaaaagaggatgttctcttcctacgtcaagaacaaggatccccaagattcaataatattcggtgatgggaaccaaggcaaggataaatctgaaacccaagggaccctcaagcgcttcctcaggagagctcaaaatgagtttgagctcaaagtgaagaagataaggagcgacaacgggtccgagttcaagaaccttcaagtggaggagttccttgaggaggaagggatcaagcatgagttctccgctctctacacaccacaacaaaatggtgtggtagagaggaagaacaggacgctcatcgatatggcgaggactatgcttggagaattcaagacccccgagggtttttggtcggaagccgtgaacacggcttgccacgccatcaacagggtctaccttcaccgcctcctcaagaagacttcatatgagctgctaactggtaacaaacccaatgtgtcttattttcgtgtatttgggagcaagtgttatattcttgtgaagaaaggtagaacttctaaatttgctcccaaagctgtagaagggtttttattaggttatgactcaaatacaaaggcgtatagggtcttcaacaaatcatcgggtttggttgaagtctctagcgacgttgtatttgatgagactaatggctctccaagagagcaagttgttgatcttgatgatgtagatgaagaagatgttccaacggccgcgatacgcaccatggcgattggagatatgcggcctcaggaacaattggagcaagatcaaccgtcttcctcaactatggtgcatcccccaacccaagatgacgaacaggtacctcaagtggaggcgcatgatcaagggggagcacaggatgatcaagttgaagaggaagaagcacctcaggcacctccaacccaagttcgagcgacgattcaaaggaatcatcccgtcgaccaaattttgggtgatattagcaagggagtaactactcgctctagattagtgaatttttgtgagcattactcttttgtctcttctattgagcctttcagggtagaagaggccttgctagatccggactgggtgttggccatgcaggaggaactcaacaatttcaagcgcaatgaagtttggacactggtgcctcgtcccaagcaaaatgttgtgggaaccaaatgggtgtttcgcaacaaacaggacgagcacggggtggtgacgaggaacaaggctcgacttgtggcaaaaggttatgcccaagtcgcaggtttggactttgaggagacgttcgctcctgtggctaggctagaatcaattcgtattttgctagcatatgccgcttaccattctttcaggttgtaccaaatggatgtgaagagcgctttcctcaacgggccgatcaaagaggaggtgtacgtggagcaaccccctggcttcgaggatgaacgttaccccgaccacgtgtgtaagctctctaaggcgctctatggacttaagcaagccccaatagcatggtatgaatgccttagagactttttaattgctaatgctttcaaggttgggaaagccgatccaactcttttcactaagacttgcgatggtgatctttttgtgtgccaaatttatgtcgatgacataatatttggttctactaaccaaaagtcttgtgaagagtttagcagggtgatgacgcagaaattagtgatgtcgatgatgggcgagttgaactacttccttgggttccaagtgaagcaactcaaggacggcactttcatctcccaaacaaagtacacgcaagacttgctaaagcggtttgggatgaaggacgccaagcccgcaaagactccgatgggaaccgacggacacaccgacctcaacaaaggagtcgctacgccttgcttcaggatctgctatccaaaggggtccaactttgacttgattggatactcagattccgactatgctggatgtaaggtcgataggaagagtacatcggggacgtgccaattcttaggaaggtccctggtgtcgtggaactctaagaaacaaacttccattgccctatccaccgctgaggccgagtacgttgccgcaggacagtgttgcgcgcaactactttggatgaggcaaaccctccgggactttggctacaatctgagcaaagtcccactcctatgtgacaatgagagtgctatccgaatagcggaaaatcctgttgagcacagccgcacaaagcatattgacatccggatcactttttga

SEQ ID NO: 12387 - DNA, 693 bp, Zea mays
  Peptide Sequence Number=SeqID_54166
atggacaagatgggttatcccaagttggaatgcgacctatctgctatgctgaaggatcaacttgtggattgtttggcctataacaatttaaaggggaagagaaggttgaaccgagtttttgatgctattcgctttgtatatcctaattactctttcctagttcaaggtaaagggaaggagaggaagagcgctttgaaaccacctttggctgtaatgaagcaaaagagattaaaagttttggcgaagcgaccaaagtcttattctgaggatagagcaatggtgttgtctgcgcttatgacttctattgaggatgtttttactcaaactgcgccaactgttggtccgaaggaggagaagaaggatgaagaagaaattaacaaggtactaattcaggatgaggtgcctctggccagcttgcaactagaagcacaaccaaaagtagaggctcagccaaagcctaaagcagcccctgggaagatcatcgagcctcgtctcggcacacctgttgttgagagtgtgaaagctgagttggaggtggttgttagtcccaagattaaccttgacctaaataaagctagccagattgtcgaagtccaagattatgtcgaagatctgaagtacccctcgagctcgcttgtttatggtggcaatgacgaggatgattatcttcactgccttcctgactatagataa

SEQ ID NO: 12388 - DNA, 591 bp, Zea mays
  Peptide Sequence Number=SeqID_54167
atgaccgcctcaaaaaagggatcgggaaaggaggtttttcgaaagaatccttctcagcaaaggaagcaggccccaagccctcctactgatcagggccgccccagagcatgcagagtcagggataaccctgggtacgtccgttacatggccaaggcttgggctacgctcccgagggagatccgcctcgcccgaccccagcctcggcctcgggaggggtcgtcaccacgtcctacccaggcctcagcctctgctctagcctcgggaggaggtctccgcctcgcccgacccaggcctcggcctcagctccggcctcgggaggagatctccgcctcgcccgacccaggcctcggcctcagctctagtctcgggaggaggtctccgcctcgcccgaccccaggctcggcctcgggagaggtcaccgcctcgctcgagatggcctcgaaccgactacgtaatgatgatccccggcatgcgctcatgacgtcgactatccccaagctctctacgaaatcaaaggaacgtcagcaggaccaagggctgtaccgccagccacgattctacagggctcaagcacttctccaccggccatga

SEQ ID NO: 12389 - DNA, 192 bp, Zea mays
  Peptide Sequence Number=SeqID_54168
atggccatcttaattcatcagagttttcctccatttttgaaaaaatggaaaagagattggacccatggaaggaggtgggacatgatgctcaagccaaaagaccagaagttggagaagatgctggatactttgaagaattggctgcaaaaatctggtaatggagtcggcaaaatctctgaagaaatgatctga

SEQ ID NO: 12390 - DNA, 591 bp, Zea mays
  Peptide Sequence Number=SeqID_54169
atgccgatcagccttttctcttccgccctcgacatcctctgctctcaaccttgccatcagccagatttgatggggtttttcatggatgactgcctccaacaactgatggatcgaattgatgctggagaaggagagcagttgaagaacttgatactgagtgagagactctcaaaacttgttcggatgaggctggaaatgcaggcaccttatatatctaagtggcctcaagcactgagtattcagtctcaaccagcaaacgtctcaacaagcttgaagcagcgagctatcctggtggatgagatatggcatgctgctggagattctggtgcttggtggtatctactcaacctcagaggtgtatatgttgacagacaattctccagtgttcacatgttaatgtattgttcctacttatggcacatggcagagttccgtgatacttggacgtttgtgaaccgcagaataaaggatgctcttgatcttcagaaaaccttccaagaggccgcatacctcgctgaagccgtgggagcaggcatgagcggtaccgtgcagggtgttctcaacagggtcttccagaaccgtagtggatga

SEQ ID NO: 12391 - DNA, 135 bp, Zea mays
  Peptide Sequence Number=SeqID_54170
atgaagatgagagctgaagggaatgggccagcttgcaggctgtttaatgaagcaaagaaggactacactggagcagattcaaagtttgaagaggcagatggaagcaatgggagctgcagagaacactgtgcctaa

SEQ ID NO: 12392 - DNA, 318 bp, Zea mays
  Peptide Sequence Number=SeqID_54171
ggttcccaccagctatcctttgaaacgccccactcatcgcttgaaccaagggctcgaaaccagttccaggtgcagcttgccttgggggtggttccactgattcttggtgacggggagctgaatgtaaagctgaacttgaaggcccgtgccttttcaacatcttcaaaggaaaagcttaaggctgtcagttgctctctcaccgtactgcctgggcgcaagaagtgggctaagccttcagttgcaaagaaccttgctcaagctgaggaatactttgccaagaagagggctgcatcatcatccgactacacttctgcatga

SEQ ID NO: 12393 - DNA, 147 bp, Zea mays
  Peptide Sequence Number=SeqID_54172
atggcgtgccaagtaggaaatggagttgaaggagctgaagaagttacatttctttacaagttcactcttggtgcctgtccaaaaagttacggtgtgaatgttgcacgaatagctggtaagggcttcctgactcagtactacgaatag

SEQ ID NO: 12394 - DNA, 426 bp, Zea mays
  Peptide Sequence Number=SeqID_54173
atggcatcttcaactcttacaggtaagcttgaggcagatgtagatattaaggcttctcccgagcagtttcatgaaatgttcgcccacaaaccacatcacgtgcaccatacttgctatgacaagattcaaggatgcgatctacatgaagatggaaaggctaaaaaggcaaaggaagtagtggaagcggtagaccctgataagaatttgatcactttcagagtgatcgaaggagatctaatggaagagtacaagagcttcgtagccacgattctagtttcgcccaagagcgaggatagtggcagcgtagtgcactggactttggaatacgagaagctgcacgatgggattgcggaccccgagactctactgcaattggttcaagatatctccaaagacattgacgcccacctcatccaagcaaactaa

SEQ ID NO: 12395 - DNA, 351 bp, Zea mays
  Peptide Sequence Number=SeqID_54174
atgttcgcccacaaaccacatcacgtgcaccatacttgctatgacaagattcaaggatgcgatctacatgaagatggaaaggctaaaaaggcaaaggaagtagtggaagcggtagaccctgataagaatttgatcactttcagagtgatcgaaggagatctaatggaagagtacaagagcttcgtagccacgattctagtttcgcccaagagcgaggatagtggcagcgtagtgcactggactttggaatacgagaagctgcacgatgggattgcggaccccgagactctactgcaattggttcaagatatctccaaagacattgacgcccacctcatccaagcaaactaa

SEQ ID NO: 12396 - DNA, 231 bp, Zea mays
  Peptide Sequence Number=SeqID_54175
atggtggaggtcatttctgagtgtgagttgcgaccagccaacgaggcgcacgagggcggttttatacccccagtcggcgacaacaatccccaccgaagcccgcgaggattccggctggcattccgcggaaaactgttagcgcggtccgccattctcacggagacgacaccccccgaccggcgggtcccacgggcagaggggaagctccacacccggcgttacagcgactga

SEQ ID NO: 12397 - DNA, 306 bp, Zea mays
  Peptide Sequence Number=SeqID_54176
atggggaagaggaagtcgaggaaggcaccgccgtccaagaaggtggcgcagaaggtcgccacggccttcgactgccccttctgcggccacagcggcagcgtcgagtgcagcatcgacctcaaggaccgcgtcgcgaaggcggagtgcggtgtctgcatggcggtgtacgccaccatcgccaacgcgctcacggagcccgtcgacgtctactccgagtggatcgacgagtgcgagaaagccaacgaaggcgtcgacgccgaggaaagccgccaacgagggcgtcgacgccgacgccggctgacgtga

SEQ ID NO: 12398 - DNA, 240 bp, Zea mays
  Peptide Sequence Number=SeqID_54177
atggagctcttccccatcaagcccatggcaggagctctcgtcgaggtgggctccaggtccgttaccggcgcgggccgctctgtacacgacgttaccgccctctgggccacctccatgggattaagtggttgtaaagacattggggtagatcatgctaattttgatttgattttttctgctttttcagtacttgatgatgaggccgtcatgaggaaacaactccacgaggcgagagaatag

SEQ ID NO: 12399 - DNA, 273 bp, Zea mays
  Peptide Sequence Number=SeqID_54178
atgacattaccatatagggatgagattcaaatgaggtttgaaggtgaagaggctctagagcaaagggaagcaattttctggtgcaatagtaattattttctaaattgcattacctcaaggttgtgcatactttccagattcgatgtcgcgggcacccagatgtcattgcttgttcttgattcacgacaagatggatgtggtttccttcagagttccgccgagcagcctcttggtttgactcttttgggatcttctaggagttccatcttgtga

SEQ ID NO: 12400 - DNA, 138 bp, Zea mays
  Peptide Sequence Number=SeqID_54179
atgggtcggcgcgagacggagcatgaaggggggaagaaacaggcaaaggggaaacccgtggccttcgtgttgccctgcgcccaggtcgggcgtaaggagagggcccaggtgtacaatgggggtgtagcagtgtgctaa

SEQ ID NO: 12401 - DNA, 118 bp, Zea mays
  Peptide Sequence Number=SeqID_54180
atggctggagagcaacgtgttgctgaggtgtcgctgacaccttcatcagatgtgctagagacaagggtagaagtgtttgcttcaacagtggggactactgcctcccaggccaaggccg

SEQ ID NO: 12402 - DNA, 204 bp, Zea mays
  Peptide Sequence Number=SeqID_54181
atggcgcgacggtggcccggggcggcggtggcggacctctgcggctgcacggggaacggcggggtgttacagcatgtggaaattcatgttgcgagtggtccacaatttcccacagtacaaggtgggtcttcttttattaagaacacaatctctgaaaagatacgtgtccttgttaatatgtcattgtattcttctatggactaa

SEQ ID NO: 12403 - DNA, 216 bp, Zea mays
  Peptide Sequence Number=SeqID_54182
atgttcgacaccctcgacttcctcgccaccgccaccggtgatcttcgcctcaacaccctcgacagaaagcgaagtttgaagaggcgtgtcgctgccttgaagtgccgcctcaactggcgcaccaacaccagcgacgggagcctcgccatccaccctagtggctatcatcggacccagcaagaggagctcgacgctcttattcgtaagctcgattga

SEQ ID NO: 12404 - DNA, 519 bp, Zea mays
  Peptide Sequence Number=SeqID_54183
atggcgaggctcccgtcgctggtgttggtgcgccagttgaggcggcacttcaaggcagcgacacgcctcttcaaacttcgctttctctgcattgatcctagtggagcatgtgagttgtgtgcccgtggtgacgcgtacgtcgagggtgttgaggcgaagatcaccggtggcggtggcgaggaagtcgagggtgtcgaacatgatgtggctcctcagcacgaagaaaatgaggggtccttcccatttatagttcaagggttggactctacaatggggacttgtattctgctgggacgagctcgactggtggcacatgggcaacatggttcctctggtgctgtccgtagggtcatgcgtagccatactcccatcatgacgtactatcatgtccgcacgtcgtacaggttccttttgtcggtcttccactcacatcctcatggtagtgcgcggagggtcccgcaggcatacacctggtatgttgtatctaccacgcactacccagtattcaggtcactgtag

SEQ ID NO: 12405 - DNA, 291 bp, Zea mays
  Peptide Sequence Number=SeqID_54184
atgccgaagcacgccgtggcgtcgttggggcagtgggcggccttcccgcccgtctacgatctgagggagttcggggcggtcggggacgggcggacggttaacacggccgcgttcgagtctaccatcgcgacgatcgccgtgaggggcggcggcaggctcaccgtgccagccgggcggtggctcactacgccgtccaacctcatcgtgccagcagggcgggcgggggcacggtgcaccaggatgacaaggaaaatgatgatactcatagctgcaaacaatgcctacaagtaa

SEQ ID NO: 12406 - DNA, 222 bp, Zea mays
  Peptide Sequence Number=SeqID_54185
atggtgaaggaccttttgacgaagacttgggtggtcgaaggtatagggtccatcatgctgcagggtctgttcctaagcaaggccttgaggaacaagagaaatgttgaggatgaagccgcccaaaaagaaataatgaagctcagatcccaagtgtttggacttgggtttgattgcgacgagaaggaaaagaagtttcaagattctagaaaaggactatattga

SEQ ID NO: 12407 - DNA, 411 bp, Zea mays
  Peptide Sequence Number=SeqID_54186
atggacgacctggtgcacccagttggcaacatcgagaaggcactcttctcgattgatgccctgggcccaaacgaaggcaaccacctcgtccgcgccctcacggaggccaactctagttttgtaaaagttgtggtggttgggggtatttatagccttcaaccaccaaagaagccattggggaggctgctgtcgatgggcgcactggacagtccgagtcgaccgttgcatgcagatagctgttgcccgctgactcactggatagtccagtggcacactggacagtccagtgaattaaagaggagtgcgcctcagttttcccgagagtggctggttcgtcttcgtgcggacatggtgcaccggacactgtccggtggcaaaccggacagtccggtgaccgtttgcgcgaagtag

SEQ ID NO: 12408 - DNA, 306 bp, Zea mays
  Peptide Sequence Number=SeqID_54187
atggccgcttttgttgccctatgtgaaggatacctcgggatgtccccctgttttctgcctttggtgctacattttctcgatcgagttgctctgcaagcggtgcccctggaggccctcaaagcttggtatggggcatcccgaaggatcaggataaaaggacagtcggggtcattgctacagtgtcagttctccatgatcgtgggtcacgctggcgggtgtgatcgagaattacctctgccgggggtggctcctctcatggcccggcggctaccgctattcaggatgactgtcgaagcacttgactaa

SEQ ID NO: 12409 - DNA, 114 bp, Zea mays
  Peptide Sequence Number=SeqID_54188
atggatatatatagcgcggggtttgcccagtcgtgggccacacgggttgcaaggccgaggttggagctggactcggaaaggaatttcggcccacaacgcaggtcggatatttaa

SEQ ID NO: 12410 - DNA, 117 bp, Zea mays
  Peptide Sequence Number=SeqID_54189
atggcggcttgcgttcgccaagtgggcacgaagaccggccacctcgtcatcgacagcccgagcgtcgtatgggtggtggccaagctctttcgaagattcgaggagagtaaaagatga

SEQ ID NO: 12411 - DNA, 1113 bp, Zea mays
  Peptide Sequence Number=SeqID_54190
atgaagctgtcggacgccaatctcacgttggagaaaaagtacgtgcacctcaaccgcttgcaggcgaagatggaggccttcctccgcaccaaggatgacgagtccgcctcccactccaccgtgctgcggggggcgcgcctcatcagcgtcgtcgtcgccgccacaagctcgtcaccagtggaggtggatgcagaaccacttctaccgactgctgctgcagaaagggaaagggagagagacgacgacgggcgcacagttagattggataaaagtttcgggtccggatgcgtccgtggtacgtccagacggtggcgcggcctcctcggcggctccatcgtccatgcccaaccatcgcgttatatacgtatgcccgcatgtcagccgtgcattctagctactatagctagctatagctatttcttctcgcctctcccaccggcccggtcgcccggagtagcaagcgtctccgatccgatccatcgtgcgagcatatccacggcgatggaggcgagagcggccatgagctggtactgcggctcccttctggccgtggccatcgcgctgttcctgtccgtgtccctcggcgtgcgcgccgccggcgccggcgccggcgttgacatcaaggtgtcgtgtgcagcgacgccggacccggacgtgtgcctgcgcgcgctccaggcggacagcgactccaagaccccgcgggacctggcggaggcggcgctccgcgcggcgacgaccgcgggcggcgcggcgggcgactacgcgcggcacgagatggacgtggtgaaggacaacgacatgtggcagtgcctgaacgagtgcgccggggagatcgaggaggcgctggaccacctggacgacaccgagggcggcctcgacgacggcaagctccacgacgtgaagctgttcctggacacggcggaggaggacacgtggtcctgcgacgtctgctgcaagcacgccccatccacgcccgtcaaaaccacgctgctcgccaagaacaaggacttcgaggcgctcatgcgcgtcgcccacgcgctcatcaagcgggccaccggtggcgccggtgacgcgccggcgccggcgcccgccgcccgcgccaagattcattaa

SEQ ID NO: 12412 - DNA, 1410 bp, Zea mays
  Peptide Sequence Number=SeqID_54191
atggcttctgctctacaattatccctgctagtactatgcagctacggctgtactattgctcttgcagtagctacaggtcatcaggaacgcaaatttacagtagtgccgacagcattcctacagtcctcatcagaagaagcatcatgttctactccaagagggacaccgcacgcaaaccgcgtgtctgtgccgctagcgcaccggaacgggccgtgctcaccagttcggggcaaaggagagctgcctcgcgctgaaatgcttcgccgagatcgcgagcgcacggagtacatcatcaggagggcctcaaggagcaggcggctgcaggacaacaacgacgcggtgagcgtgccgacgcagctgggctcgtcctacgactcgcaggagtacgtcgccaccgtgggcctgggcacgccggccgtcccgcagacgctcatcctggacaccggcagctcgctgacatgggtgcagtgcaagccgtgcaactccagccagtgctacccgcagaggctccctctcttcgacccgaacacctcatcctcctactcccccgtcccctgcgactcgcaggagtgcagggccctggccgccggcatcgacggcgacggctgcaccagcgacggcgactggggctgcgcctacgagatccactacggcagcggcgccaccccggccggggagtacagcaccgacgcgctgacgctcggccccggagccatcgtcaagcgcttccacttcggctgcgggcaccaccagcagcgcggcaagttcgacatggccgacggcgtgctgggcctcggccgcctgccgcagtcgcttgcgtggcaggcgtccgcgcgccgcggcggcggcgtgttctcgcactgcctcccgccgacgggggtctccacggggttcctcgccctcggcgcgccccacgacacgtcggccttcgtgttcaccccgttgctcaccatggacgaccagccgtggttctaccagctgatgcccactgccatcagcgttgcagggcagctgctcgacatcccgccggccgtgttccgggagggcgtgatcacggactcgggcacggtgttatcggcgcttcaggagacggcgtacacggcgctgcggaccgcgttccggagcgccatggccgagtacccgctcgcgccgccggtcgggcacctcgacacgtgcttcaacttcacggggtacgacaatgtcaccgtgccgaccgtgtcgctgacattcagaggcggcgccactgtccacctcgacgcctcttccggggttctcatggatggctgcctcgcgttctggtcttcaggggacgaatacactggtctcatcggcagcgtgagtcagcgaacaatcgaggttctatacgacatgccaggtcgaaaggttgggttccggacgggtgcttgctaa

SEQ ID NO: 12413 - DNA, 348 bp, Zea mays
  Peptide Sequence Number=SeqID_54192
atggcggatcttgcgaggcggaggcatggtggatcgtgcgaggtgagggcatggcggtgggggcttggcggttggtgtggctgcgcggaggggaagaccgatgcggggcgggggcatggacgtgccgaagaagtcatggaagcttataagaagaaaggatgggctctaacaaatcctttacctaatttaccaggtcaaaggatggaagagtgtcgaatgctttttcagatactatttcttggtccgtcaaatttatttgagctaaatgcaagtttttgctcaaatgtggcaaaaatgattgcctcaccaattgtgagcacgactgcctccaacaaagttagaatgtaa

SEQ ID NO: 12414 - DNA, 699 bp, Zea mays
  Peptide Sequence Number=SeqID_54193
atggtgcctcctgtgacgtggtcggtccgagccctaggttgggcaaagtggaggctcctccaaggtcgaggtcgagtctgtcttccgaggccgaggtcgagtccgagcccttgggttgagcgaggcggagatcgtcgactgaggccagggctgagtccgagccctggggtcgggcgaagcggagtttgtcgtcttccggggctgagcccgagtccgagccctgggggtcgggcgaagcggagttcgtcgtcttccggggctgagcccgagtccgagccccggggtcgggcgaagcggagttcgtcgtcttccggggctgagcccaagtccgagccctggggtcgggcgaagcggagttcgtcgtcttccggggctgagcccgagtccgagccctggggtcaggcgaagcggagttcgtcgtcttccggggctgagcccgagtccgagccctggggtcgggcgaagcggagttcgtcgtcttccggggctgagcccgagtccgagccctgggatcgggcgaagcggaatttcctatggcgccaggggtcgggcttggctgctgtcagcctcactctgtcgtgtggcacagcagtcggagcggcgcaggcggcgctgtcctcttgtcaggctggtcagtggagcggcgaagtgactatggtcacttcggctctgtcaactggaggacgcgcgtcaggataa

SEQ ID NO: 12415 - DNA, 270 bp, Zea mays
  Peptide Sequence Number=SeqID_54194
atggatttgcttacgccggcgagctccgccgccgcggggagctgtgctccatcgccggggcgctgtcgggtcaggggaaagagcctggacgtcggattagagacgagcggtctagatcggatctgtgcgtaccggttcactagagtcgatctggagcgttggcagttgatcggacggagctggcgattaagggtgatggcgtgttgtgcaccgtcagatctggatctgaggagccacgctgcgtaccggttcgctttagtacggatttaa

SEQ ID NO: 12416 - DNA, 657 bp, Zea mays
  Peptide Sequence Number=SeqID_54195
atgcgcctcactgactcgttgcttcactggctcagggattgggccattgcccaactcgctacttcaccggttcgggggttgggctatcactcgccttgccgacttgctgtttcaccatctcgagggctgggccattgcctacctagctgtttcactggctcgggggctgggctgtcgctcgcctcgccgagtcattactttgttgcctcgggagctgtaccgccatgcgccttgttgactcgctgctccaccagctcgggggctaggtcgtcgctcaccttgccgcgtcattacttcgttgcctcgggggctgcatcgtcgtgcgcctcgctgactcgttgcttcatcggctcgtggactgggccattgctcgcctcactgactcatttcttcattggctcaagggctgcaccaccgtgcgccccgctgactcgttgcttcaccggctcgggggctgcaccgccatgcgccccgctgactcgctgcttcgttggctcgaggcctaggccattgcccgcctcgtcgactcactgctttaccggctcgagggccaggccatcatccgcctcgccgactcgctgcttcgtcgactctgggaggctacaccaccgcctcatcagcttgactactgctgcccacctcaccaagaccacttag

SEQ ID NO: 12417 - DNA, 366 bp, Zea mays
  Peptide Sequence Number=SeqID_54196
atgcaggagcagatggctcagcagaatgagattctgcgacagctcgtgcaacgtcagccacaacctcaacactttgggggtggctaccatgcagataaagatgagaagaagagggatagattctggaggggtctcagcaccaagctccgggaatgtcttaatacagtgcgagccaacaattacaacgtgctggtcaacttggctatctcgcaggaagattgcatcatggcacatagggcagagaagaagaggaaggcacctatggcaggaccatccacacagcctcagcgctttcggatcttgtccaatattcagagcagggggccacaacaacaacatggacaatgggtgataagtccgccatag

SEQ ID NO: 12418 - DNA, 504 bp, Zea mays
  Peptide Sequence Number=SeqID_54197
atggggctccgcaactatgttctaatggcactatcaggcagagccctaaatcagagcttcttgctgacagcgagcagaaataatagtgatattgataaagcagaatatgcagcagagaggatattccaactggaacacaacaacacaggctgttatgttgttctgtcttccatgtatgctgatgccgggagaggggaggatgtggggaggataagatctccgataaaggagaaggggctccgaaagacagaggcaaggagccttgtcgatcttaatgcagtacttcccgataagcattgtgtaaggctggctgcttcctttggtctgatatcatctgaggctcggaccactgttcttgtccagaagaatgtgtgtttatgcaaccaaagccatcatgcacagaagttgatatcaaaatatttgagacagacaattgtagttggtgacacgaagatataccgcatattttcagatggctctggttgctgtggtgattactggtga

SEQ ID NO: 12419 - DNA, 258 bp, Zea mays
  Peptide Sequence Number=SeqID_54198
atggagatggcggcggcgctggctcaattgagctcgagggaagggggaagagatggccgaggtcggggtgaggaattggggagctcggtgtggtccttttataggcgcccggggtggggaagggggcgagagatggcgtgccccggcgagctcgccacgacggagatggtggcgcatagtggtgacgacaggatggttcgggcagacagggcgacgggatggctcgggcagacgcaaggcgccaaactgagctggtga

SEQ ID NO: 12420 - DNA, 246 bp, Zea mays
  Peptide Sequence Number=SeqID_54199
atggtgcacagccgaagctgtgcgcagggaaagcttcgtcgcgatagcagagaggggaaccgacttaaagatgaaaagactacgtgggccttgtcagatttccataagtcattgacaaatgtaatggacataaatgaccttcctgatgacattagggttgctcaagagaagaaactggaagaactgaagaggcaacaagagcttcagaatcaactcgttgttcagcgaagtacagttgagagatag

SEQ ID NO: 12421 - DNA, 225 bp, Zea mays
  Peptide Sequence Number=SeqID_54200
atggtgcacggcggctacccgcgccgcgacgccgccgtccgccggcccaagtcctcgtcctccgccgtagttgccgaccgcaagcggaagtggaccgccgccgccaagaacacctcacttaaaaaccagatccgttccactgagcgctttctccacaagggggctaggggcaaattgatgcttcaactgaggcctctgtttgttgcattccgctcagtagcctaa

SEQ ID NO: 12422 - DNA, 1065 bp, Zea mays
  Peptide Sequence Number=SeqID_54201
atggcctccgcgatcaaggctgcatcgacctcctcccagtggtcttcttccccggcggcagtccactcgtcgccgttatcgaagcggctaccagctgcagtggccatgccgggacggcggaggtctgtggccactgtaagggccgtcgccgcggtagctccgggtgccccggccaagctcaccgccggtgccggcggccgatgcctgccggtgtcgcagaccatgtccaggctcaggcgcagggcaaggcacagccatgtacgcgtcctgacttggaactccgttgtgtcgtggttctcgcagacggcgttcatcccgtacatcaccgccggcgacccggacctggcgacgacggcggaggcgctgcggctcctggacgcctgcggcgccgacgtcatcgagctcggcgttcccttctcggacccctacgccgacgggccggtcatccaggcgtcggcggcgcgggcgctggcgagcggcacgacgccggacggcgtgctggcgatgctgaaggaggtgacgccggagctgtcctgccccgtggtgctcttctcctacttcaaccccatcgtgcggtggggcctggccgacttcgccgccgccgtcaaggaagccggcgtgcacggcctcatagttcccgacctcccgtatgggaactcgtgtgctctcactctcaggaccgaagccatcaagaacagcctcgagctggtgctgctcacaacaccatctacgccagcggacaggatgggggagataacacgagcttcacgaggattcgtctatctcgcgaccgtcaatggagttacaggtccacgcgcaaacgtgaacacacgtgtccagtctctcattcaggaggttaaacaggtcactgacatacccgtggctgtcgggtttggcatatcgaaacctgagcatgtaaagcagattgcagagtggggtgcagatggtgtgatcattggtagcgcaatggtgagacagttaggcgaagcagcctctcccaaggaaggattgaagaggctagagaaatacgccaggagcatgaagaacgcgctaccatgccagtga

SEQ ID NO: 12423 - DNA, 357 bp, Zea mays
  Peptide Sequence Number=SeqID_54202
atgagagcaaatggggagatacaaaggggagagaaggcaaaagcagtccaagagggaagactcgcaaacacgataatacggtcgtacctcacattctctcgcgggaacctggctgatggggtggccacgaagccccctttgatcgacaagatcgatcaaaggcacgatctgggcgccgttggcgcaccggacatgtccggtgcacaccggacagtccggtgccccattctgaccgttggctcggccacgtgtcgcgcgccgatcgcgcggccgaccgttggcccggccgaccgtttggcccggtcgaaccgttggctcaccggacagtccgggtgcacaccggacagtccggtgtaa

SEQ ID NO: 12424 - DNA, 276 bp, Zea mays
  Peptide Sequence Number=SeqID_54203
atggagcccagcaaaatagcctgcgtagctgccatcgaccgggacagttcgtggaccactgtggccacggattccagcgtgagggttggggtaggggtggtggaagatggtggggaaatggtggtgatcggccccgagatggtggaagccgatgattcctactcctacccgagatctccctcatgctatatcggtcatctggtggcagttaagaacgaactgggcgagagggacgacgagacgcgtgatcacgacgtggagaacagtggcggctag

SEQ ID NO: 12425 - DNA, 252 bp, Zea mays
  Peptide Sequence Number=SeqID_54204
atggctgttgctaccgcagcccctccatgggcctccttaggccctgacagcgcgtgtggcagatcctcatcaagtggactgcttgaggacgagctatttgataatgggtggggcagtgttgtagatgcttttatggccatgcactacaagcatcagctcaggtctggtggggcccagttggcgccctcttcagcccaaccgacgccaggagaggcccaggaggtggccgacatagataaggatatagaataa

SEQ ID NO: 12426 - DNA, 861 bp, Zea mays
  Peptide Sequence Number=SeqID_54205
atgtgtgtggacaagctcagccaccagctcttctccctgctcgagaccagactcctgggcgggtggtgcccgtccgtccccgggacgccggcgcgggcgctcctcgacggcggccgcgtgcgggtgctcgccatcgacggctgcggcgcgggcgcagaggacgcgctcctggccgccgcggcgcttgcgaggctcgaggccaggctgcgcgaccgcacgggggaccccgacgcgcgcgtcgcggacttcttcgacgtggccgcgggcgccggcgcgggaggcgtcctcgccgcgatgctgctcctgaggggcgccgacggccggccgcggtactcggcgcaggaggctctggcgttcgtcgccggtagcgtcgggaccaaaaggctggtgcggccggcgcgggcggtgggcgaagctcttccgccgcggttcacgaggcggcgaccgcacgctccgccgcgtgttcggggacgccacgctgagggacaccgtcgcgccgctgctcgtgccgtgctacgacctcgccacggccgcgcgcccttcgtgttctcgcgcgccgacgcccgtcgagagcgacaccttgagacttccgccttgggcgaccgttctgccgcccgccccctttgcccggggggcggcgcggttcgcgccaatcccagttccggtggacgccttcaccggcggcggcccccggcgtccgggggccgggccgcccatgtgcaacccggcccgggaccgcaaccacccacgcgctccacaccaaccgggagttccccctcgccaccgggcgtcgacgacctcctcgtgctctcccatcggcgccggcgcctccggccgccaacggttcgagcacgccgatga

SEQ ID NO: 12427 - DNA, 600 bp, Zea mays
  Peptide Sequence Number=SeqID_54206
atggccaagctgctcactaaaatcctggcaaacagattgccacccatgttgatgcagatgatttcaaaaaaccagagtgctttcatgaaaggcaggggcattcatgacaacttccagcgcggcgcgggccttttcttcttcttcttcttcttcccgcctcggaccgtgattatcgcaacgcgtgtcctgctcacggctgccggcgccaaccagcaggagtgccgccggctggactcagttcgtccgcacttggagtggaggcgccaccgcgtggtcgtgagggaccgggtgcttgcgatggagcgtcgatatgatccgacctcaattaaccatgaactggtgttgatgggtcaaatcccagacgacgtggacgacatgcacgatgtcttggaggatctctttagttccacggctcgtacccctaccatcaaccttgacgataacaatgtcgctgccgccgagggcgaggctaccctagatggcagtgctcctgctactgcctccactacggcaagtacaaataggaagaggaaatgcacatccgatgtctgggaggacatggataagttttttgccactgagaatggtgtgatggtctga

SEQ ID NO: 12428 - DNA, 1290 bp, Zea mays
  Peptide Sequence Number=SeqID_54207
atggcgtcgccgcccacgaaaggcatgggcgtggacaagctcagctacgagatcttctccctgctcgagagaacgttcctcctcggccccggcacgcctccccgggcgcttctggacggcgggcgcgtgcgggtactggcgatcgacggctgcggcgcgggcgccgaggacgcgctcctggccgccgccgcgctcgcgcggctcgaggccgggctgcgcgaccgcaccggcgacccggacgcgcgcgtggccgacttcttcgacctcgcggctggcgccggcgcgggcggagtgctcgccgcgatgctgttcctgaggggcgccgacggccggccgcggtacacggccaacgaggcgctcgcgttcgtggccgggagcatcggcgggaagggctggggaggccgccggcgcgggccgtgggcgaagctgttccgcggcgccgcccgcggcggggaccggtcgttcttccgcagcgcgttcggagacgcgacgctcagggacaccgtggcgccgctcctcgtgccgtgccacgacctcgccacggccgcgccgttcgtcttctcccgcgccgacgccgtcgagagcgacagcttcgacttccgactccgcgacgtgtgtgccgccacctgcgccgcgggtggcgcgctcgcgagcgtgaggtcggtcgatggcgccacggccatcgccgcggcgtccgggggagtggcggccatgggcaacccggccgcggcggccatcacgcacgtgctccacaacaagcaggagttccccctcgccaccggcgtccaagacctcctcgtgctctccatcggcgccggtgcctcggccaccgtctgcgacgggtccagcacgcccatgcccgcgcgttctccgtcgccgcgggagctggcgcgcgtcaccgccgagggcgtcgcggatatggtggacgagtcggtggccatggcgttcggagacgcgtgtggatgcaagtacgtgcgcatccaggcccgcaaggcgccggcgccgctccacgcggcagcgggagcgatgcttgcgcagcgcagcgtggagtcggtgctgttccgggggcgaaggctgtcggagcggaccaacgcggagaaggtggacgcgctcgccgcggagcttgttaaggagcaggagcggcggcggcacagcccgcttccgaacgtagccataaagcaggtggccacgccgcggctgtcgtcggcgaccacgacgtcgtcaggcaccgcgacggcaaggaccgcatcgacgatgccgtcgccggcgtcgtgggattctcgtcgatag

SEQ ID NO: 12429 - DNA, 603 bp, Zea mays
  Peptide Sequence Number=SeqID_54208
atggaaccgctgtttcccactcttcacttcgcccaatttctctcccaccctcctgctcctccttcccggcgggtcccgccatttcgtcccccgctcaccaactcaaacccccttcgctctcaaaccctaaccctagccctagcccgctcccgggcggaccgacgatgccgaaggcaggcgggcggggcggcggacgaagaggagttccgcgccgaggtggaggagccgcctcatcaacgaggagtacaagatctggaagaagaaacacacccttcctctacgacctcgtcatcacccacgcgctcgaaatggccctcccttaccgtgcagtggctccccgaccgcaccgagccgccggggaaggaccactccgtccagaagatgatccttggcacgcacacctctgacaacgagcccaactacctcatgctcgcgcaggtccagctgcccctcgacgacgccgaggccgacgcccgccactacgacgatgaccacgccgacatcggtgggtttggcgccgcctccggcaaggtggaatttccgctcccacccctcccacaaactcttctccgcgttttactcgatctctctggcgtgaactga

SEQ ID NO: 12430 - DNA, 669 bp, Zea mays
  Peptide Sequence Number=SeqID_54209
atgcccggggtgccgtcttaccccccccatcatgatggtgtcgttgaagatgttgcttggcacttgaggcatgagtacttatttgggtcagttggtgacgattatcatcttttgatttgggacctgcggtctcccgcccctactaaacctgttcagtcagtggtggcgcaccagggtgaggtgaactgcctggcttttaacccgttcaatgaatgggttgttgcaactggttctactgacaagactgtcaaattatttgatcttaggaagattgatacttctctgcacacctttgactgtcacaatttgacattaatgtttcaataccttggtgtaatcagagaggaagtttttcaagttggatggagtccaaagaatgaaactgtacttgcatcctgttgtctgggcagaaggctcatggtctgggatctaagcaggatcgaccaagaacaaacaccagaggatgctgaagatggtcctccagagctcatgttcatccatggaggccataccagcaagatctctgatttctcctggaacccctgcgaggactgggtggttgctagcgtcgctgaggacaacatcctccagatatggcagatggctgagaacatctaccatgacgaagatgatctgccaattagcgatgagccggcaaaaacttcttga

SEQ ID NO: 12431 - DNA, 399 bp, Zea mays
  Peptide Sequence Number=SeqID_54210
atgtccgcggagcagccattgcgaaatcccgaggctgccaagttccagagccgcgtcctcttggagcaccggacactgtccggtgtacaccggacagtccgcttggactcaagtgaggagctcaggaatttcacgacattcgagattgatgtcgtggagggtgctagcgaggttttgcttcgatcagacgtcgcggtggacgagggatcctttgctgtctttatggagaagatgtggaaggaatcgagggagctggtgaatctggacaccacgacactggttgctatagtgtcagggatcagcaatggcggggtagggaagctgatggctgcacctgaggcagagaccagagcaaggttcaagtgcaactacaagttcatcattgatcaggtcgcttag

SEQ ID NO: 12432 - DNA, 570 bp, Zea mays
  Peptide Sequence Number=SeqID_54211
atgggcacgccggggcggagtcaaggccgcgccatggccacgctgagccagggcagggcacgccggggggcgccgtggggaggagcgggcgagccggggcggggcatgccgcgccgcggggagggcgcgagggggacaaagccgcgccgagcggggcgccacagccgtgcgccgaggcgagccaaggccgcgccgcgcaccgcgccgggcaactgcgagcgggccgccgcgagcaggccgctgcgagcaggcccgtgccgggcgcgccacgcgcagtggaacaagccgggaccacggaagaagaggggggcgggggaagagagggagacgaggctcaccgcgggacgagggccgagcggacgggcgcgacagcagcgattctgggacacgagagcgatggggaggagagagaaggcgttgggcgacgtgggagggagaaaggagatgaacagggggcgatttgggaaacttacaggcgggcccaacgggtggcggcggctgggcaaccgccctgcccgcaccgaccaagcgagcgagccgcactcacgcgctggcggctggcccgcctag

SEQ ID NO: 12433 - DNA, 306 bp, Zea mays
  Peptide Sequence Number=SeqID_54212
atggggctcggtgtatgcggctcgctctgccaaggtggtgatgtggacgatgtttatgactatgataatggaaagtggtattcttttcgtttggaaagggttgtccacgctgcaaccattgctcaggagaagatgaagccgtggaggaagacttccaggagttctaagagtacgatgagttctaggtgtgggttagcggcaacccccagtcggttgcctatgaaggccgcgtgtatatctacgtttcgttttcacactttgattattgttaaagactatgtggatgtctcagacattatgatgtaa

SEQ ID NO: 12434 - DNA, 333 bp, Zea mays
  Peptide Sequence Number=SeqID_54213
atgtggtcaaagagcgtcgccgacgcgaccttgacgaactccgcgtcccacttcttgaggttgacctcgccaccggccccagctgatgaggcgctggtggtctccgcggcgtcggcgggcttggcggcggcgtggacgtgcttgctcgatgaccagggggaattctctagtatggaggatgctagagaattgagtagatggctaatgagtgacctgtcttttgatggggtgccccctaggccttatatactcgatcgtggggcgtttcatgcggctccaacgtctgagggcactgcacgggagaattgggtcaacactgtggataatgcttaa

SEQ ID NO: 12435 - DNA, 660 bp, Zea mays
  Peptide Sequence Number=SeqID_54214
atggctgccaactatctcgacatcaaggggttacagggcctgacctgccgggcggtggtcgacatgatccagggcaagtcaccggaggagatccgcaagatcttcaacatcaagaacgacttaaccaaagaggaggaggagggctcggactcgggctcagccccggaagatggcgaactccgctccgcccgacccagggctcggactcgggctaagtcccggaagacggcgaactccgctccgcccgacccagggctcggactcgggctaagtcccggaagacgacgaactctgctccgcccgacccagggctcggacttgggctcggccccagaagacgacgaactccgctccgcccgacccagggctcggactcgggctcagccccggaagacggcgaactctgctctgcccgacccagggctcggacttgggctcgaccccagaagacgacgaactccgctccgcccgacccagggctcggacttgggctcagccctagaagacgacgaactccgcctcgcccgacccaggggctcggactcgacctcggccacggaagacagactcgacctcggcttcggaggagcttccacatcgcccaacctagggcacagaccagccacgtcaacaggaggcgccatcatcaccctaccctga

SEQ ID NO: 12436 - DNA, 975 bp, Zea mays
  Peptide Sequence Number=SeqID_54215
atgacgatagcactggagacgttacagttacagcagatccagcaaacactagcggagatcaaggaacgaacccccgacgtgaacatctcaaggttcgtcgcctccgttttgggcgattggatggagacggaatacgcgacgtcggagcggaagaggggtgacgccggtcacggacgcggcgcgggaccgtctgacgcgcggccgtgcgctcccactctggagatggactgggcggcatgcgtcctccctctgcacggcgaggacgcgcacttcgggcacgccgaggccggcgtcgtcggcgtcgcggacggtgtcggcgggtaccgggacaatggcgtggacgccggcgcgttcgcacgagctctcatggcgaacgccctggcgtcggcggagcgcgtggccaaggctagcaggaggctccgccgcctctgccccgagaagcagcagcgccgcttcaactacccgtaccagctgagctccgaaggcggcggcctcgacgacgccaaggtgggcagcatgccggcggcgagggacggcgacgtcgtagtcgtcgggacggacgggctgtttgacaacgtgcacgactggcagctcgagcgcgccgtgcggatgggcaccaacctgggcttctctcccaagaacatggcggacattatcgcgggcatcgcctacgggatatccaaggacaaatgggcatgcacgccgttcggtatgggatacatgaagatcactgccccctctgtgccctcctatgttgagctctttgggtctgccccagcgctgcccaaggccatgccatcatcgtcgctcaacaacatcttcgactcattcaagcagcccgcttccaccttgtcgctacctaggtccaagcactcatccatgccggtgttcgacaacccggtctatgacgacaacatcttcatcgaggtctctagggaactagatctttctacatttattcggatctggatttaa

SEQ ID NO: 12437 - DNA, 210 bp, Zea mays
  Peptide Sequence Number=SeqID_54216
atggtctctagcatccctgccgtggtcgacatggtcgtactccagggacagctctatgcgaacacgagatacatgatgatgtacatcttcctggagctctacgaccttggctctgccttccccgacataatccctttcatggcccgttgcccgaacgcgtacgtgaagcgcagcttcatggtggagtccccttgcagcaagttgatgtag

SEQ ID NO: 12438 - DNA, 321 bp, Zea mays
  Peptide Sequence Number=SeqID_54217
atgtgggggagaggtctgaccttcctcctagacactttccgaacctcaggcctagaggggtccgggctgctcctatcgggtggtctccatgggcactttctgaaacctcagggcttgaaactcccgtgtaacatgcctcctttggactataaaggtaagggcacttgctccttacatggagagaggacacagactctctgggagaccctcgagcgcactcagactttcgactctcaaagctatacaacacatagtggatgtagggtattacgctctggtggcctgaaccactcaaaaacctttgtgttattgtgttcatga

SEQ ID NO: 12439 - DNA, 1524 bp, Zea mays
  Peptide Sequence Number=SeqID_54218
atgggcgtcgaatccacgcaggcgaagcgcgccatggtgttcgtgccatttccggcgcagggccacatcacgccgatgatctacctggcgcgcgccctcgcggtccgcggcggcatcacggccaccgtagcggtgcctgacttcgtccatcatcgcatgggacgtctgaccgaagatgcctgcggcgccgagctggccctcgtgcccatcccaagcggcgtcccggacgacggcagaggcgaaccgccgggcttcgccaccatcgtgcacgccatggagcaccacatgccggcccacctggagcgaatcgtcatgggagcaggccacggccgcgtgccctgctcctgcctcgtcgtggacgtcctcgcgtcgtgggccgtatccgtggccgcgcggtgcgacgtgcccgccgtggggttctggccggtgatgttcgcgagttaccgcatcgtggcagccattccggcgctcgtcagcaaggccttcatctccgcttccggcgcgccactgccaccaccatcgacaaacggagtcgacgacgaagatcaagccaacaagcatcaaaacattggagacccgatactgccctcgaagctacagctgagcacgaaagatctgccatggctcgtcggtggcgcggcatcccagcaatccaggttcgcattctggaagcgaaccgtggaccgcgcgaagcgcctccccgccatcctcgtcaactccttccccggcgaaggcgcaggcgactccgaccggtatgacccgccgccgggccagcgcatcctccacgtcgggccactcttcaacgtcaacgtgtcgctggctgctggtgcggcggagaataacggctcgtcatgcgtcccgttggagaagccgaacgctgcagcggccaccaccatgtggcaggcggactccacctgcatggattggctggaccggcgcagtcccgggtcggtggtctacgtttccttcggaagctgggtcgcgccgatcgggccggagaggatggccgagttcgcgctcggtttgcaggccgccggccggccgttcctctgggttctcaagaaccacccgtcgtggcgagccggcctgcccgaccggttcgtggagaccgtcgccagcagccgcggcatcggcaagatagtcccgtgggcgccgcaggaggaagttctcggtcatcacgctgtaggctgctacatcacgcactgcggttggaactcaacgctggaagccgtaaggcaccgagtccgcatgatctgctaccctatctccggtgaccagttcatcaactgcgcctacatcgttaagatgtgggaggctgggatggcaatggacagcacggaccgggatggtgtgaaggactgtattgagagggtcatggagggcgaggagggtaggcgtttgcaagagaaagtgaatgggatggagaaagtcgtggcaggtgaggcgcggagtattgccaaggggaacctcgacctattcatcaatggaatcgagagcggtgacgattgggtaacaaaactatga

SEQ ID NO: 12440 - DNA, 114 bp, Zea mays
  Peptide Sequence Number=SeqID_54219
atggagcccccatccgcccaggcgatgtccgcgactgacgacttccaggacaaggccgtcgacgagtggtccttcggtgacgatgtttgtaatccggattcgaatcatcggtaa

SEQ ID NO: 12441 - DNA, 372 bp, Zea mays
  Peptide Sequence Number=SeqID_54220
atgggggcgtgggtctcggtcctgctcgggatggacggagccgcggcggccgggcctgctgctgtgggcctgggcgacctgccggagctctgcgccgcccaggtgctgctccggctcgacccgccggagatctgcaggctcgcgcaggtcaaccacgcgttccgcggcgccgcgggggctgacttcgtgtgggaagccaagctgccggagaactacaactatctgatggagttcgtggggagcggcgacgaggggaagcggaggcggcggcgggccgggaagaaggagatctacgcgaggctcgccaggcctgtgccttttggcgacggcaagaagactcaaattagtggcaggaaggtcgctacattttag

SEQ ID NO: 12442 - DNA, 207 bp, Zea mays
  Peptide Sequence Number=SeqID_54221
atggagcctctaccgcccccacctccagcgttcagcaggcgacctagtgatgacgacaacgaaagaaggtattcacagcaactccatgcgattgccaacccatctgaggaagatgttgctcttccaagttcatccacaacaaccaaactcctacaagttcaaggccatcagaagaaaacaagagtaattcaagacatcaaattttag

SEQ ID NO: 12443 - DNA, 291 bp, Zea mays
  Peptide Sequence Number=SeqID_54222
atggagatgatcgagaagacaaagccttcttgtgttttggaattcaccaccaagatggcgcgtgaagagctaactctccatcgtgccctgttcataacagttgatgggactaggccggaggtgcttggcgttgaggtgttagaagttgctcataattttgatgtcaatattgaagccatgtggattcatcaagtcctgccagaggatttcctcttgattctacctaatgaagcaactgcttcaagggtgctcaatgatggcaaggcatacaggggcctcattttagtctga

SEQ ID NO: 12444 - DNA, 648 bp, Zea mays
  Peptide Sequence Number=SeqID_54223
atggctgccttcgaaagaatctggaggacctgggcgccacctaagtgccatttctccctctggttggttatgcataacaagtgttggacggctgaccgtcttgctaagagaggtcttccccaccctgctagttgccctctttgtgatcaagaaggggatgatattcatctcattcttattatttcattgaaagtgttcatgtcattaaagcagccaccaggtttcattaaaaatatagaaagatacactgtttttgccacgcacatggaacgcttgtcagaactttcaacaatgtatccaaatgtgaagatcctccattttgaggttgacttgagaaatgaccgcttggatttcaagttctgcctaaaggatggcatccgacgggtaccacactatgggcttctgctggccagagtagctggtatccctacttcggtgatcgacacttcaacaagtatcacttcacagatcacagagcaggaaatgacaaggatgaatgccaattgcgaggagtactggtcgcttcagatgacgtaccaggttgtgcagcggcttatctgcctgaagtactcgaaccatggcgacgactacatccgtgaagcactgcagaatctcaaggagagctattctgcgggccggctaacataa

SEQ ID NO: 12445 - DNA, 453 bp, Zea mays
  Peptide Sequence Number=SeqID_54224
atgcacctgatggaagtccaccttaccgagaagattgtcggtcgctgtgacatcgccgagcgtcgcgtggacgcacgatgcaacgagctccacagccgcttcacagcgcgtggctacaccatccagcaggaagtggatgtggtggtctatgacgagtcaagcgaccacgacggctatggcgcggcgcccttcgatatcaacgactctgacgagaagtccatcttcgacgagggccccatattcgacgaggagcatggtaccttcaacgtcgacaacatgcacttcaacgacatgcttcgcgcccactcgtttgagacgttgtgcaacccatcttccccggcgtgctcaccaccatccgcaaggccgccaacaggggccccgcgcccgatgatcgtctgctccagccctttgaccagcaccaccttctggggcacgatcgctcaagcgatgtga

SEQ ID NO: 12446 - DNA, 102 bp, Zea mays
  Peptide Sequence Number=SeqID_54225
atggccaccgagggcaacccctacttcgtcctcgacgacatggaggagaagcagatgtggttagagttctggacaatgcctcggatctctactacttattaa

SEQ ID NO: 12447 - DNA, 1128 bp, Zea mays
  Peptide Sequence Number=SeqID_54226
atggcggccgccgccgccgcccggatcctccgcctggccccgcgccggattcaggttcccaagacctccccgctcgccgcactctcgttcccactccctcgaacggcgccgatcgccgctgcctcgggaaggcggcagcgcttctgcgccgtggcgcaggcccccgcccccgcagccgcggcgacaggggcggcgggagaggccgtgggggagttcaggaagcggctgcgggtggcggacgtgaagggcggggaggacgagggcgccgcgtgggtgggcaaggagctcgccgtgcgcgggtgggtgcgcacctgccgcgcccagaggaccataaccttcgtcgagaccggggggtccctcaggccgacgagtgagtgtgccgcgtgccccagcccagatgggtcgagcgcgtgggcgagcgcgaaggggggaagagaggtggccggagacgggcgtgagagaggtggaaatcccgcggccttcgtgttcgtcccgcgcccaggtcgggccgagcccgagctcctgggtcgggcgaggcggaggttgttcggcagaggccagggcggagtccgagccctggggtcggggcgaagcggagttcgtcgtcttctggggctgagcccgagtccgagccctgggtcgggcggagcggagttcgccgtcttccggggccttagcccgtgtccgagccctgggtcgggcggagcggagttcgccgtcttccggggccttagcccgagtccgagccctgggtcgggcggagcggagttcgccgtcttccagggctttagcccgagtccgagccctgggtcgggcggagcggagttcgccgtcttccggggccttagcccgagtccgagccctgggtcgggcggagcggagttcgccgtcttccggggccttagcccgagtccgagccctgggtcgggcggagcggagttcgccgtcttccggggccttagcccgagtccgagccctgggtcgggcggagcggagttcgccgtcttccggggctttagcccgagtccgagccctgggtcgggcggagcggagtttcctatggcgcctttggcaaggcctgactgcctgtcagtctcactctgtcaagtggcactgcagtcggagtag

SEQ ID NO: 12448 - DNA, 588 bp, Zea mays
  Peptide Sequence Number=SeqID_54227
atggcgatcaccgcaaagctggacaagctgccggcgtgcctgtctgacctgtccagccacccttgctttgccaggaactcgctgtgtcgggagctgctgcaagtcggtggtgccacgcacgcggcgcggtgcccatccatcggcggacggcaagttgaggacgtagagcgccgtcaacgtgctcgccgggaggctcgacctcgcctccgcgactgtgcgctgctcgtcaagaccgacgtcttatcggacgtcgccggcccattcccgctgcaggtgcccgacgtccaggagctgctcgtgcggctgcagatcgggcacaccgaggctaggagccaggtcgtggacgcgctgtgcagggacgagcggggcgtgctagcggcgctcggccgtgccatcgtcgccacgctggtgcagctgctcacggcgtcagcgccagcagtccgagagaaggacgccacaaccgtgtgccacgtcgtggggtcgaccgctgctcgtgttgaagggtgggctgcgcagcctactgctttacttggaaggcccggtgccgtaggagcctgcggtgagtgcgctccggaacctagtgggtga

SEQ ID NO: 12449 - DNA, 243 bp, Zea mays
  Peptide Sequence Number=SeqID_54228
atggcgtggggttgcccataccgtagtgattggcacagtgcctgttatgggaaaaaggctcttatgggatgcattagctccattgttttttatgacgttgggaagtcctctgccacagatatcgagggaagagccaatctccggcgaggcggaggctctaatgagacggacatgaccgccttgggaagaaggagcctcggccgagacggagattctcccgagcttctgtcctacccaagatag

SEQ ID NO: 12450 - DNA, 435 bp, Zea mays
  Peptide Sequence Number=SeqID_54229
atgggggtggagctcccctcgggagcttcaagcccagctgaagccgctattggacgccctttggaggcttcgggagcatggtcttaccacggccgggtcgccaccgttttccaccggaggagggtactgccgctgaccgagcgtcgactttgcctggatgagatgagactgaatgcctccatggagagctccagcatggcttcgaccgccctctccaccgatgagctcctctggcgggtgaaagggacggtgggaaggactgactgcaccactcccgtcctgatgcgccccaatcaagggtatgtctttgttgagtttgttggtttccccttatgcttctggtcctctccttcccatctcaccccttccatcccgtttgcagtgggtgcggggctatcgaaccgcccgacccctggttctggaggacgtggctga

SEQ ID NO: 12451 - DNA, 273 bp, Zea mays
  Peptide Sequence Number=SeqID_54230
atggcgaggccaacccagaaatctcgccgcaatcccaccagcgtccttccacgcccttcaatcgcccaaattggcaccgcgaaagctgcaggcgaggcttatttggagctttctggacagataatggagaatggcacctctacaaccgctgattcttgttgccggaggaccgggacgggagtggcaccggcagcaagggtccgggcatccaactcctacctctacctcctcgccaagggcttgaacatcgtctaccagttctgcaaggcgtag

SEQ ID NO: 12452 - DNA, 483 bp, Zea mays
  Peptide Sequence Number=SeqID_54231
atgatgtctcgctcctgctacctcgccgtgtcggtccttctcgcggtcgccgcgacagccagcggcgccatcgcgccggcgttgctgcacgaggtgcgcctcgaggaggagggcctgctggtcgcggagggcgcgagggtggcgtccacctgggcgggcaacaaggtctcgcgggcgcagccgatggaggcgtggccgagcggcggcgtggccacgcagggcgacgaccagagctcgtcgggcggcggcgagcacgccaaggaggaggggagcagcaaggagggcgagaagcagggcaggagctgcctcaccaaggaggagtgccacaagaagaaggtgctctgcggcaaggcctgcacgctctcggcgcacagcaagtgcgccgccaagtgcaccaagtcctactgcgggaatagcagcagcaaaatgcccttcaccgctgctgtggccttggagcttgatgacggcgctaagactgagtag

SEQ ID NO: 12453 - DNA, 201 bp, Zea mays
  Peptide Sequence Number=SeqID_54232
atggagagagaggcagagtcggagtcggagccagccggagaaaatctcggcaggattcagtttgatacggcacggaggaaggacaaggctgaccagggtggctcatgcgtcagcgattctgagaagaacagaccacacggtgacttgcatgctgatgtcaatgatcgcgtcatggtgatgtcattgcggcaagaggaataa

SEQ ID NO: 12454 - DNA, 429 bp, Zea mays
  Peptide Sequence Number=SeqID_54233
atggcgtccatcatcgtcatcgccgtcgtgctcgtcctggacgtcctcgccttcgtgctcgccatcggcgccgagcggcgccggagctacgccaacgtgaccgccgccgactcgtccgggcgtgcctactgcgtgtacagctccgacgcgtccacggcgtacggccgcagggtgacgttcgtgatcgcggagctgtgcctgctggcggggtcggtccggaacgcctaccacaccaagtacgtctcgctgttcagcaacgccccgccccggtgcgccgtgctgcggaggggagtcttcgccgccggcgccgccttcgccttcctcaccgcgctcctggccgagctgcactacctcttctacgccagggcgcgcgccgccgccgccgtgcccccgcccatcgtcggcggcatcggcatgacccgcatgtga

SEQ ID NO: 12455 - DNA, 1551 bp, Zea mays
  Peptide Sequence Number=SeqID_54234
atgcagctttccccgaggctcctgcgcgtcctcgccatcctcctcgctgccctgcccccgcgctgctgcgcgggccaccacgcggactcgtcgtccaccgtcgccggcgacaggccgtccccgccgtgctcgccggcggaccgggcggcgctgctgggcttcaaggcgggcgtggccgtggacacgacgggcatcctggccacgtgggcgggtggcgactgctgtggcgcgtgggagggagtgacctgcgacgccgccacggggcgggtcgtggcgctgcagctggaggcgccgaaggcggaggtggggcgccactacatgcagggcgtgctgtcggcgtccctcggcgggctcgagttcctggaggcgctggtggtccgcgacatggccaggatcgcgggcgccatcccggcggcgctggcgcggctgacgcggctcaggcagctctacctcgagggcaacatgctgtccggggccatcccgaggagcctggccttgctgcggtcgctccagtacctgtcgctcgcgggcaaccggctggacgggcagctgccgccggagctcggtgccgtctccggcctggagcagatcaacgtcgcccggaaccgcctatccggcgcggtgcctccaagctacgagaacctgtcgaggctggcgtaccttgatctcggcagcaacctcttctccggcgcagtgcccgggtttcttggccagctcaagaacatggccttggtggacctcagcaacaacagcttctccggcgagattccggcctcgctctgcaccctgcgcagcctgacggatctgtcgctgagccataacaagctcggcggacagattccgacccagatgggcaccctccggtctctcaactctctggccatggacggcaacatgcttgtaggccccattccggcatcactcctcggcctgcagaagctgtggtacctaaacctgtcaggaaacgggctctctggtccactccccaccggcgccggcatcgctttgccttccatggtatccatggacctctcccgcaaccgtctcaccggcgacattggccagctgttgagaagcttgtcggtgaacaggacaagcccacagattgttcttgcccagaagctagagcacctggacgtctcggagaacaagatcgccggcgcgctgcccgacttggcccgcggcgcagggctcaggtggcttgacatctcgggcaacgccatcggcggccagataccgagctccatctccaagctgagcggcctcgagaggctggacatgtccaggaaccgcgtcaggggcaccatccctgcgtccatggcggagatggtgcgcctgcggtggctggacttgtccaggaacgagctcgtcgggaggatacctgacaacttcacgagactgacgggcgtgcggcacgccagctttagaggcaacaagctgtgcggccagataccacaggccaggccgttcaacctgttccgtgcggccgcgtacgcgcacaacctgtgcctctgcggcaagccgttgccggcgtgcaggaagatatggtga

SEQ ID NO: 12456 - DNA, 393 bp, Zea mays
  Peptide Sequence Number=SeqID_54235
atggttgagggtctcctcgacatgaaccctggtgagattctggacccctttggttcgcttgttggtccgctctacgtagcacaaatcgtagggggaaagtggagctttggtgctcggctggacgggagcaccggtgatggtctccgccgttgggggcggccgccgctggtgcgggatctgctgcgctcagctatcggtggtggaagacaacccatgaaccgtagatcgcgttatcagtggccaagattagaagatagggccaacttgactagagcctatctccgccattcgatcatgatcgtgcgcgcaggactccattccgttgttttaaatcctagccatcggccggtaatcttacggttctggttgcttaccgcttcggtaatgggctga

SEQ ID NO: 12457 - DNA, 674 bp, Zea mays
  Peptide Sequence Number=SeqID_54236
cgcttagtgtagaccgcccccgcccccgctaccgcacgcctgccagaccaaccgaacgaccccacgcccgccgtcgccgcgcgagccgcagccggcctccgctcgcgtcgccccaccgaccacgcctcagccgccctgacccccggtgcattctcctctcggtgccgactgccgagatctccacaaccctctccagagaggagtgccctactatctaccgtcgccttccttggtcgccgcgcacggccttcctcgccgcccaagccccaacctcgacgacgcgcctcgcgttgtcgtcccgcctcggccctcttctcgccctgccgatggatccagccgcccccgagcctatccccgcacccgccaccgacaccgatgccgtgaccaatgccgacaccgatgcggaggttgggggcgagggcgctggggccgggaccgagaccgggtccggaacgatgccggctggcggtgtagcggagatgaaggagctgcccgaggagtttgccaagggggtggtgtgccccaaatacgagacatcggccgaagcggtggcggcgggggttggcaggacctgccgcgtctacgtcgtcggcaccgctcatgtgtcgcagagaacactgcctgttctgattgcttctcatgctgttgtacttttactacttcagaaacattga

SEQ ID NO: 12458 - DNA, 1251 bp, Zea mays
  Peptide Sequence Number=SeqID_54237
atgctcggcgcacccggccacgacggcgacgacgccgcggagcgcgcgcaggagcaagccgccgccgccgcagcagcagcagccgacgatgctccctcctcgccaagaggtctcgtggtcgcgagcgccggtctcctccaccgcggcgacgtcgacggcgcccggcgcgcgacggctgaggtcctgtccaccatggaccagcggggcgacgcggccgaccgcctcgcgcaccacttcgcccgcgcgctcgctcgcctcgtggacgacaaggcggccgccgccgggggcggcgacgtcgccgcggcgcccgcgggaggggctccgccgcctgcgcccccggggccgacggcgtacctggcgtacaaccagatcgcgccgtttctgcggttcgcgcacctgacggccaaccaggcgatcctcgacgccgccgctagcaccagcggcggcgcgcggcggttgcacatcgtcgaccttgatgccgcgcacggcgtgcagtggccgccgctgctccaagccatcgctaaccgcgcggaccccgccgtcggtccgcttgaggtccggatcaccggcgctggacccgaccgcgacgtgctcctccgcacgggggaccgtctccgcgccttcgccagctcactgaacctccccttccgtttccacccgctccacctcccctactccgtgcagctcgccgccgacccgaacaccgggctggagctgcactcggacgagactctggccgtcaactgcgtgctcttcctgcacaggctcggcggcgagggcgaggtcgccacgttcctgaagtgggttaaatccatgaaccccgccgtggtgaccatcgccgagaaggaagccaatagcatcggcagcgacgactgttccgatgacctgccgcggcgggtgactgcggcgatgagctactactcggccgtgttcgacgccctggaggcgacggtgccgccgggcagcgctgaccgcctcttggtggagagcgaggtcctcggcagagagatcgacgcggcgctgacgccgggtcgcgtcggcgaacactcctgggggttcgatgcgtgggcctccgccgcgcgtaccgccgggctctcgcctcggccgctcagcgcgttcgcggtgtcgcaggcgcggctgctgctgcggctgcactacccgtcggaggggtacgtcgccgaggaggcacgcggcgcgtgcttcctcggctggcagacgcggccgctcatggcggtttcgtcttggcaatag

SEQ ID NO: 12459 - DNA, 336 bp, Zea mays
  Peptide Sequence Number=SeqID_54238
atgggagaacccatccctaatctctccggccaccaagatcctcccccctctgcccgtaggaggcagcagcaagcatctcccctcccaggcgactacatcctcctcctactcctctcctccccagctgcagttcgcacaccctcaaagggcactttgttttggcaaagtgagtacagcagcggtgagggctcttcattgctgcaatttacatcctcctggaacaataagtttattaaatggttcagggagaagccacgtgacacatatgatgtagccgacgtttcagatgatgaagacgttgaagatgaggatgccaatgcagaggaagacacatga

SEQ ID NO: 12460 - DNA, 1806 bp, Zea mays
  Peptide Sequence Number=SeqID_54239
atgcacaaggtcgaggccgtcgcggacgatgatggagaggtcgagcgccttaacgacgtggtcggagaaatcggggacgaggcagatgagtgggggccgcgcgaggggcgagtcccgagagataatagatctatgatgccatttagtgataaagctttggagtctgctgtacggccttcgcctccagcgacggccgcgcctacacgtagtgtcgtatgtgttgatgtcgtctgccgtgcacctgaggcccaggcgccgcccgcacgagtactgctcgccgcgcgcctcagcgccatccgcaaaagcggttgcttcgggcttcgaggccttactcgtcggctgctcctgcccgcctccgtctcccacagcccacagtcccacacagccacggccacgccgccgtcctcgagccgcctgatgagctgcctccgccgcgcttcccgcctcacccggggtctctcttcctcctcggcggcggaggcggagacgctcccgccgccgcgcccctctgcgggtcgccgcgtggtcgtgacggggctgggcgccgtcacgccgctggcgcgcggcgtgggcgccacctgggatcgcctcgtcgcggggagatgcgccgtgcgctctctcgccgcagaggacctccgctttccggaggaagcagcggggaggacgctcgagcagctcccgtccagggtggtcgccgccgtgccgcgcgggaagggcgaggacgagttcgccgaggacacgtggaccaaggataaatctgtatcaggatttatttcctatgctctgtgtgcagctgatgaggctttaagagatgcaaattggttgccttccgaagatgataagaaggaaagaacgcgtctacgtcgtctcagcccatacttcatccccaagattttgatcaacatggcatcaggtcatgtcagcatgagatatggtttccagggtccaaaccatgctgctgtgacagcttgcgccactggtgctcactctattggcgatgctactaggatgatccaatttggtgatgccgatgtgatggtggctggtggaactgagtccaatattgatgctttgtctatagcgggattttctaggatggctgcacgctggacggtggacaccggtggaggcatggagcggaggcgggcgctgcacactggagggcggaggctcgagcacaagcctctgcagcagccacacgatggagcagagagccgccggagtagagggggcgcagtcgcacgctggagaaggggcgacggctactgtgcggctgctgtggcacttgatcatgcaaaggaacgcggtgcaaaaatatatgctgaagttcgaggctacggaatgtctggtgatgcacaccacataactcagccacaaagtggtggtagaggtgctattttagccatgaagcgtgctttggaccagtcaggtcttcatgtaaatgaaattggttatgtgaatgcgcatgccacgtcgactcctcttggtgatgctgtggaggcgaacgcgatcaaatctgtatttggcgaccacgcagcatccggtgatcttgcaatatcctcaacaaagggagcaattggtcatctgctaggggcagctggatcagtggaagcaatcttcactgtgctagcaattcaccacggactcgctccgcctactcttaacctggagcggccggacccgctgttcgaaggggcattcacgccactagctgcgcccaagaagatgtcgatacgagcagccatctccaactctttcgggtttggtggaactaacacgtcgctgctgttctcgtgcccgccctag

SEQ ID NO: 12461 - DNA, 438 bp, Zea mays
  Peptide Sequence Number=SeqID_54240
atggccagccctggtcggctctccctagccaccagcggcggcgccgcccgtgtccatggtagggactcactggaaacaagggcgcgagcacgctggggtccctacggcgataggaagggctcagggaggtcaggggaatgctgcgagcccgagcgtgggcacggcaccgacacagaggcactggagggtggaggtccacgacaagatggctcggcgacggcgctgcctcacaccggtgaggaatcacgcgcaatagagggcagggaaggggaaataagagggcggaggaggttggttacctcgagggaagactctaggaccctagacggtggtagaggcatgacgagggctcaggtcgacggcagcggtgctgcggctacgaggaagaagtctggtgagcgtgggcagagagaaccagagggggagggagtgaattga

SEQ ID NO: 12462 - DNA, 353 bp, Zea mays
  Peptide Sequence Number=SeqID_54241
gtgaggtccccgacgacggcagcgcgcggaggagctccggcaagcgcgtagaccggccgagcggggccatgaccggtgctcccgagcgcctgtcaccgaattggacctaccctgatccatttccccaacctaatttcactaatgaccctatggttttcactggccacgacgaccatggatgttgcgggtggatgaatgcgttcccggcgacgagggggctcctaattcaattggatgggttggcgagtatcaccgatgttgtgctggcggccggagaggaggaagaagcctggcgcggtgaatacgtgtccctagccgtggcgggctcatcggcgatgatgggacggcagtag

SEQ ID NO: 12463 - DNA, 120 bp, Zea mays
  Peptide Sequence Number=SeqID_54242
atgggtgaagggatagagcagtgggtcgatagagggagtgtccacggcggcgttctcggtgacgatgtggtgttctcggagttctgcggtagtagtattcaatcggccggcacgggttag

SEQ ID NO: 12464 - DNA, 240 bp, Zea mays
  Peptide Sequence Number=SeqID_54243
atggtgcccaggggaggggaatacgtcaatggcgccaaggtctcgatgagccgttgcgacgaacgcggcgggcagcgcaattctgttatgcgcgagtttgttgagagggggaagaatgcgctgacaagatgggtccccagggcagtgagatcgggggcgcggcaacaacctgatccacaaggatttgcggtggccgcaaccaccaacgccgagatccccggctggaaaaatgcacagtag

SEQ ID NO: 12465 - DNA, 438 bp, Zea mays
  Peptide Sequence Number=SeqID_54244
atgaccattgatgcgtccaaggagagttccgctttttcgatggaggaacttcaggatgatttctggcagcaagttgggctgccggcgaccaaccactggttgatggaagcagatgaggtcggtctagaagatccttgccgccagtttcaaacgggaaggatgggtaattcgaccataggtaggttcgctacctcgtccaagaccgaaaccgattgtgatgttggccgatttcatgccgccaaggctacacggaatcgacatcgagagatcatagaattccgatacagaagttcaaccaagacagccgctgcttcaggttcaaaatttgaacgaacatgccgacccgacattgattataggaagggaaccgaggtggtcgatgggactgacagaaactttaattcaccgatcccgagaatatggaaggttggagagtga

SEQ ID NO: 12466 - DNA, 240 bp, Zea mays
  Peptide Sequence Number=SeqID_54245
atggtgcccaggggaggggaatacgtcaatggcaccaaggtctcgatgagccgttgcgacgaacgcggcgggcagcgcaattctgttatgcgcgagtttgttgagagggggaagaatgcgctgacaagatgggtccccagggcagtgagatcgagggcgcggcaacaacctgatccacaaggatttgcggcggccgcaaccaccaacgccgagatccccggctggaaaaatgcacagtag

SEQ ID NO: 12467 - DNA, 1338 bp, Zea mays
  Peptide Sequence Number=SeqID_54246
atggagagaaagagaaaccccattgtctttctggatgtatctgtaggtgatgagccagatgaaagaatgatctttgagttgttcgctgatgttgcaccccttgtgactgagaacttcagagctttatgcacaggtgagctgggaattggacacaagactaagaagccattatgttacaagggatcatcgttccaccgtgtcatcgaagggttcatggcacaaggaggtgacattgcgaaaggaaatgggtctggtggagaaaacatatatagtggaaaatctgcagatgaaacttgtgttctacctcatgatgatcgtggtctcttgacaacagcagatactggatccaaagctagtggctcccagttctgcattactttcaagcctaattctcatcttgacaggaagcacacagtttttggcaagcttgttgttggaagtgatgttctgaagagaatcgagcaagtagatgtgcaatcccctgattcaactcctgttgttccggttactatagtaaattgtggggagctcactgaccgtaaagatattggatctatgagaataggaattgataaaaagagggccgccaaatcaaagttgtcaaagggtatatcttctgatgaggaaagtaatgaaggacagcacaagggccgccgtaacaaatcttcaaaaaggagaaggaagaagagatatttttattcggagtcagatagctcttctgagtcggagactgaatcatctgattctgagagcgattctgatacttactcaagtgactcatctgatgtcagcagttcaagtgatgacaggcgaaggcgcagaaagagacattcgaagaaaaataaacgcaagcgttcaagaagaaagcatgaccaaaggcgtgaaagaaggcgtaggaagcgtgataggaaatcaaaacagaagtcaaaaaggataaagggtgacagtgaagctgaaagttcgagtgatagcagctctgaagatgctagaagcaagagacaccgccacgggcggaagtccaaggcatcatctcaagtttttgaggaaaatattgctgcagtgtctgctttgaaggatgccacgtcacctcaacaaaagagtggcataccaaacagtccagcacaagatgtctccccgctgcaaaatggggaaaactatacaaatggtgttaacgaatcaaaaattgaaaggaatgcagctgtcatgcctgttctaactggcaaccaaagcaaatctaggtttcctatacttcttcatacatcattctttgtgcttactgcttctggaagcggtgtttcatctgacattgataagcaggagccagagcatgagtgttaa

SEQ ID NO: 12468 - DNA, 231 bp, Zea mays
  Peptide Sequence Number=SeqID_54247
atggtcgacgacgataaagggaagggcaaggtgaccaacgagaaggaagctctcaacaacgagccgaagggagaaaagcccatcaacacaggatctgagatgaagaaagatgggaacaagaagcgcatcaactctgtctgggtgcaccggacagtgtctggtggtgcaccggacagtgtccagtgcgctcggctgactcaggcgaacttgctgctctcaggaagtgattaa

SEQ ID NO: 12469 - DNA, 420 bp, Zea mays
  Peptide Sequence Number=SeqID_54248
atgacgatgctgatgttaaaccgccaaacatacatgaccatcgtatttatgcttattatactggaaggcgcaatcactttggatgtatttctgaatagcaactgggaagaggtttccctcctgacccatcaggccaagtttggggatttcaagcactttgtgagatccaattccgagatatgtgaatgggtaggcctctcagtggtggctgctcaggtgctatcaatcgttcttgggatggtgctcaggacccttgggcctgaccgtgagaccgactatgacagtgaagacgacacagccgtgcccgcaaggctgcctctcctgagaaaccagtcccagcatggatcttgggactacgctgaagctaccacgtctcgtcagggacttccgttattacattctaaatgtgttcagcgttaa

SEQ ID NO: 12470 - DNA, 207 bp, Zea mays
  Peptide Sequence Number=SeqID_54249
atggtcgcctgctccatgcgcaagtcgtcgttcaaggttcttgaggctgacatccagcacgccaacaccctcctggccgacgcgctggggctgctcatgatcctaatctacaaggtttatgtggatgggagcaccaccaccatgtcgtgcatgtttcagaactactctaccgctgctgctgctgctgcttctgctattctaacatag

SEQ ID NO: 12471 - DNA, 258 bp, Zea mays
  Peptide Sequence Number=SeqID_54250
atggcgcgtcgagtgaccgctatcgacatgatcgtacctccacaagtacggccacacacacgctcccactacctcgaggggttggacggccctgttcacataggacctcaacattggagcttctacagtgactcgaatatcgggctcataacggtgggcaacaccgcacgatgcacgacaactccatacgactggcctgcgggggagtacgactacgcacgatcctacgaacaccgtcaaaggaacaatgccacctaa

SEQ ID NO: 12472 - DNA, 822 bp, Zea mays
  Peptide Sequence Number=SeqID_54251
atggcgctcgcggcgatgtggctggcgcgacggcggtgccacacgggagcagtgcgctggtggcgcggcgcggtggtggacgcggcggggtgggggtgggggtgggagagggagagcatggtggcgataagggggtgggggagggggaggagaggaatgaggatcaaagaagcacggaagccacggcttatcctgctcctagccgtgtccgcgcggttccaatataagatcgccaaacctgttaaaaaccacggcactaagatttgtgttgggagaagaagttggcgcggaatcactccaaacggttccaatataagatcgtcaaacctgttgaaaaccacggcactgagatttgtgttgggagaagaagttggcgtggaatcactccaaacgacttgtgtcttagtccggtgtagtggtgatcgtagtagagggtgtattacaactagtgtgcccgtgtgtcaagaaagagggtgccaaaggttcaacacaaaccaatcaaaagaacaagttaagtctcaaaaggaaggagcaaaaagggaaccgaaggctgccctggtctggcgcaccggacagtccggtgtgccaccggacagtgtccgatgcaccagggtgcttcagctcaaactctttcaccttcgggttttccaggcgcagctccgctataattcaccggactgtctggtgtgccaccagactgtccggtgcaccagcggagcaacggctatctgcgcgcaacggtcgaatctgcaaagtgaacagtactgcgacagaagtcagagcagcggtcagaggggcaccggactgtccggtgccacatga

SEQ ID NO: 12473 - DNA, 1197 bp, Zea mays
  Peptide Sequence Number=SeqID_54252
atggcgccgccgggccagctctaccagccgttccacccgccgccgtcccctctcccgcccagcctccgcaacctcgacctcagcgagcgcctccagatcctccgcgaccggatgggcctgtggcacgagtacgcgcccctcatctcctcgctctcccgggacggcttcaacccgtcttccatccaggaggccacgggcatctccggcgtggagcagaactgcctggtcgtcgcgtcccaggtccgcgactcgctcctcgacgaccgggccgccgcgttcccgcccgacctgcttccctacttcgactccttgggtgggcccgaggtcctgtacgagctccgcttcctgaacgcgcggcagcgcgccgacgccgccaggcacgccatcggctacaggctcgagcccaagggcgtgcgggagcttgcgcgcgccatgaagggcttcccgcgctggcgcggggaggaaggctgggaggccttctcgaaggactcccccgccgactgcctcgccttcgcgcggttccggcagtcgcgggaggccatcgacgtgcaggaccgcgtcgcggagctggagcgcgcgctgcaggtggtggagaccgagtccggcagggcgcgcgtggagctcgagttggagcgcgccaggaggaaggcggccggggaggaggaggtggacgaggagggcgaggaggacgacgctgccgcctcgctgcggcccggcgtcacggtggtgcggctccgctacggcgaggtcgccgaggcgaccaccgtcatcctgctgccggtggtgagggagacggacggcgtcgcggccatggagtcggcgcccaggcgggctaagacggacgtgggccttggcgtcgtggaggtggacagggcgtgggcgcgctgggccgtggtgcccggatggggccccgtggccgaggcagcggacgacgccgtcgtcgtagagctggccgacgggcggaggctgccgtggcggatgagcgacgaggagccggtgctggtcatcgccaaccggagcaagaaggaggtagtggaggagggggtatacgtcctcgagagggaaggccggcttgtggtggagagggggaagaagctggctgagcagggcatagctgctgcggcggccgaggtggtcatcgtggtccggccgcccaaggacgaggacgacatggttagcgacgaggagtgggactga

SEQ ID NO: 12474 - DNA, 3639 bp, Zea mays
  Peptide Sequence Number=SeqID_54253
atggcggggaagaagcgcaagtccggctccgagaagccgacgaagcaccgcctcccgctgggagccgatgccgacgctgtcgccgaagcctcgaagcgccgccgatcgggcgccaccaagcagcaccaggcggacgaggaagcgtccatcccgccctctctcagcgccaagatcctccgcgaggcgcgcaagcagcaggaagaggagatgcgcgccgactccagcgacgaacagcgaccctcagccgtcgaggcgaccgcggggccgtccacgtcgtcctcgtttcccgtccccgccgccgacggcgagaatgagggggacgacgtcgatgagttcgacgggtttgacgcgctgagcgagtacgatggcggtgaggtggagatcaacgaggaggacgagaaggccctcgctgctttcatgtcaaaggacaaagctgccgagcgcacccttggcgatatcattctccagaagatcagggagaaggacgccgaggtcgcaactggtgaaggacgacctcgtgtaaaattggacaacagcattattgaactttataaagaggttgggaagttcttaagccggtacacgagtgggaaaattccgaaagccttcaagcgcataccatcgatggagtgctgggcagatgttgtgcagctaacggagccagagaattggtctcctaatgccgtgtatcaagcaacacgcctcttctcttcgaacatgaacacaaagaatgctgagcggttctatgaagccattttgctaccccgtgttcgaaatgacataaggaagaacaagaggctgcattttgcactctaccagtcgctgaagaaggccctttataagcccgcggcatttaacaagggaattttgctaccactctgtcggcagctgccgcacggcggcgtccagtcgccggagaacatcccggtcagcctccggcgccaatccctcccgcgtctcgcacggacacggatcggtcggcagcggctgccgagggatgctggttaccgggccccgatcccacgtcgtcagcagccgcgacggctcacagcggcggccaccgaagcctcctcctacaacctaccatctcgctcctcaccggaggcgccggagaccaggcagatacgcctggagacggagtcagcactggagtggggcggcgtgtgcgagcggctggcccacttcaccgccactgctgcgggccgcgccgcctgcgagggagggcgcgtccccgtcgggcggagccgggaggagagcgagaggctgatcgaccagacggcggcggcggtgctgcttccgacgccgctcgatttcggcggcgtcgaggacgtgtccgcgctcgtcgctgcggcggtcgcgggccgcgcgctggcggtgagggagctttgcgcagttgggcgcagcatccgtgccgtgcgggcagtgttccaccagttgaagaggcttgccgatgaaatgccggatggaaggtactcttctcttgtagatatactacaaggttgtgacttcttaactgagcttgttcaaaggatagagttttgccttgattccaccctttctcttgtcctggatcgggcaagcaaaaaactagagataatccgccgagaaaggaggaggaacatcgaaatgttagaatctctactaaaagatacagctgcaaagatttttctagcaggtgggattgataaccctctggtcaccaagcgccgttctaggatgtgtgttggtgtgaaagcttcacacaagcatttgatgcctggtggaatcgttctaagttccagtggctctggcgcaacatactttatggagccacaggatgctgttgagctcaacaacagggaagttaaactctcaggagaggagagagcagaggaactggtagtattgagcttgcttacctcaatgattgcagactcccaactgaagatcagaaatttgatggacaatgttttggaattggaccttgcttgtgctagagggtcgtatgccctatggacaaacagtgtcagaccaaccttcactgatagttataccattagccaatcagaccagtgcaatgactattcaatttatattgagggcattcgccatcctcttctacttgaacagtctcttatggcagaagaatcaactacagaagcatctgaaatgcctgttccattggacatgtgggtaaaaaagaatgcaaggatagttgtgatctctggacctaacactggaggcaaaactgccactatgaagaccttggggctgtcctcgcttatgtcaaaagctggtatattcttcccagccaaaggaaggcctaggattccatggttcgatcaggttcttgcagatattggtgatcaccagtcgctggagcacagcctctctacattcagtgggcacatatcacgtctgcgcaagattgtagaaatggtatcaaaagattctctagttctaattgatgagattggcagcggcactgatccagctgaaggtgtagctctttcaaccagcattttgaagtatcttgcaagtagagtgaatttagcaattgtgacaactcattatgctgatctaagtcggctccagtcagttgacaaccgattcgagaatgctgcaatggaattttgtgtagaaactctacaaccaacataccgaatcttatggggcagtactggtaattccaatgcacttagcattgcaaagtcaattggttttgatcaaaaagtgcttgatcgcgcacaagaatgggttgagaaactactgcctgataagcaaaaggagcggcaaggtttactttatgattctctcgttgatgaaaaagaacttttggaatcccaggcaaatgaagctgcatctgttctttcacaggttgaggggttgtacaatgagattcgcttggaagctgatgatctcgaaagcagagtagctgcattgagagcaagagagacccaaaaggtacaacaggaattgaaggttgtgaagtatcggatggacaccataatcaagaactttgaagctcagctaaagaattcaaaacttgaacaatacaattcgctaatgaggaaagcagaggctgccactgcttccgtggttgccgctcatcagccaagcgaaatagctttcgatgatgacgatgaaaaccggatctcgttcgtctcacaagttggagacaaagtgtatgttcaagggctgggaggagaaacgatggctaccgttgtcgaaactctcggagaagatgagagttgtatggttcaatacggaaagataaaggttcgagtcaagagaagcaggataaaactggttcaaagaggcacaaataacgaggcaacaacttcctcttctgtaaaagcaaagggccgaacaccgaagcagcgatcggcaacgacgacggacgtctccttcggccccgtggtgcagacgtccaagaacacggtggatctgcgcggtaagcgggtcagcgaggcggccttcgagctccgcatggccgtcgacgcgtgcaggccgtaccaggtgctgttcgtggtccatggcatgggcaccggggcggtgaaggactgcgccattgacgtcctccggaagcaccctcgcgtggccaggttcgaggacgagagccctctcaactacggctgcaccgtcgcctacatccagtga

SEQ ID NO: 12475 - DNA, 1749 bp, Zea mays
  Peptide Sequence Number=SeqID_54254
atggcgggcggcgagggggagatgcggtcgctggcgctcacgcccacgtggtccgtcgccaccgtgctcaccctcctcgtcgcgggctcgctcctcatcgagcgctccatccaccgcctcagcaattggctgaagaaaactcatcggaatccactttacaaagcaatggagaagatgaaagaagaaatgatgctgcttgggttcatatctctgcttctggctgcgacgtcaagaatcatctcggggatctgcatcgactccaagtactacaacagcagattctccccgtgcaccaaagaagaggtccaagaatcgataaatgcagagcatgccattgctcacgcgcgcaagcatctactggaggtcatcctgcaccattcaccgaggagaaatctgaaaactagttaccataaccatgaaggctgccgtgagggatatgagtcatttgtttcgcatgaaggtttggagcagctgcaccggtttatatttgtaatggctgtgactcatgtgacttatagctgcctgacgatgttactagcaatactcaagatccataaatggagaaaatgggaggatgaagcattcagggataatcatgaatcattttctcagatcgcatatgagtcagcaactagaaggcaaccagcacttaccaaatcctattcattccgctcttggagccaaaataatgtggtcatgtggcttgtttgctttattgcgcaatttggtcagtctgttgttcgagcagactatcttatcctccgcaagggttttataatgacccacaatcttccgccaacatatgatttccacaattacatgatacgctcaatggaagaggagtttgagaagattgtcggagtgagtggactgttgtggggcttcgttgttgcttttatgttatttaatgtagacggatccaacctgtacttttggatagcaattcttcctgtaactcttgttcttctggtgggtgcaaagctgcagcatgtgattgcgactctaacagcagagggcgcaaagatgagcacctacgggccaaggatacagccaagggatgatctcttttggttcaagaaaccagagtttctcctttggttgatacacttcgttctctttcagtggcaatttggttatgattcatgcttcatcaaaaaccaccttttggtatattgccgccttatactggggtttgctggacagttcctgtgcagttacagtacattacctgtatatgcgctggtcactcagatggggtccaagtacaaggctgcgctgatcccgcggaggatcagggagaccatacatgggtggggaaaagcgacgaggaagaagcgccggcgccgccgcggcgacgactcgacggtccgcacggagacgagcacggtgtgctcgctcacggacgacgacgaagacttcgaagacgacgacgaccaccaccaccacggaccgtcgtacgataccccgagagccgggggccgcccgccgtacctgaagatcgagacgcatcgtcagtcgggcagcgggcacgacggccccaggcccggcggcaccccgtgcttccaccccagcggcagcggcagcgggcacgccatgctcctgcggcaggcctccgtctccgcgccgtcgtcgccgtcgtaccgcggaggcaataacgtgacaaggtcggcgtccatgcccgggatcgccgcgctgaggacaacgggctccggcacgccgacgcgcgtgagccatgaggagcctacttga

SEQ ID NO: 12476 - DNA, 303 bp, Zea mays
  Peptide Sequence Number=SeqID_54255
atggcggttagctgtcgcgggttcagcttcagaagagatgcggcggcggcggagccagaagcagggaagaaaggaagatacaatgaacaacgaggtaaaggttgttgctttttgggagcttgtggagctgcggcttccaggatcaatcaacaacacaacaacgaggagagagaggtaaggtgggcacggagaagtatgggcccgacagtcagtgtcgctgcatgtgccgagggaggagcaagcaaagtggaattagatgcgaggacggggaggccttggcgccttgcttccaaccgctcgtga

SEQ ID NO: 12477 - DNA, 492 bp, Zea mays
  Peptide Sequence Number=SeqID_54256
atggtgatgaacctggacgtagcggtggacggtgaggtgggggctggtggtggtggtgcggctgaagggctgggggtggtggttggggatcgccgacttcctgataccagggtggagtatcaacttccaaacctcatcgtaggagctgttacaaaagaaagtatctatggtgcttttgaaaatgggataactgctgagcagataatttcatttcttaggcaaaatgctcaccctcgtgttgctgacaagatacccgctgtcccggagaatgtcacagatcagattaggttgtgggaaactgacctcaacagggttgagatgattccatcgcatttgtacgaagattttcctagcaaggaatggtttgaacaatgctgtgattatgcaagggataatgggtacttgctgtgggaggaccccaagagaatgagactaattgtacgaggggagttccaccccgaaatgagggagttccttcgcaggcaaagatga

SEQ ID NO: 12478 - DNA, 1089 bp, Zea mays
  Peptide Sequence Number=SeqID_54257
atgccgcaggtaatggtggtggcacggaacttcatggatatggtggctgctcttcctgcgggcaagcttgatatgctctatgactcagcctttatctgtgaggcagtactcaggtcacttcccccactggcaaagaagtatgcactgcagatgttgtatgtgctggcaccagtgaccgctgcagcaatggaagagtgggtgcttgatgaatatgctgccaagcataaggttgccattgataagcttctacagctcagggtctttgttgaagtgcgcgacagacgacgggacgtgagctacaagatgaatcagaagttccagggaaacatgcagaagtatttggttgatggtggaagtttaccaagggaacctttaccattaagtgtcactggtcgattgcccacaccagcagatctggaagcctatgctcttgatcaatgggagtacagttggataatatatcctgtggcattttctagaattctacataataatacatacactaaacaggatggtgaagcttcaaagttgactgaaaatggcttccaatttcttgttagttctctgttcccagctaatacgataaccggcagatttccgtctttgctcttaatattttctatgctatcagctgatggaaacaaatgcacaactttggaacgtggagtggaccctacggagctgatatcatttctcttggaacttagctttcataaattgggagcggcttatagcttgaacactctgactgatgtccagaggattgccatcagggatcttgcagaattaggactagtcaaacagcagcagggatttgtggttgtggagacaaactttcgaatgtatgcatactctacttccaagttgcactgtgaaattctacgcctttttgcaagacgagcagtccttcgcgtccggcgccttggcgaagagcagactgcagacgcccaggtccacgagctaacgagcgccggagctgacgagcagacaggcaaatggcgcctcggcgaacggcagcaagccggcaaccttgcacgcggcggcggcgtgcctagagttgaggctggagctgccaacctggtgctctag

SEQ ID NO: 12479 - DNA, 344 bp, Zea mays
  Peptide Sequence Number=SeqID_54258
cgctgctcgaaatatcgtttggggccctcagcgaggtttgggcgctctccggtgttgtccgccgccgcggcatgcgctctggcgccgctgctggtgaagacagtgcgctgctcgaaatatcgtttggggccctcagcgaggtttgggcgctctccggtgttgtccgccgccgcggcatgcgctctggcgccgctgccggtgaagacagtgggaacccaagttcgatgacgagtagggagatatgccaaaatcccggacgcgatggcggcaaccagaagggtgaagacgaggtcgagcaggggaggatggggtttgacgggctcgacgcgacggcgaggacatag

SEQ ID NO: 12480 - DNA, 297 bp, Zea mays
  Peptide Sequence Number=SeqID_54259
atggggccatcccctgccactcttgcctctgcccatggtcgtgcagaagggggagaggtgaagaggaaggagaaggcaaatgatcaagggcgagtgaagaaagcagtcgaggcagacgaactatttaaagaggccgagggcattctggcaggtgtctgggaaacggtgtccagtggcgacatactccggcttcttgcggatccccatgcgaagcgcgcagctccgaagaagtctacgaccagtcgtatggctccgataccacctgaagcgtcccgatcctttgggactcaaatgtga

SEQ ID NO: 12481 - DNA, 678 bp, Zea mays
  Peptide Sequence Number=SeqID_54260
atgggcaccaacgccgcctgcgtgcgtgcgtctagggagccgggtgggggcgtgggctggggatccatgcacacgctcctcctccttgccaccgctgcacgagcgacgcagatcggtcaggccagtcacccgccggttggcgcggcgcggcggaggcgacagggtaaggagattagcttgcgggggggagtacaggtactgggggcgacggttctgggcttggcagaggcgagagcggatgcagggtgtgtgcgacgcgggggggggggcaggatgaccggaggggatgggcgagggaggggcggggatgatgcggcgcccgtggcggcggacgagagcgggggcagaggcaccgcgagcgaagataaaagtattaaccttggtcacctagtcaaagctgacaatagggaccaagctaagaagattcaagtcaacgagagtgctaagccagttggtgccaatggagaaaatataatttggtttgaatacttgaatttggaaaggagctgttcacgaagtccgctctactgcccgcgcgtggtcgatgtcgctgacgtcaagggcccacccgtcagtgtccttcccttgcgctatcgcaacagcatcaccgagttcgccggggaagatgggatttcgggttccaaggccatcagccgagctcctgaccggggaggataa

SEQ ID NO: 12482 - DNA, 2721 bp, Zea mays
  Peptide Sequence Number=SeqID_54261
atggccctgttcgatcggaaccagaggcagaggtcgtcgttctgctccacggcgaccttcgtcgtgttcgtcgcgctctgcctcctcggcatgtggatgatatcctcccccgagaacgtcccgtcggccatttccttgtcctcggagaaggtcgtcaagtccgacgtcaaagaggaggacagctccattgacgccaccaataccgtcaagcaggacagtgccaacgtcgtctcagaggcgaccacggacggtggcgctgccacggagagcgccgaggatgtcgacctcccgggcaagcccggtggcggtggagcatcagaaggcgatggcgggaaggcgtcgtccaaggaccagtcgtttgacgacgagaacggcagaaccgagagcggggagctcgtcaaaccaggggccggagagacggacgccgtcgcggggcaggagcaggacaagggcactggcgaggacccggtgctggagaacgacgcgaaggtcgatgccgccggcaaggagcagacgccgatcgacaccaaggatgcctccgggctggatcagagcgtcgagcagacagtcacggacacgaaggcgagcgcatcagagcaggcggcggcgactggcctcgacaaggtgagcagcgccgaggcaggcggtggcacgcccaagaaactgacgttcgatgacgagaacggcaagatggacggagtcgacctcgtgaaggatgacggcaacaagactcgcatctcggaggagagtgccaaggtcgaaggcgccgcgttgacggtgaagccatcggccaaagcggcgacagcgactgccaccgacgctgagaaacaggaggaggcgtcggcggttgctactgacgctgagaaacaggaggaggcgtcggcggtcgccactgacgccagcaccactgcatccaccacgacttccgaggacgagaggaaacaggacggtgtcgagcagcagctgcctgcaacggaggcgcagcctaacgtccaggcagagctactcacagagcgcgcggcacagaacggatcgttcacgacgcaggcggcggagtccaccgaggagaagaagaaccgcgccgagaagaaagggaagaaaggaaagaagaaggcggccggcgtggcggcggtggcatggaaactgtgcaactcgagcgccggcgccgactacatcccgtgcctggacaacgtggcggccatcaagaagctcaagacggacaagcactacgagcaccgggagcggcactgccccgaggtggcaccgacgtgcctggtcccggcgccgccggagtaccgagagccgatccggtggccgcacagccgcgacaagatctggtactacaacgtgccgcacacgaagctggcggagtacaagggccaccagaactgggtgaaggtctcgggcgagtacctgacgttcccgggcggcggcacgcagttcaagcacggcgcgctgcactacatcgagttgatccagaactcgttcccggatgtggcgtgggggaggcaaagccgcgtagtgctggacgtcggctgcggcgtggccagcttcggcgggtacctgttcgaccgcgacacgcttaccatgtccctggcgcccaaggacgagcacgaggcgcaggtgcagttcgcgctggagcgcggcatcccggccatctccgccgtgatgggcacccagcgcctcccgttccccgccaacgtcttcgacgtcgtgcactgcgcgcgctgccgcgtgccgtggcacatcgacggcggcatgctcctcctcgagctcaaccgcctgctccgcccgggcggcttcttcgtctggtcggccacgccggtgtaccagaagctcccggaggacgtggagatctgggacgaaatggtgaagctgaccaaggcgatgtgctgggagttggtggcgaagaccagggacaccgtcgacctggtcggactcgtcatcttccagaagccgatagacaacgtctgctatgataggaggccggagaaggagccggcactgtgcgagccctccgacgatcccaacgctgcatggaacataaagttccgggcgtgtatgcaccgtgttcccgaggaccagtcagtgcgtggcgcccggtggccggtgctctggccggcgaggctgcggaaggcgccatactggctggaccgcagccaggtgggtgtgtacggcaagccggctccggacgacttcgcggcggacctccagcactggaagaaggtggtccggagctcgtacctcgccggcatgggcatcgactggaagaccatccggaacgtcatggacatgagggccgtctacggagggttcgcggcggcactgcgggacatgaaggtgtgggtgatgaacgtggtgaccatcgactcgccggacacgctgccggtgatctacgagcgcgggctgttcgggatctaccatgactggtgcgagtccttcagcacctacccgaggtcctacgacctcctccatgccgaccacctgttctccaagctcaagcccaggtgcaaggtgttgccggtgatcgtggaggtggaccggatcctgaggccgaacggcaagctcatcgtgcgggacgacaaggagacggtggacgagatccagggcgtggtgaggtctttgcagtgggaggtcaggatgaccgtgtccaagaacaagcaggcaatgctgtgtgcgaggaagacgacgtggcggcccacggaaatcgagaccagatga

SEQ ID NO: 12483 - DNA, 498 bp, Zea mays
  Peptide Sequence Number=SeqID_54262
atggccggggacggaaggaaacagcgtgacccgaacgggcacaatgcggcgtggacgaacggcgcggcgcggacgaacggcacagcgtggccagggcagggcatggcgcgagcgcggcgagggtgcggcgtgaccaagacggcgcgagcgtgggcgagctcgataggagagagagcaagggctcggccgacttgtatagaggggaggagggaggagagtgggcaccaggggagaagaagggtcggcggcgccatcaacgccattgatggcgtcggctgcaatgaagagaaggtgggggagagggaagaggaagagccgatggttttgggtctgagggagatgagggggtgtgaccggggtcgagcgcgtgggcgactcggccgggcgcggaagccggggtggtggggaatgccgagtggcgcgacaatgctggctgcacgcgcgtgcctacacggtgaagaagacgggcacccgcggtggggcccgcccgttagttaa

SEQ ID NO: 12484 - DNA, 351 bp, Zea mays
  Peptide Sequence Number=SeqID_54263
atgcgatccatcgagtgcaccgggcttggtgggtcgaacgactcagaggaggcctccttggaggaggtggagaactcctccgacttcaaggagtggagtggcggcgagggtgacggcggcgagggcgacagtagtagcgacgacgacgacggcaagggaagcgacgacgatggtggcgagggcagcggcgacggcaatggtggcgaaggcagcggcagcggcaacggtaaaggcgacggcagctgcgacggtaaaggcgacggtggcggcgacaacggcggcggcaagggcagcggcgacgacggcgatggcggcgacggcaacggcggtggcataatgctgccggcataa

SEQ ID NO: 12485 - DNA, 369 bp, Zea mays
  Peptide Sequence Number=SeqID_54264
atggatgggatgttttcaaaaataaaacttgatggtggatccatcatggccatgatgggttcaacattggaaaagatgtacctctgccaggttgtccgaggtctgttggacaaggacaacggtaggtgggctcattttgtaagaccaggtgtatgcaatactctacatgaggaagtgcatgtaatgtattcgcgactgcacccggacgtgcttgtcgaccctgttggaatgggagtcggtgcatcaaggacagcgggtgaaggaaatgatgaggagctagacctttttaggcctcctccttccatgaacctggccgacgatcggactcccacgaccagaaatgaagaaaccaaggatgacgaagactag

SEQ ID NO: 12486 - DNA, 645 bp, Zea mays
  Peptide Sequence Number=SeqID_54265
atggctggcacaaagttagtatcacttggtctccttgttcttatgggcataggattagccaatgcagctagggtggcgagatactctagtgctgatgggactggcaacggagagggacagggtggcggatatgtgaatggcgggggatcagggtctgggtccggtaccggatccggtgatagtagtccttatggtacctatgcaagtgctggagggggtggtgcaggtggtggagctagccaatacggtgggtctggatatggttcagggtcagggtctggttcagggtctagtacatatagtcaaggagggtattattcgggttatggagaatcttctaatgctggtggttctggtggaggtgggggtggagggcaagctggaggttatgggaattccaatgctcaaggatctggtagtggcaccggttctggctctagctatgctaacaggtattgggatggatcaagtgaaggaggtgcaaatgctaatggcaatggtggtggcaccggaaatagtcaaaatggtggcggtggcggtggttcagctatgttcctaaatggtggtggcataggaaatagtcaaaatggtgggggcagtggtggttcaggtgatgggtctggatatggcaatgcctacccatga

SEQ ID NO: 12487 - DNA, 321 bp, Zea mays
  Peptide Sequence Number=SeqID_54266
atgactcggacgccgaccagcccagctgggacagcaccgggtgggcttgaagctccaacagtgtcagggacagtggctctggatggttgctcgaagacaccacatcttggcgcgcttggccaacgcgtcccctcgctcatgtggctcgaggaggcggtggccctagagctggagggtttgcggcggcgcgagggcgaggccgctcggagctggtttatagtgggcggcgtgagagcagagcgagagggagcggttgttcgctgccgagttcggcagcacaagaagcggaaggcgcagatggatgaggaggcgtacgattga

SEQ ID NO: 12488 - DNA, 366 bp, Zea mays
  Peptide Sequence Number=SeqID_54267
atggcgcaccggacagtgttcggtgcaccagggctgtacagagttaaaccagccactcttgggaaaatggaggcacgctccgctataattcaccggactgtccggtgtgccaccggactatccagtgagccagcggagcaacgactttctgcgccaacggtcgactctgcaaaagcaacagtgccgcaacagagtcagaagcgcaaaagtcagagggcaccggactgtccggtgcagctagaagacaaacatctccaacggtcaactgctcagaaccctaatggttgcactgacgtggcgcgcaccggacagtgcatagtgactgtccggtgcgtccatcgccagcagaaatcaaccaacggctag

SEQ ID NO: 12489 - DNA, 2382 bp, Zea mays
  Peptide Sequence Number=SeqID_54268
atgttgaagcagccggacatgcagcttagcatcgtggaggtggcagctacccttgcagaacaatccagtgctatcgcttcaccaacaactatgggtgccataagtgatcttgtgaggcatttgaaaaggacattccatattactcttggcagcaaagatacggaattagtaaaatggaatgagaaattccggaagggcatagatgaatgcttagttcagctgtcaaagaaggcgtccaggcggtggtccaacgccttggaccgccttaccgctttaaaaaccatgcctgacaccacgcacaagcccgtccagaggggcaacgatgtgtcggccgccgtagcagctgcaaagctgcgtcagccgtcaccccctctggctgggcacacggaaacaaagcaacacagccgccgccgccccagcctcccgcggccacaagctccgcaagtccccgggcggcaacgccatcatctccactgccctgtccgcggcgaggcgtgccgcgccgccgagaacgccgttcggcggacgcacaccgccaaggaggccaacatggagctgcctcgccgaggcggtgacggtcgcgcccgcgcggcttgccgggccggatctgagtcgccgacggtcggagccctagcgccaagcctgcaacgcctgcatgccagcacgcggcagcactcctccgacgacgacgagggggagatggaggggggagcccagcagccgtgccactgccgtcgagcccgcgaggccgccatggagctcgccggggacgtcctccatgggggcacaccagatctggccatggacacgccggatccgggcatgggctcgccggaattggcctccggcgacccacaaagacgacctggccgccatgaacggagcaacccgtggggaagccaaccacgcagagaggagaggagggccccaccgccgtccttgcaccgacgtgagcttcctggccgcgtgctcgagcggcggcgaggcggagtgtctgatgctgggccagttcttgacatgatggctgttatgctagaaaacattgcgagcactcctgttgtagctagatcaactgcagctgctgtttatcgcacagctcaaataattgcttcggtgccaaatttgcaataccagaataagagctccctcaatatctctgagaggtccttcaatgtctttgagagcatcttctatgtctgtaaaggaagaccaaagttcctcaaacaagaatctgtgttggtgaagctgagcgcacgtcagatcacacttttgctgtcatccatttgggctcaatcaacatcccctgaaaatactcctgtgaactatgaagccattgctcatacttacagtttgcttctgttgttctctggatctaaggcatcaacttttgaggctcttactcagagttttcaggttgcattttctttgaggagctattcactcactgaagcagccatgattattttctcgtcaagagcttacaatgtcttgccactcatcccgatctgtaaacaaatgatcaatgatcgtgcggccgatccgttccttcatttggtggatgagagcagacttacagctgttaaggattcttcaaatgatccttcaaaaatatatggatcaccagaggacaacaataatgcactgaagtccctttcagaaatagaactatcagaaagtcaatctcgagaatgcatagtctccacaatcatgaacaacatcgcaaatatgctggatgcggaattgcataatgtgagaagccaattgctaagtgatttcactcccgatgacatgtgtcctacaagcactcagttctttgaagtgcatgctgataacccttcatcagggtcttatgagactggtcaccatcaagagggcttgctgattgacctagggaatgaccatgatgcttttggggaagcttcagaaagcgcagaagcttccgcatcttctatacctgcatcagatcttctgagtatcgatcagcttcttgaaacggttggtgcagaaccagcacctcaggctggagtagtgtcagcagacattgggttcaaggatatgactagccactgcgaagccctgacgattgggaaacagcagaaaatgtccgccttcatgagcttccagcaaagcgtgcaagcggcagggctgccgagcagccagcccaaccagatggagctggacctttcccaagacccgcagttgcctcagaccggggcacatagcacgaacccattcactgatgacagccttcagggatatccacagtacacgaaggggcccaacggcgacaacgcacagccaggccaggacttccaacaacagtccctgaagttaccggcggcgagcccatatgacaatttcctcagagctgctggctgttag

SEQ ID NO: 12490 - DNA, 435 bp, Zea mays
  Peptide Sequence Number=SeqID_54269
atgggtggtttccacattttcatggtggacgacgcaagcgaggcggacatgggttggatagatgacgtggatgacgtgcttgtggtgggcggtttccatggtttcatggcagacagtgcaagcgaggggacgggggagggggtaggtggcgatatacgggtgttgatgcagggatgggcgcacactttgggtggtttccacgtcgcgagcgaggcgggtgggcgatggttccacagtgtggtgatcacggctggtgcggaggatgccggtcgcgaatgtcttggaggcaaggttgggcgcgctatatggatgacaacacggatgggggcgaaggatgtgatcggggcgcgatggacgacgaatggtttccgtctacgaactacacgtgtgacgcacgacgataaaaaatcatgctttaaaggagtacataagtga

SEQ ID NO: 12491 - DNA, 204 bp, Zea mays
  Peptide Sequence Number=SeqID_54270
atgtcggctgtttggggggagggggtggggagcggcgcggcatgcctcggcatgggcgctcggcgcgagtctccccggggtgggcgctcggcgtgggcccccccgagggcgctcggcgtgacccccccggcggcgctcggcgcttggcgcgaccggcacgaggagcagcggctccggtcagggggctcgtcgcggccaccatga

SEQ ID NO: 12492 - DNA, 1305 bp, Zea mays
  Peptide Sequence Number=SeqID_54271
atgggtggtcacggcgaccaccatcaccaccaccaggaagttggagtgctcgtcgacgacgacggcgacgacgaggagctcgagcaccaggggagggcctgcggtggcgccacgagcggaggagtggtggagcaaggggtaggggatggcggcagtgctggtcatcaagacgctgcgggcatggcgttcgaggcgagcatcagcagcgtggggagcgtgagtgcagcaacgaccatggcgccgccccagatcctctgctggccaccgccgccgcaacagcagcagctccagcagcaccataacctcggcggtggccaccaccagtccccgttcttcccgctcctgcagccgccgccgccgccgccgcctcccccgccgcagccgcccttcttcgccgacttgtacgcgcggcgcgcgctccagctcgcgtacgaccaccaccattcgggcggcggcggcggcccgtccacgtcgtcggacccgctcggcctctacatggggcacccgcaccaccaccagcagcacgccggcccagggatgatgatgatgatgcccccgcccttcgcgtcctcgtcgtcgcccttcggggacttcgtcgggcggatgaccgcgcaggagatcttggacgccaaggcgctggccgcgtccaagagccacagcgaggccgagcgcaggcgccgcgagcgcatcaacgcgcacctcgcgcgcctccgcagcctcctgcccaacacaaccaagacagacaaggcgtcgctgctggcggaggtgatccagcacgtcaaggagctgaagcggcagacgtcggagatcacggaggaggcgtgccagctccccaccgagtccgacgagctcaccgtcgacgcgtccagcgacgaggacggccgcctcgtcgtgcgcgcgtcgctctgctgcgacgaccgcgccgacctgctgccggacctcgtccgcgcgctcaaggcgctccgcctgcgcgcgctcaaggccgagatcaccaccctcggcggccgcgtcaagaacgtcctcctcatcaccgccgacgacagcagcgccgccgccggatgccacgacgacgggggggcggcggcgccggatgacgacgacgacgaccggcaggaggaggcggcgcccgtgtccgtgtcgtcgcagcagcacacggtcgcgtccatccacgaggccctgcgcgccgtcatggagcgcacggcggcggcgtcggccgccgaggactcgggagcggccgccgccgggctcaagcggcagcgcacgacgagcctttcggcgatcctagagaacagcaggtccatctag

SEQ ID NO: 12493 - DNA, 1110 bp, Zea mays
  Peptide Sequence Number=SeqID_54272
atggcactgacagtgttggagaccaccgagcagcagctcctcccgtgccagcagtccgttgagcatggcgctggcgatggcggcaacggcaaggccgccgctgctggcgccgagaaggctaccgtcatgctgaaggagacgggccacggcggcgacgtcgaccggccggacagggacaacatatggagcatgattcaggcgcagaagccgccgcctgccgcgccaaggcaggcgcaggcgccggcgccgtacgtgcacccgctcgcacgccgctcgtccggtctgctgacgcagaagagcctggagacctgcaccgagagcctcggctcggagacaggctcggacggcttctccgacgccgacgactccgccaccgaccgctcgtgcacgggctgcggcgacgacgagcgcggggaggaggaggaggaggaggtggccccgcacgcggccccgcccaggtcgttcccgccgccgctgccgtcgctggcgcggcgcagggtggagcccaccaccatggagatgaggcaggagcgccaggacgggcgcctgctcgtcaagctggacaggaggagcggcgaccagccggagaccgagcagcaggccgacgaggaagacgaggaggacgaggtcgaggtcgtggacagggggacagtcttggaggtcaaggtgagcgcgcagccgcagcggcaggcgcgcagcgggagcggcccgcgagtgcaccgctccgcgctcgtcatcaacaagttcgtgggcgccgagccggtcatcacctcctcctgcgagatcgacggcggcgccccagccgcacagcacccggtggcgccggtgaagcccccgaggcgcgccactgggtccaccaccacagcggtcgcggccctgctggcagcggcctcagcgctgagcgcgaccgccgcgccgccgagcaatggcgacgacgccgccgtccccggcgccacgtgcggcgagaacaaactcctcatgacggcgaggcggcacagcagcaaggaggagctgatgatgcacatgcgccggtgcagcggccagctcagcccgtcgcttttcgtttgggaagggaccaagggtgcatcgcaattcgcaacctcctcatga

SEQ ID NO: 12494 - DNA, 993 bp, Zea mays
  Peptide Sequence Number=SeqID_54273
atgggcccgccccccggtgcgcaggacccggcgccgtcgccgtcgggcggctccggctcttccaggcgccgcttccgccgcctcgaccgccgcaacgcatccaagcacatcgcctacgacgccaccaacttctgccagtacccgccgtccccgcaggccgcatccgcgccggggtcagggcgggcttcgctcgccagctccgctgcctgctccatcgatctcgtcaacagcttccgcatcggcggcagcggagacgggggcggggacctccgcttcctgtgcgagaacctcggcctctccgggcctgacgacttcgccgtcccgcgggccgactgggaggcacacaaggccgcccgatcatctgcctccgcttcgagctcccccaactccgcacgccccaactacgactcccctcagcggaactcaccgctctctcaggtgggtgccgaggagcccgcccaggcttcggacgccgagacggagctaccggccgcaacgggaagggacggcccaatcgaagccccggagcggccggcacgcttggatctaccgctcgagtccacctgtccggatgccaggagggcgcctgggcagggaggaatcaaggggcgtgcgcccgccaccgctgtctgcggcgtgggatccacgtgggatatcttgcggtcgttggcgccggatgagaaagatgacgcccccgctagcagatctggccgtcgttttggacacctggatgcagtggagaaggatgacgacgagcgtgcggcggttctgttaatgttggatgatcttaggctggaggagtcgtccgagagctttactggtacttcttcgctatcaacgaccaacgatgacgacacctcaagcaccaccacagaatccatgttctatatttcaccgaacgggaggtttaggaggaggatcaagtcatggagccgaggggtgctcctgggtagtggctcgtttgggacagtctatgagggcatcagcgagtaa

SEQ ID NO: 12495 - DNA, 3390 bp, Zea mays
  Peptide Sequence Number=SeqID_54274
atgggtggcctggttgaagtcaggtgccggtgcagggacctggtgatgaggcaagtgacgccatggcctcctgaagtgtccgtgagcatggcaaggatgcagttgatgttggcagtagctctacctgtctattggagaggaagtggtggagggcatggaagatggaagcgcaggccggcatggacatctggcagcggctggttgctgcaaagcctgcaaaatagtagtgtttccatgcggggctcttcaagcaaacagaaacaatggcaggatcaatcgaacaaagatggagtcattttggttgatgaaagccctcagaaaaagcaacgtaaaggtagaaagcaagatgcaatactgaaggagcctaatgctagcagaaagcgttgcaagacatcggaagctcctgatggtcctggaagctgtcagcaattgcatatcagccagattgaagccagctcgcctgcagcagcgccagtaataattgacgttgatttgatgagtacgccttctaaagcaggacatgctaattcaatcgatcaggatatatcaccgttgaaagttgacctaaggtcagaggcgaagatagctgcagaggaaattcgaaggttatcatctggaaagaaaattcaccctttctttcattctcggaaattgaacaaatgtgctagccaagatcaagatgtcatcaatattgaaaacatgcatgggctttgtgattctgaaagggatccaccattttatcctattcatgttgtgtaccaatcagagatcaacgtggacacacagaacttgttgaggcctggtgctagttgccaagcttctcttcttgatctgaatgtagagccagaagatccacagaatggttgtcagcctgcctgttacctatggactgacaagtaccgacctgaaactgtggcccaggtatgtggaaatagtgagcacgtaaagtttcttgctgaatggcttaaaagctgggatgaaaaaggccacaagattggagttgctaacggggacactaatgataactcatatcaagatatatctgattcagattattcagagagtgcttctgattgtgaaaatacacttctaatcactggacctgttgggtgtggaaaatcagctgcagtttttgcatgcgccagagaacaaggcttcaatgtgatagaggtaaatacatctgacatgagaaatggagcttatgtaaggcagaagtttgaggaagcaactaaatcacatggccttgaaaaatggtcacaggaggaggttatcaatccactaagggatgattccttggatccagattcaggaactcctgataggactgaataccaatgtttgatgtcctgtgctacaagagtaatgattgactgtgatcaacagaaatcacctgtaggatactactcaggtttgaaggcctgtgatgaacctcctaaacaagttgctaacaagacactcatactatttgaggatgtggatactgtctttgatgaggatcgtgggtttatttcaactattcttaagatggcagagactacaaaatggccaatcatactaactagcaacagtgacattaggagggtggtgatgtttttgcagttttggtaccaagggcatcaattcacagagaggccaaaggaatgtttgtgtggtcctttctcacttgatttagatgcagtacattctacagtgccaaaaatgttgccatgggagttcccttgtaagttatctgaaacattatgcatggaggtagacaaaactatccttttggctgaagaaaagaaaaaacagatggaaatatcagatcttgaaggcctgcagttacatgtaacagcacctttgatcaagggaagaacttctaaaacaagaagggctaagaaatccaaattaaagcgtgctcactcgactgagcataatgatatttcaccttgtaagaatgaacttgatgatttccatgatcttccagatatatctcttccatctgataaacaaataaaaagaaatcggcatcgttcgctgctattatctgagtccgatgatgatccagctgatgtaggtactgaaaaacataacatatttactgttactgaagttggtttcttcccacaaccttcagaggtgcctcctatgcatgggcaagggatttctgatcagttccattttcccgttgaatcacgagagacatgtgaaattgctgattctttccaaaatccacctgaaagcaacatgtatgggtccatttcacaagtttgtgatacatttatgtcacaggacgtgtcatgtgtacccgagtcatccttaattttggacggcacatctgcatccataagtggtgatgaatttttgtcaagggcagtgtccaatggtttttctgccttttgtgagggtacatacactacctccagaatggtattagaagacagtgactgtgtgaagaatctaatggctgaacgacaaaaagatgttgaagatgtagttggtgagacaagtgagacttatatggaatcatttcggagaaatgaacaggcaagctgttcagctgctgggtttcaattaatggatgaatgtagtcgtgctgaaagcatctggctgctctctggcaaaaaatctaatgactcttgcaaggtggaactagtacaggacacttggaacaggctacggagttgtcgtcttgaatttaccagtgaggctaatcacaacagagcaacttctggagctttgaagcttgtctcagaagtgtctgatttaatatcagaatcagatcttatgcttttccgttgctaccctcttactaaggatacgttggatccgtctttaactccttgtgatgagccagttgattcttcttggtacagcaatcaggttgagatgggatctgtatatgcccagcatgctcttcgtattttatcgaggaattcccaaaaaatagatggtggttctgtcgatttgtcacaagagttgtttgccagtacagctgctgtatcctttggtaaaattacctgttcaggattcaggaatgattatggatctacggacctttctcatatgaaaaatccaactacctgtatttttaaaagaagggagcggcatgttcatctttgtgaaaccctgtctccagtggttcctccaaagttgttgcagtcattgagaggccctgcttttgttgattatttgtcttcaatcagccagatttccaaattagaaaacttgcgactctctgaaaataaagtcataaacaagcgaagaaggtcccgtcaggcaagacattacttgagttctggcgcacttcaactttcacatgaggatgttgtattattagaagaaagcggctgtttcagtagcagacgcgagagggttgaggttgtagagcaagcaccagtcagtacataa

SEQ ID NO: 12496 - DNA, 537 bp, Zea mays
  Peptide Sequence Number=SeqID_54275
atgaagccaacagattcgaaatcaaatttcgccaaatatttccaaatccaagacattaaatgcgcaaatattctggtgcatgcaaatggatctgtgaagcttgcagattttggactcgctaaggaggttgttaatccgcagcagacatatggacctgcagctgatatatggagtcttggttgcactgtcctggagatgttgacacgccagataccctatcctgaccttgaatgggcacaagctctatacaggatcggtaagggggaatcaccagcaattccaaacactctttcgagggatgctcgcgattttataagccgcggcagaatgatattggtccgcgcaaatcatgcggagctggccgagagggagtttgttttgactggagctagtattgtcaacgctcaacagcattgtcgtcaacctcttattggtgtttcattagttgattctttggcatacgcccgcgaggaagatgtcctcgttgagccgccggctaattttaaaaatgaactagccagcgataaatattattaa

SEQ ID NO: 12497 - DNA, 516 bp, Zea mays
  Peptide Sequence Number=SeqID_54276
atggcggcgaccaacgtggagtcgatggcgggtgacgtcaacgcgggagcaatgagggtgaagcctggcggggtcaacgaaggcgctgctgcacgggcgagaggtctccggggagaggccagttcgacaaataataaaggaaagagtatggacatagagggaactgatgctggagaaactgacaaggctctttcttccaaaacggttaagcagaaggattcggtggaaagtgtaataaagcagataagtggcattgctatttccgagtcacatgcaacgccgtccacaaatactacaaacaattcacaaccggaatcatctgctccagacatagataagaaaattcgagcattgaaaaagaagagatatgaaatcctcattatacgcttagctgaagcacaagtacaaggtgaccctgaaaaattgagacttgaggcactggaaaagatgaaaaagattgatggatggcttaaggagctgaagcttttggaggacaagagagcgcctgctgcttag

SEQ ID NO: 12498 - DNA, 610 bp, Zea mays
  Peptide Sequence Number=SeqID_54277
ggtgtggttttctggagtaggaaagggaggtagaggtggacgccagtcttcagtggtaccaccgcaagaaagcgcgcctattcttagagagaggactctagaagcattgcgaagcccaaaagcggctatcgccggaccacgcgggcgagcgggggaagatggagttttgggggcgaagactctggcgcatccgccgctgctgcttcagcaccacctctttgtcgaaccccaccacacggagctccacggtgaccggcataaaacactgaaggaattgatggctattggtcctagtctggtttctcctccctggggttgtgggcaagccgagatgggatggggagcgatgcagggagccggggagggagagagtgagtcacgacgaaagaccaagagcgatggggagcagcgggggagagggcgggtgggcggcgccagattcgaccggggattcgtatggtccaacgcggagacgacgatgggagtgaagactcaccgctttttcctcatggaggtcgtcaccctgtggaatccatcgcccaacagatttctggagacacggagctccaatgtggaagacaccggatattgtggaagcaaagaactttag

SEQ ID NO: 12499 - DNA, 1323 bp, Zea mays
  Peptide Sequence Number=SeqID_54278
atgcctgatgctcgttgcgacgatgatggcgatgattgcgtcattcttgacggtgaccctgataagccggttgccgttgcaaaggaggaggggggaccgccacgagatgcccctgaggatgaactgcagatagttgcggagaaaggagagttagcatgcagagatttccctcatccacgacatctatgcgctgccttgccattcagcagcagttctcatgcaagtcattgtagcatgtgccattgttatgtctgtgattgtcctgctccctgtgccctatgggacaagcattgtcatgctacggacaaggatagaaagtggaagagacttagggaaatatccaaaaataaaagccagccaaatcctaaacgaagaataccccagcatttcaaacgctcagtcacgacaggaccatcatcctcacagtattccgcaaatatgactggttttactggaagatttcctgcttcgggtactgcgaaccaaattcaacaggtggatatctctgttatggttgcacaggatatggtgaggggtatcagtctgccgagtgcaccatctcctacgccaagaactaaaaatcggagctatggatccaaaggtgcccagattgctcctccaatttatacattctcaaatgataatcatttccagccttctgttcctagctatggtctggtgcggcctcatgcatctaaaactgcacatgtttcatcaggaggtcatgttagcgctaagacttttcagagtaacccatctcagttttgtgttcgtgcaccaatgggatctcatggacacaggtaccgaccaccatcatatcctcagcctcctcctaacacagttgttggcactggtgtgcccctctcacggtgcgcctcgctgaacgctgaggctcagggaacacaacgcccacaagttccgccggcaggtacaatatcgaaggaatcacttgcaaatttggcacgtcggctgggattaccttattacaatactaatcagccattaggtcagcagtcaacgagcacatctcaatttctgcatatgcatcctcacgagatgctacctgctcaaggtgctcaaaacacgacctggcaagcttacgttaagaaaagtgtggcaacaacttcacaaatcgtgccttctagtgaacataattcgtcaattcatgcacctgggagcactgttcttccatctggttcagttcagatccagcagcctttgcgcccaattcaaatcgggcactgttctatcatctggtgcagcccagatccaccagcagcctctgcgccaactcgattctcagagcagtgttactccgagtga

SEQ ID NO: 12500 - DNA, 1083 bp, Zea mays
  Peptide Sequence Number=SeqID_54279
atgctcgtgaggagcgcctccacgccggtcctcggcgcgctgcacccttccggctgccactcgccggcggtctcctccccggccgtgcacttcgccgagtcgccggcgtcggccgcctaccacgcgccgcccatctcctgccacctgggcgggcccgggtccgggtccgaccacgagcgctcgcgcagccgcggcgccggcgccggcatgcgccgcacgtgctccgaggacaacctcgcgtctctggccggcggccgcgcggacgaccacgaccaccaccaccttctcctcccgccgtccggcaagggcgcgccacgggcgcggccggtgccgctcgagaccatccagtcgttcaggggcccgcatgcgtccaccgacgacgaagaggaggaagacgacgacgacgaagacgcgtacgaggtggagcgggagctgcgcttcggccagttcagctttgccggcggcgcctactcgcaggagcacccgctgttcctggccaggggcctcggcatcgaccgcctcggctcgggcctcctcagcgccgacggcggcggcgggttcggcggcagcgacggcagcgggagcggcggcggcggcgggaatttggtgacgtcggggaacggaggggaccgctccggcatcgagacgcactacaagaagatgatcgaggaggacccctgcaacgttttggacgacgcgcagatctcgtatacaaaatttttaattcttcttctgacggcggcacctacctgcgctgcgcattggattggatctcaggtgaaaggggactacaggagggcagacgagtactactcccgcgcgatcctcgccgaccccgacgacggcgagctcctgtcggagtacgccaagctggtctgggaggtgcaccgcgacgaggaccgcgcctccagctacttcgagcgggcggccaaggcgtccccgcagaacagccacgtgctcgccgcgcacgccgcgttcctgtgggacacggacgacgaggagggcggcgccgacgcgctcagctacgcggccttcgctcagccggcgcactcgtctctggcttcggcgacggcaacaacctga

SEQ ID NO: 12501 - DNA, 729 bp, Zea mays
  Peptide Sequence Number=SeqID_54280
atggtacctaatttcagcagctactaccatagctacatcatctccaatgccgcctatgcacatgactggcggctaccggaacaggacgatggcattcgcctctgcattggcctccctgcaccggcagcagcacaccatgtagtcgacgtcgacaccaaccactactcatcaaacactatcgtcggcgctgcattccagacatcctccgatcctgctgccacatacgaccttggggaaagtacgcagcggagatcagggactccacgcgcaacggcgagcgcatgtggatcggcaccttcgacagccccaggaccgcctcgctcgcctacgaccaagccacctactccatgcgcggccccaccgcggtgctcaacttccccgtcgagcgcgtggaggagtcgctgcgcacgctgggactggggctcggcggcgctgggactggggctcggcggcggcgccgtggaggactcgccggtgctagccctgaagcggcgccactgcatccgcaagcgcttgcggaccaacaagagcaaggcggccactgccgacaaagaaggctgccatgtagaagcagaagcaagggaacaggtggcggtgacggctcgtcatgggcagggcaagcgaaaggacaaggtcaccgctggcgtgctcgagctcaaggacctcgggcctgaatacttggaggagctgctcgcccagtctgatcaatgcaatgaagaattccattga

SEQ ID NO: 12502 - DNA, 477 bp, Zea mays
  Peptide Sequence Number=SeqID_54281
atgacaagagaagttggacaaggatctggatcctcggagtgcatgggaggaccgcccccgcccccgataaccacgcccccgcccgaccttcgttttcatcgccgccgcgccgcgtcgcacgcccccgcctccgctcgccgttcgctcgcccccgccgcaaacagctcgccgataaccccgcccgcacgccccgcacgcccgcaattcgcgccatcccgccgccaaccgcaaatcgccgtcgcgccgcgcccgacctccgttcgcccccgcctccgctcgcccccgccgcaaacagctcgccgaaaccccgcccgcacgccccgcacgcacgcgattcgcgccatcccgctgccaaccgcaaatcgccgccgcgccgcgcccgacctccgctcgcccttcgctcgcccccgccgcaaacagctcgccgataaccccgcaaatagctcgccgatatatccaagtgagaaaagaatttga

SEQ ID NO: 12503 - DNA, 1804 bp, Zea mays
  Peptide Sequence Number=SeqID_54282
agaatcactccatggtgtcaacccaatcatcctctacattgctagaggtgcatcaattgcctccttatctggaaagaatgatattgagtttgggcatgttgttgaatggcttgaatatgcccccaccttcctttcaggctctgaatttgaaaatgcatgcttatttgttgatggattcttggcctcccggacctttctggttggtcatggcctgacaattgctgacattgcagtttggtcaaatcttgctggaattggtcagcggtgggagagtctaaggaaatcaaagaaataccaaaatcttgttcgctggttcaacagcatagattcagaatacaaagaggcactgaacgaagttgtggctgcatttgttgggaaacgaggtattggaaaatctcctgcacctagccttaaggagaaggtacatgactcaaaggacccatcagctccagaagttgatctccctggtgcaaaagttgggaaagtctgcgttcgttttgccccagagcctagtggttacctccatattgggcatgcaaaggctgcactattgaacaaatactttgctgaaagatatcaagggcgcttaatagttcgatttgatgacacaaacccttcaaaagaaagcaatgagtttgttgagaatcttttgaaagatattgagacgttggggatcaaatatgatgctgtcacatacacatctgattatttcccaaagctaatggaaatggctgagagtttgataaagcagggtaaagcatatattgatgacacaccaaaggagcaaatgaggaaagagaggatggacggtattgagtcaaggtgcagaaataataccgtggaggaaaatctctcattatggaaagagatggttaatggaactgaaaggggcatgcagtgctgtgtacggggtaaacttgacatgcaggatcctaacaagtcactcagggatcctgtttactaccgctgtaatactgatccacaccatcgtgttggttcgaagtacaaggtctatccaacatatgactttgcgtgcccatttgtcgatgcattggaggggggtgcttcaaaaaatctgaatctcatggaatgggataaactctggacaatcaacaagaagataattgatccagtgtgcgcaaggcatactgctgtgctaaaagaccagcgtgtcatctttactcttacaaatggtccagaggagccatttgttcgaattttaccaagacataagaaatttgagggtgctggaaagaaggctacaacctttgccaacagaatttggctcgattatgctgatgcggcagctattagcaagggtgaggaagtaacccttatggattgggggaatgctattgttaaagagatcaaggtggagagtggagtaattactgaactagttggagaactgcatcttgaggggtctgtgaaaacaacaaaattgaagatcacatggctagcagatatagaggagctagttcccctttcattggttgaatttgattacctcatcagcaagaaaaagaaagactccctgttccttggcaaattaatgttgaactattctgttggtggcatctggcagctagaggaagacgaggacttcctcgacaatctcaacccttgcactcgacgggaaatcccagcccttggagatgcgaacatgaggaacatcaagcgtggagaggtcatacagctcgagaggaaaggctactataggtgtgatgccccttttatcagatcgtccaaaccggtggtcctgtttgcgatcccagatggcaggcagcaggcctcgcttagctag

SEQ ID NO: 12504 - DNA, 333 bp, Zea mays
  Peptide Sequence Number=SeqID_54283
atggcacaactctgcaatgattttatcaagaataacaaagaatatcttggtgcggtagcagtgaagcaaaatgggacaagcatgaaggagacggtagtatcagccaatcccatttcttcgagcaaccgcaatcaggggcggacgcgagacgaaagtccatgtgaggctaaaattcggaagggagaagtcaccaggcaaaggctatttcgaaaactattccttcgaaattttcggagattaagtgctagtttgggggctccattttttcaagggattcctatttttacaaggaaaaatgaactaatttcacttgggaaaatgaaaatcccttga

SEQ ID NO: 12505 - DNA, 201 bp, Zea mays
  Peptide Sequence Number=SeqID_54284
atggcgcacagtggtggcgacgggatagctcgggcaggcggggtgaagggacagcacgggcacagatttcaagcttatccttttggcatatctggcccttcaatagaaatcggtattcgaattatatttatgctctggaagaatgaagaggtcatactctatattccaaccctggccaaatcagaggaaaaagaacactaa

SEQ ID NO: 12506 - DNA, 1539 bp, Zea mays
  Peptide Sequence Number=SeqID_54285
atggccgccaccgacgacggtgccgtggactccgcctccgccgcggccgcggccagggccgtcgaggaggcgcgcgcgctgctccccgccccggcgccggactacgacgacgaggatctcgaggagcgcgcgtacgaggcggctgagaaggtcatcgtgtccatctcgggcgggccggacccggaggacgtcgacggcgatggcgacggcgcggagctctgctcgtcctcggggtcgtcaccgccgcccttctcgtggcggaagctctggctcttcacgggccccgggttcctcatgagcatcgcgttcctggacccgggcaacctcgagggcgacctccaggcgggcgccgtcgccggggacacgctgctgtggctgctcatgtgggccaccgccatgggcctcctcgtgcagctcctcgccgcgcgcctcggcgtcgccacaggccgtcacctcgccgagctctgccgcgacgagtaccctgactgggcgcgccgcgcgctctggctcatggccgaggtcgccatggtcggcgcggacatccaggaggtcatcggcagcgccatcgccatcaagatcctcagccgcgggtacctgccgctctgggccggcgtcgtcatcaccgccttggattgctttatttttctttcgctcgaaaactatggggtgaggaaactagaagctgtatttgcacttctaattacaactatggctgtctcatttgcatggatgttcacagacactaaacccaacgggaaagacttattgattgcactagtgcaatcaaggaaaatagatcaaaataaggaatatcaagtccgtgaagcattgagatactattcaatagagtcaacaatagcattagttgtctccttcatgataaatctctttgttacaacagtttttgcaaaaggattttatggaagcaaggaagccggtaatattggtcttgaaaatgctggacagtatttacaagagaagtttggtggaggattttttcctatactgtacatctgggggattgggcttttagcagctggacagagtagtactataacaggaacttatgctgggcagtttataatgggcggatttctgaatttaaggttaaaaaaatgggtcagggcactgatcaccagaagcttcgcaattgtgcctactataactgttgctttgttcttcgacacatctgattctgcactggatattttaaatgagtggctcaatgtgctccaatcaattcagatcccttttgcactcattccactcatcaccttggtttccaaggagcaagttatgggagtcttcaaaataggccctaacacccaagctgtaacctggactgtagccactctgctgatcactatcaacggctacctcttgatggatttcttctcttctgaaatccgaggtcccctatctggctcgcttctctgcgtggcggtcctcatttatgcctcgtttgttctgtatctcatattgcggggcaccgagctgtccgagaagattgccaaagcgatccgcggcagtttttcatga

SEQ ID NO: 12507 - DNA, 2082 bp, Zea mays
  Peptide Sequence Number=SeqID_54286
atggccgtccccaactacacctacctcaagctcaagatgccgggccccaacggggtcatcaccgtcggccccacgtacaaacacgcgttcgaatgcgacgtggagtgcgtggagatgaaggagtccgaccagctcgcgacttctttcatcacgcccttcggcatgtactgctatgtcaccatgtcgttcggcttgaggaatgcgggtgcgacgtaccagcggtgcatgaaccatgtgttcggccaacacattggccggacggtcgaggcctacgtcgatgacatcgtagtcaagacgaggaaagcctccgacctcctttccaaccttgaagtgacattccgatgtctcaaggcgaaaagcgtcaagctcaatcccgaaaagtgtgtcttcggggtgccccgaggcatgctcttggggttcatcgtctccgagcggggcatcgaagccaacccggagaagatcgcagccatcaccagcatggggcccatcaaggacttgaaaggcgtacagagggtcatgggatgtcttgcggctcttagccgcttcatctcacgcctcggcgaaagaggcctgcctctgtaccgcctcttaaggaaggccgagtgcttcacttggacccctgaggccgaggaagccctcgggaacctgaaggcgctcctcacgaacgcgcccatcttggtgccccccgctgccggagaagccctcttgatctacgtcgccgcgaccactcaggtggttagcgccgcgattgtggttgagagacgagaagaggggcatgcattgcccgtccagaggccagtctacttcatcagcgaggtactgttcgagaccaagatccgctacccacaagttcaaaagctgctgtacgcggtgatcctgacgcggcggaagttgcgacactacttcgagtctcatccggccatcaagtcccaggtcttggcggacttcgtggctgaatgggtcgacacccagctcccaacagctccgatccaaccggagctctggaccatgttcttcgacgggtcactgatgaagacaggagccggcgcaggcctactcttcatctcgcccctcgggaagcacctacgctacgtgctacgcctccatttcccggcatccaacaatgtggctgagtacgaggctctggtcaacgggttgcggatcgccatcgagctaggggtccgacgcctcgacgctcgcggtgactcacagctcgtcatcgaccaagtcatgaagaactcccactgccgcgacccgaagatggaggcctactgcgatgaggttcggcgcctagaagacaagttctacgggctcgagctcaaccacatcgcccggcgctacaacgagattgcggacgagctggctaaaatagcctcggggcgaacaacggttcccccggacgtcttctcccgagacctgcatcaaccctccgtcaagatcaacgacacgcccgggcccgagaaggcacccgggggctacacgcacctgttggtcgccattgacaaattctccaagtggatcgaggtccgacccctaaacagcatcaggtccgagcaggcggtggcgttcttcaccaacatcatccatcgttttggggtcccgaactccatcatcaccgacaacggcacccagttcactggcagaaagttcctggacttctgcgaggatcaccacatccgggtggactgggccgccgtggctcaccccatgacgaatgggcaagtagagcgtgccaacggcatgattctacaaggtctcaagcctcggatctacaacgacctcaacaagttcggcaagcgatggatgaaggaactcccctcggtggtctggagtctgaggacaacaccgagccgagccacgggcttcacgctgttctttctagtctatggggccgaggccatcttgcccacagacttagaatacggttccccgaggacgaggccctatgctgaccaaagcaaccaagctaatcgagaagactcgctggaccagctggaagaggctcgggacatggccttgctacactcggcgcggtaccagcagtccctgcgacgctaccacacccgaggggtccggtcctga

SEQ ID NO: 12508 - DNA, 219 bp, Zea mays
  Peptide Sequence Number=SeqID_54287
atggcgcaggctttaaatattgagatcgttctgcatccactggatcaagatcggacgcaccagactgatccagctgaaacgggcggaggcgagcgcaaaaccagtggagaggtccttactcgctatgtcggtgagggtggagctgcccgccacgatgcacgcggcggtgatcttcccggccaactgacatggaattccacgcgtcccgaagactcctga

SEQ ID NO: 12509 - DNA, 597 bp, Zea mays
  Peptide Sequence Number=SeqID_54288
atggtggctcggtttagttctccgtccttcgccttcgccttcgccttcgccccccacgaggccacgacccacccaccaccacatctcagagtaggcatcagccttgggcgcgatacaaggaagaagatacatggccgcgacggcttcggatgcacgatttgtgtgtctgtgtgtgtgcgcccatcaagaactgaaaaggcaaacgctttcctcgcgcacggctgctgctctgcctctgcctctgctcgcgctcatgtgtgctctgcggaaaagcccagcccggttttgcttgctgctgctgcccagttctggtggagggggaatcagggaaaggcaggcgcagcgcagcagccaggacaaaagctaggatctagcaacgcgcaggcagctgagctgctcagtctgctgcgccgtgcccagctcagctcagctcagctcgctgatccatccaggccaggggaatgtgccgccaaaagctatattacccgtccggcccccgtcatcgcgtcaggtgggggtggcgacgagagctacgacccggcatctcggcgcggcagtggacggacccggacccccacaagcatctggtgcgcctga

SEQ ID NO: 12510 - DNA, 216 bp, Zea mays
  Peptide Sequence Number=SeqID_54289
atgacaaggccgaggtggggaagggcacttcggttatggggaaaacacgcgccggtgtctgtggggaggccgtcgaagctcgccatcggagaggggctggcgcagtggcgcgagcggtggggatggggctgcctagcgcccgaccccacgatggggggccacaggcgcagtggggcacaacaggcgtgtgcatttaagaagtatgttgacatatga

SEQ ID NO: 12511 - DNA, 225 bp, Zea mays
  Peptide Sequence Number=SeqID_54290
atggagacgccgtatggcgtcaagactagaatactccaggtcaccatgtcatgcctccctctttccgcacggcaggtaagctacctaccgattagaaagcttaataaggcgtgcgggcctgggcgcgtctggatttgggccgagggtgcggctgttctgactgagccgttgaggcaagataagaagccagcccagcctcgcacggtggaccgtgcacccaggtga

SEQ ID NO: 12512 - DNA, 1014 bp, Zea mays
  Peptide Sequence Number=SeqID_54291
atggagttcggggttcaccagggcacgacagtggctcttgccattgcacagctacacttcggtggtaacctccgtggtgccatcatcctgcttgatggttcgacaaccgccagccaggattgcatgattattgatccctcctccgtcccaactcccatgttttgcacgaactggatacgcatggacctggaccaggaccaggccagtcgatcgtccgtcccatcgccgaccggacggacggacgtaaaagaaagttaccagaggaagttcacctcctccgggtcgggtcctgcttgctgggcacaacgcacacgctacgcagcgtccggcgtccggcaagggcatctccccttgacagctaaacgcctccccgcgccgcgccaagcggagcagatcagatacgcgcggcgggagtggacgtggacccccaccccacccggcccggacgagagaaaaggacaagctcagattctgatctcatccaccggcatccgcctcatcggccacggccaccactcgcccccggcccaatctgtgtgcgcagtggccatggaccccatggtcctagtgctactgcatgcaacagtggcgcgtcctcctgtcctgaccgcagtccagttcgacacgggcgccgtctgccatgggtgtctatctgccggcagccttgtgtgctcgatcgactcgcatcctgtatcaggcagggaggcagaggcaggcagcccggcacaggagtgtacctttgcctcttctgggattcggggtatcagagaatgggaggtggcggcgctcccactcgcagcggtggcggcgaccgcaggcaaggagggctcaagctgcggcagtgccctacggcaaaggcgagggagagcacgtgctgcatttcccactgctcttcactctcctctccagctctcccgcaacaccaagaagcaacagccagcgacaatcagcaatggccatgtctcagcaagagaaccgaatatgcatgctctcttatcttcttactactgttag

SEQ ID NO: 12513 - DNA, 120 bp, Zea mays
  Peptide Sequence Number=SeqID_54292
atgccgaagctatcgcctataaagcttcggcacagtgacatgtctcaagacgaaggaacaattgtaaagggcataattgtaattatacacaggctgcgccctgtgcctataaataggtga

SEQ ID NO: 12514 - DNA, 501 bp, Zea mays
  Peptide Sequence Number=SeqID_54293
atggccaagtctttcatcatcgcacttgaaggcctagtgttaacttggtacaccagcgatcttcgagccagcgtcttgtacagtcattgtatcagggacccgcccaagcatctacaagagctctaccaattgttcaagaagtattccagagtaaggctgacagcagccaggtccggcctcaggcgccataggaaactccgcctcgcccgaccccagggctcggactcgggctcagccccggaagacgacggactccgcttcgcccgaccccagggctcggactcgggctcagccccgaaagacgacggactccgcttcgcccgaccccagggctcggactcgggctcggccccggaagacgacgaactccgcctcgcccgaccccagggcttgaactcgggctcggccccggaagacgacgaactccgcctcgcccgaccccagggctcagactcaggctcggccccggaagacgacgaactccgcttcgcccgaccctag

SEQ ID NO: 12515 - DNA, 1221 bp, Zea mays
  Peptide Sequence Number=SeqID_54294
atgtccgacgatagcgacggccagcggcaatgccgccggggcgtcaccgtcgacgtcgagctcggcgccgccatggcgcttgccgacatggccggggtcgccggaccgggcggcgaacagccgccgcccgtgcggcgcgctactcccgctccttctgctcaccaggaggacgaggcgagcacgcggctgagcctggagctaggggaggtgagcatccaggcctccccgtgctccagcagctccagctttggcgggcacccgccgccgccgccgtcccaccaggcggcgtaccagcagcccgccgtaccggagccagcgacgactggctacggaccccggccccggcacgcggtcaccgaggccgagaaggaggcgaagcggctgcggcgcgtgctggccaaccgcgagtccgcccgccagaccatcctccgccgccaggccatccgggacgagctcgccaggaaggtcgccgacctgtcgtcgcagaacgagagcatgaagaaggtaggtaccaccgcaccttgctcggcggcggcggcatctggtgtaatgtcgtcttcacaggcgtgcgtgaggactgaggacacgtcggtggatttcatcgctttctccgactggtcttggcgccgtcaacacaagctaataacacggacgtgtgctcattcaattctccgcgcgcaggtggcgaagacgtccaggaagccggcgatgccagcgcagcagcaggcggcagaatccttggtgccggcgccgccgcggccggggttcctgtactcagcggcaccgccggcaccagtgccggtgccctatgtctggggctcctggccgcccagcgccgccgccgggagcgagcagcacggcagcccgccgccgctctgcctgcagccctgcgcgtggtactacccggccgtagcggacccgcgcgggtcgccatcgtccgcgcacgcgcagcagccgccggcgttccaggacccgcgcgccgcaacgggcgaggaggacacggacgacgacccgtgctcgctcacgctcggcctcgaggtcgacaagcggagcgcgcccgtcggtatcgtcgcgggcccggcctccggctccggctccggcggcgggggagcgcagagcgacagggacagggcggcgcaggcgaggaggcggaggagggaccttaccaagctcaagcacacgcacgccgccgcccgccccggctcctccgagcagtggtag

SEQ ID NO: 12516 - DNA, 732 bp, Zea mays
  Peptide Sequence Number=SeqID_54295
atgcctagcgtggccggcccagcgccatcgcgcggcccagccgctgccttccccaacggcctgcgtgcgcatcccggccgctccccttcccccgcccagccagcgcctctgcggcccactacgcgcatgatcaactctgctccgctggcctacacgcgtgctggtcaagtggctggcccaactgcctcgcgccccgcagcccagtgtgcccagccggtccagcgcccgcgctcaccctgctcctgccgccgccacgcgcatgtgggcatggttaggacgccaggcgcgccgcccactggccagcaggcccaggcgctaggccatcgcggggccgcttccaggcattcctgtgcatcttccaaaaactgcctccccgcgatgtgcactcagagccgaaaccgctcggcggatgcgcaacgcgctggtcgagcggccatggcggctgggctccccagccacgacctctgcatggcgaggccccgcgccaagcaccttccccaccgcgtcggtgccgcctcaccgcgccagatctcgtcctcgtccgcgttcaacagccacgcgcgggctcgctgtctgcacgcccaacacacctcgtcgtccgccgtcgtcgcaagagatgtttggattacgggtggtgatgaggatgatgtttatgactatagtaatggtaaagaagaaggtgtcgaggcggatctccaggagttccaggactttgacgagttcgaggattag

SEQ ID NO: 12517 - DNA, 201 bp, Zea mays
  Peptide Sequence Number=SeqID_54296
atggcggctgggctccccagccacgacgtctgcaaggcgaggccccgcgccaagcaccttccccaccgcgtcgacgccgcctcgccgcgccagctctcgtcctcgttcgcgttcaacagccacacgcgggctcgctgtctgcacgcccaacacacctcgccgtccgtcgtcgtcacaagtataaacgtgtcatctatttag

SEQ ID NO: 12518 - DNA, 345 bp, Zea mays
  Peptide Sequence Number=SeqID_54297
atggactgcgggttaattcaaacttctgccaaggtctctttagcaattaacctgaacgaaggggtatggctcactatcaacggtcagatggtcatcaccttccccgagcttcagtacgcccacgcgcgctacaccgcggcggcggccgtcgtcggaccatcacccacgcgcgatacggtggccaaaacccaatcggcgacaggagaggaggaaagggatgactactgggcccgccaggcagtgagcgcaaggcgacggaggcggaatgtagcgggtctgaccctggggccccaccggccggtgacaaccgaggcagtgcacgtgacagggaggctgcgaggctga

SEQ ID NO: 12519 - DNA, 465 bp, Zea mays
  Peptide Sequence Number=SeqID_54298
atggactgcgggttaattcaaacttctgccaaggtctctttagcaattaacctgaacgaagggatcaacggtcagatggtcatcaccttccccgagcttcagtacgcccacgcgcgctacaccgcggcggcggccgtcgtcggaccatcacccacgcgcgatacggtggccaaaacccaatcggcgacagatgagaggtccgcatggcggatcccgtggctggagatggatcacggtgctggcgctaggtccagaaattttgccgccacaatcaccgagtatggcggcatccgattcggtcttcggttgaaggagaggaggaaagggatgactactgggcccgccaggcaggaggctgcgaggctgacggagcgggcccggatgtcagcgcgcgcggtgagggggtttgggccgcgcagcacgcttctgctggtgggccaaatagatggtgagaggcccatttag

SEQ ID NO: 12520 - DNA, 252 bp, Zea mays
  Peptide Sequence Number=SeqID_54299
atggacactcttccacaggaagatgactggcgcatcatcagacttaatactcgtcaacatcatctgcaaagtcttcttcatcaccctttgatcaaaatattagcaaggggtgagctcacttatggtcgaggctcagcaagtgggaggagtaatgcaagtttaacaaggtgtgttaaccgatcacgtgatgtcgaggacaagaaccagattgctctcaaggtgatgctggtggacgaacctaaagatggatga

SEQ ID NO: 12521 - DNA, 3060 bp, Zea mays
  Peptide Sequence Number=SeqID_54300
atgcacgaggggctgggccgctggggtttggactccctaaaatacggatgtcacagcaactacaccgttcgcatgccgcccaccccggacaaccagccatacagtgtcggtggtggagcgccgttgtccgtgtgcgcgggtggtaccaagccggacgatctcccattgccgccctctaagctcgtcaaccggcgtgggggtgcctgcgcggacgacggcttggcgggagccagtggcaagatggaccggcggctgtccacggcgcgcgtgccggcgccgtccaagtcgctgcttgtccggagccagaccggggacttcgaccacaaccggtggctgttcgagacaaggggcacgtacggcatcgggaacgcgtactggccgcaggacagcagcgcctatgccgacgacgaggacggcggcgtgggcagcgatcccgtcaagatggaggacctcgttgacaagccgtggaagccgctcagccgaaaggtgcccatccctcccggcatccttagcccctacaggctgctggtgctggtgcggttcatctcgctgttcctgttcctgatctggcgtgcgacgaaccccaatctggacgcgctatggctgtgggggatctccatcgtgtgcgagttctggttcgccttctcgtggctgctggatcagatgccaaagctgaatccgatcaaccgtgccgtcgacctcagcgcgcttcgggagaagttcgagtccccgacgccgtccaaccccaccggccggtccgacctccccgggctcgacgtcttcatctccaccgccgacccttacaaggagccgcccctcaccacggccaactcgctgctctccatcctcggcacggagtaccccgtggagaagctcttcgtctacatctcggacgatggcggcgcgctgctaaccttcgaagcaatggcggaggcctgcgagttcgccaaggtttgggtgcccttctgccgcaagcactcgatcgagccacgcaacccggacgcatacttcaaccagaagggcgaccccaccaagggcaagaagcggccggattttgtcaaggaccgccggtggattaagcgcgagtacgacgagttcaaggtccgcatcaacggcctcgccgacctcatccgccggcgcgccaacgcaatgaatgctcgcgagcgcaagatcgcccgcgacaaggctgcggcagcctcctctgatgcccctgtcgccgacgcttccaccgtgaaggccacatggatggcggacggcacccactggcccggcacctggctcgactccgcccccgaccatgcgaaaggcgaccacgcaagcatcgtgcaggtgatgatcaagaacccgcactacgacgtggtgcacggcgacgccgggtcgcacccgtacttggacttcactggcgtggacgtgcgcatcccgatgttcgtgtacctctcacgggagaagcgtccggggtacgaccacaacaagaaggcgggcgccatgaacgccatggtgcgcgcgtcagcgatcctctccaatgggcccttcatgctcaacttcgactgcgaccattacatcttcaactgcatggccatccgtgaggccatgtgctacatgctcgaccgtggcggtgatcgcatatgctacatccagttcccccagcgcttcgaaggcatcgacccctccgaccgctacgccaaccacaacaccgtcttcttcgatggcaacatgcgtgcgctcgacggcctccagggcccaatgtacgtggggaccggctgcctcttccggcggtacgccatttacggcttcaacccgccgcgcaccaacgagtaccgtggcatctacggccaggtaaaggtgcccatcgacccgcacggtcaccatgcacccggcgccgccgaggagctccgcccgctgtcggagcaccctgaccacgaggcaccgcagcggttcggcaagtccaagatgttcatcgagaccatcgccgtggccgagtaccagggccgaccgctgcaggaccacccctcggtccagaacgggcggccgccaggagcgttgctgatgccgcgcccgccgctggacgcggccacggtggcggagtccgtggcgatgatctcatgctggtacgaggacggcaccgagtgggggcagcgcgtggggtggatctacggctccgtgacggaggacgtggtgaccgggtaccgcatgcacaaccgcgggtggcgctccgtgtactgcatcacccggcgcgacgcgttccgcggcacggcgcccatcaacctcactgatcggctccaccaggtcctccggtgggcgacagggtccgtcgagatcttcttctccaagaacaacgcgctgctggcctcccagcggctcaagttcctgcagcgcctatcctacctcaatgtcggcatttacccattcacctccctcttcctcatcatgtactgcctcctgccggcgctgtccctcttctccggccagttcatcgtagcgacgctggacccaacatttctgtgctacctcctgctcatcaccatcacgctcatgctgctgtgcctgctggaggtgaagtggtccggtatcgggctggaggagtggtggcgcaacgagcagttctgggtgatcggcggcacgtcggcccacctggcggccgtgctccagggcttgctgaaggtgatcgcgggcatcgagatctccttcacgctgacggccaaggctgctgcggaggacgacgatgaccccttcgcggagctgtacctggtgaagtggacgtcgctcttcatcccaccgttggcagtgatcggtatcaacatcattgcgctcgtagtcggtgtgtcccgcgccgtgtacgcggagatcccgcagtacagcaagcttctgggcggcgggttcttcagcttctgggtgctggcgcactactacccgttcgccaaggggctcatgggtcgccgcggacgcacgccgaccctcgtctacgtctgggcgggacttatctccatcaccgtctccctgctttggatcaccatcagcccgcccgacgacaggatcacccagggcggcgtcgatgtgtga

SEQ ID NO: 12522 - DNA, 1302 bp, Zea mays
  Peptide Sequence Number=SeqID_54301
atggcgaatcaagtagtcaaagtgaggagagaagcggttgcggcatgcatgacttgccctctttgcaatacgcttgttaaagatgccaccaccatatccgaatgccttcacacgttttgcagaaagtgcatatttgataagatagaagaggaagatttagaatgctgtccaatatgcaacattgatttgggttctgttccgctggagaaattaaggccagaccataatttgcaagatgtgagggccaaaatcttccctcttaaaggaagaaaagcaaagtcacctgaagttctgcctccagttacaatgccaactagaagaaaggagagatcactatcttcattggtggttaatgcccccaaagtatcaacacaaactaccatgaccggaaggagaacaaaagctgttgccagaaaggctggttctttacgaggttccagtttttcagtagagaagcccgttaaaagagagagagactctgtggaggatcacaaggagagtgcaagctcacctgaaacgctaaataaattcactcagaataaaagacagtgtacttcttctgctgaacctagccaacagaaggataaaggagtagagaatggtggcgaatcacgggatggaaaattggatctctggaaacctttggattgtttggcagaggttgcaaataggtccaagtccttcaagtctaattcacaaggctgtgattctaagttagaactggaacctacccatgtcatcaaccctgaagctcaaacgtgcagaaacagacatagaaaagataacggcaaaacaaaagttgaggaagaaaagaataatgctgctcctgcaacaacttctggaattgtgaaccctaaaaagttacgcaggatccgtcaaaaaagtggttctggattcggggattctggcatttctctccaagctgtgctagatgctgctggtccaaggcatgaaaaaagaatcggtcctgtgtggttctcattagtggcctctgaagaccaggtaggagaggtacccctccctcaaattcctgcaaatttcctaaggataaaggatggaaacatacctgtttcttttattaaaaaatacctgatgaagaaactgcacctcgccgatgaagatgaggttgagatcaaatttatgggacaaccagtagtacccacattgcagttgtacaatttagttcatctgtggctgcaaaaagcatcaacatcacagagagttccagcatctgttggttcttctgcaaaggattttatcatggtgttggcatatgctcgaaaagccccacagcaattgtaa

SEQ ID NO: 12523 - DNA, 786 bp, Zea mays
  Peptide Sequence Number=SeqID_54302
atgaagcacaacattccagaagcctttagggcgcaaaatctgaagagattactcaggccaaaggcacaagtagccacgctgaagaagaaaacggcggtgacaacgagctggatttcgatagacgctaaggggaaaagcgtgattcttgacgtcgacaagtatgctataatgcgccgcgttcaggttcatgctagagaccttcgtattcttgatcccatgctatcttatccttccaccattttaggcagagagaaagtcattgttctcaatttagagcacattaaagctataatcaccgcagaagaggtgttgcttagagatccatacgatgataacgtaatacccattgtcgctgaacttaaaaggcgattgcctcaagataatctcacatgtcaagatcaaggaggagaagaagaagaacaccctagtgcacgcaatgatatggatactgaggaggaaaatgaatttccatttgaattccgggcattagaagttgcattagaagcaatttgtagctttcttgatgcacgtactagggaactagagatcgatgcttatccagctttagatgagctgacctccaaggtaattgttggctttgctgcgacatactggggtcgagttttggctcttaaaataagcagccgtaacttggatcgggtgcgtaaactgaaaagtgctatgacaaggctgacaaaccgcgttcaaaaggcaagaacaaggataaatcttgaacaagctgaaataattgtctcttgtctaggactagatttttctgagtggtga

SEQ ID NO: 12524 - DNA, 168 bp, Zea mays
  Peptide Sequence Number=SeqID_54303
atgaaagagtttgagtcaatcaaagaatactcggacaagctgatagatattaccaacaagcaaatactagtctctgtgcccgagaagcatgaggcaataattgcctctttggagaacaccaaggacttgactcaattgagagtagtggagttgatcaatgttttatag

SEQ ID NO: 12525 - DNA, 348 bp, Zea mays
  Peptide Sequence Number=SeqID_54304
atgtcaaatggagatttaaatgtgcaatgttactttgttgagccacctaaggatgtcaagttcagtgaggaagccttgtggaatttggaagttatagaagcagaaatggttgaacagagtcagattgagctgaatgtgcgaactgatgaagttcaacaccaagatggtgatagtgtcgatgatttgccagtcaaaggcaccaggcctatatctgagatttttgaaagctataatgttgttgtgctggagcctgcgagctatgaaaagacagtaaaagagaatggctggaaagaggctatggaagctgagctagccatgattaaggaaaatgacttgagagttggttga

SEQ ID NO: 12526 - DNA, 912 bp, Zea mays
  Peptide Sequence Number=SeqID_54305
atggctaatgatactgaagaacaggttcaagtagagaagaatgaagagtcatatctcattcagcttgctggaaggactacccctaaaggtcttcattgcctctccatacggttgacaactgaatatcttttacttcaacctgaggaaagacaattccctaaccaacataaattgcaagatctagatttttatcactatgcagtgttctctgacgaaattctggcttgtgcagttgttgttaactccacaactgcctctgcaaaggagccggagaaaattgttttccatgtagtgaccgattctcttaaccttccagcaatttcaatgtggtttttattaaatcctcctggaaaagctacaattgatgtccagagcatagaaaattttgaatggctgtcaacagaatattcttcagcattgaaggaacaaaagtccaatgatcctagatatacatctgcccttagtcatcttcggttctatctggcagacatctttccagcactggataagattgtgctctttgatcatgatgtggtagtgcaaagagatttaactggactttggagtgttaacttgaacggaaaaatcaattttcagcaaagaggcttaatgctagtgtttgcacatgggcatttgggacttaagaggccattgtggaagacaaagagcttgcctttagattggattaccttttacaaccagactgtagctttagaaaagagctggcatgcatttgggctaggtcataactcagggcttagtcaaggtgatatcgagcatgcagcagtcatacactatgatggaatcatgaaaccctggttggaaataggaattgctgaatataaaggctattggagcaaacatgtgcagtatgaccatccttacttacaagagtgtaatatccatgaataa

SEQ ID NO: 12527 - DNA, 165 bp, Zea mays
  Peptide Sequence Number=SeqID_54306
atggccttacgtcttgataatggtgagtggtgctttgatcagaaatctctacaagctgaggctgtgaagttctttgaaaaattatatggtaaagatccgcagagcataagagaccttccagatagtggggtcacttggtcgtgtctctttggttcaatcgcttag

SEQ ID NO: 12528 - DNA, 438 bp, Zea mays
  Peptide Sequence Number=SeqID_54307
atgggcaaggacaagaaaggtcggggttcgccgcgtcgcaccggcgacaagcggaagcgtgagccaagtcctccctcggaggacttcggtgattctgagtactcggaggagttttcctccgagtctgaaggatcgccagggatagccgacgaggtgtggacgtacatctggtccgtcgagcacgccgagctcgagggctcggatgagtcggaggtctccttggacgaggagaactcttctagctcgtccgagaaagggagcggcggcgacggtgacgacgacgacgaaggcgacgaaagtggtgaaggtggcggcggcgacggcggcaacgacggcggcaagggcggcggtggaggcagcgacggcggcaagagcgacggtgacggcaagagcgacagcagcagcagcaaggccagtggcaaagcgccactcgcttaa

SEQ ID NO: 12529 - DNA, 774 bp, Zea mays
  Peptide Sequence Number=SeqID_54308
atggaaagggagcgcaacgccgccaccgctggtgctggccgctgggaggcgccggacggggtgatcgtgctgcccgtggggtcggcggcgccgcagcagggccgccaaaaggagcaccagtaccagcagagaaagcgtgagatggagcgggagcgggagcagcaggacccgggggcgagggagggggttttggggctggacccgcagccgccagagaaggtgtactacaagacgaggctgtgcgagaagttcgaggcgggcaagtgcgcgtacgagggtgggtgcaccttcgcgcacggctccgaggagttgcggccgccgctgccgctgcccctgctgacctcgctcgtccgacggaagtcgccgctgccgtcgtcgtcgccaggtgccgctgccagcagcccccacggtgggtactgcgttagggtgtgcttcgagttcagggacacgggggcctgccaccgtggggataggtgcgccttcgtccacgcttccacgacagagatgccctttcctggggggccaaggtctatggagtatgctctgaggaattcgtcgtcgtatgcaaaggcgtactcgccggggtccacggccgccgcgtaccgtaacagcagcagcaccagcaccagcaactatgcaccggctaccacaagggcgttccaatccgtttctgccgacgcggccggagagggcggttgcaaggccacccgtctggagctccttggtcgcaagaagatgaacgacatctacggcgactggccggaacaggactga

SEQ ID NO: 12530 - DNA, 579 bp, Zea mays
  Peptide Sequence Number=SeqID_54309
atgcgcatcttcttcaacctgcggccgccgcccgccggcgccgcatgcccatcccgccgcctcggcctgccgctgtcacttcttctgggggataaaaaggggtcgccaaaagaacatatgactgttgcgcagggaaaacgtgaacaagcacacaggaaggagcaggagctgctccggccgtccccgcggcggtcggtgagacggcttgccgtggaggtggcgccacggctgctggagttggggaagacggaagacgacggtcaggcactacaccatcgccgcaccaggcgggtgagcgggtcagggatctacgaccagtcggccactcggctaggcggccagccgtgcagggctgcaggcaccaccgcaccagacagcgcagcagaggatggccagacgcagccgggatccgcccgcacagcacagcagcagccgggagccgcccgcacagcagtttgccgcgttggggacttggggttggggttgcggggaggcggggagccggccgccgggagcccaggacgattcaccaagacggcggaagacggcgacgcgactagggtttttgtgggggactag

SEQ ID NO: 12531 - DNA, 582 bp, Zea mays
  Peptide Sequence Number=SeqID_54310
atggcggcgcaggagcaggagcacgagaagcagcaggcgaagacgagcaccacgagctcgctcccctccagcagcgagcgctcctccagctccgcccccaacaaccttagggaaggagctgaagctgccggcgcaggcgtggagagcgacgaggagatacggcgggtgccggagctgggcggcgcgtcggcgtcggcgtcggcctcgtcgggcgcgggcaaggaggacggcgcgcgggcggtggccgcgggggcgcaggggcaccctccggcggccgggaagaagcgcggccgcgccccgggggacaaggagcagaaccggctgaagcggctgctgcggaaccgcgtgtcggcgcagcaggcgcgggagcggaagaaggcgtacctgacggagctggaggcgcgggccaaggacctggagctccgcaatgcggagctcgagcagcgggtgtccacgctccagaacgagaacaacacgctccgccagattctgaagaacacgacggcgcacgcgagcaagaggagcggcggcggcggcaagggtggagacggcggcaagaagcaccacttcgccaagagctaa

SEQ ID NO: 12532 - DNA, 147 bp, Zea mays
  Peptide Sequence Number=SeqID_54311
atgaggaatcacattactggagacaaggccaaggatagatcactgggcgaggctacatacaatgggacaagaatagtagagggagaggaggaagaagcgtcgctgtcggtgatgcatgattcttgtgagtgcttaatgaatccatga

SEQ ID NO: 12533 - DNA, 270 bp, Zea mays
  Peptide Sequence Number=SeqID_54312
atggccgcgattgaagctccattaacacaagaaacggacgacggtttcagcaacggcagcgtggctcgcggcatcgggcgcggcttccacgcgcaggcggctatcggcgtcgcgctggctgggggctgctcgcggtcgtcgcgcctgggcgtggctgccgcggtggggccgggcggggcgtcgcgcgctgcttgcgcaggggctggcgcggcagagagcggtgtcgtggctccttgcgcgcgcgtgagacagagcaagggagagagatag

SEQ ID NO: 12534 - DNA, 270 bp, Zea mays
  Peptide Sequence Number=SeqID_54313
atggccgcgattgaagctccattaacacaagaaacagacgacggtttcagcaacggcagcgcggctcgcgccatcgggcgcggcttccacgcgcaggcggctatcggcgtcgcgctggctgggggctgctcgcggtcgtcgcgcctgggcgtggctgccgcggtggggccgggcggggcgttgcgcgctgcttgcgcaggagctggcgcggcagagagcggtgccgtggctccttgcgcgcgcgtgagacagagcaagggagagagatag

SEQ ID NO: 12535 - DNA, 450 bp, Zea mays
  Peptide Sequence Number=SeqID_54314
atgcccatgcacgacttgtatttaagcatccactcgctcactagctcattgtctctctggtgtatttgcaacgccaactggacagtagaagctgcagaatgtacgtgcagctgtggccggcccgaagcggcgaagcctgacacggtgctagggcccaaatccaaggtaagtcggccggtgctggccaaagagacgtcgtctggcctgccgccgccgaagtggatccacgtcgttctcaacagcaagggcggcgctgcgcccacggtggccatccacagcgacaatgcctacatcgtcggcttcaccaacagcaagaggacgtggtaccagctcagcaagacgggcaccaaggacaagctcgtcgacgaaaaccccgtgatggcgggcttcgacgtcaactatagctcgctcatcggcggcggcgacaagctgcaaaccatcaagggataa

SEQ ID NO: 12536 - DNA, 486 bp, Zea mays
  Peptide Sequence Number=SeqID_54315
atgactctagaaaaaattgcccccatcgttcaagtgactccgttcaacatgatgtcggactcatacgccacattcatccagaatgtacgtgcagctgtggccggcccgaagcctgacacggtgctagggcccaaatccaagctcagcaagacgggcaccaaggacaagctcgtcgacgaaaaccccgtgatggcgggcttcgacgtcaactacagctcgctcatcggcggcggcgacaagctgccaaccctgaacgtcgccaagttccgggataaggacgacaagcctttccagccattcaagggattagggataaatagcggggaggaagccttggctgtggtggcgcttctgaagctcatcttgggaagcaacagccttttggcctggctcaagtgcttctcggggcttctcgtgaagaagctcaagcgggaggacacgaattacgagaagccaaagactgcagccatcgttaacccactttaa

SEQ ID NO: 12537 - DNA, 285 bp, Zea mays
  Peptide Sequence Number=SeqID_54316
atggtcgaccgaccttcaaccctttgggggatcctgagcctaacctcgtgcgggacctcgttctgttgcgccattggcggggtttttgttggcgcggttcatggtttcgccgcagcttcctttggcgatcccgagggagatttcctctcgggtgaagttgctatgcgatgcagaatcccctctacatctgccacgcaggagatggttctgaagcagaagactgctcctgggttgaaggtgatcaatgctcttgaaaacaacgaccatggagtcagtgttgattga

SEQ ID NO: 12538 - DNA, 426 bp, Zea mays
  Peptide Sequence Number=SeqID_54317
atggctctagaaaaaattgcccccatcgttcaagtgactccgttcaacatgatgtcggactcatacatcacattcatccagaatgtacgtgcagctgtggccggcccgaagcctgacacggtgctagggtccaaatccaaggtaagtcggccggtgctggccaaagagacgtcgtctggcctgccgccgccgaagtggatccacgtcgttctcaacagcaagggcggcgctgcgcccacggtggccatccacagcgacaatgcctacatcgtcggcttcaccaacagcaagaggacgtggtaccagctcagcaagacgggcaccaaggacaagctcgtcgacgaaaaccccgtgatggcgggcttcgacgtcaactatagctcgctcatcggcggcggcgacaagctgcaaaccatcaagggataa

SEQ ID NO: 12539 - DNA, 327 bp, Zea mays
  Peptide Sequence Number=SeqID_54318
atggtcgaccgaccttcaaccctttgggggatcctgagcctaacctcgtgtgggacctcgttctgttgcgccattggcggggtttttgttggcgcggttcatggtttcgccgcagcttcctttggcgatcccgagggagatttcctctcgggtgaagttgctatgcgatgcagaatcccctctacatctgccacgcaggagatggttctgaagcagaagactgctcctgggttgaaggcgcaataccctacttcctgtggcagttttctgtattgtggtgattttacaagctgtgactacgagaatggtaggctgaggatgagatga

SEQ ID NO: 12540 - DNA, 351 bp, Zea mays
  Peptide Sequence Number=SeqID_54319
atggccgtgagctgcgtcacgggccgccgctgcgagcgcgtcgcaggcgggctggctgcgccgtgccggccgccgcgagcaagccgcgggcgggctggccgcgcatcgcgcgccgtaccggggcgccatggccggacctgggtgcacgccacgtcgggcgatctccagccgcacgcgcgcaaggccgtgagccgcgctggccgagctctaggccgcgcgcgccgcgagcacggggaggagggggacggggaggagggagaggaggtcggcactggcggtttggggagaggagagaatgagcgcatcctagggcttgagtgggagatcgtggggaagcaggagagaagatga

SEQ ID NO: 12541 - DNA, 204 bp, Zea mays
  Peptide Sequence Number=SeqID_54320
atggacgcagggatcttccgcggttcagggagttttatggccgaaggcttctgctgtgtcaccacggaagaagatggagcttcggtgccgctagtgtcgtgggccgcgccgtgcgggagcgggaactgctttgccatggccgaggaacttcaccgggccgccgcaaccgcgctctgcaccgccgccagggagcttcgcgtgtag

SEQ ID NO: 12542 - DNA, 744 bp, Zea mays
  Peptide Sequence Number=SeqID_54321
atgtcgtcgtcttcatcatcatcttcatcgtcgtcgtcgttgtcggcatttcgaacctggggggtccctggaccgacgagtaaattgtcgccgcgtgccctagcccagatgggtccgcgcgagacggagcgcgaaggggggaaaagccggagggagacaggcgtgagaggtgaaatccagcggccttcgtgtttgtcccgcgcccagggtcgggcgaagcggagttcgtcgtccttcggggctgagcccgagtccgagccctggggtcgggcgaagtggagttcgtcgtcttccggggctgagcccaagtccgagccctggggtcgggcggagcggagttcgtcgttttccggggctgagcccgagtccgagccctggggtcgggcggagcagagttcgtcgtcttccggggctgagcccgagtccgagccctggggtcgggcggagtggagttcgtcgtcttccggggctgagcccgagtccaagccctggggtctggcggagcggagttcgtcgtcttccggggctgagcccgagtccgagtccgagccctggggtcgggcggagtggagtttcctatggcgcctgaggccggacttggctgctgtcagcctcactctgtcgagtggcacaatagtcggagcagcgcaggcggcgctgtcctcttatcagaccggtcagtggagcggcgaagtgactacagtcacattggctctaccgattggagggcgcgcgtcaggataa

SEQ ID NO: 12543 - DNA, 351 bp, Zea mays
  Peptide Sequence Number=SeqID_54322
atggagggccactgtctccctttcgttgagggggatcaggaggaatccaacattgatcctagagctggatggccagagggcatttcacgacgtttagggggacattttatcactctagggatcgagtgtcgaccatctggtgacagcccatcttctcgggaagaggtgctagtggaacttttgcgcgtggagtactatcttcaggctcttgacatcgagcatgccaatttgtgcgcaataatcgacatcgtccccttcccattgagggttccgtgggaaggggacatggcgcaggggggactatccttgctgctcgtcagggagcaaggatttgagcccaagtctgagtag

SEQ ID NO: 12544 - DNA, 255 bp, Zea mays
  Peptide Sequence Number=SeqID_54323
atggccttggtgttgtactttactgacctgctcttgttagctgctcggcgctctgacctgctcggtgccacgttgtcactccggcctccatccgccagcctctgtcccctggccggtgtaggaatgggcctgtgcaagaaatggatgatgggtcggtggctcaccatggctgcattgcccaggatccgagtcatccaacgccacccgagctcctgcacagatctgcatgcacaggagggaggttcagcgaaatga

SEQ ID NO: 12545 - DNA, 252 bp, Zea mays
  Peptide Sequence Number=SeqID_54324
atggcggacacacctgcagcgtcccaagggagtagttcgattttgaatctagctttggcagtcctacccccatcaaatctgggtgacggcaaggttgagagcagaggatgtcaagggcggaagagaaaagagcccattggggtaggaattcgtgcatcggtggcatggattcagtggtcgacggagcaccgcgccgccgtgaatgggtctgcgccgcggtttgatgctcgagcggtggaagatggtccgtga

SEQ ID NO: 12546 - DNA, 234 bp, Zea mays
  Peptide Sequence Number=SeqID_54325
atggctggaatgacgctgcgggggtccaacatgccaggcaaacatggtcaaggcctcaccgagagggttggggtggcagaggaggtcggcgacaagcggtggcagcgcgacaaactccaacggggtcggggtaccacagttgggcaaggtagaggaccagaagagctcggagatgatcgggaaagcagtatcgagctccagggatcacgatggcgtactgtaacaccccattga

SEQ ID NO: 12547 - DNA, 1926 bp, Zea mays
  Peptide Sequence Number=SeqID_54326
atgggatgccttgcggctctgagccgcttcatctcacgcctcggcgaaagaggcctacccctgtactgcctcttaagaaaggccgagtgcttcacttggacccctgaggccgaggaagccgtcgggaacctgaaggcgctcctcacgaatgcgcccatcttggtgccccccgctgccggagaagccctcttgatttacgtcgccgctaccactcaggtggtcagcgccgcgatcgtggttgagagacgagaagaggggcatgcattgcccgtccagaggccggtctacttcatcagtgaggtactgtccgagaccaagatccgctacccacaaattcagaagctgctgtacgtggtgatcctgacgcggcggaagttgcgacactacttcgagtctcatccggtgactgtggtgtcatccttccccctgggggagatcatccagtgccgagaggcctcaggtagaattggaaggtgggcggtggaaatcatgggcgagacaatctcgttcgcccctcggaaggccatcaagtcccaagtcttggcggactttgtggctgaatgggtcgacacccagctttcagcggctccgatccaaccggaactctggaccatgtttttcgacgggtcgctgatgaaaacaggagtgggcgcgggcctgctcttcatctcacccctcgggaaacacctccgctacgtgctgcgcctccatttcccggcgtccaacaacgtggtcgagtacaaggctctggttaacgggttgcgcatcgccatcgagctaggggtccgacgcctcgacgctcgcggtgactcgcagcttgtcatcgaccaagtcatgaagaactcccactgccgcaacccgaagatggaagcctactgcgacgaggagagctgcccctcgaccgagccgaagctcggcgattggcgcggcgtgccaagtcgttcgtcttgctgggagacgggaaggagctctaccaccgcagcccctcaggcatcctccagcgatgcatatccatcgccgaaggccaggagctcttacaagaaatacactcgggggcttgcggtcatcacgcagcgcctcgagcccttgttggaaacgccttccgacaagaaggcacccgggggctacgcgcacctactggtcgccatcaacaaattctccaagtggatcgaagtccgacccctaaacaacatcaggtccgaacaggcggtggcgttcttcaccaacattgtccatcgctttggggtcccgaactccaacattaccgacaatggcacccagttcaccggtagaaagttcatggacttctgcgaggatcaccacatctgggtggactgggccgccgtggctcaccccatgacgaatgggcaagtagagcgtgccaacgtcatgattctgcaaggactcaagccacagatctacaacgacctcaacaagttcggcaagcgatggatgaaggagctcccctcggtggtctggagtctgaggacaaggccgagccgagccacgagcttcacactgttctttctagtctatggggccgaggccatcttgcccacagacttagaatacggttccccgagggcgagggcctacgacgaccaaagcaatcaagctaaccgagaagactcactggaccagctggaagaggctcgggacgtggccttactacactcagcgcggtatcagcagtccctgcgacgctaccacgcccgaggggttcggtcccgagacctccaggtgggcgacttggtgcttcggctgcgacaagacgcccgagggcggcacaagctcacgcctccctgggaagggccattcgtcatcgccaaggttctgaagctcgggacatacaagctggccaacagtcaaggcgaggtatacagcaacgcttggaacatccgacagctacgtcgcttttacccttaa

SEQ ID NO: 12548 - DNA, 1902 bp, Zea mays
  Peptide Sequence Number=SeqID_54327
atggcgccgagcaagctgcgccaggcgctgggcgcggtgaaggaccagacgagcatcgggctggccaaggtcggcagcggcggctccctggaggcggacctggacgtggccatcgtcaaggccaccaggcacagcgagtcgttccccgccgacgagcgccacatccgggagatcgtcacgctcacccgcctctcccgggtgtacgtcggctcctgcgtgtcctcgctgtcgcgccgcctcgggcgcacccggagctgggcggtcgcgctcaagaccctcgtcatcgtgcaccgcctcctcgccgaaggggacccggcgttcgagcaggagctcccgcgccgacgccctgggacttctccgcgttcgtccgcaccttcgccgcgtacctcgacgactgcctcgagtgccggatgcagggcaaagcagcagggtggtggtggtgccgccccgcgcggcggtggcaggccgctccacgaggagatgtacgcatcccccgggaaccgcttcgcctgcggcatcgccgccttcaacgggagacaagaggacgcggcggacgccgaggcacagaggacggtggctctcgtggccagggacccgcccacgagagagatgacggtggatcagctgctcgtcaaggccaaccagctgcatcatctcctcgaccggttcatcgcctgccgccctgtaggtgagtctctgttgctcttcctccgcggccacgcaatttgtctttctgaacttggaccatcatatcatgcatgtggatttgttactgaacttccaatgacttccgtcgcaggcgcggccaaggcgaaccgagtggtgggggtctctctgtacccgctgatcaaggagagcgtgcagctctactgcgagctcacggaggtgacggccacgctcatcgagcagttcgcggagatggagaccgcggactgcgagcgcgtgcacgccctcttctgcggtctcgccaagcagatggaggagctcgagacgttctacgcgtggtgcaaggtcgcctgcgtgtgccgccagtccgacgtgccggaggtggtggaggccgtcacgcagaagaagctggaactcatggacgagttcatccgcgacaggcacgccgcggactcgcagcagaggctctcgccgccggatccggagccgatggcaagcccagagccagcccccgtcgaagaggacaacgacgacatgaacgcgaccaaggcccttccagcgcccgaggagccggcggcggctgcggcgcaagaggaaagcacagccgggaaagccgagccagatgcctccctcatcgtggccgacgacccggtcgaggaggaggccgacttcctgaacctcagcgcggacgccatgtccggccaagagcacgggcggcagctggagctggcgctgttcgacggcaacgcagcgccggaaggcagcgtgttccaaggctcctcggcggactgggagacggagctggtgcattccgcgagcgcgctcgcgaatcagcgcgcccaactcggcggcggcctcagcatgttggtgctggacgggatgtacaaccacgcggcggcggcgaccaacgcgcagacgacgttctccggcagcgccagcagcgtggctctgcggccaccaccagggccgcacatgctcgccttgccggcgcctccaggaggcggcagcgccgtagcgggtgcggaccctttcgcggcgtcggcgctggtgcctccgccgacgtatgttcagatgtccgacatgcagacgaagcgccagcttctgacgcaggagcagcagatgtggcgacagtacggcaagaacggaatgcagcagggggcattggcaatgccaaaccagaatcaacagttgctaccacacgtggggcacaattacgcagggtatcggactacatag

SEQ ID NO: 12549 - DNA, 162 bp, Zea mays
  Peptide Sequence Number=SeqID_54328
atgcagaatatgaaggctaaggttgatcgtaggggcttacggggaagccggggagaagccagcaggccgatggggagaaccgtgggggaggagatgagcgccgccgtctggtcaatgggtgcgaggtacggtgccgagcgccatcagccggtgtggcagtag

SEQ ID NO: 12550 - DNA, 1845 bp, Zea mays
  Peptide Sequence Number=SeqID_54329
atgtcgggagatcacgccaagaatgagatggtgatcggtgagaagactgccacaagcaacgggaaggctccatcaagggagtccaccaacagaaagaaggatggatccccttcacgcattagatcgcacaagagtggcgagaagaagaagaaaatgaagaaagtggtctactacgagactaactcttcatcgccctctacatcgggatccgacgccgcgttcgtcacttctaagcgccaagagcgcaagtatagtaagatccccctacgctaccctcacattcctagacatactccattacttttcgtcccattaggcaaaccatcgacgtttgacggtgaagattattctaggtggagtgatatgatgagatatcacctaacctcactccacaaaagtatatgggatgttgttgagtttggagcgcaggtaccatccgtaggggaagaggattatgatgaggacgaggtggcccaaatcgagcacttcaactcccaagccaccactatactcctcacctctctaagtcgagaggagtataacaaggtgcaagggttgaagagtgccaaagagatttgggacgtgctcaaaaccgcgcacgaaggagatgaggtgaccaaaatcaccaagcaggaaacgatcgagggggagctcggtcggttcatgctcaaccaaggcgaggaccctcaagccatgtacaaccggctaaagaccttggtgaatcaagtgcgcaacctcgggagctccaagtgggatgaccatgaaatggtcaaggttattttaagatcactagtatttcttaatcctactcaagtacaattaattcgtggtgatcctagatataagctaatgtctcctgaggaagttataggaaaattcgtgagctttgagttgatgatcaaaggctcaaagaaaatcatcgagcaagccgcctccttcacacccgaggcgcaaccggtcgcattcaaggcgacggaggagaagaaggaagagtctacatcaagtagaccccccatcgacgcctccaagcttgacaatgaggagatggcgctcatcatcaagagctttcgccaaatcctcaagcaaaggagggggaaagactacaagtcccgctccaagaaggactccgacgagagctccaccgactcctccttcgacgaggacgccgccaacatcaccgtcaccaaaggactcctcttccccaacgtcggccacaagtgcctcatggcaaaggacggcagaaagaagaaggtaaaatcaagatcctccactaaatatgcaacctctagtgatgaggataattctagtgatgaggaggataacttactcactctttttgctaatcttaacatgcaacaaaaagaaaaattgaatgaattaattagtgatattcatgagaaggatgaactcttggacacccaagaggacttcctaattaaggaaaacaagaagcatgttaaggttaaaaatgcttatgctctagaggtagaaaaatgtgaaaaattatctagtgagctaagcacttgccatgatgttatctcaagccttagaaatgaaaatgctagattaattgctaaggttgagagttcaaatgtttatgcatctgggggctcaagttggatcatcgacagcgggtgcacaaaccacatgacaggggagaagaaaatgttctcctcctacgagaaaaaccaagatccccaacgagctatcacattcggggatggaaatcaaggtattactgtctttagaagaagtgatgattcagtagcatttaagggagtgttagagggaaaaatcacaaacccaagagaccttaaagggattcttgagacgggctcaaaataa

SEQ ID NO: 12551 - DNA, 309 bp, Zea mays
  Peptide Sequence Number=SeqID_54330
atgcccctcccccagcgcgcgcaacggcctccgctcgtgatggccgggtccgtgaatgccgcaagtgccccctatatatatatataccttcccaacctcagtccttattatctcgacagcggcgaagcggacgacgaaagaggaggaggagcaagaggcggagaggtttcccacatcgagcttgtgaccatgagcccccgctctaggtgcatctacctccttctcgatttcgttcttgcccccgtcaccttccttttcttcttccccaagttcttcgactggtggagttccaagctagggaggagctaa

SEQ ID NO: 12552 - DNA, 309 bp, Zea mays
  Peptide Sequence Number=SeqID_54331
atgcccctcccccagcgcgcgcaatggcctccgctcgtgatggccgggtccgtgaatgccgcaagtgccccctatatatatatataccttcccaacctcagtccttattatctcgacagcggcgaagcggacgacgaaagaggaggaggagcaagaggcggagaggtttcccacatcgagcttgtgaccatgagcccccgctctaggtgcatctacctccttctcgatttcgttcttgcccccgtcaccttccttttcttcttccccaagttcttcgactggtggagttccaagctagggaggagctaa

SEQ ID NO: 12553 - DNA, 804 bp, Zea mays
  Peptide Sequence Number=SeqID_54332
atggcgcgactgttactgtccgttgtccttctccactggagggggaggacgctcttccggttacacgcgcgatctctcatacgcgttgcaaacaacacgtcctcatcccaccttctgcgagcacaaacagagtgggagagcaggcctccgaaatcgccgtctgctgagcgaccgttcgagggactgcgcggtgtacatctttctgcatcgactgtgtacgactacatcgaacatacacatgagatgtctcatgatgttacaaatggcgataatgaccacgaccacaatgatagtgaaccaggcggcaatccgccacacaactcaccagacagtcctcccggcattaacaaggcacatggaatagtgtcggcaacaacacccgacaacaccacaccaccttcaagtgatccaaagggagacaaacgatcatgtccaccctcaccaaataagagagcacaagaacagccacaagaagtggcccccaaccctttttgcaggcccaagttaattgttgcttggcctcgttcggatgactgccttgaaaactatgagcctggcaggttcatgttaacattgggtgatctcatggaggagtcgtgggaagtgaggaagttctatctttggtacatggaggcggcaaaagcaggcctacattctttcattatccatgtgccacataagtacttctccatgatgcaagcctatgtatgcaagagattgggtgaaaatgttcattacctccctctgttgcgtattaacgagagagtcataaagggctatgatataccagatgaccacgaatag

SEQ ID NO: 12554 - DNA, 414 bp, Zea mays
  Peptide Sequence Number=SeqID_54333
atggtgaccaccagtttgatggtggggagaagcaagctgggctgcagcctctgccccgccctcagcttcaaggatcttcatcatccttgctggggaggagggcgaggagagccggggcctgccttcgcgtgggctggcgacccgcttcttcctccggcatctggggtggaaaccatcctccagctctgcggaggaggcgtcccccagccatgcgggggaaggcgaactgctgctgcagtggtcggcggccgggacccttgcggagaccttggctatgatggcccgagcttggtgctggcgtcctccttcgaggtggagatccttccgctcgtgccgccgtccgaggccgggccagattcctccgaaggtggagacgacgccgagggtgctgctgctccctctgttgatgtctga

SEQ ID NO: 12555 - DNA, 276 bp, Zea mays
  Peptide Sequence Number=SeqID_54334
atgtccgagccctggggcaggcggagcggagttcgccgtcttccggggcttagcccgagtccgagccctgggttgggcgaagcggagcttcctatggtgcctgcggccgggcctgactgcctgtcagcctcactctgtcaagtggcaccgcagtcggagcggcgcaggcggcgctgtctttctgtcaggccggccttgcagctttatgctcatgggggttaccagatgagaattagaagcctagagggtaccctaaattatggtccccgacagtag

SEQ ID NO: 12556 - DNA, 1082 bp, Zea mays
  Peptide Sequence Number=SeqID_54335
gattcaagaagaaattagtcagtgaattgaaggttgccgaagataacaaggactggggcctgttcattgattcatgctttacccactgtcaaacaccattcgatatcacatggaattcaccgatctcaccaaggctcggcaacaagccgtccagccgctccttctcagcgtcgctcctggacgccatctaccgctccctcgacgacggcgacggcgccgatgtcgttgttgacgtcgcgcgtgggagtgtagaggagaaggcggccgcggccgcgacagcgcagttctggtggacaaacaaggcggcgcccaagccctgcaggcaatcgtcgtcgaccgcggacagggacaggcgccggcgggaggcgggagttgcgcgcccgcgccactcggggtcggggtacgcgtcgtcgtctgactcgtcggctgctagctacagcagcctctcctgctcgtcggcgtcgaccgtaggtatcgagtctacgtgccgccgccacggcccggccccgccgcgggtgtcattgtcagaggaatccgtcgccacggacacggaggaggcgaccccgctgccacccaagagcaaaccaaagaagaaggccaggccatgtttccccgttgcaagaatccgaccaagggcctcagtgccaccaccatcgtccgggccacagccgccgtcgtcgccggcgaagttcgcatgcgcactcaaggctcttttctcctcagcgcgcctccaaaggaagcccaaggctccggcaccggcaagaacgacccctccgcccaaaatctcgcagcctccacgcatgtcgaccacgagcgctgcgaaggctgctgacgcaccgcagccgtcggagccgacgacggtgcggctccaccctgaagccgaggcgtcggtggtgcgacgaagggtggaggagctggtgcggggcctcgaggagctggaggaggatgaggaggggagcgacgccagctccgacctcttcgagctggagagccttcgtggcgccggcgccgacgagctgcccgtgtacggcaccaccagcctcgtggccaactgcgctatcgcgcaggggccagctcgttaa

SEQ ID NO: 12557 - DNA, 171 bp, Zea mays
  Peptide Sequence Number=SeqID_54336
atggagggttcctgggattgcgcgaccaagagcggggcaaggggaggatgtcgaaggcaggggcagcgcagaaccgtgcgccacgccactgtggacgcctacgatatgtttgatatttgggaatttaaaagtcaaaacagaaaacttgaagcaggtttgaatttggaatag

SEQ ID NO: 12558 - DNA, 117 bp, Zea mays
  Peptide Sequence Number=SeqID_54337
atggctgcacagtggaagggggtcagggccttcgccgcggtggcgattggatttgccgcctgccttgttggcgctagtggacccacgtatggttctggcggaatgcgtgaacagtaa

SEQ ID NO: 12559 - DNA, 1611 bp, Zea mays
  Peptide Sequence Number=SeqID_54338
atggcgccggcggcggctctggctctgagtctgctcctcgcgttcctggcgatcgggccctgcgccgccgccgacagcatcgacctgtggccgatgccgcagtcggtgtcgcacgggacgcagaagctctacgtcaagaaggacatcaccatgtcgatggtggggagcacgtactccgacgagaaatcgatcctcaaggacgcgttccagcggatgcttgacctgatcacgctgaaccacgtcatcgacggaatcgacccaggctcctcggttctcacctgcgttaatgtggttgtgcgtacacctgaagacgagcttagctttggggcagatgagtcgtataacctgactgttccaacgacaggagacccactgtatgcacagatccaggctcaaacagtgtttggagcgcttcaagccttgcagacgtttggtcagttatgttacttcgatttcacatcgcggctcattgagctcaactcggctccttggataataaccgacagacccaggtttccctaccggggactgcttattgataccgcgagacactacctccctgttaagacaatcaaaggagtgattgatgcaatggcttacagcaaattgaatgttctccattggcatatcgtggacgagcagtcgtttcccattgagataccctcataccccaaactgtggaacggttcatactcttattcagagagatatacgatgtctgatgctattgacattgtacggtatgccgagaagcgaggtgtaaatgtgttggctgagattgatgttcctggccatgcccgctcatggggtatcggctacccagcattatggccatcagaaagctgcagagaaccacttgatgtcagtaaaaacttcacgtttgaagtcatcgatggcattctttcaggtgattttagcaagatttttaagttcaaatttgtccacttaggaggtgatgaagtcaacacaagctgctggaccagaacaccccatattgaaggatgggaagagacatttaacagttttggagacaaattggaccctaaaaccgtggtgcataactggcttggagaagatgtagcgcccaaagtggttgctgcagggcataggtgtatagtaagcaaccaggataagtggtacctggatcacttggatgcctcatgggaaggattttacatgaacgagcccctaaaaggtatcaatgatacaaagcagcagcaattggtcattggtggtgaggtttgcatgtggggtgaggaaattgatgcctcagatattcagcaaacgatttggccacgtgccgcagcagctgcaggggaggcggggtgggagccgcatggtgcattgcgtaggtttttgcgatggggcgcatggtgtggtagagccatcgtggtggaggaggtcgcggagtcgtcggcgcaaatgtcatggagctacaatagcagtttacggaggttgcggaggtcgcttgcggaggttagctatctgacgcaggtgggcgggggtttcgtggagtcagagctctgtgtgcgcggagtcggtgtggatgtcgcggaggtttcgcagaggcaggggcacggagatagtctacaatattgctttaatagatag

SEQ ID NO: 12560 - DNA, 2454 bp, Zea mays
  Peptide Sequence Number=SeqID_54339
atggcgactcgcgccggacgactgcccaccactccggcgcccgctcttctgctcctcctcgccttcccgtttctgctgcagggagttcttccgtcgcgagccggggacaccgtcgccgccggccgcccgctgtccggcggacagagcctcgtgtccaagcgtggcaagttcaggctcggattcttccgcccaggtgcaacagacaactcgagccagcgctggtacctgggcatctggtacaaccagctctcggtgcacaccacggtgtgggtggcgaaccgggggacgcccatctccgacccggagtcctcgcagctatctatctccaaggacggcaacatggtcgtcctcgaccacagcaggtcgtctaccgccgtctggtccaccaacgtcaccaccggcgtctcctccacgtccacggtcggcgtcatccgcgacaacggcaacctcgtcctggcggacgcgtccaacacttccgcggtgctgtggcagagcttcgaccactcgggcgacacgtggctccccggcgggaagctgggccggaacaagcgcacgggcgaggtcacgcgcctcgtggcgtggaaggggcgcgacgacccgacgccgagcctgttcgcgctggagctggacccgcgcggctccagccagtacctgctcaactggaacgacagcgagcggtactggaccagcggcaactggacggggacggcgttcgctgccgtgccggagatgacgtccaccggcgcgtcgcccgtgtccgactacaccttcggctacgtcgacggcgccaacgagagctacttcacctacgacgtcgcggacgagtcggtggtgacgcggttccaggtggacgtgacggggcagatccagttcctcacgtgggtggcggccgccgcccagtgggtgctcttctggtcggagcccaagcggcagtgcgacgtgtacgcgaacgcgctgccgtcctgcacctgcccccgggggttccgggagcgcgacctggccgagtggatgcaggacgaccacaccgcgggatgcgccaggaacaccgcactccagccttgcggcgccggcgccgccgctcgagacgggcagaagcgccgcagggacgacgataggttctacacgatgcccgacgtgaggctgccgagcgacgcgcggagcgcggcggccgcgagcgctcacgactgcgagctcgcgtgcctccgcaactgctcttgcaccgcttactcctacagcggcggctgctcgctgtggtatggggacctcatcaaccttcaggacacgacgagcgctggcagtggcaccggaggcggcagcatctcgatccgcctcgctgcctccgagttctctagcaacgggaacaccaagaaactggtcatcgggctcgtcgtcgcgggctcctccttcgtcgccgcagtcaccgccatcgttctggctaccgtcctcgttctaaggaaccgaaggatcaagtcgttgaggacggtccaaggatccctggtggcgttcacgtaccgcgacctgcagctggtgaccaacaacttctcggagaagctcggcggcggcgccttcgggtccgtgttcaaaggggtgctgcctgacgcaacgctcgtggcggtcaagaagctggaaggcgttcggcagggggagaaacagttccgcgccgaggtgagcacgatcggcacgatccagcacgtgaacctgatcaggctgctcgggttctgctccgaggggtcgaggcggctcctcgtctacgagcacatgccaagcggctctctggacaggcatctgttcgatcgggaccagcagccgggtgtcctgagctgggacgccaggtaccagatcgctctcggggtcgcgagggggctggactacctgcacgagaaatgcagggactgcatcatccactgtgacatcaagcccgagaacatcctcctggacgacgcgttcgtccccagagtcgccgacttcgggctcgccaagctcatgggtcgcgacttcagccgcgtgctcaccaccatgcggggcacggtggggtacctggcgcccgagtggatcgccggcacggccgtcaccaccaaggcggacgtgttcagctacggcatgatgctgttcgagatcatctcgggccggaggaatgtcggccagcgggcggacggcacggtggacttcttcccgtccacggccgtcaaccggctcctcgacggcgacgtgaggagcgcggtggacagccagctcggcggcaacgcggacgtggccgaggtggagcgggcctgcaaggtggcgtgctggtgcgtgcaggacgcggagagcttgcgcccgagtatggggatggtggtgcaggttctggaggggctggtcgacgtcaatgccccgcccgtcccgaggtcgctcatggtgctcgccgatccgtccaagtacgccgttgagttcttctcaggtttgccgtcgacctga

SEQ ID NO: 12561 - DNA, 366 bp, Zea mays
  Peptide Sequence Number=SeqID_54340
atggaagtagacttcggtagcgttgaagggaaggaattgtcgaatgtcacattggattgcgcctgcattcacaaaactttcctacggacaacaaatatggaggatgggatggatctactaggtggctatggaggatgtcacgagcatgaggcgtgtgagcttgaggtggaggcgggagcaaggcatcgtgtaggaggaatactttctggaggtagtaaggtaggggtgccatggaggagcgaggtcgtgggagggggcgagtgcggcatgcatggagaggatgaggcacaaaagtggtggcgccaccctcggtgcagtttgttagggcgtaggatcaaggagagtatggaggcatcgagaggataa

SEQ ID NO: 12562 - DNA, 189 bp, Zea mays
  Peptide Sequence Number=SeqID_54341
atgagggttttgaacataagaatagaggagttcaagggagagcttgttgtgtatcgagccgatgtgggtaaactggttgaggatgttcatggtggaaagaaaatttatgtggtatatcggatgagtactatgaagaaccccttggaaatgctaaaggggcagaaaactgatatgaagcttattgagtaa

SEQ ID NO: 12563 - DNA, 249 bp, Zea mays
  Peptide Sequence Number=SeqID_54342
atgaaggtttgccgtcagtacatgagaagaggcattcctgttaacaaagaatatccttttgacctagagattaatataactttatgtagaaggctaaaagaactgagaaaaatggctaggaacaggaatgatcttggtcttaatgataatcagaatggtcaagatgctaatcctcctgttcgaagggtgataccaggtacgaatgataatttgaatggttacggtgctgatcctatgtccgtggggtga

SEQ ID NO: 12564 - DNA, 339 bp, Zea mays
  Peptide Sequence Number=SeqID_54343
atgatgggagatatcaatagacaaattggcaccggtatccctagtaacaatgaagatagtcctcaaagagaggggaaggagcaagtgaaagcaatcgccctccgatctgttaaagtacttagtagcccaaagaacctggctcaggaggtaaacaaggggaatacaaatgctgttcaagaagctgatgacaaactagagctggaagaagtagctgaactggtagttgagccggaaaaagatcaagcaaaggaacctgcaatttcaaaggttctttctcgaggagtggcgaagtgtgaatggtggggagaagaggcgctatcatcattaaacgtccagtaa

SEQ ID NO: 12565 - DNA, 108 bp, Zea mays
  Peptide Sequence Number=SeqID_54344
atgcactggccagttataatcatcctatgtagaggaaaaatgcccaacaaggtgccattctatgcgaagctatcgatatcggagaaattcccggcattaactcaatag

SEQ ID NO: 12566 - DNA, 147 bp, Zea mays
  Peptide Sequence Number=SeqID_54345
atgttgaggcgctaccgctctgatcctactcatattgtccctgttgaagagatcgaggggaggattcaaggtctcgtaatcaccaatcggagtcttagtttgtgtgggaattattgttcatcgattgaaggtaatccccagatctag

SEQ ID NO: 12567 - DNA, 3696 bp, Zea mays
  Peptide Sequence Number=SeqID_54346
atggagaatgttgaggcatttagagtcggcagtgcacgtattggaagttcaagcatttggaggaacaacgccatggaagctttctccatgtctgctcgtgaagaagatgatgaagaagacctgaaatgggctgccatcgagaaactgcctacatatttgcgtgtgaggagagggatattcacagaaggtgaaggtcaatcaagggagatcgacataaaaaaccttggattcattgagagaaggaatctgctggaaaggctagtaagaattgcagaagatgataatgagaggttcttgttgaagcttaaacaacgcattgatagagttggacttgatatgccaacaattgaagtccggtttgagcatctgaatgttgaagcagaagcttatgtgggaagtagagcgctgcctaccatattcaacttttctgcaaatattctagagacagctccaactttttcccatcctgttttttgtttgaagggattattgagttaccttcacattcttcccaatagaaagaagccattaccaatccttaatgatatcagtggaattatcagacctcgaagggcctccaagctcgggcaagacaaccttactattgtcattggctggaaagctgggcaaagatttgaaagagaaatgacggtcagagaaacattagctttttcagcaagatgtcaaggtgttggacctcgttatgagatgttgaaggaattgtctcgtagagagaaagaagcaaatatcaagcctgatcctgatattgatatctatatgaaggccgctgcactagagggacaagaggcaaatgtagttacagattatattctcaagatattggggcttgaagtttgtgcagacacctttgtgggagatgaaatgagacgaggtatctctggtggacaaaagaagcgagtcactacagttccatttgacaagtctaaaagccatccagctgctttaacgaaagacaagtacggtgtttcaaagaaggaactgttaaaagcttgtgtttccagggaatatcttctaatgaagaggaatttattcgtatatgtgttcaaaatgattcaacttattttcattggagtcataacaatgacaatttttataaggacagagatgcaccgagatacaataacagatggtggaattttcatgggagctttgttctttattctaattatgataatgttcaatggattcgcggagcttgcaatgaccatcttgaaacttcctgtcttctacaagcaaagggaccttctcttctatccttcatgggcatattctttacctgcattgatccttaagaccccaatcagcatcttagaagttaccgtctgggttttcatgagttattatgtcattggctttgaccctgatgttgggagctttttcaagaattacctagtactcctatgtcttagccagatggcatcaggacttttccgattaatgggaggattaggaagaaatataattgttgcaaacacttgtgggtcatttgctttacttacagttcttgtcatgggaggattcatcttaactcgagatgatgtcaagaaatggtggaaatggggttactggatttcaccattgatgtatgcacaaaatgccatagctgtgaatgaattcctggggaagagttggagacacgttcctcctaactctactgaaccattaggagttttggtcatgaaatctcgtggaattttccctgaaccgcattggtattggattggagtgggggctttgattggatactgtttcctattcaatttccttttcacattggcgttaaagtatttggacccatttgggaagcctcaagcagtaatatctaaagaaaccttagctgagagaattgctagcaagactggagagaatattgagctatcatcaaggggaagagattcttctgagagaagaacaggtgcatcatcgagatcgttgtcttggaaagttactagtgtcaatgaagctaatcaaaagaggaagagggggatggttcttccttttgaacccctttctatgagctttgatgaaatcaaatatgctctagatatgccacaggaaatgaaagctcaaggtatttcagaggagcggttggaacttttgaagggagtgagtggagctttcagacccggagtcctaacagctctgatgggtgttagtggtgctggcaagaccactctaatggatgtgttggcaggaaggaaaaccggtggttatgtcgagggaacgatcaaaatttcagggtatccgaagaagcaggaaacatttgctcgtatatccgggtactgtgagcaaacagacatccattccccccatgttacagtctacgagtccttggttttctctgcatggcttagactacccccggaggtcaattctgaaaccaggatgatgttcattgaggaagttatggagcttgtggagctaagttcattaagggacgcacttgtaggattgccaggggtgaatggtctttcaactgagcaacgcaagaggctaacaattgcagttgaacttgttgccaacccatccataatattcatggatgagcctacatctggtcttgatgccagggcagcagctatagtaatgagaacagtaaggaacactgtcgatacaggacgaactgtggaaataaatggaatcccaaagataaaagatggttacaatccagcaacatggatgttggaggttacttcaggagcacaagaagaagcgattggtgtcaactttaccaacatatacaagaactctgagctatataggaggaacaaggcattggtgaaggaactaagcaaccctgcacctggttccaaggatttatacttccagactagatattcacaatcgttgctcactcaatgtattgcttgtttatggaagcagtattggtcttactggcgaaacccaccatacactgcagtgagatttttattcacaacttttatagctctaatgtttgggacaatattctgggatctaggctccaaaagaacaaggcgacaggacgttttcaactcaatgggttctatgtatgctgccgttctctttataggatttcaaaatgctgcatcggttcaacccgtcgtggcagttgaaagaacggttttttatcgagaaagagccgctgggatgtattcagcactaccatatgcatttggacaggttgtgattgagctgccatacattttggttcagactgtcatttatggaattatagtgtatgcgatgatcggatttgaatggacttccgacaagttcttctggtatctcttctttatgtatttcaccttcttatacttcaccttctatgggatgatgactgtggctgtcactcccgaccacaatattgctggcataatttcatctgccttctttgcactttggaatcttttctccggattcatcatcccccgaacgagaattcctgtgtggtggagatggtattattgggtttgccctatttcttggagcttgtatggactaattgcttcacagtatggtgacgtacaggacaaatttgggtccggtgaaacagtgcaacatttcgtaagaaactatttcgatttcagagaggaattcgtgggagtcgttgcaattgtagtagttggtatatgtgtgctctttggattcatctttgcattctcaatcaaagcatttaacttccagaagagatga

SEQ ID NO: 12568 - DNA, 102 bp, Zea mays
  Peptide Sequence Number=SeqID_54347
atggggtttccagattttcatcaaaactcgttcatcctttcacaaaagggattcttttacgataaagtcatcatgattttgataaaattagaattgggttga

SEQ ID NO: 12569 - DNA, 213 bp, Zea mays
  Peptide Sequence Number=SeqID_54348
atggaccattttccggcaaatcgcgtctacgtcagtgcgatgtcagaggacgtgtctttgctgacgtggccgcgatttcctgacttaaggggatctgaattttatggaggatgtaaaaggggattcatcaaaggttcggggtcaaatgaaaatggaacatggttcggaggattgtccaatagagggtggcaatgggaagaagagaccaagtag

SEQ ID NO: 12570 - DNA, 204 bp, Zea mays
  Peptide Sequence Number=SeqID_54349
atgccccagtctccaatcgcgacggagaaggcacttccggcgaaaagaggccgtggaagagctgatggtatccgtgttgatctaaataaaatatctgcaatcattgattggaaagttccaaagaatgtttctgagccacataatagatatctctggaccctaaaagatcagaaaattttcaactatcctccattttcgccttaa

SEQ ID NO: 12571 - DNA, 660 bp, Zea mays
  Peptide Sequence Number=SeqID_54350
atggggaattctcatattaccatggttagtcacccggaaagaggtgagcttttggcacctgaggattctttggatatatctcgtaaagtgaaagaagtgtattgttatacttgttcagacattgtcaaggagttcaagaagcatgacaagaagcctgataagtacatcaaacattggtcagctgttaaaccaaagacgggggtcccatatacaattgacattggatatgaacgctttcttgggccagagatcttcttcaatcctgagatttactctgccgacttctccactcctttacctgagttgattgataactgtgttcagtctgcaccaattgacacaaggagagctctgtacaagaatatagtattatctggtggatctaccatgtttaaagacttccacaagagactccaaactgatataaagaagatagtggatgaccgtgttgctgcgactaatgcccgtcatcgtgtggaagtgagacctattgaagtcaacgtggttgcccatccaatccagagttatgcagtttggttcggggggtcagtagctgcatctaaccctgaattctttgagttctgccacacaaaggaggaatacgaggaacatggagccagcatctgcagaacaagcccggttttcaaaggaatgtactga

SEQ ID NO: 12572 - DNA, 225 bp, Zea mays
  Peptide Sequence Number=SeqID_54351
atgaacacattatgtctattcttactaggaactggtggctgcgtcaaggccactagcgcgatgatctgctctgcaactggatgctcgctgacccgttgttccttcttcaaagttggcaccgaggtgcacgattgcccacctgatgtggactctatactagcaattgaagtcgagcctctagatgacaaaaaagaaaggatctatatgaactattcacacctctaa

SEQ ID NO: 12573 - DNA, 174 bp, Zea mays
  Peptide Sequence Number=SeqID_54352
atggcgccaccctggcgggccctgcgccgccgcgttctgggtcgcggaggggtggggcacgcaggtgccgttggatccatcatggacgtagacgatcaagtgaccgatgaccccggtacccagcaggtggaaaatactaagcaggagcttgttgaaggcaagttgtgcccttga

SEQ ID NO: 12574 - DNA, 2628 bp, Zea mays
  Peptide Sequence Number=SeqID_54353
atgctcaaggagccgtgcccctatcatcaggggcccgttaagcacacccttgaggagtgcgttatgcttcggcgccacttccacagggccgggccacccgcggagggtggcagggctcgcgacgacgacaagaaggaagatcaccaggcaggagagttccccgaggtccgcgactgcttcatgatctacggtgggcaagcggcgaacgcctcggctcggcaccgcaagcaagagcgtcaggaggtctgttcggtaaaggtggcggcgccagtctacctagactggtccgacaagcccatcaccttcgaccaagccgaccaccccgaccgcgtgccgagcccggggaaatacccgctcgtcgtcgaccccgtcatcgacaacgtcaggctcaccaaggtcctcatggacggaggcagcagcctcaacatcatctacgccgagaccctcgggctcctgcgtgttgatctgtcctcggtccgagcaggcgctgcgcctttccacgggatcatccccgggaaacgcgtccagcccctcggacaactcgatcttcccgtctgctttgggacaccctccaacttccgaagggagaccctcacgttcgaggtggtcgggttccgaggaacctaccacacaatactggggaggtcatgctacgcgaagttcatggccgtccccaactacacctacctcaagctcaagatgccgggccccaacggggtcatcaccgtcggccccacgtaccgacacgcgttcgaatgcgacgtggagtgcgtggaaggcctgcctctgtaccgcctcttaaggaaggccgagtgcttcacttggacccctgaggccgaggaagccctcgggaacctgaaggcactccttgcaaacgcacccatcttggtgcctcccgctgccggagaagccctcttgatctacgtcgccgcgaccactcaggtggttagcgccacgattgtggttgagagacgagaagaggggcatgcattgcccgtccagaggccagtctacttcgtcagcgaggtactgtccgagaccaagatccgctacccacaaatccagaagctgctgtacgcggtgatcctgacatggcggaagttgcggcactacttcgagtctcatccggtaactgtggtgtcatccttccccctgggggagatcatccagtgccgagaggccttgggtagaattgcaaagtgggcggtggaaatcatgggcgaagcgatctcgttcgcccctcggaaggccatcaagtcccaggtcttggcggactttgtggctgaatgggtcgacacccagctcccaacagttccgatccaaccggaactctggaccatgttcttcgacgggtcgttgatgaagacaggagcaggcgcatgcctgctcttcatctcgcccctcgggaagcacctacgctacgtgctacgcctccacttcccggcgtccaacaatgtggctgagtacgaggctctagtcaacgggttgcgcatcgccatcgagctaggggtccgacgcctcgacgctcgcggtgactcgcaactcgtcatcgaccaagtcatgaagaactcccattgccgcgacccgaagatggaagcctactgcgatgaggttcggcgcctggaagacaagttctacgggctcgagctcaaccacatcgcccgacgctacaacgagactgcggacgagctggctaaaatagcctcggggcgaacaatggttcccccggacgtcttctcccgagacctgcatcaaccctccgtcaagaccgacgacacgcccgagcccgagaaggcctcggctcagtccgagaaggcacccgggggctacacgcacctgttggtcgccatcgacaaattctccaagtggatcgaggtccgacccctaaacagcatcaggtccgaacaggcggtggcgttcttcaccaacatcatccatcgctttggggtctcgaactccatcatcaccgacaacgacaccgagttcaccggcagaaagttcctggacttctgcgaggatcaccacatctgggtggactgggccgccgtggctcaccccatgacgaatgggcaagtagagcgtgccaacagcatgattctacaaggactcaagcctcggatctacaacgacctcaacaagttcggcaagcgatggatgaaggaactcccctcggtggtctggagtctgcggacaacaccgagccgagccacgggcttcacgtcgttctttctagcctatggggccgaggccatcttgcccacagacttggaacacggttccccgaggacgagggcctacgccgaccaaagcaaccaagctaatcaagaagactcgctggaccagctggaagaggctcgggacatggccttactacactcggtgcggtaccagcagcccctgcgacgctaccacgcccgaggggtccggtcccgagacctccaggtgggcgacctggtgcttcggctgcgacaagacgcccgagggcggcacaagctcacgcctccctgggaagggccattcgtcatcgccaaagttctgaagcccggaacgtacaagctggccaacaatcaaggcgaggtctacagcaacgcttggaacatccaacagctacgtcgcttctacccttaa

SEQ ID NO: 12575 - DNA, 3024 bp, Zea mays
  Peptide Sequence Number=SeqID_54354
atggacgccggagcgggcgtgagcgcccccaccgccgcggcggacggggcgtacggactcgcccgcatcgtggcctggtgttcgtcctcgcccctcttcttctggctcctcaccgtcgtgctcgtcgccgccatccacatcgcctccgggtccaggccctccggctccaggacccatgggaaggagagggagaaggaggaggaggaggaggaggaggagaaggcacgccgcgataggttcgcggctgccgaggagagggaggtgtcgggcaggcgagacgaccgggttctggagatgatgcgcagtttcagcttcatgaaggccaccgaggaggatttcatggagggcatgacggcgtacgagtgcaacggccgcggcgtcgacgccggcttcgcgcacgggcttgttgcgcccgagccgtttgcgccgccgccggcgttgatggcgacgagcctcagcttcaagtttcaccaccagatacctgaaattccaacggagacgacggtggtttcgagggaattcacagcagcaagagaagaggacggacaagaacgagtggaagagaaggaaccacaaattcccttggaatcattggttccgttgcaatctgcagacaagcaagaacaccgacgagaagcagaggaaacagagttcttggtcgatgagcaggtagaagagcagagcagggaggcagcgccaccgaagatcgtcgcgaccacgcacaactatcagttcttgacggagcgcgacttccgggggttcgtcagggggccggaggccatgacggtgcgcgtccaggagtctttcgtgccgccatcgccgcctgcggcgcaccagcccgaggagcgacgggtggtcgacgtatcttcccgcaccggccggttcctcacggagagggacttccggccggcgaacgaccccgacgtgtgcgagagcgtggcgtcttccgggaagcggacgccgtcgctgcagtcgaagccagcgagctctccgtccgtcgcgtacatgggcggcgccgccgtcggcgggaggacgagcttcgcgtcggagttctccggtttcggcgactccgactccgagtccagcgccagcgacggctactcggtgaaggatctcgccgtcgactccgacagcgactggttcctctcggagaaggacttcccggcgtccgcgcgcgactccggcaacctcaagagttacaaagccaaggtgctcaaggcgatcgaggccctggagaccgcggcggcggccaagcgcgagccaccttaccaggactcagcgacaacattgtcgccgggctcggtccgacaggactcaccagacaccattcccgatggttcaccgaagttccctgaggacatgtggtctcgcagcccttcgccggatgtcgagtacaaagaggacgaggagaaggtaacacgagaagctgaagcacagtacgacggggacatcgaacagagaagcacggcggaggatgaggggggcgtcgacatgagcgacgacgagcactcgtcgggcggcgagaagggagaatctgcgccagtctatgatctagctcctgttgctgacaactgtatggatcattcggagaaggagatcatcgctctaaatgatcactcgggagttgctgacgagaagagcgtcccagagactccagagcaaggattcagtctaactgaccatcgagatggagtagctcctgacgccacgaacatttcagagaccagagaagacgaggaacaagacagtgcagctcgacaggcctacgtttcagtcgccgggaaggcaaaggtgtacgacgaagatggggaggatccagaagtgaggtggaaggatctttcagccgaggaggaggacgagctggagtcgctgtgggagcaccaagacctgatagagcagctgaagctcgagctgaaaaaggttcggtccatcgggctgcccacgatcctcgaggagtcggagacgccaaaggctccgatggaggacctcaagccatggcggatcgatgccaagttcctgcgcgaagaccccatggacgagctgaacaagttctacaagagttacagggagaggatgcggaagtttgacattttgtgctaccagaagatgtatgcgatagacttcctacagctcagaggcccccagcaatccagcaactctctaaagtccctgtcgcccacggtggcatccatcctgtcgcacaatttccggtcatcgcgtcgcagatctccggaggacccgtcggagcggttcttgagggagctccgctacgatctggagacggtgtacgttgggcagacgtgcctgtcgtgggagttcctccggtggcagtacgagcaggcccgcgacctcccggagtccgacccttaccacagccaccagtacaaccaggtggccggcgagttccagcagttccaggtcgtggtgcagaggttcgtggaggacgagtcgttcaagggccctaggctgccgaactacatcaacaaccggtgcgtccttcgcagcctcctgcaggtgcccgtgatcaaagaggacagcttgaaggacaggatggaggaccagcgcaaggggaactacgtgataacgagcgaggagctggaggacgtcatggaagaggcgatgcacatcctgtgggagttcatcaaggccgacagggtcgagacgacgacgacggcggcgtccgtgctcaagggcctgtcgagcgctcacgtcgagctccaggacccttcggaccatgatctcatggcgcacatccactccacgctacagaagaaggagaagaggctcaaggacctcctcaggaccggcaactgcatcgtgaagaagttcaagaagcccaaggaggacaggtcgaaccagaacctcttcttctcgcaggtggacatgaagctggtggcgagggtgctgaggatgccgaggatcaccagcgagcagcttcagtggtgcaaggccaagctcgacaagatcgtcctggtagataggaagatccacagggaggcttcatttttgttgttcccctgttga

SEQ ID NO: 12576 - DNA, 129 bp, Zea mays
  Peptide Sequence Number=SeqID_54355
atgatgatgcacttatttcatgctgttacatgcatctggttagaatttaggactggtttggagaaggcaggaaaccacccgttgtctgctagatgtagtccatttgatcaccgatctgagctaagctag

SEQ ID NO: 12577 - DNA, 504 bp, Zea mays
  Peptide Sequence Number=SeqID_54356
atgcctccggtgaattcgttcgtcctcatgcctctgctggatttgtttgtcctcatacatccgtttgttgtgtttttggtgaggggctgtggtgaccctgagagcgagtttgagagtctgaggagggactgggaggtgctgtgtagtgataagctgggcctgagtctcgagttgggttcatttgcagctggagtaatgatatcaacaacagaccttgcgcaacatactcttgaacaaatcgaacctatccgcaacttattcgctgctcttttccttgccagcattgggatgctaattaatgtccatttcttgtggaaccatgtggatatactccttgcagcggtaattttggtgatcaccgtaaagacatttattgttgctattgtcgtaaaagggtttgggtatagcaacaaaacatctcttcttgtcggcatgtctcttgcacaaataggagagtttgcttttgttctcctaagccgtgcttcaagtatccatctcatcgag

SEQ ID NO: 12578 - DNA, 384 bp, Zea mays
  Peptide Sequence Number=SeqID_54357
atgacgaaggtcgatgcttgccgaaggtggtcgagtgagttcaccggagaaggtagaagtccgagaatgacgtgcgagcgattacaattcagcgtgaatagtacgatcacgctttttcataccatacatgccttcgtcttaaacccgaagtttccagcgacagtataccatactggaaaacgtgttagtcgtgtttttgaggacctttggaagatgaaggcctccaacatctatgttgtggccatttccaacatttgcataatgaggactttaaggaaaagcctctttgtgagaccctaccagttcacatggctcatgggtaaagtgtgcaacctctgtagagggttaatcaaaactggtgctatcgatcgtgctcaccgttaa

SEQ ID NO: 12579 - DNA, 204 bp, Zea mays
  Peptide Sequence Number=SeqID_54358
atgggcagtcgtgttggcatcaccggtgttcaccgttatccagccaggctatgtgcctcaatgttttaccatgtcgcagtgagtcaccgtgaggccgccacggtagatgccaccgagctctcacgacagtactctcttcactctccgacctccaccgcgccaactcaaattctcgagccaccgcctctaggtcctataaattga

SEQ ID NO: 12580 - DNA, 492 bp, Zea mays
  Peptide Sequence Number=SeqID_54359
atgaagtggtggcaccagagacttacagaaggcctcgtgctagatctcatatgggacgggacacaggaggttgaggtagtccaccttcacctcggtcgcttcctcctcatggggtttcggttgcgggacggcggcgatggtgtcagcggcaacgggcctgaaaggaggaggggtcaacatgtatgtgagaggatggggaggaggggccctggcctagctgatggaggatcccatggcggggcgagcggggcaggcgtggtgtcgcgcgacgtctgcgggggtcgagtgacgcgcaccgggtgggagctctgcgagggaggtgaacgcgcggagcggaagggaggaaggtggacgcgggacggcagtggtagcgtcgatggaaggttctggaggggaaggaaatcgggcgagcgggatttcaggcgccggaggggcgccgggcagaaccgtgcaccatttgtttgtgtggacgtctacaatagcatcttatag

SEQ ID NO: 12581 - DNA, 561 bp, Zea mays
  Peptide Sequence Number=SeqID_54360
caacaattgcaatctctgttggaaactctgagtgcaactgagccacactacatccgctgtgtaaaacccaataatttgttgaagcctgcaatttttgagaaccagaacgttcttcagcaactcagatgtggagttagtatttacattgttgggggtactattattggcttgcctcagggagttatggaggcgattaggatcagttgtgctggatatccgaccagaagaacattctatgaatttatagaccgttttggtattcttgcgcctgatgttttgagtggaagttctgatgaggtcagtgctgtaaggaggttgttggacaagatagatcttcaaggttaccagttcctaaaaaagatcaggatagctaagaaatatgcattttatgtgaaagggcctctagctaaattggttagatggtccgagtaccatttcccaattcatgagttcaactccccatgggagcgaatttcaggttgggttaaaaaaatcctctcgtttgttccacaccaaatcacagatctaaggtctgacccagtcgtggtcattctcaaatag

SEQ ID NO: 12582 - DNA, 861 bp, Zea mays
  Peptide Sequence Number=SeqID_54361
atgattaacccaaaaggcactaactggcagggcccagaggcagagcgtacgggcacgacccagtatccggtgatctggaccgtgcgatcggaatcaaacggtggaggtcaatgcccggaaggtttatggctgagggcggtgccgctcctgcacctcggcggtgagatcaccggagccggggcgggtgtgggccacggcggttccaacgccgccggggttggccagaattgtcgaggatggctcggcgaacacactgagggggttttggccacgagaccgaggtcagagaggggagaacggcggagggagagctccaggcgggtcggggcagttctggtgaggaattccgcctgctgggagaggcaatcgaccgcgatagggctcagtctagttccaatggaggtgggagcgctatgggccaacatcggggcacgagacggggttgggttggccggacaccgtgcgggcgcagcgagcaaacgcggccgcacaccagtgaagccaaattggctacgggcgacgtggtcggggatctcagtgtgcgtgcacactggtccacggcggttcgcggggaaggcggagctgacagggcggccccacggcgcagagagagggagcgggggcgcagagaaatggttcatcgtgctgacaggacgggcccgtgtggcagagagggaaaagggcgaagctcctgtgagcttggccccacctggatttgggagccaaaaccaggtcgacgggaatggcgccaatcactataacgagaaccggcggtggtgccctctacacaggcgcggatggtccgtgggcaggggccggaaagtccccgacctggaacaggggcttgggttccctgtctga

SEQ ID NO: 12583 - DNA, 576 bp, Zea mays
  Peptide Sequence Number=SeqID_54362
atggaggttcacgttgggtcgcaaatgcctcggaataacgatatagtggaaacaatttctgttctacccatcgaggctcgtcgagctgacccaatcactttggaggttagtggttccggtgttggaatcctaatgggtgtcgcgcttagtctaggagatttagaaccttccgcgcttgttcctgcttctcctgtggcttccattggtgctactacttctaggggtgtcccgattgttctagctttaggtcttccattttttcgggcgaacttgcagaagcaagtagatgatctgaaggctgctatttctgttgtttctttggctttgactcggcggtgctccgacgctaaggagaaatgcccccgaaatcaagaagagcttgatcaagtcactaggttccttgatggaactttggagaggaccatcaaggacttgggaaatgataaggtgttgagaagaagcagcaagggcatccacaacaggaaggagatcatgtccgactcggctatgattcaatctcggactctaggaccagtctgcactaaaatggacgcccatgatgcattcggaatctga

SEQ ID NO: 12584 - DNA, 756 bp, Zea mays
  Peptide Sequence Number=SeqID_54363
atgatctgcgtggacaactcggagtggatgaggaatggggactatcccccatcgcggttcgcggcgcaggcccacgccttcgccgtcctctccggcgccaagacggaggcgaacctggagagcacggtggggctggtggccatggcgggcaagggcgtcagcgtgctcgtcccgccaaccaacgacttcggcaaggtcctgtcaggcatgaacgggctggaaattggtggtgaagcaaacttgactgctgcgatccaggtcgctcaatttgcactcaagaatcggcagaacaagcagctgcggcagagaataattgtttttgttggcagcccagtaatagatgagaagaactggctagaagtgatagggaaaaatctgaagaagaacaacgttgctcttgatgttgttaacttcggtgaatctgataacgaaaagcctgagaaactagaagctcttgttgctgcagtcaatagtggtggcaacagtcatataattcatatccctgcaggacgtgacctttctgatgccctattcagttcaccaataatattatcggaagaccgaggaagtgattctgctgctgctgctcgtggagcatcgggttttgaatttgacgtggacccaaacgtggacccagagctggcgctactaatgcaatctgtatccttcgttttggatgtccaacagttattagagattacccataaaaagggattactaagaccacctcagctatacctattagttctcaattga

SEQ ID NO: 12585 - DNA, 1527 bp, Zea mays
  Peptide Sequence Number=SeqID_54364
atgggggtgtcgctagcaggtctctcttctctggataaccacaccaccaatcatgagggaatcaccttcaacacagggggggccatctacatcttctgcggtaacaagagcagcataactaaatcgattgattctgttgatgatagttactcagctgacggtgttgaagattcacaactattcctctccgtgccagctttaaaccaagctgcatcttatcttgcccagacagcttcattcctcactcaatgcctccctgtacctggttttgtgggtctatctgaggagggccaagagttattaacactgccacctgcatcggcttcaggcagactttctgttcagacttcttcagtagagccttccggtaccaattcatcccttggtcagtcagattgtggtggaaacccctctcaagaaaacgctggacagatggtgccttcgcatgtttttcagaatggagcttcactgttccaaggccttgttgaacgtgctcggaaaacggtccgtggttcagcagatgatattggctggctccagcgagatcaaagcttacctacaactgaggatgggacagccagattcttagagattttggattctgtgagaaaaaatgaacacaagctatctgattcattggtttacttgttggttccaggtctgtttagtaaccacggacctctttactttgtcaaaacaaaggcatatttctccaagatgggtctggcttgccatattgccaaaattcatagtgagtcttcagtgagtaaaaatgcacgagagataaaggaatacatagaagaaatatactggggatcaaggaaacgtgtgctcctccttggtcacagcaagggtggtgttgatgcggctgcagccctctccctctactggccacaactcaaagacaaagtcgcaggtttagcattagcccaaagtccatatggaggaagccccgttgcttcagatatcctgcgagaggggcagcttggtgactatgtcaggctgcgtaagatcatggagatcttggtatccaaggtccttaagggtgatctgcaggctctagaagatctgacttatgaaaggcggaaagaattcctgcgacggcacccgctacctcaggatgttcctatcgtttcgttccacacggaggcaagcatcactcccagcgtgctcacagcgctctctcacgttgcacacctggagctcccgattgctggcgatggcaattccactaggatcccagttgtgatgccactttcagccgcgatggcagcatgctcgcagttgctggtggcgaggtatggcgagaagagtgacggtctcgtgacgaggaaagatgctgaggttcctggttcagtggcggtccggccggagcggaagctagactacgcgtggatggtgtattcgtcgctgaaagaagagtctggggatcaggcggacacgtcgcaggtatgcgaagccctgctgactctacttgtcgaggttgcacagaagaggaggcatgagatggcaatgaaagacgagtga

SEQ ID NO: 12586 - DNA, 597 bp, Zea mays
  Peptide Sequence Number=SeqID_54365
atggatccgcatgcgccgctgcatatacaacaacaaacagccaagcccaaacagagtcaggccaggccaggtgaattatcttttgaagtgagggccaggcgcgttagctcgagcccgggttgcggcttccgactggcagagaccgcaacagagcgcagggccggaccacgacgagtcgcggatggagatgggtgtcagctcaggaccaccatctcaaccggtggctccaatgggggcgaagcagctgacccccctagtgcaactgccaacggatggacaaacccgttccggagggggaggagcaggaagccgcgcggcgagacggcggaactccagagggccgcgggcgcttgcactttcggtcgccttttctccatcagccgccacttcatcgtggtggccaaattttcccacgcgcgcgagaacgtcgctctccgggtccagtcgtccacccgcgcgtcgcagtgccacctcaacgctgttcgtggttatccacagggaaaaggaggggcgaccacgacgtggcgaccggcgaccccgagccacagccactgggtcgtcgcaatggatcctaatccaaatgtttcttcacaataa

SEQ ID NO: 12587 - DNA, 324 bp, Zea mays
  Peptide Sequence Number=SeqID_54366
atggctacccatgttgtgaaggacggcggtctggccatggccgtaggagggcagggcaccgtcggcaacatcctactcatgatcgaacgggagatgggcacaaaccgtggagacatcgccaacgagatcatttgcagtgatggctacccctggcgtggaggacggcggtctggccatggctgtaggagggcagggcaccgtcggcgacagcctacgcacagccgaacaggagatgggtgcacaccgtggagacatcgctgccgagatcatttgcagcgatggctacctgtggcgtggaggacggcggtctggccatggccgtag

SEQ ID NO: 12588 - DNA, 150 bp, Zea mays
  Peptide Sequence Number=SeqID_54367
atggctatccgtggcgtggaggatggcggtttggccaagaacggcggtctggccatggccgcaggagggcaaggcaccgtcgtcgacagcctacgcacagtcgaacgggagatggcgctattgaggatgcgaggtgccctaccagtttga

SEQ ID NO: 12589 - DNA, 150 bp, Zea mays
  Peptide Sequence Number=SeqID_54368
atggcgatggtcgcgcggcaatgttgccgggcaaaggggcatggcaacagggcggaacagtggcctaagttcatcctcaacgcgatatttcttaccccggctctacaagtttgctatattgaccaagagcaaaatcctcaagaattctga

SEQ ID NO: 12590 - DNA, 414 bp, Zea mays
  Peptide Sequence Number=SeqID_54369
atgtcctccagggcgtcctccttcgtcgggggcagcggaggcgacctcgcggcggtggccgcgtcggtagccgcgcggcccaggagggcgggctccgggggaggcggcgcgctcgggtgcaagtgcctcttcgggctcggcgtgccggagctcgccgtcatcgccggcgtcgccgcgctcgtgttcgggcccaagcagctccccgagatcggccgcagcatcggcaagaccgtcaagagcttccagcagtgtgatgagtggtgtgggtacagggatgcggctaaggagtttgaaactgaactgaagaaagagcctggggaaggcggcgatcagcccccacctgcaactcccacagctgtaagtggcggggaggagaaggggcttgaggcatctagtagcaaggagagcgcgtga

SEQ ID NO: 12591 - DNA, 267 bp, Zea mays
  Peptide Sequence Number=SeqID_54370
atgacaaccagcgggtcaactgttaagctcagagccataagacatcgtgctaagtccggggacaaggcgaaaccactgcagccttgtctgaacacgctaacggttctgaatgagttcgctgcagttgaaccatctcttccatgcaagcggctagcggatggctccaaacgggttcaactccctcagttcctaaagcagcagccgtcgaaggacaacaaattaattgaattgagccagacccagtgcactgtgcatcttggttcataa

SEQ ID NO: 12592 - DNA, 456 bp, Zea mays
  Peptide Sequence Number=SeqID_54371
atggccgcaagatataccttgctaggtgaggattacgctattgatagattaacttcagagaatcaggcaatgcgtttggaacttcataacatggaaattgctttacagaaatttcaagatttattcagtagtattgggcatgagggaatgaatagtttttcagcaatttctgaaaatcaggacgtacaggatgtgaataatgaacaacatgaaagggttccagccaccacacaaaatgtagatcaccagttggaaactgatccaggcagcatgcaagtacaaagcccagtgcacttcaagtctggtgcaatgccatctccggagctagtagctgcaaatacagaaaaagctgacagccttcttgaacccaatgtagacattggcatgggcagtttatctcctgcacgaccaacagattgtttgaatatggatcttgacacggagagtcagtcctga

SEQ ID NO: 12593 - DNA, 732 bp, Zea mays
  Peptide Sequence Number=SeqID_54372
atgggagacatggtccttctgcccaacggcgcggaggtggccatcatcaacggcgccgccgcggacggcaccgctgggtgggagtccgccaagacgtcggcgtacgcgcccgtcgtctaccgcccggaccactcgccgggggaccggttcgaggagcagaacgcggcgggcgtcgcgcggctgtaccactcctcggcggtgctcctccgcgacggccgcctgctggtgggcggcagcaacccgcacacctactacaacttcagcaacgtgcagttccccaccgacctcagcctggaggccttctcgccggagtacctcgacgcgtccaacgacatgctccggccgaggatcctcgacccgtcccccaccggcgcgccggcgaccgtgggctacggggcgacgatggtgatccggttcctggtcccggcattggcgcggagaaggcgcggcggccgcgccggctgcctcggtgacgtgtcggtgacgatggtggcgccgtccttcacgacgcactcgttcgcgatgaaccagcggctgctgttccttgacgtgaccaagaatgtggcggtgcgcggccgagccgacacgttcagcgcgtcggtgacgatgccggcgacagcggtgctggggccaccggggtactacatgttgttcgtggtcagggaccacatatggagcacggccacggcggcgacgtcgaccggccggacagggaccacatatgaagcatga

SEQ ID NO: 12594 - DNA, 261 bp, Zea mays
  Peptide Sequence Number=SeqID_54373
atgggggaccatttcccccacgcaggaagcctaggggaaacttctgccagtgtcacgatatgtgccacgacatccatccctgccccagctcaacccgcttcctcaggaatcaccaccaggattgagcctttcgcggagcagccagcgccccacagcagggaggcagggagggccacagtggaagatggggcgaccacgcttagttgcggggcaaaggcacgccgtgatgatgaacgcctgccaccgcctagtttacgatag

SEQ ID NO: 12595 - DNA, 492 bp, Zea mays
  Peptide Sequence Number=SeqID_54374
atgatctcattaatcattacgatgcttattgattatgagaagaacaagcatattagagatgaaacccgcgggtttgaaatggcaaaatccagcgagtttgtacatgttgccatctctacgctggctccactgccagcgcaagcaaccattcttctattgaaagaggctgatgtagtacaagctgagccgtcagatagtcgacacggctggaagcgacaaggggagcaagtggatctttgtgctcagtacatgcaagactctctacatagaccagaagaagggcgtgttccagcactcaagcttccttgcagggggagccacgtctgctgcaggaagactggttgtggaagatgggattctcaagaagcgaacggccctaaggagcggagtgtggatctcaccgatgtcatgttgagcccatcagaaggtgaagaagatggcgacttcagcctgaggggcagctactctcagctggtcagcctgaggggttga

SEQ ID NO: 12596 - DNA, 318 bp, Zea mays
  Peptide Sequence Number=SeqID_54375
atggctcctctgcacctccctgccaacacggaccaagcgcacctcctctgccgctgcgcgcgagcaacaccaccaaccaaccaccgccactacctgaccaagatggggcctcagatgcggcgcctccaaggagggcacgacgtcaatggcaccgccgtcgcacgtccaaggatggacagggttcacaccctcgagagcccccatgcagtagtggacatgatgcctcccaatggtgcccccagcagctgggggaacgccagatctggtggccctatcctccaccgccagcccgtcggcaccgacgaggaggcctcctag

SEQ ID NO: 12597 - DNA, 909 bp, Zea mays
  Peptide Sequence Number=SeqID_54376
atggacatgacgaaggggtacagtggattgctagccgtgggatccaaattcgacggcacaaccaaacacacgaaggtggtcgtaggagggggttgtggcatacaaggcaaagtggggtggctcaccgccttcgaggggtggcggttgaggagatgggtggtggtgtgcagggtctcgtcctccaccagcgccaatacgccatcgccatcccggagcgggctcctgtgcatgaacgattgcaagccctgctccacgccagtcgacactcaggcgaagctctctgaggacggcgtgcccccagtcgtcgacgcgacgtcctattggagcttgaccgacgcgctctacgcagaggccgagtaccgcgatcatcaatgcacgaagcacgtggagatcgacctgcacttcgtccgcgagcgtgtcgctgccggtgacgttcgggttctcagcgtccccaccacgctgcagttcgtcgacatcttcaccaaggggcgtacacccaccacagttatggttcgtgagtcacatgttgaaaggatggggagtatacaagatgttccatatgaaattctgaatgttctggaattcaacagcacgagaaagcgacaatcggtggtttgccgtttcccaaatggaagattagttctctattgcaagggtgctgataatgtcgtatatgaacgattggctgatggaaatcatgatatgaaaaagacaagcagagaacatctagagcaatttggttctgctggcttgcgtactctttgtcttgcctatcgggatcttagcagggagcaatacgaaagctggaatgaaaagtttgtacaagcaaagtcatctttacgagatcgtgataagaagctcgatgaggtgaatgggttaccatcttttggttattactatgacgattga

SEQ ID NO: 12598 - DNA, 306 bp, Zea mays
  Peptide Sequence Number=SeqID_54377
atgggtcaacaagaggagcctacttcttcaaagccatatgcttttgcatgcgacgaacacaaaaagatgaaaggaaagaagaaggctccaagctcaagtgaagaagaggaacaagaagaagaagaagaagaagaagatgatgatgatgatgatgatgatgaagatgatcaaccctcaacatcatcctccaaggacgaagatacagtccgatgcgtcggaaaggtcgaggatcttctctttaacattgataggaaaaaagcaaagaaagagaggatgctttgtatgcggggagaagggccactttag

SEQ ID NO: 12599 - DNA, 1038 bp, Zea mays
  Peptide Sequence Number=SeqID_54378
atggcaggcggcggctgggttacaagtttagttaggaagggcgctcagaaaataactctcagcattggtgacggtgctaatgatgtgagtatgattcaagctgctcatgttgggattggcatcagtggccaagaaggaatgcaagctgttatggctagcgactttgccattgcccagtttcgttttcttactgatttgcttcttgtacatggacggtggtcttacttgagactctgcaaggttatcacatacttcttctacaagaatctgacatttacactaactcagttctggttcactttccaaactggcttttctggtcagcggttttatgatgactggtttcagtctctatataatgttatcttcacggcactacctgtaattatagttggattgtttgataaggatgttagcgcgtcactgtcaaaaaaatacccacagctttacaaggaaggaatcaggaattcattcttcaagtggagagtgattgcagtgtggggtttctttgctttctatcagtcaatagtgttcttctacttcactgcagctgcaagtcagcatggtcacggttcatctggcaagattcttggcctatgggatgttagcactatggcctttacttgtgtcgtggaaaatgagtattttgtgatttatgttctgatgagcacctttttcttctatatgacaatcttgcttgttccgatcattgccctgtttggtgatttcctatatttatcgattcaaaggtggctattcccctacgactaccaaataattcaggagcagcacaaggacgagccccacgtgtacagcagggtgcagctacccgagaccagccacctaagcccacaggaagcgagaagctacatgatgtcgatgctccctcgggagtcatcaaagcacactggctttgccttcgactccccaggatacgagtcgttcttcgcctcgcagcaaggcgtcggcgtgccacacaagccgtgggatgtagcccggagagcaagcatgaagcagcaacgagcaggaaaatcctaa

SEQ ID NO: 12600 - DNA, 486 bp, Zea mays
  Peptide Sequence Number=SeqID_54379
atggcggatcgagccgggaaggtcgcggcagcgacggattcagcgaaggcgatgaagggggagggcgacggggcgggtccagccggacaggggcttgcactggacctggcaggattggttgacgccgacgacaggagaggcgtgaagagagaagcgctgctgtgcggctcgggcgagggcagggggcccgttgatggtgccgccgatcctagagctggccagccaaaggggagaggaaagggagccacgaccaggaagagaggcggtgcgggtcgtggtgaccaggggtcgggcggcgcttctgcggccatggggaagggaggtgggtccctggggcgacggatgccatggccagcagggagaggagctcgatggaggccggcgaaggacgcaacggagagggagtcgacgtccagatccacagccaagcatgacgtccgcgcccagccccgcggcggcgtctgcgccaagggccagggcggctag

SEQ ID NO: 12601 - DNA, 321 bp, Zea mays
  Peptide Sequence Number=SeqID_54380
atgagggcattgacgggcctcaagccaggggcatccgtgcaggagggggtgatggaggagctcccccaggcagagaaagaggtggatgggggctgtgaagatggcaatcatggatgcagccttcgtaatacagaatacattgttggtgttgtcatattcaccgggcacgagacaaaagttatgatgaattccatgaatgttccctccaaaagaagtacattggagaaaaagctagacaagcttatccttgccctttttgcaaccctcttcacaatgtgtgttattggtgccattggaagaagaatcagattggtgggataa

SEQ ID NO: 12602 - DNA, 156 bp, Zea mays
  Peptide Sequence Number=SeqID_54381
atgctcaccaatgccaactatgagcgaagcttggttatgaagtacggtgacgacaacttccacgaggatcggcaggcgatggaggccctccttgttgctatcccgtcagagatgatgtctgtcctcacgggcaaggagactaccaagaacacctag

SEQ ID NO: 12603 - DNA, 249 bp, Zea mays
  Peptide Sequence Number=SeqID_54382
atgggtcggcgcgagacggagcgcgaaggggggaggcagccgaagggagacaggcgtgagaggtggaatcccgcggccttcatggtaatgatggcgcctcctgttgacgtggtcagtccgcgccctagtttgggcgaggtggaggctcctccgaggtcgaggtcgagtctgtcttccaaggtcgaggtcgagtctgagcccccgggtcggacgaggcgtagaccgtcggctgatgtgaaagtcgcctag

SEQ ID NO: 12604 - DNA, 120 bp, Zea mays
  Peptide Sequence Number=SeqID_54383
atgcggcttcatacccttagagatgatgtggttttataccctcagaggtgcttgttgctcatcaaggggagtgggatgttgcagcacatccaccttcactctcataataacgctgcctag

SEQ ID NO: 12605 - DNA, 195 bp, Zea mays
  Peptide Sequence Number=SeqID_54384
atgacgcgtctatctgccctgggcccacattgtaacgagacgaagggcgcacgcctattatgtgtcattgacgattggggcccgcacgtcggcgcaaggctacagcggcaacggtcaagcgggccgtgcggggaagagatgaattgggccgcgaattcggttttggcccagaacggtccgggtgttcacatgtga

SEQ ID NO: 12606 - DNA, 291 bp, Zea mays
  Peptide Sequence Number=SeqID_54385
atggtgaatacggatgaccactccttaccggcgattgagcgacgcagggatatggcgacgatgtccggcggctccacggcgtttccgccaactctggcgaacaactacggggcgcacggtcgacgattcggcacgcaggcaccacggatggtcacgcgcccgctcggtgtagacccccgacctccctacaacttccggcgatggcggatggacggccgtgcacggcggcgcaatcctttgcctaagaagatagcgcgctggtggtatggctcgggtctagcgcatggatag

SEQ ID NO: 12607 - DNA, 120 bp, Zea mays
  Peptide Sequence Number=SeqID_54386
atggagaaaaagattcccaacttccttgactggcgatctggaagcaattgcgcccacaaggataaccgggtagcacataagctccggaaatgcccgcagaagaggaagctcccagagtga

SEQ ID NO: 12608 - DNA, 843 bp, Zea mays
  Peptide Sequence Number=SeqID_54387
atgacacgcgaaatagcacgtgcgacacgcacaaacgacgtgtgcgggcagcacgatgacatgcgcgagcagcgcgcgacagcgggggtagacgagggtagtcaggggaagacagtctcacctttgcgacaaacgacgacgacgtggaggaagcacgactcccagctcgacagtgagaaggcgaaggcgctggtgttcaatggcgtgcgcgcgggagactccccgcacgtacgcgacgcgactgcgcgcaggatcgagggaaacgacgcggcgggcggggtcattggctgcactggcaggggagcacgccggggcagaggcgccacaccatgggggctagacgcgctgcgccggtggccggagctaggcaagaacgggcgagaggagcgcattgggcgagatcgtggcggcggtttccgtttcctgtgcgcgcatgaacgagcaggagccggatcgagtggagtcaatttttttgaagagggaacatatgagaggtgggcccagcatatagagcaaggaccggtatccaggtcagagacgcggtcaggtgcggcggcggctgggcgttgcccacgcgtggccgctggggcgcgcgactcgacagcctggtgggccaaggcgcagcgcgcggccgggccgcggaggcaggccgtgggggcacggggtggaccgaggcacgcgctgggctggggcaggggcgcgatgggccgcggcacgcggaaaggccgcggtgggccggggaaagcgggctacagggaggtggagctgggccgtgcatgcgggttcgccaggggttgtgcggttcacagagtggagtttgaatatgggtatgaggatgggtaa

SEQ ID NO: 12609 - DNA, 162 bp, Zea mays
  Peptide Sequence Number=SeqID_54388
atggtcctggtgacgccggtgggaagtcagggtgactctggtgtggctcaacgagcaccagggcttatgggctgcgacgacactggtggcatgaagaaggtgttcgggaagctaggagtggtaatacaagatgaaaatatgtctaggaagagaacattttaa

SEQ ID NO: 12610 - DNA, 1485 bp, Zea mays
  Peptide Sequence Number=SeqID_54389
atgctagaggcgaagccgccgtcgccgggctccggcgcggccggggcggcggcgcacatccacggtcaccggcggtgggcggcgccgctgctggcctcggttctgctctcgtcgctcctcatcaccgcgtcgctcttcttttcctcctcccgcgcgctgctactctccttctcgccgctcccctccgcggcctccgccgagcctctcttcgtcgaggccaagctccgccagcagatgcgggccgaggagcgccccacgcggggcgccgtgcccaggatcgcctacctcatctccggctccgcgggggacggagccgcgctgcgccggacgctcagggcgctctaccacccggtaaacacatacgtcgtgcacctcgacctcgaggcccccgccgccgagcgcgccgaactcgcctctgccatccacgcggaccccgtctacgctaggttccgcaacgtcaaggtcgtcacacgggccaacttggtcacctaccgtggcccgaccatggtggccaacacgctgcacgcggctgccatcctgctgcgcgagggcggtaattgggactggttcatcaacctctccgcctccgactatccgctcgtcacccaggacggtttgggtcactcactggacgatactagtggagctggggatttgaaatttgcgtgcagtgtctgtctgcaagtgttcgccaaaaatgcgattttgtacgcgggcttggatatgccaattggggaatggggtttactaccgttatggattcttctacttgttcatgatctattgcatgtgctttctgagttgcccaggcagcttaacttcattgagcataccagtgacatcggatggaaggagtaccagagggcgaagccagtgatcatcgaccctgggctatacagcctgcagaagtctgacgttttctggataacagagaaaaggagtgtcccaactgcattcaagctcttcaccggctcagcatggatgatgcttactcatcagttcattgaatattgtatatggggatgggacaatctcccaaggacagtcctgatgtattacgcaaattttctttcttcaccagagggttacttccacactgtcatctgcaatgtccccgagttccgcaacaccacagtcaaccatgatctacatttcatttcttgggacaacccaccaaagcaacaccctcattatctcacactcgctgacttcgatggtatggttaacagcaacgcaccctttgcaaggaagtttggaagagaggatcctgtgctggacaagattgaccaggaactgttggcccgccgacctgatggatttgtgcctggtggatggacagacctactgaacacaactgagaaagggaaacccttcacggttgagcgcgtgcaagatctccgcccaggtcctggtgtggacagattaaagaaactcgtcacaggattgctcacccaagaaggttttgatgacaagcattgcctgtga

SEQ ID NO: 12611 - DNA, 432 bp, Zea mays
  Peptide Sequence Number=SeqID_54390
atggcactgaaccttacctcggttcgcggtgagaaaccctatgcccacgaggtggcgtggatccgcggcggtcttccaactatggcgagaaattgcggtgtcgctggcccgcaatcacccacgggaagagcacgcacaccacccgtgcgaccacctgaagtgcccaggcccaaatccgagacctcgtcggtgctgataacctgggtcgacggcagcggcaaagaggttgggtggacaaccgcggcggctgggctgttctcagtggcatgggacgcgcgagaattgtgcggtaggacggaggggggggtcgcgacctatctttgtattcacaggagaaagtccgagggagagaatcgatcggcgtgggatgcggagttcggcggcggaagagtttaccgggcgagcggcaatggcggcttggttcgttactga

SEQ ID NO: 12612 - DNA, 231 bp, Zea mays
  Peptide Sequence Number=SeqID_54391
atggaggcatctgttatggctcctatattctcgctcagggattttggtatgggcatcgtcccacggattttccctgagggcaaagggattttggtacgggcatcgtcccatgactttttcctgagggctgaggttgccttttgtgcaatctatgctcaggtaaagaagaaggagaacggtgtcgaggcggatctcttggagttccaggacttcgacgagttcgaggattag

SEQ ID NO: 12613 - DNA, 474 bp, Zea mays
  Peptide Sequence Number=SeqID_54392
atggctgctcccgaagcgcccgcatgctacgtcgggatcgcgcggcagtccgccgccttccgccttatgaaacaaatgggatgggaagaaggtgaaggccttggcaaagacaagcaaggcataaagggtcatgttagggtgaaaaacaagcaggacacactaggtgttggtgtagatagccctcataacaaatgggtatacgataccacccaatttgacaacatattgaagaaactgaaagtgcaatcagctaatcctgttcaagaagaggttgcagctgtagaaagtgattcacctgacatcacacccaagaaagacaaatcagcaaaacatgaagttactaaagttactcgacctcaaggaagatacaagaaaagagagagggggaaaagtgtgaactcttattcagcaacagatcttcaaggcatactcacgactgggggcttctgtggtttgctgggtggcagtgggtga

SEQ ID NO: 12614 - DNA, 168 bp, Zea mays
  Peptide Sequence Number=SeqID_54393
atggccctcgccgggcggccgaagcgcatgcggacgcgggagggccctcagggacagccggacagcgacacgggttcggggcagtacagcccggatagcgacacccaaactggtgtttcagaagcggttccccctaaatactccccctataccccactaccaccataa

SEQ ID NO: 12615 - DNA, 861 bp, Zea mays
  Peptide Sequence Number=SeqID_54394
atggcagccgcggctgtgaccctgccctcctcgggcacgcccttcgccgtcgccacaaccgcctcttcctcatccgcccgccgctgcctgctcctgccctccgcggctccccgccgagctctccgcgtcgtggcctccgccgctaccgaggcgccgcccaagcccacgcagccgccgacatcgccctccggcatcgtgctcgtcgacccatccgaagcccagaaggtgcaccggctcaaggccgtctacgaccagaaggtcgtcccgctcatcaccgaggagttcggctacaccaatgtccaccaggtgctcgaccgtcgaccctgctcctcctcgccgcggaaaggcccgccgttcctccttgtagctaggctaatttgctggcgtggtaggattttgacttttgatgagtcgtgcggttgtggccccgtcaagaccaaggccaggaagtccgtggccagcttcaagatccgtgagggaaacaccatcggtatcgcagtcaccctccgcggcaggataatgtacaacttcctggataggctcatcaaccttgggctccctaggaccatggacttcctgggtgtcaaccccaacagcttcgacgggcacggcaactacagccttggcctccgtgaccagggcgtgttcccggagatcccgtacgaggtgggcgggaagaagaacggcatggacgtgtccatcgtcaccagcgccaagacggacaacgaggcgttcaggctgctggtcctcctcggcatgccattctcggagaacatcaagaccgacgtggtgatccggaagaagaggttgaagcgccaccacttcctgagcaagggcaaggggaagggaggacgacggtga

SEQ ID NO: 12616 - DNA, 780 bp, Zea mays
  Peptide Sequence Number=SeqID_54395
atgaaggctcggcggccgtatggaatccgattggacagaaggtacggtacggcgggtgtcctcggcgtgggtagaatgggaaagaaagaggacgccaaggactgcagatcgtacagcctggtggtgcggacggagaaggtcctggattggagccaaagctacaagggtctggaacaaccccatctgctctctgcctctcttttgttcgacgttgggatggtggttttggtttcgcccgcgagaactctctcggctgccgctgtcgtcccaaacgtgcgcgtggtcgtcctcgatcttcccataccatcccgacacgatgtcgctggcgcgaagcccgataccgccacgccccccgcaagtgccttcggcggcgaagggggtcttcatgtgtcgcatcttccccttcctcctcacgacgaacgtcttcatcagagtttatgtattttccaagacctacaaaagagactaggaaaacaaaatgctctgactactgtcgctgcagcattgccatccccagcaagtacatctgccaaggctccagatcctgctcctgcacctgcgcccaaatcgggtctcccacctctttctgaagatgagcattggaatctgtacaaatggattctggaagaggagcggaagatcaaaccacgcaacgccactgagaagaagatcgttgaggagaactctctcggttgctttgcttgcttgccacagccgttagatttttatccccaccattgctcctttgcttgcttgccctctctctctctctccgagtag

SEQ ID NO: 12617 - DNA, 2028 bp, Zea mays
  Peptide Sequence Number=SeqID_54396
atgacagcccagcagcaccggcaccccaagcgccgctgcgtcgccctctccctttctccgtccctcgcgcgcatccccggcgcccccacgccgccgctcgactcgctggccgacgagcttctcttccttgtcctggaccgcgtggcccaggccgacccgcgggcgctcaagtccttcgcgctggcctcccgcgcctgccacgccgcggagtccagccaccgccggacgctccgcccgctccgcgcggacctcctgcccgccgcgctggcgcggtacccgaccgcgacccgcctcgacctcaccctctgcgcgcgcgtccccgacgccgccctcgcctccgccgccgtctccgggtcctcctccgccctccgcgccgtcgacctctcctgctcccgcgggttcagcgccgcgggcgtctccgagctcgccgtcgcctgcccgggcctcgtcgacctcgacctctccaatggggtcgacctcggggacgccgcggcggccgaggtggcgcgggccagggcgctccggaggctctcgctggcccgctggaagccgctcaccgacatgggcctcggatgcgtcgccgtcgggtgcacggagctgagggagctctcgctcaagtggtgccttgggctcacggatctggggatccagctcctcgccctcaagtgcaggaagctcaccagcctggatctctcctacaccatgatcacaaaggctagcttgcctcccatcatgaagctacccagtcttcaagagttgacactggtggggtgtattgcgatcgatgatgatgctcttggtagtcttgagagagaatgcagtaaatcactacaggtgcttcatatgtctcagtgtcagaatatcacaggtgtgggagtttcatccatcctgaagtcggtacccaatctattggaactggaactttcatactgctgtcctgtcactccttctatggtgagaagcttccaaaagcttgctaaacttcagaccctgaagctggaaggctccaaattcatggccgatggactaaaagccattggaacctcttgtgcttctttaagggaactaagtctgagcaagtcatctggagtgaccgacacagaactctcttttgctgtgtcaaggctaaagaacctgctgaagctggacattacttgttgtcgcaatatcactgatgtttcactagcggccataactagttcatgctcttctctcatctctatgaggatggagtcttgtagccgtgtttccagtggagcactccaactgatcgggaagcactgttctcgcttggaagagttggaccttactgacagtgatttggatgacgaaggattgaaagctcttgccagatgcagcgaactttcgagtctaaaaattggtatttgcttgaagataagtgatgaaggtcttacccacatcggaaggtcttgcccaaaactccgcgagattgatttgtacaggtgtggaggccttagcgatgatggaattattcaaattgcgcagagttgtccgatgctagagtctatcaacctatcatactgcacagaaataacagaccgctcactgatttcactatcaaaatgctcaaagctgaatactctggagattcgtggctgccccagggtttcatccatcgggctctcagaaacagcgatggggtgcaggctgctttccaagcttgatattaagaaatgctttgggattaatgatgctggaatgctttacctttcccagttctctcatagcctccgtcagataaacttgtcatactgttcagtcaccgatattgggcttctttccctttcttgcatatccggcctgcagaacatgacgatcgtccatgtagcgggtataacgcctaatggcttggcagctactcttatggtttgtggtggtttgacgaaagtgaagcttcatgaagcattcagatccatgatgcttcctcacatgataaaaaatgttgaggcacgcggctgtgttttccaatggattgataaaccattcaagtatattgtctatgattga

SEQ ID NO: 12618 - DNA, 450 bp, Zea mays
  Peptide Sequence Number=SeqID_54397
atgccaagagggagatcacgaccggcgaaaagaccgcaagctcggggaggactctctcaagggagtccggcaacaaaaaaggaggaatcctcttcctccatcaagtcacatcgaagaggtgacaagaagaagaagatgaagaaggtggtctactacgagaccaactcttcatcaccctccgcatcgagctccgagtcatccacaacttctaagcgccatgagcgtaagaagtatagtgtaaaaggttcacactcagccaataaaaagatcaagttttggattcaacaaaggagcaaagaggcaaccgaaggcacctctggtctggaggcaccggactatccggtgtacaccggacagtgtccggtgcgccaccggacagtgtccggtgcaccagaggactccaacttgaactcgccaccttcgggattttctcaggccggcgcgctataa

SEQ ID NO: 12619 - DNA, 228 bp, Zea mays
  Peptide Sequence Number=SeqID_54398
atggcgaacggcatgggcacggttggcggggtgctgcgtgggcgagctttacggactccaggacagacggaggtgctgctgcacgcgcgggcagggatttcgggcgtggtcgtcggtgagcgttctgacggtggggtacaagctccggcgaggcacgacggggagctcatgggactggaagaggagaagcaggacaacttcggcagaggatacggctgggttttatag

SEQ ID NO: 12620 - DNA, 288 bp, Zea mays
  Peptide Sequence Number=SeqID_54399
atggcgaggggaagtagtgggtcggcagccggatccatgcggcggtccacacaggagagcgccaaacctattgggcgcactggggcagctggacaaaggagagaagcggccccggcaagggaagatgctagcggggatttgttgggattcctgccgacgctcgtgaacacagagaagatggagtccgaccagcggaattcggccagcaccgagttttacgacgagcgaatccgcgcaaaaatcgcgcgcttattgcgcttttgccgcgggcgccgcgcggtctgttga

SEQ ID NO: 12621 - DNA, 450 bp, Zea mays
  Peptide Sequence Number=SeqID_54400
atgggcaagagcaagaaaggcggaagctcctcgcaccattccggcgacaagcggaagcgcgagccgactcctccctcggaggacttcggtgattccgagtactcggaggaggaattctcctccgggttcgagggatcgccggtccctgcctctcccccggcatcgtctgataattcagatgattcccaggggattactgcagaagtgtggacctacatccgggccgtcgagcgcgctgggctcgagggctcggatgagtcggaggtctccttggatgaggaggactcctctgactcgtccaaggaggggagcgacagtgacgatggcggcgagggcgacggcggcgatgggggcgacagcgacggcgatggcgacgacagcaggggcgacgacggcaacggcggcggcaacggcaagggcggcagcggcagcggcaaggccagtggctag

SEQ ID NO: 12622 - DNA, 717 bp, Zea mays
  Peptide Sequence Number=SeqID_54401
atggcggggcgctatgacggcaaccccttcgaggaggaagacgtgaaccctttctcgcaacaaacgcgcggcaaggctggcgggcaatccaactttggcggtggcgcgttttatatgcctaacccccaaaacgtgcctccgacatccaattcacgcctttcgccgctccctcctgaaccggcagacttcagtgctacagtggatataccccttgactcgtcaaaggacctgaagaaaagagagaaggagctgcaagcaagggaagcggaattaaacaagagggagaaggaactaaaacggagagaggaggctgcagcaagagcacacacgcctgcacgcagttttaatgctaaccagggtctaattgctgtcttgaagcaagtgtactgtgctggcattgtcattgaggagaaaaattggcctccttttatgccactcatccatcatgatatcatcaatgagataccgagtcaccttcaaagaatgcaatatgttgcatttgcctcgtttcttgggttggtttgctgcctcttctggaatgtcatagcagttactacagcttggatcaagggggaaggtgttaagatctggttattggcaataatttacttcatatctggtgttcctggtgcatatgttttgtggtatcgtcctctgtataatgcaatgaggactgatagtgcattgaagtttggattgttcttcttgctttacttg

SEQ ID NO: 12623 - DNA, 1125 bp, Zea mays
  Peptide Sequence Number=SeqID_54402
atggacaagtacgagcccgttcgcgagatcggggcgggcaacttcggggtggccaagctgatgaggaacaaggacacgagggagctggtggccatgaagttcatagagcgaggaaacaggatcgacgagaacgtgttccgcgagatcgtgaaccaccgctccctccgccaccccaacatcatccggttcaaggaggtggtgctgactcccacgcaccttgcgatcgtgatggagtacgctgcgggcggggagctgttcgagcgcatctgcgacgccgggcggttccacgaggacgaggcgcgctacttcttccagcagctggtttgcggcgtcagcttctgccacgccatgaacatctgccaccgggacctcaagctggagaacacgctgctggacggcagcccggcgccgcgcctcaagatctgcgacttcggctactccaagtcctcggtgctgcactcgcgaccgaagtcaacggtgggcacgccggcgtacatcgcgcccgaggtgctgtcgcggcgagagtacgacgggaagcacgccgacgtctggtcgtgcggagtcacgctctacgtcatgctggtgggggcgtacccgttcgaggatccaaaggacccaaagaacttcaggaagacaatacagcgcatcatgtcggttcagtacaagatccccgagtacgtgcacgtctcccacaactgccgccacctcctctcccgcatcttcgtccagaacccgtacaagaggatcaccatgagcgagatcaagacccacccctggtacctcaagaacctgccgagggagctcaaggaggaggcgcaggcagcctactactacagccgccagggagacagcagcagcagcagcagcaataatgcgacagcagcacccgcctactcgtcgcagagcgtggaggagatcttgaggatcgtgcaggaggcgcagacggtgcccaagccaccgtccaggcccgacgaagcagagcaacaggaagaagaagacgaccatgacgatgacgacgactacgacagaacggtgcggcagcaccggcgcaaggagaacatcatcatcagagtcgccatcgtcgtcgtcgtcatcgtcggtttcacctgcatcctccgggtctga

SEQ ID NO: 12624 - DNA, 318 bp, Zea mays
  Peptide Sequence Number=SeqID_54403
atggggcagtgggacgcgctagtggacgccgcgctcgcgaggctggaggccaggagcctgctacgtgccacgcgccccatcgcgctcgcggcgccgaccgcggcgccgaggaccttcgacggcccggggccttgggaccatgccgccgtcgagatccgcctcgaccgcgacaccctgcaccagtggctggccgaagggaatgactacatgggcctcagctcgcatccggcagtccgtgaggctgctgtgaaggtgtgccgccaatgctgcgctttgggctgtggccactacttgatatatcaattgactttgacttag

SEQ ID NO: 12625 - DNA, 1452 bp, Zea mays
  Peptide Sequence Number=SeqID_54404
atggagccgcagccaccgctccccctcgccaacggccacggcaacagcatcgtcgaccgcgacgtctggctggcctgcgccgccccgctctcccgcctccccaccgtcggcgacgatgtctactactttcccgatggccacgccgagcagtgccccgcgcacctgccagcgccgctccccgcgccgcacttcttcccctgcaccgtcaccgacatcagcctcggcgcggacgacaagaccgacgaggtgttcgccaaaatctccctcaggccaggcctcgccgccgcttctcgtccggaccccggcagcagcaacagcccgccgcgggagcccctcagctactccatcaaggagctctcgcagagcgacgccaacggcggtggatccttctgcgtcccgcgctactgcggggaccacgtatggcccaaggtcgacttcgaggccgacccgcccatgcagaacctcgtcatgcacgacaccacgggcaaacagtgggagttccgccacgtctaccgcgccaagcagccccgacacgtgctcaccaccggctggagcaagttcgtcaacgccaagctgctcgtcgcgggggacatcatcgtcttcatgcgccgccccaacggcgacctcatcgtcggcctgcgccgcatgcccaggtacgcgggcaccttgcaccgcccggggaccgggggcgacgcccaagacccggatcagccgcccccgcccccgccccgcaacgcgctcgcgcgggtgccgcccaaggacgtcatggaggccgcgcgcctcgccgccgagggcaggcccttcacggtcacctactacccgaggaaggccgccggagagttcgtcgtcccgcgcaacgaggtggaaggcgtgctcgacaccctctgggagccaggctcgcacgtactcatgcagttcgcggaggccgaggacacacggcgcaccatgtgggccgacggccacgtcaaggcgatccaccagaaaatctggcgggcgctcgagatcggcttcgtacaagtgaatgtttgtgctgttgcctccatctatgtttatcatattgatttgatcgactgggatgttgcctcctctgcaatttcagcacaactgggcagatttgtgaatgcttggcaagtccagcgtattgcctacccttctatttgcggcggccttggagatttatgttacccactgccactgatggagtcggaaagccaggtcatggccatgatattggagcagatgccaccgcgtacaagtgcttctcctcccaacaacccgccgcgtccaggtccaggccaaaaagtgaacaccataatgctcttcggcgccacaatccacgttgtgcagagtgataccgacgatgatggttatgaacagctgaatcgagatcctcctcctaatgctgctggtggtggtgatgatatggatcatgacagtgctgaaaatatataa

SEQ ID NO: 12626 - DNA, 210 bp, Zea mays
  Peptide Sequence Number=SeqID_54405
atgtcctcggagcggcaggagacggacagaggtggtcagtccacgcgtgccaacaggaaccaaggtgttgcgacgtcgacgacggtgctccagtcgtcctttggctcgagaaagagacgccaagacacgctccccgtcgtctccactattgagcttccaactaaaaacgtcgcgggcctcgttcccttcgatacacggtggcggccgtga

SEQ ID NO: 12627 - DNA, 732 bp, Zea mays
  Peptide Sequence Number=SeqID_54406
atggtacgccctaaccctctggtagtcgggcggtccctgggtatggtggcccttgtggaatctgagaagtgcaacaaggctgctactggaatgagtgtagtggtgattgtatctcacgaagtactaagaagtgttggttcattagcatttaaaggtgtatctaacaaaaagttttatttagtagattttactaaagagaatgacgatctagatgcatgtttacttgctaagactaatatgggctggctctggcatcgccatctagcacttgttgggatgaagaaccttcataagcttctaaagggagaacatgtgttaggtctaaccaatgtctgttctgagaaagatagaccttgtgcagcgtgtcaagcaggaaaacatgtgggaacaactcatccaagcaagaacatgatgacgaaatcaagaccattagagcttcctcatatggatctcttcggacccattgcttatcttagcatcgggggaagtaagtatggtcttgttgttgttgatgactattcccgcttcacttgggtattctttttgcaggataaatctgaaacccaagaaaccctcaagcgcttcttaatacgggctcaaaatgagtttgagctaaaagtgaagaagataaggagcgacaatggatctaagtttaagaatcttcaagtggaggaatatcttgaggaggaaggcatcaagcatgagttctccgctccctacactccacaataa

SEQ ID NO: 12628 - DNA, 4164 bp, Zea mays
  Peptide Sequence Number=SeqID_54407
atgccggagccatcaaccaccgagggtcggcgaatccagggagagctcaagaatctcctggaaggcgctgcgacccgacgggccgagagcactgcctcccgaaggcagggatatccctcggaacctcatgccgcgactttccgattcatgcgggaagcctcggtctacaccgggcacacgcgtaacaccgcgcctgcggccctgggccacctcggcaacgagcaccatcgacgcgaccgtcgggcccacctcgacgaaaggccgggggagtcgctccgggactacatccggcgattctcgaagcagcgcaccgagctgcccaacatcaccgactcggatgtcatcggcgcgttcctcgccggcaccacttgccgcgacctggtgagcaagctgggtcgcaagacccccaccagggcgagcgagctgatggacatcgccaccaagttcgcctctggccaggaggcggtcgaggctatcttccgaaaggacaagcagccccagggccatccatcggaagaggctcccgaggcgtctgctccccgcggcgccaagaagaaaggcaagaagaagtcgcaatcgaaacgcgacgccgctgacgtggaccttgtcgccgccaccgagtacaagaaccctcggaagccccccggaggtgctaacctcttcgacaagatgctcaaggagccgtgcccctaccatcaggggcccgtcaagcacaccctcgaggagtgcgttatgcttcggcgtcacttccacagggccgggccacccgccgagggtggcagggcccgtgacgacgacaagaacgaagatcaccaagcaggagaattccccgaggtccgcgactgcttcatgatctacagtgggcatgcggcaaacgcctcggctcggcaccgcaagcaagagcgccgggaggtatgctcgatgaaggtggcggcgccagtctacctagactggtccgacaagcccatcaccttcgaccaggccgaccaccccgaccacgtgccgagcccagggaaatacccgctcgtcgtcgaccccgtcgtcggcaacgtcaggctcaccaaggtcctgatggatgggggcagctgcctcaacatcatctacgccgagaccctcaagctcctgcgcgtcgatctgtcctccgtccgagcaggcgctgcgcccttccacgggatcatccctgggaagcgcgtccagcccctcggacgactcgacctccccgtctgcttcgggacgccctccaacttccgaagggagaccctgacgttcgaggtggtcggggttccgaggaacctaccatgccggtatcaccagatccggatgaaagagtccgaccagctcgcgacttctttcatcacgccgttcggcatgtactgctatgtcaccatgcccatcggtttgaggaatgcgggcgcgacgtaccagcggtgcatgaaccatgtgttcggcgaacacatcggtcgcatagtcgaggcctacgtcgatgacatcgtagtcaagacaaggaaggcttccgccctcctctccgaccttgaagcgacattccgatgtctcaaggcgaaaggagtcaagctcaatcctgagaagtgtgtcttcggggtgccccgaggcatgctcctggggttcatcgtctccgagcgaggcatcgaagccaacccggagaagatcgcggccatcaccagcatgggacccatcaaggacttaaaaggcgtacagagggtcatgggatgcctcgcggccctgagccgcttcatctcacgcctcggcgaaagaggtctgcctctgtaccgcctcttaaggaaggtcgagtgtttcgcttggacccctgaggccgaggaagccctcgggaacctgaaggcgctccttaccaaggcgcctgtcttggtgcccccagctgatggagaagccctcttgctctacgtcgccgcgaccactcaggtggttagcgccgcgattgtggtcgagaggcaagaggaagggcatgcactgcccgttcagaggccggtctacttcgtcagcgaagtgctgtccgagaccaagatccgctacccacaagttcagaaactgctgtatgctgtgatcctgacgaggcggaagttacgacactacttcgagtctcatccggtaactatggtgtcatccttccccctgggggagatcatccagtgccgagaggcctcgggcaggatcgcaaagtgggcggtggaaatcatgggcgaaacaatctcgttcgcccctcggaaggccatcaagtcccaggtgttggcggacttcgtggccgaatgggtcgacacccagctgccgacggctccgatccaaccggagctcaagaccatgtttttcgacgggtcgctgatgaagacaggagccggcgcgggcctgctcttcatctcgccacttggaaagcacctgcgctacgtgctgcgcctccattttccggcgtccaacaatgtggccgagtacgaagctctggtcaacgggttgcggatcgccatcgagctaggggtcagacgcctagacgcccgcggtgattcgcagctcgtcatcaaccaagtcatgaagaactcgcactgtcgcgacccgaagatggaggcctactgcgatgaggttcggcgcctggaggacaagttcttctgcctcgagctcaaccacatcgctcggcgcttcaacgagactgtagacgagctggctaaaatagcctcggggcgaacgacggtccccccggacgtcttctcccgggatctgcatcgaccctctgtcaagatcgacgacgcgcccgagcccgaggcgccctcggctcggcccgaggcaccctcggctcggcccgaggtaccctcggctcagcccgaggtaccctcggcccccgagggagaggcactaggcgtcgaagaagagcagaacggggccacgcctgatcgagattggcaggccccgtacctgcaatatctccatcgaggagagctacccctcgaccaagtcgaggctcggcgggtagcgcgacgcgccaagtcgttcgtcttgctgggcgacgaagaggagctctaccatcgcagccccttgggcatcctccagcgatgcatctccatcgccgaaggtcgggaactgctgcaagaaatacactcgggggcttgcggccatcacgcagcgccccgagcccttgtcgggaatgctttccggcaaggcttctactggccgacggcggtggttgacgccactagaattgtccgcacctgcgaagggtgccaattctatgcgaagcagacccacctgcccgctcaggctctgcagacaatacccatcacctggcccttcgctgtatggggtctggacctcgtcggtcccttgcagaaggcgcccgggggctacacgcacctgctggtcgccatcgacaaattctccaagtggatcgaggtccgacctctgaacagcatcaggtccgagcaggcggtggcgttcttcaccaacatcatccatcgcttcggggtcccaaactccatcatcaccgacaacggtacccagttcaccggcaaaaaattcttggatttttgcgaggatcaccatatccgggtggactgggccgccgtggctcatcccatgtcgaatgggcaagtagagcgtgccaacggcatgattctacaagggctcaagcctcggatctacaacgacctcaacaagttcggcaagcggtggatgaaggaactcccctcggtggtctggagcctaaggacgacgccgagtcgtgccacgggtttcacgccgtttttcctggtctacggggctgaagctatcttgcccaccgacctggaatacggctccccgaggacgagggcctacaccgatcaaagcaaccaagctagccgagaagaatcgctggaccagctggaagaggctcgggacagggccttactacactcggcgcggtaccagcagtccctgcgacactaccacgcccgaggggtccggtcccgagacctccaggtgggcgatctggtgcttcggctgcggcaagacgcccgagggaggcacaagctcacgcccccctgggaagggccgttcgtcatcgccaaagttctgaagcccggaacatacaagctggccaacaatcaaggcgagatcttcggcaacgcttggaacatcaaacagctacgtcgcttctacccttaa

SEQ ID NO: 12629 - DNA, 207 bp, Zea mays
  Peptide Sequence Number=SeqID_54408
atggaaaatgcctatatctctaacacgaagaaggaagaggacatgatggatctaaacatggagccaccggaggaagaaattatcaatgagattgatttaaacatggagccggtttcaggcttattcgatttgaacatggagccagttgcagaagctaactatgatgggcttgagcaaaaactttatgccaccaaatacatggtgtga

SEQ ID NO: 12630 - DNA, 327 bp, Zea mays
  Peptide Sequence Number=SeqID_54409
atggcccaccaaatgtggcatttctgtgtttatccgctatccatccgcgcccaagtcacgggcaacggtgcggtaggtacccgtcgacccccgcgctatggctgtcggaagcgaagctttcacgctacagcggtgcagctggaggaccaacatgcggggaaggaggaccttcgcgccatgaccgtgggggcagagcttccacaccgcggcggcacaggtagcctcggccacgtcatccgcgtccgtgttcgcgtgctcgagccagcagtggaggccgcctttgttgccggggaagaagctcgaggcaaagcctacgacgatgactag

SEQ ID NO: 12631 - DNA, 180 bp, Zea mays
  Peptide Sequence Number=SeqID_54410
atgtcgctgtcagctggagaggccacagactcgtcatccgactccgatgaggctgcatcctgtcatccccgactgtttactgctgtactggaaattgcaaacatgtgggatgtgcttgactgctacgaatacgacattgctaatagtggcaacaatccagcagagcgtctagctcactaa

SEQ ID NO: 12632 - DNA, 285 bp, Zea mays
  Peptide Sequence Number=SeqID_54411
atggcatcgccgcggcgcgccgtgggcagggctctgcgctcgtcgagggcagaaattggtgggggaagcgagttcataacgccatcaattaggcgaggaacgaatgaattaggaaatggtgggcagggtgatcggatttgcaactctggtggtcttgccgccgcgcggtgggttgcgccgtcatgcgtcaacgctgggggaagaagaggactcgagggccgtctaatccttctcggtcggctgcgattagaagccaagataactcttcgcttcattaaaatttga

SEQ ID NO: 12633 - DNA, 351 bp, Zea mays
  Peptide Sequence Number=SeqID_54412
atgccgcgccttctcgactgcggaaccggtgccacgactcgaggcagctctgcgtgtgacccaacagtgccaactgggtgcaatgatcacgggccagtcagccgcggaaggaagcgcgacggttgggaccgggaaaggggatatttcggaaagggatccttctccacgaaggaagcgggctctgagcccattactgatcagaggttcgaaggcttgctgctcggaagggttcgacagccgcccctgagcactcgggcttcaagctcattactgatcatgggttcgaaggctggcccctcggaagggttcgacagccgccccagagcactcgggctccgcgcccactactga

SEQ ID NO: 12634 - DNA, 567 bp, Zea mays
  Peptide Sequence Number=SeqID_54413
atgagcgtagggcgtgcgggagggcggttcgcggcagatgcggcgttatcagcacatgctcacgagaacagaggtagaagagaaggaacactcgctgtttggagaagaacggaggccccgccctcaagatcaatgataaaggcatacaccgctgggcaagaagtggtgatcccatcgatgaacgccatccctgtacgtcatgttcaagtgcataatgtgcacttttgcatgatccatggatggacaatggtagtgtcgctgccggtggttgaatgcagtctccccatctcgcttccatcatcgctggtgccgatgggaaatgtggagtcgtcggcaacagtgccgatggaggtagagttggcggcaccaccgcctcctccacccactgtcgcagcagttcatcgtcgccgttccccaacctcgccggagccggttgtcgctgggactatcgctgcccgtcacggacaacctcctcgcgctgtcgacgctctgcgcgggcacatcatcttcaccggccactgccccaatggggtggccacgactccctcctccagtgagagggcctaa

SEQ ID NO: 12635 - DNA, 1563 bp, Zea mays
  Peptide Sequence Number=SeqID_54414
atggcgaagccgaggaaaacctgcacctcggctccagatccgcccgtagccgccgttcggcttctgtggcacccaccagcgccggcagtccccatagtcgttctggtctcgctcgctgcgctccgcatccgtgtgctggtttccgtgggcccctactccggtcagggtgcggcgcccaagttcggcgactatgacgcgcagcggcactggatggagctcacactccacctcacgcccgccgactggtaccgcaacacctccgacaatgaccttgtctactggggcctggactactcgcccctctccgcctaccagagcctcctccacggccgcatcatcaacgcctcactccccgaggtcgtcgctctccgctcctcccgtggctacgaatctatggaatcatacgcgccctctccagtagatttcttcctgctcgttgcgtggaaaatcgaagttgctgatgcggtggacggtgttgtcatcagatctgttggtgttcttcccagctgctttgtgtataattacattagccttggacttacgcttgaagcaattgctggtgttctgtcgaggaatgagctcatcgctgcagctctcttcactcttgcaatcaaacagttcgcaagtcaggtccggtgtgcactgcgcaagatcatgggtgtcgagcggttcgcgcgtgcaccggctggacgtgctctagcactaccagagctggaattgaagttctcccacaggggtgatacatacagaaaaactgtcaccttttggtgggacatcaaaggttctggaagtgtcgatatctatgatacatttgatatgataaaagaaccgggggagctcattgtttctcctaaggtacctgtggtgcaggatgctgatgtcaaaggggccgatatgatggaggttgaaacagctccagttcacaatgcaaaaatagttccttcagaagagagtgttgtatctcttggagttgctgagggtaaggcatgtgcagctgctgatcttagctcattgatagcttctgaagaagctgggtctcaaaatgatattgacaatgacaggccgaaaacttctttgtgccatgctgattccatgaaaataaaagttagtgatgaactaccagtgaagcaatggacatactgtgatcatatgtctaatttacagagttctttcacatctgcaaataatgatatagccaaagaaatgaatgaagtgctatttaaatcattgcctgctgatacatctgcccttgatttgtcggcatcaagtgatcttcttagccaacggaagattgatttgattggcaaagaaagacttggagtacgtaaaaccaggctgaggttgaaagagcagattcttacaatgaagttcaaggcatatcgtcacttgtggaaagaggatgtacggctactttctgagcgattgaagtctaataagcgcattgatcagaataaccgaacatctcaaattggatctcagaggcaatgcttttctaaccactcacgattagccatgcctggtcagtattatttccattttatatcaaaatttgttttaaactaa

SEQ ID NO: 12636 - DNA, 567 bp, Zea mays
  Peptide Sequence Number=SeqID_54415
atggcgacatccgtgaagcgcagccacagctgcagatgccaagtactcttcctgcttgcgttggttcttctggcattcgtctctgcgagtcctacacccatcagcggcaagaagagcaagacaacggtcgtcgtcggcggcggcaacgaggcaatcgtcgacgaggacaacgacatattcaacgggtgccactacaataaccagaatccccattattcgtcggcgctgttctgctgcagcaaggacaagctgtgctgggcgtcgttgccggacccgcccgtcgtctgggtcgtcgtcgagcccgccgccgacgcgcccgccaccgccgaggtgctccgcggcaccgacatcatgtacaggcacctcgccttcaagcccgaggacaacttcaccaccgccgacaccgaggctcacgtgcagcggaacgccgcgctcgcgcacgtcgagaagcaccgactcgccggcgtcctgcacttcgccgacgcctccggcgtctacgacgtcggcttcttcgaccagatccgccagatcgacgccagattgataaactgtcacacccgtctttaa

SEQ ID NO: 12637 - DNA, 1080 bp, Zea mays
  Peptide Sequence Number=SeqID_54416
atggcttcttcaaacggtgaggctgagcaacaatggatagagaatatcaagtcaggaggaacagttccctgtctagcacctgaaaactgtcctaatggctgggctactcctcccggtgattcatttatggtcagaggcccagaatatcttacaaacaaggtaaaaataccaggtggagagtatcttctgaagcctctcggctttgattggatcaaaggaccagcaaaaatctgtgagatcctcaaagacagtaaccatcgagttagaaaagctatcgatgatgaggtttcacgtagtaaccagccttttgtctgggcattcaacctgcaactgcccaaggataacttcagcgcaatattctactttgtgtcgctggaggctatacctgaaggctcccttatggaccagtttttgaaaggagatgatgccttccgaaactccaggcttaagttaatagcgaacattgtcaaggggccctggattgtccggacggctgttggtgaacaggccatctgtatactggggagagccctctcgtgcaagtatgttcaaggatcaaacttcatcgaagtcgatgtggatatcgggtcttctatagttgcaaatgcgatcgttcatttggcatttggctatatcacaacgctaactgtagatttggcctttctcattgagagtcaaaccgagccggagctccctgagagacttattggagcagtaaggttttctgagttaaatccaggatcagctggtttgtttgaaaggcggtctgaagagcatcaggaaagcactcagtctcggcctgtaggattttggcagggtttctctcaactgttgaacaaccaaggcaatacaagggagccatcccctaatttacagaatactaatggaactttgcgcaaagaagaagcaaatgaggatgccaaatggacgctactcaatcaaatggctgttgcgtcagcatcattctgctatatctttgaaacctgtcaaaataaaggttttcttttgtttgatgaagctttatcatgtgaaataatgattcagacccctaccattgtttcggggacaatttatcagtag

SEQ ID NO: 12638 - DNA, 810 bp, Zea mays
  Peptide Sequence Number=SeqID_54417
atggaccatgtgaaggacggcgtggacggaatgatcaagtacgtcgccaacgagccctccgtcgggctctacttcgtccagcagcacgcccgggcttccatgcccctcctccttgacgtcaaggtccaccgcctggccttgcttcgcttccttccctttgcgcatgttgagctgtgctttgggggattaggaggcgatttgtctggtaagctcgtagagaagacgcgtgaggtgacattgcacactgaagacatggaggattctatttgcgctgtgagatccatggctgattttggacttccacttgctgatgacatgatcaaggacataaatagatcactgcaaataatgtcaaagacccagccaaagagagggttgatccaaaaccccagttgggggttccagtcaaggaaaagctcaggaacttgggacgaactgggctctaccaatggaagtagcagcaggaactacctctcttcaatgttcaacacggcgaagcaaaaggcatcgggtctcaggtggccgcagcctaattttgcaacaaaagatgatactagcgagaactcggcgtcgtcttctgccctggaatcgccacaagctggtgggcaaggtgcatctacaccagatacagagaaggatgagctccccatttcaagtcggttgtcagagggtacggccgcaaaccgtagcctgcctgctaccggcgtctcggaaacagtggaggcttacaacaagttcaaagaagagcaggagctgaagcttcgtgagtggctaagagactctgaagaagccgtcaatgataaagactga

SEQ ID NO: 12639 - DNA, 1395 bp, Zea mays
  Peptide Sequence Number=SeqID_54418
atggtgacgggcggatcttgtgggcatatggtggctgggctggaggtcccccagacgacgttggccctcacgcatcacgtcgtcgacgtctcgtcctgcagtgacgagcgtgtgaaccggccccgtcgtcgacacttatcgagtgggtctctaattttcaccggcgacgatgacgccaggaggaagaaggcgcaacagcagcgctgtggcaagcctgctggtggttctgctcagcttgggagcagcagcaacggcagtgcggccggctccgcaggcggcacgcgcggcggccaacaacggcacgtgcctgtccaggctggagccgttcgggtgaccaccgcggacgggtacatcctgagcttgcagcggatacccggcggccgcggccgcggctccggccaatcggcggccggcagtaagatcccggtgctgctccagcacggcctcctcatggacggcgtgacgtggctgatgagctccccggacgagtccctgggctacatcctggcggacggcggctacgacgtgtggatcgccaacacccggggcaccgtctacagccgcggccacaccacgctgtcctccagcgacccggcgtactgggactggtcgtgggacgagctggccagcaacgacctgtcggcggtggtgcagtacgtgtacgcgcagtcgggacagcagaggatgcactacgtcggccactcgctggggaccctcatcgcgttcgcggcgctcagccagcgccagcagctggggatgctcaggtccgccggactgctcagccccatcgcctaccttgacaaggtcacgtcgccgctcgcgctggccggcgcagacgtcttccttgcggaggctatgtactggctcgggctggatgagttcgacccgacaggggaacctgtgcacaagctactgactgacatatgctcgcagccagggatcgattgctacagtctgatgtcagtgttcacaggtgacaactgctgcctcgacaactcctccgttcaggtcttccttgcccatgagccacaggcttccgcgaccaagaacatggtccatctggctcaaatgatccgacgaggaacgcttgccaagtacgactacggcaacgccgcggacaacacgaagcactatgggcaggcgacgccgccggcgtacgacctctcggcgatccccgacgacttcccgctcttcctcggctacggaggcagggacaccctgtcggacccgcaggacgtgagccacctgctccaggtcctcaagtcgcaccacggcgacaagctcacggtccagtacgtggacgactacgcgcacgccgactttgtcatggctgccaacgcgagggagagggtgtatgcgcccctcatggccttcttcaagctccaggacaaatga

SEQ ID NO: 12640 - DNA, 360 bp, Zea mays
  Peptide Sequence Number=SeqID_54419
atggtgaatggcagcactgcggtcacgccgaacttcggtaaggaatttgtgccccccccggggtggacagagcccccgattcgcccccgtagatgccaccatcgcgtccgcgccccatccagtgccacggtgagctccgcctcgctgtcagctgctcgggacacccctagccagagcctcgccgctgtcgccccattgagtctctgctcctccaccgttgcttcgcgactgcagcgcttcccctcaaggctagtccccgagcctctagtgccccgccgtggccggccttctcgtctccggcgagttctcgccgcgggaccgagcggcgccaccgtgcccatgcccacccttggccgttag

SEQ ID NO: 12641 - DNA, 444 bp, Zea mays
  Peptide Sequence Number=SeqID_54420
atgagggtgaagaactacaagaaaggtttcatgaagagctgcagacaatctagatgtatgaaatgtggacattctagatttgtggaggctacgagggagcagcaagaaaggtttcgtggagaattgcggcagcaacaaatgacatttgtccaacaacaatcaaagtacatggttgcttacaacgcacagacacaacaagcaaaaaacatgagtgtcttatttattctcaacacgacacaacaacaaccatttgttttcccacaatttcaaccgccgatgcctcagtggtattacatgctccgacaccacctcaggtgcgtcgataagtatctctactcgaatgtaggattacatgctcagactccaaacgagacagatgacttcgtcaacaacttcttcacttttgaaggtagtggccacaactcaaacgacccctatatgtga

SEQ ID NO: 12642 - DNA, 1626 bp, Zea mays
  Peptide Sequence Number=SeqID_54421
atgggtgtcgatgaagataatgaagctatcacccgagccaacaaagaaatcagtgcagagcctactccacttgatcaggacagcgagtcgacagagcaagcggaggatgtcgtggacttgacggagctgaaagagaaggtgattggggctgttccttttcctccacagcgcctcgacggctggatgcagcaatggccaaccatctacgtggtccccggcgacctagccgccggaaaaacggacccctacgcccccgccaccgtctgcttcgggccgctcttcggtccggcgaggcgtgtgacggacggcatggcgaagctggagcgctacaaattgtgctgtcttcgcaagctcatcgtggggcgcagccctagccctgcaggaactggaacccgacctgcagagccagccgtgtggaagccggaggtgcacgaaccgatgcttcgcagttgcgtggacgcgatgacaagactgctcccgagaattcgtgcttcctacagcatcgcctcatctatggacaccatcgctggcgacgaaaacaccgtgcgagaagtcaagatgctgctctaccccaaccccgaggtcgccgccgtcatgggatcaactctggctgagaacatgctgctggacggctgcttcatcctccaccgcctgctcaagatggcaagcagagcagcagggaaacgctacgacgacgacgacgatgactggacccaggtgtttggtcggcgcggggtatgggcgcttgtcacgcgcgacctgctgctgctccacaaccaaatccccttgtttgtcatcaaggctctgctgaagcagcttaagggtccagctgatatcgaagacgacgacgtcctcgtggacggcggccttcagctcttcagctcgctccatcctcggaggaggctgcagccctcgccggacgactcgctccgcctccgcctccgcgacgcgcaccacctcctgcacctcttctacctgtccatcaccaacatcccgacgcagtcatcagcctcagcgtcgccggacaagaagcttccaccggagctcacgcagtgggtgccgtgcgccaaggagctggaggacgcaggcgtgagattccgggcgaggaaggacggcaccgcgacgggcttcctggacatcaggttctccgccgtcggcgtcctggagatcccgccgctgcagctctacgactacagcgagcctctgttccggaacctaatcgcgttcgagcagacctacccggacacgccgggccacgtcaccgcctacgccatcttcatggactgcctcgtcaagacatccgacgacatgcgactcctccacagccgcgggatactgctcaaccacatgagcggcgacagggaggcggccacggggttcttcagcggcatctgcgccggagcgcacgcctcggccgaccggaactatctcgccccactcatggacgaggtggtcaggtaccagagtggaaggtggccccagtggcgtgccgcgctgctgcgggactacttcggaaacccgtgggcggtcatcgcgtttgttgcggcggcgatcgtgctcgcgcttaccatgctgcagaccttctacactctctacgcctactaccagccacccaagcagtcctag

SEQ ID NO: 12643 - DNA, 576 bp, Zea mays
  Peptide Sequence Number=SeqID_54422
atggtgaccggcggtgacaagcctacaagccccgcgaaggctacaagccacgggaaggctccatcgaaggagtccggcaacaaaaagaaggagggatccccttcatgcatcaagacgcacaagagtggcgaaaagaagaagaaaatgaagaaagtagtctactacgagaccgactcttcatcgccctctacatccggatccgacgccgcgtccgtcacttctaagcgccatgagcgcaagaagtttagcaaaccaccggtttttgaaggtgaagattatagtatgtggagtgataaaatgaggcaccatctaacctcactccacgctagtatttgggatattattgagtttggagcacaggtaccatccgtaggggatgaagattatgactcggacgaggttgcccaaatccggcactttgactcccaagcaactactatactcctcgcctctttaagtcgagaggagtataataaagtgcaagggttgaagagtgccaaagagatttgggacgtactcaagactgcacacgaaggagatgagttgaccaagatcaccaagagggaaacgatctag

SEQ ID NO: 12644 - DNA, 2004 bp, Zea mays
  Peptide Sequence Number=SeqID_54423
atgttttactcgcacacgatcctcgcgcggaagagcccgctgggcaccgtgtggatcgccgcccacctcgagcgcaagatcaagaagccgcagatcgatggcatcgacatccccacctacgcagaaagtataatgttccctgaagttccaattgctctaagattatcagggcatcttcttctaggtctagttcgcatttattcatggaaggtgcaatatctgtttcaagattgtaatcgaatgctaactacaatgagaacttcattcgcttctgtccaagtcgatcttccaattgatgcagactgtgctccatttgagtccattacactaccatcaacactaaatcttgacgccttgaacttggatgacgcaatttctctgatggatacgccagataatcatcagaagactcttgatcagattaccttgcctggatgccagagtagagcaatcaggacgtcccctccatttcatgatggttttggagctaataacgatcctaatgaagaagctcccatagatcgtcccataggcaattcaccagtgaattccaacatagcaaatctgacagatggagcactagatccacctgaaaaaatgcgtgaagctccacatgagtttcctcacctgaaattaacagagtccatccttggaaatgatgaccccatggatttggaccatgattcttcaccttttgtgcaaaacaaggctatcacccctccagttattgatgaaacaacttctgctggtcgacaagtacctgggagatccatttccaatttacgtgcaccaaacacctttgatgcttttgcagatgatgcacccctaaattttgacattcagttacctgaatttcggcttgagccatctccacgtccagtacaagagaacaaggataatagaagaccaaaagcacaagttagcaatagaaataggaagagagggatgaaatttgattacaaaattgtgctctccaatgaaaaacaattgcttcttgcagtttcaattgtttgtgtgaaagggcctctagttgagttggttagctgctgtatgagaaagcaaattgatggtgctgaactagatgagttgatctgcaagaggagaaaattaccccagacagcccttgatgtgtggagattcagcagaactaacagacagggcagcttcttgcttgaacctctgctgcatgggacgtgcagtgatcttcaagaaacctatgagagaaacttcccttgtgtcagtggccttgatgctgagtgtagcaatgtggctggtgtagcaaatgatgatccggatgcatcacttgaacggcagctaagcccaaatgttcctagaactgcggagctgtcttaccatgagctcaccccaacgtctccaggaaatgcagaggcacagcctgaaccacctctgccaaccctaaagtcaccaggagctgcaggtgcagtgccagacgatgatatgttgcctgagttgccccggttctcaccaatagatgtgccatcttcaataagaggaaatgatactccttacaaaactcctggcggaactccatcttggctcggaggatctgctgtttctgaaataccatcatctgatgggaactattcattacctggacaaagtactcgtgactctgataacatgtcattcctttttccaatcaatgaagatgatgaacacccagagatccctggtctcatgagtacacctggaggggtatctagtgtagctactggaactaccggattaggaagcatgtcggctaggacaagggctgttgcacttttctttaaggatcatgcgtcttcaccctcagatgatcagcctggaaaattcagtttgaacaaaattttggaagggaaaacaaggaaacaggctgcaaggatgttctttgagacaacggttctgaagagttataattacattgatgtgcaacaagaggatccatatggagccattgaaattttagttaaacccttgctgtcagctgccaaactgacataa

SEQ ID NO: 12645 - DNA, 510 bp, Zea mays
  Peptide Sequence Number=SeqID_54424
atggcgtcgacctcagagacagcttcccatgtcagcgaaggaaaagaccaccggccagaagatggtgcaggagtttctccttttcgaaaaaggaaactacaatcatcaggttatctcgtgaatgattccctgaccgtggaatgcacgatcaccgtgctacgcgacttggacgccccggatagggagcagcccctgccagtgccaccaccctcggacctacaccagcacctcggcgagctcctgcagagcagcgatggagcagacgtcacgtttcatgtctccgaggagtccttcaccacccacaagatcttcctcgccgcaaggtccccggtcttcaaggtcgagttcttcggaggcatgaaggaagctctgcttctgtggagatcggagacatggaggctgctgtgttcagggtcatgcttcacttcatctataccgacatggccccagagctcgatggtgaccaggagcctgaggcggcggcggccatcgctcagcacctactggtag

SEQ ID NO: 12646 - DNA, 1215 bp, Zea mays
  Peptide Sequence Number=SeqID_54425
ctctcttccaaatgtgacaataagctcttccgtattaaattctctacacttcacatgcaaagatattcttttctggaagcatattccaaaccgattcgctgtatatctcgaagccgcactgtccgccccttgggtcctacaaagcgggcgagttctgcaacagcaaatgaaattgacatgctcagtaatggccaagggtttgttagtactgacaaagtaaatagtcgtggacattcagtgtgtctgcatacgcccatgtttcccaagatagaaggtggaatggtggaggtagtagaggcccccaaaatagcatcacagaataagaatgccagaaaggtggtagtaagcaaagaagcacagaatgtcatagggactgattcctcaacatccaactatgacagttttgattcaggaagttcttggagtggatcagaaggagatgatggtattgaaaccttttcagacgctgtggttttcagatactgtctagacagcacatatgaccggtcaaagtttcttagaggtgcatctcttactgttaacaaagatgacttggtaaaacttgcagaccgagtctcgttatatagtggatgctcccaccacagaaaccaaatattaatgtcgaagagattgttcagagagggtgctgacacttggaacatgatctcaaagaacaatgaacgtgctctttggtcatctgccattccagagatcataacaaaatttacgaacattgtccattctgtgcgtaggggtttatcagagcaggatcttgaggttttaagaggcattgctggttgtggtgaggacataggaagagatgaatttgataggctatggtgctggttatacctagtggttgtttcattatcgagagagagaattaaaaagctgtgggattgcacagcacctagatggatagagggcttgattacaacagaagaagctgagaatgcactaagaagttccagggaattgttaaaggaggcaggaacatttgttctcagatttcctatcacccgaagctggccacatccagatgctggaagcctagttgtcaattacattggctctgatagctcaattcatcataggctactctctcttgattccagtgatgctagcgctgagaaactgcaagatttgctgctccaggaaccagaactatcacagttgggcagggttgatcgggtctcaatcaccatccggagatga

SEQ ID NO: 12647 - DNA, 2223 bp, Zea mays
  Peptide Sequence Number=SeqID_54426
atgcagccgcctcgccgcgcgcttgtcacatccctcctccgcctccgctccttctcctccattgcctatcctcatccctacccacccgcgcccctgcgacgccaccagttcgtcgccgaccccaccacctccacaaaccgtggtatcgtcgggggcatcggcggcgtcggttccgggaacgggaacctcttggacccgacgcagctcctccgcgatgacccggtggcaatcaccgcttccctttgggtatcctccttccgcgccgccgcctccacctccagctcttgtacccccacaccgccgcagccactcacccccttcctctctcgcctggagctgtgggtgctcgcctaccagaaggcgtacgctgacgagaccggctcctatctgccgcgctcctccatcccggcctccacgctcgcctccctcctaacgctccgcaacgccgtactcgacggccgcttccgcttcggcaaccgcctcacccccatcctccagtccccgcgcgccgccaacgcgccggaccctgccaccctctccaagcgcaagctccgcgccctccttacaacccccggcccatcgcccttccaggaccgcgtcgtgcaggagctgctcctactcctgctcgagcccgtctacgaagccaggttctcgccaaagtccttcgccttccgcccaggtcgatccccgcatgccgcgattcgcaccatccgccgcagctttgctccgtacctctggtatatcaagggcgacctctccccactcctgcactcgcctgatcctgctctcgtggtcggtgcgcttatccgtgatgtgcgtgataaaaaagtggttgatttgatccgttcggccctgctcacctcggtggtgaccgcaagcgatgatgctgcagtaaagaagaagaagaccaagaggaaataccagaagaagaaggtgctgccagagggggagccgaagcctgacccttactggctgcagacgttttttgggtttgcaccagaggaagcacagacacagcctgattggggccattgtggggtgctgagcccgttgcttgccaatgtgtgcctggatgagtttgataagtggatggaagagaggattaaggagttttacaagccatccaagtccgatgttgtgggaggggatgatggtattgagcagggcaatacatcatggccagagtttgttcccacgactggccctgacaagacaaggaaggtggactacattcgatacggcgggcatttcttgattggtgtgagggggccaagagcggatgtggcggtgctccggaagcagctagttgagttttgtgatcagcgattcaggatcaaacttgataacgagagcctccctattgagcacatcacaaaaggagtcatgttccttgaccatgtgctgtgccgtcgagttgtgtacccaacactgcgttacactgctacaggaggcaagatcattagtgagaagggagttggtacactgctctcagtgacagctagtctgaagcagtgcatcaaacaattccggaagcttgagtttttgaaaggagaccgcgaaccagatccacaaccatgcttccgtatgttccacgccacacaatctcacacaaattctcagatgaataagcttttgctgacgatggcagagtggtatcgctacgctgataaccgcaagaaggttgtcaacttctgctcttacattataagggggtcactggcaaagttatatgctgccaagtacaagttgcggtcaagggcaaaggtctataagatcgcgtcaagaaatcttagtcggccattgaaggataagaaaggccagtcgccagagtatcacaatttgctgagaatgggccttgttgattcaattgatggtcttcagtatacaaggatgtcgatggttcctgatcctgattacacgccgttaccatttggatggcggccagatcatgagaagattttgctggagtacataaagctcacagatcaacagacattgaaagagcagagaaactgcaccagggaggacgggcttataacaccacaggacaatatttcgatgcttgtatggggctacaagaaaaatgctgttttacttccttcaaaagtgagtgatgcccaaggatccacagaggaccttggttcagataccgatgaattgaatgaaaaagagctaggaaatgagggtaaccaaagtttccaaaagcttgctgaaatgtcatga

SEQ ID NO: 12648 - DNA, 1164 bp, Zea mays
  Peptide Sequence Number=SeqID_54427
atggcttggacggctgcgggcacagtttgctggcgcctcctccgcctcccctccgtccgctgccctctctcgtcccgggcccggtgttccgctgcgcagagcctagacgccgtggacaaggagtatgccgacctcaacctccggcctctgtaccccaacgtctgtcgtcacccttcttctcttcgtccctacccccggtgctattccaatcttaccactgattcatctatgtacgcagaggggccatcacatgcgcatacggagcccacggggccgccagagtggaaggaggtgttcgacgaccccttgcttcccctcatggtcgacatcggctgcgggagtgggaggttcttgatttggcacgcgaagaattctggcaagagtcaaaactaccttgggctagaaatccgccaaaagaattttgtcttgtataagtgtccaagcaaaccatttaaatgtgcctttgaactgcacccgttggtggagcgggcacagttctgggtgaatgaattggagcttatctattttatgtttgcaaatgcaacgatgtcttttgagaaaatcatatcgtcataccctggtcccctgtcacttgtttcaatactgtgtcctgatccacacttcaaaaagagacatcacaaaagaagagttctgcagcaaccattggtcgattcaatcataaataatctatgtttaggcggacaggttttcatacaatcagatgtactggaagtagcggtagacatgagggaaaggtttgatgggtactctggtattttggcacatgttaattatgtcgatcaagatcttcagtgtgacaatgaaggatggcttctggacaacccaatgggaatccggacagagcgagaaatccatgcagagcttgaaggagcaacgatatacaggagggtgtaccaaaaggtgtcgcctcaatccgtaccgaccccttcccgctccccgaggcgaagctacgactctgccatagcgtttgagaagatcaaggtctccaacccaatcgtcgaaatggacggtgagatcccatcgcttatctttccatttcttgatctggacatcaagtactatgatttggggatactgcaccgtgaagcaattgatgacaaggtcaccgtgaaatttgagagtccgcttcatcttctggcttag

SEQ ID NO: 12649 - DNA, 957 bp, Zea mays
  Peptide Sequence Number=SeqID_54428
atgtcggtctccaggtgtgtggtggaggagatggatgttactattagggaagaggtgtttagcgggcatgttaatttcagtatccacttaaacaagaaacacaaccaagacaagcaaacaatggataaagccaagaaaaatagagtattttacattagctccagctgcaagaatgtggtcagggctagatccaggtttaaactcctcccgctgctcgccgatgtaaagagggaaggcgacgccgagagacggggaaggagacgcggtgaccatgtctcagatatgggtgttcgagttcagctcgctgatctggaaccaggcatcacccacgacgtccgcgtcgtcggcttcgtcggggactaccaccacgtcttctaccaaggtaacgtccacactgcttacctgcttgaaccttcggatgtaccttttgatatatcatctgttccgaaggagacaaaatcccaaccccttgcggagaaaaagtctacaggcaagaaatcagcaggtccggcatctgctgtcagtgaccctgtttctacagttgatgcttcgtatgagaagcttctttcgtccattccggaattcgctgattttggaaagctttttaagtcatctgcacctgtagaattgactgaagctgagactgaatactcagttaatgttgtgaagcatatttttgatggacatgttgtgctccaatacaactgtaccaatacaattcctgaacaattgcttgaacaggttattgtttttgttgatgcttctgaggctgatgaatttttagaagttgcttcgaagcctttagaatcattaccatatgattctcctgggcagacctttgtcgcttttgagaagccagaaggtgtcattgctaccggcaagttctcaaatatcccgaaattcattgttaaggaggtcaccattggatcatggcgctccaattttatgagatgctag

SEQ ID NO: 12650 - DNA, 744 bp, Zea mays
  Peptide Sequence Number=SeqID_54429
atggcggcgccggaatcggaatgcggcgggagtgacggctaccgcgacctccgcggcgtgcgcgtcgacctggacacgggagcagccggagccgatgggggaggaggcttcgccgtctccttctggctctacctgtccgtctccgccagaccgtcctcagtgatcctccaccagatcacagcgggagatgacaccaagttgccgtttcttgctttaggtgaaggaaacaaactgcttctcttcccgttgatgaggctgcacagggaagctcctgctcctgctagttcctacccatggactgacacaaccaatctatcatctacgagtgtatgccctcttgagaaatggttccacattgggtgtgaggttactgaaaatgttatgtgtcttcacgttgatggtttcctaactgctgaggcccccctttgttcactgtttgatgagccagaccgtcaggatgattcaaaccaaattagcttagttggaaatgatggcaagcttgaaggctatatctataatattgaggtttcatatgtactaggagctataaaagaacaatacacaaagaacccaccttttaagttatctattgactattcatgctctgatggaatcgaagagggtgatgacggcatttggagcatcgttggtgggaaggtcgttgcttcacttgtctatgctgatgatggaacagtagttgcaaaatcaagggatgattctgagcctcctttgcttattacttga

SEQ ID NO: 12651 - DNA, 420 bp, Zea mays
  Peptide Sequence Number=SeqID_54430
atgagcaaccacgaacagaaaggagcactacagcacatgagcacacgagcgatatgttcagataagttcagagctgatctcatgaacattgctatgactacccttagttcaaaaattctttcccaggataaggagtactttgctgaacttgcagttgatgctgtattaaggcttaagggctgcaccaacctggaagccattcaaattctgaagaaacctggaggatctcttaaggactcctttttggatgaagggttcattcttgacaagaaaattggcattgggcaacctaagagaattgagaatgccaaaattttggttgcaaacactgctatggacacagatttaagactatgggggcacgtgtctgggtggattcaatgtctaaggttgcagataaggcttgcacgccacctatag

SEQ ID NO: 12652 - DNA, 564 bp, Zea mays
  Peptide Sequence Number=SeqID_54431
atgccgtcattgtcatccttactctctggctccaatactgcgagtgctgagcttcctctaatcccttgcaagctctgcaatggggtggtgattgagcgggtctccaaacaaccagaaaccacgtcgaggaagttctaccggtgcagagccaagaaaacggatgggtttgtcagtggtgatcgacgccttgagttgttaatgatcgcacttaatgatcatggcaaagccgttgaatctctaaccaattccatcagagagatgaagaaaaagctgtccaacctggagttagtgatggaagagctggataacgtgaaaaatttgatgaaggcagccatggttgaaattgaggaaaacaagaaatcgacagctgctgcattgaaactgatggagaatgagctgcaaaagctgaaaggcctgttcgctgtacgcctgtccgctgtctgcgcgtggccgcctgtccgcctggccggtggccgcctgtccgctgtacggctgtacgcgcttcggcgcttggctgcctggcgcctggtggcgatagccgatggggattgggggacgtcgtag

SEQ ID NO: 12653 - DNA, 648 bp, Zea mays
  Peptide Sequence Number=SeqID_54432
atggggctcctgctaagtgttgagtcagatgggcagatgttggttttgggaggacccacgggcgaagggcgtgtcactttcatgcggtatagtgttgcgttcctccaatctgttgggtttcagggtcccatgttgatttttgggaggacccgcgggttccatgttgattttttggaggacccgtggtccgtagtccgtgtcactttccggagtctacagtgttgcgttctgaatgctagtgttatgttccataacccgtgtcactttctggagtctaccgtggggctccttctaagtgttgagtcggatgggcggatgttggttttgggaggacccacgggcgaacgacggtcccatgttgatttttggcaggacccgcagtctgaagcccgtgtcactttccggagtctacagtgttgcgttctgaatactagtgttatgttccatgtcccgtgtcactttctggagtctaccgtggcgctcctgctaagtgttgagtcagatttgcggatgttgattttgggaggacccacgggtgaagggcgtgtcactttcatgaggtatagtgttgggctccttctcagtgttgtgttcggaactatgctgttgcgttccttcaaggtgttgagtttcagggtcccatgttga

SEQ ID NO: 12654 - DNA, 2274 bp, Zea mays
  Peptide Sequence Number=SeqID_54433
atggcgatgggaatggaggtgcagctggtgggagcagttggcacgccgatgaccggacgaagcaacggctacccccggagccactcgtcgtccatgaaaagggcgacgaactggcctggcaagatctggcggcgcggggatcgaatggacggacgacaagagcgagcgaagaagtcctggcggcttggtgagaaaatggtggcgctgggggcgatgggaacggaggtgcggatggtggcagcagtggagaatgaagcgacggcgacgtcgagactgattgtcgtcgtccgcggccatggggcggagcaccttccggagaagtcgagacttatacgattaaaaaagggaaccgcctcaccgattctgatgtcgaaggtaacctggtgccgatccgcaggggtgaagaagaaagccaacatgccacaggggaagagtaagaagaacgtggtgaaggagaaagccaaaaagattaagaagaacgcggaatcgagagccaaagttcatgaaaatacagatcaaattgagatcaacattagagaaggtgtttcaatttggataacaaaggctgcagtgcaaaaatgttttgagtttccccctggtacagataagaagctgccaatagatccaactacaaaaacatttgattcactctacagagtattgagtgtttcagaaaaaaaaatcaatgtaaagaagaagaagatgaaggagaatatgaaggagaagcaggttgaggaggagaagattgagatgaacatggaggagaagaagcagaatctggttgaggatgaaggtagtcaacaggaggaaagtgaagaggaggacggtgaagatggggaaattggagaggaggaaggtgaagatggggcaattggagatgctaaagtggggggagatggagacaaggaaagtgctaaaaggggggggataaaggttgctgtcagaagaaatgttttgactcctttgaacatcaatttgatgttacagaacatcaacaacgatgagattctcaaacttcttgttaaaagaaatgaagacactgatggtacagaaccgaatcttgacattgacctgattgtcagatgtttctttgcggtgagcagtgttgctgagtttggcaaggataagaagaaactgatatcagggtgtacaactgtgctaatggttgttttcttggaccatctcgtggaaaaccctttggatcctttgaccatccctaggatcaacttgtatacttcagattttatcgcagacctgataatggtacccaaggatagccctggccctgaaaaaaagcgtcgtaagtttaagaattcggaggatacatgctatcatgaagattcagaaatggtgccaagtccagggagagcatcgccggttgttgcttctgtacaatctcataagaactttgttgatcatgcagatttagaaattgtgccatctcatgagaactctgttgatctacatagtgtttacatggcacatgtattggaaagaagcagacaaagcatagtagtggacatattggactacaatatacctgaatctacttttgcagattgtttgctacctacaggtcatatgcacacagatgtattttatttacaatgccaactgttgtcaaaggattggaaggataaagtaattcttagctggaaagctactcaagaactgattcatcaagatattggagttaaggagctggacaaggaacttactgcagaggttatgaacaaagtggatctgatatttattcctatcattcatgccggtcactggtcccttgttattctttccactgccaaacaagagacatatatccttgactcctacccaaggcacagtggggtggccaaggatgttttaactcaactgcagaagtatttggataataaacacaactttgacatgtctaactacactgaccatgtgccacctgttcagcatcaaaaaaacaattacgattgtggctttcatgttttattgtatattgaagaattcatgaaggagaagatgtataaaatcaacaaaaaaatggtgttgaaattcagaaagcagctttgcatgaatctcttgtaccatcctttgaacagaataaatcttgtggaattcagaaagaagctgggtattacattgaaaagaaaacttcctggtatacttgatcttactattgaaggtgagaggagtgaatctgaggctgcagtgataattgaaatagagaacagagatgataagactctagaggatgaacatatttcagttgagaaagagtaa

SEQ ID NO: 12655 - DNA, 636 bp, Zea mays
  Peptide Sequence Number=SeqID_54434
atggaggatttctacagggagatttatgccgtcgatggcatcactggcatcaagttccctgatcattaccctgtctcacgcctccttggctgtgttgaggtggtaggctgcctcaggtctgaagagcttgtttgctgggaacatgtgcctgagtctgtcaggcttgaagggctgactgacttttgttggctctgtgaaaatccacagaagttggtggttccattcgagatgcgtggttaccagggtgtctacaatttagaaagaaggatctatgatggggctgtgaggggccttttacctgttcaaggtccactgcctgtcaagttccctcttccagatcccagagaccccttctccttgaagccaggatctcttacatttgctgcttccaaacccactctgcaaaaatctgaaagtgttgctgcagcaatagccggggctcgagctgcagccactcaattctcaaagaaggatcgcaaagctgctgctagtagtgaaattggtacagaagagcaatcctggggaagccatggcgctatgcgcatctacagaaccagaatcggccttcaattttcccgagcactcaagcgaattcccaaaatccaaattctgagcctcggagaagccctagactag

SEQ ID NO: 12656 - DNA, 366 bp, Zea mays
  Peptide Sequence Number=SeqID_54435
atgacgaaggttgatgctttgccgaaggttgtggaattgagaacactggaggtgggcaccaatgttgtcacgcttttgaggaccttcggaagaggaaggcccccaagatgggatattgttgagtttggagcacaggcaccacaggtgggcgacgaggactatgactcggatgagcccgcccaaataaggcattttaattcccaagcaacttctatattcctcgcctccttgtgccgagaagagtataataaggtgcaagggttaaaaaatgccaaagaaatttgggatgtcatcaaaacggcgcatgaatgggacgaggtgactaaaatcaccaagtgcgagacaatcgagggagagctcggttga

SEQ ID NO: 12657 - DNA, 939 bp, Zea mays
  Peptide Sequence Number=SeqID_54436
atggacggtggatctggttattgcaagtatggctggagcaagtatgctgctccttccgggcgttgtgctacattcttggaattcggtaacattgaagcacctatgtatgcaaggcttcgtcacttcttctctacaatatatacgaggatgcaaataaagccttcgactcagccagttattgttgtccttccactgtgtcactctgatgataccgagtctgctagggcctcaagaaaacaatacaaggagacgctgtactctgtcttgtttgacatgaatgttcctgctgtttgtgctgtcgatcaggcagttctatctttgtatgcttctaaacggacctctggtattgttgtgcacattggattcaatacgacttctgttgttcccatctttcaaggtagggtaatgtatgagataggtgttgaaactgtggggcaaggtgcccttaaactcactggatttctcaaggagttgatgcagcggagaaatatatcctgtgagtcactgtacactgttcgaaccatcaaggagaaactttgctacgtagctgctgattatgaagctgaattgcgtaaagatacacaagcgtcctgcgagatcgatggaacggttggtgatgacagctggtacaagacggtcattttagctggtggttcgtcgtgcttgcctggtttaccagagaggctggagaaagagcttcaccaacttcttccaccttatatgtcagaaggaataagagtactccccccttcatttggcactgattctgcctggtttggtgcaaagatgatcagcaacgtgagtactttcactgaggcatggtgtgcaaagaagaaacaattccgtcagaagacaggccggagtggtacattgtttgccaattcctggttgttggcaaaagcgcagttgtctcgttttaattttaagtggaacgattaa

SEQ ID NO: 12658 - DNA, 579 bp, Zea mays
  Peptide Sequence Number=SeqID_54437
atggcgagctcgctggcccgcctgggagcggcgctgccacgcgccgcggcccgcgccctgccaccggggcggtgggccgccgcggtgctcggcatcggcgcctcccgccgcgccgaacggtgccaagttcattccgacattaaagtagcccctacatcagacgtgaaggacgatagcaaatctgaaactaggaggatcaagatgctctatgacggtgattgccctctctgtatgcgtgagctgaaacaaaaggtgaccatcatactgataccattgcagctaaacttccatgtaatttcatgtctgtgcagattgaaagttcgcattctgtattgtggccagagagatgaatacgagaaggtcatggggaagatacatgccattctttcagatggaactgttatcacagatgttgaggcatttagaaaattgtacgaggaagtaggactcgactgggtttatgctgttagactgtctccagcaacgtcctctatatacatcctctatatccgtcctttacagtcttctttaaaagattccatctcctatatctactttctcttcaacaacgtcctttaa

SEQ ID NO: 12659 - DNA, 756 bp, Zea mays
  Peptide Sequence Number=SeqID_54438
atggctgatggagctttatggcttctagctgttatgtttcaggccgggcacttgaagatgctcgatggctacattgatttcttcatggaccccagcctgtctgaatgctacctgcaacttaaagaagaactcgataaacttatacagcagaagcttgaagacccaaacttcgacatccacaaggaaggcaagtacatcctattcgccgtacaagagctcgccgccggcgacctgtgcgaagggaggttcgtgttcggccgcgagacgagccgggccaggctccggagccccgaggacgacggcaagagcaacctcataaaggacgggatgaaccccaagagcctgctgcatacgctgctgatgcgggccggccacaccccgcccaggtacaagacgaagcacctcaagacgaacgagttcagggccgtggtggagttcaaggggatgcagttcgtggggaagccgaagcggaacaagcagctcgcggagcgggacgccgccatcgaggcgctggggtggctgacgcagacctccggcgtgaatgccatcgaggcgctggagcgggacgccacggatcagggcatactcctctgcgaggagggcgtggatttcgtggagcgctcagctaggctagggcacgcgcggatcgcggagagggggaggcggggccatcctgtgcactggatctgggcgtggatgttggcgtggatctggtgcgcggaggtagtagctgggcgagggatttcgcagaggtag

SEQ ID NO: 12660 - DNA, 1095 bp, Zea mays
  Peptide Sequence Number=SeqID_54439
atgaccgcgtcaaaaaaggtgtgccacgtcattccatttcgtatccttttcctcttcctctctctctctcttactacagggaccgggaaagggggatactccgaaagggatccttctccaccaaggaagcgagcccggagccctcctactgatcagaggttcgaaggctggcccctaggaagggtccgacagccgcctcagagcactcgggctctgcgcccactactggtcagaggttcgaaggctaacccctcggaagggttcgacagccgcctcaggcctctcgggctccacgcccactactggtcaaaggttcgaaggctggcccctcggaagggttcgacagccgcctcaggccactcggagcccccgactcggcgcccactactgatcagggagctcgggctcaccctcgacgccggacgacggactccgcctcgccccgaccccagggctcgaactcagcctcgacctcggatgacggactccacctcgcccgaccccagggctcggactcagcctcgacctcagacgacggactccgcctcgcccgaccctagggctcggactcagcctcgacctcggacgacggactccgcctcgcccgaccccagggctcggactcagcctcgacctcgaacgacagactccgcctcgcccgaccccagggctcggactcagcctcgacctcggacggcggactctgcctcgcccgacccccggccgcccggccacccctggccgcgcccctggccgcccccagcccagccgccggccgcgccctggccccagccgcgcctggccagcctcggccgcgccctggccggccccggccgcgcccagccgcacccccggcccgccctggccgcgccctcggccgcccctggcccctggccgcccgccagccgcccctgcccgctgaggatccggggtgtagttcgcttcgccgtcgtgccgtcaatggggctcggtgtatgcggctcgctctgccaaggtgacaatgagattgatggttctgattacgattatggtattggcgaagatgaagctgtggaaggagacttccaggagttccaagactacgacgagttctag

SEQ ID NO: 12661 - DNA, 1027 bp, Zea mays
  Peptide Sequence Number=SeqID_54440
atggatttctctgctgtttcttctgccctcaaagcaatcggcgagctaacacaagaagtcacatccttgtggggcgtcgatgaccaagttgagagcctagcaagtgagctgagatggatgcaaagcttcttgaaagtggcagacgcaagaaaagttgatcatgaggtgatacgtaccagcgttgttgagatcagagagttggcctacgatgctgaagatgtgatcgagatgtttgccttcaaagttgcttccaaaaggaaaggtggattttcaaattgcatcaaaagatgcgcttgtttcctcaaagagggatgcctgctccaccagatcaagtcagagattgagaaaatcacagccaaaatcaaagaattggctcgacaattgcagatgtatgatgtatcaaagttcgaagttgatggagaaagaccaagttcttcaactgtaaggctggaggcaaggcggccttatcctcatgttatggatgataacattgttggattggatgatgacgtcaagaaattagtcacagttcttctcaatgagcaaagtgaatgtagggttgtctccatatgcggaatgggtggtctgggcaagaccacacttgccaagaaaatatatcatcacagccaagttgttggtcatttcaagcacttggtttgggtatatgtttctgaaaactgtcaaaaaagaaaagtttgggaagatattcgctctgatcttcccagcttaagtgaagaagacaggaagatgaatgatgaaaaattagcaaatacgttatctagtttctttgaggaaaacaaatgtttggtgatactcgatgatgtttggaacatcgaggcttgggatagcttaaaaccagcattttcaacaagagagacgaaaagcaagatcttactcacctctcggaagaaggagatagttgcacacgccgacaaaaatggtttcttatatgagttgcaggagctagactacaatcagagctgggaactatttcaaaagattgctttctcccaaacaaattctccag

SEQ ID NO: 12662 - DNA, 1758 bp, Zea mays
  Peptide Sequence Number=SeqID_54441
atggaaggaggatccagtttttcagttgttgcaccaccagtcttcgatggagacaattaccagatgtgggcagttcgcatggagacttacctagaggctttagatctatgggaacctgtagaagaggattacgaagtcccacctcttccagcaaatcctactgtggcacagattaaagcacaaaaggaaaagaagacaaggaaatcaaaggcaaaagcttgcttatttgcagctgtgtctcaaatgattttcacacgaataatgtctctgaaatcagcaaaggaaatctgggattacctcaaggctgaatatgaaggagatgagaggattcgtggaatgaaagtcctgaatctaatcagggattttgagttgcagaaaatgaaggagtctgagtcagtgaaagaatattctgacaggcttctcagtatttccaacaaggtgagattgcttggttctgagttgaacgactctagaatcgtagaaaagctactggtcactgttccagagaagtttgaagccaccaatactattctagagaacaccaaggacctgtcaaagatctctcttgcagagctcttgaatgctttacaagcacaagagcaaagaagatccatgaggcaagagggagtgatagaaggggccttacctgtcaagcatcaagacaacaacaggtataaaaagaagaaaaattttaaaaaccaatcgacgagtggagaaaaattatcaggcaattatcagaagagcaaaagaggaggtgtcaagaaatcctacccaccttgtcaccattgtgagaagaaaggtcatccaccattcaaatgttggaaaagacctgacgccaaatgctccaaatgcaatcaacttggacatgaagcagtgatttgcaaggtcaaaggccaggtgcaagaagtagatgcacaagtagttgatcaagaagaagaagaagatcatttgttcgtggttacttgtttctcaagcagagaatcaagtgagagctggttgattgatagtgggtgcataaatcacatgacctatggcaaggagctcttcgaggaattgagaaatactgaagtcaaaagagtgaggattggaaatggtgagtacttggaagtcaagggaaaaggcacaatagctattacaagttatgaaggtacaaaattcatttcagatgttttgtttgtacctaaaattgatcaaaatctcttaagtgttggccagttgctggataaaggctataaagtgctatttgagaataagcagtgcttgatcagagatgctaatggcagagacttgttcaatgtcaaaatgaagggaaaaagttttgctcttagtccaatggaaaaggagcaaatgacttttaaatccagagttagtgctactgagacttggcacaagaaacttgggcactttcatcatcgaggattacttcaaatgcagtcgaagaagctagtggaaggacttacagacattgatgatgatctacctcattgtcgagcttgcaaatttgggaaacaacatagacaaacctttcctaaacaagcctggagagcctcgaagaagttacagcttgttcatactgatctttgtggtcctcagagaacaccttcgttaaatggtaacctctattacatagcctttattgatgatctaacaagaatgtgttggatttttttgttgaagcaaaaatcagaagttgctggtgtgttctggaaatttaaagctagagttgagaatgaaagtggatgcatgattcagatttga

SEQ ID NO: 12663 - DNA, 507 bp, Zea mays
  Peptide Sequence Number=SeqID_54442
atggagggaccagcaaagcaaattgcccttcctttaaaacgacgtagtcgggtgcaagtggcgatgggatggtggcaggtgcggcgcgacagtggcagtggcagaggccaagagtcagcagatttggcgctgtcaggaggccaagggtcaaagaccctagatcttatcaacatgacaaatattagagagttggagattcgaggggccttcaatattgaagatttttacacggaagagttgggaagaatagatccaagacatttgactcatcttctttcaagctgcaatagcatttttaagttgagcttagatgtggaggtcagttacttaaagatgcttgaatttcatgaagaggctttcataggaaaggaaatgttttgctgtggacaagcttttgctaaccttgagtctgccttaagaagcttaacaatctggagatgtggaaagtgggtgaaggagtcatgccttctcttcagcgattggagatacaaaaatgcagacagctaa

SEQ ID NO: 12664 - DNA, 174 bp, Zea mays
  Peptide Sequence Number=SeqID_54443
atgatggtagcgaagtccatggtcaagcttgagtctttcaagtccaaggaaaggggtgtatgtgaaaggaataacgaggatagggatcttaatgctttagaacaaattgaaggagccaccgttagtggtaaaggcatcggggatgagattataaaagtaattgacaatatataa

SEQ ID NO: 12665 - DNA, 453 bp, Zea mays
  Peptide Sequence Number=SeqID_54444
atggagcaaaataaaccaagtgtgccctggtctgaggggagcaacggctacttcgcacaacggtcgactgcaaaagctgaagaatcagaggaacagtgcgcaacactgcgcgtagagtcagggccgcccgtcagaggcgcaccggatagtgaacagtgcctgtccgggtgccgcttgaagacaaagcctccaacggtcgactgcttcaatacccctaaacggttgggtaacgtggctggcgcaccggacagtgtccggtatgcccatcgacaacagcccaaccccaacggttgtttggtggttgagggctataaataccctcaaccacctccactccaaccatccaagcattccacacattgcattcaatacaagagcaatagacttcactccaagacacaaatcaaagtgatcgatccactcaaagtcccaaattcaactctagcgcattag

SEQ ID NO: 12666 - DNA, 981 bp, Zea mays
  Peptide Sequence Number=SeqID_54445
atgcagtcggcatgcaaccgcgccaagtgggcgcaccccttcgattctgatgcgcccagcatggaggcccaggcccacacgtcatgcaaccggcgcgccggttgctacgtgcgagcaactgcaccgccactcgcgccactaccgtgcctcctcgactgcggaaccagtaccgcgactcgaggcaactctgcgtacgacccaacagtgccagccaggcgcatcggtcacgggccagtcagccgcgggagaaggcgcgatggtcgatgcggcaaaaaatgggccggcagtaatggcggtggcaggcgggcagaagcagcggtcacgttgtcagccaagctcatgagaagcgagcgacgcttcgccttcgccataatgaccgcgtcaaaaaagggaccgagaaaaggggatacctcgaaagggatccttctccgcgaaggaaacgggccccgagcccccctactgatcagaggttcgaaggctggcccctcggaggggttcaacaaccgcctcagagcgctcgggctccgcgcccactactggtcagaggttcgaggggcggcccctcggaagggttcaacggccgcctcaggccactcaggctccgcgcccactactgatcaggggttcgtaggttggcccacgaaggccaagtccggcctcaggcgccataggaaactccgcttcgcccgaccccagggctcggactcgggctcagccccggaagacgacaaactccgcttcgcccgaccccagggctcggactcgggctcagccccagaagacgacgaactccgcttcgcccgaccccagggctcggactcgggctcagccccggaagacgacgaactccgcttcgcccgaccccagggctcggactcgggctcagccccggaagacgacgaactccgcttcgcccgaccccacggctcggactcgggctcagccccagaagacgacgaactccgcttcgcccgaccctag

SEQ ID NO: 12667 - DNA, 1371 bp, Zea mays
  Peptide Sequence Number=SeqID_54446
atggcgtcctccttcaaacggtcgctgccatgcgtgctcctcctcctcctcctcctcctcctcgctgtcttccaccacggctgctcgtcggcgagggcccacagacgcgccggcgacatggaggggagcatgagcaccgacgacagctcgatgatagagcggttccagcggtggaaggcggcgtacaacaagtcctacgccacggtcgccgaggagcggcggcggttccgggagttcatggccatgtacacggcgcccgcgccggcgcagctgcccgcggacgagtcggtgatcaccacacgcgcggggccggttgacgccgtcgggggcgcgccgagccagctgccggtgtacgtgaacctgtccgcctccgcgccggcgagcgtggactggcgagccagcggcgccgtgacgccggtgaagaaccaaggccgatgtgggtcgtgctgggccttctcgacggtggcggtggtcgaaggcatctaccagatccggacggggaagctggtgtccctgtcggagcaggagctggtggactgcgacacgctggacgacggctgcgacggcggcatcagctaccgcgcgctgcggtggatcgcctccaacggcggcatcaccacggaggccgactacccgtacacgggcaccacggacgcctgcaacagggccaagctctcccacaacgcggccggcggcgacaacttccagcactacaagaagggagtgtacaacgggccctgcgggaccaacctcaaccacggcgtcaccgtcgtcggctacggccaggaggcggccggcggcgacaggtactggatcgtcaagaactcgtgggggcaggggtggggcgacggcggatacatcaggatgaagaaagacgtcgccggcaagccggaggggctctgcggcatcgccatccgcccgtcctatccactaataaactcgggagggggggctttagttgaaaatgcgggcgaaggggtatcatgcttcctcggccgtcggatctcggatccacgattgagtttaaaaccggcggaggcgggcgcgcgggcgtgggtgcgaccgataggtggggggcaggggtcagtgactcaggtgctggcgtggggactggccggctggggggcagcggtcagtgccccagacagggccgcgctgacgggcgggggtccattggttggcgacctagagaagggaaaaggaggggggctagcgcagctgccgagtggggccgggcgtcagcgacttagagaggggggaaggaggatcggcgcggggaggctgccaggcggggcccagccgtcagagctgccatcttcctccgaccgcgtgtgcatgggaatggggagggccccgacgacgctctggtga

SEQ ID NO: 12668 - DNA, 1641 bp, Zea mays
  Peptide Sequence Number=SeqID_54447
atgtcgggagatcacgccaagaagaagatggagaccggcgaaaagcccactacaagctacgggagcacttcatcggaagagtcccgcaccaaaaggagggagaagaagaagagctcctccaacaaagggaaggagaagaaatcttcttctcaccacaaagagaagaaggaaaaatcttcttcccacaagccgcatcggaaaggcgacaagcacaagaggatgaggaaggtggtctactacgagaccgacacttcatcaacatcgacctccgactccgatgcgccctccgtcacttctaagcgccaagagcgcaagaagtatagggatgaaaactatgatgaggatgaggtggcccaaatcgagcacttcaactctcaagccacaaccatactccttgcctctctaagcaaggaagaatacaacaaagtgcaagggttgaaaaatgcaaaggagatttgggatgtgctcaaaactgcgcacgagggagatgagctcaccaagatcaccaagcgggaaacgatcgagggggagctcggtcggttccggcttcaaaaaggggaggagccacaacacatgtacaaccggctcaagactttggtgaaccaagtgcgcaacctcgggagcaagaagtgggacgaccacgaagtggtaaatgttattttaagatctctcatttttctaaatcccactcaagttcaattgattcgtggtaatcctagatacactaaaatgacccccgaggaagttatcgggcattttgtaagttttgagtgcatgatagaaggctcgaggaaaatcaacgagcttggcgacacatccgaagctcaacccgttgcattcaaggcgacggaagaaaagaaggaggagtctacaccaagtcgacaaccaatagacgcctccaagcttgacgatgaggagatggcgctcgtcatcaagagcttccgccaaatcctaaagcaaaggagggggaaggactacaagtcccgctccaagaaggtttgctacaagtgtggtaagcccggtcattttattgctaaatgtcctatatctagtgacagtgaccgaggcgacgacaagaaggggagaagaaaggaaaagaaaagatactacaagaagaagggcggcgatgcccatgtttgtcgggaatgggattccgacgaaagctcaagcgactgctccgacgacgaggacgccgccaacatcgccgtcaccaagggactcctcttccccaacgtcggccacaagtgcctcatggcaaaggacggcaaaaagaagaaggaaaaatctcaaacccaagagaccttaaagggattcttgagacgagctcaaaatgagttcggcttaaggatcaagaaaataagaagcgacaacgggacggagttcaagaactctcaaattgaaggcttccttgaggaggagggcatcaagcatgagttctcctctccctacacgccacaacaaaatggtgtagtggagaggaagaatcgaactctattggacatggcaagaaccatgcttgatgagtacaagacaccggaccggttttgggccgaagcggtcaacaccgcctgctacgccatcaaccggttatatcttcaccgaatcctcaagaagacatcatatgaactcctaaccgggtag

SEQ ID NO: 12669 - DNA, 234 bp, Zea mays
  Peptide Sequence Number=SeqID_54448
atggacgggttcacccggagcgaggcgtcgctggccaacgccgtggcggggcagcccgtggccgtgtccatcgaggccggcggcgacaacttccagcactacaagaagggagtgtacaacgggccctgcgggaccaacctcaaacacggcgtcaccgtcgtcggctacggccaggaggcggccggcggcgacaggtctgagggcctaactgcaaggttccaggagctcagatga

SEQ ID NO: 12670 - DNA, 411 bp, Zea mays
  Peptide Sequence Number=SeqID_54449
atgggcaagagcaataagcgcaagcgtgagccgactcctccctcggaggatttcggcgactcggaatactcggaggaggagttctcctccgagtccgaggggactctggctcccgtctctcccccagcgtcgtctgacgactcagacgactcacaggggctggccgcggaggtctggacttatatccgggtcgtcgagcgctccgggatcgcaggctcggatgagtcggagtactcctcgaacgaggaggactcatccgaggaggacggtggcggcgaagacgatgacgacgacgacggtgacggcggcgacaagggcggcaacggcggcagcaagggcagcgacggcggcagcagcaggggcggcaacggcggcagcagcagcaagggcagcaacaggtccagtggttag

SEQ ID NO: 12671 - DNA, 933 bp, Zea mays
  Peptide Sequence Number=SeqID_54450
atggcggaagtgacggagaggagaaagcgcgccgcagtcgtggtactgggcgacatcggccgcagtccgcggatgcagtaccactccctctcgctcgctaaccaggccagtatggaagtggacattgttgcaaatggagaaaaagtgcagttaacaggaatttcaaagatatcaggtgcgctggcacttctacttaaagctgctgtccagttcattttgctagtttggttcctttgttttaagatccctcgcccttatgtctttgttgttcagaatccaccctctgttccaacattggctgctgtaaaactggcaagctggctgagaggtgctaaatttattgttgattggcataagtttggatatacattgctggggttgtcgcatggcagaagtcacatcattgtcaaaatatatttctggtttgagaagtactttgggcagatggctgatggtgccttttgtgttacaaaagcaatgcaacatgaacttgctcaaaattggggaatcaggctagggaattccatctgtagtgctatgggcaatgccaaatgcatatcagtggaggaagtatgggaagacatgagcattactgtcttcgccactttaggtgaagatgattcaacagatgaggagcaactttggattgatatcaagaatgggaagcaatttgtctacccaagattactgtttattgttacaggtaaaggacctgataggaagaaatatgaggttcagataaaaaggttgaagttgagacgtgttgccttgcggacgatgtggcttgcatcagaggactaccctctattgctcggatcagctgatctaggagtgtcgttgcatacatcttcgtcagggctggacctaccaatgaaggtggttgatatgtttggatgtggattgcctgtttgtgctgctccattctcgtggtag

SEQ ID NO: 12672 - DNA, 531 bp, Zea mays
  Peptide Sequence Number=SeqID_54451
atgacgcgtggccgcagtgtgaaggaccggagcaagaagaagcgcgtccacgcgctcgaggtagccaccgagcgctggaaggttctctccaaagtgctcgccgtcgtcgacgcgctcaagaaggaggatgagcacgtcaccccgctcaagcgcctcgagatcctgcggccgcagctcggcctcgtcaagccgcacaaggtggcccacttcgtgcgtcgctcgccgcacctgttcgaggtctgccgcgacagccgcggcgtcatgtgggcaggcctctcgccgcaggcagaggcgctcgtcgaggaggaagcgcgcctgctagaggatcactcccctgtggccgtgcagtacgtcaccaggatgctcatgatgtccgtggaccggcggctgccggtcgacaagatcgcccacttccggcgcgacatgggacttcctcatgactttcgaacacggtgggtgcacatgtttccggagcatttcaggctggtcagattggaggatgatttcgaggaaaagctcatcattatgtga

SEQ ID NO: 12673 - DNA, 240 bp, Zea mays
  Peptide Sequence Number=SeqID_54452
atgaatgttgttcctgctctacagatctcccagcccacccatccatccatcctctactccccgtttcctgtttatgcttattcggacgggtgccaccaccatgttcctcatttaaggctccacacggcaacgcgtcctgattctctcgaaggacctaacaatggcggtgctgctggaaacttccggaatttatgggttatgggcgatggaacggaggatcctcctctcctcatcctgtag

SEQ ID NO: 12674 - DNA, 444 bp, Zea mays
  Peptide Sequence Number=SeqID_54453
atggccagaccttccgcaagggtcccggcccgagcggccgcctcagggtctagaaaaggggaaccccctctacgccaaaactttcctcggaaaaggttttctaccaaaacgactttcgtgcctttcgactgcatcaatggcggaatcctaaaaacgacaagagagaccttgaacggtaaggccgaccgagccaagcaactcctacgcctccgggatactgataccttactcgtcaccttccgcgaaaggaatgaactacctccgcaccggaagggctacaagataacgagctccaagcggctcaccggcgaccactgcaccagcagcgacaacgacctccgcctcaagcgactagacagcagcagtgattgcctcagggcaaacgctactgtgaaaaggccctcgtaccagtcccccatccgaggggcgaggacaaaccattaa

SEQ ID NO: 12675 - DNA, 756 bp, Zea mays
  Peptide Sequence Number=SeqID_54454
atgggatgccttgcggctttgagctgtttcatctcgcacctcggtgaaagaggcctgcctctgtaccgcctcctgaggaagaccgagcgcttcacttggacctccgaggccgaggaagcccttgggaacctaaaggtgctccttacaagtgcgcccatcatggtaccccccgctgtaggagaagccctcttgatctatgtcgccgctaccactcaggtggtcagcgtcgcgatcgtggtcgagagacgagaagaggggcatgcattgcccatccagaggccggtctacttcatcagtgaggtactgtccgagaccaaaatccgctacccacaaattcagaagctactgtacgcggtaattctgacgcggcgaaagttgcgacactacttcgagtctcatccggtgactgtggtgtcatccttccccctaggagagatcatccagtgccgagaggcctcgggtaggattgcaaagtgggcggtggagatcatgagcgagacaatctcgttcgctcctcagaaggccatcaagtcccaagtcttggcggactttgtggctgaatgggttgacacccagcttccagcagctctgatccaaccggaactctggaccatgtttttcgacgggtcgctgatgaaaacaggagtgggcgtgggcctgctcttcatctcacccctcgggaagcaccctccgctacgtgctgtgcctccatttcccggcatccaacaacgtgaccgagtacgaggctctggttaa

SEQ ID NO: 12676 - DNA, 801 bp, Zea mays
  Peptide Sequence Number=SeqID_54455
atggcagtggggcgggttcggggcgggtccccgcggtttttggacccgatgggcgcgggtacagaagatacaatagaaattgaggatgatgttactattggtagtaagagaaagccaaaattaaaatcatgggtttgggaagagtttgacagacttcaaataaatgggatttggaaggcaaagtgcaaatggtgtaagaaatatttaggaggggaaacaagaaatggtacaagtcatttaagtggtcaccttgagatttgcccggatagatctgttagaaaagggttaaaacaatcatctcttaaactgactgcaaatccacatgatgggatagtaactttagagaaatacacatttgatcaagatgttgctagaaaagagcttgcattaatgattattgtccatgagtatcctttggctatggtagaccatgttggatttcgcaagttttgtgctacactgcaaccattattcaaagtagtctctagaaacacaattcgaaaggacatacttgatatgtatgaggtgcaaaagaaatctatggtgaagtatttcagaagtttaagttctcgtgttgctgttactacggacatgtggactgcaaaccatcaaagaaaaggttatatggcagtgacagctcattttttggatgatgactggaaactaagaagtttccttattaggtttatatatgtcccagctccacacacagcagatgttatcactgatgttctccatgaggttcttttggattggcgtattgaaagaaatctatccacaatcacgcttgacaaactgtag

SEQ ID NO: 12677 - DNA, 186 bp, Zea mays
  Peptide Sequence Number=SeqID_54456
atggcatcatatgataatacaccaagagggcataaagtattcaacttatggttatccaccaaccaagaattagaattgtatccttttcccaagaaggaaaccaaactcatggagtcaaaggtatcgatattgtctcagggtatcgatattttccttaagtggtatggataccacgtgaaaaattga

SEQ ID NO: 12678 - DNA, 501 bp, Zea mays
  Peptide Sequence Number=SeqID_54457
atgaccaatgatggtgttacaacgcgattgcagaaggagatgggtctgctacaacacgagctctcccagctcgacaataagctcgaagctaaactggaaatgaagtctctcattttaaggagttttgtaatgatttcaaaggggaaatctgagtggtggtccaagctcaaacagatttttgaagctgaaggggtggacgattcagctaaggtggtcaaaattcgtccatatcgatacccttctgtccagaaaaatgagatgagagactggtcaaggagatgcatgatactggtattatcaaggatagtaacaacccttttgcttcacctattgtcatggcaacttaaccaactaacggttaaggataaatttctaattcttgtaattgaagagttgctcgatgagttaggacaagcagcctgcgtctccaagttggacctcaggcctggttaccatcaaactcgactgtgggagggggacattcacaaaacagctttttga

SEQ ID NO: 12679 - DNA, 504 bp, Zea mays
  Peptide Sequence Number=SeqID_54458
atggctaacccctctaggtctattcgaccctcacttggtggtcattgtcacggttcaggggctgtgtccagtgtcatatttgtggccactttggtcacctccggtggttaccaaccacaatttgtgcctcaaatgtcgtcattgggttttggcaatggggtcagttaccaatcagaattggtgtctcaagtgccatcatcagattttggaagaaatgaaaatgggttattttctccctctcattttcctaataatgatgctaaccctagtgtttcttcatttacgccggcggttcatcatgtcccctttggtgataataggttgactcttccacatggttttgggcctcaacactctaaccatgtgggttatgataatggtgggctgcctatgtctcatttgggcaatcaaatatcaactctaaggagctatgatcagcggccctcagttgggccgcaaatgccttggtccactaagcctagggcctatgtttctcatgtttaa

SEQ ID NO: 12680 - DNA, 543 bp, Zea mays
  Peptide Sequence Number=SeqID_54459
atgaagcgcccacgctcgagcccggtggcgccgacaggacgtagtgccccacggtggacggctgcaaggtcgacctcagcaagtgccacgactaccaccgctgccacaagttttcagtatttcagtggtgtttcacctttcactttcaccatgttgtctaggtatacgaaccacaaggtggcacacatccccggtgcgctattcttcgacttagatggcatagttgatcaaacaactgatccaaagtatagatacaccgacgattttcctaggattgcggtgattcatacatctttctacaaatctcatttaccacacatgctgccatcagaagaggcattcgcaacagcaatttctgagctagatataaaaaaccaggataaagttattgtttatgatggaaagggatttttcagcgcgcctcatgtttggtgggctatcgaaagggtttataatggtgaacagataaatacagtctcgtttcagactgaatttcagcctaatctattctgggcactggaaaaggctagtgactttttttaa

SEQ ID NO: 12681 - DNA, 411 bp, Zea mays
  Peptide Sequence Number=SeqID_54460
atggagctgctcagggcttttcgcctgtcacgttccggtgcccagacgtggagcggcgcgggcctgcaccggtacttggccttccaggttcagattcagggcggagggatcatcaccgatccttgtgagcatgagtggatgcaaacggtggagactacttcaaggcgccttgctgacaggaagaccgcaaagttccagaagaacatcaccaggaggggttctgtgcctgaaaccactgtcaagaagggaaatgactaccctgttggccctctagtgcttgggttcttcatctttgtcgtcattggatcatcttctggccaccaaaagctgttgcggactgtcaaacgctcagtttttgagccagcttttataaaatttattgggggtaaaaatcattcaaaatcaacataa

SEQ ID NO: 12682 - DNA, 924 bp, Zea mays
  Peptide Sequence Number=SeqID_54461
atggcgcctagaaagcatccatctggtagtaagaaaaggaagagaaagaaagaagtagaggaatttatagaatcacaaagaggtgccatggataaatttgttcgcactaatacaagaacttcaagtaatgaagatcaaccaaatttggctatagttgttgtggcggaacaaccagataccaacgaagaattagaagatcatgaccctacacttgaagaaaatgttgacatcaacacaaatgaaaaatgcaagagttcattggggcatgatggatttggagattggaggcatactagtgagaggttaaaagaacatgaagctagtatggagcatattacaagtatgagctcatggaatgaattgagagtgaggcttcgcaagactgaaacaattgacaaagaatttcagcatcaaattgcaaaggaaaaagagcgtatcaggcaagttttattaagaataattgatgttgtgaaatttcttggtaagcgtactttggctttcagaggatcaagtgagcaactctacaatgatcaaaatggtaatttcttagcctgtcttgagatgattgctgaatttgatgtggttatgcaagatcatttgagacgtactcaaaataatgatattcaatatcattatcttagtcataaaattcagaatgagttgatttctctattggcttctgacatcaccaaatccatcataaagattgttaaagaggctaaatatttttcagttatccttgattgtactccagatgtgagtcatcaagaacagatgagtttgttggttcgatgtgttaatatgtctagtggcaaagttgaggagtattttctgggtttcatgaaggtagatgacacatctggtgagggtctttttaattcattgcttgattctattgagtcttttggtttaaatattgcggag

SEQ ID NO: 12683 - DNA, 192 bp, Zea mays
  Peptide Sequence Number=SeqID_54462
atggaagacgagctcgacgtggggaagaaggctgcaattcgtcgaacacgtggtagatgctacagtagcgaccttgggcggcactttttggcgttttctgcttggattcagacatgggtcactgtagcaaagatatttcccacgcaatactctacaagtttgattaagggttctcagccatttgcaaactag

SEQ ID NO: 12684 - DNA, 531 bp, Zea mays
  Peptide Sequence Number=SeqID_54463
atgccgcccacccccacccccccaaaagataaaaagattaagaactattcagaaatgatgctgtctgcccttgccatccctctctatgaatacctctctcaatctcttcagctcgtgctcaatatttcttatacctcaaatgacatccagcagcaagaaaacggacagggtggagccacggtgcacgccgccgacgccgcggaggcagtcctggggcttgggcgcatggaggcgtgcattgtcgccaaccgctgtctggcgtctgacgcaatggcagtcggcgagcaaacggagccaccgggcaccgacacggagcgcagccggaggccagggggcctcctggagtcctgggcgaggccacgagggagcccctggcgccggccagctgcgagccggtccgggcggagccgcggagggggagagcccggaggagcaggagctgctggtggcggattctggtcgaaacagggggcggagcgcgaaggttgcgcatctaccctgagtgctgatctaggagccacagaatcggag

SEQ ID NO: 12685 - DNA, 560 bp, Zea mays
  Peptide Sequence Number=SeqID_54464
atggagagtgccataactctgtacctacagggccactaccatcccactgatcaggccgaggccaagagatttgtatttcaagttaaaactgaaatctggacagaaaagtccagtctgtcgtggtccccgttcctctgctgcagaggtgcaggcaaccaacaaaagcttcccttcccctccagcctccactctcctctccttttcttccgctgttccgcatcgcatcgcatcgcctcgcctcgccgccagcgcaactccagccctggccgggatctctttcacccccccctctctctccgccgcttcgctcccccgtctcggggcctgcctcggatgctcccggcctcgcatccgctgctctacgcctgcgtcttccgcgacacccacctcgtcgccgagctcgaccacgcccactcccactcccagagcaccgccacctccgccgaccccgtcgcttccgacgccccctcccccgcccctgacgacgacctcccggcgctcgccgctgcgctcgtcgccgccgctcgcgcacacgcactcacacacacagcccgccgggc

SEQ ID NO: 12686 - DNA, 1983 bp, Zea mays
  Peptide Sequence Number=SeqID_54465
atgagcatgacccagccaagttctacgaggtcaaaggccatgacacaaccgatcctcacctgcacaccacctttcttgacaccacgcaagaattgtgtcgccaccaccaacatgccttcaccttcctcgcgtggcccaatgccaagacctccggtcgtctcttcaaatgccaacgcagcgcccttccttcagctccatacccacaaccaccaccaccagcagcagctgaggatgggcgacgcggccatcgccgccgtgcatttgcatgagtctgaggaggagcacatcttccggagccggttcccgcccgtggccgtaccagacgacgtcaccgtgccggagttcgtgctggcggacgccgaggcctacgcggacaagacggcgctcgtggaggccgcgccgggtggccggtcctacacctacggcgagctggtccgggacgtggcgcggttcgccagggcgctgcggtccatcggcgtccgcaggggccacgtcgtggtggtcgcgctcccgaacctggcggtgtaccccgtggtgagcctcgggatcatgtccgccggagcggtcttctccggcgtgaacccgcgcgccgtcgccgccgagatcaagaagcaggtggaggactccgaggccaggctcgtggtcgccgacgcggtggcctacgacaaggtgaaggacgctggcgtgccggtgatcggcatcggggacgtggcgcggcttcccggcgccataggctgggacgagctcctcgccatggcggaccgcgcgggcgcgccggtggtggcgcttgagccggcgcagcagtccgacctgtgcgcgctcccctactcgtctggtacgacgggggtgtccaagggcgtgatgctgagccaccggaacctggtgtccagcctctgctcctccatgttcgccgtcgggcaggagctggtcgggcaggtggtcaccctgggcctgatgcccttcttccacatctacggcatcaccggcatctgctgcgccacgctgcggcacaagggcacggtggtggtgatggaccgcttcgacctgcgcgcgttcctgggcgcgctgctgacgcaccgcgtcatgttcgcgcccgtcgtgccgccggtcatgctggccatggtgaagagccccgtggccgacgagttcgacctgtccggcctggccctcaggtccgtcatgacggccgccgcgccgctcgcgccggacctcctggcggcgttcgagcgcaagttcccgggcgtgcaggtggaggaggcgtacgggctcacggagcacagctgcatcacgctgacgcacgccagcggcggcggcgaggacgtggggtcggcggtgcaggtcgccaagaagaagtcggtcggcttcatcctgcccaacctggaggtgaagttcgtggaccccgacacggggcggtcgctgcccaagaacacgccgggggagatctgcgtgcggagccaggccgtgatgcagggctactacaggaagaaggaggagacggagcgcaccatcgacgccgcggggtggctccacacgggcgacgtcgggtacatcgacgacgacggcgacgtgttcatcgtggaccgcatcaaggagctcatcaagtacaagggcttccaagtcgcccctgccgagctggaggccatcctgctgtctcaccccgtccgtcgaggacgccgccgtcttcgggtaagcgaccgagcggaccgcggcatgcagttggagattgtgcgtgtgtgttcctgcgggtcatcatgcatgctgccggacgaggaggccggcgaggtcccggcgtcgtgcgtggtgcggcgacgtggcgcgccggagagcgaggcggacatgatggcgtacgtggcggggcgcgttgcgtcgtacaagaagctccggctgctgcgcttcgtggacgccatccccaagtcggtgtccggcaagatcctgcggaggcagctcagggacgagttcgtcaagaagacggcagcagcgtaa

SEQ ID NO: 12687 - DNA, 1599 bp, Zea mays
  Peptide Sequence Number=SeqID_54466
atggagggagtccttgagcggtggaagacgaagatcttcgttggtggcagcctctccgccgcgcgaggacgaggcacgactcaagtggcattttcgtggctcggcggtggcgtgatggagtcctccagcaagtcatcatacagcaagctgtccgctgcaaatgacaagatggattccgatgccgccgggagccacgagagtgcacggtcgaatggcctctcggttgatgcagccgacaaggcgccggccgcgggaggagcgggcagagctgacaagacctccgacgcttccactggtagcagtgacgacagcttggtggatagctccggtggtactggccgccatacgaagcggcacactgggagcgatcgcaggtgggaggccatccggtcggccagcgccgggggctccccgctcagcctcgtccacttcaggctcctgaagcgcctgggctacggagacatcggcagcgtgtacctcgtggagctgaggggcacgggcaccttcttcgccatgaaggtgatggacaaggaggcgctcatcagccggaacaagctggtccgcgcgcacacggagaggcagatacttggccttctcgaccaccccttcctgcccaccctgtacacccacttcgagactgacaagttctactgcctcgtcatggagtactgctgcggcggtaacctccattcgcttcggcagaagcagcctaacaggcatttcactgagcaagcagccaggttttatgcctccgaggtgttgcttgctctcgagtacctccacatgctcggcatcgtctacagggacctgaaaccagagaacgtcctggtcagagatggaggtcacatcatgctctccgacttcgatctgtcgctgcggtgctcggtcagcccgatgctagtcagatcctcatcggtccatgccgccgccaacaacggcgtggtccatgccgacggtgccagccagcagggccagggctgcatacagtcaccgtcagcgttcttcccgcgcatagtactccccaagaagagccgcaagaccagcaggtcggactccagcatcaaggacgggtcgatcctggagttcaacgcggagccgacggacgcgcggtccacgtcgttcgtcggaacgcacgagtacctcgcgccggagatcgtcagaggcgagggccacgggagcgcggtggactggtggaccttcggcatcttcctgtacgagctcctccatggcacgacgccgttcaagggggacagcaaccgcgccacgctgtgcaacgtggtggaccagccgctgcggttccccgacgcggccccgcctgtgcctgtgagcaccgtcgcccgggacctcatccgtgggcttctggtgaaggacccccagaagagaatcgccaccaggaggggcgcagctgagatcaagcagcacccgttctttgatggggtcaactgggcactcgtcagggatgctcaccctccttctgtccctgaccctgcagacttgggccggtttgcatctaaggagaagccggcggcggcagttgccactgctcatcgtgctcctgcagctaaaccaaagaccggcaattttgttcagtatttttag

SEQ ID NO: 12688 - DNA, 327 bp, Zea mays
  Peptide Sequence Number=SeqID_54467
atggaggagagcaccacccacggccgggactggaactcgacctcacctgctatctatgtacttcggtggcggctactcaaccttgcggctgtaccgagacctaacgaaaccttggctccctacgtccatgacccttcgtcgctcgactggatgaacgaggggagggagggcttatatccgtgcgggcacgcgcccccgcaggaagccgcaggccgggaactcgccgcagatttcgacgtgactgttatggtgagcagccgagtccaagtccgttgcgagatccgcgtggaagaaggatttctggatgccgggacccacggtcagtga

SEQ ID NO: 12689 - DNA, 405 bp, Zea mays
  Peptide Sequence Number=SeqID_54468
atggatttgaactgtcttaaactatatgaaagggttatttggtttcttctcctggttcccagtgatgatgggtcgggctatatgggccggcacgaggcacgacacgacacgatggcaacagcgatgcttgcccggcgagacgcggaggatagtggcagcggcacgaaggcagcgcacttcgtgttcgtcccgctgcgagagcagggccacctgatccctgccgtggacacggccctgttgctcgccacccacggtgcgctctgcacaatcgtcggggacccgtacacggctgcgctggtgcgccagaccatcgaggccgcccaggcggccggactggcggtcaggcttgctgagttcccgctcgactacgccgagtccggcctgccggaaggggcggaccgctga

SEQ ID NO: 12690 - DNA, 435 bp, Zea mays
  Peptide Sequence Number=SeqID_54469
atggacgcgacaggagctcgacggcggccacggaacagacggtggccatggaacagacggcggacgacgacggtgctccacgggtgcgcgcgcagtgcgagagaggggcacaatggggtctcctggggagccctactgatcgaggggggtgagcgagtgggtgcggcctcagaaaggaggtcgggcgcgtggggagagtggccgggaaatgcgcgacgtgggcgcgtccacggcggagtgcgcgggcgagaggttagggaaggggaggaggctgacaagtggggtctacgagccagcgagggtgaatacgcgaacagaaggtcagcgctgatagagcggacccaccaggcagagagagggagcgagtgcgcgcgaagaaacttgcggcgacaagttggccccaccgggcagcgagagggagagagtgcggactga

SEQ ID NO: 12691 - DNA, 327 bp, Zea mays
  Peptide Sequence Number=SeqID_54470
atggaggagagcaccacccacggccgggactggaactcgacctcacctgctatctatgtacttcggtggcggctactcaaccttgcggctgtaccgagacctaacgaaaccttggctccctacgtccacgacccttcgtcgctcgactggatgaacgaggggagggagggcttatatccgtgcgggcacgcacccccgcaggaagccacaggccgggaactcgccgcagatttcgacgtgactgttacggtgagcagccgagtccaagtccgttgcgagatccgcgtggaagaaggatttctggatgccgggacccacggtcagtga

SEQ ID NO: 12692 - DNA, 324 bp, Zea mays
  Peptide Sequence Number=SeqID_54471
atggaggagagcaccacccacggccgggactggaactcgacctcacctgctatctatgtacttcggtggcggctactcaaccttgcggctgtaccgagacctaacgaaaccttggctccctacgtccatgacccttcgtcgctcgactggatgaacgaggggagggagggcttatatccgtgcgggcacgcgcccccgcaggaagccgcaggccgggaactcgccgcagatttcgacgtgactgttatggtgagcagccgagtccaagtccgttgcgagatccgcgtggaagaaggatttctggatgccgggacccacggatag

SEQ ID NO: 12693 - DNA, 321 bp, Zea mays
  Peptide Sequence Number=SeqID_54472
atggcgcccgcgcagcgtgccccgccccgcccgcgcgcgctcctctgcccgcggcgtcgcccgtcccgcccgtgctcgcccgtccgtgttcgcctgcccgccccggcatgtcctgctcgcgccgtgacggccccggcgcggcctcgagctcggcccagcgtgtgtgcggccccgacgtgtgcacggctagttcgcggcgcgtgtgtgcggccttgcgcgcgcgctgctcgcgtgatgcgcgcggtgccttggcacggctcgccgtgccttcgtctacccctagacgaccccgtctacccccctatattttatgcgcgctaa

SEQ ID NO: 12694 - DNA, 225 bp, Zea mays
  Peptide Sequence Number=SeqID_54473
atggcgttgagggtgtcccccgtgtcgcatggcgccgcggcagcgccgctgccgccgctcgcccggaggaggatggcccgtggggtggtggtggccatggcgtccaccatcaacagggattaccatcccgttttgaaatcgaattccaccaggcgccgaaaacgagattaccgtcccgtttacatcagggattaccatcccgttttgactttacattctttctaa

SEQ ID NO: 12695 - DNA, 336 bp, Zea mays
  Peptide Sequence Number=SeqID_54474
atggcgtccatgttccgcccgccgttaggaactgaaatcccgattggtacggggaggaaggataccggatgtgatcatggggaaagagggaaggtttgttattcggtgatgccgatgccctattttcgcaccgatggaagtcgcggtagcgattccagtgcatcacgggcgcgcgacattcatcgccaaagcgcctgtcgcgcgtgttcagagtacgccaccgttggtttggggaagaagcttctggtgggtgggacccaaccgtcagtgaaaccagaggagagaagcaggctgaccgagggaaaagtcattagtggtcaggcgggcatgaattag

SEQ ID NO: 12696 - DNA, 186 bp, Zea mays
  Peptide Sequence Number=SeqID_54475
atggacgcaatcttcgtcgttaggggagggggccgcttggtcgtgaagcgcgacagagagcttgaccctgatgaggaggaagcagcaatgcgattcatctcacatgggatgggattcctacgttatcgtgcctgcaagatgtgtctgcaggctgttgtttcagtcattactcaactgacatcttaa

SEQ ID NO: 12697 - DNA, 441 bp, Zea mays
  Peptide Sequence Number=SeqID_54476
atggtgcacaccctccaggccactcgcatgaacaccacatgtatccctccacctcaacaggctcctctttacacagttgtggttgaagaagaccataaggagatgcaccaccttgttggaggaaatggtctaattgtggaggatagttctgaggaggttctagatacactcactctgtccctagcacttcatgccacaccaatcgcccaagcccctgctcctagaggtgatgaccctgatgatgaaggcgatgatgaaggtgatggagaagataaccaagacaacaacgacaacaacaacaatgagccagaccgagatggaggatttgatggaatgtggcctatcgctgagcattacactttgatgttcaagatgggccacctcccaaatttattgcagaatgtgctacacaagctaggaatctacgtttactctttatga

SEQ ID NO: 12698 - DNA, 681 bp, Zea mays
  Peptide Sequence Number=SeqID_54477
atgtcagtgtctataaatatttgcaaaggcatcaagagatttgctggacggggacacaaatcactggatgacttttcaaatccaaatgacgatgatgacttgatgcctcccccaaaggacaagcatcgcattacttttgatgacctgttgcggcctgcactgacttcgatgaagagcaaagatcaaatgattgaatgctttgattgtgtctttggaagtgtattctttgctctagtattgaatggagaagttgcaatgcttggatggcttgaatggaggtggttgggggtatttatagccccaaccactattccagccattgctatcgatgggcacaccggacagtccggtggtgcgccggatgctgcattgttcactgtccgtcagcacagtcgaccgttgggtgaagttaaccgttgctccattggtgcaccggacagtccgatggcacaccggccagtctggcaagctattgccaggaaagggtttcataacatgctgaagatgtcaatagacgagcttgagagtaggtctcttatcaagtggctaatggacaagctcaaccccaatgatatgacaatacgtcctggttctagcaaggagttaaagatcacaaaagagattgtccgtctcattcttggactgcctagtgccggtggcggcaagccattcatggactga

SEQ ID NO: 12699 - DNA, 282 bp, Zea mays
  Peptide Sequence Number=SeqID_54478
atgaactccatggttaaaggtgcctacatggacaacgggacatcagtacatgagtttgctagaaaattctctgagatgctggaccatattagggagaatgtggccaaagaactccctctgggttatttcgagaagaagtcagtgtctagatcttgtctttcaacctctggacttcatcttgaggatgagagtactcttggtagtaggttgacaacatggaacaagttacttggagctcttgacgagttacctcatgattcttcgtctccatatcaagcttag

SEQ ID NO: 12700 - DNA, 123 bp, Zea mays
  Peptide Sequence Number=SeqID_54479
atggcgtcatggtgcttgactgcactccactatctcacagcactggctgtagaccttgttggccctccccacgttgaatcagcaagctccgccatcgtcactcagctacacgcctccacctcg

SEQ ID NO: 12701 - DNA, 615 bp, Zea mays
  Peptide Sequence Number=SeqID_54480
atggagccaaagtcgaacatgccggacaagttcatttttctgccatcagatttctacaattggaatacaattgttataaggtactgcgctggagcatcacttgctggggacgtagacggggaagacctgatagggaaaactaaggtattcctaagagctggtcagatggcagagctggctgctcgaagagcagaaattttggctaatgccgcgcgactaatccaaaggcgtataaagacacatcttatgcgaaaggaattcatcaaattaagaaaagcctcagttcaatctcagaagttctggagagcacgactagctaaaaagatttttgagtatatgaagagagacgttgcttcaattaggatacaaaagcacgtgcgtgcgcattctgccagaaaagcgtacctgcaagtatatgaatcagctacagcaatacaaacaggattacgagcaatggcagctcgcaacgaacatagattccgaagagagaccagggcatccataattatccaattatccaggaaaaacataatgaacagttccttgaatcacagactcggtggcgccaacacagagcttatgctgcttacaaacagcaacagaaagcttctttga

SEQ ID NO: 12702 - DNA, 1677 bp, Zea mays
  Peptide Sequence Number=SeqID_54481
atggctcctccagctcttgtttttagctgtttgaagtcctgccttgatgatttcagtcatcataatattgatgtggcttgcaaccttctcgagacttgtggccgatttttgtaccgctcacctgaaactacgattcgcatggctaacatgctggagatactgatgagattgaaaaatgttaagaatttggatccacgtcacagtacacttgtagaaaacgcttactacctttgtaaaccacccgaaagatctgcacggatatcaaaagttcggccacctttgcatcaaatcttgacaaatcaagtgttgaacatgttttgcgccaactacgcaaagttaccttgggcagaatgtcaacaataccttctgaagtgctttctaaaggttcacaaaggaaagtacagccaagttcatctgattgctcttctcactgctagtctcagccgctatcatgatgactttgctgtcgcagtggtagatgaggttttagaagagataagggttggattggagttgaatgactatgggatgcaacaaaggcggcttgcccacatgcggttccttggagagctatacagctacaagcatatagattcatcagttgtttttgatacactgtaccttatcattgtgtttggtcatggaacacctgaacaagatgtgttggatccaccagaagattgcttcagaatcaggttgatcattacacttttacagacctgtggtcactatttcagtaagggatcttcaaaaaggaagctggacaaattcttgctacactttcaaagatacattattagtaaagggcccttaccactcgacatagaatttgacattcaggatttatttggagagctacgaccaaacatgtctaggtatttatcaatcgaggaacttgttgctgcgttagttgagcttgaagaaaatgagcgctcagccccagtagaaaaggttgaaaatgaaagacactcggacaatgaatctcataaaagacaggcacgagatgctggtccatctgtgaatggtggaagcgctgcaaatggaattgaggaaaatggcaaggatcatgaaatagcagatagtgagagctattcagatagtggcagcattgatggacgggaagatgaggatatattatctgaggataaatcaaatgatggctcagataatgaaggcgacgatgaagatgatggcattcctgttggttctgatgaagatgaaaatgttgaggttcatcaaaagactcgagggccacagaaatctgagagtggagaagaaacagtagatgaagagggtggcaatgctgggggtagcagcaaggtgcgcgttaaggtgctaatgaagaaagggcacaaacaacagacgaggcaaatgttaattcccgctgatagttcaatcgttcgaagcacgaagcagcaagaagctgccgagcttgaggagaagcagagcattaagcggaggatccttgaatacaatgaaagggaggaggaagaactgaatggagcatcacaaatggggaactggggtcaaggagctaccaacaccagcagtatcagatcaggtggccggggcagctgggatggttcagcacggggaggtggtcgacaacgacaccacatcgccggttctgagtggtttctatcacagttctggtcggagaaaatgagtttgtcctga

SEQ ID NO: 12703 - DNA, 813 bp, Zea mays
  Peptide Sequence Number=SeqID_54482
atggagaatcgtgggggagccaagatgcaaatcccctacctgaggaggggtctattagataaaaatcaaagtagtgagcacgaggacgcaacgagggcgtccaccacgcttcaccacggctccgcctacatccgcgacccgtccgcgtccgcgttgccattctcgccggcatcgtcgcgcccccaccccatacgagccgcccccgcgacgctgaccccactgccgtccagcaggatctctcccttcccccgccccacgcctagcaggatctctcccttccctcgccgtgtcacgcacgcggatctctccattcccatcgcgcgtgcgctcgagtcggacgacctcccggccttcgtccatgccgtctcggacgcgcgacccaccgacaagagtccgctccgccgccacgcgctgcgcgccctggcgctcgtcgcggcgtcccacccacgcgatgccgtggccccgctcgtcccgcgcatcctcgctgccgctctccgccgcgtccgggaccaggactcctccgtccgcgccgcgctcgtcgacaccgcacgcgccgcggcggcggcctcggcctcggcctcagcgtccgccgcgctccgacccctcacggacgcgctcctccacgagcaggaccagtgcgcgcagcgcgtggcggcggagcggactcttgtcggtgggtcgcgcgtccgagacgacatggacgaaggtgggaggctcccaacgcatccccgccgacctcaacgccgacggtcctttcctaacccgcagcccccggccacagtctctctcttccggtccagtgggggctgctag

SEQ ID NO: 12704 - DNA, 642 bp, Zea mays
  Peptide Sequence Number=SeqID_54483
atgacgtcaagggttctcagctccctacggaagcaagacaacgtcagcaggatccatgccgcaccgacagctgtgcttctacatggctcaaggcacttctccgacggccaccaccggcccaaggctgggcaagacggcgggtcgtcggagtcgacaggggagtccaagcttcagatggccagcgtcggtggagcagtggccgggggcgtgggggcgccgacgccgcacgtcctcgcggtggacgacagctccgtcgaccgcgccatcatcgccgccatactccggagctcccggtttcgtgtgactgcggtggaaagtgggaagagggccctggaactgttaggcacggagccgaacgtgagtatgataatcaccgattactgcatgccagagatgacgggatacgagctgctcaagaaggtcaaggagtcgtccaagctgaagcagatcccggtggtgatcatgtcctcggagaacgtctcgaccagaatcagaagatgcctggaggaaggagcagaggatttcctggtgaagcccgtccgcgcgtcggacgtgtcgcgcgtcttcagccgcgtgctccggggctctcgggatggcaggcgcgggaaacgaaagtcgtataggggtagtcggtgtctgtaa

SEQ ID NO: 12705 - DNA, 2079 bp, Zea mays
  Peptide Sequence Number=SeqID_54484
atgtcgttcggtttgaggaatgcgggtgcgacataccagaggtgcatgaaccacgtgttcggcgaacacattggtcgaacggtcgaggcctacgtcgatgacatcgtagtcaagacgaggaaagcctccgacctcctttccgaccttgaagtgacattccgatgtctcaaggcgaaaggcgtaagactcaatcctgagaagtgtgtcttcggagtcccccgaggcatgctcttggggttcatcgtctccgagcggggcatcgaggccaacccggagaaaatcgcggccatcaccaatatggggcccatcaaggacttgaaaggcgtacagagggtcacgagatgccttgcggctctgagccgtttcatctcacgcctcggcgaaagaggcctacctctgtaccgcctcttaaggaaggccgagtgcttcacttggacccctgaggccgaggaagccctcgggaacctgaaggcgctcctcacgaacgcgcccatcttggtgcctcccgccgctggagaagccctcttgatctacgtcgccgctaccactcaggtggttagcgccgcgatcgtggttgagagacgagaagaggggcatgcattgcctgtccagaggccagtctacttcatcagtgaggtactgtctgagaccaagatccgctacccacaaattcagaagctgctgtacacggtgatcctgacgcggcggaagttgcgacactacttcgagtctcatccggtaactgtggtgtcatccttccccctgggggaaatcatccagtgccgagaggcctcgggtagaattgcaaagtgggcggtggaaatcatgggcgagacaatctcgtttgcccctcggaaggccatcaagtcccaagtcttggcggactttgtggctgaatgggtcgatacccagctctcgacagctccgatccaatcggaactctggaccatgtttttcgacgggtcgctgatgaagacaggggcaggcgcgggcctgctcttcatctcgcccctcgggaaacacctacgctacgtgctacgcatacacttccccgcgtccaacaatgtggccgagtacgaggctctggtcaacgggttgtgcatcgccatcgagctaggggtccgacgcctcaacgctcgcggtgactcgcagcttgtcattgaccaagtcatgaagaactcccactgtcgcgacccgaagatggaagcctactgcgatgaggttcggcgcctggaggacaagttctacgggctcgagctcaaccacatcgcccgacgatacaacaagactgcagacgagctggctaagatagcctcggggcgaacaatggttcccctgaacgtcttcttccgagacctacatcaaccctccgtcaagaccgacgacacgcccgagcccgagaaggcctcggcccagcccgaggcaccctcggctcagcccaaggcaccctcagctcagcccgaggcaccctcggcccccgatgcgcctcgagcccttgttggaaacgccttccgacaaggtttctactggccgaccgcggtggccgatgccactagaattgtccgcacctgcgaagggtgtcagttctacgcgaagcagacacacctgcccactcaggctctgcagaccatactcatcacctggtcgtttgctgtgtggggtctggacctcgtcggccccttgcagaaggcacccgggggctacacgcacctgctggtcgccatcgacaaattctccaagtggatcgaggtccgacccctaaacaacatcaggtccgaacaggcggtggcgttcttcaccaacatcatccatcgttttggggtcccgaactccatcatcaccgacaacggcacccagttcaccggcagaaagttcctggacttctgcgaggatcaccacatccaggtggactgggccgccgtggctcaccccatgacgaatgggcaagtagagcgtgccaatggcatgattctgcaagggctcaagcctcggatctacaacgacctcaacaagttcggcaggcgatggatgaaggagctcccctcggtggtctggagtctgaggacaacgccgagctga

SEQ ID NO: 12706 - DNA, 1440 bp, Zea mays
  Peptide Sequence Number=SeqID_54485
atgggtgatgatgagctacttaatgatgcaaactacctgagaaccctggactccagtatcaagcgaaatacaacagttataaagaagttgaagacaataaatgatgagcagaaggatgggctaatggatgagttaaaaagtgtgaatttgagcaaatttgtcagcgaagcagtttcttatatttgtgaggccaaacttcgctctgctgatatacaagctgctgttcaggtttgctcactccttcatcaaagatacaaggacttctctccttgtcttatacaaggtctactgaaggtcttctttccgggaaaatctgtagatgacttggatgcagataaaaattcgagagccatgaagaagagaagcacactgaaacttttgattgaactgtattttgttggaattgtcgaagatgctagcatatttgtaaatattataaaagatcttacatcagcggaacatttgaaggaccgtgaaggaactcaaaccaacttgtctcttctatctacctttgctcgtcaagggaagttttttttagggctacaacctcatggtcaagaagcttatgatgagttctttaaggagctaaatgttaccgctgagcagaagaagttctttaagaaagccttgaactcttattatgatactgtagctgaactactgcaatcagaacatgtgtctcttcgtctaatggaggcagagaatgcaaaagttttaagtgccaaaggtgaactaagtgatgagaacacagcctcatatgagaaactcaggaagtcttttgatcagttactacgtggtgtatcctcgttggctgaatctcttgatatgcagcctccagtgatgccagatgatggaaatacaacaagagttactacaagaactgatgccttgccttcttctggaaaagattcatctgcattggaacctatctgggatgatgaagataccaaagctttttatgaatctttacctgatctcagagcatttgtgccggctgtattactgggagaggttgagccaaagtcgaatgagcaacatgctaagggccgtgagcaatctagtgagtccacttcagaacaagagactgaactacatgacgattttcaaacttctgcaactgaacatcaactagaagttaaattagatggtggagtgaaagagagtgatgacaaagataaagagaagggaaaggatggagaaaaggaaaaatctaaggagaaggatctggataagaaaaatgacagagagaaggagaaaggaagagccatggacggtgcaagtctggataacatcttgcagaggctaccgggatgtgtcagtcgtgatctcattgatcagttgacggacttcactggaactgttgccttactattctcgtttggttgcgacactatcaacttgtatgaaagatgttccaagtatgcttctgtctatgcttga

SEQ ID NO: 12707 - DNA, 423 bp, Zea mays
  Peptide Sequence Number=SeqID_54486
atgtcaacaatagcaaaggaaaatgaaaccaaaagcgaatcagacgaatggactcatgaactcaacgaagcctgggccgtgcgcataaaaggacactcggggaccggaaagacatataggatggtggccccatctacatccttatgggcaatgtctgcatcacttggatctgctgcatctagctttgtgccctccgaaagggcgtcaaccatcatcgcgaataggggaagttttctcaccataagcgggccacccttggcggagaagcccaaccaagaagggatgcagaggcatcacaaacccccgctcgtgaaaatgaacgaacgacaccatgaagcacgttggcggctcggagatgacctcatgctcgagaagcctcaaatcctcttcgtaaagaagaccccatgcgacgtgggcatctag

SEQ ID NO: 12708 - DNA, 2175 bp, Zea mays
  Peptide Sequence Number=SeqID_54487
atgcccgacataccgagggatgtcgccgagcactcgctggatattcgggccggagcccgacccgtcaggcagcctctgcgccgattcgacgaggagaagcgcagagtgataggcgaggagatccacaagctaatggcagcagggttcatcaaagaggtattccatcccgaatggcttgccaaccctgtgcttgtgaggaagaaagggggaaatggcggatggtatcaccaaatccggatgaaagagtccgaccagctcgcgacttctttcatcacgcccttcggcatgtactgctatgtcaccatgccgttcggtttgaggaatgcgggcgcgacgtaccagcggaagtccgagtgtttcgcttggacccctgaggccgaggaagctctcgggaacctgaaggcgctccttacaaaggcgcccatcttggtgcccccagctgatggagaagccctcttggtctacgtcgccgcgaccactcaggtggttagcgccgcgattgtggtcgagaggcaagaagaagggcatgcattgcccgttcagaggctagtctacttcgtcagcgaggtactgtccgagaccaagatccgctacccacaagttcagaagctgctgtatgcagtgatcctgacgaggcgaaagttgcgacattacttcgagtctcatccggtaactgtggtgtcatccttccccctgggggagatcatccagtgccgagaggcctcgggcaggatcgcaaagtgggcggtggaaatcatgggcgaaacgatctcgttcgcccctcgaaaggccatcaagtcccaggtgttggcggacttcgtagccgaatgggtcgacacccagctgccgatggctccgatccaaccggagctctggaccatgtttttcgacgggtcgctgatgaagacgggagccggcgcgggcctgctcttcatctcgcccctcgagaagcacctacactacgtgctacgcctccatttcccggcgtccaacaatgtggctgagtacgaggctctggtcaacgggttgcggatcgccatcgagctgggggtcagacgcctcgacgcccgcggtgactcgcagctcgtcatcgaccaagtcatgaagaactcccactgccgtgatccgaagatggaggcctactgcgatgaggttcggcgcctggaagacaagttctacgggctcgagctcaaccacatcgctcggcgctacaacgagactacggacgagcttgctaaaatagcctcggggcgaacaacggttcccccggacgtcttctcccgggatctgcatcaaccctccatcaagatcgacgacacgcccgagcccgaggcaccctcggcacagcccgaggcaccctcggcccggcccgaggcgccctcggttcagcccgaggtaccctcggcccctgaggtaccctcggcccccgagggcaaggcactgcacgtcgaggaggagcagagcggggccacgcctgatcgaaattggcagaccccgtacctgcaatatctccgccgaggagagctacccctcgaccaagccgaggctcggcggaaggcgcccgggggctacacgcacctgctggtcgccatcgacaaattctccaagtggatcgaggtccgacccctgaacagcatcaggttcgagcaggcggtggcattcttcaccaacatcatccatcgcttcggggtcccaaactccatcatcaccgacaacggtacccagttcaccggcagaaaattcttggatttttgcgaggatcaccacatccgggtggactgggccgccgtggctcatcccatgtcgaatgggcaagtagagcgtgccaacgacatgattctacaagggctcaagccccggatttacaacgacctcaacaagttcggcaagcgatggatgaaggaactcccctcggtgatctggagcctgaggacaacgccaagccgagccatgggtttcacgccgttcttcctggtctacggggccgaggccatcttgcccactgacctggaatacggctccccgaggacgagggcctacaacgatcaaagcaaccaagctagccgagaagaatcgctggaccagctggaagaggctcgggacaaggcgttactacactcggcgcggtaccagcagtccctgcgacgctaccacgcccgaggggtccggccctga

SEQ ID NO: 12709 - DNA, 156 bp, Zea mays
  Peptide Sequence Number=SeqID_54488
atgaatggtatcttcggcattacgtacgagcagcttcaggaaatccccaggaccttcggcgatgaagcatggtcccaacaatatgtgagctcactcttgctatctcacaccccaactggtcaagaacagaactcctgttatgtagtaaagatgtga

SEQ ID NO: 12710 - DNA, 432 bp, Zea mays
  Peptide Sequence Number=SeqID_54489
atggctgcattgtttgctggattccctggcaattccagtcaagtgagtgatggtgctggagctgttcttctcatgaaaagatctgtggctcttaagaaagggctgcccattcttggtgttttcaggagctttgccgctgttggagtggatccagctgatatgggcgttggtcctgctgtggccattcctgctgctgtgaagtttgcaggccttgaaattggagacattgatttgtttgaactgaatgagtttgtctattgctgcaacaagttgggactggaccgttctaaagtaaatgtaaatggaggcgcgattgcccttggacaccctctggatgcaacaggtgcccgatgcatggctactcttctaaatgaaatgaagcgccagggcatagactgcagatttggtgttgtcaccatgtgtatcgattag

SEQ ID NO: 12711 - DNA, 504 bp, Zea mays
  Peptide Sequence Number=SeqID_54490
atggagactctatcggctgaagatcagcaagagttcgagaaacacaaggagcaactaatcaagcaagcacgggtgaaattcctggccaacttcaaggtggacaagaatcacaaggttgaaactgggaaaaacacatgcgattcatcggctacaagttggcagaaccaaacacaatccctttacgggatgccgatggacacataccctgggcaaccacagcctcctgcacaaattagagccccaaccactaaagtgatcgttggtgagggcttctgtcgtatggcgcaccggacagtgcggtgggccaccggacactgtccgccgttactccactggcacatcggacagtccggtgctacaccggacagtccggtgaattatggcggagcggctcccagaattcccgaagatggcaagttcggagtcgggttctctggtgcaccggacactgtccggtggcacaccggacagtccggtgcgccagaccagggcacacttcggtag

SEQ ID NO: 12712 - DNA, 519 bp, Zea mays
  Peptide Sequence Number=SeqID_54491
atggggaaattcgtgatctgcgcagaacatccatcaaatgagtttttcatgtcatttttgaaatgtttgacatacaagacttcagaggaatttgttgcgagagtgaaagaggcaatggatagagaaccccaaccgctaacccctgagcaaagatacaacctttcgtgggagacagcgaccgagagattcatggagtacttagaccttgaaaaggttctgaacaatgaggctgctcagcctgaacaaggtaggaaaagaaagaataaaagaacctcacaacctaatttgtcttcggtcttccgtgctcaccttcgggagatcaagaatgaggagggtaagacagtggacctctacgtccccaggaagtgcttggccacgaacagaatcatcactgccaaggatcatgcctctgtccagatcaacattggccacttggatgcgaatggcctgtacgatggtgatgctgacagcttgttggacaggtcgtggcagaagaagaaggctgagatcaagcagtag

SEQ ID NO: 12713 - DNA, 354 bp, Zea mays
  Peptide Sequence Number=SeqID_54492
atgacggaggcgctgaagtccgtccggaatccggtgacacagaaaaagatcagagtttctccttctacttcgtcgggtgaagtcccggtggtggacagcgcctcgacgctgatccctcgggaagctgcgtcaggcattgttggttcacttcgcaattcaccggattccggacggactgtccactttgcaattcacttaacactaaacatcttcgtcgggtacaaggttttcaaaaatcagagcattagtgatgtcatgtgcacaacaacagtagatgctcttacaatggggaaattcgtgatctacgcagaacatccatcaaatgagtttttacgcagtttatcagggacatag

SEQ ID NO: 12714 - DNA, 722 bp, Zea mays
  Peptide Sequence Number=SeqID_54493
acctcacactggtaccatctgttgctatcggcagggatcttcaagctgctcgtgttacagcagccaataaaatacgcctttggaacaagggtgttgactcagaaagcttccatcctcgtttccgcaacatggaaatgcgttcaaggctaacagtcatggaccgacttccaggagcaaggattgcatttattggagacggaccattcagagctgagctcgagcagatgttctcaggtatgccggtggtgttcacgggcacgttgcaaggggaggagctatcacaggcctatgccagtggggatgtgtttgtgatgccttccgagtcagagacactggggtttgtggtgctggaggccatgtcatcaggagttccggtagtcggggctcgcgccggaggaatacctgatatcatacctgaggatcaggaggggaggaccagctttttgtacacaccaggggatgtggatgactgtgttggcaagatcaagcggctcctgtcgagcgaggaactgagggaggccatggggagagctgccaggaaggagatggagaagtttgactggcgagcggcgacgaggaagatccgcaacgagcagtacagtgctgcaatctggttctggcgcaagaagagggcacaggtgctgcggcccctccaatgggtgctgcggctgctgaggcggacaatgccaggagctgccgatgccgcagcgaagcaatcctag

SEQ ID NO: 12715 - DNA, 435 bp, Zea mays
  Peptide Sequence Number=SeqID_54494
atgcggcagaagtactcaaacttttctttatgtgcggacggcggtggagctcgagcagtacgcccacgcaaggagtcgcagtcgcagtacgccgccggctgcctgctggtgctggagctcgagcagtcgagcgcagccgcgcccacgcaaggagcagaacgccggacgccgggagcagttgacggcggggcagcggccgagcagtggagtccagcggacggcggtggacggcggggcggcgggctgtggcaggcggcggccgagcagtgcagaagatctaggtctagggttcggcggttggctggtgaagtggtgggcggctccgcggttggacgcctgggcggtctgcggctctgcgctttgcctgtggctgcctggctgcctgcgggctgcggacagcggaccgaactaccggagggaggaaggaaagactag

SEQ ID NO: 12716 - DNA, 672 bp, Zea mays
  Peptide Sequence Number=SeqID_54495
atgacggtcggcctgggggtggagcttgatgcagtcatggagaacatggttcatggcctgatcgaaggacacgaaaataccccggacaagggagcggcggcgtacggtggaagagtagagggaaagggggtcagtaaagcgggagccgcaggggctacatggcaacacagggaggggctgctggaccgaggggccaagaggtggagagggagatgcaaggatgctggtgagggggtcaacagcaggatgaggatggtggccgaacagcgtgaccaagcccatggcaggagggacgacggcgcggtgacggaggagagcccgcgcaaggtgttgggcacgcaggaaggacctaccggagaggagggcgaccgagggcgagccacgcagggaaggccgaccggcggcaggccacgcaaggaggacgcaacccccctggtcggtgcgtcctgggtgcgccgaaaggacccgccggagaggtgggcggccggggcgggccacacaggggaggccggccggcggcaggccacgcaggagatgtcgaccggggatggcggcgaccggagtgaagggagcacgcggactgctgggtctgacggcgccgaccgacggcgcgcgtgcaccacaggcgcagatccggcggggcaaggcgcaggagctcgtgggagacagtga

SEQ ID NO: 12717 - DNA, 450 bp, Zea mays
  Peptide Sequence Number=SeqID_54496
atggcggcaccggccccgagccccagccctggcggcgacgtgacatcaagccccggccccactagcgggcgcggtcccggctcaggcgcgtcggccttgcatggctccggcgagggcgaccccagcgcggacgcagcctcggtggcggcgcgttgccccatcgggcccccggtgcgagcggacgcggcgcgacacatggcgacaatggcggtgggcgcgacccctggccacggtgtcggcgggcgtggcccctgggccaaagcggcgggcacgaccgtcccggcccctgtgtgggtgcggcggccccattcgcacgcggccgacggagcctcgttcgcacttgagcaacatcgatctttagaaatcattaaggaactgtgtccatctgctaataacgtgtcagcagtagaggcgcgagaagctatacagaacccgtctcccttcccataa

SEQ ID NO: 12718 - DNA, 829 bp, Zea mays
  Peptide Sequence Number=SeqID_54497
agcgagggcgtccacagcctcaccgtgcccccgcccgcgcgcgcgtcttcctccccgcgcaccaatctcgccgcacgcgccagccttcgcccgcgacgcgtcttcctccccgcgcaccaatctcgccgtgcccccgccaccccgcgcgcgtcttcctccccgcgcaccaatctcgccgcacgcgccagccttcacctgcgacgcgtcttcctccccgcacaccaatctccccgcgcaccaatcctccgcctccgcctcgctctccgtgaatggaaggcgccattcagggatcctccgcgtccgcctccgccatcctcgggctcgccccgctcaaactcgatgaaaggcgccattccatgccctcgcccctcgccggcaatccagggctgccacgtccccatcctcgccccgccccacttccttccgccccactcccttcctacgagagacaaacggggcatgcgcggggtcggcaaacgcggcgtgctcccctcctcagtccctatccaacggtgcggcatggagcccaagctatcttcggtcggcgttcgcgacctccgccgtgtcgtcttccccacccccgtcctcgtcgtcgatctccgccgtgtcgtcatccccacccccgtcctcgtcgtcccgctcgacgcccgccgtgacctccaccgcgtcatcatccccacccccgtgcccatcgacccgtgtcgtcatcccccctcctgcgataggatctgggagcagcaaggcaccactggagtcggccccgcaacgtcatcctcaagaccttactgctctcaacctccatcgtccccgtcatcctcgcaggcgcaga

SEQ ID NO: 12719 - DNA, 222 bp, Zea mays
  Peptide Sequence Number=SeqID_54498
atggaggtgaattcctctggcgaggaaactgtggtaaaggtaagaaagccgtacacaataacgaagcagcgggagcggtggacagaggctgaacacaaacggttccttgaagccttgaaactttatggcagagcatggcagcgcatagaagtgtccttacattactgcattatagataaggtacaggggaatgtcgacttgaagcctaaaagcttggtttaa

SEQ ID NO: 12720 - DNA, 747 bp, Zea mays
  Peptide Sequence Number=SeqID_54499
atggaccctcaaactcctgcgctattcagagtgaccctgactataatcctcaacgagacaccgacggatgcagaaatggtcgtcagccagcagcaccaccttgccctctgcataaacttaaactattctcgctcaaggctgcaattccggggatgctggagggcgtgctcgcaagatttctggggccggagcgcgagaaatccacaagaaaagatagtggcccagatttctcgcggcgctcgccgcgatcgcgacccgcacaggccacagcctctctcccctctgctcccgcggcccgcgcagcgcacagcatacagcgcaccgagctgcggccaccgcagcgaacagcaaagcacctccgactccaagtcgcgagagccttctcattcgtcttcctcctcttccacccatcctgcctgctcacttccgttccgtagtccagctagatccccgggcaaccgatccaccgagaagcttgtggttgtggcggcggcggagagggaagcgggaggccaccgtgcgtcggaggtggacgagggagcgaggcggcgccagaccgaggttgcgtcgggctcgatttctactgggctgctgtctgctgagaggacggcggttgtgatttgttcgtcgtggtatgtgatgggtaactttacggggttgagtgttttcttggtgagacgtgagtctctgatattggttcctggaggcttattgcttccctttgattggaagaactggatcctgtga

SEQ ID NO: 12721 - DNA, 402 bp, Zea mays
  Peptide Sequence Number=SeqID_54500
atgattaaccgaggtttaatcatggtcatcaccggggatatctcggatctcggtgatggggccttctccatgaggctagcgatacgagatctcggagcgcctttctctacacccgctacgcggcgcaaggcgcccctttggtcggcattgcagaagagggatccaaattggaaaacctcaccgacgacaaagttgaagacgatgttgaagatgacaaccatggagctgtcgggagtcgacgtcgcaccccctacctggcgctcctacgggggcgtgccacacaatgcttttgggaggacggcgataacgatcacagctctatggttcgtgcagggcacgacagaacacaatgagttatacatgtttgagtcgtcgcgaggcgtaataccctacgccttgtag

SEQ ID NO: 12722 - DNA, 204 bp, Zea mays
  Peptide Sequence Number=SeqID_54501
atggaagaacagattgatgcaagcagcagacagggatcaaagcgcgataggtacatcaggtccgaaggcaacctgctcctgaacgactcaaagcaacacgtcgctgatgctccagaaccagatgctgctggagaagagtcgtgggacttcgagagtagttcaaccatgcccaggtattacagaaaatgcagtcggccctgctga

SEQ ID NO: 12723 - DNA, 1887 bp, Zea mays
  Peptide Sequence Number=SeqID_54502
atgtcggaggccgaccggatacgccaccgcacggcggcactggtgctgcacgacgatgaggtaagagacaaaccggacgccaaggcgaacgtcttcgcggatctcggctcgccggtgtcgccgctgcgggcgcgggcgagcgtggcgacgtcctcgtcctcgtcctccgggtcggccaagtcgccggcgccgtcgaatgctgggatggcgggcgggaggagccactccggcgagctggtgggcgagtgcaatccgccgcggctgatggcgcacaggcggtccggatctggacagttaatattctctggcggcagcagccgggggagcggcggcggcggcggggaccgtgggagcacggcgagctcgccgatactgaatgcgctcccctccgggaacatctgcccttccggccgtgtcccggcaacggccgctccccctccgccgcgctcccgcccggacgtgctcggatccggcaccggccactatggccacggaagcatcatgcgcggcgccggcatggcccccgccaggagcagcattgactcctcttcgttcctcggacactcctcgaggtcgccggcaagctttccggcaagcagtgggagcctccaggaggtgacccgcttggggaacgagtggtacaaaaagggtaagtacggggaggcactgcggcactacgagcgcgccgtggcgctgtgtcccgagagcgccgcatgccgcggcaaccgcgcggccgcgctcataggactcggtcgccttgccgacgcgcttcgtgaatgcgaggaggctgtccgactcgacccggccagcggccgcggccacagccgcgtcgcaggcatttgcctccgattggggatgattgacaaggcgcggaggcacttcacccaggcgggtcatcttcagcagtcagaccccaccgactggcagaagctgcaggaggtggaggtgcatctgggaagatgcacagatgcaaggaaaattggggattggaagagcacgctgagggaggctgatgctgccattgctgctggtgctgactcctctcagttgcttcttgccttgaggtcagaagcacttctccaccttcacaagctggaggaggctgagtcgactcttgcgagctttctgaaattggacagtgcattgccctcatcattgacagcagcagaactctcgggcatgcttgctgagtcatacgtacatattgttcgagcgcagattgacatggcattggggaggtttgatgctgctgttgctgcagctgagaaggctagagatcttgatcccgggaatgcagaaatcgggatggttttgaataacgtgagactagttgcaaaagccagagagcaaggaaatgatctcttcaaagctgccaagttttcagatgcatccatggcttatggtgaagggctcaagtatgatccctcaaattcagtgctccactgcaatcgagctgcttgttggtcaaagctagaaaagtgggaaaaggctgttgatgactgcaatgaggcactaagaatacaaccaagctatacaaaagctctcttaaggcgagctgcatcatatgctaagcttgagcgttgggtggattgtgtgcgggactatgaggcgcttcggaaggagcttcccagtgacaaggaggttgctgaggcattgttccatgctcaaatttccttgaaggcgactcgtggtgaggatgtatcaaatatgaagtttggaggagaggttaacatcgacagcagcccaatggtggcaaaggcagagaacgtgcggatagtcccgacgttcaagatatacaaaggaggggtgaaggtgaaggagatgatctgcccgagcttgcatgttctgcgctactccgtgcggcactattctgtatccagttcttga

SEQ ID NO: 12724 - DNA, 357 bp, Zea mays
  Peptide Sequence Number=SeqID_54503
atgacctcagccaaccatctccagcaagtaggcaccgaagcaagagatccgagctatggctatgggtgtgacgagaggaatctgtttgagcagatgaacaagagaagagaacaacatggaggcctccctccaggaggtgaagaggaggctggcctcctttggatcgagggatcgatgtgtggcctccggcgacgacattctggcatatccgaagcaggtcgcgtggagcaccgtcaaccagatcatctttaccgaggtattcgaaaccacacaaggtaccgactaatcttggttggtgtctctacacaaaggaaagctcacgcgagcgccaagcaccacggtcgagtaactctgtag

SEQ ID NO: 12725 - DNA, 246 bp, Zea mays
  Peptide Sequence Number=SeqID_54504
atggccgagcctgggcagggatgggaggtgacggtgctcgcttttcaccgcgaactccggatcacctactcaccccctctaggtgctctcaacaacatcgacgatcccacttgcagcttcatcgtaaccctaaatcaggatctcgaaggccgcggatggggcaccctagggaagggtcatcgtagcatgaaggtaaacccttatggaaaattgagcaatggcgaaggcaatggtggcccgcggtga

SEQ ID NO: 12726 - DNA, 426 bp, Zea mays
  Peptide Sequence Number=SeqID_54505
atgccgattaaaaagccgtcatatgcagtgcagtgcaatgcaagggtgcgtgtttatggacatggtgatggtggtgtggtggaggtggtggttgtgaaactcaactcttctcctgtgaaccatgcagctaaagagaccccgggcgggaaagtggccaatagtacaaagcggctgcgaggtaccaatgcaaaggaggtagcactatcagccgatgaacaaagcccaaacccagcgagccccacgccgtctccgtgcatgggccaccaggcaccagccacaagcccaccgggtggcccatggaaatgcatggactatgtatacagaatgtgtacacaccaggatcctttcaacatgcttaactatgatgactcaaactggatatgtgagtattgtaatgtggacctatatgctgcggaagaactctaa

SEQ ID NO: 12727 - DNA, 306 bp, Zea mays
  Peptide Sequence Number=SeqID_54506
atggttcaggattcaaagaagaggaagaagaaggtgactactaggcagagcaaagttccgaaggatgcacccaaagctaaggtggtagctgagattgaggaactccctcctctaggagtcgaagaggcaaagattagagaagttattgccttgatagcgcaaagagttatgcctttggagtcgctcctagagagcgaagatgaggacttcaggcttcggtttgattacaatgagaaggaaaattctttcaagattctgaaaaaggattttattgatagtcgaactgaagtacaggcaatgcgctaa

SEQ ID NO: 12728 - DNA, 924 bp, Zea mays
  Peptide Sequence Number=SeqID_54507
atggcgtccttgggtgttcgtgccgccgccgccgctcgtcttccctccctccgtcctcgccgcgacggcagcagggtgctcaccggcttgagggtcgggacagggcactacggcgtgcggctcgcgctttcttcgtccacatcagcttctcccagagagttcaaggtcgctggccttcctgtcgatgacagcagtttgggcccgggggatgaatatgagtttggactctatactcctaagctgcttgcagttactggagatgattatgtgtctaacccccgcatgccagacgaggatgagttcgaccatttctaccgtgttgtcgccaagaagactgacatgctgctcagctgccaccttccaaagccgcttgcagtttctgaagaggagaaggccgtgcaggagaagttcaaggagatggcgaacgaatgcatcgacctcctggttgatgcgatgcgccgcatcccagcggagaaaaggcgcccactgttctcggtgtttggtgagctgtacccggtatttgagtcagtgaggtggactgccgagggggggtgtgccaagtggtggatggcgctgcagatcatggagaagctggagatcgtgcgcaagatggtgtcgagcgcttgcggcggcacccctcttgacagaggcacggtgttcgccaggaaggtggacctcaccggtgtcgacggtcaggcgctcgccggccacggcctcgggagcaacttatcagttgaggacgttcatggcttcatgctgtttacgatgaatataatatgcttgcatgcatgttgtttcttaattttgggtgaaacgaacacaggtggtgatcttcgtgctgctccacaacgtcttcagcaacgtcaagtcggacatcgatggcatggtctctgcttccactccttattagccatcgtcacctag

SEQ ID NO: 12729 - DNA, 207 bp, Zea mays
  Peptide Sequence Number=SeqID_54508
atggctgcgagcgggcaggccacactggcgggccacaagccgccgtgccggctagccgcgtgcaggctggccacgccgggccgtcgcgacgccgacttgccgcgctggccggccgtaggccaccacgccggcgggccgcaacgagccgccgcgacgccgactggtcacgcctgcgccggggccgcacccacgccgggcgagctctag

SEQ ID NO: 12730 - DNA, 759 bp, Zea mays
  Peptide Sequence Number=SeqID_54509
atggcgtccttggttgttcgtgccgccggcgccgccgccgccgccgcccgtcttccctccctccgtcctcgccgcaacggcagcggggtgctctccggcttgagggtcggaacagggcactacggcgcgcggctcgcgcttgcttcgtccacagcttctcacaaagagttcaagatcgcctgccttactgtcgatgacagcagtttgggcccgggggatgaatattttggcctctatactcctaagctgcttgcagttactgaagatgattatgagtctgacccccgcatgccaggcgaggatgagttcgaccatttctaccgtgttctcgccaagaagactgacaacctgctcagctgctacattccaatgccgcttgcactttctgaagaggagaaggccgtgcagaaggagttcaagctgatcgcgagcggatgcatcgacctcctggttggtgcgatgcgccgcacccccgcagagaaaaggcgcccactgttcttggtgtttggtgagctgtacccggtatttgagtttgtgaggtggactgccgaggcggggtgtgccaagtggtggatggcgctgcagatcatcgagaagctggagatcgtgcgcaagatggtgtcgagcgctttcggcggcgcccctgttgacagaagcatggtgttcgccaggaaggtggacctcaccggtgtcgacggcgaggcgctcgccggccacggcctcgggagcaacttatcagttgaggacgctttcctctag

SEQ ID NO: 12731 - DNA, 522 bp, Zea mays
  Peptide Sequence Number=SeqID_54510
atgacggcttgtaacctccgtttatgggaatattctagggataacccgggtgattctgggcagatgggagatggcagcagatcacgtctcgtccacaaacctcagtacctcacgacggcagacgggctggctgacggcgcgacctcagagtcagagctggcggcggcggacgcggctacggaagcgcggctggagtggcggcgcacagggaagcgtggctgcgcgggtctccaagctgtgacgggctggcggcgcgtagggaagcgcggggctagcggcgcgcagggatgcgcggggctggaggcgcgcaggaaggtgcaggtgtgcgcgtgcgccgtggggagaagtgatgggctggcggcgcgcagggaagcacggggctggcggcgtgcaaagaagttgcgcgtgtgcaccgtgggggagaagcggaatttccgatacgcctcggatacgtatccagaagtatccgaggagtatccgtatctgatacggtatctgacaccggatcctagtgcacattga

SEQ ID NO: 12732 - DNA, 294 bp, Zea mays
  Peptide Sequence Number=SeqID_54511
atggagcctaaagcacgcaatcagttgcttgttggagcgatcgatctacgtcaagattattggcaaatcaagtctagagcccgaccatctcgatctgtgtacgaagcatcacagattcacgacttccgtttcggtactacgcggctgccatggccgacgccagcaggcacacgtcgccgcgtgacgccaggtgcgtgcgtgcgtgcgtgcgcgatggacatatgtggtggactggtggtggtggacacacttggtttggtgccaagcggggccgagaccgtgatgcatgcctga

SEQ ID NO: 12733 - DNA, 249 bp, Zea mays
  Peptide Sequence Number=SeqID_54512
atgggcgacgacgacgaccacaatgaggggctgagggcggggccgacggcgtcgtggcggctcaacgtcagagacttccacatgccggagcggcccaaggagccgcccttcgtagccagggtcttcctccgcagccacgtgatcttagattatatagttaactccaagataataccacccgaacgaaaaagatcgccatggcaaaccaaccacgatgatataacagcaacaaacaaaagcggtgcttag

SEQ ID NO: 12734 - DNA, 384 bp, Zea mays
  Peptide Sequence Number=SeqID_54513
atgaacccgcgggattggcagacttcatcggagtgtagccttcgtcttgccgtggagaggacgaagggcaaccgtgccgatcatctcaccttcgtaggtgtagaggggcgacgaaggcttcgtgcgaagggcaccagttgcagccagcaaaagcaaacttacaagtcatgcacatcacctacaaggaggcctacaaagaagctttttgttaatgacgttgataagaaggatggaggggctgactgtgctgcagccaaagctaggcttattagctcctacaagatcactggaatagatagttcagaacaaataagtgacattttgcgtggcattgaaggaagagtgatactgctttggtcatgtcttcttccacatgtgcagtga

SEQ ID NO: 12735 - DNA, 438 bp, Zea mays
  Peptide Sequence Number=SeqID_54514
atgccgcgggctgccgccggcgaggcggccatccttggcatccgtgacatcacatcaatcgtcaaggtgaggggacgacaaggccgaggggttgccgccgatgtcgttattggtgaggttgatggtggtgatgtcgtggatgctggagtggcgcttgtccttgacgctagagttgaggcggatgatgtacttctgtgcatggcaagaaattcagaaccagacgacctctgtgttagcaactacatgccatacgagccggtgaagcagatcatcccctacctcattacgtgcatcgaggagaacaagggcctcctctctgcatcctccttagacatgcctcgtgccagaagaagttgggggtattatgattgtcctggactcatttttgaagtgacagccattttcacgtctagcgccaccgacgtctacaacctctag

SEQ ID NO: 12736 - DNA, 210 bp, Zea mays
  Peptide Sequence Number=SeqID_54515
atgtatggttcgcaggtggtgatgatgatgatgattttggttatgactatggtaatgatggctcgtcttagacacactgcacggaagtcagacagtcctttcttgccctctcgtctcacggagcgtccacttcgtcatccagtgaccggtcagtctagccacatggagaagctgcacaatcgcctgcacgaggagcaggaacgtcgatga

SEQ ID NO: 12737 - DNA, 666 bp, Zea mays
  Peptide Sequence Number=SeqID_54516
atgacgtggtggtgtagcgttgaaggagctcggcgtgatggcgaattggagttcgacggagacggaaccgattatcgaacagaaattgcgcagatcgacgacgcgagactcgatctggcgagcacgacgggtgaactcggttgggcgcggcgattggagcaggcggccactggggcagcgcccaggcacgcacgacgagaatccaagcagggccagtgcgcagcgaccatggaaaagatccgagctgggctacggaagctggagggcgagcaggaaaatccgggctggggcatcacggtctgctgcgcaaccatggagacaagcaaagggagcagggcgccgcagggaaggagctggggactaggcacatggctggaagaggctcggcgcgcagaggaagctccggcaccagggaggaagacgcgcatggcgctgggcgcggtccgagcagaggctagccagacacgcggagcgagcagggagcaagcccggcgcgcgacgcagaggaaaatcaagctgaggagcaccgagctggagctccgaacaggagcaaggagaagggaggggcgcgacgctgggcaggagcagggagggaactccggcgcagggagcagggcgcaggaggaacagaggccgagctcggtgagctgcgcgcagggaagttag

SEQ ID NO: 12738 - DNA, 1170 bp, Zea mays
  Peptide Sequence Number=SeqID_54517
atggcgatcgccgagaataagcgactgcaagttgacaaggttgcctatggtgctaggaagcttctccatgtcgtcgcggtggagacccagggtgttgtggctgcccttcatagggaaacacttcagggcacaggtctggataaagagcagatgaggcaggatagcgttgcagacaattgccatcgccagctaaacaagatacttgttgtctgggatcaaaataacatcattgtcaggtcaagctgctgggatttgggtatggttgaattggtgctccaagatgtggggaagtctaagtcaatagacaacaaaactttatatgacacgttctgtgcgtttgggaatatcctttcatgtaaaattgatagaaactccttaggagaaccaagggaatatggttttgttcagttcgagatggatgaatctgctcagtcagcctttgataaactcaatggcatgcttctcaatgacaagaaagtgactagtagaccatttgttcgcaagcaggactgggaaaatgtttggaacagtatcaaattcccatcctctatccttcctgggaaaatgtctggacagtggctgatcgggcaccttctagcatctgaaaatgggcagttgctcatttcggtgcttcaaagtttagggaatcctataattggtgagaggttctggcagctatacagcttgaccatccagcttgctcatttatttttggatgcgaatgaggaatacacatatggttcatttagtttcattggcctggatacaaatacactttatgagatggtttgtccctactgtgatttcgggttagtggctgaattggatgatgcaaatgctctcatgagccacttcgaggggacaaaccctgatttccatcatgacccaaggtttgggatcatggaggcaatctctgtcgtgatgcagcatggtatggcagggatgaacaaggaggttcatgtcacaggaaagccgaaattcttttcagaactagagatggagtttgagatcaaacgtagggacaatccacccatgtcattggaggctttgctggagactatcatttgtctgtcagttcatagcttctttgtcatggtttgggattccggtggaattgatgtcatgtatcggcttgagggcaagccgatttttaagaaaggggaatgttaa

SEQ ID NO: 12739 - DNA, 534 bp, Zea mays
  Peptide Sequence Number=SeqID_54518
atgaaccgatctcgggctaccataaatagggcagagccgaagccttctttccccttttccttcgccagcgcgcagcgacccacaaccaggctcgacctccagcatcatcgaagaaatgcggatgagagaacccgccgccgcgattgtccctcgccaacgccgcggctggacctccgcaccgaaccccgaggacctgcttggcgcggaaagctccgaccctcaccaatttggacgattgttaccccggggccgagcaatttctcgtcgcggtgcttctccgccatggcagccgcgacaccacgtggtctgtcctcgccatcgctccaacccctcggtatgtccctcgactacctccaccgcgattatacgaacgtcatacacatgtccatagtgaatcggagcaccgtagcccctagtgggggggacctcgccggacttctccgtcgtagaagcacggcggcgccgccgtgttcaagctcggggtggggaaaactgagcggagtcatagatctaggaacggatggccctgattaa

SEQ ID NO: 12740 - DNA, 165 bp, Zea mays
  Peptide Sequence Number=SeqID_54519
atggcaagaataccttccctcagccctgatgctcttccactgccgcaccccgaggttcagacggcgcaggcgagtggtgtcatcgcagcccactacacggcccaaatcgagatgtacaaaagcagcagctacgtcaagacagagggcatcgaagaaagagaatag

SEQ ID NO: 12741 - DNA, 342 bp, Zea mays
  Peptide Sequence Number=SeqID_54520
atggtgaataagacattcaagaagatggcaatgatcaagtgggagttgaggaagaataggacaaggaggaggcaccacatccaagagtctgcaccaccaatcaacgagatcatccggattgaggatgctttgaaggatctagattggctcaccggagactccaaggccttcaaggatggctcaccgccacaccgctggcttcataaggataaggccgatgatggcgacgccactgtggacaagacggagctcgggtatcaatcccccaagaaggtcctgaaggacatcctcactggagactccgactccggtgacgatggctgccacaagaagctgtactga

SEQ ID NO: 12742 - DNA, 1140 bp, Zea mays
  Peptide Sequence Number=SeqID_54521
atggctaaaccagaggggccaaccattggcgtgaagctgttcgtggacaaagagaagaagaaggtgctctttgctgagtccgacaaggagttcgtcgatgtgctcttcagcttcctcaccatgccgctcggcaccatcgtccgcctgctggacaagcagtctcagatggggtgtctcgaccagctgtacaagagcgtggaggacctcaacttggagtacttccaaaccagtgcttgcaaggcgatgcttctgaaaccgctcaacgcggcttccggccactgctgccgcctcaagatcaacgttgatggaagctttccaagggtggtctatgtctgcaaggacacgtcgtgcagcgcactcagcgacaacgcgtttagttcgttccctggcacggtctgcaaatgtggtaaggtcatggagttcgttgggcggtgcccaaaatacgatggtgacactgaaaccgccgccgccgcttgttcagaggatggagtttttgtgataggttgcttgaagtttatcgtcaccgatgatctccaggttgcgccagcatctacctctcttatgatgtctttcttcgagaaatttggtgtgcttgatccagctgtcctagagcagcaggttctgcagttcagttctgaaaagataaaatgcttgttgaagagattgttgacgtccaagcaacctctcactgatcattatttcgaagctcttgttccacaagatgatgcaagcctagaagcgcttgttcagaacttacatcctaaacaagaaaacgaggaccaggaaatgccaggaaaccagaagatcagggttcttcagacgaaggacaactctgccctgctgtatgatgaagttggtgtcgattttgtggactctctcttcggcttattaagcattccactgggatcggcaattaagttatattgccagtgctcggcaaaaggctgcctcggtaatgcttacaggagcatagatggtagtgtcaaagaattcgtcagagaggagtgccagagtctccttctggacccaaaggttatggagctacagagggctgtccttgtgctgagtcgcaatatactcagctctgtgcttctgcatcctaagaagaccaagaagctgcaccattaccgtcgcatgtaa

SEQ ID NO: 12743 - DNA, 1377 bp, Zea mays
  Peptide Sequence Number=SeqID_54522
atggctaaaccagaggggccaaccattggcgtgaagctgttcgtggacaaagagaagaagaaggtgctctttgctgagtccgacaaggagttcgtcgacgtgctcttcagcttcctcaccatgccgctcggcaccattgtccgcctgctggacaagcagtctcagatggggtgtctcgaccagctgtacaagagcgtggaggacctcaacttggagtacttccaaaccagtgcttgcaaggcgatgcttctgaaaccgctcaacgcggcttccggccactgccgtcgcctcaagatcaacgtcgatggaagcgttccaagggtggtctatgtctgcaaggacacgtcgtgcagcgcactcagcgacaacgcgttcagttcgttccctggcacggtctgcaaatgtggaaaggtcatggagtccattggacagtgcccaaaatacgatggtgacactgaaaccgccgccgccgccgcttgttcagaggatggagtttttgtgaaaggttgcttgaaatttatcgtcacccatgatctccaggttgcgccagcaactacctctcttatgatgtctctcttcgagaaatttggtgtgcttgatccagctgtcctagagcagcaggttctgcagttcagttcagaaaagcaacctctcactgatcattatttcgaagctcctgttccacaagatgatgcaagcctagaagcgcttgttcagaacttacatcctaaacaagaaagcgaggaccaggaaatgccaggtaacctgaagatcagggtccttcagacgaaggacgattccgccctgttgtatgctgaagttggtgttgattttgtggactctctcttcagcttattaagcattccactgggatccgcaattaagttatatggccagtgctcggcaaaaggctgcctcggtaatgtttacaggagcatagatggtagtgtccaagaattcgtcagagaggagtgccagagtcttcttctggacccaaagttgccacccttctttggttgctgcgcttctaagatccttcagtgcggaaatatggtgaagtccattaaactttgtgaggcgaatccaaaacaaaaaggtggatgcgagaaaggcgaagtatatgtaagccggaaggcgaatttcctggttactgatgacctgcgtgttcttccactctcattagcatccactgttaagattgttagtgattccaaaatccagacctcgaatcttgtggtcaaagaaatcacattaacaaagtccaaggttatggagctacagagggctgtcctgctgctgagtcgcaacatactcagctccgtgcttctgcatcctaagaagaacaagaagctgcaccattaccatcgcatgtattag

SEQ ID NO: 12744 - DNA, 234 bp, Zea mays
  Peptide Sequence Number=SeqID_54523
atgggggtggcggcgcgggaggaccggaggagagggaggaagaggatcagggcagcgaaacaacttgggcttcatgccgcggtgcgtctcgcctccactttggacagagccgcagaagacgatcaggtggaggaaactgggctggtcactggtgggccgctctctgctggatacggcaaaaccgctaagcacgtcgtgggtagggccagggtcacatttcctttccaccattga

SEQ ID NO: 12745 - DNA, 966 bp, Zea mays
  Peptide Sequence Number=SeqID_54524
atggttatgaggagccaactacatttgacggtgttgcttgctgctgttatgttatcatattgcctgaaagtgacacctccacaaatgattaacctggatagcacaataaaacataatcatgatacttcaagtcaactggataggtttgatcctgtattaaaagctgggaatgactatgccaagaactttattttctctgtagcagtagagacaagatatctgaatgctagcattcgggagcttggtgatcattttcagacaaaacgtgatggtgaaaatggtgttgatgcatcaattgaaaagagaacacctaagctacttcagtttacttttcaagagttgaaatctgccacgcttaacttcaggccaggcaatattcttggggagggtgggttcggttatgtattcaatgggtggattgagccaaacagcactgctcctgcaaaacctggcacaggggttactgtggcagtaaaaagtttgaagccagatgcgcttcaaggtcatagagaatgggtgttgcatcataaacaccttgttaagttgattggatattgtattgaggatgatcaaaggttacttgtatatgaattcatggcacggggaagtcttgaaaatcatcttttcagaagggctcttcccctaccttggtccaacaggatgaagattgttctaggtgccgcgaaaggagtagccttcctccatggaggtcccaaacctgttatttacagggattttaagacatcgaatgttcttcttgatgtggagtacaacgcaaaactatccgatttcagtttagcaaaagctggtcctcagggtgataaaactcatgtatatactcgggttgttggcacctatggttatgctgcaccagagtatgtaatgacagatgcgttttttttgggaccaagccctatgggcaacaatggagatgaccagcgtcttggtttatcaagaggaagttaa

SEQ ID NO: 12746 - DNA, 318 bp, Zea mays
  Peptide Sequence Number=SeqID_54525
atgcgctggcccgcgccctggcggccgcgccccggccccgtgcgcctcggccgcaccccgcgtgccctggccgcgttcggccgcaccctggccgcgtgcctcggccgcgccctggccacgcctcggctgcgtgccttggccgcgcgccctcggccgcgtgccccggccgtgcccccggttgtgccctcgcgcaccccttccccggcggcctcatgcctcgcgcgcctgcacggttcgcgtgccctcagcacgtgcagcgtgctctcgcgcgtgcgatgtagtcgcgctgcgttcgaccctcgtcttaatccattttaa

SEQ ID NO: 12747 - DNA, 1620 bp, Zea mays
  Peptide Sequence Number=SeqID_54526
atggagcaaggggagaaccaatcagctgatagttttgttgtttcatcatcggataataatgagctggaagatttacctgtgaaggaaagatgctttgagcagagagaagctcttcctggggagcctcgctgtgttgtgtgtggccgatatggtgaatatatatgtgatcagactgatgatgacatctgcagtgtggaatgtaagacaatccttctttctcggatagttgctaaaacaaagccagcagtaaaagcagcaaagcgtgtgaaccttcctttaggcgatgagagcttttgtattaaggacatcaattttccaaatatacttactttagctgacagccggatcagttcactgaggagtaaacttgacatttgtgtcaagggtgatgctgttcctgatccaatcatgtgtttctctgcctgtggtcttcctgagaagcttgtgcacaatctcgagactgcgggatattgcatgcctactccagtgcagatgcaagtcatccctgcatcaatgagtaatagaagtttacttgtttctgctgatactggttcagggaaaactgcatcttttctaattcccataattgctcattgttcacgattaagatcacaagaatgcacaggcaatcaaggaccgttggctatagttcttgctccaacaagagagctatgcctgcaggtagaagagcaagcaaaggtgcttggtaaaggtttgcctttcaaaactgctctaattgtcggcggagatccattgcctcaacaaatttacagaattgaaaatggtgttgagttaattgttggcacccctgggaggctaattgatcttctcatgaaacacaatgttgaccttacctatgtttctgtattcgttttggatgaggtggactgcctgctggagaggggattcagggatcaggccatgcagatttttcagtcactttcacacccacaggttatgatgttttcagcaacaatacattcagaagttgagaagatgtctaactcactggctaataatgtgataagtatctcttgtgggaacccaaacagaccaaacaaattagttaaacaagtagtcatttgggtggagtctaagaagaagaagcagaagatttttgagataatgaaaagcaagcaacattttaaacctcctgctgttgtgtttgtgagttccagggttggagctgatctgttgtctgaagcaattactgttgctactggattagaggttgtttctatccatggtgagaaaacgatgattgagagaagagagaatttgcgaaggtttttaacaggagaagtatctgtcgttgtttctactggcgtcctggggcgtggaatggatcttctgaaagtacgtcaagtgatattgtttgatttaccaaattccattgatgaatatattcaccaagttggaagggcatcccggatgggtgaggagggtatggctgttgtgtttgtgaatgaggaggatagaaggattttcaaagagcttgttcaggttctgaagactgcaggagcaccgataccccgtgaaattgcaaattcaagatacacagctggtgtttatgttggtagcgagaggaagagaaagttgagctctaggtctcgttcttga

SEQ ID NO: 12748 - DNA, 237 bp, Zea mays
  Peptide Sequence Number=SeqID_54527
atgcgtgagaaaagggtgtacgtaccagacagtgtcagaggacaagatctcacagaaccttcttatgctccagtcagaggtgatcgactgacacatgacatccccaccgtagatgtactgcagctacctcagacaagcttaaatgccaaccatctccaagcaattccagaactaacaccccaggacaaaggcacccttgtcaattctcatacacaggtcgcactgaaatcactctaa

SEQ ID NO: 12749 - DNA, 321 bp, Zea mays
  Peptide Sequence Number=SeqID_54528
atggatcctgctaccgtcgtcgtcatcgaggagtcataccggtcctactattgcatgcgcaacagagcctatgaagaagccctattttctgctgctgtttgccaactccaagtagatcgcccactgaagaagctcaccctcctcgctatagaaggtgattcatgcaagtgctcacctcccgaagatatgaagaaagtaagaaaacaaatcgtcgatcacatttacccgtggatattagaatgccaagagaaaggacatgccaaagtgccatcattgggaagcaaatggatgtttaggacggacactggggctttgaagtag

SEQ ID NO: 12750 - DNA, 285 bp, Zea mays
  Peptide Sequence Number=SeqID_54529
atggatcatcaagatgctaccgtcctcaagctgcttgatgcaatggtactgatggagcagcgcttaatagctgctctggctggccgtaatggcgagcaggccgacgcggaaaagctgaccaacaatactgacggtgtgtcgaagcttcccactaccgacgctaacaagcacgagctgctcaaggaggcgctcgacggcctcgccgccctgtgcgcggcgttcctagcggacgctgtcgcctgtgggagcaggccagactgggtcatcggcgatagccgccggtga

SEQ ID NO: 12751 - DNA, 543 bp, Zea mays
  Peptide Sequence Number=SeqID_54530
atgcgctcttggtccccgctctctgctcggatagaggtccggtaccgccacgtggcctatgggcgcgtggcacaagccttcggttccccggtcgcggcccagctacagagaataggcagctcgcagcccatcaggttaccggtcacgcagtcacgtagagtcgcagtcgtccctccagccgccagcccgacactacgcgtctacgcctccctccagctccagccggcagccgccactagcccactcacctcgcgccgtctcgcgcccggaggccagaggccagagcaccgccgcgggcccgcggcgccacgggcgctccctcctggtcttgggctcctggccggctggcctcctttcgtccttcgccagttcgcctcacgccctcaccgccatgacgcgccagcgcccagagtccagacaagcaaatcaagcaagtccaggcgagcagccgagcaggggcggtcgggcgggcgcggactgcagacaagcaggcaagcaagccgtgaagccaagcagactgcagacaagcaaagcaagcagtga

SEQ ID NO: 12752 - DNA, 756 bp, Zea mays
  Peptide Sequence Number=SeqID_54531
atgcgtctagcaaggatactccagttcctcctgatcttcttgtgcctaattgtgactgtggcagattggcttgggtatttcaatccaaacatccagacacggctgctcgctgcttctacacatgtggcagtattaacatgtgtaatgatgttttgttccatccttgtaggatcacttgaggtgtttttttctagtgaatcgacggtcctgccatacagtggacgtaggtgtattttcatagagtggttgtatggttctaggtcccattggcctgagccagaggcaaaggagaagaaaaagaacgaggcggaacatgttgaagctaagtatggactagttccttccgagcttggtgtcagctatttttgtggccatatggtagattacgaagagaaaaccaggaaatgcacttgggagacattctttggtaaagacgaggtgatgcagacgataaggtcgaagaggctcatgggacagaagatgcagtgtggatcacagctcgtcgattcctacattaaatatcgcagacaggagatgcgtagagattggatgcaccgggaactatatcgcagacgagactcgtgcaaggaggacaacacatcaaggttgagtgaactcatcgcgctaggtgaggcaggactacatggagaaaaggaggacgacaagtttatgtctcaggccgccgatgaagcggaggccgcttattacaagcaaaaggccgatgaatcagaagttgaggaccagctattttcctag

SEQ ID NO: 12753 - DNA, 1056 bp, Zea mays
  Peptide Sequence Number=SeqID_54532
atggcgccgagaagtgttaccttgtcaccatggcttatagagccgagaaaagagtccaaaaacgacattaagtcctttagggggtctaaacattggtatgttgatgttctattccctgactccaagacaaaccagctctgtcagcttgcttatgatctgttcaatggttgcagatatgcacctcctatctcttataactttctgaatctcatccgccttggtggcaatgctaaaactacatttgagaagagaatggggaacattgatgatgcagttcctttctttggcagaggcttcaacaagatctacccactgattatggttgtttatacgctattggttgctagtaatttctttggccgtgtgattgactttttgggaagctggaaaaggttcaagttacaacaggaagaagagaatatagatggtttagatccctctggaatgattattgtacaaaaagagagatcttggatcgaacaagggtgcaaagtgggtgagcatgttattccattggcaaggaatttcaatggcgtgaacacagatattgaatcacaaaatgtgccattggttggaaacacagtggagatgaaagtaggggcagcttcttccagaaatgatgggagagctggccagttgaaatatgcaaacagcagggagactatcgccagcaaatacacttctattagggaacagaaccggcagtcagggaaggcagtgaaaaaggaaatttcatcaaactctgtatctttgcttgaagaaagaagttctgagcagtggtccaatactggtataccaccaactggtgtgtctgcaacatgggcctcgatgaagataggttttcaaaatttcaaagccaatttgggttcgaagaagtttcttcctttgcgccaggatccaggatttgttctaaatttgagtgtctcttcacctgaatctcttgatgacatattccaaaggttgaaacgacggcctgcaaatgtgcttgtggattaccttgatgacgatgacaacaacaacacacgagatatggatgtgcatttccaggatcaatga

SEQ ID NO: 12754 - DNA, 621 bp, Zea mays
  Peptide Sequence Number=SeqID_54533
atggcgtctccccctcccttcgacctctgcggcgatctcgacgacgacgacatcgataaacccgtcaccgccgtccccaaggatcgtcgtctccctgccgctgcccctacaccgaacggcctcaatgaccacctcctccgcttcacccgcagcctccagcgccccacccaaaaccataaccctagccccaatctgccaccgcctccgcccccagccaagtccggcctcgggcaccatagcaagctccacctcgcccgaccccagggctcggactcagccttggctccggaagacgacgaactccgcctcacccaaccccagggctcggactcaacctcgacctcagacgacgaactccgcctcgcccgaccccagggctcggactcagccttggctccggaagacgacgaactccgcgtcgcccgaccccagggctcggactcagcctcggctccggaagacgacgaactccgcctcgcccgacccagggctcggactcagcctcggctccggaggatgacgtactccgcctcgcccgagcccagggctcggactcagcctcggcctcggaagacggactcgacctcggcctcggaggagcctccgcttcgcccgacctag

SEQ ID NO: 12755 - DNA, 258 bp, Zea mays
  Peptide Sequence Number=SeqID_54534
atggcgaaggggtattatggattcctagccgtggaatccaaagccgacggcaaagatcatagacttatctcacctgaaccggtattctatcaccgaggctgggagatgggtggttacatgatagatctatatgaacacctagaagaagaaattgaagtagaagtggaggaggaaatagttcctcaactcgaagcttctccaactcaagttgttcctgaaggttgctccgaaagtgctccagtgataggagttgaatga

SEQ ID NO: 12756 - DNA, 981 bp, Zea mays
  Peptide Sequence Number=SeqID_54535
atgtcgctgagctttgctgcagctagaagacgacgttccgcaggccctgagaaggctcgcgcagaacagagaggctacccagaagagtcgcctgcggaagaaggcctacatccagcagctagagacaagccgcatgaagctgtcgcaggctcgcagctagagctggagcttcaacgggcgcgacagcaggtgactatagaaaactatcctggtgaaattttcataaacatctctcctaccaagtgctggaacatggttcgtgaaaggctcaatatggaaataaggaggcagctcaatatgggaagagataaccttcctacactacagcctacatgttcagtaatatacattgcaggctatgatgcagcccctaaatcagttcctccatttcagatgaaagaaatacttggtgattatgatgctattcatgtaagacgtggtgatctattgaaaaataggaaagatagatttggtattgaacggagccttcatcctcatctagacagagacacccgacctgagtacattataaaaagaattgcacaatggattccaccaggtcgaactttattcattgcatcaaatgaaagaactccaggcttcttttcccctttgtcagacagtgcacttctggttcttcaatctgtatgccgattaaatcctattcaggtttctacctccatgtgtgctattatatcaagaatcactttgtgcttacctaaagtgtttgatcattcatttggcaacaattcagagtactggcgatcaaggccccatgcaacaattgagaatcgagacaatcagaatatgtcacctcaggatccaccccttgttgcactaagggggctcttccagcgggctaattgtgatgaactgcgagcactacttagtttgctgatgagcaatagaattctgggcgacaattctaggcagcaggcttgccaaatccttgatgaggagattgcgaagcaatggcactga

SEQ ID NO: 12757 - DNA, 516 bp, Zea mays
  Peptide Sequence Number=SeqID_54536
atgcccacccgtgcacccgccaatccgcgaccgcacgtagaaggaacggagaatgacaactcagtagaaaagacactcaccgacgatgagcctgcgatgatgccggccacaacttgccgcgacccggcgatgaacctcggaatcaagaggaaatttgccaagactccggtgttcatcaacgcttcggtgaatccccaagcaccggcatgcccaggcactacgatcctatccctcccgatttctttttctctctccctgtacgtacgacggtggcgtcaccccaccgttcggatgcccgacatgaggaccataagggtgcctcgactcgcaatttatagggccgcggcgtccgcccggttccgttatgcgccagccgccaagcagttagcaggggaaggagacaaacctgttgacgagggaggccattggacagtggtatcgcgtggtgaagagatttggtctatcggcaagaatttcgcggcgctcggttggggaatcatccaggattccgcgtaa

SEQ ID NO: 12758 - DNA, 228 bp, Zea mays
  Peptide Sequence Number=SeqID_54537
atgttgggaacgatcgctggctcttttgggcttccatgcgcctgtggggccccctgtcacgctttggtccctggcggctcacaaaggaaaaacaaggttaaatgccccagggattacaaccaaagtttcagtgactatgaggtggaactaggagatgcagatttatttgatgaaaatcttgaagaagttgtaggaaaatgtgataaaaagctaaaggcacaaagttaa

SEQ ID NO: 12759 - DNA, 408 bp, Zea mays
  Peptide Sequence Number=SeqID_54538
atgaccagtcgggcccagtgcgagagtaaggtgcgagggggtctgctagggagcgctactaagcgagtgagtgcgagctccaaaaagaggtcgggcgagtgcgggaggtggccgggaaacgcgcgacgtgggcgtgtccatggcagagtgcgcgggcgggaggttacggaaggagaggaggctgacaggtggggtccacaggccagcgagagcggactcgcgaacgggcagtcagcgctgacagggcggacctaccgagcagcgagagggagcgggtgcgcgcgtgaagaacccgacgccgacaagttggagccaccgagcagcgggagggagagagcgcggacgcgggccgtggctgacaagtgggacccacctgtcaggcgaagcgggcgcgcgcaacctgactag

SEQ ID NO: 12760 - DNA, 336 bp, Zea mays
  Peptide Sequence Number=SeqID_54539
atggtgaaatatcgtttttgctcacttcttcaaactctggccctcttgctccgagtaattaaatgtaagtcattatcattatcattttacgttacacttcgtgaatcaaacaatatattaatgcttgccgcacatattcatgaggcgatgcgcaaccccatctgtacttgtgtacacaactgcgacaatgtagccatgctcagggaggtgtctctgggggagcagcacctctgcatggagaattcacggcttaaggagaagttggacctcgtctgcgccctcgccaacaagttcctcggccacccaatctcgtttggaagctcgatattcctgtga

SEQ ID NO: 12761 - DNA, 126 bp, Zea mays
  Peptide Sequence Number=SeqID_54540
atgaccgtctgcgtcttgcccatggtgatgcgctacctcataccgtgggcgggcctgctccgatcaccactatccgtaagggtggaagatgggtccttggccatcgatctcaagactggtggctag

SEQ ID NO: 12762 - DNA, 321 bp, Zea mays
  Peptide Sequence Number=SeqID_54541
atggacgagtacatcagagccgataatgatttccgacaaagaatggaagaagcctatagatactctaagatgaccagggcttcagagaaaggctccacccatggtatgtcaggacgatccacaatcccagctcaagcgaagacagaggcaatcacacccaagggcatcaacacagcttccaatcatctgggacgcaacaaagcttcttcagaccaccaaccccaagaggcagaggaggtcgaagctttggaggaagattcagctcacaaccaagaaggtcattatgcttgttccgtggagaagataaggggcaacaactag

SEQ ID NO: 12763 - DNA, 918 bp, Zea mays
  Peptide Sequence Number=SeqID_54542
atgatgaccgcgtcaaaaaaggtgcgccacgtcattcgatttcatatccttttccacttcctctttctctctcttgccatagggaccaggaaaggagatactccgaaagggatccttctccgcgaaggaagcgggccccgagcccccctactaatcagaggttcgaaggctggcccctcggaagggttcaacagccgcctcagagcaatcgggctccgcgcccactactggtcagaggttcgaaggctggcccctcggaagggttcaacggccgcctcaggccactcgggctccgcgcccactactgatcaggggttcgtaggctggcccccgaagggttctgacagccgcctcagagcacgcagagcgagggatgaccctggagtgaggctgacagcagccaagtccggcctcaggcgctataggaagctccgcctcgcccgaccccagggctcggcccccgtctcggcctcggaagacgacgaactccgcctcgcccgagcccagggctcggactcagccttggctctggaagacgacgaactccgcctcgcccgaccccatggctcggactcagcctcggctccagaagacgacgaactccgcctcgcccgaccccaaggctcggactcagcctcggctccggaagacgatgaactccgcctcgcccgaccccagggctcggactcagccttagctccggaagacgacgaactccgcctcacccgaccccagggctcggactcagcctcggctccggaagacgacgaactccgcctcgcccgagcccagggctcagactcagcctcggcctcggaagacggactcaacctcggcctcggaggagcctccgcctcgcccgacctagggctcagaccgaccacgtcacaggaggggccatcattaccctacccctag

SEQ ID NO: 12764 - DNA, 843 bp, Zea mays
  Peptide Sequence Number=SeqID_54543
atggagagcaggaggaagaatcaacagaagacgagctacattgtaatttccatccagctcctagcggccctcctactcttggagcttgtgtcgctagtgccgggggcgtcatgcgaggagttgcccttggatttttgggtgagtgcactacgcggggtcggggcaaaggacgtttcaacagccgatggatgcaccaagaagaataaggacaccgtgctctgctctgcccaggctaacacggtaaccaatttcatcaaccctaccaactctgaggaacaaggctataggaccatcggggagtccatcgctaacatccctgatgatagcaccaaacggtacatcctcatcctcagcggtggcaccgtgtaccgagagaaggtattggtgagcaaaagcaagccattcgtcaccataagatcagatgaccccatcaaccctgccatcattgtgtggaacgacactgccgccaccctggggaaggatagcaagccccttggagtagatggtagtagcaccatgaccgtagagtccgactacttcattgcctatggtgtcgtctttaggaatgatgctgcagcagcagcgaagaagaagaaggcagaaggcgaggcgccagcgttgcgggtgctaggaacatgtaggcccctgctgtcagcgctttctcctcaaccgaaagctatactcctcgcgatctcggcgtggagctcgcccacctccggggtttacgccgacgacaagtcccagcaccgcggcggaatccctgactgtggcgccgggaattcgacgccgccattgcaaatccgcggatcgtcgtgggcggacctggtgacgacaggaatcgtg

SEQ ID NO: 12765 - DNA, 381 bp, Zea mays
  Peptide Sequence Number=SeqID_54544
atgccaacagcgttccctggtacccgaccccctcgtaacccggatgcaaaacgaaattgggaaggtagcgaacttgggacatgtgttctcaccacgattcctgtcgtcaccaggtccgcccacgacgatccgcggatttacaatggcggcgtcgaattcccggcgccacagtcagggattccgcctggcttcgcgacgaaccgacccgctacaccagggaggaccaccacagcgtacccaaacggtgaaaatgtggcccgagccggcaacccgaggagtggcgcggcgatgtttctaccgacggtgtggattccgcggcccgggtgggaggaaggttcacgggagcgcgcagcacaggggaggaggaacgaatcaagctga

SEQ ID NO: 12766 - DNA, 1281 bp, Zea mays
  Peptide Sequence Number=SeqID_54545
atgtcgggagatcacgccaagaaggagatggagaccggcgaaaagcccactacaagctacgggagcacttcatcggaagagtcccgcaccaaaaggagggagaagaagagctcctccaacaaagggaaggagaagaaatcttcttctcatcacaaagagaagaaggaaaaatcttcttcccacaagccgcatcggaaaggcgacaagcacaagaggatgaggaaggtggtctactacgagaccgacacttcatcaacatcgacctccgactccgatgcgccctccgtcacttctaagcgccaagagcgcaagaagtatagggatgagaactatgatgaggatgaggtagcccaaatcgagcacttcaactcacaagccacaacaatcctcctcgcctcactaagtaaagaagaatataacaaagtgcaagggttgaagaacgccaaggaggtttgggatgtgctcaaaaccgcgcacgagggagatgagctcaccaagatcaccaagcgggaaacgatcgagggggagctcggtcggttccggcttaacaaaggggaggagccacaacacatgtacaaccggctcaagactttggtaaaccaagtgcgcaacctcgggagcaagaagtgggatgaccacgaagtggtaaatgttattttaagatctctcatttttcttaatcccactcaagttcaattgattcgtggtaatcctagatatactaaaatgacccccgaggaagttatcgggcattttgtaagttttgagtgcatgatagaaggctcaaggaaaatcaacgagcttggcgaaccatccgaagctcaacccgttgcattcaaggcgacggaggaaaagaaggaggagtctacaccaagccgacaaccaatagacgcctccaagcttgacaatgaggagatggcgctcgtcatcaagagcttccgccaaatcctcaaacaaaggagggggaaagactacaagtcccactccaagaaggtttgctacaaatgtggtaagcccggtcattttattgctaaatgtcctatgtctagtgacagtgaccgaggcgacgacaagaaggggagaagaaaggagaagaaaaggtactacaagaagaagggcggggatgcccatgtttgtcgggaatgggattccgacgaaagctctagtgactcctccgacgacgaggacgccgccaacatcgccgtcaccaagggactcctcttccctaacatcggccacaagtgcctcatggcaaaggacggcaaaaagaagaagatgtag

SEQ ID NO: 12767 - DNA, 258 bp, Zea mays
  Peptide Sequence Number=SeqID_54546
atggcggcgcacaacacccgtcggtcgaccggcacgctgccatggatcggcaacggtggtgcgattcggatgaaatctggcgaagtttttgtttccattgtgaagggagaacggtgctttacccaattacccacaacattcttctcttatgtacgactagaggtccaatacgttttactgtttgttccttcaagaatgatatggaagtttctcaccaacactcatggtaataacttagtctataaagaacatatttaa

SEQ ID NO: 12768 - DNA, 588 bp, Zea mays
  Peptide Sequence Number=SeqID_54547
atgggcctgggccggaaattcagcccaaccgcatgcgcctccctccccctcctcaactttgcaccgttggatgtgatccagcggacaggattgaatggcgcactgttcagggttttaaatagcggaaatctcggggtgaggagaaaccctagctcatttctgttctcctccccagccgccagaatagtatccagccgccaggaagcatggccgacggcgcccttctcatcctttctctgtttctgttcttgcactgccaggccgtgccctttcccactggtgatggcgagtagctcaactggcccttaccgccaacgagtgcgtccccatgtgagggtgcgcggtcgtcggtcggtggccgatttcatgggttttgccgagatagtctctgtcagtggccaaaaccctagatttagggttagagaaacagcacgcatcgaatccgagctgctacaggttgtagcgtttccagacactccgacacttaggcgatggggcctctggggactagggttttggggcaagaggacacacccaacagatacaataaaaatggagaacgtgcattccaaggactatcaattctaa

SEQ ID NO: 12769 - DNA, 327 bp, Zea mays
  Peptide Sequence Number=SeqID_54548
atggcgctccctgttgacgtggcgggcccgcgcccgaggccgggcgacgtgggggctcctccgaagctggggtcgagtctgtcttccgttgccgaggccgagcccgagcccctgggtcgggcgaggcggaggtcgttcggcagaggccagggcggagtccgagccctggggtcgggcggagcggagttcgccgtcttccggatatcgctggtcattggtgagaatgaagttgttattatgcttgtgatatacaagtatgcctatgtcgttttcaccatgtttttcatggttgagttttattacaataatattgttatatatgcttga

SEQ ID NO: 12770 - DNA, 353 bp, Zea mays
  Peptide Sequence Number=SeqID_54549
atgaaggcgccaccaccgtaccatgaatgtgttaagaaacctgtttgggccccgaaggcccatctcataagcgtgcgagcagatgccgccgcaccgcctcacctcgaatgcgagagcgggaagccgggaaccgtgccggccgtcgctgcgccaccagcaagtgcgctggtcatagtcacggacaccaccatgtcaccgcacaagcagcaggtgccgccacgacaccgcgcaggcgagctgtcgccgccagaagtaccaacgcaggcactgccgcgggcaagcatgcacaccgagcagccaacgtcgccgcctcatgggcgtgcgcacgggagcaggcaccgccatacgagcaa

SEQ ID NO: 12771 - DNA, 291 bp, Zea mays
  Peptide Sequence Number=SeqID_54550
atggtcgtcatcaacgccggcgactctagggttggtctgggtaccacatccgacaacggcatcgtcacaccgtccagctcatcatcacttgaagctcaacctgccacgacgacggccgttgctgatattgtgagtgtcctcgaacaagatgtatattacctccctgatgagcccggggtgcacttcgtttggcagcccaaccaagagtcatcggtactcgtcatgtcgtgcgcgttcgacggctactatatcaaggactatggcgtcatcttggcgccagaggtgatatag

SEQ ID NO: 12772 - DNA, 657 bp, Zea mays
  Peptide Sequence Number=SeqID_54551
atggacacggaggcgccgagcgggcgggtgggcgtcaagtgcgggcggtggaacccgacgccggagcaggtgaaggtcctgacggagctcttccgcgcggggctgcggacgcccagcacggaccagatccagcgcatctccgcccacctcggcgccttcggcaaggtggagagcaagaacgtcttctactggttccagaaccacaaggcccgcgagcgccaccaccacaagaagaagaagcgccgccgacgcggcgcggcaatggcatcgtcgtcctcccccgacagcggcagcggcagcgggagcagcgaggaagacggccgtgttgccgccgccgccgacgccgacctcgtgctgcaaccatcgccgggaagaagcaaaagcaaacgggaggccagaagaagctacggcggcggccaccatcgccggctcgttacatgtaagcagctagcgcacacacatcgctacgtcagggacgttgtggagcagcaggaggaggacacgtgggagcggccgacgagggaggcggtggagactctggagctcttccccctcaagtcgtacgtcgacctcgaggcggagaaggtccggcgctgcactgcacataccgacatgaaaagggatgacatatcagcacgaattgtcctcataacttaa

SEQ ID NO: 12773 - DNA, 1398 bp, Zea mays
  Peptide Sequence Number=SeqID_54552
atgttagaggtagacagagtggttttgccggaggtttgtgcaccagtgaaggatactgttgtttgcttgtcaatccaggatgagaaaaatgacccacttgcatctaacagtcaacttaatatgagatcatattccccagaaggtgatggcgtgattaaggaatcaaatcgtgtggtgacagataaggaaaatgataagtctttgtttctttctttggataatgaccaaaaagttcacagccaagcagaagctgaggtgcaggatattatggttcgtactagctgctcaatatctgaaattttagctcagaaaattaccagcaaagaacagccctcccaaaaaagcatagaagttggggatgagtgctttagaccttctcaagatatggattatgttatgatgtttgactccagcaaagatgagaatggaccaaatccagaaagattgacagctgaaggtgattgtggcgatcctcatgaacgtctggatttagtcacagtaggtgatatcggaaaaatggttgtagacaatgcaatcatcgaagatgtgaagagtaataacacaactgcaaacaatgtcaatcacggtgagctgcatgtttcattgcagttgccagagggaaacactgacaatggtatgactggtgttagcacagcttcctctttagacataaaagagggaaacaatgacaaagtagtggcagatgcctctgcacatgaaggtgatataaatgacaatggtagctctgaattgaaaataggaaatacgaacagtggtattactggtgttatcgcagcttcctcagacttaaaagaggaaaatattgacaaagtagtggcaggtgactgtgcacatgaaagtgatataaatgctaaggattgcactgagttgaacattggaaatactgataatagtattgctggtgatagtacagtttcccctgaggtgagcgcggaaaacactgatcaaatcatagcaggtgattgtggaaatgaaaccgatttaaaagctgatggtgagggtgctgacaaattcttagcaactgacagtgctcttccttgtgaagatgatgcaacttgcatggatggtgcgaatgtgattgtatcactagatgtaccccgtagcacgaagaatgatacattttccaagaacacatcttctgacgctgaaatgcctctgcctgttggaacctgtgagctcgtcgatagaccttcttccgagaatgacatgtctgagcacacatcttttgatggtaaacggcctgcggatgataggactttggaagagaacgaaatggttatgcctggtgatgaaaaaacagaggtgcattacaagcgacggaaggttttggcctcagagaaacaaagcagcttctccggagcaacttctacagattag

SEQ ID NO: 12774 - DNA, 573 bp, Zea mays
  Peptide Sequence Number=SeqID_54553
atgaagggatccaaacgccccgtaagaagaatagatgaaaaccccaagatgacagatacaaaatggctggtcactacatcttttccaccattgcatgccattctcttctccaatctggggagtgaaattatggaggttgacctgtccaagcagcctaaaccaaaaattccttgcaaagacaacctacaagaagatggtctatgcactgaggactttgaagatgttatttatccccaaggagatcctgatgctgtttctattagcaaaagagatgttgagctcctgcttcctgaaacctttgtcaatgatacaataattgacttttatatcaagtacttgagcacaagaattgaatctaccaagaagcgcaggtgccacttctttaatagcttcttttttcgcaagctggcagatcttgacaaagatcaggggagagctccagaagatggtgatgccaagctctcagctaaactcccatgcattttacacatggattcacttaaaggaagtcacactggactcaaggatatcattcaaagctcctgcaaggctgcaacacattttgacagctag

SEQ ID NO: 12775 - DNA, 99 bp, Zea mays
  Peptide Sequence Number=SeqID_54554
atggcgcgccgccgtgctgagtcccggaccacagtagtcgtgcgtgaagagctcgtgactgaggatcctggtgagcagcagatagaagtagctgagtag

SEQ ID NO: 12776 - DNA, 498 bp, Zea mays
  Peptide Sequence Number=SeqID_54555
atgtgccgctctggacgacaagctctagcgcagccgctgcttggacgtggtccagagcggctgtaccacgttgtccatcatcaagcaggggggcctcatggtctttgccaacgtcaacgactcccgggcatcgcatccgacgacagcgccatcattgtcgtccaactcatcgtcgacctgaagcccgacctaccatgcgggaagtgtcttgacaacgtgttcatgcagtgtttcattgaatgtgttcgtgatgattccaaaaatcatcgtctaactatgaccactaatagattaatacttgacgtcaatgttggggccctgctaaactttgtggagcaggaacgtcatagtgctatcacttcttacattcaacaaattattcattcacatttcaccgaattcggagctactcagtctcacagaaggccaattttggagcctgttaaaacttttatcctcagcacgaatgcaaactcgaagatcattctcgaattataa

SEQ ID NO: 12777 - DNA, 435 bp, Zea mays
  Peptide Sequence Number=SeqID_54556
atgaccgcaaaaccccaactgctggtgctctcgacctcgactgctctgtccctctccgtcgcacgctgtcgctccacacaaccttggcagaagagcgccaccaccctggcggattctgcacaaaacatgaagtatgtggaccatccttggactaatcctaagcgcataacaattcagtcaagccgcgagtgcttcggcgttgatatcccacgcttgaggcctaccacagaacagtccaatccaagtcatgttgagggaaatccttcacatgttgagagaccaactgtcatcaacgaaacagtagagcaaatgggttttggcgatgacgacgacgactttatgccacctgttaagaagcgtattgttgctagaagtcatacaagagttctcagaaatattgtgacaaagaggataaaagtggaggatctcccctga

SEQ ID NO: 12778 - DNA, 861 bp, Zea mays
  Peptide Sequence Number=SeqID_54557
atggccccaagggcacatttccctttcaacctccacatcattgagcaggggccatttaatcaggaggcaagatgtctaacctataagcttagcattgctgttcttccggcttcccttcagtttctctcggagagcagtctgtctccttcggatgaggatgagctccatggtgaggaggatgaggatgtccggggtcagtccaacccccagatccgacaactgagtcctttgcagcgtaagtctgtccaccttcgcctcggttcccatcagagagcgggcagagaacggactgcagatgtgcatggggatatggttgaggcgccagttttagctctggaagatggtgctactttctgtgttggtgatgggccgctgacctcccctagacgttcttcgcctcagcgcagaagtttggctgagccgctgaagaaggctgggttgagctcgccccattttgccactcaagttccaagcatgacaacttcaaagaacatttcggaagatttatctcctcactgccatgatcatgatccagttgttcccggtgttgttttgttagttcaggatgatctagggtttaacgtgcctggcgaggctatatcaacagaaagcattgacggtgtgcgggcacccgaggcggtgccagttgtgccatctgtggagaagataaacaatcctcaagttttatcctcgttgggtcgtcctagcttagctgggctttatgggccgactactgcgggatcaccggattctatccttcctgtttcgccccagcgacacatgtctgttgctgggccgctggaacaggctagcgcaaattcgccccaacctgatggtccatctgctgctgaggccccctga

SEQ ID NO: 12779 - DNA, 153 bp, Zea mays
  Peptide Sequence Number=SeqID_54558
atgctgctccagctcccgtcgtcgacgttcctgctcctcatgcaggcggtgatgcagcctctccaagtggctggactgactggtcacgggacggcgaagcggtcgctccgcgagacgggaaggttagcggtcctacagtcagcacggctttga

SEQ ID NO: 12780 - DNA, 399 bp, Zea mays
  Peptide Sequence Number=SeqID_54559
atggctgccgctggtgatccacctcttcctattgatgttgaggcagcaagccaagggaatcgaagtgttccatatgatccatccaaggacccgttgagaaagccagctaaacccaaggatcaagcatggaaaggcctccggccgacgttcctgcccatcgatactcctctccaatccctcaccgatctagcgaccataacaaaggatctcctccaatggaaatgtccaaaagctattgcagaaatcagacaagagatgagtgagtatttgaagtctaattcaaggaaatttaaatgtgaacttgatcttgatggtgataatgagaactcagcatatgagactcaggtagatgagcccgatatcactgagggagcagtgatggccattatcaaggaatga

SEQ ID NO: 12781 - DNA, 183 bp, Zea mays
  Peptide Sequence Number=SeqID_54560
atgacctttttcaaggatcgctctgatgtctccaaagacaacatcctaaagccagcccttgagagcctatcggtcgatgaacaacaacaatttcaagattacatgaaaaaggtgcaagaagagtgtaatacccaaattgaaattcgaggagaatttaccaaagaacttgagtttgaaatttga

SEQ ID NO: 12782 - DNA, 1053 bp, Zea mays
  Peptide Sequence Number=SeqID_54561
atgggcgaccggaggatggacgaggatgaggtgctgcgcggtggccatctgggcggtcagggtggcgtccatggcacgctcttgctcctaggcgagggacgcggcgcgctcgcgctcctgcgaggcagccatgacgacttggatggtggcgatggcggcaaccaatgcggagtcggtggcgggcgccgtgggagcccaagtggggttggcgacgagtgggcgagtggtggggaggccgcgaggcggctatcgggagaagcaggctggcgagagaggtctcgattccatagcggtggcgagggcgccgttgcacgtcgggtaacccgggaggccgagcccagaggggaggagcccggctgcacacgcgctggccgcgttggtagcagcggctgcactgggcgcgagagggctgagcgcagtggtggtgtggaccacagcggctgcactggccgcgttggtagcagcggctgcactgggcgcgagagggctgagcgcagtggtggtgtggaccacagcggctgcgctggccgcaaccgcgaagctgtacgcagcagggtcggggatgagggccggaccagtgctggtggtggcggcggcggcggcggcggcggctgcagccacggcggcctgcagggccgtgacggcgtcgacgggggagtccatcaggcgcaggcggactggcggcggggaagaagagccggcacacaggggaccgacgacggggaagaagaggggcgcggccggcggtggggcacaggggatcgaccggtggtggggtcgccggcggctcggagaagagggccgcggcttgggggccggcggcggggaagcggggccggcgacttgtgggcgccgttgatggagagggccggccttgggtacaaaacaggtgtcatgggggtgaagcaagcagagcctcgtcttgaactcaagaagcacaggagggtgtctagaaagaagattaaccaatcgattcttgacgaaatcgaagatgatgttgatgacctcgatgatgactaccagtttgacgtcaagcagcgttctaggaaatga

SEQ ID NO: 12783 - DNA, 1428 bp, Zea mays
  Peptide Sequence Number=SeqID_54562
atgcggggcctcgccgcccggcacggtggcgaggacctcatgctgctccgcctcggcacggtcccgacgcttgtggcgtcgtccccgcgcgccgcacaggcggtgttgcgcacgcacgaccagtcgctagcctcacggccccgctccatcttcggcgacatcctcgggtacgggccgtcggacgtcgggttcgcgccctacggcgaggggtggcggcaggccaagaagctggtcaccacgcacctgctcaacaccaagaaggtgcagtcctaccgcgccgcccgcgaggaggaggtgggagtggtgatcgacaagatccgccgcgcagccatgacaggcgcggcggtggacttgagcgaggtcctgagctcgttcacgaccgacatggtgtgccgagccgtggcggggcggtcgttcagggtggacggcctggacaaggtgttcaaggacgtgatggacgcgagcatggccgtccttgggggcttcaacctggagaacttctaccctggcctggccaaggtggccggcggcgtgctcatgtggccggggcggcgcaaggctgagaggctcagggaccggtgggatgaggtccttgataaggtgatcgaccagcacgcgagcgaggcggccgccggtggacccccggcgacacgccgccttgagagtgatttcacccatgtgttgctggccgcgcaagaggagtacgggctcaccagagacggcatcaagggaatcatggctgatatgttcgcagcgggcacagacacagcgtacttggtactagaattcaccatggccgagctgatgcagcaccaggacgtgatggcgaggctacaggcagaggtgagaagcagcatgccggcgaaggggcaccaccaaggacaaggagccatcacagaagagtacctcgccggaatgccatatctgaaagccgtcgtcaaagagacgctccgcctgcacccgccgtcgccgctcctcctcccgcaccagtcgctcgaggagtgcgccatcgacggctacgtggtccccgccggcaccaccgtgttcgtcaacgtctgggccatcggccgcgacccgaggctgtgggacgccgcagaggagttcatgccggagaggttcgtcgtcgacaagggggccacggcgacggcggcggagggcgtcgtcgatttcagggggaccgacttccagttcctgccgttcgggtccgggcgaaggatgtgtcctgggatgaacttcgccctggccaacgtcgagatcatgctggcgaatctcgtgtgccattttgactggagggtggagggaggagcgaatgacattgacatgacggaggtgttcggattaactgtgcaccgaaaagagaagctcgttctcgctccaaggttatggtcctgttcctgtgctgctgctcaaccaccaatggagggctaa

SEQ ID NO: 12784 - DNA, 741 bp, Zea mays
  Peptide Sequence Number=SeqID_54563
atgacctggttgagtatggagactgaagacaagtctgtggctaatgctacagtagaatcgatttggcgactccacgttgtcttgggacgtctgggtgacctgctgacctggagcaccctaaggtctctcccccatagggcgggatctaggtcctacgaggagaagaagacgaccttgtgccatcgtgaaccgttcggcccagagcgtgaaccgtccggacagcgtgctgggaagaagtcgcttctgccgctaggtcgcggaccgtccgacccagagtcgcggactgtccgcgccgccacagtgagcatcaccaggcgacccgacaacccatcgcggatcgtcgccaccgtttaccttgcaaaaccaaacccaagccttggacatgatatcacacaatccaccggtgccagtatagcacagcttcccttcggtttaccatgttcgttggtcactagaaggctaccaatctcggattgcttcccaggaggccacaccgcaaaagcagcagccggagaagaagccagtccaccgaggaagggtgagtcggcgaccgcggtggagaagacggtgccgccgtccaagaagtctacggtcctcatgatcgagcgcctatctaggaaggtgcagctcgccctcgccaaggttgagatcgtctgcatccaggtgcagcacggcgagttagcttcacctgctgtcgtgccagtgccgacaaaggaacaacaactccattacaagcactag

SEQ ID NO: 12785 - DNA, 1068 bp, Zea mays
  Peptide Sequence Number=SeqID_54564
atggccaccgccgccgccaccgcagcagcagcagcagtctcctccccggctgcgcgtggagcagccggggccgccgccgcctcccgccgggggttcgtcacgtttggtggaggcgccgcccgcttctctcccacgctgcggtccggccgtgggttctctggtgtgcaaacccatgttgctgctgttgaacaagcagttgtaaaagatgctaccaagctggaagctccagttgttgttgttacaggtgcatctagagggattggtaaggcaactgctctagcccttggaaaagcaggatgcaaggttctggtaaactatgcccggtcctcgaaagaggctgaagaggtctccaaagagattgaagcatctggtggtgaggctatcaccttcggaggagatgtttcaaaagaagctgatgtagagtctatgatgaaagcagctctagataaatggggaacaatagatgtgctggtaaataatgcagggattacacgagacacattgttgatgaggatgaagaaatctcagtggcaagacgtaattgatctgaatcttactggcgtcttcctttgtacacaggctgcaacaaaagtaatgatgaaaaagagaaagggaaaaattatcaacattgcatctgtagttggtcttactggcaatgttggccaagctaattatagcgcagccaaggctggagtgattggtttcacaaaaacagttgccagggagtatgcaagcagaaatatcaatgtgaatgctattgcaccagggttcattgcatctgatatgactgccgaacttggagaagagcttgagaagaaaatcttgtcaaccattccgttagggagatatggccaaccagaggaagttgcagggttggtcgagttcctggcccttaaccccgcagctagctatatgactggacaggtgcttacaattgacggagggatggtaatcacatttttcgaaaagcttagacggctcgacgccatggcttatggtgttgactgtgatgacgtgacagccaccttagcacctagctcgacgctacagatcttgatgccgagctag

SEQ ID NO: 12786 - DNA, 1805 bp, Zea mays
  Peptide Sequence Number=SeqID_54565
atggaaaggattccaatcttgttgggtggttagaggttacctgtaattatggccaccccccctcaaccaacgagcacgccaggcgagtaggcgaccgtatacgcaatgccgccgtcacggtggcgtcggtcaggagaggagggtgccccgtcgcgatccctcgccggccggctggaccaccaaagcgccgcgcgtccttctcggggtctcagtcgggcgcatcgcacgtctacgggatccgcatccgccggcgccggcgccaccacgcgcgccagagcccggccccccggccgtcgcgtggctgtcgtccatgcatgtccctcctcctcccggccggccgggcgcctctcatgcttatccccggcgacgtacgtgcggacgacgggaccgagtttctgctccatgtcgacgacaaacccgcgtcacgggagaacgacagaagagatcgatgtgaagagaagaggcacggattcggctggcatccaccgcacgtgctcggattcgtttatctgctgctaaaaggatacttcgctgtcactgggacgaccgcgtcaatctccgcccccacgtgtccaccgccatctgcggcctcgtgccctcctcctctattaaccgagcccgcctccacacccggaccacacccgcaccagcctcttcagcgccctgcgcccaagctccagctccgatccgtaacccaaacaaacgacaccttgggcttggagcctactgtgccaccggcccgcccacgagaccccgcggccatgtccatcccgcggctcctcctcctcgccgtcctcgccgccgccgctgcgtgcgcgcccgcgcacgccgccggcgccggcgcctgcgcggcggagaagttctcgggcaaccgcgcgttcgcggcgtgcgccgacctggcccgcctgggcgcgtcgctgcactggtcctacgacgccgcggcggcgtccctgtccgtggcgttcctggcggccccgccttccgcgggcggctgggtcgcctggggcctcaaccccagggcgcagagcatggacggcacgcaggcgctggtcgccgtccccagctccggcggcggcggcgcgtacgaggtgcagacctacagcatctccgggacctcgctcggcgccccgggcccgctctccgcctaccggacgtcgggcctcgccgccgaggtcggcggcgacggccgcgtccgcgtgttcgcgaccctcgtgctccccaacggcacgggcgccgaggtcaaccacgtctggcaggtcgggccctactccggcgggatccagatacacgacaccaagggcgacaacatgaacgccaaggggacgctcaaccttctaaccggcgccactgccgccgccagcggagggggcagcatcatcaggaagaaaaatactcatgggatcctgaatgcggtgagctgggggcttctgctgcccatgggagccatcttcgcgagatacctcaagacgttcaggtcggctgacccggcgtggttctacctgcacgtcgcttgccagctgctcgggtacggcgtcggggtgtccggctgggcgaccggcatccatctcggaaacctgtccaaggggatcacctactcgctccacaggaacatcgggatcacagtcttcgctctcggcactctgcagaggtggaagacgggctacatcgccgccatctccgtcctcggcgccgtcgccgtggccctggaggccgtcacgtggggcgtcgttctgaggcggaggaaggaggaaagcaagagctacaacggcacctctaacggcggccgcttgccgctgtctatgtag

SEQ ID NO: 12787 - DNA, 471 bp, Zea mays
  Peptide Sequence Number=SeqID_54566
atgagaaggcggcgaaggaggtgggactgcaggaggatcgggaggcgagcgctggagagcttgtgctcctccctcgacttggtctccggaatccagcgctctccggcgttggcgccgaccccagccgccgcgggtgagggcccctccgcctcctccaccgaggacccggtcctcgtccgcgtcgccgcagccgccgccgagtccaagctcgtctcctacggggatgcgaccgccgagtccaagctcgtctcctacacgtacgaaccttatcctgtgacctgtcacacgcgcccttcccattcccgtggtctcattgcttcgaccgcgttcgttcgcaggaagctgggtcctctggccagcggggacgtgttctgccttctgctgttctctgcgattggaaggttcagccatggcctgcccgtcctcgacgccgagacgttcaagacggccgaccccttcattgctggttag

SEQ ID NO: 12788 - DNA, 390 bp, Zea mays
  Peptide Sequence Number=SeqID_54567
atgccgggcgggaggcgggcggttggcgcgccgccgcgccggctttgttaccgtctccaggccggcgtctgcgtctcgaccctccctccacccggtttaatttcctggacgaaaaggctggtgcgcgttttctctcccaagggtggtggtggccacttccacggctggtcttgcttcgtggagcgaagcgtcctccagtcgcgctacgtggcgaatgatggctcgttcgtcattgtcggagcagtcaaagttgtgccggacgatccgccctgcaacctcggaagccatctcggcctcctgctggactccacggccggttccgacgtttctttcgtcgtcgacggcgagaggttcgctgcccaccgggccgtccttcagtggtggccctga

SEQ ID NO: 12789 - DNA, 177 bp, Zea mays
  Peptide Sequence Number=SeqID_54568
atggcagcggcaatgagcatgtttaagtgtgaggagaacagagaaatatttctgaacagccagaggccacgtgtccgattgttgtggcttaggaacgagatcgacaggcaggtgttagatgcaatagccttcagttgtctgatttactttatattcatatgcatctataccacgtag

SEQ ID NO: 12790 - DNA, 195 bp, Zea mays
  Peptide Sequence Number=SeqID_54569
atgaggcgcggcgcctacaagcagtgtgtcgacttcagcccctcgcgccgccaccgcgaggatggcctcctcgccctctgctgccttgaccgcgacgttgggctcttcaagcgccgtcatgacgagcctgctcctgccgtcgctgtctccgattcgactcctacacccttgaagtcgacggtttacctggcgtaa

SEQ ID NO: 12791 - DNA, 777 bp, Zea mays
  Peptide Sequence Number=SeqID_54570
atggacatgccgccggcggcgcagggacggagggcgatcgccgtggtggaccggaagcttgacgagctctgcgcctgcctcgacgacgcgatgtcgtccaggcagcggagcccgtacgcggaggagcggctccgcgcggagatcaagtcgagggccgacttccttcggtcgctcatggccgccgaggtggactgccacggcgggacgcgcccggagcacctggctgaggccgaggcgcgcttcgccgtcctagaggccacgttcgatcggtgggcgcggcgcgcagtcgctgcacctgaaccagtcgtcgaggagaaggaggaggaggccgactccttggggtcctcccggtccacgtgctcctgcaccgagtcgtgccaggaggcgacggagggggacgccatgcgcgacgccgtggaaacacgcggcaaggaggggacgtcggatggcatcgccgaggacaacgacgccgaatgcgagacggtggtaatccgcagggaggaggcggcggcggttcctgttgccaagaagcgggatgaggctatgggaacacgcgaggaggtggcgctggacgccattgccaagaagaagggcgataccgatcgcgatgccgcggcggagacggggaggaggaccgtagaccagcggcgctggtggaggcggagtgctgcctggtgcggtgcagccggcgtcgtcgcgttggtcgcggtcgggttggcggtggagttggtcgcggtggctgaccacgatgtgaatgcttacgttgttccgacgtag

SEQ ID NO: 12792 - DNA, 569 bp, Zea mays
  Peptide Sequence Number=SeqID_54571
atgcgatgcccccgccgcgagagctcccctagatggcatggagcgcgtcgcccatgcgcctgccctgaccctgattgcacactaccgccgctggatgtccacgcgctggccctcttcatctcgctcgtggtggtcgtggtgcagacctcgctgatcatggtggagcggagggcgaagaagcggatggtgttcgtgatgaacaagctcatgtggctggcgtgcctcttcatctcggtggccttcatcgcgctgacctacgtggtggtggggcgcgacgactggtggctggcctggtgcaccatgggcatcggcgccgcgatcatgctcaccaccctcggctccatgtgctactgcatcatcgcgcacaggctggaggagaagaacaccaggaagatcaggagggcctccgcgagccagtcccgcggctcgtggtcccgatcagtcgactcggacgaggagatacttaacagcgagtacaagacgaagataggttgcggcaccacatcagtcttcttcaaccaaaggactgaaggcccttcctgcggaaccaagttcaagtcacttgaccg

SEQ ID NO: 12793 - DNA, 1575 bp, Zea mays
  Peptide Sequence Number=SeqID_54572
atggagcggcagtccagcatccggctgggcgcgctggagaagctgaggagcttccgggggatggagaagcagaagagcttccgcgggatcatgtccctggagcggcggagcagggacagcccggggaaacgcggcgacacgccgctccacctcgcggcgagggccgggagcgtggcccacgtgcagaggatcctcgcggagctcgaccgggcgctggccgccgagatggccgccaggcagaaccaggacggcgagacgccgctgtacgtcgccgccgagaagggccacgcggaggtcgtgcgcgagatcctcaaggtctgtggcgtgcagacggccggcatcaaggccagcaatagtttcgacgcgttccacatcgccgccaagcagggccaccttgaagttctgaaggagatgctgcaggctcttcctgctcttgctatgacaacaaattctgtaaacgctacggccctggacaccgccgcgattcagggccatgttgacatcgtcaatctcctgctggaaaccgatgctagcctcgccaggatcacgaggaacaacgggaaaacggttttacactcagcagcaagaatgggccacgtggaagttgtaagatcgttgctgaataaggatcccaggattggtttgaggacagacaagaaggggcaaactgcgctgcatatggcttcgaaagcgcagaatgctgagatcgtggtcgagttgttgaagccagatgtctcggtcatccatatcgaagacaacaagggaaacaggcccttgcatgttgctactcggaaggggaatatcattatagtgcagactctgttatcagttgaggggatcgatgtcaatgcagttaacaggtctggagagactgcatttgccattgccgagaaaatggacagtgtagaactcgtgaacatcctgaaagaggctggtggagaagccgcaaagcagcaaatcaagaagaggctggagaagctccacatcggcgggctgaacaacgccatcaactccaacaccgtcgtcgcggtgctcatcgccacggtcgccttcgccgccatattcacggtcccgggaaacttcgtggaggagctgagccaggcgcctccgggcatgtccctggggcaggcgtacgtggcgagcaacccggcgttcatcgtcttcctggtcttcgacgcgctggccctcttcatctcgctcgcggtggtcgtggtgcagacctcgctgatcgtggtggagcggagggcgaagaagcggatggtgttcgtgatgaacaagctcatgtggctggcgtgcctcttcatctcggtggccttcatcgcgctgacctacgtggtggtggggcgcgacgactggtggctggcctggtgcaccatgggcatcggcgccgcgatcatgctcactaccctcggctccatgtgctactgcatcgtcgcgcacaggctggaggagaagaacaccaggaagatcaggagggcctccgcgagccagtcccgcggctcgtggtcccgatcggtcgactcggacgaggagatacttaacagcgagtacaagacgaagatgtacgcgctgtag

SEQ ID NO: 12794 - DNA, 516 bp, Zea mays
  Peptide Sequence Number=SeqID_54573
atgtcgcttgctgttgactacgtcatcctcaagggcctcatgagggatgtcgttagtgagggctaccttgcccttcttctcaacgagaatggccaccttcgctgcatcttcgatggaagtggtagccttcgaagtcgctttcttcggagccatcgcgggaatgttttttcgaagcacaaacgggttattacaggtcattacagtgtgattaggtacaacacggacgaacaaaccatcaactctacccacacactggcttacaagtgggaccaggcggcccagggcggttttacacaggcccgccgtttcaacaatgcgcgggtggcgacagaagccttcgtgctccgtgagccaagtcttcgacagtcggtgaggccttcactgttcctggctctagcgggaacctgcaaggcctttctgccacacccggttttggaaggcaaaccgaatgcgaaacatcatctcctcttgagcactaagtacaatggggacaacctggggtggggtggtttgtaa

SEQ ID NO: 12795 - DNA, 360 bp, Zea mays
  Peptide Sequence Number=SeqID_54574
atggcgaggttgtgcctgatggtggtgcagcacggtcggggacggtggtcgagctctaccggcggcggattcgggcgcagggggcctggcgacggggaagctctggcgagcttgaagaacgggtgcgcgcagcttgggcgagcggttgaaggagggggagaaggactggcaagcggggcccaccgaacagcgacacagacacgcaaacacacgataggccagggcgccaacaaggtgaccccacagaacagagagagggagagcgagaggaagagacgcgcgggtcggcgccgacaggcgggacccacctgtcagggactagaggcgcgcgggtgcgggcatgcgcttggctgggcttag

SEQ ID NO: 12796 - DNA, 189 bp, Zea mays
  Peptide Sequence Number=SeqID_54575
atggcagcgtggataactgagtgggctgccacgcgcgcgggggaatgggagggtattggaccggcctaccagattaggccagattttgggtcttacaaatcctaccccctcgagatttgtaagaaaagtgtgaacaactatgtcatctcagaacatatgcacaaacaaaaatctcggcatgatgtgtag

SEQ ID NO: 12797 - DNA, 462 bp, Zea mays
  Peptide Sequence Number=SeqID_54576
atgaagatgcctgggccgtcgaggctgcgacccgactgcgcgaggctgctgtccgctgtgggccacatgtggccagctgggcgtggccggcgggggccgtcacgtggatgggggcgtcctgttaggcttgttcggttattttcaatccatatggattgctggggattaatacggattgagagatattttaacttactggggattgaaactccctcaatccccttcaatccatatggattgagataccttcaagctcggatcagaaccagtgtgaagaagtacaaagagtatgaagatgaacagtgctcccgtactgttcgcgctgacttggcaatttgcttttgtgtcgcgcttgtacttgtatcattcttccaagccgaagccgaagcacttgagaacaagtccccaacattggcgcccacctccggtgaactcttttcgaccaccttcggcaagcattga

SEQ ID NO: 12798 - DNA, 1293 bp, Zea mays
  Peptide Sequence Number=SeqID_54577
atgaggcgcgcgggctcgagagcgtcatacgcccgggcggaggaggcggccgcgggcctcgacgtgcgcttccaccgcctccccggcgtggaggccccggcggggtgcgcgggccccgtggagttcatctcccgggtcgtggagctgcacgcgccgcacgtgagggcggccgtggcgggcctggcgtgccccgtggccgcgctgctgctcgacctcttctgcaccccgctgctcgacgtggcccgcgatctggtggcccccgccgtgccgccgccggcgtacgtgtacttcacctgcagcgccgcggcgctctccttcttcctgcgcctgccggcgatgtgcgacgaggtggccggcgagttcggcgacatggacggcgcggccgacatcccggggctgccccccgtgccgccgctcgccctcccgacgccgatcatgcggagggagctgcccgagtgcaagtggtacgcgtaccacggcaggcggttcgcggacgccgacggcatcctcgtcaacacggccgccgagctggagccgggcgtgctctccgccatcgccaggcgcggggccggctgccctgctgccccggcgctgtacccggtcggcccggtcgtctcgttcgccccgccgaccgagccgccgcacccgtgcgtgcggtggctggagacgcagcccgcggcgtccgtcgtcctcctctgcttcgggagcagggggttcttcggcgcggcgcaggcgcgcgaggtcgcccgcggcctggagcgcagcggccaccgcttcctctgggtgctgcgcggcccgccggcgccagggacgtggagccccgtggacgcggacctggcggagctcctcccggagggattcgtcgagcggacacggggcagggggctggtgtggccggcggcggtcccgcagaaggaggtcctggcgcacgccgccgtgggcggcttcgtcacgcactgcggctggaactccgtcctcgagagcctgtggttcggcgtgcccatggtgccctggccgctgtacgccgagcagcacctgaacgcgttcacgctggtggccgccatgggcgtcgccgtggccatggacgtggacaggaggagaggtaacttcgtggaggcggccgagcttgagcgggccgtcagggcgctcatgggtggcgacaacgaggaggggaggaaggcgagggagaaggccgccgagatgcaggcggggtgccggaaggccgtggaggatggagggtcgtcgacggccacgctgacgaagctctctaacgctctctgtcgtaatgactag

SEQ ID NO: 12799 - DNA, 216 bp, Zea mays
  Peptide Sequence Number=SeqID_54578
atgcacaacgcccacgagcgcatcaccaagctcgagaacatgtgctggtggatctggcacctcacgcgtaagaagcaggagttcgagcatagtggagaccccaagggtcattttcaggcactgctagctctagcgatggatggtttagagaaaggaaaggctggcactgctggctcaagcgatggagggtttggagaaaggcaaggctatgtatga

SEQ ID NO: 12800 - DNA, 1323 bp, Zea mays
  Peptide Sequence Number=SeqID_54579
atggaggtggaggccatgggcggcgccgggggcaagcggggcagggccaagggcgcgggcgcgggcgcgggcgccgagccggagccgaagcgacgcgcgatggcggtggccgtgcagccgcccgccgccgcgccgtgggcgcagcagcacccggcctcgcggatctaccgcgtctcccgggcctccggcggcaaggaccgccacagcaaggtgtacacggccaagggcatcagggaccgccgcgtccgcctctccgttgccaccgccatccagttctacgacctgcaggaccgcctcggctacgaccagcccagcaaggccatcgagtggctcatcagggccgctgccgaggccatcgacaagctcccctcgctcgacgccgccgcgggcttccccgcgcacccggcctccgccaaggaccacgccccgcctgtcggtgacgacgacgaccaccaccaccagcagcagcagcagctcacgaggtccggatgcagcagcacgtccgagaccagcaagggctccgtcctctccctctcccgctccgagagccgggtcaaggcgcgggagcgcgcaagggagcggaacaccgttgccagggacaaggaccccgccgccaacgacaccaccgccaccacctcggcgcaggcggcgtccttcaccgagctgcttacggggatggccgcggccagcgccgcccccgctcaacacaagcaccagctgcggcagtcgtcggtgtcctggcagccgacgattgtctccgccaccaccgactacatcgggttcgcgcagccccggaagggcggggggcacgcgatggcgcacgccttcgcctcccccgctcctcacctcggcaacattgcgtccatcgccatggccccagcgcagcacttcggcttggccagtggtgccgtcaccgtcgcctccgggggcggcggcgagccgcacgccgagatgacgcacttctcgttcttgcaggaccatttcatgcccgtccacgcggcaccggcgccggccccggcgtcggctcccgccggagaatacaacctcgacttctccatgtcctcgggtcttatgggtgtcaacactaggggggcccttcagtccaattcgcagccgcatatctccggccaccatcaccagcagcagcagctccagaggctgtctactccactggacgctcccaacatacccttcctgtacagctctgccgccgctgcagctgcggcggtcaccacgcccaccacggccgacggccagttcgccgcgttccagctctggaacgggttccagcacgcagacatgaaggagaagggcaagcactga

SEQ ID NO: 12801 - DNA, 1110 bp, Zea mays
  Peptide Sequence Number=SeqID_54580
atgggggaggaggtggcggtggtgctggagcccccacggcccaagtcgccgccgaggtacccggacctgtgcggccgccgccggctgcagctggagctgcaggccctcaaccgcgagatcgacttcctcaagggaaacgagtgtccttttgacgccgtgctctgctttaaggagcagatttgcgacgctatccaggacgagctacaatcactcgaagaaagaagaagacgcacagatcatgccgtcttttttggtggatcagatcaaaattgtgcatatgcgtgtcatggttctgttgctcctgccattgcttgcccagctgcaaaaggccatgctgcctggattgctcctgctgctcatgcccagatctgtcatgctgcaagcccagctgcaaatcatgcaacaaaccctgctttgggcccaacagctgttcatgttgcgacatatcatgctgcaagccagattgcccatcctgtagttcaaactgcagctcgtgctgcaccggcagtccatcatgctgtaaaccaaactgcaacacctgctgcagaccaaactgtagctcgtgctgcgatccgtcatgctgcaaaccgaactgcagctgcttcaagaccctctcgtgctgcaaattccagtgcagcccaaactgctgcacctgcagcctcccgagttgctccggctgcaacccctgcggcagttgcaagaaatgctggtcatgccccagcgactgcaagccaagctgtggctgtttcagcgcgcaatgttgcagctgcgcgggatgctgctcgtgctcaagctgtttcagttgcttcggttgtttcaagtccttcaagtgctccaacctgtttgggtgctgctcctgcaagcagtgcttcaagtgccagtcctcgtgctgcaagggggcgtcgtcctgctgcaaatgccagtcgtcgtgctgtgagggtgaagacggcagcagctgctgccggaggccatgctgcacttttccgaagccagcttgctctgggtgttcgtgcgggtgcgcttggtcctgcagaaagtgtacagaatggtgtcgatgttccgggtgccgcaatccgtgctgtgccactggatgcttgtgttgactgttga

SEQ ID NO: 12802 - DNA, 1560 bp, Zea mays
  Peptide Sequence Number=SeqID_54581
atggagcttccaccatgggcgtccttcctcggcatcgtgctagccaccgtgatgcttctgaaagccctcaccggccgccgcagccgccgcatgtacaacctcccgcctggccccaagccgtggccgatcatcggcaacctcgacctcgtgggcgcgctcccgcaccgctccatccacgagttgtccaggaagtacggcccgctgatgcagctccggttcgggtcgttccccgtggtggtcggctcgtcggtggacatggccaagttcttcctcaagacccacgacgtggtgttcacggaccggccaaagacggccgccggcaagtacaccacctacaactaccgcgacatcacatggtccccctacggcgcgtactggcggcaggcgcgcaagatgtgcctcaccgagctcttcagcgccaagcggctcgagtcgtacgagtacatccgcgccgacgaggtgcgcgcgctgctgcgcgacctgcacgcggcgtccagctccggccgcgcagtcatgctcaaggactacctgtccacggtgagcctgaacgtgatcacgcgcatggtgctcggcaagaagtacctggataaggaggaggcggccgccgccggcgggtcagtgaccacccccgaggagttcaagtggatgctcgacgagctgttcctgctcaacggcgtgctcaacatcggcgactccatcccgtggctcgactggatggacttgcaggggtacatcaagcggatgaagaagctcagcaagatgttcgatcggttcctggagcacgtcgtcgaggagcacaaccagcggcggcttcgcgaggggaaaggctttgtcgccaaggacatggtcgacgtgcttctgcagattgccgacgaccctacccttgaggtcgagctcgaccgggaaagcgtcaaagcttttactcaggacctcatcgccggtggcaccgagagctcggcggtcacagtggagtgggccatctcggagctcctcaagaagccggaggtcatcgccaaggccacggaggagctggaccgcgtcatcggccgcggccgctgggtgacagagaaggacatgcccagcctcccctacgtcgacgccatcgtcaaggagaccatgcgactgcacccggtggcaccgctgctggtgccccgcctcgcgcgcgaggacacgaccgtggccggctacgacatccccgccggcacgcgcgtgctcgtcagcgtgtggtccatcggccgcgaccccgcgctgtgggacgcgccggaagaattcatgcccgagcgattcctcggcagcaagctggacgtgaaggggcaggactacgagctgctgccgttcgggtccggccgccggatgtgccccgggtacagcctcggcctcaaggtcatccaggtgagcctagctaacctgctgcacggcttcgcgtggagcctccccgacggcgtgaccaaggaggagttcagcatggaggagatcttcggcctgtccacgccgcgcaagttcccgctcgaggccgtcgtcgagcccaagctgccggctcacctctacgccgagccttga

SEQ ID NO: 12803 - DNA, 144 bp, Zea mays
  Peptide Sequence Number=SeqID_54582
atggagaatatttctaaagaacacaacaaagacgaagacgaagaagataacaactcccagacgatctctgattcaagtggcgatgaagaattggcgatgtacctcttgataatggagcaaatggataacactattgctatttga

SEQ ID NO: 12804 - DNA, 900 bp, Zea mays
  Peptide Sequence Number=SeqID_54583
atgtccgtccgccccagtcctacccggcttatgcacgcggcgaagagtggtgccgtcgtcacccttcgcaggtgcagcctcacctccaggagcgccttcttcctcgaccaatttgcctccgtccaggcttcgaccgagctcgtgaacctcctcctgggcgaccatcgcattgaatgtgacgctcgtgaacctcctcccgagttcgtgaacctcctctcacacgccaatccccttactctgttgtgcctccgccccctcccagcatctagcgcgcactgccatcctctgcgccccatcgtctaccgtgaggcatccatccctccttctcccacacactcggatcctccgaacacgccaccaagctcaacgcgatggccgcaccccgcctccctgccccaccgccggcgaggtgcaccgtcgccaccagaggacgagcacgagcaacagaagaccttgaggagaagcccaccatcgaggatatgtccgtcttctccgctgccactgtgccgcctcgcccagccacgcagatacgtggatttgatccaccaccagctcgagtttttgcttggcattgccctggagttggatgcattcaagtatttgcaaatagttgcttcatatggaggatgcacaggtgcaaacaatcttgataagaatgaactatctcaatcccgcgtttattttagaggagatttcgagtgggagaggatcacggtcaagtcagtcgggattaagaaagagttcgatgctgatagggtctttgggcaggagtatgcacaaggtagcctcagtgataacttctttgcgatcattgtgccgactgagtacgattgtttaacggccagcactaggaagaaggaaattgttgatgtcatagttaaggctttcaagagcacatga

SEQ ID NO: 12805 - DNA, 507 bp, Zea mays
  Peptide Sequence Number=SeqID_54584
atggcctgcggcaatatactcggcttcggcggtgctaaaggttcactctcagccaataaaaagatcaagttgggttcaacaaaagagcaaagggccaaccgaaggcacctctggtctggcgcaccggactgtccggtgtgcgtccgcacagtgtccggtgcaccaccggacatgtccggtgcaccagaggactccaactccaactcgtcaccttcgggaatttccagaggcactcgcgctataattcaccggactgtccggtgtacaccggacagtgtccggtgctccaagggaggtcggcctcaggaactcgccagcttcgggaaactccaacggctaatccgctataattcaccggacatgtccggtgtgcaccggactgtccggtgcaactccggagcaacggctatctccgcgccaacggctctctgcggtgcattaaatgcacgcgcagcgcgcgcagaagtcaggcgtgcccatactggcacaccggacaaggaacagtag

SEQ ID NO: 12806 - DNA, 222 bp, Zea mays
  Peptide Sequence Number=SeqID_54585
atggatggcatccgggcatcgacgacgcagctacagacggtggaggtgcgccagcagatgctcgaggcagcctggtggcggtcgacctcggcacacgagggcgcgacctcgccctgtcggacggccatcggcaagcgcgagcatgcggagtcatcggaggggtgtagtgtcaaggcccaaaagtaccgctacagtgacgacggtactgtagcatacccttag

SEQ ID NO: 12807 - DNA, 522 bp, Zea mays
  Peptide Sequence Number=SeqID_54586
atgcgcgccctcctcatctccatctctcatttggatttcccgcgcaacaacctccctctccctcttccacctctctctccccgtggtgccctagggattggagacggcgatcaccggaatttggaccccgaggtgagctcccctctcctccccttcccttctcctctctctccctccccctcccgttctcttccctgcgccccctgcccctccctggcgcggcagtgcccgcccctgcccctcccctgcgcggcggcgctcgcccccgccccagcctccccccgcggcggcgcccgcccccgccccagcctccccccgcggcggcgcccccggccccagcgtggtccgctcgcccttgcccccgacgcggcctcccctgcccccggcgcggccccggcccccggcacggcctcccctgccctggcgcggccccggccccaggcgcggcccctgcccccggcacgcagcccccctgcgcgcggcctcggccccctgcgcgtggcgtcccagctcccggtgtga

SEQ ID NO: 12808 - DNA, 1005 bp, Zea mays
  Peptide Sequence Number=SeqID_54587
atgaggccgatcctgatgaagggccacgagcgcccgctgacgttcctgcgctacaaccgcgacggggacctcctgttctcctgcgctaaggaccacacccccacggtctggtacgccgacaacggcgatcgcctcggcacctaccgcggccacaacggcgccgtctggacctgcgacgtctcccgcgactcggcgcgcctcattaccggatccgccgaccagaccgcaaagctatgggaggtcagcacggggaaggagctcttcagctttcgtttcgacgcgcccgccaggtccgtcgagttcgccatcggggacgcgctcgccgtcgtcaccaccgacaacttcatggaccacgttcccaccgttcaggtcaagcgcatcgccgaggacatcgacgaccagacggaggagtctgcactcgtcatcaccggcatcaagggaaggatcaacagggccgtttggggcccgctgaacaggaccattatcactgccggggaggatgccaccattcgcatctgggactcagagactggacagctgctgaaagagtctgataaagaatctggacatcagaagaccatttcatcgttgtcaaaatccttggactggtcgcattttatcactggctccttggataaatctgcaaaggtggttctaggaggtggtcaggatgcaatgaatgtgactatgacagatcgccgtgctggtaaattcgaggctaaattctatcacaagattttgcaagaggaaattggtggtgttaaaggacattttgggccaattaatgctttggcatttaatcctgatgggcggagtttcattgtatcaacatttggccacttaacattgtctaaaggttatgcccatatttcgtgctttttattgtatatgctcaatgattcagccatgctaagtcatggtaatatacgctattctgatccacacaaggatgtcatcagcatttctgagagaaagatttgtgttgctatgtgtaattttcattag

SEQ ID NO: 12809 - DNA, 2301 bp, Zea mays
  Peptide Sequence Number=SeqID_54588
atgccaacggaggccacagagctgcggcggagatgccggctggcgggcaccgcccggagcggccagccgggcaccgcatggatcgggccgagacgcgtgccacccaccaccaccaccaccacgccacggaacgcgcgggtgaaggcgctccgcggcccaggtcacaccctccttgggcccagcggcgccggcaagtcgacgttcctcgacgcgctcgccggcaggatcgccaagggaagcctcgaggggtccgtcagcatcgacgggcgatcggtgacgacgagctacatgaagcagatttcatcgtacgtgatgcaagacgaccagctgttcccgatgctcacggtgttggagacgctgaggtttgccgccgaggtccgcctgcctccgtcgctctccagggctgagaagctcaaccgggtgtgggagctcattgagcagcttggtttgcagacaacagctcacacatacattggggatgaagggatacgaggtgtctctggtggggaacgccgcagggtgtcgattggcactgacataatccataaaccatcccttctgtttctcgatgaaccgacctctggccttgattccaccagtgcatacagtgtggtagagaaagtgaaagaaattgcaaaggggggaagcattgtgctaatgacaattcatcagccatctttcaggattcagatgcttctcgacagaatagtcatcctggcaagaggaaggctaatctacctaggaactcctcttacgcttcccacacaccttgctggatttggccggcctgtacctgatggcgagaacagcatcgagtacctcctggatgtcatcaaggagtatgatgaatcaacacttggacttgagcctttagttgcctaccagagggatggcagcaaacctgatgaagctgccaagacaccgatacccaagacaccaagaacaccataccagaaatcagtgcagttccgacagatccagctcaagagcaaccagttttcggtcacaaccggaacgcctcatgctaatcccatgtcaaacttcgagtcctataacatcgacgatgaggacgaagaattcgacaactctcttgagagaaagtcgcacacacccttgcataccggaacctcaacctaccatccaagacttgcatcacagttttacaaggatttctcggtctgggtttaccatggtgtcacagggacgccccaccgtaagcctacatggactcctgctcggactccagctaggaccccagtgtcaagctaccagcagcgcagccgtgtcgctacgccacaacacgcacctcctcctcagtcaccccgtgaaccagttttcaagccggaggaacctagctaccatgaataccagcttgaactggaaccactggatgctccggaggatggccccaagtttgctaatccctggttcagagaggtggttgtgctctcatggcgcactgctctgaatgtggtgcgcacgccagagctattcctctcccgggagatcgtcctcgcagttatggcactcattctttcgacgcttttccaccgcctcagcgatgctaacttcacaaccatcaatcgcctcctcaacttctacatctttgcagtctgccttgtcttcttctcctccaatgatgccgttcccaccttcatccaggagcgctttatcttcatccgtgaaaggtcccacaatgcttaccgtgcatcatcctatgtggtatcctctctaatcgtctacctcccgttctttgctattcaggggttcacctttgcagtcatcacaaagttcatgctccatttacaaagcagcctggttaatttctggatcatcctgtttgcatctcttataacaaccaatgcatacgtgatgctagtcagtgcacttgttccaagctacatcactggatatgctgtcgtgattgcgacaacagcactcttcttcatcacttgtggtttcttcctgaagcggacgatgatccctatggcatggaggtggctccattatatctcggccataaaatatccattcgaggcattgcttgtgaatgagttcaaaggaagcgaatgctatgttggcacacaaaaccaactttcacctggacctctgggacaagtcagtaacctgaattccacctcaacgacatgccccctggtaggccaagatgtgctttccaccatggacatagcaattgataacatctggatagacgttgcaattctcctagcctggggcgtgctctaccgactcgtcttctatgtggtcctaaggttctactccaagaacgagaggaagtaa

SEQ ID NO: 12810 - DNA, 381 bp, Zea mays
  Peptide Sequence Number=SeqID_54589
atggacgctctaaaatttgaataccctgattatgagcggctcaacaagggtgccaaaggggcaaaaaggaaaaggattgttagcgttctgagcagacaagctgccagaatgttgctaagtcctctaggatcggaactaacgaagcttttactgaagaaggacgagccttcaactaccaaaggggggatgggcagaaaacaagaaacagctgcgactgcagaacaggtcatggccccagtgcctgacaaaggaaagaaaattgctgaagctgctttggaagaaaaaaaatttgaccttcgaaacctggttgggcaagaactatctgagtccgaaaagaaggagctacaggaatatggcatttcttgtggctaccagccatga

SEQ ID NO: 12811 - DNA, 717 bp, Zea mays
  Peptide Sequence Number=SeqID_54590
atggcgtgctatccattggctccacaaaacagcgagtcggcagcacgcggagacgtcggggctgctgcacatttcgtcgagcacctagcaagcaccatggggccctgcgcagcagcacgcaagcagggaggaaaccgagtcgcgagccatggcggggaagatgcagggagcgtccaagcagggaggggcgccgaggtagaggagaagctgcaggggggtggcgccatggggagggagagagctcgcccactccatggacagcagagggaaacgctggggagctcgaccaacgaggttgctggccgaccatggagacacccagctgctgagcgccatggatccgcggggaatgaaggtgttgttgccctgcgctcacttgagcttggggagggaggcgtccatggcagcttctgctcttgcgcgagggaagccagggaggagggcaccatggaagaggaggagccgagctccttgctgcagtcatgggaagaaggtctccctgctgccgaacgccatggagaaggggaggaagaaggggacttggctggagcaggcgtgcccgagggagaaggagcagggagagcgctcggccgtggagggaagctcggctgcttgagctacgctggcgccatgggaggtgttgctgtcgtgtgccatgaacagagaagaaggaagctgcgcgtgagagggaaaaggagaagagagagtggcggctag

SEQ ID NO: 12812 - DNA, 297 bp, Zea mays
  Peptide Sequence Number=SeqID_54591
atgcagttggtggacgacctgaagaatggtggacttacccagtggatgctcgccaatccatggggatgtactgtctacgagatggaaattggaataaggattaaggtgtggtactccttaggatggttggttgatggccgaatccctagccgccgacgagatcccccgcctgcgcacgtggaccaacctactccgaccaccacagccgacgatccgtacctcgacgtgatcgccagagacccccagacctcacccgacccctcatcggagcaacctcgccgtcgagtttgggattaa

SEQ ID NO: 12813 - DNA, 348 bp, Zea mays
  Peptide Sequence Number=SeqID_54592
atggagacggatgtgtgccgctataagtctgacaatgttggctttccaaagctcgaagcgatgttatcgactatgtctgatgaagacttttctgattgtctggcttatactcatctcgaggagaaatctttcaagagattagaaaaggactttattgacagccggaccaaagtccagaggctcaaaacttcaaatgctgaacagaaaaagcgcatcgcatcgctcaaagctgagatggaggagatgaaggagtatgaacttgaaatgacgaagttgaggcaatcgtctgccgaagtggttgtcaatctaattagtgctcaagtaaagatggatagacatgaaggctaa

SEQ ID NO: 12814 - DNA, 762 bp, Zea mays
  Peptide Sequence Number=SeqID_54593
atgcccgcgaccaatacccgccacgccaccgctgcacacagcgatgcgacgaccaaggccgtggcgagtaaggagctgggcgtgttcgacggccacggacgagcgcagatcggcgcgacagagacgaagaccgagaggagagcgctgctgggggaagcgaagcgccatggcaaggccgatggccggcacgcgcacctggtgaaggtcgagacgacgggagggcgcgacggcagcctgggccagagccgcccgcggctaggaggtctacgcggccaacagagggaattcgcgagcagccatggaagctggggcgatccagggacgcggtccgatgagctcgcagcggatccgagctggggcgagctgcagcaggaagccacggggaaactcgggagaagggaagccgcgagggagagagagagagacagggcgccgagcagagaagcagaggtgcggctgagcgtgggagatgggacgccgcgagatggggcaaatagggagcgggggcgcgccagcagggaagctccacggccgcgaggcgggagagaagcagggcgtcgagaggaagaggaagggcggctgggcgcatggcaaacagagaggaagcgagctgcggcagaggaggaagacacgagggagcaagaagcctgtgcgcgcgtgggagaagataaataccgcgagaaaatatcaggacagagatcggcggttgaaaaaatcagagagaaggagataagaatgatgatgccaggaaatatcgagtga

SEQ ID NO: 12815 - DNA, 246 bp, Zea mays
  Peptide Sequence Number=SeqID_54594
atggcgcggaggcaagaagaagcttccaaatgctcgaaaaaatttctatctgagatttggaaaaggggtggaaaagagttaagtattgaggaatccataaagtacagagaaaaggtagtgattgaggtaaaacatacagaatctgaagctaaggatactgccgccgaaaccgaggccatttctgccagagctataaagaaggctgaagattatgagatcttgaagacctatgaaccagggaattaa

SEQ ID NO: 12816 - DNA, 1128 bp, Zea mays
  Peptide Sequence Number=SeqID_54595
atggggctgcttgcttctgtgcagggacctagccaactgttgaaccagcaggaaattatcttgaatgcttcgacctttgataaatgcttggttattggaaaccagatcagggaggtggggaaagggcgtgatgttggcttgaaccaaattgcactatttgaggggaaagttgctggaggcaatggtgagcaagttctcagccgagatgtgtaccgtctgggccagttatttgatttcttcaggatgctaaccttctttttcaccactgttggttattatgtctgcacgatgatgactgttctaactgtgtatatcttcttgtatggaagggtttatctggcactctctggccttgactactcaatatctcgccaagctaggtttttggggaacactgcactagatgcagctttgaatgctcaatttttggtccagattggtatttttacagcagtgccgatgataatgggtttcattctggagctggggctgatgaagctccagttctgttcggtgtttttcaccttttcgcttggaacaaggacacattactttggtagaacaatccttcatggcggtgcaaagtatcgtgctactggaagaggttttgttgttcggcacataaagtttgctgaaaattataggctctattctcgaagtcactttgtcaaagcgcttgaggttgctctcctcctgatcgtttacattgcatatggatacacaaaaggcggttcatcttcatttattctgattactatcagtagttggttcctcgttatgtcctggcttttcgcgccttacattttcaacccttctggtttcgagtggcaaaaacgagggtgccgtgcgttactgtgtgagtgggctgtggacctcatgaagaagctgatgaagctaggaagcctcgaccacaccattggacacagtgcgatactcgacctcgccgatggagcgggagacaagcggtcatatgttctggacatcgatcgcctgagcgtggagggtggcgatggcggcgacgtcgaacctggagggaggggtggctttggggtcactagaggcgactcgacactatggtcgaggagaagacactatccgccgcggtgtgctcatggtcccgagtggtag

SEQ ID NO: 12817 - DNA, 534 bp, Zea mays
  Peptide Sequence Number=SeqID_54596
atggtctccccattaagccaccaatctttccaaaaaatcttattttgcccattaccaactaaggtttacggcttctcatggattgtactctttgttatggttcttcttttcaagctttttactgcaactcctaggaagtcgacagccttgccgacttttgttaggtttctgcagggcgtccttgctattgggataattgcaggaattgcccttcttatcgtgctcacatcattcactgttgctgatttatttgcaagtgcacttgcttttatagcaaccggctggtgtgtcttgtgtctggccgtaacatggaagagggtagtgaaagtccttgggctatgggattcagtccgtgagattgcaaggatgtacgatgcaggaatgggagccatcatctttgtgcccatcgtcgtcttctcatggttccccttcgtgtcaacattccagtcacgtttcctcttcaatcaagcgtttagtcgaggtctggagatctccctcatccttgcagggaacaaggcgaatcagcagatttga

SEQ ID NO: 12818 - DNA, 354 bp, Zea mays
  Peptide Sequence Number=SeqID_54597
atggctttgatagccggcaagtcatccctctccctagcgccccttcccttccccctctccctctataaattggacagccgagcccctactcttcccttatcgagctcgcccaaaactgccgtcccttctctcttccgtgcacacgcgctgctcgccaaaatttcgtcggcgctgccgttcggaccgtccgcccccatccgagtcacgtcgtgcccctgcttcctggtcgcgccgtttagccagaccgtccacgccactgtccctccctggcgaccaccattgcccctgcccctttctcggccgccccgctccccctcgccgagctccctacgcacaaagaccagccagaggtag

SEQ ID NO: 12819 - DNA, 200 bp, Zea mays
  Peptide Sequence Number=SeqID_54598
atggtcggcaacagcggcgtcctgctggcgcgggagcacggcacgctcatcgacgcccacgacctggtgattcggctcaacaacgcgcccgcgggcgatggcagtcttaattgggttttcgcgctctgcatcaccaagtcaaacttcgccggcgaggttgccaccgtggggggacctccatcgcgttgggtgggcgtaag

SEQ ID NO: 12820 - DNA, 537 bp, Zea mays
  Peptide Sequence Number=SeqID_54599
atgtgcggcatcctcgctgtcctcggcgtcgctgaggtctccctcgccaagcgctcccgcatcattgagctctcgcgcaggttacggcaccgagggcctgattggagtggtttgcactgtcatgaggattgttaccttgcacaccagcggttggctattatcgatcctacatctggagaccagcctttgtacaatgaggataaaacagttgttgtaacggtgaacggagagatctataaccatgaagaattgaaagctaagttgaaaactcatgagttccaaactggcagtgattgtgaagttatagcccatctttacgaagaatatggcgaagaatttgtggatatgttggatggaatgttctcctttgttcttcttgatacacgtgataaaagcttcatcgcagctcgtgatgctattggcatctgccctttatacatgggatggggtcttgatgagatgaaggcattgagtgatgattgtgaacgcttcataacatttcccccagggcatctctactccagcaagacaggttga

SEQ ID NO: 12821 - DNA, 126 bp, Zea mays
  Peptide Sequence Number=SeqID_54600
atggccccaagacggagggagcgtgcggagcaagcgaaggccttgtcggtccctatcgaagccagaaacggcgaaggcctctacgactaccaaagacctagcacatggagcacgaagggaggctga

SEQ ID NO: 12822 - DNA, 1431 bp, Zea mays
  Peptide Sequence Number=SeqID_54601
atggcgctcctgacggtgtcagcggcgctgccgcggttccggccggcgccgtgcaagcccggcggcgcggtggcatgccaggaggccgcgccgtggcagctggcggtgctgtacgtgtccctgctcctgaacgcggtgggcgcgggcgggtaccgcccctgcatcgtggcgttcggggcggaccagttcgacgagtcgcgggcggcggagcgcgcgcggagctggggcttcttcaactggacaacgtgggctggggctggggcctcggcgtgcccggccttctgcatgggcgtctccgtcgccgccttcgtggccgggtacccgatgtaccggaggctggagcccgcggggagcccgttcacgcggctcgcgcaggttgtcgtcgccgctgtcaagaagcggcggctgccggcggcggacgtcgaccccgcgttgctgtacgaggacgacgagctcgacgcgcccatctccatgtacggcaagcttgtgcacacggatcagctcagcttctttgaccgcgcggcgatcgtcaccgacggcgacctggtcacgctgacggacgcggactccggcaagccgtcgacggcccccgtcccggacctgtggcgcctgagcaccgtgcaccgcgtggaggagctcaagtcggtgatccgcatgggtcctatctgggcggcgggcatcctggtgatcacggggtcgtcgacgcagaacaccttctccctgcagcaggcgagcaccatggaccgccgcctcgcgccgggcctctccacgttcgagatccccgcggggtccatgaccgtcttcgggctgctggccatgctcttcaccctcttcgtctacgaccgcgcgctcatccgcgtggcgcgccgcttcacggggctggaccgcggcatctccttcctgcaccgcatgggcgtcggcttcgccatcagcgtgctcgccaccctggtcgccggcttcgtggagcggcaccgcagggacgcggcggcggcggccggcgccacggacgccggcacgtccccgctgtcggcctactggctggtgccgcagtacgcgctgcacggcgtggccgaggcgttcacctccgtggggcacctcgagttcatgtacgaccaggcgcccgagagcatgcgcagcacggcgacggcgctcttctggctgtccatctcgctgggaagctacgcgagcacgctgctggtggacgctgtgcaccgctggagcgcggggcccggcggcgccaactggctgccggacaacatcaatcacggcaagctggattacttttactgggtcgtcacggtactgcaggtcatgaacctggtgtactacgccatttgcgccaagcggttcacgttcaagccagtgcagctccacaagaaagaggaagaagaaggcggcaaggcacttgtggagttgcaagagaaggtttaa

SEQ ID NO: 12823 - DNA, 720 bp, Zea mays
  Peptide Sequence Number=SeqID_54602
atgccagctagcccacggcggcagtgcgcgctcgcgtggctagcctacggcggcggcacctgctcgctcgtgctgctggcccgcatcggcgcctgcgcgcgctgctggcttgcggcggcgggtgcacagcttgcccgtgctcatggccgtgtgggccttggtctggcggcggtcctgcggatgccaatgacgagttcaaggtggcgcgactgctggtggtgggtcgtgggccagctggttctatgcactaggtcgtggggtgagaggtcctccggcgaaagccatgcccgcttgcgagaggacggcggtgacgcctacgggcgccactcctaccctattgagggtgccgtccttggacccctcgtgcttcatttgggagtccttgcctcggactttttggggtttctcgctggctgctcggtcgacgtcgagactctgaaggttggggcctactgggttggtgcgtcggtggatggcaaaaggtggcaacaagcggcggcttggcagggtgacatcggtgtggttgttcctgcaggtttctccttggttctggtgatctccattgctctactgggtcttcgaagaaaacttttcttagttggttctaggcgggtggcaacggcgtttcgacgtcatttctccttcttgaaggtgctgcccagaagaccttcagtttgcatggttgtcagtggtatggaggcttttcgtcgctccacttag

SEQ ID NO: 12824 - DNA, 780 bp, Zea mays
  Peptide Sequence Number=SeqID_54603
atgccggtgcgggaggagcggggatggggaggtgcggagcgagggattcgcatgctacttgagaatgcaaatgctcttgctgaaaaatgggataaaattcccatcgtgcttgccgtgaagacttatcctgatatttctcatagcctgctcaagtatcaatggactgatgaagaagtgagaaatgccacagggtattcaaatgtcatggtggctgaacatccactgaagctcagtagttcatatgccatgttaaagggaaattcaaacaataggggtcttcatggtgaacccttggcaacttcctaccacaggaagtttcttggaactgttgattacctgtggcacactcatggaattgaatgctccagagttttggacacgttacctattagtgttttgaagagaacgaggggtcttccaaccagggaaattggcagtgatcatttgcccattgttgctgaatttgctttcacggaatcagttgaagatgattccgatgaagatgatgaatctgagcaagatgacgaatctgaaatatctccggcttcattgcacaatgaatttctcggtatctttgcccgtgtactgtatgggatcctgctgttcacagaatcaagtatcacattgagcagaatcaagtaccacattgagcagaatcaacactttccgcaccggatgtccactgaagcacgggcctttgcgctcgtcgctgaacattatgctatggatctggatgttaagcttagtatcttggttcgtgatcagaaaaaccactgctga

SEQ ID NO: 12825 - DNA, 378 bp, Zea mays
  Peptide Sequence Number=SeqID_54604
atggattgcttcggcctccaggtggttgacctttccatggttgaaggcgagctgcctagttgttctgacgttggtactgatttcctccatgctggttgctctgacggtactgctgctactgctactgctgaggaaattgcctctgatactgctgctagtgttgacgctgatgctggtgctgctgagggtattgccgcggcggagaagaaggtgcgacgaggaatcccggcgctctatgccaatagcgctgcaattccgggctttgggcgacttcagtgcaacccggagaccagcccggacgcatttccgagcccttcccgttgcgccgacctccacgaaatgcgtggtggccgtttctatcaccgccgcacgaggtag

SEQ ID NO: 12826 - DNA, 360 bp, Zea mays
  Peptide Sequence Number=SeqID_54605
atgaacaacggacgaggtgcatcaacgtgcaaggtcgacatcgcggttgagcattgtgttgagcgggtggcatgtgcggtggagcagcagcatcgctatgtttgggtcgcgggtggtcgatggagctggagggctcagtggccattgccagtgctggtgagcacaagacacgagtggggaagcccacgacctggtggaggccgagcaccaaggggaggcgagggaggagggcatcgacgcttccatggagaagggctactgggcgctaggctcctgcccatggggcttcctgcgcgtgcgcttgagggagcagtggccagagatggcgtctgccctgaacaagatcgagcatggtcctag

SEQ ID NO: 12827 - DNA, 447 bp, Zea mays
  Peptide Sequence Number=SeqID_54606
atggctcaggttcgagctcccccttccctgctcgctggacactggctagggacgcagtgcctagcccctgctctcccatggcacacagggcccttgccgtcagttttggacgtcgacccttctaaagttgtcgcgttcgacctcatccaggccccgcgccgttcctgccctcaccggctgtcgtcctccagctccagcatccggtctcctccgcacagcgatggtcgcgcctcctgcctctgtcaggctgaggctctcacctctaggactaggattgggcgttcggacgaggcggcgaggtctgctgtcgtcgtgtcgaccggcggcgaggtctgcgtgctgtctgatgcctgctacgagggtttgccctgtattgctgcccgcctgcctgtacgtgggagcatgggcggtggccggtgggtgggctggttacttgggtttcggtag

SEQ ID NO: 12828 - DNA, 480 bp, Zea mays
  Peptide Sequence Number=SeqID_54607
atggactatggcgccgagctgtgtaacctcgacgccatagcccatggcgccgaatatcggggtctaaagatgcatttaaaatttctaggggtccaaacgttttcgaaacatcactttacaggggaggaaaacaacgcatcctgcactgctccgactgctatgccacccgcccgggtgaggctgacagcagccaagtccagcctcgggcgccataggaagctccgcctcgcccgaccccagggctcggactcaagctcgaccccggacgacggtctccgcctcgcccgaccccagggctcggactcaacctcgaccccggaagacggtctccgcctcacccgaccccagggctcggactcaacctcgaccccggaagacggtctccgcctcgcccgaccccagggctcggactcagcctcgaccccggacgacggtctccgcctcgcccgaccccagggctcggattcagcctcgacatag

SEQ ID NO: 12829 - DNA, 1752 bp, Zea mays
  Peptide Sequence Number=SeqID_54608
atgggctgggcgcctaggtggctgcgcgggctgctcggcggcggcaggaaggccgccgtgacgaagccggcgaaggagaagaagctctggggattcgggaagtccttccgggaaaaggaccccgcgccagcgccggaacggcctcggacgccttcggtgcagcccacggcgacgcctcgccgggggtttgcggcggcgccggatgaggcggacgacgagcagagcaagcgtgctatcgctgtggccgcggcgacggcggcggtggcagaggccgccgtcgctgctgcccaggcggccgccgccgtggtgcggttgacgagctccggccggtgcccaccgccggccgccgcgaagcggggaggagtgggcggctgttcggatccaggccgctttccgtggctacctggcggctaccgccgtagccgcgtagtaatggcggtggcgaggcgggcgctgaaggcgttgagggggctggtgaagctgcaggcgctggtccggggcaacattgtgcggcggcaggcggcggagacgctgcgatgcatgcacgcgctcgtccgcgtccaggcgcgcgcgcgcgcgtgtcgcgcaattcgctcgcagcatgtcgcggctcatccggatccgccaacgccggagaagtacgatcaggcgggtgcccccaggcacgcccgttccggctctctgaaggcaaactcttccaagacgccgggcggcgagaggctgggtagggagaggtcggaatcttgcgggaggaactggctggaccgctgggtggaggagaggtacacggacgacgagaagaacgccaagattctcgaagtggacaacggcaagccagggcggcacggttccaagcggcgcggcggcaaccatcaccagtcgccgtgctcgacgatgacctccgagcagaacagccggagctacgcgaccatgccggagtcgccgtccaaggactcgacgaccgcgcagcagtccgtgccgagcccgtcgtccgtgggcatggctgccgaggccctgagcccgctgcgcgtgccagcggacatcgccgagctctgcgacagcccccagttcttctcggcgacgtcgcggcccgggagctccaggagggggggcgcgttcacgccggcggccaagagcgagtgctcgcgcagcctcttcggcggctactccgactgccccaactacatggcgaacacggagtcgttccgcgccaaggcgcgttcccagagcgcgcccaagcagaggccgcagcagcagtacgagaagtcgggctccctccgcagggcgtcggcgcacgccctcgcggcggggccggcagcggcacagaggtcggtggcctcgttgcacgccatgaaggcgtatccgggctccggcagattggaccgacttggcatgccgatccacgctgccttgaaggcgctagcacaaggcatgttccggaagcagccagcgtcagaactcagaaacccgatcggcagcggcggcagcagcagcagaagggaacagtatggtagccgcgatcagcggcggcggatggtgccgatcgcggacacctctgggctctggcggatagccagcccgatcggccgcgcggcgctagcggggagccggggacacagcacaggcgtccacgccggctacgcgacgatgcgacggcacggcacaccgcggccgcgcgcaggcgcaaccaacgatcaaccagttgcttcgacgcgcctctcatttgctgggagccagcgactaggggcctag

SEQ ID NO: 12830 - DNA, 1437 bp, Zea mays
  Peptide Sequence Number=SeqID_54609
atggcttccatggcctatatagctgcctgtaccgcggcattggcgatcttcgtcgctctgctcctctgggcgtaccgatggagccaccccaagtcgagaggcatgctcccgccgggctctatgggcatccccctcctcggcgagacgatgcagttcttcgcgccgaacccgacctacgacgtgtcccccttcgtgaaggagagggtgaagcggtacgggagcatcttcaagacgagcatcgtggggcggcaggtggtggtgtcggcggacccggacatgaactacttcgtgttccagcaggaggggaagctgttcgagagctggtacccggacaccttcaccgagatcttcggccgcgacaacgtcggctccctgcacggcttcatgtacaagtacctcaagaccctcgtgctccgcctctacggccaggagaacctcaaggcggtgctcctcgccgagacggacgccgcctgccgaggcagcctcgcctcgtgggcggcgcagcccagcgtcgagctcaaggaaggcctctccacgatgatatttgatcttaccgccaagaagctgatcggctacgagccgtccaagtcgtcagagagcctgaggaagaacttcgtggcgttcatccgcggcctgatttctttccccgtcaacattcccggcacggcctaccacgaatgcatggaggggcggaagaacgcgatgaaggtgctgaagcgcatgatgaaggagcggatggcggatcccgagcgtcggtgcgaggacttcttcgaccacgtgatccaggaactccggagggagaagccgctcctgacgaagaccatcgcgctggacctcatgttcgtgctcctcttcgccagcttcgagaccacggcgctggcgctcagcctaggcgtcaagctcctcaccgacaaccccaaggtcgtcgacgcgttgagggaggagcacgacgcgatcgccaagaacaggaaggacccggatgcccccgtcacgtgggccgagtacagatcgatgaccttcaccaatcaggtcatcatggagatggtaaggcttgcgaacatcgtgccggggatatttcgaaaggccctgcaagacgttgagatcaaaggctatacgattccggcgggatggggcgtcatggtgtgcccaccggcagtgcacttaaaccccgacatctatgaagaccctctggcgttcaacccgtggagatggcagggcaaacctgaaatcaccggtgggacgaaacacttcatggcgtttggaggtggcctcaggttttgcgttggcactgatcttagcagggtcttgatggcaacattcatccacagcttggttacaaaatacagttggaggacggtaaaaggaggcaacatagtccggacccccggtctcggctttcctgatggcttccacatccaactttttcctagaaattga

SEQ ID NO: 12831 - DNA, 426 bp, Zea mays
  Peptide Sequence Number=SeqID_54610
atggaaccgccattctcgctggcatcgtcgtgcctcatcccccgtaagatatccacccccactgcgatagtcgaccttgtgcctcccgacatcctcaccgccattgttgcgccctcgccttcgatggaatcgcacaatcgcgccatcatcggtcgtaatcccctcgacccgacttcatccgcgcacccacaatccccgcaagcctcgcccctgatggcgtaccccgcccctcgcatccatggcactgcaatgatcgcccacgctccaaataaggcgtgcccgcaatctctgcgatggcgaggccaaccacggaatctttgccgcaatcccaccaacgtccttccacacccttcaatctcccaaatcggcaccgcaaaagctgcgggcgaggcttatttggagcgtggacaaaacaatggagaatga

SEQ ID NO: 12832 - DNA, 414 bp, Zea mays
  Peptide Sequence Number=SeqID_54611
atggagcccaagctgtcttcggtcggcgttcgcgaccttcgccgtgtcgtcatgcccacccctgtcctcgtcgtcctgctcgacgcccgccacgacctccatcgtgtcatcatccccacgcccgtccggacccctatcgccagcatcgcagtgcctcccgcacgaggtcgctgcgcttgtcgatctgatggcggcccccatggcaaaggagcagtgagcgagacccctcgcgtgtgcaactgcaggagatggacgatgaagcgttggatcaaggagatggaggaggtggccgccatggccaccaattccaggtcagcacctgcacctccccctcccttccttccaccagattctagatctcttgatcctgacaccagttttcttggatctattggcgagttcatcgactcttga

SEQ ID NO: 12833 - DNA, 234 bp, Zea mays
  Peptide Sequence Number=SeqID_54612
atggcggttcgggcgggccttatagggagcagggaagtccgagcggagcagcagcgagatccccgcgcgcggatttcggcacgcggtagctctgctgttaagtgggccccacaagtcggcgttccctcccacacggctgggcagcgggacccgcatccagtgaagggggcggccagttgggctagcgcagtgagtgaagtaaggatgggtccaaatgtgagggtcatggcccag

SEQ ID NO: 12834 - DNA, 327 bp, Zea mays
  Peptide Sequence Number=SeqID_54613
atgacgacccatctgagggtggagttcgacgcagtcacggagaacaaggttcatgacccgatcaaaggccgcgaaggtgccctagaggtgctggccgtcatgaagggagacatgcacactgtagggatgcacgggaaccgcaacggaggtagggatcagcgtgacgggcattgccagtgctgcgggaggagctgcaggcgtcgctggcgtagcgaggaaggaggtcaccggcgtggaatggaggcacggggggctacgcgagcagcactgtccagggaagaggccgctgtggcatcgtgggagatcacttcggccgtggggaaataa

SEQ ID NO: 12835 - DNA, 527 bp, Zea mays
  Peptide Sequence Number=SeqID_54614
ccctccctccgtttgctttgctggtcgccaaagacgagagcttcgcctttggaagcgccagtagcgtagggcgaccgggccagccgagcccctccgaattagttgacggctttgatgactcgacggctggcggggaaatgcgcagcggaaaaagggagaaatgttctttccgggctcaatctcgtcaatctccctggattccagtcaggcgaggcggagaccgtcatccagggtcgaggttgagtccgagcctcgggtgtcgggcgaggcggagaccgtcgtccgaggtcgaggttgagtccgagccctggggtcgggcgaggcggagaccgccttccggagtcgagcatgagtctgagcttaggggtcgggcgaggcggagtccgtcttccgaggtcgaggtggagcccgagccctggggtcgggcgaggcggagaccgccttccggagtcgaggatgagtccgagctcaggggtcgggcgaggcggagtccgtcttctgaggttgaggtggagtccgagccctag

SEQ ID NO: 12836 - DNA, 858 bp, Zea mays
  Peptide Sequence Number=SeqID_54615
atgggggtgggggatcttccgcaacagccaccccgttgtcgttggcggcatcactctgtcatctctgctggggtgaggcgcttgaacgtcagtgctgctggggtggaggcagcagccgctaccagcgtagaggatggtgtagccagtagatgcgtagagggcggaggcgcgtggccgtccgagccttgctgcggcgcgcgtatgcaggcgagggccatggcctactgcaggtcgctgggtgcgcacagtttgacgtccacccggagatgccatggaagtccggcagtgaagagttgtgcttgttggtgcggtggtggcatgggctccgcgtggcacaggtaccctcccatcgcacttcagccatccttgggtcattttttctcccatgtcaatgaagaatggagaaagggatacaagactggtgtatcacatgcaatcagttcaaaattatctaatgtagttgttgtctctgtatcaggtggcattcatgattatcagcaaggggaaactctgaaccacttgcttgtgaattgtgtcttctcaaggattttctggtacaacctgctaagaaagtttgggctgcatagtttagccccacagccagatgcagtttcttttatggattggtgggagagggtatcagagacaacaaatggtctggtcagggaaggtcttgactccgtcatcattttaggatcgtggatgatttggaagcatcgtaatagagtcatttttgatggagggtctcccaaccttcctctgattatggagcatgcagatgaggaaagaagaggctgggaaattgctggagccaaagggctctccctcttggctgtccccctgcataggttgctgtag

SEQ ID NO: 12837 - DNA, 429 bp, Zea mays
  Peptide Sequence Number=SeqID_54616
atgggatccagccttcctgttcagtgccacaaccacggcgagcaggggagcagatcactgctgggagggagcagcttgggagagggtatggacttgcagaagagaaccaagtgtgtggcctctgaaaacgatatagctcttttagtcatggaagtagtcaagatcgaggtggacattgttgaagccatagagggaggcgctagtccaaaacatcaacagaggcacacgagtatacataatcaacagcttctctctgacaaccgcagcaagacaaagagacggtcagatggcaaaggtaggccatgctactcgaacacattgacaagcactcacatgtccatctacaacaccaacagcgtcatcctggaggtggcagcagtaggaacagactctaagactcaggctgagactgagagccaaccagagtaa

SEQ ID NO: 12838 - DNA, 1356 bp, Zea mays
  Peptide Sequence Number=SeqID_54617
atgggccgccgcaaggtttccatggggatcatcccgaaccggcgcctgcgaatctccacgttcggcaagcggaaggaggggctcaagaagaaggcgaacgaactcgccgtgctctgcggcgtcgaggtcgcgctcgtcgcggccccggcggacggcgatggcggcgcggcggacgtgtgggagtccaaggagggcgtgctggcccggtaccgggagctcgacccggaggtgcgcgcgcggcacacgttccgggagtacctctacgccgagctgagcaaggaggaggccaagctcgcccgcgtgacccaggccgggcccgacggcctcgactgctgggacaaggcgctggacggcgtcgacaccgtggaggaggcgcagaagctgctcgagaccatcgacgccgccatacgggacgcggacgacaggaggagggcgctgggcttgccggtcgacgacgacgacgacgaggacggcggcgctgggatcgtgctcgaggggatcgccccgctcagctctgcagccgtcgaggacggctacctgctggacgcgttcggcggcaacggcgacgccaacgaccgggccatggccacgtggggcaataacggcttccaggagccgtgcagcgccgccaacatgcagtacggcttccagcaattcagcagcagcagcaacggggccacggtgggctacgactacgacctgcagatggtgctggacatgtacaacaacggcggccccgccacgggcgcctactactaccagacgcgcgatgcgggcacaatgcaggacggctacggcttcccgtgcgcaagcaccagtgccaggtacttcggcatgccttctgcctaccagatgcagccggtggtcggcagtggcgctgccgagcccattctgggcatgtcgagcgccggcgagccatgccacgccatggtacccgtgccagtggagtacccctcagcccacactagcctcaactacgtggacacgcaggcgacacacggtgtccacggcagtggtggcacgtccttcgctatggaaactagaggtagcttcatcaacgcaccaccagccttctctgtcgccacgagcaccggtggtggcggcggcaacttcgtaagcgcgccaccagcagcaccctcccaaacaatgggcggcaccgtcgacgactacacgcgagcccaacccctccctatgagccgcggcaccgtcgacgacttcacgcgagcccagcccctccgcatgagctacggggacgatatgacaattgccggcacgtacgcgatgcagtccggcatcgaggaagtgcattacctcagtgacctagcggacagtcagctgaacctatggggaaactaa

SEQ ID NO: 12839 - DNA, 147 bp, Zea mays
  Peptide Sequence Number=SeqID_54618
atgtctccggcgcccagcagcggcaagcgcgggagggttcccgacccggaggaggacgtctacgtcgacaacctccactcccacaagcgctacctcaccgagaaggacatccaaatcatctgtatcgtttgctgcgggtacacttga

SEQ ID NO: 12840 - DNA, 201 bp, Zea mays
  Peptide Sequence Number=SeqID_54619
atgaagcctagccatgtggacttcggcaagtccaagatcaaaggacacattgaggtacttaaacgcttcggctacattgacaatattgagagggtgcggttaggaggtgatgaattagtaccgagtcaaagggaagacgaagtcgttgtgtttcggttacttagaattaaaccaattgaaagactttgcacatatgtctaa

SEQ ID NO: 12841 - DNA, 339 bp, Zea mays
  Peptide Sequence Number=SeqID_54620
atgcgacctggcaaggtcctagcgactagagcatggaggcagtggtccgggctggggcgtggcaagaagcatggaccgccggcgagcgtcaaggaaggaatgatagccactaaggctgacctagggcatcggtgtggagtccatgttggatctgaagaagaggcaggcaagggcggagtggcttggacaaaggttgaagatgatgtgcccaccaaccggagcataagaaagaagaagctcggaggggaaggagacaagcaccagggaagcaagcacttcaataccggaaccaaggctgagcacaaccaggatgcacacgcgcgacggacgaatctctag

SEQ ID NO: 12842 - DNA, 1971 bp, Zea mays
  Peptide Sequence Number=SeqID_54621
atggtgagcccacaagctcctccaagcactccgtctggccgcgaagtccgtgacctcggcgtcgtgatctgtggcgctgagctcgacaccaagatttgtggcaccgagttgtggcagttggagacccttctgttgcagaaggatacctacatgaactacagtcaggcgctaagttacacaagccaagcactaagtcagaacctagcaggcttaaggaaaaagagtccaattcgcaagataagtaccacattgagttactatttggaggataattggaaacgcctatgggtgcttgcattatggattggaataatggctggactgttcacttggaagttcatgcagtatcgcaacaggtatgtctttaatgtgatgggctactgtgtgaccactgcaaaaggcgctgctgaaaccctgaagctgaacatggcaattatcctcctcccagtatgccgtaacaccattacttggttgagaaatacaagggctgcacgggcattgccatttgatgataatattaacttccacaagactattgcagcagcaatcgttgttggtataatcctccatgcagggaaccatcttgtgtgtgattttccacggcttataaattcatcaaatgagaaatatgctcctctgggccagtacttcggtgaaacaaagccaacatactttacattggtcaaaggagtggaaggcatcactggtgtaattatggttatctgtatgattattgctttcactttagctacacggtggttccgtcgtagcctggtgaagcttccaaaaccatttgacaaactgactggcttcaatgccttctggtactctcatcatttattcataattgtgtatttggctctcattgttcatggccagttcctttacctcattcatgtctggtaccgaaaaacgacatggatgtatctggcagtgcctgtttgcctgtatgtaggggagagggtgctgaggttcttcaggtctggcagttattctgtcaggctattgaaggtggccatatatcctggtaatgtgttgacactgcaaatgtccaagcctccggctttccgatacaagagtgggcaatatatgtttgttcaatgtccagcagtgtcaccctttgaatggcatccgttctcaattacttcagcgcctggggatgattatctaagcattcatgttcgacaacttggtgactggacacgagagctcaagagggtttttgcagcagcttgtgaacccccagtgggcggtaaaagtggccttcttagagcagacgagacaaccaagaaagccttaccaaaacttctgattgatggaccttatggttctcctgctcaggattacagcaagtatgatgttcttctacttgttggattagggattggtgcaactccttttatcagcatactgaaagatcttcttaacaatattataaggatggaggaagaggaggatgcttccactgatctttatcctccagttggtccgaacaagccgcacattgatctcagcacacttatgacggtcacatcaagaccaaagagggttctaaggaccacaaacgcttacttctattgggttacacgtgagcaaggttcttttgattggttcaagggagtcatgaatgaaattgctgaactggaccaaaggaatattattgagatgcacaactaccttacgagtgtttatgaggaaggagatgctcggtcagcgctcatcaccatgcttcaagctttgaaccatgcaaagaatggcgttgacattgtctctggaactaaagtccggacacactttgcaagaccaaattggaaaaaagtcctatctaaaattgcctcgaagcatccatttgctaagataggtgtattctactgtggagctccagttcttgcacaagaactaaacaaactgtgccatgaattcaatgggaaaagcacaacgaaatttgagttccacaaggaacatttctga

SEQ ID NO: 12843 - DNA, 420 bp, Zea mays
  Peptide Sequence Number=SeqID_54622
atgcacaatggtctggaggagctcttcagtgccactgcaacacatcaggctacccctacccctactattgatctcggcgatgacaatgtcgttgttgagggtgaggttaccccatatggcggtggtgctgtgacggcctccatgacgtcaagcacaagtaggaagtggaaatgcacatccgatgtctgggaggacataaacaagattttcgccactgaaaatggtgtggagacccactaccaccctagagaagagggtgctacactcttaactaatgcacattggtatgatggtgaaaaaatattggagttccttgaaaggttctatgattctactgttgtgatgtatgatgcaaggatgcaacacacaatagaagataaatccctggaggagtccttcaaagatttgttccttgattaa

SEQ ID NO: 12844 - DNA, 1131 bp, Zea mays
  Peptide Sequence Number=SeqID_54623
ctcccgctcggacgcgtcgcgggcgcctttccccagagattccaaggccacccacaaaatcgatccatccagtcgtcgagcgcgtctcctcttcgagcattggactgttccgggagccgcgctggaaagcggcttctgattgggtcggcgatgaggggcgccgccgccccgggccaccagcgatggagcggctcggcggggacgacgccgcggtcactcagcacgggctcctcgccgcggggctccgaacgcagctccgacgacggggaggagctggtcgaggtcacgctcgacctgcaggaggacgacaccatcattctgcggagcgtcgagccggccgcggcggggggcgccaccgcgctgccgctgggcgcgcgcggggaccatgccggcggcgcgtcgtcgtcgtcgcggtccttgtcgccgtcgatcaggcggacctcgtcgcaccggctcctgcagttctcgcaggagctcaaggcggaggccatgtccatcgcgcgccagttctcgcaggacctcaccaagcgcttcggccgcacccaaagccgcgcggaagggcaggggcagcagcagcagccgtcgtcaggcatcgagtcggccctcgctgcccgcgccgcgcggcggcagcgcgcgcagctcgaccgcacgcgctccggcgcgcacaaggcgctccgcggcctccgcttcatcagcagcaacaaggccaacaacgcctggatggaggtgcaggccaacttcgaccgcctcgcttccgagggtttcctctcccgctccgacttcgcggaatgcattgggatgacggaatcgaaagagttcgcgctcgagctgtttgacacattgagccgccgccgtcaggtgcaggttgacaaaatcaacaaggaggagctgcgcgagatctggcagcagatcacggacaacagcttcgattcccgcctccagatcttcttcgacatggtggataagaacgcggacggccggattggggaggaggaggtgaaagagattatcatgttaagtgcatctgccaataagctgtccaggcttaaggagcaagccgaagagtatgccgccctgattatggaggagcttgatcctgaaggacttggctacattgagcgacagtggtga

SEQ ID NO: 12845 - DNA, 739 bp, Zea mays
  Peptide Sequence Number=SeqID_54624
atgtccggtgtaccagaggactccaactcaaactcgccaccttcgggaatttccagaggcactcgcgctataattcaccggactgtccggtgtacaccggacagtgtccggtgcgccaaggagaagcggcctcaggaactcgccagcttcgggaatctccaacggctagtccgctataattcaccggacatgtccggtgtgcaccggactgtccggtgcaactccggagcaacggctattcggcgccaacggctacctgcgatgcatttattgcacgggcagcgcgcgcagaagtcagagtcgcccatactggcacaccggacaaggaacagtagatgtccggtgtgcaccggacacccaggcaggcccacaagtcagaagctccaatggttagaatccaacggcagtgatgacgtggcaggggcaccggacatgtccgatcacgccaagaaggagatggagaccggcgaaaagcccacttcaagccacgggagcacttcatcggaagagtcccgcaccaagaggagggagaagaagaagagctcctccaacaaagggaagaagaagaaatcttcttctcaccacaaagagaagaaagaaaaatcttcttcccacaagccgcatcggagtggggacaagcaaaagaggatgaggaaagtggtctactacgagaccgacacttcatcaacatcgacctccggctccgatgcgccctccgtaacttctaaacgccaagagc

SEQ ID NO: 12846 - DNA, 561 bp, Zea mays
  Peptide Sequence Number=SeqID_54625
atgtccggtggtgcaccggacactgtccggtggcacaccggacagtccggtgcgccagaccagagacaattgaatcctagcgtcttcgaagtcgcacccatctcgattcgctatgatctgtgcacttattctgcttctttatggctaagtcggagtgatgttgatgagacatttgagatagattggggattcttaaatgctcaatggactgatgacatgtgtgcgaatcttcaaattgtgcagacgattggtattgcttggcttccaaatgaattttcatttatgaagcttatcctctctaaagctgatttggtaagtatgttctatgatgcatttggggagttcctttacctgacacaaagatatgaagacaaaagctcccagtttgaacaaagctcttatgttgtgaatcacttgtgggagttatgcgaagagaatgacatagatagtgctactgcacaatttcctagagttggaaaagtatgtaacactttttgtaaagagcgttacatagaacatattcagaagctatctgaaaagatatatgagcccattacatga

SEQ ID NO: 12847 - DNA, 420 bp, Zea mays
  Peptide Sequence Number=SeqID_54626
atgtggcgtgatgagggaaccatcaacatcagtggggacctgcctcctatacggaggctaatctcttattcacagcaggcatcagagcatgaggaggacaccatcaacatcagttcggaacctgcctcctgtggggagcatgaggagggcaccatcaacatcagttgggaacctgtctcctatggggagatgtatttgattttggcatcaaatgacgcaagggtgacatattactttgaaattgtttggctaatctcttcttcgcagcaagcattagagcatgaggagggcaccatcagcatcatagactcaaacctaccctctatggggagtgattcagttgataggttgatcaaccaaattcaatttgaagtcgtcgtcgcccacgtccgcgtggatgttcattgtcggcccgcatga

SEQ ID NO: 12848 - DNA, 267 bp, Zea mays
  Peptide Sequence Number=SeqID_54627
atgtcgtgccacgtggacaacacaatggcaaggccatgtgagctaaccaagtgtgccaccttttttagggagattgtcgacttactcattacaaatgatagcactagtttttgtctgaaatcgtctgctagcccatggcaactagggatcggttggcttcgaactccatacgccgtcccgcacgacgttatgcttgtcctctctgattctctgaacttagaaatgatcaccaaggtcattgcttctgggaaagcggatcattattaa

SEQ ID NO: 12849 - DNA, 1725 bp, Zea mays
  Peptide Sequence Number=SeqID_54628
atggacgacgtagtaccagcgacagcgaagcagaccgtcgttctgtaccccggcggcggcgccgggcacgtcgcgccgatgacgcagctcgccaaggtcttcgtccgccacggctacgacgtcaccatggtgctcctggagccgcccatcaagtcgaacgcctccggcgccagcttcgtcgagagcttcgccgcctccaacccgtccatcaccttccacctcctcccgccgatccctccccccgacctcgccagctccaccaagcaccctttcctcgtcgtgctggagttgctgggccagtacaacgacaagctcgagagcttcctccgcaccatcccgcgcgagcgcctgcactcccttgtcatcgacatgttctgcaccgacgccatcgacgtggccgcgaaggtgggcgtccccgtctacacgttcttcgcggcgaacgccggagccctggccgtcttaacacagacggtggcgctgcttgacggccggcaaacgggcctcaaggagctcggggacacgcccatcgagttccttggcgtgccgccgatcccggcgtcgcacatcatcagggagatgctcgaggacgcggaggacgaggtgcgcacggcaatggcgaagatctggaagcgcgacacggacacccggggcgtcctcatcaataccttctactcgctggaggcccaggccctgcaggcgttcagtgacccgctgtgcgtccctggcaaagtgttgcctcctgtttaccccatcgggccgttggttggcaagggcgggagcgggacggacggaggagaggcggcggagaggccgcatgagtgcctcgcctggctcgacgcgcagccggagcgcagcgtcgtgttcctctgctgggggagcaggggcttgctgtcagaggagcagcttaaggagatagccgctggcctagagaagtccgggcaacggttcctgtgggtggtgcgcacgccggccagcagcgacgacccgaaacgattctggctgccacgcccggagccggaccttgacgcccttctgccggaggggttcttggagcggaccaaggaccgcggcctcgtcatcaagtcgtgggcgccgcaggtggacgtgctcagcaaccccgctgttggcgcgtttgtcacccactgcgggtggaactcgtcgcttgaggccatcacagcgggtgtgccgatgctgtgctggccacagggcgcagagcagaagatcaacaaggtacttatgaccgaggccatgggcatcgggctggagctggaggggtacaacacaggtttcatcaaggctgaggagatagagacgaaggtagcaaggataatctgcctccccgccgttctgccttccaacgatctcaactgtccatccacgcctctgttttcgtcccgtcggatgctgccaacgcccgcgcgcatcccctggtcgtcagccccacccatccgtgcgagcgagcaacccattgcagccaccaccgccctacctactcacctcctcggcgcgaacagccgccgaacccttatcgctcgcccctcgcccgtgccagcaacccccgccaccgccgccgccctgcctctcgtccacccctccgccgcgagatgtcgccggcccctcaccatcctctatccacagcgcgcggggcgtagcccccctctagcgccgctcaagggtgaagggcccatccgcaccctgatgttggccacctccaccatgctctga

SEQ ID NO: 12850 - DNA, 1011 bp, Zea mays
  Peptide Sequence Number=SeqID_54629
atggggttgggatgctgcggccttcgtccgggaggtggaagtgaatgttgtgaagattttgtgaggaaatattcaatgaagacagatatgccaaggagctgggatatacatggttcaaacgttaggttgaaccatgtatttgagttgaatggtcttctgtatggtctgtaccctgaggaggactctgctaaagctggggatgaacgaaggaagaaaagagtggcgacgcgggtagccgaaggctgctcaaaggggaaggctgcggttacaacagcgaggaaaatgaaaaaggttgaagttaaggcgaggggtgtgacgaaggcatccggggctccaggtgccttgaagggttttgttgaggaattagcggagacgtgcactgagcctagggagaaaaaatggaaggcgttgctaccgttggtggacccgcgacgcgaggtgaaggtgccatgccctaacgtgaagggctttgctgtggtcgttgtgatgcctccgccagcggcgccagcggcggcgactaggagggtgctctcgcccgtgaaggctggcaaggtgactggggcaaacagtgctaagattggtggatccagcgaagcaagccgggaactgttcgtagacgattacttgattgaggatgtgagcatgttcgatgctcacaccggactgactgctggtagtggtggtgatgccagcgaagttggtggtggagatgacccgggtgaagtctatggtggaggcttctctggacccgtgggtgtgattctgctgctgttgaagggggtggggaggtcgccaatgcgtctgcagctggtgttggtgttcggggagctggtggatgttgtgacctcgctgctgtgtttcgagaggaaacgaccggaggacaagattgagcgtctctggacgcaaaacacagaggccatcagggacaaatctgctgctgaaaacaagagtcggaaccttctagagaaggtcgtctctcttgagaaagagaacgaggggctcagccgttag

SEQ ID NO: 12851 - DNA, 2196 bp, Zea mays
  Peptide Sequence Number=SeqID_54630
atggcgacggtcacgcagggggtgctgctgcggctgctgcaggcgatgcacacggaggagcgcgtggcgggggagcaccgttcgccggtgctgcaggtcacgggcgtggtgccggcgctgacagcgtccacctccgacgcgccgctgctcgccgcgccgccgtccaacggcgtgctcctcaacctctccgacggcctccactccacctacgtgcaggtcccgcccgccgacgccgacgcgctgctggccgccgcgcgcccgcacctcgtgggccacctcgtccacctcgaccgcctccgcctcgcgcgccccgtgccgcgcgcgctcggcctccgcaccgtcccgtcctcccgctccctgccctgcgctggcgcgccccagccgctcgtcgtgcgccccgccgcctgcgcccgcggctacgtcatccagcccgccgcgtccgccgccgacgccgcgccgccgctcatgccctcctgccccacctcctcctccgacgacaacgacgccaagcggaccgtcctcgggcccaagaacgccgtcgccgaccccgcgccgccgccgcagcagcccgtcaagcgccggttctcgtcgccggcgccgccgtccaagcagcgagacccgtcgcccgccgccaagcccgcggtctcgcgggcgtcgtctccctccgtcggcaaaagcgcgtcgcggccgtcctcgcccgcgctcaggtccacgcccagggcgacgtcgccggcgccgtccaagtgcgtcgtgcccagcctggtcgccgccagggaggagaaccggagggcggccagggagccggcgatcatcgtgccgtcgaggtaccgccagccgtcgccggcgggcgggaggaggggcgccgcatctccggccgtcgccggtgggaggcgggcgtccctgtcgcctagctcgcgccggctgtccggggaagggaccggcaagaagaaggttggggtgctggtggctgggatctccaagatgacggatctggggagcgggtcggctgccaagcccgggaggaagagctgggacgatcccacgcgcactgtggctgcaacgtccgtcatgaagtctaaggccaaggtggacaaggataccatcctcaggactcaggaagcaatgtcgaggcggctaagtgatgctacgacggaacaatccagtaacgatgattcatctgttgacgagaagcccaagcagcctcgtaagaagatagacgcccctacctcagtgaaggcaaagaccgcagctccgaaaattacacttcacgaccctaaatggactgacggcagcattcctttggacgcacttcctgataaactctcaaaaataggaaaggaagcttttgagcggagagattcagcagcaactgctgcagctagcgccctgcaagaggcattgatctctgaatctgtgatcaggaacataagcaagttctctgaaatctgcgcgtccgcaagggtctccaatccgttcccaacagtagatctcttccttgtcgtctgtgaggatgctctcaagtggaagaccatcgctgccgagtctgtggtgaccaacggggctgaagaggaggaactgctggagaagaaatcgacttggcactgggtcggcgctgcgttagccactgatctcgaggtcctcaagcttctgaacggtgccactgggcccttctcccggacgcggagcagcggcactaccaacaagccaaatgcatcttcggtggaaccgccgaggacagcaagcatgtcgtcgaagaagcaagcgcatggagcttcagccaaggcgcagtctaaggcggcggcggtgtcaccaagctccccgccgaggtgcagcacgtggaacatgggcgagacagctgagctcgccaaggccctgtggcgcgagatgcgcgcgtggttcctgaccttcgtggacgaggcactggacgtggggttccacctgttcgaagatcaacagaacgtcgctggcaaggggaggcagcacggcggcggacacataacgatggtcctctcgcagttcaagaagatcagcgactggctggaccaggtagggaagatcgcggcggcggaggaggaggagcagaggaccaaggaaaagatcgagctcttgaagcgcaagatctacgggtttgtcattagccacatggggtctgcgttggagagcccagcatccgtctcggtttcttcgaggagctga

SEQ ID NO: 12852 - DNA, 792 bp, Zea mays
  Peptide Sequence Number=SeqID_54631
atgcaccccgtgccaccgcgatcgtcgacgacgtcgagcatcgccgccagcgccacgcgggtacacccatccgacgccgtcggcggccgtgccactgccgccagtagtggcctgcagggtcaggcgccggcggtgtacacggtgtggaagaggtccagcatgggcttccagggcaccgacggcttctccgtctacgacgccaccggcagcctggcgttccgcgtcgacaactactcgcgccgccggaagctcttcgccggcgagctcctcctcatggacggccgcggcgcgccgctcctggctctccgcccgcagatcctcagcatgcgcgaccaatggaactgctacagagcaacgtcagaagaacccagcggcgacaacgaccagagcttccgccgccgcaggcggcagcagcagctcttcttctccatgaggcagtgctcgctcgtcagagggaccgacgaggtggaggtgcacatggcggcggcgtcagggacgtcggcagcccagcagcaggtcccgagcttcacggtgcagggcagcttctggaggaggagctgcaagatccggcgcggcggcgacggcgacggcgacggcgaggaggtggcgaggataagcaggaagaaggccgcaggagcggcgccggcgcccgtcacgctcggggaagacgtgttcagcctcaccgtcgtgcccggcgctgactgcgccatggtcatggctttcgtcgtcgtcatggaccgcatctgccagcggccgtacagacccttgatgtgctctgcctcctcgtcgtag

SEQ ID NO: 12853 - DNA, 813 bp, Zea mays
  Peptide Sequence Number=SeqID_54632
atggccaaggtccaccccaacgccgcggggtccgtcgttgccacagcagcagcagtaggccgggccccggcggaggctgatggagagccgtccactgtgctgacggtgtggcgcaagtcgctgctcttcaactgcgacggcttcactgtctacgacgccagcggcgacctggccttccgcgtcgactgctacgccggctccacccggcgctggcgccgcgccggcgtcgtgctcatggacgccagcgggaagccgctcctcaccgtgcgccgcaagacgcggctcggcctcgcggagcgctgggtcatctacgacgccgacgccgacgacggcacgacgacgacggccagggccacgccgctgctctccgtccgccgccgcatcggcgcgtgctgcaagacgctggcgctcgcccactccgcggccgcgggcaccgacgacgcggcggcggcggctgcactgtcgtacgtggtggagggctcctacgggcggcgcgcctgcgcggtgcgtgaggagcgcgggggcgccgtcgtcgcggaggtgcagaggaaggaggcccgtcggcgacgacgtgttccgcctcgtcgtggcggggtcacgtctcggcgcgccgctttccatggcgctcgtcatcgccctcgacgacatgttccgcggcggggccggcggcggcggctggtcgacgacgcggtcgttgctacgcaggaagaattcgtccatggctatatagaatggctatatagaataggagaattttgcaaacatgggaccgtctaccagacttttggcaccacggtcggtcgtggcaattga

SEQ ID NO: 12854 - DNA, 711 bp, Zea mays
  Peptide Sequence Number=SeqID_54633
atggaccatatatcatgtggaaaactatcccttgccccctcttatcattttgcacggtttggtcatttactgtcgtgccctcgctccgttacatcccttgccgccgtccccatgtttgcaaaattctcgagctccggcggtgagctggctgacgtggtcatccggcagctggaggagctcgccaagtcggaggcggcggtcgtggcggcgtcttacgcggagctgctggagccaggtgacggcgaggagctgcctccatgggtgtcgccggatctcgacaatggccccgccgcagacttcgaggctctcgacgctgacgttgacgccgcctggcatgatgcagcgaccatcgcattcgcagcagtgccttcccacgaggagcaggaagcgtggatcgcgaccggttgcgacgtcgacgcgcgctgggcggaggtggaggagatgcgcgagcaggctgctccggcgccggacgagccgtgcctgtcctcgttcgtggacacgtcggagatcttccccgccagcgtcacgctcagcggcggcggcggcgacgtggacaatagcggcgacaactacaagccagacgaggaaacggccccgcgaccacagctgttggccacgagggcgctggtgccggtgacggaaaaaggaggagagagagagggagaatggaatacgggagacgatagaagaagacggcgacaagggatgtaa

SEQ ID NO: 12855 - DNA, 129 bp, Zea mays
  Peptide Sequence Number=SeqID_54634
atgacgatgatccccctcgccggcttcaccgccctatctgccgccggcctcctgctcatcttctcctccttcctgctgcaaactcaagaggttgcgattgctgctgttgttcgtttcagagaattgtga

SEQ ID NO: 12856 - DNA, 1239 bp, Zea mays
  Peptide Sequence Number=SeqID_54635
atgggcaactgcggcacacgggaggagaatgccgtcgtcgctgcgcacgcgcaagttcagcaactccacttgttacaacagccttccaagaacgccaatgcagataggaagcacacctgcatgtcatcagatataagtgacccttccacacctaggaaagttgaagatgccaagaacatttccatatacaacgatgtgattgccttcacattgtttgagctagagacaatcacaaagagcttccgtgttgattatgttcttggcgaaggaggatttgggaccgtttacaagggttacatagatgaaaatgtcagggttgggctgaagtcactgcctgttgcagtcaaggtgctcaacaaagatggacatcaagggcacagagaatggctttgttttgttgaccatgacatgggaaatagacaagctgataagaccgaggttaactgcctggggcagttgaggcatccaaatttggtgaagttgatcggatattgctgcgaagatgaccatcggctgcttgtctacgagttcatgtttcgaggaagtctagaaaaccacttattccgaagtaaaccttctgctcctgttatgctgtttgtcagactgttactaactacatttgaagaaaaaggcaaaataactggaatgctttccgatgctagcatgtatgattatactgccaaactgtctgactttggcctcgcaaaagatggccctgaaggtgatcagacgcatgtgtcgacacgggtgatgggaacctacggttatgctgcccctgaatatgtgatgaccggtcacttgactgctcggagtgacgtgtacagcttcggcgtggtcctgctggagctcctgacggggcgcaagtcgatcgacaagtcgcggcccagcagggagcagagcctggtggactgggcgctcccgaagctcaacgacaagaggaggctcctccagatcatcgacccgaggctggaggggcagtactcggccagagccgctcacaagtcctgcagcctcgcgttctactgcctgagccagaaccccaaggccaggccgctcatgagcgacgtcgtcgagaccctcgcgccgttgcagcagggcggcggcggcggcagcgacgcgtcctccggccttcctgactgcagaggccgccgcaggctgaccggcaacagcgtcgtccacttcagggccatccccaaccccaagtgcacgcctgttgtcccggcttgcagagtgcggtga

SEQ ID NO: 12857 - DNA, 1572 bp, Zea mays
  Peptide Sequence Number=SeqID_54636
atgcagagtccagaaatccaacagagaaacagggctccgacccactcgcgcgctggttcgctggcaccgcgcgtccctcgccacctccgcaccgccgccgcgctcgcggccgcggtgcagggcctcatcgacgcgtcccctgcgcggggcgagtcgcagaccatccacgcgcagctcctagcgtcgggactcgtcggcagtgccgacctctctgtcaagctcctcgttctgcacatacggtgcggctccctgcacaatgcccgcgccgtgttcgacggaatgccgagccggagccgcgccgcgcacaactacctcatcgcgggatacttccggcggggccgccccgcagaggcgctggggatcttgcggcggctcgcggcgtccacggggcggctggacgtcttcgcgctgtccatggcgctgaagctgtctgcggcgctggctctgcccggcgtcgtcgccagggaggcccacgcgcgcgcgctgaggtccgtcgaacagtccgacgatatcctgttcgcggccctggtggatgcctacgtgaagagcgggttgcttggcctacgcgcggcgggtgcacggcgcaatgcccgtgccggagcgtcgtgtgctccacggcactgctcgtcgggtgcatgcaggaagtggctgttcgaggacgtagattcgatattcaacgagatggaggggaaggacgccgtggcgtacaacgccatcgtggaggggtacagcaagacggaagagacggaggagggctccctcccccccacagaagaacatgcagcgagcggggcttcgtccctcaatatcgacattcgtgagcgtgctcggggcctgctcacacagacatcgccagagctcggcgagcaggtgcattgccaggggacgaaaagcggcctagtcttggacatcaaagttggaagcgctctggtcgacatgtatgccaagtgtggacgggtggaagacggccgtaggatcttcaaccagatggcagagagaaacgtgattacctggacttcgatgatcgacgggtatgggaagaacggcctctctgacgaggccctccagctgtttggcgaaatgcgggagcggcgagacgtgaggccgaaccatgccaccttcttgagcattctgtcggcgtgcgcacacgctgggctgctgtcccagggccaggaggctttccagagcatggagagtgagtacttgctgcagccacggatggaacactacgcatgcatggtggacttgctgggtagattcggaggcgtgcggcaggcctatgatttcgtccgaggtatgccggtgaggccaaactctgatgtgtgggctgcgctgctcggggcggctacactgcacggggatatggacatctgcaaagttgcatcgagggaggtcttcgagctgagccgcaaggggagaccgggcgcctacatggcattctccaacacacttgcggcagctggggagtgggacggcgtgcacgacgttagggagatgatgaaacagcgaggcgtgctgaaagacactgcttgcagttgggtcggttctgagaacccgccactcgtcgactga

SEQ ID NO: 12858 - DNA, 1917 bp, Zea mays
  Peptide Sequence Number=SeqID_54637
atggggaggaggaagaagtccaaggagatggagaagaagccgctggacatcctgtcgggctccgacgaggacttcgacagcggggagaacctctccaagatccagatcaacgaggagtacgcgcgtcgcttcgagcacaacaagcggcgggaggcgctgcagcgcctcgaggagcgcaggaagcagggcctggtccccgcctccgacgacgacgagtcggagtccgagtcgtcgtcggaggaggaggacgaggcggccgccattgcctcgcgcctagtcgaccgccgcatgttcgaggtgatccgccgcatccgcagcggcgatccccgcatcctcgacaaggacgccaaggtctactcctcggaggaggaaggcggcgaggaaggtgaggacgccaagaagcaagaagagtccaagcaggagaaggaaaagaccaagaaggagaagcctctgtacctcaaggacgttaatgcccgccacctgctcgaggagggccccgagttcgcagcgcagcccagccggagcagcagcaagttcgagaggatcgcttatgacgagcagcagaagaagggattggaggctttccttgaggcacagaaagaagcattaggcgatggtggagacgatgatggcgatttattccaggtgaaggaaaaggctagagcaggagctgacgacgaagcggaggaggacgaggaggagaagcagacaaaggaccttgctggtgaggtctttgggaaggatgaggagctggatgagaacgagaagttcttgaaggaattttttcttaagaggccgtaccttgagacagagaagagtaagtcctatctagataatatccaggaattgtcagatgaagaggagctcgagattcaggaagagtatgagcatgcttataattaccggcatgaggaggccatggcatcaggggcagtggtggcggatcgggtgttgggacattcaagggttgttgaaggttcggtgaggaagaaggagagcagcagaaagcagcagcgcaagagcaaagaggagcggatggcccgtgttaagcaagagcaagcagaggagctgaagcatctcaagaatttgaagaagaaagagattgcagagaagcttgagaggatccgaatgattgctgggattgaaggagatgctgcttgtaagcttggtgctgatgacttggaggaggattttgatccggaggattatgacaaaaagatgcaggagatgtttgatgatagttactatgaggctgatgaggttgatcctgagtttggaagtggtgaggagatggatttggagaagccggattttggcaaagaagacgaattgcttgggcttcctaagggctgggctagtgaccattcaaaagaagagtctactgccactgatgcgaaaggtgaaaaagggaagatctctctcaaagacaaggtggagcttgagaaagagatggaagagtactacaagttagactacgaggacactattggagatatcaagactcggttcaagtataaacaagttaagcccaatagttttggtctgagtacctatgatatattggcatcagatgacaaggatttgaaccagtatgtttccgttaagaagctagctccttacagagaggatgaatggaaggttacacatcataagaagcagagcaaggatttgatccttggaggccagaagaaggaagggaagaaggacaaatctggcaagaaatctaggtctgaggaagaccctagttcttcaaaaacagagaacgacaggatgacaaatgggcaagagtcaacagatgccaagaaaaagtctaccagaagtgaacggcggaagcgtcgcaagtctgagctaaggccatccagtgatcgattagaggcatatggaaagataaattcaaagcgtcacaagagccattga

SEQ ID NO: 12859 - DNA, 1683 bp, Zea mays
  Peptide Sequence Number=SeqID_54638
atggcctctacatgcctagcccccgcctccctctccacgcccctgctctccgactccatcgcgcgcgcgcccgccgccaacgggcacgccaccaaccaccgacaccaccaccacgacgacagcgacggtgctgcggcggtctccgtttgcgacgacggcggcggggacccgttcgcgttcctctcggaggaccggccgccgagggaccgagggccgtccccggccgacccgttccgcaacggcacgccggcgtggggcggcggcgtgtacgcgtggtcgaggacgctgctgctcctgccggtcgcgttggtgcggctggcactgttcgggctctccatcgcgatcggctacgcggccacgtgggtggctctccgcgggtgggcggacacgcacgggaggccgcgggtgggcggcgggcctatgccggcgtggcgccgccggctcatgtggatcacgcggatctcagctcgctgcatcctcttctctttcggtcggacactccttatcaggtaccattggatcagaaagaaaggaaggcccgctcgtagggagctcgcacctattgttgtttccaatcatatctcgtacatagaacccatattcttcttctatgaattgttcccaaccattgtttcgtcagagtctcatgatgccctaccatttgttggaacaattattcgagcgatgcaggttatatatgttgacagattctcaccagcttctcggaaggctgctgtaaatgaaataaagagaaaggcagcttgcaatagcttcccgcgggtcctgttattccctgaaggtaccacaacaaatgggagattcctgatttcgttccaacatggtgcattcatacctggctaccctgttcaacctgttgttgtccgttatccacatgtgcactttgatcaatcatgggggaatatatcgttattaaagctcatgtttaagatgttcacccaatttcataatttcatggaggtagagtaccttcctgttgtctaccctcctgagatcaagcaagagaatgcccttcattttgcggaggataccagctatgctatggcacgtgccctcaatgtcttgccaacttcctattcatatggtgattctatgattatggcacgggcaatagaagctggaaaggtgaatggctcaaattacatggtagaaatggcttgggtaaaagatatttatggtgtgagcacagcagaagcaatggacctattggaacatttcctggcaatgaatccagataacgatggacgtgtgaaagcacaagatttttgggctcattttggtctggattgcagtcctctgtgtaagaagatatttcactactttgatttaggcattaaggaatcgattacgttccgtcagttcttggttgggtgcgcgcacctgaggaagcaaccgttgttccagggtgcctgtgagaccgcctttgagaagtgccgggatcctgaaacatctgagatctccagggcacagctagccgatgtcctgcggttaagcatgctgctgccgtctggtgatagaatgctggacctgttcaagacgtttgacatagatggcgacgaaaagatcagcaaggacgacttcatgacgtgtcttgggaggttcccgttcctgattgcgttctttgcagccccgatcaatggggaagtgtacatcgagatagtctga

SEQ ID NO: 12860 - DNA, 2109 bp, Zea mays
  Peptide Sequence Number=SeqID_54639
atgtcgtccgacccatcgccccacctcccctcgccggtggccccgccgggcgcggcggaggcggatccccatcacctgccccaacccgccgagccacacgaggtgatgcaccggacgagggccgtcgacttcctcgggcgacgcacgcccatcgtctaccagaacgacaacgggccctgcccgctcctcgccatctgtaacgtcctgctgctgaagaatgtgatcagtctgaaccctgacgctggcgaggtgtcgcagcagaagctgctctcgctcgtggccgagcgcctcatcgaccccaacattgccggacaggataaggacgaggagtatgtttgcaaccgggagcagaacatcgcggatgccattgatcttctcccgcgccttgcaacaggcattgacgtgaatgtgatgtttaggaagattgatgactttgagttcacccgagaacgtgctatatttgatcttcttgatatcccgctataccatggatggatagtggaccctcaggatactgaaactgctaccgctattggatcaaagtcctacaatgctcttgcttctggacttgctgaattcaagtcaggtaaaccaacagaagaaaacaaatatgtggaggaagaaactgttgattttgctgccgcaacaactgcagctttaaagattccatctcccagtgtttctcgtgggagatcgtttgatgaacatactctctcaaactcatcaactgtaccacataaaaggcgaggtgaccttgaggaagaagaggaactgatgagagtcctcaatctatctaaagctaaaagtggggatgtagaagtttcttttgacacttcacatagtcattcatcctccaatattgagacaccacaaaatgagagttttcagtcagaagcactcgagttggtggtggcgacaaaaaaagaggaatatggtaatcacgctacgagtgatcatgtctctatgctatcagtcacaaatgttgctattaatggcagcgaagttgtacccgaagaatcccaagaaaatttgatatctaaagaaccagaggacaatggaataaagaaccttgatatacccattcaattttcagaaactactccttatccgtctcatgaatcctttgctagcagtgaccaccaacctgctattcctacccttgttgaaggtgataaagaaacctgcaaagaacagttcgatgtacaaattcatggccagtctaatgatactgaggtcgcttgtgactcatcagttacaacttgtgaagctgttccagatcatgctacaacagaactggatgtgaaaagtgattctttagataattctcagtctctaccttcaagcattcaggaatgtgaaccaatataccaaggtgaagagcacatacttggcaccacaaatatggtgtatgaaaatcaagagccagtgtatgagggggaggtggttcttgctgagcaggctgacaagattggggaaagcagttcttctggggatgacaaggccacagaacatcaatgggaactgattgataattttctgctgaccactgctaaccagctgactgtctatggtctcttctgtttacaagagggacttaacgaaagtgagctttgtgtcttcttccgcaataaccactttaacaccatgttcaagtacaacggaagtctatatctcctagcaactgatcaaggttttataagccaaactgatttggtatggcaaaggttggatgaggtgaatggagatggcgtttttcttactagcaacttcacaccatttaatgctgaaactccaagaaatgattcatggaatgaacagcaagctatgacgagtactgctgattatcttgctcaatttgacaactccacttctggaaactctgatcttgagctagctatagcactccaacagcaagagtttgagcggcaaccacaaaggtttcaagctccacagccgcagcagcaacagcaacaacagcaacaaccaccacctcagacgcagtaccagactcaatctggccgaccaggacttgttgttggtccaaggaggtccaacgccccacctccgtccagaagtgaatcgaagaaagagagatgcatcgtgatgtaa

SEQ ID NO: 12861 - DNA, 132 bp, Zea mays
  Peptide Sequence Number=SeqID_54640
atgcggcttcatacccttagaggtatgaaggcagaggacatatgcattgcattcattgaagtgatatttgcagatgatgtggttttatacccccagaggtgcttgttgctcatcaaggggagtgagaagtag

SEQ ID NO: 12862 - DNA, 2634 bp, Zea mays
  Peptide Sequence Number=SeqID_54641
atgcccgccataccgagggatgtcgccgagcactcgctggatattcgggccggagcccgacccgtcgggcagcctctgcgccgattcgacgaggagaagcgcagagtgattggcgaagaggtccacaagctaatggcagcagggttcatcaaagaggtattccatcccgaatggcttgccaaccctgtgcttgtgaggaagaaaggggggaaatggcggatgtgtgtagactacactggtctcaacaaagcatgtccgaaggttccctaccctctgcctcgcatcgaccaaatcgtggattccaccgctgagtgcgaaaccctgtccttcctcgatgcctactcagggtatcaccagatccggatgaaagagtccgaccagctcgcgacttctttcatcacaccgttcggcatgtactgttacgtcaccatgccgttcggtttgaggaatgcgggcgcgacgtaccagcggtgcatgaaccatgtgttcggcgaacacatcggtcgcacagtcgaggcctacgtcgatgacatcgtagtcaagacaaggaaggcttccgacctcctctccgaccttgaagtgacattccgatgtctcaaggcgaaaggtgtcaagctcaatcctgagaagtgtgtcttcggggtgccccgaggcatgctcctagggttcatcgtctccgagcgaggcattgaagccaacccggagaagatcgcggccatcaccagcatgggacccatcaaggacttaaaaggtgtacagagggtcatgggatgcctcgcggccctgagccgcttcatctcacgcctcggcgaaagaggtctgcctctgtaccgcctcttaaggaaggccgagtgtttcgcttggaccctagaggccgaggaagccctcggcaacctgaaggcactccttacaaaggcgcctgtcttggtgcccccggcggatggagaagccctcttggtctacgtcgccgcgaccactcaggtggttagcgccgcgattgtggtcgagaggcaagaggaagggcatgcattgcccgttcagaggccggtctacttcttcagcgaagtgctgtccgagaccaagattcgctacccacaagttcaaaagctgctgtatgctgtgatcctgacaaggcggaagctgcgacactacttcgagtctcatccggtaactgtggtgtcatccttccccctgggggagatcatccagtgccgagaggcctcgggcaggatcgcgaagtgggcggtggaaatcatgggtgaaacgatctcgttcgcccctcggaaggccatcaagtcccaggtgttggcggacttcgtggccgaatgggtcgacacccagttgccgacggctccgatccaaccggagctctggaccatgtttttcgacgggtcactgacgaagacaggagccggcgcgggcctgctcttcatctcgcccctcggaaagcacttgcgctacgtgttgcgcctccatttcccggcgtccaacaatgtggccgagtacgaagctctggtcaatgggttgcggatcgccatcgagctaggggtcagacgcctcgacgcccgcggtgattcgcagctcgtcatcgaccaagtcatgaagaactcccactgccgcgacccgaagatggaggcctactgcgacgaggttcggcgcctggaagacaagttcttcgggctcgagctcaaccacatcgctcggcgctacaacgaaaccgcagacgagctggctaaaatagcctcggggcgaacgacggtccccccggacgtcttctcccgggatctgcatcaaccctctgtcaagctcgacgacgcgcccgagcccgaggtaccctcggctccgcccgaggcaccctcggcacagcccgaggtaccctcggcccccgagggcgaggcactggtcgtcgaggaagagcagagcggggccacgccagatcgagattggcaggccccgtacctgcaatatctccgtcgaggagagctacccctcgaccaagtcgaggctcggcgggtagcgcgacgcgccaagtcattcgtcttgctgggcgatgaagaggagctctaccatcgcagcccctcgggcatcctccagcgatgcatctccatcgccgaaggtcgggaattgctgcaagaaatacactcgggggcttgcggccaccacgcagcgccccgagccctcgtcggaaatgctttccggcaaggcttctactggccaacggcggtggccgacgccactagaattgtccgcacctgcgaagggtgccaattctatgcgaagcggacccacctgcccgctcaggctctgcagacaatacccatcacctggcccttcgctgtatggggtctggacctcgtcggtcccttgcagaaggcgcccgggggctacacgcacctgctggtcgccatcgacaaattctccaagtggatcgaggtccgacctctgaacagcatcaggtccgagcaggcggtggcgttcttcaccaacatcatccatcgcttcggggtcccgaactccatcatcaccgacaacggcacccagttcaccggcaaaaaattcttggatttttgcgaggatcaccatatccgggtggactgggccgcgtggctcatcccatgtcgaatgggcaagtag

SEQ ID NO: 12863 - DNA, 372 bp, Zea mays
  Peptide Sequence Number=SeqID_54642
atgggcaagagcaagaaaggcgggagctcctcgcaccattccggcgacaagcggaagcgcgagccgactcctccttcggaggactttggcgattccgagtactcggaggaggagttctcctccaagtacgagggatcgccggggacctacatccgggtcatcgatcgcgctgggctcgagggctcggatgagtcggaggtctcctcgaacgagggggactcctctgactcgtccgaggaggggagcgacggcgacgacggcgacaggggcgacgacgatggtggtggcgacggcagcaagggcgatggcaagggccacggcggcagtggcaacgacaagggcggcagcggcagcggcaaggccagtggctag

SEQ ID NO: 12864 - DNA, 1533 bp, Zea mays
  Peptide Sequence Number=SeqID_54643
atggctccacttctcgccgcagccatgaaccacgctgcccatccagtccttagaagccatctaggacccaacaatgagagtttctcacgacaccacctatcttcttcaccgcaaagcaaaaggataatggacgggagcaatgcagacattggagcgaattcgtaccatatgtacaaaacggatgtcagattgctgaaggaaatgggcatggacgcatataggttctctatctcttggcctagaatactgcctaagggaacggtcgaaggaggtattaaccaggatggcatcgattactacaaaaggctcatcaacttgttgctagagaatggtaaaaccccatttttcttagcttcgttgtttatggaaagtcataatctagtgttcaaaggcatagagccatatgtaacaattttccactgggatgtccctcaagcactagaagagaagtacggcggattcttagataagactcataagaggattgtaaatgattacaaaaacttcgctaaggtgtgcttcgacaactttggtgacaaggtgaagaattggttgacctttaatgagccccagacatttacttcattttcctatggaaccggggtctttgccccaggacgatgctcaccgggactagactgtgccatcccaactgggaattcactcgtcgaaccttacattgctggccacaacattcttctagcccacgctgaggctgttgatctttacaacaagtattacaagggcgagaacggccgcataggtcttgcatttgatgtaatgggtcgtgtgccatacggaacatcatttctagatgaacaggccaaagaaaggtccatggacattaacctaggatggttcttggagcctgtggttcgtggtgactaccccttctcaatgagatcgttagcgagggaacgactacccttcttcagtgacaaacagcaagagaagcttgtgggatcctataacatgttgggaataaactactacacctcaatattctccaaacatatcgacatctcaccaaaatactcgcctgttctcaacactgacgacgcctacgctagtcaagaaacgtatgggcctgacgggaaacccattggtcctcctatgggaaatccgtggatctacttatacccagaaggcctaaaggatatccttatgatcatgaagaacaaatatggaaacccacctatctacatcactgagaacggaatcggggatgttgatacaaaggagaaacctctacccatggaggctgccttaaatgactacaaaaggctagattacatccagcgccacatctcaactctcaaggagtcaatagacttgggagcaaatgtgcatggctacttcgcttggtctctgctggataactttgaatggtacgccggctacaccgaacgttatggcattgtctacgtcgaccgcaaaaataactacacgcgctacatgaaggagtcagccaagtggttaaaagagttcaatactgcgaagaagcctagcaagaagattattacgccagcttaa

SEQ ID NO: 12865 - DNA, 207 bp, Zea mays
  Peptide Sequence Number=SeqID_54644
atggcgcaacactacgactggcgtacacctcggcgatggccgctcggccacatcgccggcaagtgggtaccttcgaacttggatcagaaccacattggaagaagcatgaacgataagaagattgatgtagcgccgaagctacgcgcaagggaacttcggcattacagcaggaaagggaaccgacttaaaggggaaaaggctatttag

SEQ ID NO: 12866 - DNA, 438 bp, Zea mays
  Peptide Sequence Number=SeqID_54645
atggccgtgatgggtacaacatcggaaaagatgtacctctgccaggtaccaaactttgggtttgaaatgattaagctgagaccgggcgagcttggggaggcttggagcggtcttcggcgagctggatggtcgggaacccgggcgcgggtctccgacggcggctggcggcgtgggcagagcgcgagagagggcgaagctatgcggaatgaggtgaggggtgtgcgcggggcactggcggggctctatgaagggagctggacgcgtgggcgggcgtcatggccgagaaacccggcgacgtgcgtgagtgcacactcgccggtccacggcgagagcggggaaggcggaactgacaaggcaggcccacggcgtagagagagaaaaggggacgcgcgggggcaatggctcggctctggtgaactgggcccatcagacacatag

SEQ ID NO: 12867 - DNA, 1029 bp, Zea mays
  Peptide Sequence Number=SeqID_54646
atggttggaaataagaagggaaagaataaggcttcacaaaaagatttgaagagctattttagccaaggttccagtggctcaagtctaagtactcatggcagcggcgtagttgctattgtagaagatgtgcctttagaagaaaatgtcttgccatctgtagaacatgatgaagaagaagaacaagttcaagaaggtataactgacttcaacccggatcatattatttctgatccgggacttcgtattccaatcgaaagattttatgcaaatattagagatgaagttaggagagcttttatagctaaaggtccaacccaaccaaccggtcacagatttcctccatcaagtgataaaaggagctttcagaaaaagtggtttagccaatatagttggttggaatatagtgtggagaagaataaggcatattgcttctattgctacctttttaagaatgatcgaatggatgacaaatttggttatgatgcctttacaaaagctgggttctcacaatggaaaaatgcttatcttgcacttccaaaacatgttggtgggcctagtagcatacacaatgttgcatcaacatcatttcatgattttgataaccaaaggtcaagcataaaacataaggtttcaagttatagcaaagatgcattgatcaaatatgaaacccgattggaaacttctttaggtattgtaagttatcttgtattgcaaggggaaccatttcgggggcatgatgaatctagtacttcgttgaatagaggcaattttttagaattgcttgattggtacaagcaaaggaatgatgaagtgaagcgtgcttttgatgagttatgtcccaaaaatgctaaaatgacctctggaacaattcagaaagaacttggaagttgttgtgcggaagcaatcacaaaggcaataaaggaagaaatgggggattgtctattcacaattcttgttgatgagtctcgtgatatatcaattaaagaacaaatggccttggttgtgagatttgtgaacatttttttctag

SEQ ID NO: 12868 - DNA, 387 bp, Zea mays
  Peptide Sequence Number=SeqID_54647
atgttgatgcaggtgaacttggacgcgacagggtggtgttacatcgtcgaaccagagaaagacgaggtgatcgtctacttccacgaccgcttggcgtttgttgggctcctgcgctttctgtcgctcgatatgttggttggtctttacaagaggagaatgatgacaacaacgtgggcgtcaattaagcagatccgcattgaggttcaacgggactggctcgataggcttaagctccacaggttcgaggagagagaccgtaggagcagctcttgtgccgacagcggcaagaagtgtggtggccacaagcgaggtcgtggacacggcaaaggcgagaggtttggctccgcatcgtccgatggctacaagggccaattcgacgatgaatag

SEQ ID NO: 12869 - DNA, 242 bp, Zea mays
  Peptide Sequence Number=SeqID_54648
gagaacgagcccacgtgatgggaaggggacaaaagagtgatgcacgggaaatacagaccttgtatcatagttatacaagaaatatattcaaagcactccagaatgtttctgaccaactggatcgtgctcaactaaccaaagcctaccagactgctgctattctgtttgaagttttaaaagcagttacacaacaacatgctgttgaagttgatcatgaggagagctgcgcatcattaaattaa

SEQ ID NO: 12870 - DNA, 2151 bp, Zea mays
  Peptide Sequence Number=SeqID_54649
atggaattcttttcacgaggaccagtttggaaacattcgggggagctgttttcttcagttagcaatgatttgcagattcttctttcttctggtcttgaagaggaccttaatttcggttctgatgctgcagaaaatgcattggctgctgttagacttactgtcatccttatattcacagtgcacaatgtaaataaagagcctgataggcagtcttatgctgaaattgtgcaacgcagagtactgctccaaagtgcgtttacggctgcttttgactttgttggacgaattctcagaaggtgttcagagctccatgatattgcatcaagcttctatctgccagccattttggtctatattgaatggctggcgtcccatccagagttggctgttgattcagagatggaggaaaagcatgcaaatgccaggtctttcttctggagccaatgcatctcatttatgaataagttgatccttaccaaccttgcatctgtgaatgatgatgatgacgaggcttgcttttctaatatgagcatttatgaggagggtgaaactggcaacaggtttgccctttgggaagatcttgaattgagaggttttctgcccttgcttcctgcacataccattttggatttctcaagcaaacacacatttggaagcaccaaggagaagaaagcacgggttcagcgaatttttgctgcaggaaagtcactgcttaactttgttcagattgatcagttgagaatttattttgattcatcatcgaagaagtttgttatggccaagaaccctcctgtttctaaaactaacacccctcttcacgaatctcctgatgcacttaaaacaagtggcactgaaatggattatgaggctgctagaagatttgattcagtttcttctaatatgggcacactgcagtctaaagtgcagttttgtcctgatggtgacgatgatgaagaaattgttttcaagccaacagcttccgaaaagtttccgaaagctccttcagatctgttggttaatggatacactcatcctgtacctatgtctactgctggctggccaaccaatgctagtttagtgcctgttcagagcactggatcaatgactgcaactggttggccacccaatggtgggtcaaatgcttttccaagtactgcatctctatcagctgctggtaattacaacattaaccagtcgcttcccaggtcttccgttggttgggctgtcaatggtgagcaaagtgttattcctagcattgctccaagatttgaactcgtgcagcctgttgaagagcctgtttccagctggacaagcagtggtgcacagcatgttggtactcagcacaagcacacaggtttaactttcccagatgttgtgtctgaaccacttgtatctgcatcaatggttcaacgtttcagtagcactgattattcgaaatttctcagtgaacaagaaatgctcttagtgaatggactgaatactgtcaacttaactggaaatggctatttaaagcagagactgcagcctggattgagtggtttacagtctatggggtattcatctcagacacctattgaacctggtggtaccactgcaaactcgatgcataatcatctgaaaattactggagagaatgtgccctctacacttgattcagttgtaccttcaatagctccattaggtggcatgccaatgaaattcacagaagcgccactaactgcttcaaagaagaaccctgttagtcgtccatcaaagcctgttgggccacctccaggatttgatcatgtagccccaaagcgccaagatgattctattccagttgaaaaactgcagatcccacaggttgatgattacagctggctagatggttatcagcaatcgattgatcatgttcacaacttaagaactgtttattctggtgtcagtgacagcactgcatttgccactccattccccttccctgggaaacaacagttatctgggatgcatgcacaaggggctacaaatgaaaagacatggcaagatttccgtctttttgagccttcaaaacagaacatgctccaaaattaccaccaaagaaatcagcaaaatggtcaaatagctgaacaagagccagcaaattctgtctggtctagcagttaccatgtgtga

SEQ ID NO: 12871 - DNA, 597 bp, Zea mays
  Peptide Sequence Number=SeqID_54650
atggacacggtggctccccgcctgagtcgctcctcgacgcgatacgggcccatcagcagcagtgctgcctccttcagtgggcccgtccggaagtggcgcaaggcctgggtgcccctcaccggtaccggcaccggcaccgccgggtccgggggagggagctcacgaggagacaacaaggtggttctgtttagatggacgccggtgaatggttgctcaggaggagggggaggcaccgacgggggcatggagctcgctgctgcgggggcctccacctgcaggcggcgctacgtcccggccacaccactgaatgaggatgcggttgttacctcttcaaaatgccatgctgagggcctcaaagttacacaggatgccccccaaggttcagaggcgtggaggtgcatggtgtcctcaatgcatgccaaggatggcgtggatggagacgactgcggcatcgggcctgtcctcaaggaccacctcaccgcttgtgtcatcgggtaccttgtcaagcaggtcttgggattcctagagtttggcgttgacccgaatgagcttcagaagacccccaatgaagaggtctgcatgtcttgggattcctag

SEQ ID NO: 12872 - DNA, 411 bp, Zea mays
  Peptide Sequence Number=SeqID_54651
atgtcaacaatcaacggaggtggacgcgagctgggcaccatgagtgagatgctcgcccaccagcgagggagtatgccaagcaggaaaaatacacagggcgcgcacgagctgagcgacgagactgaactaaaggctaggcgcagggacgcgacggccacgacaagagagctccgcgagctgcgccactgcgcgtcgagcgccagggacgagctcacggcggagtcggactcggctggtcgcgcgggtcaggaaacagagaagctggacgccgagcagaagttcgacgcgcgcagggaccaagcgagctggagggtgagcaagacgtacagggcgagctacaggaggaggaaggagaggcttggacgcgcggcgagccagacaccgaacgccggccagcgcgcgcacggctag

SEQ ID NO: 12873 - DNA, 240 bp, Zea mays
  Peptide Sequence Number=SeqID_54652
atggcgcccgtggagccccttccggaggctcccaacgatggcaggcccatcgtgtgccccatgtcagacttctgccctctcacgatggtgcccgtggagccccttccggaggctccgaaggacggcaggcaagtgtgccccatgtcagactattgccctctcacgatcgatggggtgcagaaggagtcgttcctagagaccctacgaaaggagcagagatggagtggcctgcacgagtag

SEQ ID NO: 12874 - DNA, 558 bp, Zea mays
  Peptide Sequence Number=SeqID_54653
atggaaggcaccgttctagggtccttcacggccacccccgccccgccgcgagtcgtccctgccctccagaaatctcgcccgtgccgccacatctccgccgaaaatcttgccccctcccccgaaacctcgctgccacccctcctcacgctccttatcccccacatcctcgccacagggtccttgtcctttgggtgcgtcctctcatcgctctcctcccgcggtgtccacaccgtggctctcgacctccccgaccaacagcaccgcccccgatggccccccccacccatgagccccgagacgccgtcctacccccacccgccacacccgcctcccgagcatcgaggtggtggtcgaatcgacagaggtcgtgtccccaccgcccgcctcctcgccagctccatccgcccctcgctcccctctagcctcgcccagccgagctccctcctactcatcgcctcgtttagggccagggtcgctgtctctgccctacgggcactgaagccccccgtggtgccactcagcgccccccatcgaccaacagtgttcctatcaagctaa

SEQ ID NO: 12875 - DNA, 1218 bp, Zea mays
  Peptide Sequence Number=SeqID_54654
atgcagccaccacggtcatctgctatgaatgcacagccacaagtacgtcgtgacagccagctaatacgggaggtgttgtccttcggcggcgggatcccgcactggcagatggccacggtcagagaactagatctcgacggcggaagcgagctgcatccaactggaggctccttgttcagcgacgacctgtgtgcaacaatggatggaaatggatacttttctagcatgatgagggatgacaacagtcaaagagaatttgatactcatagcaacacatgccctgaactacagtcacaatcaatgtcagtttgtccagtagcccccaacgcaggaccgaacaataagaggtccaaaaatttcagtgatgacgaagatgaagttttagtatcggcgtggctcaatattagtttggatcctattgtgggcaaagatcaaaaaggtggtcggtattggtctcgtatattcgaatactttcatgaacacaacaagtgccagtcaaagcgtacacttaattctctaatgcaccgatgggagacaattcagaaatgtgtcaacaagttttgtggatgtctaacacgaattgagttaagacgtcagagcggtactacaatgcaagacatggcatgtgctttgtacaagtctgaagatgagcataaaaaatctttccagttcatgcatcgttggaacaagctgagaacacaacctaaatggttagctaaacttgatgatttagcttctggtagaacatcaaacaagaaacagaagacacaaccaaatgttgatggtactgcaatggtaccaaatgaaaaaggagataatgaagttcaagctggagaggatcaagctttgattaggccaactcgcaagaaaaagtcaaaagcagcaattatacaagaaaagagaaaaagtgtgacaacaactttagaaaacatgtgtgcacaaaagaaagacactgatggggagaaggaagttaaaaaagaggagagattcaataaagcatttgcactagaacaggagcgagttacaaatgaaaagctccttctggaggtgaggaaagaagaggtcgaactgcggaaacaacagatagaattgcagaaacagagggatgaagagagaattatgaccctagatctttctgctatgccagaagagctaaggagatactatatgggcttacgggctaagatcatgagaaatgaagatacaccttcaacttag

SEQ ID NO: 12876 - DNA, 258 bp, Zea mays
  Peptide Sequence Number=SeqID_54655
atggtgatcaatgataaggagaaggagtccatcttcaacgagccaagggacgacaagcccactgactctggctcgagtcataagaagaaggacgggaagaagaagaggcgcattaagaagatcgtctactacgacagcgacgagtcttcttcccaaagagacgacgactacgacgagaaaaagaaaccggttaactcaaaattttctcgtataatcttcactcatatttatttgtttgccattggggagaaagtttaa

SEQ ID NO: 12877 - DNA, 594 bp, Zea mays
  Peptide Sequence Number=SeqID_54656
atggcgctccctgttgacgtggcgggctcgtgccctaggtcgggcgacgtgggggttcctccgaagccggggtcgagtctgtcttctgtgccgaggctgagcccgagccctcgggtcgggcgaggcagagattgttcggccgaggccagggcggagtccgagccctggggtcgggtgaagcggagttcgtcgtcttctggggccgagcccgagtccgagccctggggtcgggcggagcgaagttcgccgtcttccgggcctttgcagctttatgctgatgggggttaccagctgagaattaggcgtcttgagggtacccctaattatggtccccgacaaattggaaaccaatcaaccttccctgtctgcagtcatgacttgctcgacacagtcacggctcgcccaacgcagtacgattcgttcgaggccaactccgggcggggagacgcagttccaatttgccagagcccaaccttggcgggagacgcggttccaattcacccggggccaaccttggcggagacacgatttcgattggcccaaggccaacctcagcgggagacgcggttccgattcatccgagcgcagtcatga

SEQ ID NO: 12878 - DNA, 2115 bp, Zea mays
  Peptide Sequence Number=SeqID_54657
atgacgtcggtggttctcagccccctacggaagcaaggaaacgtcagcaggatccatgccacgccgacagctgtgcttctacaaggctcaagcgcctctccgacggccacgttaccatacgtctaccaagcctccagcggccagcgcggcgaaacctgtcatccacgccgcacgctgccgtggcactcaaccggcccgtcctacccccacgggccccacccagtccaccacccagcccctggggaagcagggattctggcgacggtccctccccccggctctcccgcctcgcggctccgatcgaggccgcagcgtcaggtaagatccttcacggccgcttccggtcctcatggacccgcattccacctcgtgcgcgcgctgtcggctctggatttcgtctacttcggcgaggactcggagttagaaactagaagccgtgtccggggagtcgccgaggtctctagtaggaggcattccatggcaggatttggtgagaatctttgttcgcggggcgaatttcggtgccatgcagttgcattaatgggaaaccaatgccaaaatggaacctacgggtacgggagcaattacaacagctacaaccactttcagaaggagcctctggcttctaggcactgtgatggggacgatactgagggttgctacacagggccatctagaccgagcatagcagaccttatgcgacaaggactgaggcagactttaacgtccatctctgttcttggtcgagagactcctaatgtcacagagcattatacccttggccggcagcttggagagggtctcactgggaccacctacctctgcaccgagaccagcactgggtgtcagttcgcatgcaagtccatcctgaagacaaggttccggaacatgcaagatgttgaagacgtgcgccgtgaggtccagataatgcgctacctttcagggcaaaaggatgtagtcgccatcaaggacgcgtacgaggacgaggaggccgtgcacattgtcatggagctctgcgaaggcggcgagctgtatgaccggattaagaaggggaactacagcgagcagaaggctgcacatcttataaggactattgttggcgtcatagagaacttccattcacttggtgtcatgcaccgggatcttaagccagaaaacttcctcttacaggataaagacgatgatttgtcgataaaagtaatcgactttggtctctccgtgttcttcaaaccagaagtattgcagaaacattatggaccagaggctgatgtgtggacagctggagtgatactctatgtactgctaagtggcgtgccaccattttgggcagatacacatgaaggagtacttgacaaagtgcggaatgggcattttgattttgaatcagaccagtggcacatgatttcggacagcgcaaaggatcttataagaaaaatgctctgcccttgtccatcggagagattgaaagcccatgaagttctaaagcatccatggatatgtgataatggagtggctactcatcaaactctggatccaactgttctttctcgtaccaataaattatctgcagtgaataaatcaaagaaattggctctacaggttattgctaagcatctttcagaagaggagattgctaggttaagaggaatgttcaaggcaatggacaatggaaacaatgttgtgattactttgtctgagcttaaagaaggtttgagcaaatgcggctcagtgtttagaaacattgagattagtgatatcgtggaagcggatgattatgacggcaacaccaatatcaactgggaagagtttattgctgtaacagtgcccctaaataaaacagaacacaaagaacacttgatggcggccttaacatatttcgacaaagatggaggtgattacatcactgtcgacgagcttcaaaaggcttcagtggaacacgagatgaaaaatgctttccttgaggacaccatttatcaggttgatcagaacaatgacggccagaccaactatggcgagttcgtcacaatgatgcagagcgacagctctgggcttgggtggcaaacaatggaaagcagcatgaacgtacccctgagggaggcacctgaagtttactga

SEQ ID NO: 12879 - DNA, 429 bp, Zea mays
  Peptide Sequence Number=SeqID_54658
atggtgttctatcttactgtagaggatccatgtggtggaacataccagagttggcaacaacatgtgcctcctccaccccttgaacatgtggccaagatgcacccttcacctctgctagcatatgccaatcatcctcctcaactgctgccgccagcagtagcagcgatgataaatagtaatggtggatctggttctaactactctggtggcgagatcctacctccaccatcccctggtgctgctcttagcttctcaaagagcacattcacctacgaagagttgatgagggcgactgatggattctctgatgttgttctccttggacaaggtggttttgggtatgttcatagaggagtgctgcctaatggcaaagagattgttgtaaaacaattgaaacttggaagcggccaaggagagcgtgagttctag

SEQ ID NO: 12880 - DNA, 2523 bp, Zea mays
  Peptide Sequence Number=SeqID_54659
atggccggatcgggaagcgatggggctccagcgaccgccggcgccagcctaatgagcgactacctcgacggcccaaacgccatccaacggcgcgctgcgtcggtcgcaatcgtgcgctccggcgcgggggcaggggacggcccgcgcgtcgtcgacgggcccgggcgggaggaccggagggcgcagtcgtcccgacgagcctcgctgtcgttatggcgctctcgggcgccggccacgaagacggcggccgttgactcgatacccagctccgtcccgggcgctgccgcgccgcggggtgccaaggataaagggtcctcgacggcgtggaggagctggaagccggtgcgcgcgctcgcgcacctcgggaagcgccgcgcggggtgcctgttctcggtcgaggtcgacgccgcccgcggcgtgccggcgtccatggaagggttccgcctcgccgtcaccgtgcgcaaggcggagaccagggacggctcggtgcagaccctgccgtgccgggtgcgcggtggcgccgcggacttcgacgagacgctcttcgtcaggtgcaacctctacttcgccggcggagccggcacggggaagccgctccggctccagccgcggaggttcgtcgtaaccgtcgtcgccgtcgagggacgaggacggggcgcccttctgggcacgcacaccgtcgacgtcagctcgctcgtgctcgagtctctccgcaagatcagctccgagggacgccgcgtcaggtggttcgacgagacgttcgcgctctccggcactgcggccggcggagagctgcagctcaagctcgggtttcagctcatggaagacgcagggctcagcctgtacacgcaggccgaggagagggaccgcgggtctccggctccgggctcctctcgtgccagggctcacaacaggaactccttcagcatttcaagcacgcccaagctttcgccatctgacgcttccgtctcaccttccatgagggcctacaagcagcttgtcgataggcttcgtgtcgacgagaatggagatcctgatcatcatcctgcggtacgatctctgatgcctcggaagcccggcgacgacgagctttcggcatccaccaccgacgccggggacgtgaacagcctccccgagtacgaggtcgtggagaagggcgttgagacggttaaagaagtcgtccactaccaggctcaacgcgaggtgctgcgggagctcgactccattgccgagcagatcgaggccatcgaggcgctgatgaccaacggcgggaagaagtcgcccagggcggcgggtcagcagcagcgtctggacgcggatgaagagatggtgacggtggagtttcttaggaagctcgaggcggacggtgtcggcgacaagaagaagctcaggctgcccttgacgccgagatccgagccggcgtcgccagcaaggaaggcggtgacgactccgcccgtggtgccagacttggggcggggcattggccctgccgtgcaaacgcgtgacggcgggttcctggtgtccatgaacccgttcgacctgccgctggggaacagagatgggcccccaaagctcgccatgcaggtgtccaggcctttcgtgctgccgggcgccacggcggccacagggttcgacgtgctccagaagatggcggcggcaggcggcgccgacgaggtgcgcgacagggtggcgtcgctcggcggcatggatgacattacggggaagacgcccgagcaggtgggctttgagggcatcgcggcggctgtgatcggcgggcgacgcaccgagggcgcgagctcgagcgccgcgcggtccgtgcggctcgtccggaagctcgccgtggccttgtccgagggccggagcgagcgcgtctccacgggcatctggagcgccggtgacgacccggagacgctggacgaagttttcgccttctccctgcagaagctggagaccatggccgtggacgcgctggcggtccaggccgagatggccgacgaggacgcgccgttcgaggtctccgcggccgcgggggacacgggcgtgttcgactcgctggtgccctcggacgagtggtccgagtctggtgcctcggacgggcgcgtcaccctggtggcggccatccaggtgcgcgacccgtcgcggcggtacgaggcggtgggcgcgcccatggtcgccgtcgtgcagtcggcgaggctgttgggcgcggcgggctacagcgccgggaggttcaaggtacgaagcctgcacgtcggcggcgtgcagatgaggtgcacgccgtccggaggtggcgggagcgcgcgctggggcgcggagaggcagaagctgacggcgatgcagtggatgctcgcgcacgggccggcccgcgctggcaagagggcggcgacgacgacggcgcaggcgggggcgagagtgcagcggcccgacgtcgtgtggagcctgtcgtcgcgggtgctcgccgggatgtggcttaagacggtgcggaacccggacgtaaggattggcggcggcggcggcggcacgtga

SEQ ID NO: 12881 - DNA, 264 bp, Zea mays
  Peptide Sequence Number=SeqID_54660
atggcgctgcgtcaccctattttggcccaatgggtcttgtatccagttaggtccattacggacgcatactatggttgcagcaccaccccaatacccttgtggtcgccctcccatgtttataaaccccctagccgccaccaagaacagcgggacgagtgccctagtggccagggtgtcacgctccacaagatcgtgacagccataggaggtggtgtatcggttgctaaggcgcagcgtctttggaaggctgtagtcgggccgtga

SEQ ID NO: 12882 - DNA, 618 bp, Zea mays
  Peptide Sequence Number=SeqID_54661
atggaccgcgggtggatacttaacttctgcggggtctcttatgcaaaacgctatcgcgaaggggtacgatgggggtttggaccgttggattacatctgcacggtgtggattaaatcggttacaactcgaactgggaacaattcttacagccgcagacaactcactctgatcgataggcgttgtggtgcggacgaacggctgcgctcccgctccggtgagagattcccggacttccggtgcgcagcgcaccccggttctgaaggatatacccttccggacgtccctccttttgcctggatggcttcatgggttcacgccgacgacgcacgccagaatcgactgcggcggcggtggaacgatggtgcggcgatgttcgattatggctgcgcgggttctaggtcacggagaccaaggcgaccgagcggggcactatatgggcgcgacgtggctgaggtgtttcaatggccgaggccggattccgcggcggcggcgagcttttcggccaggtggttgaagccggcaatgaagacaccggcccacgcgccagagacggagagaaggagcgagcgcgagctgagtgtctggactgtggggtccgcaagtcggcgagtggtctga

SEQ ID NO: 12883 - DNA, 387 bp, Zea mays
  Peptide Sequence Number=SeqID_54662
atgggtaggggcaagggctggactcgccgcgccaacggcaagcgcaagcgtcccccaagtcatccttcggaggattttggtgactcggagtactcggaggaagctttctccgatggcgagggtgatggcggcgaggacgacggcagcagcagcaacaacgacggcaagggcggtggcggcggtgacggcgacggcgaaggtggcaacggcgagggtgatggcgacggcgagggcgacgacaaaggcgacaacgatgacggcaagggcgacgatgacagtgacagcgacgacaagggtgacagcgacggcagcaagggccacgacgacagtaaaggtgatggcgacaagggcgacggtaaggccggcggcataatgctgttggtttag

SEQ ID NO: 12884 - DNA, 616 bp, Zea mays
  Peptide Sequence Number=SeqID_54663
atggtttatgtgttgcaaatcttcgagggcaagggtaaacaacaagaaacatcattggcaagagcaggagatacaagatggggatctcactacaagactttacttaggattgagtcaatgtgggactcaataatagaagtcctagaaattgtgaaacaagatgagcgcaatccatctaagatgatgttgcaaatcctccatattacaaatgagttgtctttgatcttgcaaaggaaagatcaaaatattgttcaagctatgtctttagttgttgatgtgaaaacatgtttgattaatttgagaagtgaaggttgggagccattgtttgaagaaaccaaaacattttgtttggcaaatgatatcccaataccaaatatggaggatatggtaccacgatttggtcgatcaagaaaaggtgggagaaacaatatcactcaagaacatttttttcgtattgataccttctatgctgctatagatgctattaccactgagtttgatcatcgcttcaacgagacatcctcggagttgttggtttgttttgcttgtcttgatccaagagactcattctccaagtttgatgtagataagctttctcggcttgtggatatctatt

SEQ ID NO: 12885 - DNA, 2016 bp, Zea mays
  Peptide Sequence Number=SeqID_54664
atggcggtggcgacgactgctcggtggctcctgctcctggctgtcgtctcggcggccgcggcgtccgggaagcacgagaggtggagggtgggcggccaggtggtggagaaggagcgacggcgggtggtggcggagagcgaggccggctcggtctcggccgtggacgtcgccgacgcggcgggcacggcgtaccggctgcacttcatcaccatggaccccggggcgctgttcctgcccgtgcagctgcatgccgacatggtgttctacgttcacagcgggcggggcaaggtgacttccatagaagaagagagcagcgaacagagctccctggaggtggagcgaggagacgtatacaactttgagcaggggagcatcctgtacatccagagctaccccaacgccagtagacagcgtcttcggatctacgccatcttcaccagcgaaggcatcaacgccgatgacccctcggtaatgaacctccggtcctactcatccttccgttcctctgcaatgcattgcatgtacacttctgtgattgttgtgtgccaaattaatcaaagcagaagcccaaggtggaagcttactccagcgtcagcaatctggtcaaagggttcgagacagacgttcttcgcctgggatttgggcaagctaaccgatagcatcttccacaaggtcaaacccgaggtggtagaagcgatcaagtctgccaagacaccgccaccgatcatagcctacaacccagaggaggagaagggggacaagaaacccggctggaccgagaacatcatcgacgctctgctgggcgtgcgcgatccggaggagttccttaacaagaagaagaagaagaaggacaagcacaaggacaagaagtccaagagcaaggcgttcaacttctactccggaaagccagacgtccagaactgctacgggtggagccggatgatgactagcaaggacctcgacgcgctgcacggatccagcattggcatgttcatggtgaacctgactacgggttcgatgatggggcctcactggaaccccaaggccacggagatcgccatcgtgacagagggttcaggaatcgtgcagacggtgtgcccgagcagcagcagcagcagcagcagcccgtcgggcgggagcagtggagaccaccaccacggtcacaagcggcgcggcgggccgggaggccgcggcgatgagggcgaaggcgaaggcggccgcgcgcggtggcagtgcaggaactcggtgttccgtgtgaaggaaggcgacgtcttcgtggtgccgcggttccacccgatggcgcagatgtcgttcaacgacgactcgttcgtgttcgtcgggttcagcacccacatggggcaaaaccacccgcagttcctggccgggaagggctccgtgctgcaggccattgggaagaaggtgctggcgctggcgctggggcagcgggacccgaccgccgtggacaagctgctgtccgcgcagcgcgagtcgacgatactgccgtgcgtatcgtgcgctgaggagctggcggagaaggccgaggaggagaggaagcgacgggaggaggaagggggagggaaagggaaaggaccgggagaacgtgagaaggaaaaggagaggagggaacgggaggagaaggaaaaggaggaagagcgggagagggaacgggaggaaaaggagaggaaggaaagggaacgggaggaaaaggagaggaaggaaagggaacgggaggaagaagagaggagggaagaggaagaagagcgggccaggaaggagcaagagaagcagcggaggagagagaaagaggaggaggagcgtgcacggagacgcgaggaggaagaaagagagagggaggaggaagaagaacggcggagggaggaggaagaaggtggaggcggacgtggtgacgagccagagagggaggaagaaggcggtgacaagccgccataccggttgtccaagaaactgaagaaacgctaccatgcacgtgccggtgtgttcagcaggagtggctga

SEQ ID NO: 12886 - DNA, 411 bp, Zea mays
  Peptide Sequence Number=SeqID_54665
atggcttatatgaccgattttaaagatctcaatgatgtttctccagacatggacacaaggctgattaatttatcggccgctaagcatgaggaattagaagtcttcaggaaaaaggtggacgaggagttccaacgacaaaaaaatcggaggcgcaaggtggatgagaagtggtacctcttgcacttcagaatcgatcgccaccagaaggtcgtccgggcaagggaaataaagtttgatactatctcagccttgttgcagcagcccctcattgttaaaagtatgacggaggatatagagaaaatgacgtatacattagaaaaaaactcatacgcctattttttgtcacctgaattaagcaccgaaacaactgagccaaaaacttcgacaatctatgttgtgatgggttcgtga

SEQ ID NO: 12887 - DNA, 522 bp, Zea mays
  Peptide Sequence Number=SeqID_54666
atggcgaagggcgacgggcgcggaggagggccgcagggacttcgactggctgtccaagttcctggtggtctgcctcaacgctatccgggatgtggtggcgccgaggaaggcgacgacagcatccacggcgcccgatctggcggtgctgctcccgcccaggcgctgtccgacgtgctcgacgctagcggcgcgtgcgccacggtgacgcagaccacgtggctcgtctccaccgcctgcgacatcgtcgctaggaaagagaggcatgggatggtcgtgtcttgccccttcctgctgtacctcgtctcgtcgcaggataaggccacacagaggaactggggtgtagttcgcttcgccgttgtgccgttaatggggctcggtgtatgcggctcgctctgccaagatggtttgtttacaaatgatgatgaggaggatggttatgattatgctgttggtaatggtaaagaagaaggcgtcgaggcagatctccaggagttccaggacttcggcgagttcgaggattag

SEQ ID NO: 12888 - DNA, 335 bp, Zea mays
  Peptide Sequence Number=SeqID_54667
atgcagaaccaggcgggagaaccaggtgacgatgagctgtcagagagtggcgttgggggtgagggcgtcgtcccagagctcctgcatcgtggtcgggcaggtccggttgcccagggcgagccaccgcgagatgttggcctgctcggatctgaggcggaggcgaatgtggatctgggagctagggtcggcgtgcgaagggagcggtttctggcgccgatgacaggggttacggaggcggggggcatgggcgtggcctgcgaggatggcgagcgacgcgccgacgccgagattggcggggggatggggggcgagggctcgctggcgccgatacccgg

SEQ ID NO: 12889 - DNA, 768 bp, Zea mays
  Peptide Sequence Number=SeqID_54668
atgtcttactggagaaaattctttgagcagactaatgggttagtttggtttgctgatagttcacacataaggaggcttgatgattgccgtgctgaactccacaatctcttgaaagaagagagactagttggagcttcattgttgatttttgcaaataagcaagacatgcaaggagctctaaaaccaactggaatcgcgaagaggcatccaatttcagtagtcactctccgacagctcatcgccgcttggttctcccgccggtacacaaggtttaagaagcgctccgcggacttccacggccgcgctgccgatctcgtccacagcctccggggcacggcgatgcccaggagacaggccctcgaggaagagcaatgtagagaagagaaaggtatctcgactgttccaaagcacaaaggatccaccgaagtcgaggctgagtccgggcccaagggtcgggcgaggcggagaccgtcttccgaggtcgaggttgagtccgagccctggggtcgggcgaggcggagtccatcgtccgaggtcgaggctgagtccgagccctggggtcggtcgaggcggagtccgtcctccgaggtcgaggctgagtccgagccctggggtcgggcgaggcggagtccgtcgtccgaggtcgaggctgagtccgagccatggggtcgggcgaggcggagtccgtcgtccgaggttgaggcggacctcactctgtcaagtggcacaacagtcggagcagggcaggcggcgctgttttcttgttag

SEQ ID NO: 12890 - DNA, 537 bp, Zea mays
  Peptide Sequence Number=SeqID_54669
atggacaaagaaaagaagaggaacataaaagaaaaagcccagaattctttccccttcattttccccaatcgtggcccgttccccccccttcctgggccgctcggccaccccggcccacgcgccttcgccttccccccgcatcctgctcgcgctcccgggccgctgcgcgcgccaacggcccagctgccccgcgtccctggctcgctcctacagcgtgcgtggccggcccaccccgcgtggcccagcgcacaggcgcccacgcccaggccgccaggccagcgccccctccctggcccagcaaccgcgacccacccagtgcgctcgcgagaacgcgtctggccatcgtgcctcgctcccgcatgggcgagcgttgtgcctgccctagcgccgccgggcccaccggccaccctaagcaactgtgcatcttctttaggcactcttcgtgatgtgcgctcccattccgccaagaaccgcccaactgctcgagctcctgtcgacctcccacccctccactccccgacgaacgaatcaagctga

SEQ ID NO: 12891 - DNA, 219 bp, Zea mays
  Peptide Sequence Number=SeqID_54670
atggggtccaggcacagtgcttgctctgccgagactgggcgccgaggttctttcgttttgcttttgatagtcaccctcctgcggggagagagatacttgatcagagatggttggtttacagatgatgatgatgctggttatgactatggtaatggtaaagacgaaggcgacaagacggatacacaggagttccaagacttcgacgagtttgtggtttag

SEQ ID NO: 12892 - DNA, 453 bp, Zea mays
  Peptide Sequence Number=SeqID_54671
atgggcaaggacaaaaagggtcgaggtttgccacgtcgctccggcgacaagtggaagcgcgaaccaagtcctccctcagaggactttggtgactctgagtactcggaggaggaggtttcctccaggtccgaggggtcgccggtctacgcttccccctcggcatcgtccgatgatttggacgactcccaggggatagccgccgagggctcggatgagttagaggtctcctcggacgaggagaactcttctgactcgtccgaggaagggaacggtggtgacgacaatgacgaaggcgacgacagtggcgacgacagcggtggaggcggcggcgacgacgatggcaacgacggctgcatgggcggcggtggatgcagtgaagacggctggagcgacgacggcggcaagggcggtggcagcggcagcaaggccagtggcaaagcaccactggcttaa

SEQ ID NO: 12893 - DNA, 705 bp, Zea mays
  Peptide Sequence Number=SeqID_54672
atggtgtgccatctgagatctgcgagcgtgccttcgagccctcgctctaatgagatccatgttgaggaacagctgcagagcctgaaggcagccatctcatcaccgtcagtgaccatcaaaaccatggtcgatggtctgagcaagctcgggagcatctacgaccgcattgatgtgctcacatgcttgcccaccagccagaggaaggcggtggaggaagagctcgagcgctccctcgtcctgcttgacctctgcagcgtcttgcaagagagcttcgtggagctcaaggccagtgttcaagagatgcagttggctctcaaaagaggagacgacgcggctctccagaccagggttcagtgctacgcgcgcttggtcaagaaggcacagaagctgttcaagaagttcaacaagaagactgcttctgacatcgaaagttgcagggtgatcaaccttgttgctgaagcgagggagattgctgtgtcaaccctagaatcaacattgcatctcctgtcaaagcaaattgcaatgccaagttgtagcaagtggtcacttgtctctaagtctttccaaaagaagagagtcatgtgcgaggcggatcaattgcaagggctggagctcggcttcgttgatcttgagaacagagttgggacattgttcaggaaattggtccagaacagagtgtcttttctgaatattcttagcttgtag

SEQ ID NO: 12894 - DNA, 585 bp, Zea mays
  Peptide Sequence Number=SeqID_54673
atggtggatagtctgagcaagctcggcagcatctacaaccacatcgacgcactcacatgcttgcccaggagccagaggaaggcagtggaggaggagctcgagcactccctggtcctgctcgatctctgcagcgctgtgcaagagagctttgttgagcttaaggccagtgtccaggaggtgcagttggctctggaacgaggtgaccacacggctgcccataccaagattcagtgctatgtgcgctcggccaagaaggcacagaagctgttcaagaaggtcaacaagaagactgcctctgacatcgaaggatgctgggtgattaatctggttgctgaagcgagagagattgccgtgttgatccttgaatcgacattgcatctcatgttgaagcaaattgtgattccaagctctagcaagtggtcccttgtttccaagtcattccgaaagaagtgtgttgtatcatgcgatgcggaacaattgcaagggttggagctggacgttgttgatcttgagagcagagttgggacattgttcaggacgttgatccagagcagagtgtctcttcttaatgctcttagcttgtag

SEQ ID NO: 12895 - DNA, 693 bp, Zea mays
  Peptide Sequence Number=SeqID_54674
atggcgtgccacctgagatctgctagcatgccttcgagccctcgctccgttgaggaacagattctgagcctgaaagtagccatctctctgccttcagtgaccatcgaaaccatggtggatagtctgagcaagctcgggagcatctacagccacatagacgcgctcgcatccctgcccagctgccagaggaaggcaatggaggaggagctcgagcgctccgttgtcctgcttgacctctgcagcgccatgcaagagagctttgcagaactcaaggccagtgtccaggagacgcagttggctctcaaaagaggagacgacgcggctcttcatgccaagattcagtgctatgcgcgctcagctaagaaggcacagaagctgttcaagaaggtcaacaagaagactgcctccgacatcaaaggatgcagggtgatcagcctggtcgctgaagcgagggaagttgccctatcgatcctcgagtcgacactgcatctcctggcgaagcagattgcggtcccaagtcccagcaagtggtcacttgtatccaaatcgttccagaagaagagaatcatgtgtgaggcggagcagttgcaagggttggagccggagattgctggtcttgagagcggagttgggactttgttcaggacgttgatccagagcagagtttctcttctcaatgctcttagtttgtag

SEQ ID NO: 12896 - DNA, 327 bp, Zea mays
  Peptide Sequence Number=SeqID_54675
atgccagtgatgctgcatgaggattccattccaccagaaccaggcaacagtgtagcaggcatgaacaagaaaaatagcatcacagtttccattactaccctggcttaccatctcagatctgctagcgtgccttgtagtcctctctgcaacgaggttgatgctcataagcagccccagagcgtgaagacaacagtttcttcatcatctgtggccattggaaccatgtgtgttggtttcagaaagctcggaggagtctacaactgcatctgcgagctggcgtgcttgcccagcaaccaagttacacaacagaggaaaacagtggagtaa

SEQ ID NO: 12897 - DNA, 591 bp, Zea mays
  Peptide Sequence Number=SeqID_54676
atggccgagcctgctctaggcttgattccatgcaggacacagtcaaagaagtggcctactacgggattcgcggggagcagacgagctcgggcgaggcagaaatggtggttcagcggagagggacgtcggtcgggacaaggatttcccctacctgagaaagctctagggcagaagcaaggatatcacacctacttaatgaggaacaacaaagtttacaagcaaaccatcaaagatctagtcctatatccgtgttgccaagaaggcacaaaaacgattcaggaaaaacaggaagaagtccactgcagcagatcaacagagttgcagggtgatcaagatgttgtctcaaaccaaagagattgcctcctcaatgctggaatcctcattgcatctcctgtcgagggaaattgtgatgacaagttccaccagatagttccttatctgcaagacaatccagaagagaagagttgttgcgaggatgagcaattgcaggagttggaattcgacattgttgagcttgagaatggagttgagtctttgttccatacattgatccagagcagagtttctcttctgaacattcttagcttgtag

SEQ ID NO: 12898 - DNA, 159 bp, Zea mays
  Peptide Sequence Number=SeqID_54677
atggacttgcctgagaaccacggtccacggctgctcttgggtgtggatgttccgttgttcttccttgtggatccttctgccaaatcatgcatccatatgtttccgcagcggcagaggcgctttgctgtggacactcgatggagctcaacggaatactga

SEQ ID NO: 12899 - DNA, 219 bp, Zea mays
  Peptide Sequence Number=SeqID_54678
atggagcagcggctgcgccgaggacttagtgttgccgcgggcaggtccaggggcagaggggccgtcactgtggtcgcctgtgctggtacgacaggagaggctggagcagcgctgcagcggggtcgtggcgagcagtggcgtcgtcgagggcttggcatcgctgcgggcgaggccaggagcagagctgggagaggtggtgcagtggtggtgcggcgatga

SEQ ID NO: 12900 - DNA, 2493 bp, Zea mays
  Peptide Sequence Number=SeqID_54679
atgtcgcgtgaggcgccgcccggtccgcaactgcttgcggaggtcaccgtcaacaagagcatcttctgcttcccgctcaacgactcagtcgccacctcctctggcgtcttcgccggcgacgacccgctcaagttctacttcccgctcctcctctaccatgtctgcgccgtcttcgcgctctcccgcgccgtgcacgccctgctcggccgcgccaacgtgcccctcgtcatctcccagatcgtggccggcgcgctgctcggcccgtcgctcctgggccgggtgctcccgaacgccagcgcgcccttcgcgacgccggaggggtggctgcagctcaacacggtcggcgcgtacgccttcacactgcagatctttgttatcggcgtgaagacggacctggggatgatcgtcaagtccgggaagaaggccgtggccatcgccttcttcggcgccatcgggccgcacatggccatgtacgccgccgccgccgcgctcggggcgcgcgtgccggcgccgtggaaggccaacttcatgctcaccaacctcaacgtgtggtggtcgctctcggccttcatcgtcgtctgctccacgctgggcgacctcaacctcctctcctccaagctggggcgcctcgctatgtccgcggcgctcatcggcgacttcgccaacaccatctttgtcgcgggcatcacgtcctacctcctcgcgtccagccccttggagagggtccagcggatcggcttcctgtcgctcgtcatcttcgccatcttcataggcttcctgacctacgtggcgcgcccggccatcctgcgcctcatgcgcgacgtccccgagggaggcctcctctccgaggcgcgcctcgtcgccgtgctgctcatcaccatcgtctgcagcttcgccagcgaggtcctgggcctgcacgccacctacgggcccttcatgctgggtctcatgctccccggcggcgccccgctcggggtcaccctcgaggagcgcctcgaccgcctcgtcgccggggtgctcatgccgctgctcttcgcgcagggcggcctcaggctggacgtcttcaagatcaccgacgcctccacgtgcctcctcctcgagatcttcctcctcgtcggcgtcgccgccaagcaggcggcctgcatgctgccctgcatctactgcgggatgtcgccccgggaggccttcatcgtcggcctcatgatgaacttcaagggcatcaccgaggtcgcctacgcctcggcgttcgtggactcggacatcttcgacgagcaggtgtacgccgccttcatgctcaacatcctgctgctgggcgccgccacgtcgtcgctggtcaagcacctgtaccacccggaggagaagtacgtggcgtaccggcggcgcacggtgcagcacaagaagctgggcgacgagctgcggatgctggcgtgcgtgcactcgcaggcggacgtggcgcccatgctggcgctgctggacgccgccagcccgtcgcccgtgtcgcccgtctccgtctacctcctccacctcacgccgctcgtggggctcaccagctccgtgctccgcgccttcaagtacggcgaccggaactgcgtgccgtctgggggcaccgactcggggcgcatcgtcaacgccttccagtacttcgtgcagcagcggcccgtggggtccgcgtcgctgctcccctacgtctgcatcgcgccctacgccaccatgcacgacgacgtctgcgccgtggcgctcgagaagcgcgccatgctcatcgtcgtgcccttccaccagcgcctcgccatcgacggctccgtcgagaacacgacggccagcgccggctccgtccaggccgccaacgtcaacgtgctccactactccccctgctccgtcgccatcctcgtcgaccggggcagcctctccgtcgcatcgtccgccgtggccgggggccccgcggccacagccgacgccgacggcttccctcaccgcgtcgcgctctacttcctcggcgggccggacgaccgggaggcgctcgcgctcgccacgcacatggccgaggacgcgcccatcggcctcaccgtcttccggttcctgccgccgccggagtggcgcaagggcggcgaccccgaggaggaccggctcgacgaggaggcgctgcaggagtacgtccgccgttgggtcgacggccaccgcgtcgcctacagcgagaacctggtctgtagctccgacgagatggtggacaccatccggaagtctagcccggcgtcggacctgctgatcgtcggccggcgagcggacggccccaagtcaccgctaacggtcggcatatcggactggagcgagcacctggagctcggcgtcctcggggacctgctcacgtccacggatttcggatgccgggtctcaacgttggtggtgcaacagcagaccagggcagccgccggtgagatcagccggtcgccggagaagaacgcggcgaagccacctgaatctgacggccacgtttga

SEQ ID NO: 12901 - DNA, 534 bp, Zea mays
  Peptide Sequence Number=SeqID_54680
atggcgcccaaaaactcattggcagcaatgacattaactctacaatatcatatctgcagtaaaccagtgctggaagagtggcagctatccatttcgaggaagcagacctacagccggaggcggagcttaattaagagcaagctgcccaacgtaattttcactgtctatctatacgagccagagaagcggacggacccagcgtcgctcggcacgtcggactcgaaacggacgatccctcactacagaaaaacgtcgcgcagatcaccgagacttgcacgaacaagcaaccgaaatcatggggcaaatcgcatagacggggccggggaaatcaaagagacagacctgaaatctctggggcgcgcgaagggatccgtccgatcggaccagacggtagctctcaaggtctggggaatggcgaacgcgagcaaggcagcggttgggcgaggcaaaggtgtgcccgtgtggagcagcggtggaggtggagccgtggaggcggagatgaaggaaccggaagggagagttccagaaggctag

SEQ ID NO: 12902 - DNA, 177 bp, Zea mays
  Peptide Sequence Number=SeqID_54681
atggggctctccgttgctttgctcctcgctcggatgcttggtatggcgggcatattcccactgcttttgaattggactgaagagcagagcgggtgggtgccaaagctgctgccgaccaagatttgctctcgcttccccggcctgcttctgcttctgctgaaagcctggaacgagtag

SEQ ID NO: 12903 - DNA, 1218 bp, Zea mays
  Peptide Sequence Number=SeqID_54682
atggaggccaagccgggggaagccagtgttgggcatgcgcctgcgcctatggcggcggcagcaccggttatggcggcgccaccactagaggagactgtgagcttccagcagccgctgccggcgccggccgcggcggcggagaggggcagctcgagcgccgtcctggtgccgcctcttgctacggcggcgggaggcggcgcgatggcgctcgtgccggtgctgatgaaggtgccgaagaagcgagggaggccgcgcaagtacgggccggacgggagcctgatccgcccgctcaacgccacgccgatctcggcgtccgcgcccttgccggccgccgtggcgcctgggcactacacgccggcctccgcggtgggcgccgccatgaagcgtggcaggggacggccccttgacttcgccgccgccgccgccaagcagcaccagcagcatcaccaccagctctaccagcatcagcagcagcagttcggcttccacttcgactccattggtgatatgggggcatgttcagctggtgcaaatttcactccacacataattacagtcgctcctggtgaggatgtgatgacgaaggtcatatcgttttcccaacaaggaccacgagctatctgtgttctctctgcaaatggtgtgatatccaccgttacactctgtcagcctgattcctctggtggcacgttaacttacgagggacgctttgagttgctgtccctgtctgggtccttcatgccaaccgaaaacggcgggacacgaagtcgatcaggtgggatgagcgtgtctctcgcgagtccagacggtcgtgttgtcggtggcggggttgccggcctgctggtggcagcgagtcctgttcagagtccccatttggcagattgtggttgggagcttcctgccaagctaccagatggagcagaagaacaagaagccacgggtggacgcggcacctgctgccgccgtcccgcagacgcctcccgcagtcccgatctcgagcacagacacccgcagcagcgagcaagggcagcagagctccgcgtcccagagaggggtgaacatgacggtcccgggaggaacctacggcgcggaccagagctgggtgttgtcccctgctccgcagcagccgatggccgaggtgtccaggacgccgtcgtctggggacctgaagatgaccacgtccggatcatgagcactctgaaacccagccggagctag

SEQ ID NO: 12904 - DNA, 615 bp, Zea mays
  Peptide Sequence Number=SeqID_54683
atggcgtccaccgacaccgtcgggtcagcgtccaccatcggcgcgggccttggtgcgcgagcccgtcgcgcgtccccatgcagcagcagcatgctccgatggcgtgcggcgtgccatcagtcagaggtcgcaatggatgatgttgatggcctcctcatccccaggaccgatccgcccaccccaccaccaccctggttctggttcgttggtcgtttggcctccgctccactcaactggctttcgcttttcccgccggccggtcgccgggcgggcccagaagcccccagaggcacggggggcaggcatccgcggatcgtggtcgtggcacgcgctttgatgcgattcctctcctccgtcatccggctctgcggtcttggatgcgattcctcctccgtcatccctgctcgcctcacttgcatctgtgcccgtttcgacggtgacctctgctgggcccgtttcgcggtccatctgtgcgttcagcagcattcggcctgcatgcatggcttcgaaggggggtttccggccttccaacgggatcttgcacgtaacgccgagttgggggaactcgccggacttctcagccgtagaagcggcggcggcgccgtcgtggggtag

SEQ ID NO: 12905 - DNA, 408 bp, Zea mays
  Peptide Sequence Number=SeqID_54684
atgcagccattagaagagatgcttcctcttccccgagacctattcgacattaggtattcaggggctgatgcgaggaggaaggtcgcgccggatgtggccagcggctacgcgcacagcttcaccttcaaggatctgcttgtggcaactggctacttcaacgaggccaatttcataggagaaggtggattcgggaaggtgtacaagggcaagatcaacggacagacaatcctaaggtctaaggatacagccgggtggcgttatggattcacggccttatttctttctgtgagatctttagaattctttcagggaatggaatgcatatggagcttttcttccatgttaaatggcagtgactctgtcatatctttctaccatccactatttgtggacccatctatacactaa

SEQ ID NO: 12906 - DNA, 198 bp, Zea mays
  Peptide Sequence Number=SeqID_54685
atggcgagtggcggtgcggcggctagcgcggcaaactctagcgagctcggaagatatggatcacttgagtggggtctatccaacagaccaaatcctaggcaaatccaaggttttgtcatgtcaaaactcctagtcccaatgccatcttctggtattagtgttaaggttggaatcctaatgaacatgggagagttttag

SEQ ID NO: 12907 - DNA, 393 bp, Zea mays
  Peptide Sequence Number=SeqID_54686
atgccgccatgcaccgatgggggggctttgcgctgctcgaatcacggtaagaagacaaccattgtgatcgccatgccgcacacaccgtgtagcactccttggatttttgtcttgagcattggggtgtcggggcattgcttcgccggccgtggccgctgccacggtggacgcgcgccgccgtgtttggtagctggaaggaagaagatgggtggaccgttgactcagctatggatggatgagatcgcgccatcgcgtacccccttcatgtgtcaaagtccgaccgttggatctgatcggatgtatgggatcctctctcggctatttaaatcctgggcgttggtcactgatcgaacgacacacaatgcgtaccgattcatcgtagcgggcttttaa

SEQ ID NO: 12908 - DNA, 426 bp, Zea mays
  Peptide Sequence Number=SeqID_54687
atggcgcgatctcatccatccatagctgagtcaacggtccacccatcttcttcctttcagctaccaaacacggcggcgcgtctccaccgtggcggcggccacggccggcgaagcaatgccccgacaccccaacgctcaagacaaaaatccaaggagtgctacacggtgtgtacggcatggcgatcacaatggttgtcttcttaccgtgattcaagcagcgcaaagcccccccatcggtgcatggcggcatggccgacccccgatgagaaattgagcacacaccgaggccaccttccccaaccgtccctcggggcacaggacgcaggtgagggcggcactcgtcggtcgttctcccagcatagtgtggccacacgggtattggagcacgcgggatggcggccaagccacaagctccacacccggtga

SEQ ID NO: 12909 - DNA, 3009 bp, Zea mays
  Peptide Sequence Number=SeqID_54688
atggacggagtcgccaagccgtccacgagctcggggtcgggggtcacggatagtgcctccgccgccgcggcctccatagatgagaggttcgccgatctgtgcgagagcaagctgggactagacgacagcatgacgaggcaggcaatgcagcttttcaatgagaccaagaacatcaagtccagcatgtcttccttgggcggtggatcgcccgaggaggtcgagaggttctggtctgcctgtgttatgtactgtgtgtcaaggctcagcaaagcgcggaggtcgaaggaaagtggcagtgtctcactttgccagattttgagggcatctaagctgaacattgtggattttttcaaggagatgccgcaattctgcataaaggttgcacacattttgactggcctatatggttcagattgggaaaagaggcttgagttgaaggaactgcaagcgaatgttgtccatttaagcttgctaagcaggcactacaagcgtgcatatcaggagctattcttgccaaatgatggaaagtgttcagacagctcttcagaatcaaacaaccaagaggtttctgattattatcgctttggatggttgctctttttagtcctaagaatccaaacattcagcagattcaaggatcttgtgacatctacgaatgaactagtttctgtgttggctgtacttatcattcatattcctgtgcggctaaggaatttcgatataaaggattcatcctactttggtaagaaatcagataggggagtcagtcttattgcttctctgtgtgaaaaatatcatacctcagaagatgagttgagcaaagcactggagaagacaaatactctcatactggatattttgaaaaagaagccatggacagctacttcagcatgccaacaggataatttgactttcattgatccagaagggttgacagtttttaaggatttgcttcagggaggctcattgaaatcaagtcttctaatcctggaaaaagaatatgaaaatgcaattaacacaagaggcgagctagatgagcgcatgtttgctaatgatgaggacagtttacttggcagtggaagcctttcaggtggagccattaatttaccaggcacaaagagaaagtatgatgttatggcctcacctgcaaaatcaatatcaagcccaaatccaatgtctcctccacgtttttgtctatctcctaaaggaaacagcttttgcaactcaaagatggctcctatcactccagtgagcacagccatgacaactgccaagtggcttcggagtacagtatctccgcttccatcaaaaccttctggggaactattgcgcttcttctcagcatgtgataaggatgtaacagatgacattgtacacagagctgggattatacttggagccatattcacgagcagttcttttggtgaacagatctgtactaatatgcgaagcgctaataggatggatgctatttggacagagcaaagaaaaatggaagcccttaagctatattatagggttctggaatctatgtgtagggcagagtcacagatcttgagtgggaacaatcttacattacttttgtctaatgaacgtttccatcggtgtatgattgcatgttctgcggagttagttcttgcaactcacaagactgtcactttgatgttcccagctgtgttggagaagactggcattacagcctttgacttgagtaaagtcatagagggttttgttcggcatgaagatacactccccagagagttaaagcgtcatctgaattctcttgaggaacggcttctggaaagcatgtcatgggagaaagggtcatcaatgtacaattctttgattgttgctaggccagtactatctatcgaaataaatcggttaggtttactggctgaaccgatgccatcacttgatgcaattgcagcacatcataatatctcaatgggtggcctgccgcctcttcccttccagaaacaggagcgtttgcaagataaagatgaaatcaggtctcccaaaagggcgtgcactgagaggagacatgtgccggtggacagcaattcatttcgatcacaagtgaaggacagtattaaattgaagctaccacctcctcttcaatcagcttttgcaagtccaacaagaccgaatcctgcagcaggaggtgaaacatgcgcagagacaggaatagctgtgttctttagcaagatatcaaaacttgcagccattagaatcagaagtctctgtgaaagactgcaactttctcagcaagttctggagcgagtatattcccttgtccagcaaatccttagccaacagactggtctcttcttcaacaggcacattgatcagatcatactatgcagcatatatggagttgccaagatctctcaactgcaactttcattcaaggagattgtttttgggtataggaaacaacctcaatgcaagccacaagtttttcgaagtgtttatgttcattggcccccaacaagccataatgggaaaacaggagaagatcatgttgatattatcactttctacaatgaagtatttattcctgctgtcaagcctttgttagtggaggttggacctggtgctagtccaaagaggaaagaagagggaaaaggtccatacccagaatcccctcggctagctcggtttccgaaccttcctgacatgtctccaaagaaggtttctgctactcataatgtatatgtctcgccactacgatcatcaaagatggatactttactctcaccaagcccaaagagctattatgcatgtgtcggcgagagtacctatgcgttccaaagcccctccaaggacctgaaggctatcaacaaccgcctaaatagttggaagaaagttagcggacgattgaacttcgacattgtcagcgatctggtcgttgccagtagcctcaacggcgttcaaaatgccaagcccgcagccacggaagtggttcccaccaagacaccggtgaagtgcgagccatctgaatcgtga

SEQ ID NO: 12910 - DNA, 462 bp, Zea mays
  Peptide Sequence Number=SeqID_54689
atgtcctttccgctcccgccccttccgcttccgtcccttccgctcccgtcccctgccctcccacctccggccgacgccccagcccctccaacccacagcctcacgccggtcatcctcccatggtcggcggccacccaacctgctaccccggcgtcggtttcctctcctctctccgcccagtctgtggctgatattcctggtggccgttcaaaggcgcagcgatggttgtgggacgtcgccgtcgaagtccctgctcccctcttcccctgcgcccccccagacccgttcctgctgatttacgtgggagatgcttcaactgtttctcgccgtcccaccatgcggctgagtgtggcagtttggtacggtgttttcattgccgcctgcctgggcatcgggtgcgcgcgtgcccacgccggaagaggactctgcatcacccagcgaaggtgttggtgtggcgtctag

SEQ ID NO: 12911 - DNA, 551 bp, Zea mays
  Peptide Sequence Number=SeqID_54690
tcaccactcacctgaggccaacctcggacgggagatgcagtcacacctcgctcaaggccaacctcgtgcaggagacacagtcacggctcacccgaaaccaacccccgggcgggagatgcagtcacgactcgcccgaggccacccacgggcaggagacacagtcacggctcgcccgaggccaaccccgaatgagcagcacatttctgacttgcccaagggcatctcggttgatgctccagaaggtactcaactccaccgaccaactctgcgaggcagatcggccgaccaactctttgatgaccaaattcatcgaccaattcaacgaggaggaccagccgaccaactcactatcgagcaacccgatgaggcaaagatctgaatctagtgctactgatccacatcagctacgacatgatgcatcaccatcaagccacatctggacatacacacatcacgatgaatgggcaccaggcgccacgatctgcatggtccaccatgatgatcatcaactgaacctcatggcatacgaggttgccatcgtcggccactag

SEQ ID NO: 12912 - DNA, 375 bp, Zea mays
  Peptide Sequence Number=SeqID_54691
atgagcagggagaggggtctgccatggcggctaacacgcgcatgcctggagggagaggcttgtagagcagccaccagtgcgcaggcgcacgagcttgcggagctgccaccaccgacggtcatagtgggaaagaaaggccgtgcttcgtccatggcggcgcggcggcgctacgcgcctgctctcgcatgctcggagcagatcgagccacgaccctgcacgaggaagaaggcgacgaccatctcgaggtcgatgatgccacacggaggcggagttggcgtgacctccatggcttgcgcacttgttgcgggggagtttgttaagattattccaggtgttgagatttgtgtatactattctttagacagattgatgtaa

SEQ ID NO: 12913 - DNA, 435 bp, Zea mays
  Peptide Sequence Number=SeqID_54692
atggacgccaacgtcgtgcagcgctgcctcgaggccggcggccgcgacttcctcttccaccatacctcttcccctccctctccgacctccgcctctgccgctgcatcctcctccatcctccaatctctccccctccacgtgtccttcgaccgcgggtattacctcctcgtcaaggcgatccaggagctgcgtgcgcgcaaggacggccacgtcgttaccgtcggcatcggcggacccactggctcgggcaagaccagcttggctgagaaggtggcgtcggtgctagggtgcgtcgtgatcgtctccatggaggactaccgcacggcacctggtgtcgacgacggcatcagcgacgtcaatgccgtcgatttcgacgcacttgctcgcaacctccagatctttgcagtttcctcaatcaaggctgattacacatga

SEQ ID NO: 12914 - DNA, 708 bp, Zea mays
  Peptide Sequence Number=SeqID_54693
atgaatgagatgttgagactggatcggaactcagtgaatacactcgacgcctcagcaccggagtgggagacaacgggttgccgcttcgagtcccaggagacgaggactcctgaccgaacctttgttgtgtatgaaccatccaagcagagtgcagaaccagcagaggtatgcaaagttactaatggagcagttttcgaccacaaaatgagagacaaatgtgttaaattcgtatgtacagccatactgatagagcatatagaagttgttgacttagttgtgagtattttggccctaaaccatgtattcccatataatctgcccaagaggctcagcaatacaaccaacaattccaccaattcaattctggccatgggagaggatatggaagagctggacactagggaaatgatgctacagaggttggcctgcaaaacctctccccaccagactgaggacctcattgggcaggttaaaaaggggcagaattctattatcattttgggagcatggtccatttggaaccaccgcaatcagttcgtttttgataaaattcagcctaatcttgataaagtctttgtagcagtatgggatgaactgcacattggagtttggccgaagttaagagtacgttcgctcgttctaacgccaaccactgagtgtcacccctccatagttgtgtatgttggagacagaaaatggaaaccataa

SEQ ID NO: 12915 - DNA, 366 bp, Zea mays
  Peptide Sequence Number=SeqID_54694
atgagcatggacaagatgtggttcaatgtattgctgaaacagtggaaacacagtggtcatgatttcagtctgagaaatagaaaagccagcacgattcttgtctctctgtattcttgcaataagttaaagaagacagctaaaagtcttatttcctggagtaataatcaggtgggacacatcaggttccaattagccatggctaaggaaatccttcataggttggagattgctcaggatgacaggatcctttccatgaatgaactatggctaaagaataagttaaaaaagcataccctgctgctttcttccttgagaaggaccatggccagactgcgatcaagaatttcgtggctcaaggatggatag

SEQ ID NO: 12916 - DNA, 306 bp, Zea mays
  Peptide Sequence Number=SeqID_54695
atggctcgaatgatggcgctcgggccccacattgtccacgtcgtccgctataaaggatatgagacagttaggcgaccccagggcccacgagcacgtgtggtcttacccatggtagaacgctcagttttaccgtcgaccggtgcctccttcttaaggaagccaccgctggtcgaaccctccttggcctataaaaggaggaggcatggccgacgccttcggcttggatttccacggacacaagaagagactcttgaatccccgagaagacggacgcaaggacggaacccagatgaggagaggccctga

SEQ ID NO: 12917 - DNA, 261 bp, Zea mays
  Peptide Sequence Number=SeqID_54696
atggacatcatcgacgacctcgctcgtctctgtgagcgctactcccgtctggtcgtcgggcccccagtctaccccaactatgtccctcgcctggacccactagttagtagaaggcaagagaaaggttcgccccagaaggacctgccctcggttagtcccgaggcactgagcccggggtcgagtgaggtggagccaaataggggggtcgagcagatcgagaagaagccactcaagtggattccatgcctgaaccaggactga

SEQ ID NO: 12918 - DNA, 1347 bp, Zea mays
  Peptide Sequence Number=SeqID_54697
atggacgaatcacgaaaaagagctgtctctactgcaaatggtaaaaatataagttcatcccttgatgaagactttggaaatgacttcctttcatcttggaagttaccaaaatcaggaaaagacacgattgacttcagtgttgactcagttcccaagagtagcaagaaattcagctttgacaacctagatgattttgggcttaatggagcctttgacaaattaccgtcctttcaaatgggcatgtctgatctggatttttctagccctgacaagaaaaaagtgaagcacaccagttcaaatgcagatctttttgaaaagaaaaaggaaactgacaaggacaatttctccttttcttttgatttcaatgagttgggaaagtttagtcttgatggaaagctaggaattgaagaaaagagtactaatagatttaatggcaaatctgaccctgtctcctcagaggttaaaaaggatacacaaagaggccttttagccaagggcaatgctatccttgaagagaataatagtaaggataaaatgcatacacttgatactcgcacttcaagaccttctcatctgacgaatcatgagaatgtgaagaatgccagtcaaccaacttcaaatatcgatgttgctgattcatctgacaagatgcaagaacataccagtgtcaatcctgcaacaatggaacaaactaaagtagactcagtgctcaatgacaatcctggagagcatcctaaagagatatatgcaatgaaggcagctgttaacataccttctcaggatttctcctgcggtgccatatctagtgaagatccaacacaagggccagcagatcatgtgaacagtaaagatgcacctatagtgaactgtggtaaagttcatgtatcgagggagagtaatgatgatgagcagtcgaatggtttacaatccagggacaccagcattattaattccaatgtgtcaagaagaccgtcgggccaatttaactcccagaatgaggttcttgaggaaagtgtttcgcttaatgaaggaagtcaagacaaccaaagttttagtggcgctcctaagaagtttttaaagaagacatcacatgggacaacaaataccgaggaagagatttcaggtcccaagattctctcttgttcagtgcagagggaacacatgcaagctaatgcagtccctcacaaatctaaaactgctttatcaaaaacatacagcaagctagcatcaaatgggctattggccacctccatgaatgccaaagttgacacgaatgccaaattaggctgcattcagcactcgcaacagtgccacacaggtgcattgctgctgctgcagcaaccataa

SEQ ID NO: 12919 - DNA, 175 bp, Zea mays
  Peptide Sequence Number=SeqID_54698
atggagctcgcccctgcctcagcttggactgcgtcgcacggctctggtcaaagaagatccctctgcccagcccctctgctcgcctgccgtgttcgtgctcgagcccttttcctgccgcgcgccgagtcctctgtcgtgctaagctcgctcacctcgtccatggccgtcgtgccga

SEQ ID NO: 12920 - DNA, 1029 bp, Zea mays
  Peptide Sequence Number=SeqID_54699
atggccgataacacaaaccgcaccaatgctatgtacttggtatggtcaggtgctgtctttgccaagaaaagtatatgggacctggctgttccactcagcgcacgaaaaactagtggaggtaactccgaaggaatagcacatttcttgcagctgccacatttcacagaagcaactgtgaaaaagattgctcgcaagaaaatccgtgccttccaagaactttgtgacatgtctgtggagggtcgtgctgcattgctcacacaagttgctgggctttctgaagaacaagttcgggatgtggagcttgtactggagatgattccttgtattgaagtagacatcaaatgcgagactgaaggtgaagagggcattcaagagggtgatgtcgtgacaatgtatgcttgggtctcgctacgacggcgtaatggactgactgctgctcttccccattgtcccaacttcccattccacaaggaagaaaacttctggctgcttctagccgatgcggcatcaaatgatgtctggttgtcacagaaagtgagcttcatggatgaggccactgccataactgcggcatcaaaagctatacaagatacccaggaagcactaggtgcaagtgcaaaggaaataggaaatgcagttaaggaggcagttgacagggtgaagaagggcagtaggctggtaatgggcaagttccaagccccagcagagggtactcacaacctcacctccttttgtttatgcgacgcttggataggctgtgacatcaagaccagcttcaagctcaaggtcctaaagcgcagccgtgctggaacaagaggccatgtgcctgaagaagggtcagcagcagccgtagaagatggtattgaggacgaagaggaggaagatgaagaggagtatgatgactatgagagcgagtacagtgatgacgaggaggatgagaagaacaaggggaaagggcaggggaaggtcgtgaacggatcggcccatcaaggggctgaatctgatatagattcaggcagcgatgagtga

SEQ ID NO: 12921 - DNA, 252 bp, Zea mays
  Peptide Sequence Number=SeqID_54700
atggagaagaggatggcagagatgtttcaatacatgcagagccttgacgccacatccggttttgctcctccacctccgttgtttcctgcagctgaccctgctcagtgctatactcctagtaacagttggcactcggcaaagactttgttgagtgtccaacaaaaagtactcagcaaagaagttgttaccgatgtacagttcacagtgttctttttgtcaagagtaacacttggcaaagagtttgtcgagtga

SEQ ID NO: 12922 - DNA, 360 bp, Zea mays
  Peptide Sequence Number=SeqID_54701
atggaatcggtgctatgcgcagaggaaacaaaaccgaataactgggatagcttcttaccagaggcggagaccagggcagggccagccacgacgcagggcgaatcagcggcaaggatgcacacctactccatccacacggcccagcgaacaaccgaggcaactcatcgaggtccaagctgccgtggtccggtgatcccccaagttctccccgaggccgcacacgaccggagcagctcgcggcagtctaggggcatcgggaacctggagatttggcgaggcagtctagcagagatgtcgcggatgcgaggagagaccagagaggggggtgcgccgagcagaagggatggtggcggcatctag

SEQ ID NO: 12923 - DNA, 495 bp, Zea mays
  Peptide Sequence Number=SeqID_54702
atgcccgacataccgagggatgtcgccgagcactcgctggacatccgagccggagcccgacccgtgaagcaacacctgcgacgtttcgacgaagaaaagcgcaaagccataggtgaggagatccacaagctaatggccgcagggttcatcaaagaggtattccatcccgaatggttagctaaccctgtgcttgtgaaaaagaaaggtgggaaatggaggatgtgcgtcgactacaccgggttgaataaagcatgtccgaaggttccctaccctctgcctcgcatcgatcaaattgtggactccactgctgggtgcgaaaccatgtcattcctcgacgcctattcaggcttcgttctgactgtgctcttgtatactcatgatccgattccgaagataccctgcctcacatatttcacttgggaaacattatcaaattatgtttttgaggaccttcggaagccgaaggcccccaacagtagcccctcgcaatattaa

SEQ ID NO: 12924 - DNA, 492 bp, Zea mays
  Peptide Sequence Number=SeqID_54703
atgggcaggggtacgaggggcagtggttggcatcgctatgccgacggcaagcgcaagcgtgcttcaagtcctccctcggaggacttcggcgactcggagtactcggaggaggcgtactggcgctccatcgagcgcgacgggctcaatgggtcggatgagtcgggggtctcctcagacgaggcggactccttcgactccttcgaggagtggagcagcgacgatggtgacggtgagggcgacagcagcggcgacgacaatgacgacggggatggtggcagcaagggcgacggtgacggcagcggcaacgacgacaagggcgacggtgacggcggtaggggcaacgacagcaagggctacagcagtggcgacgacggtagtggcgatgtcaagggtgaaggcggcaggggcgaaggtggcaggggcaacggcggcagcagcggcaagggtgacggcggcagcggcaaggctagtggtgtaatgccactggtttaa

SEQ ID NO: 12925 - DNA, 294 bp, Zea mays
  Peptide Sequence Number=SeqID_54704
atggcttctttagtcactactatacaacttagccaatttgtcacttttattcacaccctattggtattgagtaaggtggttgggttggctagaccgatttccttgagtttagcagctcaagttgcacctccaattgatttggcacctactgctgttgatgttgtccctatagatgttgaggcggtttctatggatcaagatgatgggctgctggactatgaaccctctttgaatagagtagaagtcaatgtagtgcatttctctcctaatcattatgctgtgggagatgactag

SEQ ID NO: 12926 - DNA, 1566 bp, Zea mays
  Peptide Sequence Number=SeqID_54705
atgtcgggtttcgtttcaggccacccaaccctcaggccgtggcggagccggaggaacagcacatgctgcaccccttcgctcccgccggggcctgtgccatggcccgtcgttggcaacctgccggagatgatgctgagcgacaagccggcgttccactggatccaccatatcatgaaggaggcgggaaccgacatcgcctgcatcaaactgggcggtgtccacgtcatccccatcagctgccccaagatcgcgctcgaggtgctaagcaaccaggatgccaacttcgcttctcgcccgctcaccttcgcctccaagaccttcagcacaggctacagggacgctgcaatgtcccactgcggcgaccactggaagaagatgggccgcgtgctggcctccgagatcgtctgcccctcccgtcacaggtggctccacgacaagcgtgccgacgaggcagacaacctcacccggtacgtctacaacctcgcgacgaaggcggggtcgtccggcgccgttgacgttaggcatattgcgcgccactactgcgggaatgtcgtccgccgcctcatgttcaacacgcgctactttggcaagccacagcctgacagtgggcctggtccactggaggtacagcatgtggacgccgtctttacctccctcggccttctctactccttctgtgtctccgactatctcccgtggctgctgggcctcgacctagacggccacgagaagatggtcaaggaggccaatgagagggtgaccaggctgcacgacgcggtcatcgacgagcggtggaggctgtggaagagcggcgagaggcgggagctcgaggacttcctagacgtgctcatcatgctcaaggacgccgaggccggcagaccggtgctcagcatcgaggaggtcaaagctctgctaatggatatcacgttcgcgtccatggacaacccgtcgaatgcagtggagtgggctctggccgagatggtgaacaacccgacgatgcttaagaaggcagtggacgagatcgacagcgtcgttggccaggaacggctagtgcaggagcacgacatcccacggctaaactacaccaaggcctgcatccgcgaggcgttccgcctgcaccctgtagcgcctttcaacgtcccccacgtcgctgtcgcggacgccaccgttgccggctaccgcatccccaagggcagccacgtcatcctcagtcgcactggcctcggacgcaaccctgatgtatgggacgaccctcttcgcttcgaccccgaacgccacatccctttgagccccgagatggaggtctcactcgttgagcgtgatctacggtttatctccttcagcactggtcgtcgcggctgcatcgctgcagctcttggcactgatatgaccatcatgctcttcgctaggctcctgcaggggttctcttggagcaagatgaccggggtggcggccatcgaccttagcgagtccaggcacaacactttcatggcacggccactcgtgctacaggctaagccacggcttccagcgcacctctaccccgggatcttgctttgtaagtag

SEQ ID NO: 12927 - DNA, 1167 bp, Zea mays
  Peptide Sequence Number=SeqID_54706
atgccgaagctagcggcctcggctcacaccttcgtcgttcgcacacttggccgaagcttctctttatgccgcttcagtttttctggggcagtgtcctggccgaaggattcgttccaccgcataactgatcacacctacctctttggaggcatgtcaagacaccacaccaatctctgtagttatgaaggcttcgtcgtcaaggttgtacgaagccagggggtcactccaatgctgatgtattatgcagagtgcatgatttgcattatcagacgaaggccaaagtggcatggggactggacgaaagagtggtttcatgcaaaagttgattttgaacaacgtgaagacttcaaagattatgaagatcccgcgattaatgccgaaactggggaaaggaaaagagttgctaaaggtgatggtaaaacatcgaagaagactgttgatgctgataaagagaaggatgagtcagacggtggcgaagaaccattttcgggccccgaaaagaagaaagccaagacttcttcgaagaagtctgccactgcgcaagagcaagggaaagggagtgctacaaccacctcttctatgggctgcacacgagttcttgaggtaatgacacaaccattaccattctcccctctaagtcccttgggacttatactaatttggtttgtgccaaccgcaaaggggactaacgaaggaggccaatctttgaaggacaaagaaatttcatatgaagaagtggaaagcccatgcattttggttcttagaggtgctgccttcggagaaaaagagttgaaagaaccaaagcttacgattggagaagatgtgactgaacctactcagactactggtgaagagatagatgagcttggtttctttgtgaagcatcttggtggagcgaactggtacgcgctcgacgccatcggatctgattttgacgacgcagattttaaacactacataaccagtactgcccgctcgatctggtttggacgctccagattgaccatcgcgaagggcgacacccgaccacggaagagcttggttccgcggcggacatcagtcttcggtgagcaatcgccgcggcttgggacgagcttccttcacacggactccacgatcagcttccccggactcaggcgcgcgtcgtcggccacccaccgaggctag

SEQ ID NO: 12928 - DNA, 426 bp, Zea mays
  Peptide Sequence Number=SeqID_54707
atggggcgcgcagcgactccagcccccggggcccagtcctcccggttgccgcgcgccgtctcgaggctgcggcttgtgcttcgctcctcggaagcagcagcgaggagcggcagcaagagatggatagggtgcttccggccgtcgccatcgccggccaccgccgcggcgggggcggccgtggtgaaggaggcgaagggaaagcggccggaggtggaggtggagccggcgcgcggcggaggggaggacgtgtggagcgccgatgctgagaccgaagtggctcagggtggggcgttccccgagcacctcgtcatcatggtcaatggcctcgtcgggagcgcggacgattggaagttcgcggcagagcagtttgtgaggcggatgccgggacaaggtgatcgtgcaccttgctcgctgagtcatggatag

SEQ ID NO: 12929 - DNA, 1128 bp, Zea mays
  Peptide Sequence Number=SeqID_54708
atggctgatgaggactcatccgacttcaccttctgcagggttagttctgcagaaaatgacggtcaaccagaatctcctaaagccattcctatggcaagtatgacgctcgaggatgttcgtgttaaaagtgcagatacttcaaagaataatggcatgaaaactgttgactcagaaaaagataggtctggtaacaatgtcagtgtttcaacaaaagacgataacatgaaagcaccagttacacatacaggtagtggagcagaatcaaatgtcccattacaggcaaaacgttcatccaagaaacccgcagcacgggcaaaggttccttttgagaaaggctatagtcaaatggattggctaaaactgacacaaacacatcctgatctagctggagagatcgatctcacgagtatgaaagagaaggctacgacaaacattggtttctgtgccgaccctcttcctattaatatccgcggtgtgaaagggggccacaaccataaggttgttgtgcccccgagtgctgcatctgaagattctgaccactgccctctgatcttggggctcagggttggcctggaaaacgacgctttcactttgaatccttttggccaaacttatgtggctcttcttccaaagaagaatagggctgaggaggttaaagactatcgtcctattagcctgcaagtgctcttaaatggaattccaggaaagaccattcagctaaaaaggggtttgaggcagggagatcccttgcctctaatgctttttattcttgttatggatattcttggggatatgccaagggagagtgatattcagatgattctcaacattctgcacctatctggggaagcctcaggtcttaagaataatgtccagaagagcaatttctgtgatgaagtcagggctttcttctctatagctatggtgacagaaattggaaatgggcttaaggggcagtcaaaccgaaggttaatttctttggaagaggttaagcagcacaaagcaggagattgtatttggacagttctcaaaggccgcgtgtacaacattgctccatacatgaaatttcatcctggagagttcctcctggagaagtgccttgtcggattccttgatcccaccgcgtag

SEQ ID NO: 12930 - DNA, 405 bp, Zea mays
  Peptide Sequence Number=SeqID_54709
atgcgcaagtttcaggactccatcaaggccctccaggccgacatcgatcatgccaatgcgatggtgtcggaattcttgagggactacgatggctcggtcatccagatgcgggtggcgtacagcgccgtcgcgcatttcctcctgcagtggaccgactgcaagctcgccggcgcgctcggcctcctcaaggttatgctatacaagcttccgagtggcatcaccgagctggacgacaggaagcagaggaagctctgcctcaagaaattcaggagcagggatgagcagctctgggaggtggacacggagagggagcttgagtgtgggatctgcctcgaggttagccccaaggtcgtgctgcccaactgtgcccacatgctctgcatgcggtgctttgaggattggtaa

SEQ ID NO: 12931 - DNA, 774 bp, Zea mays
  Peptide Sequence Number=SeqID_54710
atggcgcctcctgttgacgtggtcggtctgtgccctaggttgggcgaggtggaggctcctccgaggtcgaggtcaagtctgtcttccaaggtcgaggttgagtccgagcccccgggtcggacaaggcggagatcgtcggctgaggccagggctgagtccgagccctggggtcgggcgaagcggagttcgtcgtccttcggggctgagcccgagtccgagccctggggtcgggcggagtggagttcgttgtcttccggggccgagcccgagtccgagccctggggttgggcggagcggagttcgtcgtcttccgggaccgagcccgagtccgagccctggggtcgggcgaagcggagttcgtcgtcttccggggctgagcccgagtccgagccctggggtcgggaggagcggagttcgtcgtcttctggggctgagcccgagtccgagccctggggtcgggcggagcggagttcgtcgtcttctggggccgagcccgagtccgagccctggggttgggcggagcggagtttcccatggcgcctagggccgaactcggctgctgtcagcctcactttctcgagtggctcagcagtcggagcggcgcaggtggcgctgtcctcttgtcagaccgcgatttggccaacgttgcttcttggtgaagacagggcctcgggcgagccaaagctttgtgctgatgggggttaccagctgagatttaggagccttgagggtagaggtgtatgtggtctgatcaactccgtggcaaatgggtaa

SEQ ID NO: 12932 - DNA, 186 bp, Zea mays
  Peptide Sequence Number=SeqID_54711
atggcagcaactacggcgacgagcacaaaggtcgtcatcattgggcgtagctgcaccgcccacgctaaggagctcggcgacctggttcccaaggaagtggaggagacctggacccggctgcagcctagtttaaaggcatggaaactcccactttcagtgattatagcaaaagaaaggcatatatga

SEQ ID NO: 12933 - DNA, 3111 bp, Zea mays
  Peptide Sequence Number=SeqID_54712
atgctttccttcctggtcattccacttatcctcatcatcggagcagcatacacgaaaaagttgaatgtcttatctttgtcacgcaatgctattgtttcagaggcagtatcagttgtagagcagactttgtcacatatcaagaccgtcttctccttcgttggagagagctgggccatgaagtcctttgtccagtgcatggaaagccaatttaatctaagcaagaaggaagcattgataaagggaataggacttggaatgttccaagcagtgactttttgttcatgggcactgatggtttggattggggcagttgcagtaaccaaaaacaaggcaacaggaggtggcacgatagctgctatcatgagcatcctctttggtgcaatatcaattacctatgccgcaccagaccttcagaccttcaatcaggcaaaaactgcaggaaaagaggtcttcaaggtgataaagagaaagccatccataagttatgcaaaaagtggattagtactagacaagattcatggagagatcaaattccgtagggtgcactttgcatatccttcccgccaggataagccaattctccaaggattctcattgtccatccccgcaggcaaagtcatcgctctggtaggaagcagtggctgtggaaagagcactgtcatttcactacttcaaaggttttatgatccaacttcaggtgacatactcattgatggccacagtatcaagaaaattgatctgaaatcgctgcgcagaaacatagcttcagtctctcaggaaccatcactattttctggtaacataaaggacaacttgaagattggtaaaatggatgcaagtgacaaggagataactgaagcagcaagaacagctaatgttcattcattcatatccaaactaccaaatgagtacttgaccgaggtaggagaaaggggtgtgcagttatcgggtggccagaaacaaagaatagctattgcaagggcaatgttgaaggatccaccaatcctacttctggacgaagcaacaagtgcccttgattcagaatcagagaagctagttcaagatgcacttgagagagcaatgcgtggaaggactgttatcttgatagcccacaggatgtccacaattgtaaatgctgacactatagttgtcgtcgaaaatggaagagtagcacacactgggacacatcatgagttgcttgacaaaagcacattctactccaatgtatgcagcatgcaaaatatagacaaggaagctgaaaataaagtggcaagcactcctgataacatggaggaacaaattggcgaagcacacatcaagcagtcctccacaaatcagggaccaaacaaaaagctagaaagactggagtcaaaacaaccaagaaatgagaatgtaaaggaaacaccccctttcttcagactttggtatggattgcgtaaagaggacattatgaagattctagttggctcctcagcagcagccatctctggaatctcgaagcctttgtttggttatttcatcatgacaattggcgtggcatattatgacccgaatgcaaaaaaggaagtcaccaagtattctttgatattcttcacagcagggatggttacaatggatttcttacctcacgcattgtcagtgacacgtcaacagtcaagaccatcatattcagacagaatggcagttattgtgcaatgcatcgcttcaattctgatagcaacaatagtaagcatgaaggtcaattggagaatggctttagtttcatgggcagtcatgccatgccatttcattggtggccttattcaagccaagtcagcaaaaggattttatggtgactctgctattgctcaccgggaacttgtctccctagcttcagaagctgctagcaacatccggactgtggcatcctttgtttatgaagatgaaataatcaagaaagcagaattgtcactgcaagaacccttgaggatcaccaagattgagagcatgaagtatggggtcatccaagggatctcgctctgcctctggaatattgcacatgcagtggccctatggtacaccacagttttggttcagaggaagcaagccaaatttgagaacagcataagatcataccagatattctcactcacagtaccttccatcacagaattatggaccctcattcctatggtcatgtcagccatttcaatactgaatcctgtatttgacacacttgacagagagacacaaatcgtcccggataaaccagaaaacccaggcaaagggtggctcgtcggtagaaccgagtttcaggatgtgagcttcaattatccatctagaccagaggtgaccattctggatggcttcaatctaattatagaacctggccaaagagtagcattggttggccccagtggtgcaggaaaatcctctgtactggctttaatactgagattctacgatcctgctagaggtagattgttaattgacaacaagaacataaaggactacaatctccgatggctcaggaagcagattgggctagttcaacaagaaccaatcctgttcaacacatccatcagagataacattagctatggaagtgaaagcccttcagagactgaaatcatccaggctgcaatggaggcaaacattcacgaattcatcagtggtctaccagaagggtatggcactgttgttggagacaaagggagccagctttcaggagggcagaaacagagaattgctattgcaagaacaatactgaagaggcctgccattctgcttcttgatgaggcaaccagcgcacttgatggtgaatctgagagggtggttatgagctctttagggaccaaggtgtggaaggacaaagatgagcaagccagtacgattacaagtatcacagttgcacatagactgtccacagtcataaatgctgatacgatagttgtgatggagaaaggaaaggttgttgaacttggtaatcaccaagagttgatctctgctgaagatggcgtttactcaaagattgttccacttgcaaagcaacatgaaagaatgaccatctattcaagttccattatggccaaagaccaaagacacttagcaagaatagctttaggagattaa

SEQ ID NO: 12934 - DNA, 1044 bp, Zea mays
  Peptide Sequence Number=SeqID_54713
atgggattcgggctagtgccggcccggcactacgcccgtgccgggcttgggccacgaccaaggcacgccgtgccggcccggcacggcccgtttaaaacggaaagcccgataggcccgactagctattcctacttcctaagacccgaagtctgtaaccctaaccctaaccccagtcgcgcactcgtctcgttctctccgtctccgctgtccgctccgccctcgcccagtcgccgcctcgccccgtcggttccctcgtgggtgctcgcctcgtcgcccgtcggttccctcgtgggtgctcgcctcgccgcccgtcggttccctcgtggtgctcggctcgccggccgtcggttccctcgcggtgctcgcacccggttccctcggttccccgtcgaccgccgcctcgcacccagttccgtcgacgtcgaggcgtcggccgtcgcgcgtcgtgcttcctggaatcctggatgccccgtcctcggcacgtcgtcggtcgaggtcgtggccgtgagggaccaggtgccggcgatggagcataggtatgatcctacctccattaatcatgatttggtgttgatgggtcaaaccccagacgttgtggacgacgtgcacgatgatttggaggatctctttggttccactgcccctaccccgaaccctaccataaaccttggcgacgacaatgtcgctgccgagggcgaggctctcccagatgctactgcctccactacggcaagcactggtagaaagaggaaatgcacatccgatgtctgggaggacatggataagattttcgccactgaaaatggtgttgaggaagctcggcctcctgaactcgccagcctcgggttcgcgcggcagccgctccgctataattcaccggactgtccgcgcgcgcagaagtcagaatcgcccataccggtgcaccggacaccaaacagtacctgtccggtgtgcaccggacacccaggcgggcccacaagtcagaagctccaacggtcagaatccaacggcagtgatgacgtggcaggggcaccggactgtccg

SEQ ID NO: 12935 - DNA, 2379 bp, Zea mays
  Peptide Sequence Number=SeqID_54714
atgagaccacaagaactccgtgcatacaggcagcatgagcgagaaaagatggagaaaaaactaaacgaatatgttttgatatgcaggcgattgaaggttaattgcgacatagtagctattcaaaatgacgacatagctaatggggtcatcaatcttatttctttacatgggatcaaaaagcttgtcgtgggagccgcatcagataaaaaatattcaaagacaatgaaagcaccaacgtccaatacagcattgaagataatggaaggagcagcttcaccatgcaagatatggtttacttgcaaaggatctctaattgttgtcaagggcggcaatgcagatacacctacagtaccatcatcacaaaacacagcaccattaccagtattcaacatttctagccaaatgagatcaatgatgatccacaattcaaaggacaaagcatcaagctcaaatttaagtatggcgaacgatatgggagaatcaagaacagatgtaccttgctctctatatgaaaatgctggtgatacactgcttcaatcatttgaagatgttgagtccactttcaaaggcaagccaaggagactacggagtttagaggacttcactgttgactcaggcagatcgcagacgcagaactctgattccagttgtccaccaaatgatggggcagccagtatctctagaacagcagtggttgataacgataacataagtgaagttgcatcaaatatgcatctttcaactaacaattcatacgaccatatttcaccaacaccacatgacctggacaaacttaaggaaactctcactaaaatacagcttctagaaaaagaagtgcaagaagaatgcaataaacagcaaaatgctgaaagagaactgcaatcagctcttcaaaagagcaaagaattagaaaaatcgtatatgaacgaattaaggcagcagaaggcactcaaggaaatgcttgaaaaacagaggcaggagattgatgtgatgagaagacagcaagaagaagcatatgctgcgctatacaatgcaaatgagcagaaggtcacactagaacaacgaataagtgagattgagctatatgttaaagataaggaagatgagctagcaagaaacaaacaccaactggaagcgctccaagcagattgtgacaggatacaacaagaaagagatgctgccataagggaagctactgaactgcatgaaaagaatcggctgggagtttttgcaccatctgaagccctaaacaccaagttctctcttattgagctgcaacaagcaacacaagacttcaatccaatgttcaaggttggtgaaggtggtttcggaagtgtctataaaggtttcctccgcaatacaacagtagctataaagttgctacatccagaaagcatgcagagacaatcagaattccatcaagaggcttctgttctcagcacagtaaggcatccaaaccttgtcacgctgattggtacatgcccagaagcttttggtctagtatacgagttctttccaaatggaagccttgaagattgcttgggatgcaagaacaacacgcgaccactaacatggcagacccgcactcgaataattggagagatgtgttctgctctcatttttcttcattcaaacaaacctcaccctgtggtacacggtgatctaaagccagaccacattcttcttgatgccaattattctagcaaattaggagattttggaatttctcgattgttgatacagacaaacacctgcagcacaaatctttaccgaacaacaaacccaagaggaaccttctcttatatggatcctgaatttctgaccactggtgaactcacaccacggtctgatgtgtactcctttggcattatcatcctgcgactactgacagggaaacaacctcaaaggattgccgaaatagtggaagatgccattgagaaagaaaatttgcattccatcatcgatagcactgctggaagttggcctttcatacaggccaaccaacttgcgcatattgccttgagatgtgctgagttaagtaggagacgaaggccagatctaacagtggatgtgtggaaagtggttgagccactaatgaaggcagcttcaatgacagcacgaccactttcatgcacagctccatcagatgagacttgcatcccatcgtacttcatatgtccaattttgcaggagatcatgagagacccttacgttgcagcggatggattcacttatgagggtgaagctattaggggctggcttgacagcgggcatagcacatcacccatgacgaatctcgacctcgagcgcagccttctcgtgccgaacagggcccttcgttcggcaatactcgagtggaaccagcaggagaggcagtga

SEQ ID NO: 12936 - DNA, 399 bp, Zea mays
  Peptide Sequence Number=SeqID_54715
atgggagagaactcgcgggaatggcgccgcgcggcagctagaagaggggggcgcagaactgcgggccgcgcagaagcagcaaagtctgaaatggctaacgccgggacagggaggggaggacagacaccggagagcacgcaccagcacaccttaagaacggcggtgagcaacaccagggaggccgcggagagcccgcctttggctgtcgacgacaagattttcgttgctgtccccgaagaactcaagcacggcaagagcaacttgctgtgggcgctgcacaacttggccagggacgcctccagctcccggattgccattgctcatgtccacgttcctgcccagatgataaccaccataacaattgcattattagagcccaggccatctcctggagactag

SEQ ID NO: 12937 - DNA, 753 bp, Zea mays
  Peptide Sequence Number=SeqID_54716
atgggctgcgccgtatgccaccttcgtcacgccgtcctagcaatcactgtccccatctccatgagctgtgtcgcatactctcatgccaccttcgtcacgtcatcctgcccaactggcgtcaccatctccatgggcagcaccgcctgccaatttgtcaccacatccccgacgtcggctgtggtgcgtggcctcctagtgcgctggtggctgcagcgggtgcgccggcagttgctcgaggcaaccctggtggtggttgacctcggcacacaggggcgcaacctcgccctgtcggacggccatcagccaccgagtcggcctgctgtctccaagtgcgagcatggtgttaggttggtgtctagaggagtcatcgctaggttgcagctcgaggacgacctgtttgtccgggaggggtgtagtgtcagggacaatattatttctactccactgttaacggggacaattcttcctggaatcacaaggagaagtgtgattgaaatttctcagaatcttggatttcaggttgaggagcgtcttatcacaatagatgaactgcttggggctgatgaagtcttttgtacaggaacagctgttgtattgtcacctgttgggagcatcacttaccgtggaagaagagtggagtatgggaagaaccaggaggccggagtcgtgtcccaacaactctatgccgcactcacagctatccagaaaggtctcacggaggacagcatgggatggacgttgcagctaacttag

SEQ ID NO: 12938 - DNA, 1806 bp, Zea mays
  Peptide Sequence Number=SeqID_54717
gcgactatcacccgttctaccattggcactggtcatttgtctcggcatagggacaaatgtaaacgactccatggccgaactgggaaccaatctatgcttagatataatgctgatggtactgtttttcgttgggaatatagtgctgaagttgcacgtgttcagttatgtcgtttgattgctaggttggaccttccattatgctttgctgattgtgatgcatttgatgaatacattaaaactacccataatcctaggcattgcaatgtttctagacaaactacaactagagatattcaaaagtactttaaagaacgacatgctatagttgctgaaaaattgaagtctgttacttctgttgctttaacttctgatatttggagtggcaatgctaaagaagattatttgtctgttgttgcacattatgttaactctgattggcagttagaaaaaaggattcttgctatgcgtctcattgattgttcccactctagcaagaacattgcagagaggattcatgctgttgttaatgaatatgaattggctgaaaaggttttttccattaccttggataatgcatctgctaacactagggcaatggaccatcttacacctttgctatctgcttatgttggtcctttattattgcatcaacgatgtgcatgccatatcattaaccttgttgtgcatgccacatttgtggaactgaaacctcatcttgaagattttagaactgccatctcttttttgaactcatcaaaccaaaggattgctgcatacaaaagtttttgtgttgctatgggagtaagacctcgtaagtttggtttagatatggaagtgagatggaactctacctaccttatgctcaaacatcttataccttacaagagcacattctctgtgtttatccagacccactatcaccctagagaagagggtactacacttttaagtgaagcacattggtatgttgctgaaaaaatattagagttccttgaaaggttttatgattctactgttgtgatgtctggtgtgtactatcctacatcacctttaatgttgcaccacattcttcatattaataagcacacgaacatgtatgagaatgataatttgcttagacatatagttgtcccaatgaaagacaaattcttaaaatattggggtacaattcctttgttatatgcatttgcatttatactggaccctagagctaaaatgagaggtttcaacaatatgcttgcactcatgactcattctgattactctggatatctaacttctgtgagggctgatttatctgatttatttaataaatatgatgacaaatttggttctgttaggttgcagaggacttcaaatgctacccctggtgaaggtaagagcaaatatgcttgggatttggtgtttggtgcagatggcattggtagcagttcttcaatggcactgggtgctggtctgggtgcctttggtgccagtagcagttctgggatggttcctgaactgtcaagaaggacatctgctagtgctttgcttcatgcagcaagcacttctggtatttctggttctgaactagctgcttatccagtactttcaatcctagctaaagatatcatttcagttcctgtctctactgtgagttcagactcagcatttagtcttgcaggtaggctcattgaggagcggcgtcgtcgacttggctcaggaatggtggagatgctttccttgctaaaggactgggaggcagcagatgcaagaatgcagcacacaacagaagataagatccttgaagagtccttcagagattaa

SEQ ID NO: 12939 - DNA, 912 bp, Zea mays
  Peptide Sequence Number=SeqID_54718
atggacaaggtgctggccttctcgatcctgagcgcgtcgccggccgacctctcctccacgggcgccggcttcggcgggagctgggcgcggctgtcgtggcggaggggcgcggacgaccagcgtgcgccgcggcgggagcagcagcaggaggaggacgaggacagggagaagcgagacttgcgctcccgcgacggcggagctcacgcgagcggagggggagcggcggcggcgccaccgcggttcgcgccggagtttgacggcatcgactgggaactgctcaattaccagagtaggacgacgaacagagcaacttcagtgtcgaatcgaatcgaaggtgatcacattcatgggaacctcccacaaattccatcttctgccacaattgaaggccgaagacgcatcggaccaaaccttataacgaaaccaaagtatgaaacgaaggcggagacgatggactcgaagcagtgcagcccgtcgaactcgggcgcgaaccgcggccgcgtctcccgccggcgctcggccgccggggcccgctggtcggccgccttctcctgcctcggcgttggcgccgcgtccgccgccgccgcctggggccgagcccgccacgagagccgggcggcggaggaggaggaggagaggccggccgcggagatgtccgccggcgacgagctcaggatggagaaggccaggatcttgtccatggtctggtcggtcacagacgacggcggcggatggaaatcggcagagggacgcggcggcgagacgtggcgactggtggtggccgcgggtaggcgtggcgcgacacctggaggggtctcaggtggcgtttggtccgtcggttggattggattggaccggagctaccggcaggccaccgccccgtggtgccgtgcggtcggcatcccgagctag

SEQ ID NO: 12940 - DNA, 456 bp, Zea mays
  Peptide Sequence Number=SeqID_54719
atgactaacggtgtacgagggaatttcttccgcgcaattgtaactggcagcacttgtgtccatgtctccatgaccatgactggatataacaaacattccgaaaacagcgctattcaccccgttccgactactgtgccaaccagcagggtaaacctgagtcacgacctcccccgagttcagcctcgggcgcaacagggagctccgcctcgcccgacctcaggcctcggcctcagcctcggcctcgggagaaggtctccgcctcgcccgacctcgggcctcggcctcagcctcggcctcgggagaagtcacatcctcgcccgacctcgggcctcggcctcgggaggagtcacatcctcgcccgacctcagcctcggccttaggagaagtctctgcctcgcccgacctcgaccacggaccgaccgcgccactggggatacatcattaccctacccctag

SEQ ID NO: 12941 - DNA, 1104 bp, Zea mays
  Peptide Sequence Number=SeqID_54720
atggacagaccgtgcgtcgtgccgtgggcagcagctaggcctcgaacagccccaacgcgccatgtgctgctgcttgggcggctgccaaggcagtaccgtgacctgcgccggtcacctgggcgcctagtgtcgcagctagcctgggcagcagccaaggatggggcgccaaccaaaggcaggccgtgcgtccatggaagcagccaggtttgtgtacgcagagccgcgcacagagccaaaatttttggctctggctctcagccgtattttggctcctgctcctgtgcaagagctggtttaggagatggcgtttgggatggcttcagcgaggagccgacgatccgtggcgcggcgggagaccaagcggcgcaggagcaggaggggtgggtgatctgcagggtgttcaagaagaagaacctcgtgcaccacggccagagcagcggcgtgaagcagcaggcagcaggagacgaccacgcggcgtcccatacggcggcggcggcagcgcacatggacgagagcagcccgagccagtgctcgtcggtgaccgtcatcagcgaccacgtgcacgccaacgttaacgacaagcagcagcaggcgcaggcgtcgttgctgatgatgcacacgcaccactccgccagcagcgacgacgacgcgctggaccacatcctgcagcagtacatgggcggcggcaggcaggcgcccgcgccggacaccaagccggcgctgctggagcagctggaccatctgcaccaccaccttgccgcagcgcctactactagggccgccgccggcttctactacgggaagttcatgaagctcccgcccctcgagcacgccggcctgccgccaagcccaccaccaccaggagcgcgcgagtacggcgccgccgccgccgccggctgggacgacgacgacgacgcgctggaccgcctcgccgcctacgaccacctcaacggcctctccaacgacgcgtccaagaacatggccgcgttcttcgacgtcgagcctagcgccgccgccgccgccgccgtggacggcgacctgtggagcctcgcacggtccgtgtcggcgctgcacgcggacttgaccatgaacaacaacgtctag

SEQ ID NO: 12942 - DNA, 1932 bp, Zea mays
  Peptide Sequence Number=SeqID_54721
atggcggctctagccacgtcgcagctcgtcgcaacgcgcgccggcctgggcgtcccggacgcgtccacgttccgccgcggcgccgcgcagggcctgagggggggccggacggcgtcggcggcggacacgctcagcatgcggaccagcgcgcgcgcggcgcccaggctccagcaccagcagcagcagcaggcgcgccgcggggccaggttcccgtcgctcgtcgtgtgcgccagcgccggcatgaacgtcgtcttcgtcggcgccgagatggcgccgtggagcaagaccggcggcctcggcgacgtcctcggcggcctgccgccggccatggccgcgaatgggcaccgtgtcatggtcgtctctccccgctacgaccagtacaaggacgcctgggacaccagcgtcgtgtccgagatcaagatgggagacaggtacgagacggtcaggttcttccactgctacaagcgcggagtggaccgcgtgttcgttgaccacccactgttcctggagagggtttggggaaagaccgaggagaagatctacgggcctgacgctggaacggactacagggacaaccagctgcggttcagcctgctatgccaggcagcacttgaagctccaaggatcctgagcctcaacaacaacccatacttctccggaccatacggggaggacgtcgtgttcgtctgcaacgactggcacaccggccctctctcgtgctacctcaagagcaactaccagtcccacggcatctacagggacgcaaaggttgccttctctgaactgaacaacgccgtcttcgttctccatgctcgtatacctcgtctggtggtgaccgctttctgcatccacaacatctcctaccagggccggttcgccttctccgactacccggagctgaacctcccggagagattcaagtcgtccttcgatttcatcgacggctacgagaagcccgtggaaggccggaagatcaactggatgaaggccgggatcctcgaggccgacagggtcctcaccgtcagcccctactacgccgaggagctcatctccggcatcgccaggggctgcgagctcgacaacatcatgcgcctcaccggcatcaccggcatcgtcaacggcatggacgtcagcgagtgggaccccagcagggacaagtacatcgccgtgaagtacgacgtgtcgacggccgtggaggccaaggcgctgaacaaggaggcgctgcaggcggaggtcgggctcccggtggaccggaacatcccgctggtggcgttcatcggcaggctggaagagcagaagggacccgacgtcatggcggccgccatcccgcagctcatggagatggtggaggacgtgcagatcgttctgctgggcacgggcaagaagaagttcgagcgcatgctcatgagcgccgaggagaagttcccaggcaaggtgcgcgccgtggtcaagttcaacgcggcgctggcgcaccacatcatggccggcgccgacgtgctcgccgtcaccagccgcttcgagccctgcggcctcatccagctgcaggggatgcgatacggaacgccctgcgcctgcgcgtccaccggtggactcgtcgacaccatcatcgaaggcaagaccgggttccacatgggccgcctcagcgtcgaccaccgccgttcttgtttcgtcgtcctctcttcccagtgcaacgtcgtggagccggcggacgtcaagaaggtggccaccaccttgcagcgcgccatcaaggtggtcggcacgccggcgtacgaggagatggtgaggaactgcatgatccaggatctctcctggaagggccctgccaagaactgggagaacgtgctgctcagcctcggggtcgccggcggcgagccaggggtcgaaggcgaggagatcgcgccgctcgccaaggagaacgtggccgcgccctga

SEQ ID NO: 12943 - DNA, 912 bp, Zea mays
  Peptide Sequence Number=SeqID_54722
atggctcggactctcctcaagcagaggggaatgtcgactgtcttctggggagagttggtggtgacgactgtctacaccctcaatcgctcgtcagccaaggctctcaatgagaggacaccgtacgaggcttggcatgggcacaagctggtgatctctcacctacgagtctttggctgcctcacgttcaccaaggagcttgaccacatcggcaagcttgacgataggagcactccagggtgttcattggctacacggagggctttgaaggcctaccacattcttgacccagaaacacaacttgtgcggaatgagcacgacatattgttcgacaaagggcaaagatgggcatgggacaaggtggtggacgatgattcgacttcgacgtacgacgacttcactgttgagtacgtccacttcgagggagctaggggagtagcaatcctagatctcgtatttggctggaaagcaaaaagaagcatgtcatttgcagtcaagctacgatatgtcttgaaattaatatctgctgctgcatgggttgtgattttaccagtgacttacgcgtacacttgggagaatcctactggtcttgcaagaacaataaaaagctggcttggggatggtcagaatcagccatctttgtatatactggcagtagtgatatatatggcaccaaacatacttgcttctatgctatttcttttcccatttatgagaagaatcctagagagttcaaatgttaaggtcataacgatcatgatgtggtggtctcagcctcggttatttgttggtagagggatgcacgaaggtgcattctccctcttcaagtataccatgttctggattattcttttagcaatgaagttgattgtggaattctttgtggttttgctagttggaacacagacaatgtag

SEQ ID NO: 12944 - DNA, 1593 bp, Zea mays
  Peptide Sequence Number=SeqID_54723
atggggcggatcggcaccgccgtccgaggaggaagggctcgaatcagaccatctctgggacctagaacgttccgcatgggaagttgggttgcaaggagcagcgggtcccgacgccagaggggtggaagacgacggggtggccgtcggtttcggggtggttgctggcgtgaggctggtggaggggttggcgccgggaagggaagggacaggggcggaagacggagggaagaccgaagggcaggagacggaagggcggccatcttatctagatgcatcgaatggggagagacaccccctgacttttttttcttaagttggtgccgtgactcgaacccgggctggctcagcagaccgcttctttggcgtgtccggctgaccagttgcaccatcaaacctctggtacagccaaccaaagatataatgagagaacctatcaggacattccagtggcacgagtttttccctcatggaactaacaatattggtgttgttatatcactctgggctccaataatcctggtatatttcatggacacccaaatttggtatgcactgttctctactctgattggtggcatctacggggcttatcgtcgtcttggtgagatacgtacattaggaatgttgagatctcgctttgaatctttgcctgaggccttcaatgaacgcttgattccttctgatgcaaataagagtaaaggtcttcgtgctgctttttcgagtagacccaaggcttctggtgacgaaagtgagagagagaaaagagctgcaaggtttgctcaaatgtggaacgccattattacaagtttccgcgaagaggatctcatagacaatagggagaaggatctgctactggttccagactgtaaagaccgtgaacttgatatattccaatggccgcctttcctacttgctagcaagatcccaatagcactggatatggcagcagacagtggtggaaaagaccgtgatctgacgaagaggataaagtcagatccatacttttcctttgctatcagagaatgctatgcttcattcaagaacatcatcaataccttagtatttggtcagcgggagaaagatgtcctagtacagattttcacagttgttgataagcatatagaagaggaaactctgataacgggtctcaatatgaagaaccttcctgcactgagcaagaagtttgttgaattacttgagttactgcaaaaaaacaaggaggaagacttgggtcaggtagttattttgttccaagatatgctcgaggtggtcacgagggatataatggaggaacaggacctgctcgagacgttggattctttacatggtgccaatagtagaaaacatgaaggaattacaccgctagatcagcaagaccagttgtttgctaaagctattaagtttcctgtggtggaatcaaatgcatggactgaaaagataaagaggcttcatcttctgttaactgtgaaagagtctgctatggatgttcctattaatcttgatgctaggcggcggatatcgttcttcgcaaattctctatttatggatatgcccaatgctccaaaagttcggaacatgttgcccttctcgtaa

SEQ ID NO: 12945 - DNA, 213 bp, Zea mays
  Peptide Sequence Number=SeqID_54724
atggacaatggaagacatcacactagtcaacctcattaccctttcactggtgcttctggcattctgttgttggtttacatcaacaatgtcaccctcaccaacaatgtcaaccaagacaacctcatcaaccttcccagcttagctgcgccatgtcctagggtgatcgctgccctagtggcccgtgaccatgttcccacccccaatgacttatag

SEQ ID NO: 12946 - DNA, 1674 bp, Zea mays
  Peptide Sequence Number=SeqID_54725
atggcggctccggggcggaggacggcggacgtgtcctcgtcctcgccctctccgtcccctgccgccccctccaccggcaggcgcctcctgcgcacgcagaccgtcgccaacctcggcgagtccatcttcgacagcgaggtcgtgccgtcctcgctcgtcgagatcgcgcccatcctccgcgtcgccaacgaggtcgaggttgaaaacccgcgcgtcgcctacctctgtcgcttctacgctttcgagaaggctcaccgcctcgacccgacttccagtggccgtggtgttcgtcagtttaagaccgcacttctgcagaggcttgagagggaaaatgaccccacactgaagggaagggtccacaagagcgatgctagtgagatgcaacgcttctaccgcgaatactacaggaagtacatccaggcactgcaaactgtcgttaataaggatgaccgtgcgcgcctcactaaggcataccaaacggctgctatcttgtttgaggttttgagggctgttaatgattcccagtccgttgaagtcgatcaagcgattttggatacacacatcaaggtcgaagaaaagaaaaagctgtttctaccttataacattctcccgctcgatcctgaaagtactggcgaagccattatgcgatatccagagattcaagctgctgtttatgctcttcgcaatactagaggtctgccatggccaaaggaccaagacaagaagcctgaagagaagaatactggcaaagaccttcttgattggcttcaggctatgtttgggtttcagaaagacaatgtgtccaaccaaagggaacatttgatactgttgcttgcaaatgttcatataaggaaaatacccaaggctgaccaacaaccgaagttggatgacaaagctctggatgatgtaatgaagaagctatttaagaattataagaagtggtgcaagtacctcggccgcaaaagcagtttatggttgccaaccatccagcaggaagtgcagcagcgtaagcttctttatatgggtctctacctgctgatttggggtgaggcggccaacttgagattcatgccagagtgtatttgttacatctaccatcatatggcttttgaactctatggcatgctggctggaaatgtgagcccaatgactggtgaaaatgttagaccagcatatggtggtgacgaagaagcctttttgacgaaagtcgtgactccaatatacaaagttatagagaaggaagctgaaaggagcaagaccatgaaatcaaagcattcacattggagaaactatgatgatctgaatgagtacttttggtcagttgattgtttccggctaggatggcctatgagagccgacgctgactttttcaaaactccaaaagatccttatctgaatcatttgaatggagagaacagatctgcaggcaatgtccattggatgggaaaagttaattttgtggagatacgttcattttggcacatattccgtagttttgacagaatgtggatcttcttaatattgtccttacaggccatgataattattgcttggaatggtggaacaccaagtgatatctttgatgctggcgtatttaagaaggttttgagcatatttatttctgcagcaattttgaagttgggtcaagtttttgcctatattttgatggaataa

SEQ ID NO: 12947 - DNA, 540 bp, Zea mays
  Peptide Sequence Number=SeqID_54726
atggcgcctcctgtcgacgtggttggtccgcgccctaggttgggcgatgtggaggctcctccgaggtcgaggtcgagtctatcttccgtggccgtggttgagtccgagcccctgggtcgggcgaggcggagaccgtcggctgaggccagggctgagtccgagccctggggtcgggcgaagcggagttcgtcgtcttctggggctgagcccaagtccgagccctgggtcgggcggagcggacccgagtctgagccctgggtcgggcggagcggagttcgccgtcttctggggcttagcccgagtccgagctctgggtcgggcggagcggagttcgccgtcttccggggcttagcccaagtccgagccctaggtcgggcgaagcggagcttcctatggtgcctgaggccgggcctgactgcctatcggcctcactctgtcgagtggcacaacagtcggtgcggcgcaggcggcgctgtccttctgtcaggccggtcagtggagcggcgaagtgactgcggtcacttcggctctgtcgactga

SEQ ID NO: 12948 - DNA, 795 bp, Zea mays
  Peptide Sequence Number=SeqID_54727
atggtggacggcgggttgtttaccaacaagctcagggactctaagaaaatgcgctgcgaaggggtatcagtggagatgagccgttggattagatttgtacggtccacaacagatcaacgggaggttgtgctggtattagatctgagccgcaagatcaagatcaacggcttggatcctataataccgggatcgacggccaagagtggacgtcatccatatgagcgacaaatcctagatccggccattgctcccacatccgacggccagcgagtcatcttctacctgcgcacctcggcatctaacaacggtgagtccgtctacggcatgccaagccggagaattaccagggtacgccgaggctacaatccaccacacgcaagctcaaacgacagggagataagggagaggaagatcatggaggcatgttttaccatggctctgcacaggaacgagcagcctcgcaccggtgtcgtccagttcggtcttcaacacgccgtgaaggagcccagtcctcccatcgacgaacacgcgaggggaacctcccagatgcccagcgcgcagcgcgcagaggtagctgtttcggggccacctgccagcgtcgtggccgagggggaaataggtacccaaggcaaggcccgtaaacctctctctgacccatttatcgaccaagtccccgccgagcaagtctacgaggcggggcaactgaccaagtccttgtcaagcagggcgaccaacattgagcatatccacgaggaaggaaccaagggcaacaatgttggccaacgacggccgtga

SEQ ID NO: 12949 - DNA, 1899 bp, Zea mays
  Peptide Sequence Number=SeqID_54728
atgctcttggggttcatcgtctccgagcggggcatcgaagccaacccagagaagattgcagccatcaccagcatggggcccatcaaggacttaaaaggcgtacagagagtcatgggatgtcttgcggctctgagccgcttcatctcacgcctcggtgaaagaggcctgcctctgtaccgcctcttaaggaaggccgagtgcttcacttggaccccagaggccgaggaagccctcagaaacctgaaggcgctcctcacgaacgcgcccatcttggtgccccccgctgccagagaagccctcttgatctacgtcgccgcgaccacccaggtggttagcgccgcgattgtggttgagagacgagaagaggggcatgcattgcccatccagaggccagtctacttcatcagcgaggtactgtccgagaccaagatccgctacccacaagttcagaagctgttgtacgcggtgatcctgacgcggcggaagttgcgacactacttcgagtctcatccggtaactgtggtgtcatcattccccctgggggagatcatccagtgccgggaggcctctggtagaatcgcaaagtgggcggtggaaatcatgggcgaaacaatctcgttcgcccctcggaaggccatcaagtcccaggtcttggcggacttcgtggctgaatgggtcgacacccatctcccaacagctccgatccaaccggagctctggaccatgttcttcgacgggtcgctgatgaagacaggagccggcgcaggcctactcttcatctcgcccctcgggaagcacctacgctacgtgctacgcctccatttcccggcgtccaacaatgtggctgagtacgaggctctggtcaacgggttgcggatcgccatcgagctaggggtccgacgcctcgacgctcgcggtgactcgcaactcgtcatcgaccaagtcatgaagaactcccactgtcgcgacccgaagatggaggtctactgcgatgaggttcggcgcatggaagacaagttctacgggctcgagctcaaccacatcgcccggcgctacaacgagactgtggacgagctggctaaaatagcctcggggcgaacaacggttcccccggatgtcgtctcccgagacctgcatcaaccgtccgtcaagatcgacgacacgcccgagtccgaggcaccctcggctcagcccgaggcaccctcagctcggcccgagacatccttggttcagcccgagaaggcacccgggggctacacgcacctattggtcaccatcgacaaattctccaagtggatcgaggtccgacccctaaacagcatcaggtctgagcaggcggtggtgttcttcaccaacatcatccatcgtttcggggtcccaaactccatcatcaccgacaacggcacccagttcaccggcagaaagttcctggacttctgcgaggatcaccacatccgggtggactgggccgtcgtggctcaccccatggcgaatgggcaagtggagcatgccaacggcttgattctacaagagctcaagcctcggatctacaacgacctcaacaagttcggcaagcgatggatgaaggaactcccctcggtggtctggagcctgaggacaacgccgagccaagccacgggcttcacgtcgttctttctagtctatggggccgaggccatcttgcccacagacttagaatacggttccctgaagacgagggcctatgctgaccaaagcaaccaagctagtcgagaacactcgctggaccagctggaagaggctcgggacaaggccttactacactcggcacggtaccagcagtccctgcgacgctaccacgctcgaggggtccggtctcgagacctccaggtgggcgacctggtgcttcggctacgatag

SEQ ID NO: 12950 - DNA, 1836 bp, Zea mays
  Peptide Sequence Number=SeqID_54729
atggccgtggctccgcctctctcaacccacgtctcccgaactctaacctcaaacctgcacctctggccgcggacccacggtggcgtggctcatgcgcggacgcgggctctgatcccgacaccggctgcggcgtgcgccttccgtttcagtttccgtgttcgcgccaccgccagtggctcgaagctgccgccttatcctctacccgatgtcttcccctacattaccgccgagtgggaggccgtcgcgaagggttgggcgtgcgccgccgtcgccgtatactgcctctcccgcgcagtgcccgccgcggggcgcctgccgcgcgcgctcgccggcggcggcgggggagggggcgcggctgttgtggtggcagccaggggcggggtcgccctcgctgcgtttgcatcggcgcgtgccgccgctacatacgcgcagcaggcgtttctctgggaggcggcgctgcaggcggcggggcggctgcgggagcgcgccttcgagcgcctcctagagcgcgatctcgagttcttcgagggtaggggaggggtggctgcgggcgacatcgcgcacaggatcaccgacgaggcggacgatgtcgcggatgccttgttctccgtgctcaacgtacttccatctatgctgactgtgaaggcaaacaatggggaacttaaggagatcatgagattccaaaagttagctcgtgctgatctaaagaataatttgagtaagaagaaaatgaaggctctcatacctcaagcggttcgagcaacatacattgggggcctgcttgtgctctgtgctgggtcgatagttgtttcaggctcatcctttgatgctgaagagtttctgtctttcctaacagcacttgctcttgttgtggagcctattcaggatgcagggaaggcatacaatgaatataagcaaggacagccagcattagaacgcatatttgatcttatgaggttcaaccctaagaaggtgctccacgtatatcctgtatccaaatggcagaaggcacttgtagattgctcgtttaggaacaagggatactggatgaaaggcatggtgactgataagccaagggcaattcatttacaaagtattaatggggacattaagttccatgatgttacatttagatatgttgatgacatgcctccagtagcagatggtgtgaatcttcatattagaccgggagaaataattgctttagttggaccttctggtggaggcaaaactactcttgccaaattactcctccgtctttatcatccacaaaaagggtatatacttctggacaaccatgatattcaggacattcaatcgcaatgcctgagaacacatatcgcttttgtttcacaggacactatgctattttctgggacaattgctgaaaacattgcttatagagaccctgtgggagatattgacatgaatagggttgagtacgctgctaagattgccaatgctgaggagttcattaagatgttgccagaagggtacaattcaaatgtgggacagagaggttctagtttgagcggtggacagaagcaaaggttatctattgccagggcaatctatcaaaattcctccatattgataatggatgaagcaacttctgctttggatatcagatctgagctgctactgaaagaagcgcttagtaatctaattgcaaaacactcagtaactgttatcatcattgctcatcgacaggaaatggtcctaatggctgacaggattatttcactagagcgcggtgaattgcgagagatgtcgaaacaggcatttttgtctcaagatggtcacttcagcttaccaaggatcaggagtccaaattag

SEQ ID NO: 12951 - DNA, 339 bp, Zea mays
  Peptide Sequence Number=SeqID_54730
atgggggatgtcggacggtcggacgggcgtcaagccgtgaagcgcgcgggggtacgttacgtggatgcagacgcgattgcggggccggggcgggcgtgcaggcgtcgtcggggacagtatgactgtatgagctttgtcgacaaaaagaaagagaaaggaaaacacggattgtacgttgccaaaccgaacatgtttaggtcatttggtgacccatcaacatcaatccaacgtattcgaattcgaatacagataacttcggatacgaatacaaatacaggtgttttcggatgtaatacggataatcgtgtatcgaatacggaactagtcggacacggatag

SEQ ID NO: 12952 - DNA, 195 bp, Zea mays
  Peptide Sequence Number=SeqID_54731
atggcgccgccgtccctggtcggggcaccgccgatttttactgtatattttattcatctgtttggtgtgatgttgattttggctatggtatgtattgtgttgatgcgagtagacgagcaagccactgtggaaactgaggttcaacaagtagaagtagctgagcaggagctcattgaaggcaagttgtgcccttga

SEQ ID NO: 12953 - DNA, 915 bp, Zea mays
  Peptide Sequence Number=SeqID_54732
atggacagtttagagaaagcccttttggtctacaatgatatgtgcagagaaggagtcacactggatgatacagtctttgttgctgcacttggtgcttgtgctcatggaggtttgttgcaagaaggttggagcatctttaatcaaatggttgagtactgtcgcattgttccaagaatggagcactatggatgcatagtggacctacttggtcgagctgaatcaaggacgtccagtgagacttcagagtttgctagaaaatgggtaccatttgttaagaagtacaacattgaacctagagctcctgaatggtacttctcccagaaaattgattacttgaagcacaaagtgcacccttcatttgttaaagaccgtcgggccatgaagagagaatatgtagaattcaaagttatggtaaatggccttgttgctaaggcacagaaagttcccgaggaaggatggatcgtgcaagatttcacaccatggccaggaaacaataccagggaccatcctggaatgattcagcgtcctggattccagcatcacaagaaagctggtgccatgaatgctcttgttcgtgtctcagctgtgcttaccaatggacaatacagggcattctggagactgtctgatggaagccaacgtatcagcatggaagttgtgctggagatgctgatggaagttgaggccaccacatatacgtttacatttgacgaccacattttggctattaacagacatgactattacagatgcagttttcaatactattattgcaatctcgaggacggagagtacgtcttgatccaagagcttgaggcacaacaagaagaagctcgagaaccagctctcgaactcgtcgccgaagaaccatccgctgcaccctcatttgaaggcaagccccagttgtatgcataa

SEQ ID NO: 12954 - DNA, 1311 bp, Zea mays
  Peptide Sequence Number=SeqID_54733
atggaaggcaacgacctaccccctggaaacatgttgcaaggggctccctatgatagtttagacttacatggcgactctatggcaaaacatgccccaaactcaggaaaacagatcttcagcagctcccagatgccggggactttcacaatgtctatgaccagggctacagaacctgatgactttcctgggtttcagttcaaagaacatggaaagagtgatgaccaccaccaccaccaataccatagtcatcaccaaaagaactgcatgagtgatggtgaagaacatgatatggctgaagatgctactgataccccaagtggaaaaggcaagaagggctctgcatggcatcggatgaagtggacagattcaatggtaaaacttttgattacagcagtgtcttacactggagatgatcatggtgctgattctggtggtggcaggaggaacattgcaataacgcagaagaagggcaaatggaaggcgatatcgaaggttatgggagagagaggttgccatgtgtcaccgcaacagtgcgaggacaagttcaatgaccttaacaagagatacaaaaggctgatagacatccttggcatgggcactgcttgcaatgttgtggctaatccagcacttcttgatagcatgaatcatctttctgataagatgaaagacaatgcaaaaaagatacttagctcaaagcacttattttatgaggagatgtgttcctaccacaacaacaaccgtgcaaatttgcctgaagatcatgcacttcagcattcactactgcttgcccttagatgtaaagaggagcatgatcttcggagagcaagtggagatgctgatgaagacgatcgaagtgcggattctgattatggggagaatgatgaagagcaatatcctgtgcatacacgcatgagggagccctcaaccaccaaaaggaagcgccacagagatgtggctttggtcacatcaaactctcatgaaggcagtgagaggtctgatccccatgatgtaacagtggacatcaacaaggctttcacagatgcaaccaacatggttttgttgcaacaggacttggcttcacaagccatagagattcagaaacgtcgcttgcagattgaagcaaaggaactggaactcacaaagcaacgtcacaagtgggagcggttcaggaagaagaaggacagggagatagaaagaatggcactggagaatgaacatatggtgattgagaacaaacgcttggaacttgagctgagacataaggagttagagctagagcttaagctgaaaggcaaggggaaccatccataa

SEQ ID NO: 12955 - DNA, 177 bp, Zea mays
  Peptide Sequence Number=SeqID_54734
atgcccgccgcccgttctacgatcaccgtggaactccccgccgtgtctgttgcccagcgcgcgattgttcgacgaagttgccccgtgccgccgttagcccgccttgccgtgtgcagcgccctctggtgctcctgcgccggcgcgatgcccatggccgagtccgctagaccgtcctga

SEQ ID NO: 12956 - DNA, 1134 bp, Zea mays
  Peptide Sequence Number=SeqID_54735
atgggtcaacaagaggagccaacttcttctaagttatatgcttttgcatgtgatggacacaagaagatgaaaggcaagaagaaggctccaagctcaagtgaagaagaggaagaagaagaagatgatgatgatgaaagagatcaaccctcaacatcatccttcgaggatgaagaaacagttcgacgcgacaaaaaggtaatggggatgattcacaagattaatctaatggatgtgcccctacaggttgaggatcttctctttaacattgacatgaaaaagcaaagaaagagagtatgttttgcatgcggggagaagggccaattcagagacaaatgtccaaatatggtcgaaccaacaaagaggggggcaaaggcaaggcactcacaagtgtcaagacttgggatgattcttcaagtgaacatgatcctccaaggaattgcagccaccggtcttcatcacgctcttcatggttacctcacaaatgccttatggcaagaggttgctcacctcgagcagaagcgctggagttgcgaaggaacgacagaggcgcaagggatcgacagggcgacggtggtggagctccgactgcacaggaggaactccggtgagcgtggaccgggcagaccaaagggattaggggcgaaccgaagggtgtttcaggtggcgggggatagtgcagagcttactggggcaacagacacagcggggagttccacggcgaccgtagaacaggcggcgggcgttggtaggcggtggcggggctctagtcgcgcgcgcagagcgagagagagggcgagggggtttggcagagtgcgcaaattggagaggggaggtgggcgagcagggcgcggggctcaaaagaggcacgggggcgcggacgtggctggagaacacgcgcacgtgggcgcgtccacggcgggggatcgtgggcgagaggttagggatgagctgataggtgcgaacggcgggacagagagagagggagcgggcgcgcgcgagggaaacagcgccgacaggtcggtcccaccgagcagcgagagagagagggggggagtgagcgcgctcaggtttgcgccgacaggcgggccccgcctgtcaggcaccgggggcgggcgggcgcggggcctgggctaa

SEQ ID NO: 12957 - DNA, 228 bp, Zea mays
  Peptide Sequence Number=SeqID_54736
atggtgggtacaagtgcggtcactgcacggtggcagccggggtcagtggagcattgtacgcttcaggacatggttgatggtgtgacttggcctaccaccctgccatcgggttggacggtcgagtgggatgctgctcagcaggagaggagcaggaggagtagtgggctaggccttgccctattcctcactttcgacgatatcaattatccgcttcaatctatcttatga

SEQ ID NO: 12958 - DNA, 183 bp, Zea mays
  Peptide Sequence Number=SeqID_54737
atggggatggggtatagaaaatttgcaatccgccgagaaagtgatttaaaaaaggtggtggaggtcgtcagtgagcttcaatccgggggcctggtgcagtggaacttcgcggcaaagctcagggagcttggcagggctttcgtgaagctgttcccgagctcagtttgggacatggagggctag

SEQ ID NO: 12959 - DNA, 312 bp, Zea mays
  Peptide Sequence Number=SeqID_54738
atggcgggcggcgcggagctcgccggagtaggggttttgctcgggaaaggtctcctccagcagctactccagcggcgggggcgtccaatcgtggtgcaggggacgcctccagtgggggaacgggggagcaacgcctcacaggctccacctcttgctgaggcggggagcaagagccctgctgctccagctcctggtgccgatgctcctgctccacgtgaaggcggtggtgcaacctctccaagtggctggactggccagtcactgggcgacaaagcggaagctccgcaagacaagaggacaagaaaggaatga

SEQ ID NO: 12960 - DNA, 165 bp, Zea mays
  Peptide Sequence Number=SeqID_54739
atggggctcggtgtattcggctcgttctgccgagggtggtttgccccttggggaggagtgcggagttccaagactatgatgagttgtaggtgtgggttagcggcaaacccccagtcggctgcctgtgaaggccgtgtattgctacgtttcgttttcaccctttga

SEQ ID NO: 12961 - DNA, 330 bp, Zea mays
  Peptide Sequence Number=SeqID_54740
atggagtcaacactcctcgttaatcctcgttggagcacttacatgagggtgtcactcccctttggatcgcacaagaaccaaccaaaccccttcaccctctcgctttgctctgcacgcgtgaccagagagctctgctaccgcccaccgacgtccaccgctcgttctacggtcgccgtggaactccccgccgcgtctgttgccccgccggagctccgccaccgtcgccccgaggcgtccctgcgcctccgccgttgcaccgttactccagcgtttcctctcaagccgttagatctcgggcatccgtccgagatcgggcggtttaaaccttag

SEQ ID NO: 12962 - DNA, 219 bp, Zea mays
  Peptide Sequence Number=SeqID_54741
atgtcgcgcgcgtttgacgactactatatcaaggactgtggtgtcatctcggcgccggagctgggatcgaagagcatcggctccggctgctgcatcgctttcagcggcgcggtcgcttcctccccaaccccaacaactccatcacgcttcacacgcggagaagaagcagacagtgcagcagaagaggaaggctccaaaaacgcagctgatgagtcgtaa

SEQ ID NO: 12963 - DNA, 309 bp, Zea mays
  Peptide Sequence Number=SeqID_54742
atggtggtggccccctgggtgaggttaaacaaggaatacatgtataaatctaggaaatccttaattaggttatcccatcaaattatgcaatatatcaaaagagagagggagggaagaagaatggtctgccagagggataacatggtcttcaatggccaccactgcgtcagtttccaggagaataatggagaggagggagaagaaaggaaacgccagggagcttcatggggcaccgacggccttcaaacaccatcaatggcgacgttagagagaataatgggggagggagtaatggagcagaaacggtag

SEQ ID NO: 12964 - DNA, 2751 bp, Zea mays
  Peptide Sequence Number=SeqID_54743
atggatgtcgccattggcagatctgggccgaacgagtcccccgtcagcaggggcaggccgagcacgccatcctccaaccaccgcccctccacgccgtcctccaaccaccgcccctccaccccgggcggcaccaggaggagcagcgtcggcacgccatccacgccgcgctcccgcagcaacggcgcgggccccttcaagtccgagcccaactcgccgccgtcggccgccgcgcagaagccccgcctctcgttcgaccgctccccgagatccggggacaccaagcccgtcgtcgagcgccgggtgcccaagatcggcacgactcctgaaaagcatctccggagggaggccgaactgcaggcgcggcttgagtccgcccaggaggacctgaagaaggcgaaggatcaactggcattcatcctcggagagagggaccgtcttgtcggggagctcaacgaggccaagagagtcgctgatgagactcacgagaagctccaggatgccctcatggccaagaggtgggccgaggaggccactgagatcgagaagttccgggcggatgagctcgagcaggcaggcatcgacgaggcgcagaggcgggaggacgagtggcagagggagattgagtgtgtgcgtggccagcatgccgctgacttggagagtctggtcaacacaacggaggaggtggagaggctcaggcgtgatctttccatggcgaacgaggccaagaaggctgcacttggccacgccgatgatgcaatgaagattgctgaagtcaatgcagagaaggtggagattctctcaaatgaagttgttcgcttgaaaggcttgcttgattcgagtgctgccagcgaagagagtaagagccgtgaagctgagcttcttgttaagaatctggagtctgaagtttcatctctgaaaggcaaacttgaggaggcaaaagtccttgaagacaggttagccgacgcagaaaaaatgattgaggagcttaaatcagagatagctaatgcgcagaaggtcgaggaagacatccgtcagcagttagaagaatggaagcagaagtcagtatcacttgagatgaaattggaggaagttactctatctgagaagttcaaaagtgactcacttgtttccacgactgaagagctgtacaagatccagtcgatattgcaagatcgagaatcggaaattgaagttcttaaaggaaagacaactgccttggaaatcgaggtgacaaggcttttagcagatgtgactgattcaaatgagcatcttgatgcatcacagcaagaggtgtttgggctgcagacaacaatagatgttctgaagaacaagcttgaggctgcagagctagctgcctcagaggctttggacaatgagaggactgctaccacaaagattgaagtcctgactgaggagaaaaccaaccttattagtgagctggatgacgctagagacagagaggagagagagaaaagggcaattgaggatcttactgctgcattggataaggtaactggtgaagcacaggaagcacatgataggtgtcagaagaaagaagatgattatgaacatgcccttgcgcagataggtgatctgaagatggccctgaagagtatggaagagacttatgaggtaatgcttgatgagtcagaacaggacataactggcctaagggaaactgtggagaagctggaagctgaggtgagcaagtacagagaagaatgtgaatctaaggagcttgaccttatcacggctactaaacagtctgaacaagaaattgctgctcttaaagaagaagcggagcatgtatgtgcatccctgcgaggtgcagagcaggagcttgaagcagtcaatgaagagaaagagaggcttgaggggaaattggcacgcacagaatcagccgttgctgaagccaacgatgctgtgcaggaggcaaaagctgaaaatgagaggcttcaagagaaacttgcacacgtggaatcagaggttgctgaggccaacatggctgcagaggaatctaagaatgagatcgagaggcttcaagagaaactgacatacacagagtcggcggttgctgaagccaacaagactgtgcaagaggcaaaggctgagagttcacagctgaaggagcgattacttgacaaagagaatgcattgcagagcataacccaggagaatgatgagttcaggatgcgagaagctgacgccatgaagaaaatagaggagctatctgccctgcttgccgaagccatgacaaagaagcatcccgaggaggaagagaagctggtggttgttgatgaggcacacaattctggacgtgaagctatccgttctgtggcagaaaatgaagatacagaagaaactgaccataagaaaccaaagcttgaagctgatgcagtcgatacgaactccaacggagaaccgaagcacgacgagaaagacgacagcaaggtggaagaagaggagctgaagactgagctcagcctacaggagagcgacagagctagctctgagaaggaagcacagtccgaaaacaggagacaagaaacagaaccatccaacgacgagttagacccgaagaaggacagcagcaccgagagcgccaacggaacggccgtgccagaggatacggcagcgacgacgactaaagcggcaacgtctcctacgaaaccgcagcagccgcagcagaaaaagaacaagcctctgctgaagaagtttgggagcttactgaaaaagaaaaacagcaagtag

SEQ ID NO: 12965 - DNA, 216 bp, Zea mays
  Peptide Sequence Number=SeqID_54744
atggccgtgatgggttcaacatcgaacaagaggtacctctgccaggtactagattttgggattgaaaatgataaatacgagactagactaataccagaaaggccaacatgcaatgggagtggagagatggcaagagtagcatgtaccctccgtggcaagaggctggacggtggtgtatctgtgctctcggttggcgtgaacccagtctggtcttaa

SEQ ID NO: 12966 - DNA, 611 bp, Zea mays
  Peptide Sequence Number=SeqID_54745
atgctcgcgccgcctgtacttgagatgagcatggagacggagcatgatgtgcggccaatgcctccggtgctcggccgccggctcgagcagtttccgtacggcgggatggtgctagccacggatgtgtgctacaggcacccgtgccacctcgtcgaccccttcaccggctcgcgcgcaccgctgccggacctgcccatccccttctcggagaaggagccggtcgggtgtttcagcgacgagccacgtctgctctgcgcgcgcgtcaccgacgacgggacgcgattctcttggtgccaccgcgccggggacagcgacagcgtggtctttaccaaagcgtaccgcgcgcggcacagggacagccagaggccgccgaggtggaggccagtgctcgacatcggtgaccgcgcggtgttcgtcgacggcgcgcatgggttcacagtcaccgccgacccgacgggagcgaaggcgaaccgcgtgtacgtgatccttgcccatcagctgacgcacccatgtgggcgtctggccgtcgcatacgacgtcggcttcacagaccttacgaggccagagcgcatggggcggctgaatctaaacaccggcgaggttgagccaat

SEQ ID NO: 12967 - DNA, 471 bp, Zea mays
  Peptide Sequence Number=SeqID_54746
atgtggtggcgtccgctgatgcgatcgctcctccgcctgtgtctggcgccctggccaacacgtcggtggtgccagtcgcggtgcggatccacaaggcagggcgaagtcaccgtcaagctctcggtcgtgcctggccgggctagccgcctagctctttcccgcctcccgtggcctgggcgcctggctagggccagctattcaggcgaccaaccgcaccaccgtccccctaccttccacgttatcgtggactccgactatgtctgggtccgcttcttgccatgttcttctcggtactctactgtacacgagaaacgtgggaatattgcatctcccgcgagccaagctcggacaagcctgcatgtgcgtatgcggacaaccaatcatgaggttagagtcgctgctggcatgtctgctggaggtagttttgttcatgttcactctgagaatggtgtgattgatttttacagatga

SEQ ID NO: 12968 - DNA, 363 bp, Zea mays
  Peptide Sequence Number=SeqID_54747
atggcccgatgggtactgttgtgcctgggccgagcaccgggcacgctgggccggcacgggcacagcccgattatcccggaagcacgccgccgtgagggaccgatctggtgctccgactttatcgtcgtgagggaccgatctggtgctccggctttgccgcccgtgagggaccgatctggtgctccgactctaaacttctctgtactagtgctccatgctggcaagaaggatggcattagcacatttctccccacgcaggcacgcagccaagttgacatcgagatcaaactgatagcaccagtcccaacctcagatgcctcaagtataacaccttgtgtatcattatcagcattcctcaagtaa

SEQ ID NO: 12969 - DNA, 162 bp, Zea mays
  Peptide Sequence Number=SeqID_54748
atgggtactgttgtgcctgggccgagccaccgggcacgctgggccggcacgggcacagcccgattatcccggaagcacgtcgtcgtgagggaccgatctggtgctccggctttgccgcccgtgagggaccgatttggtgctccgactctaggtctcaaataa

SEQ ID NO: 12970 - DNA, 1419 bp, Zea mays
  Peptide Sequence Number=SeqID_54749
atggaggcaggggcagggaggagagggatcccctcgctgctgaaatcgccggcggcgcgggctgatgaatccggaggagccacttcgccgcagcaggagcacatcgcctccgatattacccagcttgtaggatggacgccactggtagagctgaagagaatagcccagaaggacaacgtcgacgcccgagtcgtcggcaagctggagtgctaccagcccctctgctccgtcaaggaccgcagcgctctgagaatgatcgaggacgcagaggagagagggctgatctcgcctggcgccacgacgctggtcgagccgacgagcggcaacatgggcatagccctggcgtacatcgatctggcccgaggctacaggttcgtcgcggtcatgcccgccgagtactcgctcgacaagcagatcctgctgcggtacctgggggccgatttggtgttaaccgatcctgcgcttggcttccagggacagctcgacaagctggaacagctcaggaaagaaatacccaacgcgcacgttcttgaccagttcgcaaacgcggcgaaccctgaagcgcactttagatggactgggcctgagatctggaaggatacggcaggcaaagtcgacatcttcgtggccggctccggcacgggaggcacggtctctggcgtcggcaggctcacgggctcacggtcaccgcgtggtcggcggctggacaacgaccagtcggcggctggacaacaacgagtcgacggtcggcggctggacaacgacgagtcggcggccggcggctggacaacctgcgagtcggcgagtcggcggctggacttcgggcgccggtggggcgaggggcctgcgacctacggcagtgctccggccgtccggcggtccggcctccgtgctccgggcgagcggcgctgcgagctccagcggtgctccggggtctgggcgtgggcggctccacctccacggctggcggcggctggagctggagggtataggatagaggaaggatccccggtcggagatccgccactgtacttgaagacgaagaacccggcggtgaaggtcgtctgcgttgagcctgctgagagcccagtcatttcaggcggcaagccttctcggcacaagatccagggcgtcgggccgggattcgtgcccaagaacctggacacctctgtcaccgacgagatcgttacggtgaccgcagaagatgcgatggcgaacgccaggaggttggccagggaagagggtctgctagtgggcatatcgtctggggcgaatctggcagcttgcctcaaggtggcgtcgagacaggagaaccgagggaagatgatcgtcaccgtgtttcctagcggtggcgagaggtacatgagctccgatctcttcgcggatgcaagggaggagtgcgtcgccatgaccttctga

SEQ ID NO: 12971 - DNA, 1065 bp, Zea mays
  Peptide Sequence Number=SeqID_54750
atggatggcgaggaggttggcaggaggggtattcctactctgctgaagccgtcttcctcctccagcgacggcagtgccggggaacaagagcacatcgcttctgacgtcactcagctcataggatggacgccgctggtcgaattgaagcgaatcgccagcgaggctgggatcgatgcgcggatcgtcggcaagatggaggcttaccagccactttgctccatcaaggaccgctctgctttgagaatgatagaggatgctgaggagaggggattgatttcgcctggagtcacaacactggtggagccgacgagtggtaacatggggttagggttggtcctcttcgctattcagagaggttacaggctcattgcagtcatgccggctaaatactcgcttgacaagcagatcttgctgaggttcatgggcgcggagctatacttaactgatccggcccttggctttccgggcatgtttgacaaagttgaacagctccgaaaacagctgccaaatgtacatgttctgaaccaagtcacgaacaaagcgaattctgaagcccacttcagattgaccgggcctgagatctggaaggacacggcaggcaaggtggatgtattcgtagccggttcaggcacaggaggcactgtttctggcgtcgggaagtatctgaagatgcaaaagccaggcgtcaagatcatctgcgttgagcctgcagaaagcccagtgatttcaggtggcgcgcctggcaagcataaaatccagggagtaggcccagggtttctacctgaagttctggacacctcggtcatcgacgagaccgtcaccgtgagcaccgaggaggccatggcgaatgcgaggaggctggccagggaagagggcctgctcgtgggcatttcttccggagcaaacctggcagcttgtttgaagcttccctggctgaaggtcgcttcgagacaggagaacaagggcaagatgatcgtcactgtgttcccaagtggcggcgagagatacatcaactccgacctctttgcagatgtgcgagaggagtgcattgccatgacattttga

SEQ ID NO: 12972 - DNA, 612 bp, Zea mays
  Peptide Sequence Number=SeqID_54751
atgccacccaagttaacctcggaagaatctgttgcagtagttgttggccgacgccgtaaaaattgggaacacatcttggcgttcaccagcatcaccacggttccgccctcgccctcccccgtcaatctcgcagcggcgcccgcccccgacatcctcgcctccgcgctcgctctccgtgaatggaaggcgccattcagggagcctccgcgtccgcgtccgccatcctcgggctcgccccgctcaaactcgatgggcctcgcccctcgccgttgcgagattgggcacccgcccccgacgccctcgccggcaatccagggctgctacgcccccatcctcgccccgccccgtcataggtgtctcttccccgcccgcgtgatgcccgtcgtagtccctcgcccctcagtccctatccaccggtgcggcatggagcccaagttgtcttcggtcggcgttcgcgacctacgtcgtgtcgtcatccccacccctgtcctcgtcgtcctgctcgacgcccgccacgacctccaccgcgtcatcatccccacgcccgtccggaccccctatccccagcatcgcagcgcctcccgcacgaggtcgatgcgcttgtcgatctaa

SEQ ID NO: 12973 - DNA, 255 bp, Zea mays
  Peptide Sequence Number=SeqID_54752
gttgatagtgggcttgagcaagctcagactttcgagttaaaagttctttatgttgatcagctttgtaatcttgcatcgcagagagtctattcttcaatgctctccttcactgtaccagacataaacagtgccgtatcgaagctaatggcattgggagccgagttggatgggccaatcaagtatgagatccatggaaaagttgcagcactgcgatgcatcgatgggcacatgctaggcctgtacgagccagcttga

SEQ ID NO: 12974 - DNA, 825 bp, Zea mays
  Peptide Sequence Number=SeqID_54753
atggagacggagcatggtggccacgaagaggaatcggcgatgctcccgtgcgtcgcgttcgcatcggagcacggttacaagttcttctccctcgcccacatgcgcatgcttaacagcgccgacgtgcggccaatgcctccggtgctcggccgccggctcgtgccgtctccgtacggcgggatggtgctagccacggatgtgtgctacaggcacccgtgccacctcgtcgaccccttcaccagctcgcgcgcaccgctgccggacctgcccatccccttctcggagaaggagccggtcgggtgtctcagcgacgagccacgtctgcgctgcgcgcgcgtcaccgacgacgggttgggcgtgggactggcccgcacgaagatccctgcgccgccgggcttcggcgacgtcgactacgcctacctagcgccatctacggacgacgcgattctcctggtgcaccgcgccggggacagcgacggcgtggtctttaccaaagcgtaccgcgcgcggcatagggacagccagaggccgccgaggtggaggccagtgctcgacatcggtgaccgcgcggtgttcgtcgacggcgcgcatgggttcacagtcaccgccgacccgacgggagcgaaggcgaaccgcgcgtacgtgatccttgcccatcagctgacgcacccatgtgggcgtctggccgtcgcatacgacgtcggcttcacagaccttacgaggccagagcgcatggggcggctgaatctaaacaccggcgaggttgagccaatgtggggccgtccgcactggatcataccttggaatgaatcgggtcgtcgttaa

SEQ ID NO: 12975 - DNA, 255 bp, Zea mays
  Peptide Sequence Number=SeqID_54754
atggcggcggcgacgctccggtgggtgctgcagctgcaccgggacgtaccgcgggcagcacggttctactcggagggtctcgacttcagtgtaaatgtctgcacgctccgctgggccgagctgcagtcggggccgctcaagctcgcactcatgcacaccaactacagtaagaccagccctttcctaggagaggatctggttccagatatcgagagcgaaagggcattgcaagcagaggttgatagtgggctttga

SEQ ID NO: 12976 - DNA, 624 bp, Zea mays
  Peptide Sequence Number=SeqID_54755
atggaggcaggggcagggaggagagggatcccctcgctgctgaaatcgccggcggcgcgggctgatgaatccggaggagccacttcgccgcagcaggagcacatcgcctccgatattacccagcttgtaggatggacgccactggtagagctgaagagaatagcccagaaggacaacgtcgacgcccgagtcgtcggcaagctggagtgctaccagcccctctgctccgtcaaggaccgcagcgctctgagaatgatcgaggacgcagaggagagagggctgatctcgcctggcgccacgacgctggtcgagccgacgagcggcaacatgggcatagccctggcgtacatcgctctggcccgaggctacaggttcgtcgcggtcatgcccgccgagtactcgctcgacaagcagatcctgctgcggtacctgggggcagatttggtgttaaccgatcctgcgcttggcttccagggacagctcgacaagctggagcagctcaggaaagaaatacccaacgcgcatgttcttgaccagttcgcaaacgcggcgaaccctgaagcgcactttagatggactgaacggctccctgaggccacaattggtggagcaccaagaatctga

SEQ ID NO: 12977 - DNA, 681 bp, Zea mays
  Peptide Sequence Number=SeqID_54756
atgcacgcaactaatatctcatatactgagttactgactgcttcggcaatcttgaaattcaatctaaacgtggagttcgaagatattctggagaaaaggtttcggttcgccgtgcccgtgcgtacgtttggggttgtttacttgtttctctctcgcttcttcctggcggcggaagacagagaagggcgagcggccgcgcggaacatcgacgaccgagaggccccctcgtcagcaaccccatctgctattctccctgacggcattctggcagcaagaacaaaaaagcgtggtctgcatagtatcccgagtatttcggcttacctctatgtccagttccaggttgaaaaaggattgaaagacatggtccatattgtggcaaccaagacagaaataaagaacaaatgggacaagttgaaagaattcaaggcatggaagaagttgatgaggcagacatgtactggacattccaagttgtgggaacttcaaaatatggaggaactagaaatatgttttggcagcatcacaagtattggttttgatcattggtctcctcatatggccactgcttccaccattgctgaacaaggaggtacaccacacgaggcaatcaattgtgacacacaagaagatggtgacaccaatgaatgtgaagtttcaccggtcaatccaaatggcaagtga

SEQ ID NO: 12978 - DNA, 2115 bp, Zea mays
  Peptide Sequence Number=SeqID_54757
atgagtggtggacagaaacagcgaattcagattgcaaggtcagtgtatgaagatgcagatatttacctctttgatgatcctttcagtgcagtagatgcccatactggaagccagcttttcaaggattgtgtaatgggaattcttaaagataaaacagtgttgtatgtgacccaccaagtcgaattccttcctgccgcagaccttatattggtgatgcaagatggtaaaatcgtgcagaaagggaaattcgatgaacttcttcaacaaaacatagggtttgaagctatagtaggtgcacatagccaggctcttgaatctgttataaatgctgagagttccagcagaatacagtcaggcaaccaaaaatcagcagatagtgaggatgagttcgatacagaaaatgaaacggatgatcaacttcagggcataacaaaacaagagtctgcacatgatgtctcacaagacatcagtgacaagggaaggttaacacaagaagaagaacgggaaaaaggaggcattggcaagaaggtttactggacttacctgagggcagttcatggtggagccttagtgccagtaacaatagctgcacaatcattctttcaaatcttccaggtagccagcaactattggatggcatgggcatcacctcctacaactgcaaccactccaaccgttggattaggcctcctcttctctgtatacatagcactatctatgggaagtgccctgtgtgtcttatttcggtccttgcttgtgtcactgattggtctactaacatcagaaaggttcttcaagaacatgctccactgcatcctgcgtgccccaatgtccttctttgattccacacctactggtagaattttgaacaggcgctactacataccaacagcgagagagttggctcgtttatcacaaattcaaagggctccaatcctacaccattttgcagaatcgctggcaggagcatcaagtattagagcatatgcacagaaagatcgtttcagaaaagcaaaccttggtcttgttgacaaccactccaggccatggttccataacgtttccgcaatggagtggctttctttcaggctaaacatgctatccaactttgtctttgccttttctttgactctgctagtgagcctccctgaaggttttataaatccaagtattgctggacttgcagtgacttatgcattgaacctcaactcacagctggcatccataatttggaacatttgcaacacagaaaacaaaatgatatcagttgaaagaataatgcagtactcgaggatccctagtgaggctcctctcatagttgatcactaccgccctccaaacagctggccagatgctggaactatcaatataagatcattggaggttcgatatgcagagcatctcccatcagttttgagaaacatatcatgcacaattccaggaaggaagaaggtggggattgtaggacgtactggtagcggaaagtcaacttttatccaagcacttttcaggatcattgaaccaaggggaggaacgatccaaatcgacaatgttgacatcttgaaaatagggctgcatgatttaagaggaagactaagcatcattccacaggatccaacgatgtttgagggaacagttagagggaatctggatcccctgaatgagtaccctgatcatcgtgtgtgggagattttggacaaatgccagcttggtgatatagttcggcaaaacccaaagaaattggactccatagttgtagagaatggggaaaattggagtgttgggcagagacaactattttgcctcggaagggttctcctaaagcgaagcaatgttcttgttcttgatgaggcaactgcttcagttgactcctccactgatgcagttatccaaggaacgatacgcgaggaattcaggaaatgtacggtattgacaatagctcacagaatccacaccgtaattgacagtgatctcattcttgttttcagtgaaggaagaattatagaatatgacacaccctcaaaattactggagaacgagagctctgaattctccagactcataaaggagtactcacggcgatcccatggcttcagtggaacagcaaacaattga

SEQ ID NO: 12979 - DNA, 1242 bp, Zea mays
  Peptide Sequence Number=SeqID_54758
atggaggaaccgcctcagctgttcttgtgccccatatccatggagctgatggaggaccccgtcacggtgttaaccggcgtcacctacgatcgcagcagcatcgagcggtggttcttcaagtacggcaaggcgacgtgcccggccaccatgcagcggctgaattccttcgacctcacgcccaaccacactctgaagcgcgtcatctccacctggcttgaccacgcctcctccccctcctcatcgtcgtcgagcacgccgctgtgtaataagctggagcgggaaaagctaccgtcggtgttcgcgagcattgaggccacgccgttcaaggtcaccgcgctcaaaaacctcaggcgctgcatggacggagacgtggcagcgcagaaggacttcgtcgcctacggcggcattcaggtgctcggccgcgtcatgacacaggcgctggcggagagctgcgccggtggagacttctcatcgttccggacgtgcgaggaggccggcgccgtcctcgccacgctccctctctccgacgacgcgtcggtggagctcgtgctcaaacccgagtgcatgaagcccgtggtcgcggtgctgcagcgcggcagcgccgagtctaggctgcacgctatggccatcctcgctaagatctccagggccatcggcgccgaccgtgactggacccctggtgtagacgtcgacgacctggtcaagtccctcctcgagctcctgtccgacggtgcctcagcgaagctgagctaccgcgcgctcgacgtgctcctcgacgtcacggcgcgctcccgcggcgcgcggcgcgccaaggccgtcgaagtgggcgcggtctgcgtgctcgtggagctccttcccgacgccgagcgccgcatcgccgagcgcgcgctcctcctactcaagcgcctgtgcaagtgccccgaaggccggctcgccttcgtggagcacgcgctggcggtgtcggccgtggcgcagacgctgctgcgcgtgtcgcgcctcgccagcgggctggccgtgagcgtgctgtggctggtggcgtgcgcggtgacgcctgcggagagggtgctggatgacatgctgatgagcggcggtgtggcgaagctgctggcactcctgcaggtggagaactccgcgtcgaccaaggagaaggcggcgaagcttctcagtgtgcacggcgcattctggaggcagtacccgtgcttccccactgacctcagggactacctgaaattcctcaactga

SEQ ID NO: 12980 - DNA, 1435 bp, Zea mays
  Peptide Sequence Number=SeqID_54759
ggggttcagatgggtggaccccattgcctctggcagcgcagaggctcatgaggcttttgttaaggatgtggaggatggtgagaacgaggggtggggctgcagcggtggtgttggggctggcatggcggcggtggtggcaatgcacccatgccaaacggaggatggtggaggacagggccaatctatgggcggagcatggtggcaccagcaggtgcagaaaggagtggcggtggcggcgcgaatgcagcacattctgccgcattatggtcaaggtggtgctgagagattgattgtcgatgcggcttgtcagcttgctgcccacgatcatgatgttcatgtcttcacatcacatcatgataaaaaacgttgctttgaggagactctttctggtttgtttccggttactgtacatggggatttcctgcctcgccatgtgttctaccgctttcatgctgtttgtgcttatcttcgctgcatttttgttgcgctctgtgtgctactcagatggcccttctttgatgtcatattggtagaccaggtttctgttgtgattccactacttaaactaatggcatcatcgaagataatattttactgtcatttccctgatctgttacttgcacaacatactactatgcttcggaggttatatcgcaagccaattgacatgattgaggaaagcactactggtatggctgatttgattcttgtcaatagcaagttcactgcagcaacttttgcaaggaccttttctggtttacatgctagaggaatcgagcctggtgttctttatccagctgtctctgttgagcagtttcacgaaccccatgcttataagttgaatttcctatcaatcaaccggtttgagaggaaaaagaatcttgatcttgccatttcagcatttgctttgctccgttctgctgcttggactctacctggtgatgctctacaagaagcaacattaacagtggcaggtggctatgataagcgtctcaaggaaaatgttgaataccttgaggaactcaaaagactcgcattgacggaaggggtttctggacaggttaattttgttacatcttgctcaacatctgaaagaaacgagcttctctccaactgcctctgcgttttatacactccaaaggatgaacatttcggtattgtacctcttgaagccatggccgcccataagccggtaattgcctgcaatagtggtggcccagtggaaacagttgtgaatgaagtaacagggtttctgtgtgatccctctcccgcagaattctccaaagccatgctgaaacttgtgaatgatcatgatcttgctgtcagattgggtgaacaagcacgtgaccatgtggtgcaaaaattctcgaccaagacatttggtgatctcctcaacagctacgtcttgaacatctaccatgagaggatggaatga

SEQ ID NO: 12981 - DNA, 321 bp, Zea mays
  Peptide Sequence Number=SeqID_54760
atggagaagagaaggaacaccgatagggctgcagggagctatgagcagggtagggaaggagaagagaaaggaagaaactatagaggagaaggtgaggcacgggaggcagacaagatgggaagagaagagttcgagttcgatgccttcttcaacccagtaggaggaggtatggagaaggacgtaaggctacaaatactgacacgtgggccacgatatttccgggcccacgagtcagtttcgcaggcgtcctacatgatagtgacagggccagggaggcatcggagaaagagagataggtcgaccgggcgggaggaactatga

SEQ ID NO: 12982 - DNA, 1044 bp, Zea mays
  Peptide Sequence Number=SeqID_54761
atggccggcctcgacctcggcaccgctgcgacgcgctacgttcatcagctccaccacctccaccccgacctccagctgcagcacaactacgccaagcagccggagccatccgaggacgaccctaatggcggcggcggcggcaacagcaacaacggcggaccgtatggtgagcacgacggcgggtcgtcctcatccggcccagctggagatgcccccggtggcagcggcggtaacggggagatggtagtccgccggccccgcggacgcccaccgggctcgaagaataagccgaagccgccggtgatcatcacgcgggagagcgccaatacgctgcgcgcccacatcctggaggtggcgagcggctgcgacgtgttcgagagtgtctccacgtatgcgcgccggcggcagcgtggcgtctgcgtgctgagcggcagcggcgtcgtcaccaacgtgacgctacggcagccgtcggcgcccgcgggcgccgtggtgacgctgcacgggaggttcgagatcctgtcgctctcgggatctttcctcccgccgccggctccccccggcgccaccagcctcaccatcttcctcgcggggggccaggggcaggtggtcggtgggaacgtcgtcggtgcgctctacgccgcaggccccgtcatcgtcatcgccgcgtccttcgccaacgtcgcctacgagcgcctccccctggaggaggaagaggctcaggcagcgccaccgggcctccagatgcagccacccggcggtggtgtcgatggcgctggaggcatgggcggtgggccgttccctcccgatccgtcggcggctgccgggctgccgttcttcaacctgccgctcaacaacatgtccggtggcgggtcgccgctcccgcccggtgctgacggccatggttgggccggtttgagagaacacgaagatatcaagaagaaagcaatggacggcacgatggttaagggcggcttgcaaaaggtacaattaattgtttttgagttgtacaaaggtgttacatgcctgtgtgtgcaacaacaataa

SEQ ID NO: 12983 - DNA, 177 bp, Zea mays
  Peptide Sequence Number=SeqID_54762
atggcggcggcgggagaagttgccggcgcttcgtcggggacgaggacgaagcggcttaagattgccgtcatccacccggatctcggaatcgttgctcttcctcgttttggcttctcttattcctttattggcctgtcacttactcacttgagtagcaaatcaaaatcaaaagaataa

SEQ ID NO: 12984 - DNA, 709 bp, Zea mays
  Peptide Sequence Number=SeqID_54763
atggagagggggggcctgcactactggcctgctctcgcggggattcttcccaacaagcaggtgcaacagctgttcatccaggggggcttcctcgatgacccgtcaggttctactatattgcatcatatgcaagaatggcaagacctatattcaccttgcttctggatggtcacttttgcactgatacaattgatgttcatcatgagtatattggctcaatttctgttcaagaaattcagatggtggagacagagactgaagggttcagctcctgaaagcaataaacaacatcaggaacacaagattacagatataaagctggacatctcatacaaagcatgcaaagcttgttgcctgcttatactaggaagtcatgttctgagggcagtatttctacagttacatgaaagaataagtgattgcaagtatccaccctttattatttgtgaagtcagggggaaaacaggaatcagattcacagacagcagcgtaacagaggcactattgaatccatctgtgggacagcaggcagaagtcaaacggccatgcccatatggaagagcaaatattcttgaacttgtcaccttctcctggatgaaccccgtcttttctatcggatacaagaaacctctagagaagaatgaggtgccagatgttgatggcaaagacgctgctgagtttctttctgattcatttaaaaagatcatag

SEQ ID NO: 12985 - DNA, 852 bp, Zea mays
  Peptide Sequence Number=SeqID_54764
atgcatggtgtggagatcaccaatgaggtgcttaagagcgtgaagatagggttgaccttccaaggatgtttgaagactattaatagcaaaaaatatggggtcgaactagtgtgcttcactgataacccaaatattgtcttatattcatcaaaaaatggctgggatgaatctctgcgtctactctcactgaatgataatcggtttcttagatattttaaaggtcaccttgacagggttgtctgcatctcattttgctctgagaaagaaaattttctctctggttcacttgaccgtactgttctcttatgggatcaacgggctgaaaaatcacagggcttactgcgtgtgcaagggaggcctgcagtttcatatgacgatcagggcatggtatttgcagttgcctatggtggtcacataaggatgtttgatgctcgaaaatttgaaaaggggccttttgagatcttctctgttggtaataacgattcagaggcccatgtcataaagttcagcagtgatggcaggcggattctgttaaccactaaagctggacgtgtccatgtgctagattcattccatggcaatagcattgcgtcgtgcaatgtgaagccagtggtaaccaactcaacactggaggcgtcgttcagccctgatggaaaccatatcatatctggctccggtgacggtagtgtttatgcttggaatgttaggagtggaaaggtcgcgcgctggggaagcacagacgacgaaccgccgctgattcgattgtttgccctgtgccgctacgatgcgatgcccgtgttctccagtggggatgcacccatttatgacctgccaagctcgctcgctcaatga

SEQ ID NO: 12986 - DNA, 1659 bp, Zea mays
  Peptide Sequence Number=SeqID_54765
atggcttcccagccgaagaagatatccagcgagcccatctctctggttggcccgacgcccgccgacatcgaggccacggcgcagctggagaagctcctgcgcgaagcgggaatgtacgagagcgccgaggagtcggcggtccgcgccgaggtgctgcgcgacctccagggcatcgtcgacctctgggtcaagcagctcatgctcaagcatgggtaccccgacgccatggtcgacgaggcaaccgcctttgtgctcccgttcggatcgtaccgcctcggcgtcctcggcggcggctccgacatcgacgcgctcgtcgtggggccctccttcgtcgaccgcgatcaagatttcttcggtgtgctggccggcgtgctggccgagacggaggcggtgacggagctgcatcccgtgcccggcgcgcacgtccccgtcatgaagctgaggttccgcggcgtgcaggtggacctcgtctacgccagcgtcaacctccccgtggtgccccggaacctggatctgagcgaccgccacgtgctccgcggcctcgaccacgtcaccgcccgcagcatgaacggcgtgcgcgtggccgacgagatcgtgcggctggttcccgacgccgccgcgttccgcacgacgctgcggtgcgtgaagctgtgggccaagtcgcggggcgtctactccaacgtgtccggcttcctcggcggcgtggcctgggccatcctggtggcgcgcgtgtgccagctctaccccaacgccgtgcccagcatgctggtgtctcgcttcttcaaggtgttcagccattggaggtggcccatcccggtgatgctctgcgacatcgagcacgacgacgagctcggactcccggtctgggacgtgcggaggaacctgcccgaccggagccacctcatgcccgtcatcacgccggcgtacccgtgtatgaactgcacgtacaatgtctctcgggccacccatagggtcatcaaggagcagatccaggccggggacgtcgcgtgccagaagatcgccgccggcggcggccgcgactggggcgcgctgttccagccgtccccgttcttcagcacgcacaagagctatctgcaggtggacgcggcggtggcaggaggcgcagaagagctccgggagtggaaggggtgggtggagtcgcggctgcggcagctcgtggccaaggttgagagggacacgttcggcgagctgctatgccaccagaacccgcgtgcctacgacgccgagccacacggcttgcggcgcgcgtcgtcgtttttcgtgggcttgtcgaagccacagcagcagcacaagccgcacccgccggaagggtatccgccgttttttgacctccgtgcgacggtgctcgagttccagcaggacgtctactcgtacaagttctggaggcccggcttggagttggtcgtcaagcacgtccggcggaacaagctgccggcgtacgtgatgcagaagattggtggtcggaatatccatgagctcaagaggaagcgcgccgacgacgactcttcaccttcgtcgccgccattgtgctcgtcgtcctccgcctcttctggcgacggtgactccgtgcaaggaccgagcagcagggcagagctgcatccaagaaaggcaatgttgttcgatcccagtcccagctga

SEQ ID NO: 12987 - DNA, 171 bp, Zea mays
  Peptide Sequence Number=SeqID_54766
atgatgatgagtgccttaatccttcatggagaactcttgctaatgagcagcaatgatgcgtccgagtgtcgaatttgtggtggtagtggactggattactgcctccggtgccatggaactggtgagtatcgtgaacccatgggcttccacttcactgtccaaagaaaatga

SEQ ID NO: 12988 - DNA, 342 bp, Zea mays
  Peptide Sequence Number=SeqID_54767
atgtcgatgtcgtacccggtgttgtcgctggcgagctgcacgacgtgggcgataaaggtagaggtgatcctcaacgcgcaaggtttcttggattgtgtgtctccgttgagtgatggaaaggacggggaggcgttggacaactacgctaggaaggtcaacggcatggccaagaagttcgttggcctcgggtccacgctcgacgatgtcgccatggaacattttgcccgggattgccacaagcccaaggaggaagtcatggcggacacggtggacgacaaggaggagcaaacgatgttgtggagacttgaagtcggcgatgctgggtttagggtcatggcttag

SEQ ID NO: 12989 - DNA, 939 bp, Zea mays
  Peptide Sequence Number=SeqID_54768
atgactgaccgcaggcggcaaggattagagaggacgcaacccaacccacaaaaggacagggcacaggagggtggctccgtggctggcggggcagtgcacggggccagacagggccggtgcgcgtcggcgtcggcgtcacgagcgcgcgtaaacaaaacaggcgtcgccgtcccggtgcctcgtcgggtcaggaaccgggcgggagtcgggacgacgacgagaagaacagaacgggatgggtcctgcgtcttcctgggggcgggacgccaacagatggagcggagggacggtgcatgttctgccgcttgccgctggcgcaccccgcatcccgcccgcctcgccctcccccgcggcaatctcggcgctcgctctccccagcggcaatctcggtgtccaccgccgcctcataacactcccgtctcccacgccatacgcccaagaccgagccgcctagatctgattgggttggctctcgtcgcgggggcgaaggggaagggggaggaagaaccaggaggcgtgcgttcgtccaagatgctgcagctgctgatggcggcggccttctcggcggccccgctgacgctgtacgtgccgccggtgcgcagcctcatcctcttcgtggaggccatggaggtcgtctgccgcgactgcggcccctactcccacgacgtcgtcgcccacttccgcgtcgccctctcccgcgtcctcgccggcctagcccagcccatctccggtcggctacggtggatcgatctaaaggcaacaagactgagatatccaaatctgagctcatacagaagagtgcatactgtagggtttcaggacgggacatggatcttgttgaactttctgcctatggaaatgtccggcgagggccagattcagggggctgcaaaatccaatgaagtagatatatctgaatggcgtcaaagttcgaagtag

SEQ ID NO: 12990 - DNA, 381 bp, Zea mays
  Peptide Sequence Number=SeqID_54769
atgggcaagagcaagaaaggtggtagttcttcgcatcattccggcgacaagcgcaagcccgagccgactcctccttcggaggacttcggcgactcagaacgactcctaggggattgccgcgaggtatggacttacatccgggccgtcgagcgcaccgggctcgagggctcggatgagtcggagtactcctcggacgaggagaactcctccgacccgtctgaggagggcagcggcggcgacggcagtgatggcaacgatgacggaggcgatggtgacggcggcggcggcaagggcggcggcggcaacggcaagggcggcagcggtgacggtgacgacggcagcaagggtagcagcaatggcagcaacaaggccagtggctag

SEQ ID NO: 12991 - DNA, 393 bp, Zea mays
  Peptide Sequence Number=SeqID_54770
atgggtgtcgagtttggatgtagggggcctcatggggatgaccccaggcaatggcgccgccacgagcaagcaaatgaggacccaggtgttcagcaggtgaaaagtgctgagcaggagcttgttgaaggcgttgaccggccgattccgaccacccccgccgtcgagccgtacctcgctgtgaccgccagaacctcccggagccaaccccgcccctcgccggacctccctcgctgccgcatgcatatatcttattcattgcattcaatagattgcaacctcgtggacggagagtacatcctcgtgccagagcaaggagttgctcaggaggtagccccggatccagcaccagagcctgccccagctttggaaggcaagccccggttttatgcataa

SEQ ID NO: 12992 - DNA, 2439 bp, Zea mays
  Peptide Sequence Number=SeqID_54771
atgacgacgcgcaggcccagccggaagcggaacgaagactccgcaaattcagcagataacccatcaagtgttgcctcttcttcaataacacaatcaacagcagcaactatcaagtcagatgatcctgcatggaagcattgttattgtccagatttaaagaagaagcattcactaaagtgcaactattgtgacaagttgatcaatgctggaattacaagagtgaagtaccatcttgctaacattggaggctttaatgtttctaagtgcaagaaagtgccaactcctgttaaagaagacatggtggctttgcttacaaagaattgtgatgcaaaggagaaaaaaagaaaggaaaaacaaagggaaagagatgaaattgatcttgataattcaggaggtgataattcaagtgaagaagagagtgaacatgggaatgatgttattgtgctcaagtcaacaaaaggtggcagtagctctagattagcaacaactggtggcactattgataaattctacaaacctgagtcaattgaagaatctgtccaaaagaacaaaagaggattaagcactagccaaaaaattcaaacacaattgacaactcagaaaagagaggagaggagggatagagcttgtgagtatatatgtcaattcttttatgaagctggtattgcacataacacagtcacccttcctagctttgctcatatggttgaggcaattggagcatttggtagaggtttgagaggtcctagttcctatgagatgagcggaccattcttgaaaaatgcaaagaaaaggtgtttggatagatttaagagccaccaagaatcatggcaactcacaggttgtacaattatgacagatgcatggacagatagaaagggtcgaggggtaatgaatttagttgtccacagtgctcaaggggtctgtttcttggattctgtggactgctccgctgtgaagaaggatggcaaatatatttttgatcttgtggatagatgcatccaagagataggagaggaacatgttgtccaggtggtcacagataatgctagtgtcaatacagcagcagcaagtctattggcagcaaagagaccctccattttttggaatggatgtgctgctcactgccttgatctcatgcttgaggaccttgcaaaaattggagctgttgaggaaacaatttctagtgcaaaacatgtgactgccttcttatatgctcatacaagagtgttagatttgatgaggaaatttttggggaaagatttggttcgttctggagtgactcgttttgccactgcgtatttgaatttaaaaagtttacaagataacaagaaggatatctcaaggctctttagatcagatgagctcaatgagttgggttacttgaaaaaggcgaagggcaagaaagccaacaaagtggtgagatcagaaggcttttggaaaaatgttgacatggccgtcaatttctttgagccattagctaatgtattgaggagaatggatagtgatgttcctgctatggggttcttgcatggatgtatgcttgaggcaaagaaagaaattgctatgaggtttgacaataatgaaaatagcttcaaagttgcttgggacataattgacaaaaggtgggacaacaagctgaaaactccactacatttggcagggtattatttgaacccctatttttattacccaaacaagtcagaaattgagcttgatggttcatttagagctgcagtaattgcttgcattaccaagacagttgaagatgaagaaactcaagataatataattgaagagctaaatgtatatcaagaacaacaagggacatttggacatgacattgcagtaaggcagaggagaaataagaacttcaatccagcaaaatggtggctgaatcatggcacaagcacaccaaatctgaggttattagcaacaagaatactgaatttaacatgcagctcctcaggttgtgagcggaattggtcggattttgagcaggttcacacaaagaagagaaacaaactgctgcatgacagaatgagagatcttgtttttattaaatataattcaagactaaggcaaaaaagagagaacaagagcaaagatccactagagagggaaatgaatgatgttcttgaggatgatgccaatgagtttattactgggcttgtaccaaatgctaattcagataaagatgaagaacatgggggtgcacaagttggagaaacaatacatgaatcacaactgtcgcagccacaaccaaaaagaaaaaggcttgtgcgccctaggaagaagaaaattaggagcctacattccctgttgtatggtggtttagagaatgaagctgttgcctcatcttcggaatctgaagataatggagatggtgacatttcaatgcatcaatattcagattcagatgatttaggagatgaatag

SEQ ID NO: 12993 - DNA, 291 bp, Zea mays
  Peptide Sequence Number=SeqID_54772
atgccggtctccggtgcctgtaacgcgcgcagacttgttcccaggtttatcttcctcgtcgcgttagtcgccaactgctccgtgaactccggtctagccatgatattcgttgggccatgcacccgatcttcacttccctactacgggtatataagtttggtcgaggctccccttgaacccgaagtcctggccacagatgttgtgtctcgccacaataacttcaccgagcgaagaacaccggggggcaatgttttaaatgtctggctaagcaccttagcggtgagggtttga

SEQ ID NO: 12994 - DNA, 366 bp, Zea mays
  Peptide Sequence Number=SeqID_54773
atgaactccaatcaagaaggaagaaatggatgcggcacttgggcttcgcgcggggtcggttggtgcggggcgggcgctgctcggctccaggcccagggcaggggcatcgcggcctgggcgggcgcggttgctgcgcagagctggtcggggcatggccacgaggcggctggagtctggtggctgcgctcggcggcttctacgggggctcctggcgttgggcgcggcctagcggagtcctgctgcgcggcggctgcaggggctgctggcggctctactccagaagaatctgcggtggcgtttttttcagatgaaacggcgacggctacaagcgttcgcgagaaacagcagagccggctggagaattga

SEQ ID NO: 12995 - DNA, 357 bp, Zea mays
  Peptide Sequence Number=SeqID_54774
atggcttcaaccgccctcttcaccgatgagctcctatggcgggtgaaagggatggtggggaggactgactacaccactctcgtcccgatgcgtaccgaccaaggctatgtgtctctggtgaattattcggtttctccttctgcttccagtcctttccctctcatctcacccctttcgtctctttcgcgggggttgcggggctatcgaaccaccagacacctagttctggtggatgtggctggtcgggaggcgcgtcggtttgtcactaaggagaagaagaagaaagatgtggacaagaagcagactcgcaagaaaatgatggcccgagacacatcggagaagcacctcagggcatag

SEQ ID NO: 12996 - DNA, 1620 bp, Zea mays
  Peptide Sequence Number=SeqID_54775
atgggcgtggtctcaagggaggtgttgtcagcatgcgagaggctctgcttcatttgcccgtcactgcggacgaggtcccgccatccggtcaagcgctacaagaaattgcttgcagaaatcttccctcggacacaggatgaagaaccaaatgatcgcaagatagggaaactgtgcgaatatatttcaaggaatcctatgcgtgttccaaagattacattttacttagagcaaaagtgctacaaggaattaagggctgagcgctatggttcagtgaaagttgttattgcaatctatcgaaaggtgatatgttcttgtcaggagcaattgccactttttgccaacagcttgctaacaattgtagagacattattggagcaaaatagacaggatgacttgcggaaattggcatgtcaaacactttttgactttataaataatcaggttgacagtacttacatgttcaatttagaaaaccagattcctaaactatgtcatctggcccaagagatgggtgaaaaggagaagatatgcattcttcatgcagctgggctacaagctctttcatctatgatttggtttatgggtgagcattcccatatgtctgcagagcttgataatgttgtttctgcagttctggaaaattatgagagcccatatgcaaatgctgataatgatgccgctattgaggatagacgaattcagtgggtggatgaagtgctcaaagctgaaggtcatgaacctcctgctgttaccattttgacaagggttccttcatggaaagttattagaactgttcacgagaagaatcaacaagtccaaatttttggtcagggatttgtctacataaccttgctagaatatccagggaagcaacaacagtgcgacgagttctggaagttatatttcgttattttgataataacaatctgtggtcaccttctaaaggatttgcactgtgtgtcctactggatatgcagattgtcatggagaaatctgattcatcattgcatgccaggacagaatgctcatatattgttgtctatgttagtcaagcatcttgaacacaagaatgtattgaaacaaccagatatgaatctagatatcattgaagttacttcacgccttgctgggcactccaaagctcagtcttctacagcactaatggcttcaataagtgatatggtcaggcatatgggtaaaagcatgcaatccttggccagcgatgcaggtcctggagacaacatggtcaaatggaatagcagatatgggaaagctgtagatgaatgtcttgttcaattgtctagaaaggtcggtgatgctggacctatccttgatacattagctgtagtgctggaaaacatttcaagttctatgattgttgcacggtctactatctttgcagcatatcgtactgctcaaatagttgcatcattgccaaacttgtcacatcagagcaaagatgctgtcacccttatgctcagtgttcgtcaggcaaatcttcttctttcctcgttatggactcaggcactgtcacctgaaaatgttccacggaattatgaagcaatttctcatacttacagcttgatgctattgttttctagagccaagattgttgattga

SEQ ID NO: 12997 - DNA, 243 bp, Zea mays
  Peptide Sequence Number=SeqID_54776
atggcggagttggttgaggagctcccgcgcgcgaacccatggcgagttgaggaattcatggtgcggccacgcggagagctcgacgcgatggaggcatttgttggcagaggtggcgaccacgatcgacgccgggaaaagcagaggcgacgtgccataccggctagtgaaacaggtagagaacggcttataagcgttggtgcagccccaaatgttaacttgctagcggctcaatggcgttggtag

SEQ ID NO: 12998 - DNA, 2112 bp, Zea mays
  Peptide Sequence Number=SeqID_54777
atgggcgccgccgacaagtggctgctcccgctcgtctccgtctccgtcgtctcgctcctgctcttcctctccgcgctctcgggcttctccgcctcctccgcgctcttcgcgcgcctcccgccgccctcctacgtgcgccggggcgccgccgcgccgccctccttcgcctacctgctcgcgggcggccgaggggacggcaggaagctcctgcggctgctcctcgccgtctaccaccccaggaaccgctacctgctccacctctccgccgacgcgccggattccgagcgcgccgagctcgccgcggccgccgcgcgcgccgctcccgccgcgcgcgccttcgggaacgttgatgtcgtgggcaggcccaccgcgggcaccccaatgggctcctccggccttgccgccacgctccgcgccgccgccgcgatgctccggctcgatgcggagtgggactggttcatcacgcttagcgccgccgactacccgcttctcacccaggacgacttgattcatgttttctcctctgttccaaggcacctcaactttatagatcacaccagtgacattggatggaaagaacactttgttgagtattgtgtttttggttgggagaatctccctaggacactcctcatgtacttcacaaatgtgatgctacctctagagggttatttccattcggttgcatgcaactcggacttccacaatttcacagtgaacaacgacttgcggtatgtggtgtgggacgatccacctcagatggagccccatttcctaaatgttacacattatgatgagctagtagggactggggttccttttgcccggaagtttaaggaggatgaacccctgttggacatgattgatgataaagtgcttcgacgctggcgtcacaggcctgttcctggcgcatggtgcacaggcaaaaggaggtggttcagtgatccttgctcccagtggagcaacgtcaacattgagcggcgccggaagctgctccagatgctggggctcgccggggaccccgccctggcgcgcctcgagatgggccgatcggtctcctacgacgatgggcctgtgcccgtccgcccggcgccggtctcgccgcccatctcccgatccagatcagacggcggcgccgtgtcggcctcggcgaccaagccgccgctgggagggcggtcgccgggctcctccgaggccacgcccgaaggggaggaggaggaggaggaggaggaggccgacccgaggtgtctgatccggaacctcgacgatggcagcgagttcgtggtcaaggaggggcccgagctccgcgaggtcggcacgggccggcagctcaccatggaggagttcgttgacccctgcgtcggtcgctcgcctatcgtccaggagctcatgcggcgcgagaacgttgcgagctccggctcgtccacccccgtccagcgctccaactccgactccagcaacggagcgacgcgccaccagcggcggcggcggcatagcagctggcttcggggcatccggaacgtcgccggctccgtggtggccagctcccgcgaccgccgcagcagcgacgacaaggacacgtgctcggataaaggcgggcgccggtccagctcggccacagacgacagccaggacagcactggagccgtgcgccacggcccggtgcgcgttaaggtgaggcagtatggcaagtcgtacaaggatttcagtggcctattcatgaaccaggagattcaggctcacgatggctccatctggagcatcaggtttagtccagatggttggtacctcgcgagtgctggggaagagtgcgtgatccatgtctgggaagtgtcagagttcgataggaaacacgaggagaacggagcgtgcaatctttttgttgcgatggtgtgcaacggttcgccggagccaacattagccgtggccagcagtgtggatgggagcaatcgtgagaagaagcgtcgggcaaggttcttggagggtcataggtctgtgagctcagaccggctaatgctgccagagcatgtgtttgcgctgtcagaaaaaccgattcggaccttcatggggcactcagaagatgtgcctcatgaccaatttagtttgctgtga

SEQ ID NO: 12999 - DNA, 516 bp, Zea mays
  Peptide Sequence Number=SeqID_54778
atgcccctctctcccccttggaacagcgaaatcgaaggttcatgcaacagcggcatcgacgaccagttcccgggccctcccctgaacgtaacaagcattcaggtgataatgaactttgtttatcttgccattggaacagagcttgcttcaacacatcgatcttatgctggtcctacaattgcttttgcttgttgcttcatgggtcttggatctttggttgttcagttatttgcttcagcaattgggcttctggatttagaaggtggtggtcacggtgagggcagccacaagacgcccatcttctcggcgctcacgcatgtcgtgcagcgcagcggaggcatcattcttgtcatcatcccatcaggcgtcacacagcttggtattgtttctggtttttggctcataacatgtgttcaggctaatgatacagatgttgaattgaacaatgctctctttgttgttagttctcgtgaatgtcctgttatctcgaaatacagagatgttgtccacacctaa

SEQ ID NO: 13000 - DNA, 963 bp, Zea mays
  Peptide Sequence Number=SeqID_54779
atgttgctgttagagaggacagcactaaccaattcaacccaaaaacttaaactattagaagaaggttttcttccaccttcacgcaggcgctctctttttactttggcaacttcaatgcttgtgtttttctcgaaagctttcaacgttccagcgctcattccagttgtgaagcatgtgttgacagaaagtacagttgatccatttctttgtttaatagaagactgtagattgcaggctcttgatagtgctgctcagtcttgcaaactctatggttcaaaagaagatgacgatcaagctctgaaatcactctcgaacattgacatgaatgaacatcagtcaaaagaaacatcagtgtctcttatacttgatagcttggaagatctgtcagagtcagaattgtctactattagaaaacagctgattgaggaattttcagcagatgacatttgtctgggatctcattttactgaaacaccttcgaaatctgcagcacaaaatggaaaactgcaccacaaatctatggaggttattccattcggatttgtttttgaagatgatactctcgttgaagcatctgacagcttagtagaacctcacttgcgacatctgccatgtaacagcgttcttgatgttgaccggcttcttaattcggttttggaaacatctcagcatgttggaaggatgtcagtttcaacagaccaggatttgcctttcaaggaggtagccaaccaatgtgaagcacttctgattgggaagcagcaaaagctatctatctgcatgagtgttcgtgaaaaaaaggttcttaactttcaggatggtgaatcatccatcgagaagtcatctcagcaggatcctcaagcatatacgtttctctgcacagctgatgaacaatggcacctcaattcctgtaagctgccagtgctgtgtccctatgaccggttccttgcaacgtctgggtgctaa

SEQ ID NO: 13001 - DNA, 359 bp, Zea mays
  Peptide Sequence Number=SeqID_54780
gatcttatgctggtcctacaattgcttttgcttgttgcttcatgggtcttggatctttggttgttcagttatttgcttcagcaattgggcttctggatttagaaggtggtggtcacggtgagggcagccacaagacgcccatcttctcggcgctcacgcatgtcgtgcagcgcagcggaggcatcattcttgtcatcatcccatcaggcgtcacacagcttggtattgtttctggtttttggctcataacatgtgttcaggctaatgatacagatgttgaattgaacaatgctctctttgttgttagttctcgtgaatgtcctgttatctcgaaatacagagatgttgtccacacctaa

SEQ ID NO: 13002 - DNA, 246 bp, Zea mays
  Peptide Sequence Number=SeqID_54781
atgtacattgatgggtcctatctcaagacaggaagcgacacaggtgtcgtcctcacgtcacctcagggacataagctccgacgttttaacatcgaagccgacaaaccctcgaccatcacatcggaacgaaagcccgttctggatggggtcttcgcctccaacctctatgagcccatcgtgaagattaagcaatcagaggaggaattgggcaaggcgcctgacgaccaagtcgccctcgaggcctag

SEQ ID NO: 13003 - DNA, 222 bp, Zea mays
  Peptide Sequence Number=SeqID_54782
atggcgaacgttgtagaggggttattaccggagattggagcgcaaatactcgctgtcgacgagtggggcggcacggtggtcgaacgccaagtccgacgagcaattccgcccagtcgcaatgcaaagcaacacccgccgaggccacgaacacgctcccagagatcccgcacaacgccccaacctcacgccgaggccccaaccacggcgccaaggggtctttga

SEQ ID NO: 13004 - DNA, 408 bp, Zea mays
  Peptide Sequence Number=SeqID_54783
atgggtcacacacgctcgctgctgcctctcgccctctccttcctctcctcggcaaatggcgtctcccctcccttcgacctctgcggcgatctcgacgacgacgacatcgatgaacccgtccccaaggatcgtcgtctccctgccgccgcccctatgtcgaacggcctcaacgaccacctcctccgcttcacccgcagcctccagcgccccgcccaaaaccctaaccctagccccaatccgccaccgtctccgcccccagccacctccgaagaacaagtcgagaaggtcaagctagatggcgtctccatggctagatggcgtctccccctcccttcgacctctgcctccactgctgagttcgtcgcctccactgctgagttcgatttggtggagcctacaaccaaataa

SEQ ID NO: 13005 - DNA, 234 bp, Zea mays
  Peptide Sequence Number=SeqID_54784
atggggcgccccctgcatgcgccatgcaagggaagagggctggccgttgcagccagccttagaggcttcatcaagaaacctttctccttcctgcaggggcagcgctgcgggcgcagggcgccctctccatgcgccatgcaagggaagaggcatgagtcctccatgatgacacctgaagaaggagaaaggttctctgatgatgcctctaagactgtctccaccaacgttctctaa

SEQ ID NO: 13006 - DNA, 546 bp, Zea mays
  Peptide Sequence Number=SeqID_54785
atggaatccgcaacggcggccgtccgcagcgcgtcgctagcccgggcccggcccgcgccgctcgtccacgggcgcgcgcgcggggcgggtcgcgtcgtgggcgctggcctcgccgcgcgcgcccggcggagggcgctcgtcgccgtagcctcccaccaggagcaccacgagccgctcccgccgcgcgcgcaggagggcggcgccgtggctgtggcgacgcaggctgacgaggcggaggtccatgcgattgacgctccggcggctgctgctgaaacctcgtcttcccaactggctgctggcaagacagtgcgtgttcgatttgtgctgaaaaggcagtgcacgttcgggcagagcgtctgccttgtcggcgacgaccctgcgctcggcctctgggatctgtcgaacgcgtttcctttgaagtgggcggaaagccacgactggaccttagagaaagaggacaagaagccagcggttgccacagatgcttctgttcaagtagattgggtgaagacagacgaagctaaccctcaaaagcttgtagagtga

SEQ ID NO: 13007 - DNA, 2094 bp, Zea mays
  Peptide Sequence Number=SeqID_54786
atgaccatcgacttcctccgcgcgcgcctcctctccgagcgctccgtctcccgcgccgccaaggagcgggccgaccaccttgccaagcggtcaatagtcaccgagcccgtcgccgcagtgcaggttgtggagctggaggagcagctccggacggtgacggcgcagcggcgcaaggcggagcgggcggccgcggaggtgcttgccatcctcgactcccagggcttcggccgcctctccgacgccgcggacgattcaggctcagagtacgaggccgacacgggcgatcccaatgccgtcgagagggacggaggcggcgggaatgcagcggaggacgcgctgtcggggtcggagctgggagccccggcggcggcggctgctgcctctgctgctcaggccgggggcttgtcgtggaggggccgcgccgcgagccccgaatgcgagaggcggcggccgcagcaccaacagcacaagggcaggcagctaaggcagaggcacggccacggccacggccacaggaggggttacttttactgccgcgccgcggattcgtcgcccaagtaccacccagggcagtcttgccggaagatcaagaggaaggagctgagatctcagacagaagaagaggagggcaacgacaatgcagtggagagcacggaggacgggcaggagagatcagattgtactgtttgcactgatcaaccggctgatgttgatggcgaggtgaaccaagatgggcatggctcttctagtaatggaagaggggaggatcgtgatgatcttgccatggtatatgagaaggatggggagatggagagggtactcgagaagcaggctgagctaattggacagttcgaggctcaagaaaatgctcagagggagtgggaggagaaattcagcctgagccgggattcagttatggataatgttaacttattaaacaacaagctaaatcaggctgaaaatgcttgtgggaggagggaaactgctcgggttgtagataaagaagtggtttgtgaacaggcaagatcaagtgacaataatttccattgcatcaacgacccctctgaatgtctaccaaatggccctgtttcagaattgccccaaaatgtagccaaagatagtgttactgaacaccggaaatttgatgggtttggtcatgattgtgtagtgactgctgcagcagtaatttcaagccacggagaactgcaggttaggaaggatgtgctgacaactaaaagctatcctgaaggaagtggcaataatcttgggaaatcagctctaccaccacaaggaagctgtggtagcagactaaatgcaggacatagaaatggtcaaggagatgaaagttcagacagtggttcaagctaccatgtgaatgctcgatcttctgagcaatacataaacacatcatcagttgggagccagctaagtgatactcctaaaagcgaagtctcagaatggagctcctcttgctttcataaccataccgataaccagcttgatacacaacttcatcaatcatcaaacaaagatgtaggaggggtgctagaggcccttcgacgtgccaagatgtctctcagagcaaagctgagctggccaagtctagccagcaagaacatattggcacttgaagcaccggatgatttgccagtcaatggcatggaactttcactctgcaggacagcccatgtcagtcaggaaatattcgcactaccaacaccaacagactaccttaacaaggtattaccgcatgatgatgtgaaggtaccaataggtcctgctggtttgtttcgtttgccaatagattcatttcccagagatgagatgaccacaagggatggctatggttcatggttcagtttgacctcggtgagtccaccctacgtgtcgccaagctatcatgctgatcatattatgccagctctatccttgtctcagtatggttctgggttgtcactaaatccatactatgatcctcatagttccatgttgctatccatgcccactgctggtgggcgtagcgtccctgtgtcagatttcagaataggggatggttccttcctccgagaagttccacggcctgacaattattag

SEQ ID NO: 13008 - DNA, 1161 bp, Zea mays
  Peptide Sequence Number=SeqID_54787
atgtcgggcctggagaaggtgaggtattggagcgtgccggttaggctccgtgcttttaccactcaggttgacaccaatgttggtcgtatatgtgtaagactgggatgggtgcccattcaacctcttcctgaatctctacagctacatctcttggagctatatcctatcttggaaactatacaaaagtatctttggcctcgcctttgtaaactcgatcagcagacactgtatgagctgcattatcagatgattacatttggaaaggtcttttgtaccaaaagacagccaaattgcaatgcatgcccaatgaggagtgagtgcaagcattttgcaagtgcatttgcaagtgcaaggcttgcacttcctgctccccaggaggaaagcttagtgaagttgagcaatccatttgctttccagaatagcagcatgcatgctatgaattcgactcacctacctcgccttgaggggagtatccattcaagggagtttcttcctaagaattcagagccaataatcgaggagcctgcaagtccaagagaggaaagacctccagaaaccatggaaaatgatattgaagatttttatgaagatggtgaaatcccaacaataaagcttaacatggaagcttttgcacaaaacttggagaattgcattaaagaaagcaataacgaactccagtctgatgatattgcaaaagcattggttgctattagcactgaagcagcttcgattcctgtaccgaaactaaagaatgtgcttaggcttcgaacagaacactatgtgtatgagcttccagatgcacatccacttttacaacaggttccttgtcgaacagctatgaggggtagtttcccacttaatggcacttactttcaagtcaatgaggtatttgctgaccacagatctagccacaacccaatccatgtggaaagggagatgctatggaacttgcaaaggcgcatggtctttttcgggacttcagtacccaccatattcaaaggtctaagaacagaagaaatacaacaatgcttctggaggggatttgtctgtgtgcgaggattcgacatggagactagagcaccaaggcctctgtgcccccatttgcacattatagcaaggccgaaggcccgcaagacagcagcaactgagcaagtactctaa

SEQ ID NO: 13009 - DNA, 495 bp, Zea mays
  Peptide Sequence Number=SeqID_54788
atgaccgatgccctggctgatctgggatctcctgttgacaatcggatcctcatcctcaacatcctacgagggctcaaccagcatttcaagcacatcaacaccatcattcgccgctactcaccattcccgaactttgtcaaggttcgtgatgatcttttgctggaggagatccatctagacaccttaggtccagcaacgactctgacggtggtctactccaacaacatgtcgtctgctccaaagtcaccatccttgacatcgtctcacccgcctggctctggcaccgaaaacggcattggcaacaccaactccggaaacaaccgaaacaagggcaacaaccgccacaacaacaatggtagtcatggtagctcctctggcacatctgccacatctcctatgggtgttggggtcaccaacggcaaggcgtcgccccctggccaacataagtccaccatgacaagggcacattactatgtactcctgacccgccactag

SEQ ID NO: 13010 - DNA, 390 bp, Zea mays
  Peptide Sequence Number=SeqID_54789
atggggacggggctgagcgtgccgagcgcgcagctactcggccgcggcgcgcaggggcgaagcttcgccggcgaatgggagggcgcggctgccgcggcgctaggcgtcgacgccctgctcggggagaagacggacaggggaggagggacgagggcgtccaggccggctcagccaagccccggccatggcgagcgagcggcgaggaggagagcggtggagagaagaaaggggggacgagctcacctcggcgaagcacaacgaggcgctgcgcacgcgagttcggcgacccgcacggcgacggcggcggcgctctgggcggggtgcggctccgaaggcggcgatggcgaggcggaaagcgaggtcgaggcgaggaaaggcggcggtgggtga

SEQ ID NO: 13011 - DNA, 516 bp, Zea mays
  Peptide Sequence Number=SeqID_54790
atgctccgcccgctccaccagggcgcctcgccctgggggacggtctccgagcactgcccgccgtccactagtcccacctcccggcgtccgctctatgcctccactgctccaggcgtctgctccattgctcccggcatccggcgttctgctcctgcgtcgtcctcgtcctcggcgccgccgccggtgcgggcagtggtgccactgccccccgcgcacgaggtcgtcatgtggctcctgctccgggcggccccgaaccagaggagggagccgccgttgccgcacatccccaggagctacttgaggagatcgccatccgcccctctgggagcggcaaggtaccggccccctgcccttacaactcctagagctctacccctcatgcttaccttagggagacgagatgctttgctcgcctactggaggacatgctctgatggttgctctgacataacgaggaagtccctcttcgtggtcggagaaattgggggcaatgactacaacctacctcttcactag

SEQ ID NO: 13012 - DNA, 372 bp, Zea mays
  Peptide Sequence Number=SeqID_54791
atgtcggggctcgcctgtaatccctttgtcgctgcaacctcccatctcatttctctcagccacatcgcccaccacgatcgtgagccaacgcataagccccccccccatgcagatgcccctagcctcgccacattcccagcccgtgccctcctcttacctcgcctagttctggtgcttgctgcacctccctctccacaccgggaccccattgaggtcactaccccgagcacgtcggagcaacaatgcccaccgtcgagcacgtcgagcccccagacgtcgaagcctgcaaagccaccacgctgtgcccccgcctcaccgcaccatagcaccacttatcaccgcgcccggaggatctgtcaagttccgccctga

SEQ ID NO: 13013 - DNA, 216 bp, Zea mays
  Peptide Sequence Number=SeqID_54792
atgggagcacctctccttctcctccctcttctctgctgctgctgcttcgcattactcctccaagtccaaggccgcggcggctacgacgtcgtcttctgccccaggggcgtccaggtaacacgcccgcccgcctgcttcctcgtctccctttcgtgctctcgtcactgtggttccgtttaccacggacggaaggtaaaaccacttgcaaaattttga

SEQ ID NO: 13014 - DNA, 111 bp, Zea mays
  Peptide Sequence Number=SeqID_54793
atgggtgaagagatgggcgaaagagacatgacaacattgttcgcctactcccctgtgcaagacgaggggttagcctacaccgctgccttcgatcgcacgctgacaagataa

SEQ ID NO: 13015 - DNA, 2445 bp, Zea mays
  Peptide Sequence Number=SeqID_54794
atggagcccaaccttcaatccgcactggaggaacaaacgaagattcttcgcgcgctcagtgcccgcctcgctgtccaagaagcgtggtggcgcagttgggagtcgaaagtggcgcaccattcggtgtcgatccacgaccttgaggtagcagtggccactgtgccatccgcgacgttgaggaggaacaggacatcgacaactgcatccccatcaaaagatggcacccgcttcaccgaggaagacgacgacaaccaccccgccacgctcgaaccactgctcaccgacaccaccaccgccgccgaggtcgattccatcgccaacaccgacgatgtcgaggctgactctctcgcctccgcctccacggtgggggtcgccacatcccaggccgccgagatgcagctccacgtcgggtgggcgcgctggctggagggacaggccgactacctaagacacgatcggatgctccactccaatctagattccctcacttcgagcaaccacccgctgctccaggatgcctcagccaccaacaactcgcccacccagtactcgacagaatgcttcagccatgacatcgtcttgttgaggactatcagtgctgcgcccacaagcgaggaccgcgcgctgcagcagaggcgcctcgagtgcctcgtcgcgtggcccgagtggcggaggattggcggacggaactacatcatgctcgagcatcaccccaacaggatgttcgacgcgtgcgataggttctggcactgcgtcttcgcgctctgtgacttcggctctgtgcagggcctgcagaggaagctggagcggctctgcctggcggggagcgcacctgacctggaagtcctcgccgtgctttcgggcctgcgcgcgcgaagcctttccgaccagcgtgccgctaaccatacccgcacgtccatgcggagcatatccacgaccgccaccccgttcagactctgctctacacggagcggctacatcgcaagcgggacttcgacgggcacgacttgcagcaccaggtcacagagctggatctcctccgagttcgagcactcctccattccgacccccaaccagaaggtattcaacctctcgtctgatgtcctcaataagagagatccgtgggtcggtaccttcgaccacattttcaccgagctcggccaaccacaaagcctagaagctgtccgacttctctgtcacctacgtcatcagctaccagactgctcccagttggaattcacatacgaggtgtttgctgcacagaaggtgttcgaggaattgtctcttagctcccctgctacttgggtcaatattgggaagctcttagcctctctgtgctggaaaattccttggccaccaccacatatacaagttgggttgggatgtggcagtgaggctttacgttcacttccatggttgtctcccaccatagctagtaccaatgaggagagaatattcatcatatctgaggatggcaaggttgacggtgtggttgatcagacgatggatgaacagatcgcagctgcagtttttatgccagcttgtatagaagcttcgcttaatgatgggatgaatgcaggaaaaaccagggaggcctttgctgatcatcagtattctgagtatgacagtagattgaaagataaggatcagaaaatattatttgaagatgagattgatttatcattgttcaactacaagttcgattcctacacaacagatagtcctgccattgatgctgaagtagagcttcgttctacggatctttggccatactggaaggttgattgcttgtgcaagataattccaagacagctactagcagagaacgcaatgatgcttataaggaacaccgttgacaagctgattatgaagcataaagaaatacaagttgaaactgaacagattgcgggtgaggatgatgtaaatgaaggggatcctagcattctacgcttcctacttgctagccgagacaagtcagcagacatggaacgatcgcaggagcttctggagactctagttattcttatcgtgaaatctgtgaaggatccaagaagtgttgtatgcaaaactgcactaatgacttgtgcagacatctttaaggcatatggtgccttaatggttcactcaatcgatccatcgctagtacaacagctgcttctgacggcttcacaagataagcgttttgtctgggaaactgctacaacaacttttatatcattgacaagctggatcttccctttactactgaagccaacaatgttgccttacctaaagaacaagaatacagggacctggccaaaagcgtcaaggttgccgctgacggataggggttgttgcacccttgccgccaccacgctatctataattgcccctgccacaccagaccgtggtggctgccgccgtcacatggccttgcagcgcgccggaaaggagtgtgtctcttga

SEQ ID NO: 13016 - DNA, 1077 bp, Zea mays
  Peptide Sequence Number=SeqID_54795
atggtgttatgccctccagagagtataatgatattacatagtgaattaaagcgccagaggaagctcgtgaaaaatctgaagaagaaatccttgtggtctaggaccttggaagagattgtggagaaacttgtggacatcgtaatatttttgcacaaacaaatccgagattcatttaacgaaactggaactgacttctgcgcttccgagcaaactcagaacaaaaggctaggttcctgtggtctggcgctacattacgctaacattatcaaccaaattgaaaatatagtttcccggcccctctctcttcctcctagtgcaagggacaatctgtaccatggtctcccaataacagtgaagtcagctctgcgatcacgattgcaaacatataaccccgaagaagagcgcacggtagctcaaataaaagccgaaatgcagaaaactcttcgctggcttctgccgatagcagagaatacaataagttgtttccttctgattcattcaccagggcacaccaaggttttggatgggtcggcgagtgggcaaatcttggttgcagcaccacctaacatgcatccaccttgctcgcaggagcgacatgagcaagaaatcaggctcccagcacagcgtcacccgcatccagacgctccatcacgccgacaaggcgaaaaccgagcactacatgctggagctggtggcgctcctccaccacctggtgatccaggtgaagaacagaggctacgggaccagcaaatcgtcgaggcacgacgcgtcgtcccggtcccgcaaggcggcggcaacggacctccgaccggagacggagactcggcacaacacgtcgccggtgaacagccgcacggcctcgagcccgctgtcggactgcgagcgcgcggcgctggaccacctgagcttcaggaggacggcctacggcaggagccagagctgcgagcctccgcctggccaccgacggagcaaggcccacaggagctgggacccgtgccggagccacggcagctccccggcgacggagttcggcaggacccccgccgtgcagcagcgcggccggggcagggatcttga

SEQ ID NO: 13017 - DNA, 264 bp, Zea mays
  Peptide Sequence Number=SeqID_54796
atggcgccattgccgcactgctttgcctcgactcccaggcacaagacctcgattcaactacgcaaaaggaaaaggaaaaacagtgaacaggactgggctcattccagcccgaaccggcccacgaccaggaccaggtccccgaccatgggcggcagagcgactacaccggtgaacttgtatcggccgttataccctataatccctgctcgaatgtgttctacacctaattacaccattggcgctacactggggatcaacaattaa

SEQ ID NO: 13018 - DNA, 309 bp, Zea mays
  Peptide Sequence Number=SeqID_54797
atggctcaccttcaacctttatttttggttgatcagccttacacttcacatgaactaccatcttttgaaaatgaaaatgatgaagagcaagtagtggaagtgcctatccaaggtgaagtccctcttgccaccatcaaacctaagctgagatcaaaggcatccactgaggagatgccgaagaaagaagctcctaaggttgaagataaacaagattctccgaagaaggtggagatgggcacaaaagaggccgaagcaattaaggaggcgcaaaggttaaaagaacttgagggtacttatattacatcttga

SEQ ID NO: 13019 - DNA, 144 bp, Zea mays
  Peptide Sequence Number=SeqID_54798
atgaagaagctacagcgtgcacgacggcgcttcatccgtctccccgacatggttcaggttgatgggccaggctgggccatcgtgccacatccccagcccaagcacgacacgtatatagccacgtcgtgccgggccggcccgtag

SEQ ID NO: 13020 - DNA, 297 bp, Zea mays
  Peptide Sequence Number=SeqID_54799
atggtggccgtgtcactcggctggatcacatttgaggtccacttcaagtcgatggatgagtacaacgagcggtggcgcgcgacgtgggtcataccgacggtgtggcagctcatcttctcgctgctctgcgccttctgcctcatgtggacgccctcgcagagcgcgacgaggcccggcccgctgtcgtacgtggacaacttggcgatctctgtgtacaaggatgccaccatcatcatcctaagaaccgactccgacgtgtacgcgaaagccgccggcgatggaggcaagcgggtgtag

SEQ ID NO: 13021 - DNA, 597 bp, Zea mays
  Peptide Sequence Number=SeqID_54800
atggcacagaacggggaaagaagtgggatactgacgggcgggtcctccttgtcaggaccgccgtctaccttggtcgcgcgcacggcgcgagcgccatggccggaactggcgactccgcatgggcgaagaaggcacgaggctgttgcgattggccgggggtctcggttcgacggcgcggtactagtaccggcgatcaccggcgaccaatcgatgggacagagaaaattggggagagagaaaagaaagtccggtggggaaattcacctcgggtggggcgggaacggtggcgaggctgggcctgacggtggcggagcacggtcaaggacgacgaccgagcacaaccagcggcgggttcaggcgcaggaggtatggcaacggggaagctctgacaggcttgaaaaacggatgtgcgcagctcgggtgagtgggcaaaggcgaaggtgttacagatgcatagaggctacgcataggcacgggtgcacggcagacggacgccatggcggcatcctggcgcagtcgactccgcatgaaaccatgaagaccgaaggtgaactggggaagaagatacaggggctgggtgttggtgggctggcttag

SEQ ID NO: 13022 - DNA, 423 bp, Zea mays
  Peptide Sequence Number=SeqID_54801
atgccgagtcaagcggcgccccccgcgccccaaccacttcaccgcccgtccgtcttacacgccgccactgcaaggttatattttggtgacgccattatgacgaaaaggcacatgcgaaggtcagcgaaggagcaggcacatgcgtggtcagaggagaagcgtggtggccgagccatgcgagtggcccagtgctgtgctgagctcgacgcagccgatgcgaggtcggcacagttatctgcgagcgtggtcaggtgcagggcgagtcagtccatcgcgtccggcgcagctttgtcaaaagacgtggaaggaccgcaacaaaacgaaattcacacaggacctaaatataatatatcatatgtaaatcagatatttcatatttctttatggcttgatccaacggttaagatcttattggtgacgtga

SEQ ID NO: 13023 - DNA, 294 bp, Zea mays
  Peptide Sequence Number=SeqID_54802
atggcggtggttgggggtatttatagccccaaccaccaaaacagtcgttggggagggctgctgtcgatgggcgcaccggacagtccggtgcgccagccacgtcacccaaccgttagggttctgatggtttcgaccgttggagctctaacagcttgggccactggacagtccggtgccgcactggacagtcactgttcactgtccgttgtcagtcgaccgttggagtccaccgttgcgctggcgagccgttgctccgctggcacaccggacagtctggtgacccaccggacctga

SEQ ID NO: 13024 - DNA, 522 bp, Zea mays
  Peptide Sequence Number=SeqID_54803
atggccggaactagcatctccgcacgggcgaagaaggcacggggcgatggcggttggccgggggggtctcggttcaacggcgcggaggtctggcgacggggaagctccgacgggcttgaaaaacggatgcgcgcggcttgggtgagtgggcagtggcgaagtgagcgaggcaggggaaagtgggggtgtgcaaggacttgtagaggaggtcggggtgccggtttggagctgggtggcgacgtgggcgcgacgatctcgacgtgcatgcgcgcggtccacgcaggcaagaagttgaaggagggggagggactggcgagcggggcccacgggacagcggtacaggcgtgcgagcacacgacgggccaaagcgccgacaagatggccccacagaacagcgagagggagagaggaagaggggcgcgggtcggggccgacaagatggccccacagaacagcgagagggagagaggaagaggggtgtgggtcggcgccgacatggaacacatcatgcacagcggatag

SEQ ID NO: 13025 - DNA, 456 bp, Zea mays
  Peptide Sequence Number=SeqID_54804
atggcacgacctcgcctgcggcgcggctcccctgcccccggcccattcggccgccggctccggcgcggccccgcccgcggcacggcttgcccctgccccggtgtggcctcccctgccccgccccgtgcaaccccgcccgatgcggctccccagccccggccaccgtcccggcgtgctcgccatggcgcggcgcgcgtccgcctcggccgtggtggcgcggtccggcccctgcccttgcacggcgtggcccttgcacagcgcggccccggcccggcgcggcttcagctcgcgcggccgcggtgcccctgcgtagcgctgcgcgtgcgcggctcggccccggcatgtgcacggcccatccgcgacgcgtcagcgcggccttgcgcgcgcgtgcttgcgtggtgcgcacggtgctttggcacggctcgtcgtgccctcagcgcgctcgtctacccctag

SEQ ID NO: 13026 - DNA, 294 bp, Zea mays
  Peptide Sequence Number=SeqID_54805
atgaaggcggtcttcgccttgcatttctgcaccagctctctggctttctgctcctcatctaggatcatctgtctgactttggcctgcatggtgaagcattggcgcttggctagtgcacgcaacttgagctggtcctcgtctgggatgcctaggacttcgtcgtcctcgatgatatcgtcaccttctagtggggtgaagcctggcgagggtctcaaggtaggctttcagagctgcaagtgtgaacggtgccctctggtgtgggcgggttctcctggcgatgtcacttgctattga

SEQ ID NO: 13027 - DNA, 288 bp, Zea mays
  Peptide Sequence Number=SeqID_54806
atgggtggagcggttgtgacttcgggtgaggcagagttctgcctaaggtgggaactctcgggaagaggcctcgggttaagaggtgagttgcccgaggcagaagatgtcttctttcggttaactgctgagaagataaagggaagaaaggtggccatcttcaccgccgtctatgaggggtacctggggattgagccccattgggatctggcagaagcattctgcattgggctccatgccttggcttcgcactgcctagatgaagaccccaacctcattattcttcaataa

SEQ ID NO: 13028 - DNA, 459 bp, Zea mays
  Peptide Sequence Number=SeqID_54807
atggtggcgaggtcgccgaagatgaggcagacgcgaacacccgataaactggggtcatcggggagggctagaatgggtccaaagagcctagcaaactcactggcagactaccggccgcaagaacaggatcagagacggaagaacgatgaagagaaggggcacgggatcgggctaaatcagctggtcaccacgcgggcgcggcaaaccggcatggccatcaccggtgaagcaaaattggccaataacatggcggaattgggagaaattgagcgtggggacgtacatctcacctcgggatggggctcgggggaaaaggctgagcgcggaccagacggaacagaggtgctgtgggaaactgaggggtgtcctgagttgctgacggcgaggtggaactcaccgaggcaacgagcgaggcgcgggctcgacggcgaccacaaaacgggcggcagagctccctaa

SEQ ID NO: 13029 - DNA, 651 bp, Zea mays
  Peptide Sequence Number=SeqID_54808
atggtgcttttgggtaggacggtgtcatggattgaaactcaatggttcgcggttgggcatgagagagagacagacaagcagatttcagcaggttcggatcgctttgaggagcgtaataccctacttcctgggatggctttgtatgtcagtggagttacaggtggtgtctatcgagcggtctcactgcttcagaaaatctcagagaatccgggtggtacacccaatggtgagccatggccggagggaagaaaggcaagaaagggcgtcgctccactgttggaaagcgcaagcgcctccccgagtccttccttggaggactttgcagactcggagtactcagaggaagtctcctctaagtatgatcgttctcccattccggcgtcgtccgatgattcggatgactccattgggctgtccgttgcggagctggcgtacgcccggtccatcgagcgtgcggggctcggtgggtcggacgactcggaggatgcctccttggaggaggtggaggattcctcggacttagaggagggcagcgacaacgagggcgacagcgacgagggcgacgacggcaacagcgatgacggcgacggcggcgaaggcagcagcgatgacggcgacggcgatggcggtggtagagtgccattggcttaa

SEQ ID NO: 13030 - DNA, 180 bp, Zea mays
  Peptide Sequence Number=SeqID_54809
atggcttcgccgtacgaccgtcaatgggggtccgagcacaatactagctctaccgaggccggttgcagagaatgggaatcacaacttgtgggtaaagtgtgcgacctctgcatagtgttagaacctggtatatcagtcgtgctcatggttaagagcggccttgggatcctctttgactag

SEQ ID NO: 13031 - DNA, 162 bp, Zea mays
  Peptide Sequence Number=SeqID_54810
atggcgtggtcatcttcatcctccagccacaccaaacggcggaatagagcctgcgcggcgtacgcacactggagacccgtcctagagcgacaccacaccaatagacccccagatcgatcctacatgattactaggctaaagaacacattttcaattgtctaa

SEQ ID NO: 13032 - DNA, 207 bp, Zea mays
  Peptide Sequence Number=SeqID_54811
atggctgagttggggcagaaggtgagtttggaaaaactgtgtcccaaacagggcctacagataaagatatcttgcttggcttctcaacatgaagggatcattccagagaacgaggaagcgacacacctagatggcatgacactcattgagagttttggctcaactcatggtgtaaatggttatggacgatttagcgtgtcgaagtga

SEQ ID NO: 13033 - DNA, 1507 bp, Zea mays
  Peptide Sequence Number=SeqID_54812
acgcggatgctccgcacgcgcttcccttctccatctccgtccaaatcgcgatcaaatgccaccgcgcgcatcgctcctcctccgccgccgcctctccgcccgcccgcctcaccgcgatcaccccgaagtcgccgcgctgctaggggtcctcaactcggcgccgccgtcctccacgtcgctctcacacgcgctctcccgcgccttcccgtcaccctccgacgccttccctctctgcaggctgcctcacctcctcccgctgctcccctcccctcttctctccctccgctttctactatggcgcctgaccccatcctccccgctaccctcccagcacgctctctcctcactcgccacctcgctccccgacctctcatactccgtgccgctcctcctctcgtcctccccacggccgctccagctcccgcactatgccctcctcctcaacatatccgctcacgccagtctcttccctgcctccctcgccgtcctgcgccacatgcggtccttcgacctcgtgcccagcgccgcctgcttccaccacgccctccgcgcggcgggctccgccagcgatgtctcggcagtgcttgagataatgtctgcgtccggcgcttgtccaaccgtgcccgtgatcgtggccgctgtgcataaattggcgtcggcgggggaattcgaagtcgcctaccggctgatcgataaaatgccggagttcgggtgtgtgcccaatgctgtggtttacacggcagtgctcgatgggatgtgcagtttcgggaacgtggatgcggcgttgaggctgatgaaggcgatggagggtagtgagtttggtgcaaactgtgcacccaccgtgagggttgtcgacgcgtatgatgtggtggagcgtgtaattggtgatgggagtgtttcgaaaaggtccttcgtctttttgcgattcaacccgtggtcctcgcccgaacctcaatcaggttcggttgggcgccctgccgcggtcccccgagcaccggtcttgcctcgcccaaaccctagcttgttgccgccgccgcctcctcctgccccgcttgcttcgaagctgttgactcgcttcaccgccgcgacgagcatctcaacaacctccgccacaacgacgggcacgagcccctccaccgcctccgactcgtcgcctcggctcaccactttcttactagggcggcaccgctgttcgcgcagaggaacagagttgccgcattcgcatggactccgccgccactgccctcctcgaatctgcctccgcctcttccgccaacgtcgcaggcaaggagatatctgcccgccacctcgcccaccgcactacctcaacatgacctcctcctcgctctgcaagaagtcagacctcgcgctcctccacatggtcccctgtgccccgctctgccgcctccttgacaatatccatgaggttttgctcgccaccaggctcaccctcctcttccccgccgtcctactcgcgtttgccacacaaatcttccacttcagctag

SEQ ID NO: 13034 - DNA, 573 bp, Zea mays
  Peptide Sequence Number=SeqID_54813
atggtggctctacttgcgagtgaatatgcaaaaagaaattacaagcaggcttgtttggtattattcagagttcagcagattggaggtgtaactggaattgcactgggtgcaactgtgttcttttcagtctacatgttagttgtatttgccatgcggataatgtccatatgtttttctctgcagctgttattgagaaaggcgacggaaaacaaagatggcattcaactactgaatgcggctatagaaaaggcttgctacacggaaagtgaggacaagacttatgatcttaattttatgcaggagcctgcagatatctatatgattgatgaaccaagtgcttatcttgattcagagcagcgtattgtggcctcaaaggttatcaagagattcattcttcacgtgaagaaaactacatttattgttgagcatgatttcatcatggcaacatacttggctgacaaggtcattgtttatgaggggcgaccttctattgactgtactgccaatgcaccacagtctttagtatccgggatgaataaattcttatcgccatatgtagttctcatagtttaa

SEQ ID NO: 13035 - DNA, 1206 bp, Zea mays
  Peptide Sequence Number=SeqID_54814
atgcccgatgagaagccacggccacgggcaggcgagtgtggatatgcaaccgactcaccctccggtgccgccaccgaactccacactcacccgccgctcggtcacgggtcaccccgtccctatatagaagctccttcccgtgtcattgcttgcctccctcccttcttctcccggcaactcctcaccccagaggccacaactgccaacaagccaatggctctcgtccgccagcgccgccagctgccgcaccttaccctcccgctggaccacttcgccctgcgcgtgccaccgcagcctcagcccaccgccgcgccgtccacctccacgtccgacgcccgcctctccgactacgagaggctctccgttctcggccacggcaacggcggcaccgtgtacaaggcgcggcaccgccggtccgcgcagccggtcgcactcaagctattcgcggacggggacacctcggcggcgcgcgaggccgagatactgatgctcgccgcggacgcgccccacgtcgtgcgcctacacgcggtgatcccgtcggccgccggggaggctcccgcggcgctggcgctggagctcatgcccgggggctccctgtcgggcctgctgcgccggctggaccggccgatgggggagcgccccatcgccgccgtggcgcggcaggcgctcctcgggctcgccgcggtccacgcgctccgcgtcgtgcaccgcgacctgaagccgtcgaacctgctcgtcggcgccgacggcgaggtgaagatcgccgacttcggcgcgggcaaggtgctgcgccggcggctggatccctgcgcgtcctacgtcggcacggcggcgtacatgtcccccgagcggttcgacccggaggcgtactcgggagactacgacccctacgccgccgacgtgtggagcctcggggtggccatcctggagctgtaccggggccacttccctctcctgcccgcgggccagcgcccggactgggccgcgctgatgtgcgccatatgcttcggcgaggcgccggagccgccggccgcggcgtcggaagagttccgggatttcgtggcgcggtgcttagagaagaaggccgggcggcgcgcgtcggtggccgagctgctggagcacccgttcgtcgccgagcgggaagcggccggcgcacaggaggcgctcgccgcgctcgtgaaagaggcggagcagctggacctatag

SEQ ID NO: 13036 - DNA, 333 bp, Zea mays
  Peptide Sequence Number=SeqID_54815
atggtgttcgaggctggacttggctgctatcagcctcactctgtcgagtggcacagcagccggagcggcgcaggcggcgctgtcctcttgttaggccgggcgcgcgtcaggataaggtgtcaggccatacttgcattaaatgctcctgcgatacggtcggtcgtcgtgacgatttggccaaggttgcttcttggcgaagactgggccttgggcgagccgaagctttgtgctgatgggggttaccagctgagattaggagtcttgggggtacccctaattatggtcctcgacaagttctatctaggtttcgtcctacagccaacattcctctga

SEQ ID NO: 13037 - DNA, 996 bp, Zea mays
  Peptide Sequence Number=SeqID_54816
atggtgagcaacaactatgggttgtgcaagggcaaggctcattgttcgacgcagcggcaaggcttgactctgggttgtgatggcatcacggcgaggcaggcacgattgtggcatgagcaaggtggcgagcaccgagtcgggccaccagcggcgacaggcacagccaaaaattttaaaatatttgcaaatttgaattgtgaactaacaactaaaattgagcaactagaatctaaagctccatcctcaactatcgatgatagcctagttaaaaagaatgaaaaacttaaggctaaattagctagctctcaagatgttattgaaaacttgctagaaaaaatagaaattcttagcatacacaataataagctagaaaacattggtagtactccagaagctcctaaaatttatattcctgagattattaaaagggatgcttatacctcttgcttgtattcaataaatgttaattctaatccttgcaatcaagttctttttaagaatgttgttatcgaaacatgtttggatgagattgctacgaagaacgaattgttaaaccaagaggtggtttaccttggtaaggctttgtatgataagaaagacaaaaccaaacaaacccaacattcccagtataacaccacttcgggagtgaacaagcatgtggagggtgaaaccatggtttgcttgctatgtcacaaggaaggacataagtcttaccaatgcaaggcgaagaccagaggagataaaaagaaaaggccaacaagtaagatctccaacacctacaccaacaaggtggacaaaaaggcggttacaccttatttgatcaagaagaaaaagaacataaaggtgatagccatcaagtccaacaagcaagccaaaagggaaagaggaccaaacaaatctgggtgccaaaggagattatttcaaccattaaaagcactaagaaagtttgggtccagagagggaagtgagaagtccgaaggacttcgaagaatttag

SEQ ID NO: 13038 - DNA, 315 bp, Zea mays
  Peptide Sequence Number=SeqID_54817
atgtcgcttttcagcctttcgccatacgtcgatgaatcctcctcggtcgagctcatcgacggacgaacgaatgccattggtaaggggctgagcgccctgtcccctacctggcgtgccaactgttgtggtttcttgaaccgggggacaataagatttgtgttcggcaggggtgttagtgtagactcactccgaatgctcaagggtacacgttacaatgagaaattatattctattagggaggtgttcggcctcctacttctgggcctcgtagctcctgtggtctcgtctgttgggttgtgcttcttgccctcttag

SEQ ID NO: 13039 - DNA, 414 bp, Zea mays
  Peptide Sequence Number=SeqID_54818
atggcgtccgagcggccaggacagcctgctcgtcggcccctgcgcgcctgcctcgcttcccggcctctgcccgctagctcgcccgtctcggtggccctcagccagctagcacggcggccaacggcctgcctgcgcggcggtgtgaccagccaggcagcttgcggcagtgcgacttgtggccctattcggccggcgagccccaggtcgtggatcccggggcccctggccaagcagcggcctcgccgttgctcgtgctgtatgtcgtgcgcgcagcgcgtcgtcgactcgcctcgccgcccgccgtcgtcgcaaggtgatgatgaggatgatggttttgattatgattatggtaaagaagaaggtgtcgaggcggatctccaagagttccagggctttgacgagtttgatgattag

SEQ ID NO: 13040 - DNA, 270 bp, Zea mays
  Peptide Sequence Number=SeqID_54819
atggaagcattctcggtctcctccttgcgctggttctgtctggctattctgtttggttgctggggtaggaaagcgaggtgcctaactactctacctctgatactggtttcctcctggttggctgtgctggcggccatctggaacgtgataccgatggaagctatctctgaactcctcccaggttatagcttcagggttggcatgggtggcgagctcccgctctactgtgcgcagccagtcttcggcgtccatggggtgaaagtcgcctag

SEQ ID NO: 13041 - DNA, 267 bp, Zea mays
  Peptide Sequence Number=SeqID_54820
atggagtccgagcgcgagcaggggatggtaggcgagtatccagggtactcagttgaactggccaagggcagctgcggagaagtcggcggcgcaacgacttgtaccgagttgttcggcctaggaagatccacagtagcgggcttggtggagctggtggtggtggtggaggttgttgttgttgttgtctctccaaccgcgcttgccttatttcttggcggacctgacgtggaggatttggaggattcatttctgtttgctattgcgtga

SEQ ID NO: 13042 - DNA, 417 bp, Zea mays
  Peptide Sequence Number=SeqID_54821
atggcgggcaggtttatatttataaaactcggggattcttttgaagttttaccatgccgaagggggtattcgcatgcggtagctgttgataagaatttaatggatgcgattaaatcggtccacataacaaaccggagtggtagatctaccgacgccaccacaaaggcgaggagtattcccggcataatgcggcattacaacgtcatgacggctccggcgacaaatccccagcccatgggtgcgctatcctctaatattcttgttcctacacagtatggggatgaatatgaaggttcggaggtgttcttacctggagatgattgtgtagagggtctaaccatgtggtgcggcgacatggcagcgagctccatgtccgatgagttccacacccgcaacaacgggtgccattgcccctga

SEQ ID NO: 13043 - DNA, 273 bp, Zea mays
  Peptide Sequence Number=SeqID_54822
atgtcgctccttcgtgagcaattccaccggcgccgcggcacaatcccgaccaagcgcagttccacgaacttcgacccgctctggcgatcatcaatcgcaaggacgcgcacaccaatcgacggtggtaatagtgtcgaaccagatcccgcctggcgcaatggcggcgtggcgcagatctttgggtggcttagagggaagaaggaagtgcggcagttgaggtttttatgtccatggagtccgagcgcgagtaggggatgtattgcaaaaatttaa

SEQ ID NO: 13044 - DNA, 303 bp, Zea mays
  Peptide Sequence Number=SeqID_54823
atgccgaaggcttctgctgagttcccgagctgcattaccagacgaaagcaagggccaaaatcccccactccaaagaaacggaaatcatcgaagcttgatcgcgctggcaggaaaccatctgagttaccgaagcagattggtgagaccccttcaacattgtctattagcgttacagaaattctagaggtcatgactcgtcctttgccttcctctatgctgattctactagggtcagatttgactagcttattattgacgatgaaggacaagaatgccgaagaagaggcagggaggagtccttag

SEQ ID NO: 13045 - DNA, 957 bp, Zea mays
  Peptide Sequence Number=SeqID_54824
atgcctggcataccgagggatgtcgccgagccctcgctggatatccgagatggagcccgacccgtgaagcagcctctgcgccgattcgacgaagaaaagcgtagagccataggcgaggagatccacaagctaatggcggcagggttcatcaaagaggtattccatcccaaatggcttgccaaccttgtgcttgtgagaaagaaaggagggaaatggcggatgtgtgtagactacactggtctaaacaaagcatgtccgaaggttccctaccctctgtctcgtatcgatcaaatcctggattccactgctgggtgcgaaaccctgtctttcctcgatgcctactcagagtatcaccaaatcaggatgaaagagtccgaccagctcacgacttctttcatcacacccttcggcatgtactgctatgtcaccatgtcgttcggcttgaggaatgcgggtgcgacttaccagcgatgcatgaaccatgtgttcggcgaacacattggccggacggtcgaggcctacgtcgatgacatcgtagtcaagacgaggaaagcctccggcctcctttccgaccttgaagtgacattccgatgtctcaaggcgaaaggcgtgaagctcaatcccgaaaagtgtgtcttcggggtaccccgaggcatgctcttagggttcatcgtctccgagcggggcatcgaagccaacccggagaagatcgcggtcatcaccagcatggggcccatcaaggacttgaagggcgtacagagagtcacaggatgtcttgcggctctgagccgcttcatctcgcgcctcggcgaaagaggtctgcctctataccacctcttaaggaaggccgagtgcttcacttggacccctgagaccgaggaagccctcgggaacctgaaggcgctcctcacaaacgcgcccatcttggagccccccgctgccggagaagctagctaa

SEQ ID NO: 13046 - DNA, 348 bp, Zea mays
  Peptide Sequence Number=SeqID_54825
atgacctggccgagcggccatagctgtggtggccgctgtcgggaaaacagcgccgctcgatccgttccgactgccggtaaagccaccccggcgacgactaacaacaagtcacgatcaaccaccgagttcagcctcgggcgcaacaggaagctccacctcgcccgacctcatgctccggcctccggaggaggtcttcgcctcgcccgacctcaggctccagcctcgagaggaggtctccgcctcgctcgacccccggactcggcttcgaccccggtctcgggaagaatcgcgtcctcgctcgaccctggcctcggcgtcaagagaagtctccgcctcgaccgaccctag

SEQ ID NO: 13047 - DNA, 288 bp, Zea mays
  Peptide Sequence Number=SeqID_54826
atggcccatgctggtgctggcgagcaggcaggagaggagcgacctgtgctggcgtctgcaggggatggatcacagagagaggagcaggatgcgctagggtgggatggagcacgggagaggagccactggccgccagggcaggatgcgcacagccaccggggcaggagaggagcactgagtgcggcacgccgacacgaggatggatcacaggagttaggatgggtgaagacccatggaagtccatgtctatgcaaacccatctacacccataggtatcaaccattttaa

SEQ ID NO: 13048 - DNA, 138 bp, Zea mays
  Peptide Sequence Number=SeqID_54827
atgtcggtcagggccaacagtcaacaagtgcaccggacagtttggtgcccccagaagcagaaagtagccgatcaggggattctgtgcccacgcactgttcactatctggtatcttcggactcagaattacgaacatga

SEQ ID NO: 13049 - DNA, 291 bp, Zea mays
  Peptide Sequence Number=SeqID_54828
atggggcagagcggcaccgccgtgcacaaggtggtcgagagtggcttagatctgaacgtaccccttcgctgtgaaaaagtttctaaagagcccctcatcttttaccaaataaacccgcgctccacacctattcaaagaacttcgccaactggtccaaaaccttataaaactgaccttagcttttttattattgtttatgacaagatcattgtgttaattggaaccatggagcgaccacctgggaaaacagtgctaccacaagggtggtatggaacgcccttggctgactaa

SEQ ID NO: 13050 - DNA, 276 bp, Zea mays
  Peptide Sequence Number=SeqID_54829
atggagcagggggtaaatctacgcacatttatacacgagaggagttgggaaaccgagcccaacaaccccgtgaaacatcccaacaacccagctaacgtcgcgatctacgccatggtcggcgcaaggtctgttgtaggcgagaagacgactgacacggtgggcccccgaggcccacacgacagtgaccaaggcggatgcaggcgtgatggagaaggggaaatgggccgcatgatagagtggagtttgggccgaccgaagggtttcgacccatggtga

SEQ ID NO: 13051 - DNA, 519 bp, Zea mays
  Peptide Sequence Number=SeqID_54830
atgacgctgaacttgcatgaaggcgagcagccgagcgagagtcccaacagctgggagaagcgccgggacatctgcgtcagcgtcatcaccagctactctcctaccatcctttgcacccaacaagttcgcctacgtggcaaaaaattagaatatagggaaccaggtttggagaatatgctggagaggagtgtgttggagccagaatatttggtttttattgtttttgtttgtaggctaaaaatagtgggtttggtatgcaggcttaagatggcaactggactacctacaacagtgcttgccagctctattttgattgcgcacttagttggcggtgcggaagcggccggtatgcgcacatggaagaagatcgtgcgcgtgcggaagaagcacaccccatgcggaagaagcacacacacaggggtcgcgagtttggaatctcaagaaaaggctcacaggacaacactgatgaatactgcacaatattctatgaaaaggaaaaggtttggcatttctggctaa

SEQ ID NO: 13052 - DNA, 282 bp, Zea mays
  Peptide Sequence Number=SeqID_54831
atggcgcaatgctcagctttacaacaacaacaacaacaacaaagcctttttgtcccaagcacgttgggatatgcaggcacagatgcagtaggaacaccaagagatgtgtcaggaaaggcaagatatgcgggaggagatgcgtcaagaaagaatggtgcgacagcagcaagcaccattgcctccaccaccaccaccagttccaccctaggacaagcaccgggaatttataagccacaagccacctaccttcgccagctctctggatccattacatgcggatga

SEQ ID NO: 13053 - DNA, 1002 bp, Zea mays
  Peptide Sequence Number=SeqID_54832
atggcttctgtcgccacaacaagctgtgacctgctggtaaggactgcactgcgtcctctgctccacctcacaccttctgtagcccagctgcgtctggctggtaaagctgaaggtgttctctttgaagatgcaggagatggatatgcattcacacagggagactatcttttgacatattatattgctgaactccactcatcagtgataagtacagatggtgttgatggtgaagtaatacaccttacaatgccttctgaatctgtagtgtcaagcttagttgcaaccagcgaatttgagcacaagaaacgaatggagatgattcagcctatacctgatatagaagagccatcggggcaggaaggtgctgagctatcaaaaatacctgttgatttgaaaagtggagactggttccttaagattgtaccatggattggaggccgtattatatcgatggcccatattccttctgattcccagtggcttcacagcagaattgagataaatggttatgaagaatacagtggggctgaatataggtctgctggttgcacagaagagtacaaacgccagatatccattttgaaggacaacccaaagattgttcagatcgactccagcattcaggcaagaagtgtaggagctggttctggtgggttttcaaggttggtctgtttacgagttcatcctacattcaccctgctgcacccaactgaggtagtagttgctttcacggccatcaatggttcaaagcaagagatctccccggaggcaggagaaataacattcgagggagacctcaaacccaacggagaatggatgctagtggacaagtgtgtcgggctgagcttggtgaaccggtttaatcccagggaggttagcaaatgctttgtgcactggggaactggtgatgtgaacatggagctctggtcagaggaaagaccggtgtctaatgagacgccgttgaggatttgccaccagtatgaggtgcagcaaacaacctaa

SEQ ID NO: 13054 - DNA, 933 bp, Zea mays
  Peptide Sequence Number=SeqID_54833
atgtgtaatctcctcaagctaaaagatagcaaactagatttggattcagttgaactacaaacaaactgtgatggtatacctggttataaacaaaggaaaatgtcaacgaatcctgatgaacctaagagtcatgcccggacagactttttgctcaacaatgaactagaggtccgaaagttttgggatgagaacaaggtttttcaggctgatcctggcaatgaatctccaagccctgaggaaaaattctttgggaactttccatacccttacatgaatggcttgctgcatatgggtcatgctttctcattgtccaagcttgagtttggtgctgcataccacaatgatcttgctactaggactggacaagagcttttggacatggttgatagttcgcccattgttgcaataaagagcctaaaagtatctgacttccaaggcgtgtctcttccaactatcggcagaagtacgctcgagattaatcctgatctgcttgaggctaagaatcttatgtcctggtatgtctctgaaggtaaagatatttcactggcaccaattagtgcagaagcgggtgccacgcgcgctggtggtttcaagtacatgtattccgatagagtttttctgtctcacatcaccagtgatcctgctatgggccaggaaaaggtgactgaagtttttgggtccggatactggtgtgaggggtgccaaaagaatgactctgagtgctcgctgagcgccgacgagcttgattggattaggaaagagtgggctcgccatcgtttgcaggagggggacaacagttacgttctcaagctcaaggaagccacctgggttcctcacatgttccgcgtcagcgtgacgcaagatgaatacatgaacgagaagagacagagaatcaccgtgaggggtgaagcactggtcgacttcgcagcttga

SEQ ID NO: 13055 - DNA, 348 bp, Zea mays
  Peptide Sequence Number=SeqID_54834
atgaggaacgagaagagcaggctgtccaccaatggacctactgcaacaagtgctcctccacccgcgtgcctgtataaaatggcaggggttctaccaacaatcaacacacatgtgaagcgaagctgggacatgcatgttttggtaaggttttctagcaggtatttaagagtggccctctcttcatatcatcgaaagtttaggagctcgtggcaatggaagtcccacaataggacgatggaactcgtggcatcaagtggtgtcgcgctcgggctcgcgctcatctgcaacaaggcactatttcctgtgagggttcctatcaccattatgctcatgccgcgagtaccttga

SEQ ID NO: 13056 - DNA, 444 bp, Zea mays
  Peptide Sequence Number=SeqID_54835
atgaaagagagccatggccaggaaggtggcggcgtaggcctagacgaggtagaggcgctcagcggcagcgcttctgcggccgaggggtgggaggggggaatggttgatgtagaattctgcgcttctgctgccgaggggtgggctgccagccttttccagaagcgcgtggagagcagtacattctgtaaccggaaggagattccaagaaaaaaaatccactataagaccaagttcaccgctattaccacgggcgacctctggtttttccaccaatcccagaagaaattaacaaaaaatattccgtactatagcatcaagcaagcaagcaaatccatgaaccacgaagtagattggattggaggagcattcacgtatcccctgaggaaaggaatatttggattcgagggcacaccagcgtggaaagagataatctctccaaactga

SEQ ID NO: 13057 - DNA, 2484 bp, Zea mays
  Peptide Sequence Number=SeqID_54836
atggatgaatcaagacaaccgctgtccaggaaaattccgcttccatcaagccagatcaatccatataggatgattatcattattcggcttgtggttttggggttcttcttccactaccgagtgatgcatccggtgaatgatgcatttgctttgtggctcatatctgttatctgtgaaatctggtttgccatgtcttggattcttgatcaattcccaaagtggttccctatagagagagagacttacctagaccggctgtcactgaggttcgataaggaaggccagccgtctcaacttgccccaatcgatttctttgtcagtacagttgaccccttaaaggaacctcctttggtcacagcaaatactgttctatctatcctttcagtggactatccagttgataaggtttcttgctatgtttctgatgatggtgctgcaatgctaacatttgaagcattatctgaaacatctgaatttgcaaagaaatgggctccattctgcaaaaggtacaatattgaacctcgtgctccagagtggtacttccaacagaagatagactacttgaaagacaaggtggcagcaaactttgttagggagaggagagcaatgaagagagagtacgaggaattcaaggtcagaatcaatgccttggttgctaaagcccagaaagttcctgaagaaggatggacaatgcaagatggaaccccctggcctggaaacaatgttcgtgatcatcctggaatgattcaggtcttccttggccaaagtggaggtcttgactgtgagggaaatgagctgccgcggttggtttatgtttcaagagagaaacgaccaggctataaccatcataagaaagctggtgctatgaatgcattggtccgagtctctgctgtactatcaaatgctccttatttgttaaacttggattgtgatcactacatcaacaacagcaaagctataaaggaagcaatgtgttttatgatggacccactactaggaaagaaggtttgctatgtacagttccctcaaagatttgatgggattgatcgccatgaccgatatgctaacaggaatgttgtctttttcgatatcaacatgaaaggtttggatggtattcagggtccgatttatgttggtactggatgtgtgtttagaaggcaggcattatatggttatgatgcccccaaaacaaagaagccaccatcaaggacttgcaactgctggcccaagtggaaacacaagaagaagactacgaaacccaaaacagagaagaaaaagttattatttttcaagaaagaagaaaatcaatcccctgcatatgctcttggtgaaattgatgaagctgctccaggagctgagaatgaaaaagctggtattgtaaatcaacaaaaattagaaaagaaatttggtcagtcttctgtctttgcaacatccacacttctcgaaaatggtggaaccttgaagagtgcaagtcctgcttctcttctgaaagaagctatacatgtcattagttgtggttatgaagacaagactgattggggaaaagagattggctggatctatggatcagttacagaggatattctaactggtttcaagatgcattgtcatggttggcggtcaatttactgcatacctaaacggcctgcattcaaaggttctgcacctctgaatctttcagatcgtcttcaccaggtgcttcggtgggctcttgggtctattgagatcttcttcagcaatcattgccctctttggtatgggtatggtggtggtctgaaatttttggaaagattttcctacatcaactccatcgtgtatccttggacatctatccccctcttggcttactgtacattgcctgccatctgtttattgacggggaaatttatcactccagagctgaacaatgttgccagcctgtggttcatgtcactttttatctgcatttttgctacaagcatcctagaaatgagatggagtggtgttgggattgatgattggtggaggaatgagcagttctgggtcattggaggtgtgtcctcgcacctcttcgctgtgtttcagggacttctcaaggtcatagctggtgttgatacaagcttcactgtgacatcaaagggtggagatgatgacgaattctcagagctgtacacatttaaatggactaccttattgatacctcctaccactttgctcctattgaacttcattggtgtggtcgctggtgtttccaatgcaatcaataatggatacgagtcatggggccccctcttcgggaagctcttctttgcattttgggtgattgtccatctgtatcccttcctcaaaggtttggttgggaggcaaaacaggacaccgacaattgtcatcgtctggtccatcctgctggcttcaatcttctcactcctttgggttcggattgaccctttccttgcaaaggatgatggtccacttcttgaggagtgtggtttggattgcaactag

SEQ ID NO: 13058 - DNA, 423 bp, Zea mays
  Peptide Sequence Number=SeqID_54837
atggccggcgcttggcccccagctcgccacgccctggactccctggccaccgcgcctttgctcctccctgctcggcctccaacggcggcctccctgccgacgcgcccccgacgccgcgctgagctctctgcgccacgcacctgctatgcgctcgacaaattgtttgaatcggaaaatcattaccgatctcgaggattcgagtcagccattggaacgttgttcatgaagattgttttattcttagcacaggtacgcttgttaatcacgagatgtggaggacaagagccgagtcgaccccaagttgacgtaacaggtggattactccgcatagtgaagctgatagatgaatctgaagatggatggacgaagcaagtatcagaacaaaagctgatcgccaagtggtcgtcacctaacaaacattaa

SEQ ID NO: 13059 - DNA, 195 bp, Zea mays
  Peptide Sequence Number=SeqID_54838
atggaggaaaaagaaattggctgcatgcggcagattcggagctgcgtgagtgccgtggggccatggcggatgcaggcggagatgtcgcaggggaggctggatgacagaggtcggagacgccgggcgagcagggctaccccgcgcaggagcatccgcaacggaccacttttcccgcgagaccccaggcggccgtga

SEQ ID NO: 13060 - DNA, 342 bp, Zea mays
  Peptide Sequence Number=SeqID_54839
atgccagcgccctctaccggctcgccactcagggtcatcctaaaaagcattttccttttatcttgcatgcttctaaccgaaagagttgatttgtggtatgagtttaactataacagtggacaactagcaccaaagacgattattgatcaaatttatgggaacacactatcaatttcggaaataaaaacagcagacattcctgataatgtcctatcctctgttggagttgtaagcgatggtgagttcactatagaagtgatagatcatgttttagattaccttgaattagtggataatgtgtttgacttccaacttatcaaggatttgcttttctcggcctga

SEQ ID NO: 13061 - DNA, 312 bp, Zea mays
  Peptide Sequence Number=SeqID_54840
atggtgagcataggaaagggactcagggaggaagacgagcgtgaagctacgagttgcggccagcggagaaccgtggcgcagagagctcagcgcggcgtcgggggcgcgtcggcagggaggccgccgttggaggccgagcagggaggagcaaaggcgcggtggccagggagtccagggcgtggcgagctgggggccaagcgccggccatgggagggagcaggagagagagccgcgatggagcttgagcagaggaaagctgcgcgcgtagataaaggagcaggggcggtggctgtagagaaagatcaggggtag

SEQ ID NO: 13062 - DNA, 435 bp, Zea mays
  Peptide Sequence Number=SeqID_54841
atggcgattgaacgaaggaatggtattatgccaaagtttactctgagcaacatgaggattttaatgattatgaagatccatcggccaacgtcggggctggagaaaaaaaggaaaagatctcctaagggtgctgacaaagagtcaaagaagactaccgatgtcgaagcagaggaggacgaagcatccaaaattgacgaagagccaccttcgggcccgatagaggtcaaaattcctatatcgaaaggtggcaaatcttcgaagggcaaggaaattttgtatgaagaagaggtagagagcccacacattttgggtcttggaagtgcggccttcgggagttcatcatcctctaaaaaagatggtgcaacgaaatctgccaagaaatctgccaaggatgatagatcttcggggcacaagaaaacagaagaaggcccatga

SEQ ID NO: 13063 - DNA, 210 bp, Zea mays
  Peptide Sequence Number=SeqID_54842
atggccatgatgggttcaacatcggaaaagatgtacctctgccagccttaccttgacttccttaaccagcatacccttgagagtcttttctttagtcgggtgaggaagcgacaaatttttgttgcttctgctctaaggtggtgccaaaagaagaacacaaggaatgaagtgtgggaggaaaggatcgtccatatagaactttttgtttaa

SEQ ID NO: 13064 - DNA, 609 bp, Zea mays
  Peptide Sequence Number=SeqID_54843
atggccagattatctaggtacgccctcggacaatttggcccggtcacggaccgtttggcccttatgtcggaccgtcagagtacagaactacccaggcagtgccatatatggtcgaacagtctggatacgccctcggactgttcagcccagtcgcgagccgtccgggcccttatgatagaccgtctggggctcgagctcaacctcgacgccggacgacggactccgccttgcccgacccagggctcggactcagcctcgaccccagaagacggactccgcctcgcccaacctagggctcggactcagcctcgaccccggaagacgaactccgcctcgcccgacccagggctcggactcagcctcggcctcgaaagatggtctccgcctcgcccgaccctagggctcggactcagcctcggcctcggaacacggtctccgcctcgcccgaccccagggctcggactcagccttgacatcggaagacgaactccgcctcgcccgaccccagggctcggactcgacctcgacctcggaggagccttcgcctcgcccgacctcgggctcggacccgccacgtcacagggaaggccatcattaccctacccctag

SEQ ID NO: 13065 - DNA, 495 bp, Zea mays
  Peptide Sequence Number=SeqID_54844
atgaacagtcgatgtataactcatggtggtgccgagcgtcttcagggtataaggcctgctgtccaaaaagttgtgcttgctataatgactgagagacagatttggtgcctggctggggcttctgccctgcatgacttggtccttaagctggaccactttggttcgtttctggaagtcagtgctagaagtaaaaaaagaattgccaaattggtggaagtggtcgctagtatgcagctcatccggcaagaactgtgttactttctgaaagacagaaagatgtgcatttctcatgtgctcagcgtagccggtaatgggatcgagcaagcaacacaagggatgcggtcatccaagttctgcctcaacattgcaggtgacactccatcctccaaccgcctctttgactacatagtcagtcactgtgttcccgtcattatcagcgatgagattgagctccgtttgaggatgtcctcgactactcgaagtttagtgtcgtag

SEQ ID NO: 13066 - DNA, 414 bp, Zea mays
  Peptide Sequence Number=SeqID_54845
atggaggctaaggcggtgaaaattgatggtaaatatttaacgaagactgagacaccgaaaagctgggatatacgcggttcaaatgttagattgaatcgtgtgtttgagctgaacaacctctggtatggactgtatcctgaagaaggctctactgatgttagggatgtcaaggggcagaagaggaaaggtggaatcaggcgtggtggggtggatgaggggtgctccaagggtaaggctaagatgccgccaatgaaaaagaagaagaaggtggaggcaaaaaacaaagggctgacgagggtagttagactgacagagatctccgatagatttgctgaggagctagccgagacatgcgctgagccgagagaggaacagtttaagggtgtgtttgactggatgtacaaggagggatga

SEQ ID NO: 13067 - DNA, 366 bp, Zea mays
  Peptide Sequence Number=SeqID_54846
atggggacgacgagcagcggcgggaagaacccttcagctagattaaacctcctgaccttccgggcgagtgtgccgctggagaggaagaacgacggaaaggatcttgcccccgccatccggagaggaacgatatcaaccgcgcaggcctcgaccaaggtcataggtggatttgaccctaaagctgaagctaggtttcgtataggtgaaagccttaatcggtcagaagtgctaacaccgcaagcgacagctgaagggccaccacttgctgagaccatgatgacaaaaggtgtacttttagcactaaaaacaggcaatagtgttacttcagaattcagaacacatataagtcctcatgggtgctcttaa

SEQ ID NO: 13068 - DNA, 2076 bp, Zea mays
  Peptide Sequence Number=SeqID_54847
atggatcaggacacaccgacattgaagccgggatggatgcagcatgacaaggcagcaggcgctccaaacatctggactatagcttcctcccactcagattatcaagctgcgggtggttcgtcaagaagccattcatctgaacattaccgtaaccatggttcccagcaatcatcatcaaggagaagttcaggctcgaatggatctcgccagcctgaccgggatgcaattgggaagtcaagggactatttcaatttcggaaagtccaaggacagggatcggcagagggactttgattcccgtgattgggagagtaggtcggctggtgcagttcgtgatgatttcaagtccttcagcacatgcaaatctgaaagggataggatgaatcatgcccgctcaaaggcagacacatggagtaaagccagcggtagcacctctagaaataatgcagttagttcctctactggaactgttgttaactctgttagaaatgcagctttggggacctccataagcaatgcttctgtacggacctcagtaagaaatacttctattagtaatgctgtaagcaatgccagcaatgctgctagcataacttttgaacgggaatttccgcagcttagttcagaggacaaaaatggaaggcaaggcataagcaaaatcccatctgctggtatcagcacctcaattcagaatgtacctctggtatcttctgatggctggagctccatgctagcagatcttcctttattaagtgatccaaagaaaagcctagccacttcttctctattgcacattgctcctagtaaacagactgaagtggtgccaaacactgggactgcattaagcatggcagagacagtgatgcaagctcctctgagaatttccattgggcctgagttatcgaccgaggctcagaagattgaagaaagaaccttgaagcagcttactctaagacctattacacctccagcaagcaaatcttctgctcttagttctttgaaaataaaaggtacaaggcttggagatcatcctactggtcctagtaagacctcacaactattaaaaatacagtcagccaacacttcttctagagctccagttaaagcagatgtttcaaagctctctcagccaggaagcttccaagttctcagtcgagagcaaaacggtactgcacacaccgccaaagactgtcctgtgaaacctgtgagtcctccaactcctttggcgtcgctggaaacacagaaaaaaacagtggcgagccaaaagttgaagtttggcaccaatgagagtcttctgcccctgcaaggtccatctcgtgacagaaagtcaaatgcaagagacaaggttagattctttgagatgctacggaccaagtcttcaaatggttcaagcactgcctttgagccaggaagccaaccatccccatccagcttagttgatgtgaagcaggattcttctcttaatcttggaaatgacttccacgtgttctgttctgagatcaaatgcacggagcacaggaggtgtttctgtgaagaagcaaattcttctgatgggtctcagaggcacctatctgataccgaggagcacattgcatccttgaaactgagcgttatgggtggaatgcctcagcagcctctagttgaaaggagagaagctaactcatcatctgaacctgcggacacaggtgatgaaggatttcagtcgttcctatcggacagcgcagaagtcagtttgtcctcaacacttgcagattcagatgatggatggaatagatcccaatctggcaatgaggaagcaagttcattatcagaggatactgaatcagatgatgatttccatccagctgacatttctccagaagataagcgtttcatgatgttgcttggttggaaagaagatgaaatagtgcaagtgacacctttggatttcgacgagattgcagacacggtaaaaggctgtgaggaactcaagaagaagcttcagtctatgcagttcaatgaagaagtcaagagcattctcctccatattgagctggacgagaagcagcagcagcagcacaagagtacaggggactaa

SEQ ID NO: 13069 - DNA, 1329 bp, Zea mays
  Peptide Sequence Number=SeqID_54848
atgaagggcaaaggcgggccggtggacaggaggtcctccgccaggtggaggttgctggtgctctgcgcattcagcttcggcatcggcatgctcttcaccgaccggtctaaccgtctaaagttcggtcgcagtcgtttctcacgtgggctcccacgccaaagcacaggtctaaagttcggtcgcagtcgtttctcacgtgggctacggtgccgctgtatatgggtgggcagaggttctggacagcaccggataccagtagccataccatgtctcaacgctggaggcaagagcaagagctccaacttgtatcagaagattgcaacacaaagagggtggaagcatggggaagacaaggatataatgggagaggtaaccaagactcatgaagccatacaatcattggataagtccatctcaacgctgcagatggagcttgcagcaaagcggagcacacttgagctactccgatctagtggttcaccagtaacctctgaaactaaccaaccaaggaaaaaggcttttgttgtcattggagtcaacactgcattcagcagccgcaagcgccgtgattctgtccgggagacatggatgcctcaaggagaaaagctgcaacaattagaagaacagaagggaatagttatccgcttcactatcgggcacagtgctacatccaacagtatactggacaaagctatagattcagaggacgctcagcatcatgactttcttaggctggaccatgttgagggatatcatgaactctcagctaagacaaaaatattcttctctactgctgttggcatctgggacgctgacttctacgtcaaggtcgatgatgatgtgcatgtaaacctaggaatgcttgccactacccttgctcggcataaatcgaaaccaagaacttatattggctgcatgaagtcaggcccagttcttgctgacaagaatgtgaagtaccatgaacctgagtactggaaatttggggaggaaggaaataagtacttccgtcatgctacagggcagatatatgccatttcgaaagatctggcgacttatatctcaatcaatcggcctatcttgcacaaatacgcaaacgaagacgtgtcgcttggatcgtggttcatcggtttggaagttaatcacatcgatgaaaggaacatgtgctgtggaactccaccagactgtgagtggaaagggcaagctggcaatgtctgcgtagcgtctttcgactggagctgcagtggcatatgcaagtctgttgagaggatcaaagatgtacatgctcgctgcggcgaaggggattcagcagtttggagtgctcttgtctag

SEQ ID NO: 13070 - DNA, 324 bp, Zea mays
  Peptide Sequence Number=SeqID_54849
atgacgttcttcgtggaggaccttgcgcgaaatggattcgtgggcgccggcggcggctggaccggggagtgcagcgacgacgtgtggtgtaggagagaggcggtggcggcgttggggccgaggagacggcgtggcggtggcgtggcgatgtgcgaggcctacgtcgacgacattggggtcaaaactaagaagattcacaacctcgtctccgacttggaaacaaccttcgcatgcttgcggaccaaaagcattaaactcaaccccgagaagtgtgtcttcggtgtcccccgaggcatgctcctgggattcattgtgtcggagtga

SEQ ID NO: 13071 - DNA, 411 bp, Zea mays
  Peptide Sequence Number=SeqID_54850
atgggtgggggtgggggtggggaggggatcgcgacaggacgggggcggctggttcctcaccagcatgtcggcgttgtgcacctagaggtggaggaggtgctattctggcacccatctatggccgagcggtggtgcgcgctcgcccacgatctaggggatgggggcacggacgcagaccatcagtggggagcgggagcaatcatctatgcggggtgggagtgggggtggggaggggatcgctgcgggacagggtggctggttcctcaccgacgcgtcggcgtcgtgcacctagaggtggaggaggcgctatactggcacccagctatggccgagcggtggtgcgcgctcgcccaactccacgtcgtcgtcgtcaaggtggatctcaccgtgcacctcgtctacgcccgctag

SEQ ID NO: 13072 - DNA, 228 bp, Zea mays
  Peptide Sequence Number=SeqID_54851
atggctaaaatccctaatcatcggcgacggagctcctattccctccagctgatggacgacgacactattattccttgcatcacccttatcctagatggaaacctgactcaaggtccctacgaccttatcttcaatgggaagtccatctctggtgattattctttgaaaggacagatgaatgaaggcaaaagcatggagcagagcaactggacagttaagggagactaa

SEQ ID NO: 13073 - DNA, 243 bp, Zea mays
  Peptide Sequence Number=SeqID_54852
atgaacctcgacgagctcctagagaagaagtgctccactccggttggtagaggtggtggcggctcagatcagtccgacgctgcccctttgtccccccacacgtcttcggatctgcaacccccctgcgcgcagcaacttatctggttacttttgagggcaagaaactatttgcttaaagcagggaaggttgtgggaaagggcgaacctttgcacaaaaagaggtattctagaatcttctgctaa

SEQ ID NO: 13074 - DNA, 321 bp, Zea mays
  Peptide Sequence Number=SeqID_54853
atggacatcactggcggcgctactggggttctggcggcgagagagggcttgggggctgggttctgcgaaggacggttgcagcacggatattatgcgatgcacatcgggtccaagcgcggttcgatggccggagatcgcggcatggctgaacggcccgcgaccggtagtcgtccgaggaagacggacctggtcatcaggtgttggtggcttgcgcgtctgcggaacgggccccacacgacagagggtaagggttcggcgcgcgcgacatacgggcccgcgtgcgaagagctggccggctgcggtggggacccacatgtttaa

SEQ ID NO: 13075 - DNA, 321 bp, Zea mays
  Peptide Sequence Number=SeqID_54854
atggacatcactggcggcgctactagggttctggcggcgagagagggcttgggggctgggttctgcgaaggacggttgcagcacggatattatgcgacgcacatcgggtccaggcacggttcgatggccggagatcgcggcatggctgaacggcccgcgaccggtagtcgtccgaggaagacggacctggtcatcgggtgttggtggcttgcgcgtctgcggaacgggccccacacgacagagggtaagggttcggcgcgcgcgacatacgggcccgcgtgcgaagagctggccggctgcggtggggacccacatgtttaa

SEQ ID NO: 13076 - DNA, 660 bp, Zea mays
  Peptide Sequence Number=SeqID_54855
atggctcgaacgcctgacacggcgcgtccctttgttcacctcgtcctgttgctgggcgccatctcgcctccctcgccgcgttgctgtgcgtgcctctaccatggcgacgtgcccaagcacgtgaccgaggccaacctgctcgtcttgttctgcgaggtcgccactgtcgaggaggtcatcatcatcaaggacaaggccaccaaggtctctcaaggtgtagatctgcctggccccagatctaggctcgtcgccctcccttccccacgcctgctcccgctcggttcaccgcaatgttgtgacctccactactcgctccagggaagttgtgctccgctcggggttgggtttgggagcaatagagaggagaagaatgtggagaaagacatcagggtggctgccaagcgcaatgacatgggatctgcaaagaagcagccggatctctacgacaccaacaggccggggtgggggacccgcccccatggtcgtccatatcttgattccgaagcaaaggactccgcgcttgtcatcttcactgtcacagtacctgaggagaacgtcaaggtggacaggccgaccagaattcgaaagcccaatagaggaattgctgacaccaaatatcatgaccaattcccaaaggagctcttatcaaacgacaactaa

SEQ ID NO: 13077 - DNA, 234 bp, Zea mays
  Peptide Sequence Number=SeqID_54856
atggagttgagagaacaggggcaagccctcggtgttcgtcgggcgcgtgggaccagttcacagaagaagcaggttgtatcatggcgtgcggcgaccggaatttcgtcatcgtgcgactggatccgctactcgccgcgactacctctgtcactgcttcgaccgtcgttgaggtatcctttatcctgtcccccttcatcagtgcgtcctctagaacccatcggaactcgtgattag

SEQ ID NO: 13078 - DNA, 3090 bp, Zea mays
  Peptide Sequence Number=SeqID_54857
atggcgccgcgctcggtgagcctgctgcttctgctgacgctcgtggtggccgccgacgacgaggccgcgctgattgcctttaaagccgcggcgatctttggcggcgacacgcttgcgtcgtggaacagtagcggtgccggcggattctgcggctgggtgggggtgacgtgcgggggcggggccaagcaccgccgagtggtggcactgagcctgcccttgcacgggctgagcggatcactctcgcctgccgtcgggaacctgtcgtttctcaggactctcaacctcagctccaacgcactcagcgggggcatccccgacagcctcggtcgcctccgcctgctccgagaactcgacctgagctccaacgccttctcaggcgaggtccccgccaacctgagctcctgcaccagcctagtcctcatgcgcctccgcttcaaccagctcaccgggagcgtgccctacgagttgggtgagaaactgatgaatctcgtggtgctcagtgtttggaacaacagcctcaccggcaccatcccagcgtcattagccaacctgtcgtcgcttagcatcctgtcacttgggttcaaccagctccacggcaccatcccgcctggcatcggcgccatccaggccctccagcacctcgacctcaatgacaaccacctctctggcgaacccccacattccttgtacaacctaacctcgttggaaaggttccagctcagtgataacatgctccatggcagaattcctgatgccataggcatcaggtttcacagcatgcagatgcttgagttttatgctaaccagttcaccgggtccatccctgtttcactcttcaacctcaccacactgcagatgcttgacctctcagaaaataggctcggtggatatgtgtctggtgcagttggaagattggtagctctgcaaagcctattactgtacgggaacctgctgcaggcggacgacaaggagggctgggaattcatcacgtccctgtcaaactgcacccagctcgtggaatttgaaatcggcctcaacgccggtttgactgggcagctgccaagttcaatagcgaatctatctagcctacagacgctccgctttgatggatctgggatctcaggaagcataccatcggccatcggcaatctgctcaacctacaagtcctcggtatgtcaagtactttcatatcaggggttattccagagagcattggcaggctgggaaacttgactgagatggatttgttcagcactgacttgtcaggcatcattcctttatctattggaaatctcaaagggttaaatgtctttgatgcacatcattgcaacttgggggggccaattccagcaagcataggcaacatgtcgaatctgttgacacttgatttatcaaagaactccctcgatggttcaatttccaatgagattttcaaactgtcatcccttctctatttaaacttatcatacaattcgctatcgggacatcttccttctgagatgagtagtttggggaacctgaaccaactagttctgtctgggaaccgattgtctggcgagatacctgagagtattggggaatgcactgtgctgcaataccttatattggataataactcaatcgatggaagcatacctcaaactctgagtaacataaaaggtctaaatgcactcaatttgtccatgaataaactaactggtgttatcccaagtaacattggaactatccaagatcttcaggtgttgtatctggcacacaacaacttgtcagggccaattccttcgctcctacagaatttgacagcattatcagaattggatctgtcattcaacaatctgcaaggggaagtgccaaaggagggtatcttccgatattcgactaacttttcaatcattgggaacagtgagctttgtggtggattacctcaacttcatttagctccatgccagacagatcccatgaaaaagaacagaaaagggcagttgaagcatcttaaaatagctctggcaacaataggtgccctattgatcttagctttctttattgcactccttcagtttattaagaagaaacttatacgaaatcgtaaccaacccttaccaccaatagttgaggaacagcatggaagagtttcttaccatgtattagcaaatggaacaaatggattttcagaagccaatttgcttggtaaaggaagctttggggcggtctacaaatgcactttacagcctgaggaaactgttaccgcggtgaaagtttttaaccttcagcaatctggatccactaaaagttttgtggctgaatgtgaagcattgagaatggtgcgtcaccgttgtctcattaaaatcatcacgtgctgctcaagcatgaatcaccaagatcaagagtttaaggctttagtttttgagttcatgccaaatggcagcttagaaggctggcttcatccaaattctgatattctcactatgacaaatactctaagcctagaacaaaggctagacattgctgtagatatcatggatgctttgaactatcttcataatcactgtcagccaccaattgctcactgcgatctcaagccaagcaacattcttcttgcagaagacatgagtgctcgagttggagacttcggcatatcacgaattcttccagaaaatgcaagtaaaatcctgcaaaattcaaatagcaccatcggaataagaggctcagttggttatgttgctccagagtatgctgaaggctctactgtctcaactattggtgatgtgtatagtctcggtatattgttgcttgagatgtttactggaaggagccccatagatgacatgttcggagacacagtagatttgcataattatgccaaacatgcactcagcgaaagaatcttagatattgttgattcaacaatctggctacatgtagagtcaacggatagtactataaggagcagaattaaggattgcttggtttctgtcttcaggctagccatatcctgctcaaagcttcgtccaggggatcgaacagtgatgagcgatgcagcagcagagatgcacgccatcagagatacataccacatgttttgctgctag

SEQ ID NO: 13079 - DNA, 618 bp, Zea mays
  Peptide Sequence Number=SeqID_54858
atgtaccccattgctaaggaagagtctgtcctcatccatcgatttcttttcctgcttacacagcaccctaagctagcacactccaccaccctaggacagctgactgagtacctcagaatgaatactcagaggtctggacctcatccaaactcaagagaacctagagctagccccaaaaggcttaagcctcatcctgaccaagggacaagtcctgagaccctgctcaacgaggacaccaggcgaggaggcggaaaggagctgtcgcaaggaagagcggtgccacttctccctcacaggttgaggcccagtgctgccatgtatccagcgacacatggcgtgggccacggggggaagcctggtcttggcctccatggtacaatgtgcctcagcattaaccacgagcaagacgtatacctgcccgctccagcggtagacactacaaccaaaaggcatgtgccacacaatggctcgcgcgctatcgaggcgggaccgttgactctttgcaccacgtgggttgctgccatcatggtccccactgtagcgcgcgaggaaccaaggaaaagggtgacaaacggaggagatgggacgacgtcgctagagcatccgtacacacgatag

SEQ ID NO: 13080 - DNA, 324 bp, Zea mays
  Peptide Sequence Number=SeqID_54859
atggcgacatcgggcctgacatcgcggcacggccggatcggcacacgctgtcgttacctggcagggtcgtcgtgttgggatccaggttccgaaggcgaaggtcatgtggcggagggcgcgtgcgttgttgagcgtgaaggggaggcggaggcatctaggttctgggaggtatacgacgtattaccctgtcccctcaagtatatgggtcactatagagaccccgatgctaaggtttctacggccgggttgtccgatcccactagtcatcagagatatgtatccgacgtcgtgcctgacaaggacccctcggtaccgcttccatag

SEQ ID NO: 13081 - DNA, 2058 bp, Zea mays
  Peptide Sequence Number=SeqID_54860
atgcaaggcctcatgttggctgacacagggatcgtaggaagcatccccttagaaattggcaatcttttcaacctccagttcttcagcgtgtcaaatacttccgtgtctggtgcggtcccagatagcattggcaagctggtaaacttggttgaattaaacctgtacaataccaatctgtcagggcttataccttcatctattggaaatctttcagagttagctgcgcttgttgcattcaatagcaatctggagggaccaattcccaaaagcatagggaggctgaagaacctctatgcccttgatatctcaagtaaccgcctaaacggttcaattcccgtcgagattttccagctaccactcctttctagatacttaggcttattacataattcattatcaggtaccctacccgctgaggttggtagcttgataaaccttaacatcctggcgctgtctagaaaccaactgtctggtgagatacctggtagcattggggactgcaccgtgttgcaggaacttgggctggatgacaacttatttgaaggagccatacctcaatctctgagcaatataaagggcctaactggactcaacttgtccatgaataagttgtctggcgtcattcctgaagccattggtagcatgcgcaaccttcaacagttgtatctggcacacaacaatttgtcagggacaatcccaataatattgcaaaacttgacattgtcagaattagatctatccttcaacaatctgcaaggggaagtgccaaaagaggggatattcaaaattttggctaacttgtcaattactggaaataatgatctttgtggtggggtaactgagcttcgtttacctccgtgccacataaatgtggtgaaaagtaacaaaaaagagaagttgaaatctcttacaataggcctagcaacaaccggtgcactcctgttcttagcttttgctattgctgctcaattgatctgcaagaagcttagacaaaggcagacgaggtcattccaaccaccaaaaatcgaggaacactatgaaagagtttcttaccagacactagaaaatggaaccaatggattttcagaagctaatttgcttggtaaaggaagctttggggaggtatataaatgcacttttcaagatgaaggaaatattgcagctgtgaaggtttttcgccttgagcagactagatctataaaaagttttgtggctgaatgtgaagctctaagaagggtgcgtcatcgttgtctcataaagatcatcacgtgctgctcaagcatcaatcaccaaggtcaagagttcaaagcacttgtttttgagttcatgcccaatggtatcttaaatgattggattcattcaaaatctgccatgcccactttgagaaatagtctaagcctggaacaaaggctaaacattgctgtcgatatcattgatgccctggactaccttcataatcactgtcagccaccaatcgtccattgtgatctgaagccaagcaacattcttcttgcagaagacatgagtgcccgagtcggagactttagcatatcaagaatacttccagaaagtgcaagtaaagccctacagaattcaaatagcacaattggaataagaggctccattggttatgttgccccagagtatggtgaaggttcttctgtgtcaactattggtgatgtttatagccttgggatattactgcttgagatgtttacgggaaggagcccaacagatgatatgtttagtggttctttagatctacacaggttttcaggggatgctctaccagagagaatatgggagatagccgatacaacgatgtggattcacacaggtgcatttgacagcaccacaagatatagaattgaaaagtgcttggcttcagtatttgctcttggaatatcatgctcaaagaaacagcctagggaaagaacactcatacatgatgcagccactgaaatgaatgctatcagagattcgtacctccatattagcagatcgcctatggtggaatgtggagtggacaactctgcagtaatttgcaacgataattaa

SEQ ID NO: 13082 - DNA, 495 bp, Zea mays
  Peptide Sequence Number=SeqID_54861
atgtggaaattccgtggaagaaagaaaggaaccatgtggcgctttcttctcgtagatgccacagaactcgcgcacaaagcaaacacgcgtttccagttttacgtctcctacgtcaaagacttcgggaagcaagtgacggaggtcgccaagttggtcccacagcaggaagcccaccaaatccagcgagatccaggccgtcttggcctcgccctctcggcggacatcaccaagcacaccggttgtctcctcgggcaccaccaagccacctggccttcaccaagttcacctcatcttaggttagcctctaggactggaaatagtagcagtggtattggtagtcgtgcctcagttcatctcattacctgctattccctactgacaaacatagtttcaaggaaggtatgcggacaatcacctatggtgttgattgttcaagaatcacatcagtaccactcattctttgttattctgaatgtttgctacatttataactag

SEQ ID NO: 13083 - DNA, 346 bp, Zea mays
  Peptide Sequence Number=SeqID_54862
atgagaaaagatgcaccaacacgcagatcgacgccgccattacctccatctcctaccctcacccgcacacctcccttccgcccggggcgtcgacgcctaggtctgcgtcctcgtccaacctccacccgctgccgctaccctcacccgcacacctcccttcgaccatgggatgtggtagtggcttacttctcagtcatcttcgtgatcgtcgtccgaccatggggatcgaatgcgagcagtagcaacatacaggaacacacggacatgaagatggatgatgatggcgatgactacaccttcgacgctgcccagccgcttcattatctacgatttgtaggcgacgctg

SEQ ID NO: 13084 - DNA, 816 bp, Zea mays
  Peptide Sequence Number=SeqID_54863
atgacacttcctgttgacgtggtcggtccgtgccctaggttgggcgaggtggaggctcctccgaggtcgaggtcgagtctgtcttccaaggtcgaggtcgagtccgagcccccgggtcggacaaggcggagaccttcggctgaggccagggctgagtccgagccctggggtcgggcgaggcggagttcgtcatccttcggggctgagcctgagtccgagccctggggtcgggcgaagcggagttcatcgtcttccggggctgagcccgagtcggagccctggggtcgggcggagcagagttcgtcgtcttccggggccgagcccgagtccgagccctggggtcgggcggaacggagttcgtcgtctttcggggctgagcccgagtccgagccctggggtcgggcggagcggagttcatcgtcttctggggctgaacccgagtccgagccctggggtcgggcggagcggagttcgtcgtcttccggggctgaggccgagtccgagccctggggtccggtggagcgaagttcgtcgtcttccggggctgagcccgagtccgagccctggggtcgggcggagcggagttcgtcgtcttccgggccgagcccgagtccgagctctggggtcggcagtcggagcggcgcaggcggcgctgtcctcttgtcagaccggtcagtggagcggcgaagtgactgcggtcacttcggctctgtcgattggagggcgtgcgtcaggataaagctttgtgctgatgggggttaccagctgagatttaggagccttgagggtacccctaattatggtccccgacagtag

SEQ ID NO: 13085 - DNA, 522 bp, Zea mays
  Peptide Sequence Number=SeqID_54864
atgggcaagagcaagaagggcggaagttcatcgcaccactctggcgacaagtggaagcacgagccgagtcccccctcagaggacttcggcgactctgagtactcggaggaggagttttccttcgagtccgaggggtcaccgatctatgcctctcccccggcatcgtccgatggctcggacgattcccaggggatcgctaccgaggtgtggacatacatccaggccgtcgagcgctctaggctcgagggcttggatgagtcggaggtctcctcagacgaggagaactcttctgactcgtccgaggaggagagcaacggtgatggcgacaacgagggcgacagcgacgacggaggcgacggtgactgtgacggtgacgacggcaagggtgacgacggaggcgacggtgacggtgacagcggcaagggcgacggcaatggcgacggcaagggtgacgacgatggtggcggcggcaagggcgacagcggcagcagtaaggccagtggcaaggcgccactggtttaa

SEQ ID NO: 13086 - DNA, 552 bp, Zea mays
  Peptide Sequence Number=SeqID_54865
atgcccatggcacaaaccaccgcgagagtccggccagtggtgtctaaatcccaagcgcacgcccaacactgccccagccaaccggtcaatgggactcttgatagtttctgtaataccgcagagaggaaaacaaagcttaccaggttagcgccgacccggccgaccgcggtgcccagggaaggggaatacgtcaatggcgccaaggcttcgatgagccgttgcgacaaacgcggcgggcagcacgattctgttatgcgcgagtttgttgagagggggaagaatgcgctgacaagatgggtccccagggcagtgagatcgggggcacggcaacagcctgatccactaggatttgcggcggccgcaaccaccaacgccgagatccccggctggaagatgcacagtagtggaaggggagcgacagatgctggcaaagcgaccccacacggcagcgaccagactttggcgttcacagataggcaagctgacaggtgggcccggttgttggcgcttcatcaggttgaattggaatttcgaattaactttttaatgtag

SEQ ID NO: 13087 - DNA, 648 bp, Zea mays
  Peptide Sequence Number=SeqID_54866
atggcgcgtccccccccttcctccttgcggaatggcgacgaaggggcgtacaacaaaaagtcgagacagtccttgatcatcctctcgctccgtgcagaggctcgggggctgctctcgcaccaggctacggccaaattgtcgaccacatcgacaaaccagcttaaaaactcggagcctgaccatggaaacaacgctattcacctccgttctgactactgtaccaaccaccagggtgaaactggcgacagcctcagcctcagcctcggcctcaggagaaggtctccgcctcgcccgacctcgggcctcggcctcggcctcggcctcgggaggagtcacatcctcgcccgacctcaacctcagcctcgggagaagtctccgccacgcccgaccttgacctcggaccaactacgccactggggatacatcattatcatacccctagctagctacctcaggatacgaaggaacaagaccggtgtcccatctggattactccggcaacagtgggcgggtaacgggtatccaccggatagcggatacccggtatggattcacgaactatatatccatgtactactcgcccaattgccatccctagccaaggtcatcccattccacccttgtggtggcacttgtttcccaagttaa

SEQ ID NO: 13088 - DNA, 195 bp, Zea mays
  Peptide Sequence Number=SeqID_54867
atggagaggagggagatgaaggagatgggcgcgcgcagggagcatgcgcgcggccatggaagggagcttgaaggattcgcagaagagaggataaggaacagagttagggacggtggatactggataaataagaacggcgacgacgataggatagatactttgcctcaaacatttagttgtcgaggatcaaattaa

SEQ ID NO: 13089 - DNA, 342 bp, Zea mays
  Peptide Sequence Number=SeqID_54868
atgggggtggtggtcggacccaactgtgccaaggcgagcagggacgacgtcaaacttcaagaaccaggggacgcggtcacccaacctgagcagatagaggcaccaggcacatgggctgggcagagggtgggcgggagctcgagacgagctcggcagggacctgagcattcggcgctgaggagctcggctgaagaacggcggccatgggagaccagggaaggagggtctcggctggggagggagatccgagctggggtgcggcggagcaggcagccatgggagggagccgacgagcttggggagatggggaggagagaggcccgcgcgcagccatggagttga

SEQ ID NO: 13090 - DNA, 342 bp, Zea mays
  Peptide Sequence Number=SeqID_54869
atgggggtggtggtcggacccaactgtgccaaggcgagcagggacgacgtcaaacttcaagaaccaggggacgcggtcacccaacctgagcagatagaggcaccaggcacatgggctgggcagagggtgggcgggagctcgagacgagctcggcagggacctgagcattcggcgctgaggagctcggctgaagaacggcggccatgggagaccagggaaggagggtctcggctggggagggagatccgagctggggtgcggcggagcaggcagccatgggagggagtcgacgagcttggggagatggggaggagagaggcccgcgcgcagccatggagttga

SEQ ID NO: 13091 - DNA, 303 bp, Zea mays
  Peptide Sequence Number=SeqID_54870
atggtcttctttggtctctatcctgccgatggttccgactttgaagctcttagccatgcgattgagaaactaacatgtaatgatgctagtgtctctgttacaaaggagacaagtaatgcacttggcatgggattcagatgtggcttcctaggattgctacacatggatgtgttccatcaacggcttgagcaactaggactgttgaaggataagttcttccaactagatgagggccaaattagcgctaaggattaccttaaggataaaataaggattcctgaagaaaggattgacacacactga

SEQ ID NO: 13092 - DNA, 1077 bp, Zea mays
  Peptide Sequence Number=SeqID_54871
atggacatggagcaccagctgctgcacttggagcgcttcatggccagcagcccgggcttctttaccgtcgacagcggccaagaccccgcccattttcccaacggcgggttgttcgtggagcaggtcggcgccacgggtggcgtcggcggcgacgacggcgggtgggtggaggacctcatgcagctcggcgaggagctgttcggtggtcggggcgatgccaatggcaccgacgacggcatgggcgacgatcactactaccagcagtggcagtgcgacgacggtggctctccagacggcggtccgccaccgagcgtatccttggacggcgacgcgagccccccttctggggagcaagagcaaggtaccgtggagctcgcctccgagcggcacccgcaccgcgaggccgaggacggcgacgacgacgtgttgggcgcgacgcgcaagaggagggaccggtccaagacgatcgtgtcggagcggaagcggagggttcggatgaaggagaagctctacgagctgagggcgctcgtccccaacatcacaaagatggacaaggcgtccatcatcgccgacgcggtggtgtacgtgaagaacctccaggcgcacgcgaggaagctcaaggaggaggtcgcggcgctggaggcgcggccgaggtcgcctaccggacagcacagcgggccggccggggctggtcgacgacgccaccagcagcagcagcaggaacgccgccgcgacgcggggaggagcgcgggctccggcgcccgggtgacgcacgtgggcgcggtgcaggtcggcgagggcaggttcttcgtaacggtggagtgcgagcggcgggacggcgtggcggcgccgctgtgcgcggccgcggagtcgctggcgtgtttccgggtggagacctccagcgtcggtggccggtcggggccggaccgcgtcgtgtcaatgtcaacgcttacgctcaaggggaggggacaattaggagatgcagcagccatcggcgaggcctcggtgaagctttggatgatggcggctcttgtcaaggaaggcttccggcccgcagcgacggtccagatctcatga

SEQ ID NO: 13093 - DNA, 3816 bp, Zea mays
  Peptide Sequence Number=SeqID_54872
atgacagtcacctcctcaccattacccttcctctcctcttcgtcctcgttaacgtgccatctccgccgagcgggcaccgccaccgctacggcagcgtcatctgcttctgaagacttcgactaccctctcgccgacccctctcttcgatggccccaccttcgcttcccgtacctccccgcgccgcgcttcccagccaccgtcgccgcggcacctccggtccccgccagaccaccacaggaagtggaggaccccgtggcgacttccggctcggcatcttcactcgtggagccgctggacgcgcgtgctcatcgcgggagggtgaaaaagctgagtaagctcgcgctgcggcgggcgcaggactggcgcgcgcgcgtggccgggctcgcggacgccgtcctcgagctgcctcccggggcgcctgtcgacgacgtgctcgacggcgctcgggcatcgccggacgaggtcgccttcgtcgtgcgcgccgtcggggagagctcgtggcggcgcgcgttggatgctttcgagtggctcgcccggagcagcgccccggcttcacgcgccgtcgccgtcgtcctcggcgtcctcggtcgcgcgcgccaggattcgatcgcagaggaggtcttcctccgattcgccggagagggcgccactgttcaggtgttcaacgccatgatgggcgtttatgcgcgctctggccgattcgatgacgcacggcagctgcttgacacaatgcacgaccgggggatcgatcctgacctcgtcagcttcaatactctaatcaatgccaggtccaagtctgggtgtttggctgctggcgtcgcccttgacctgctatttgaagttcgacaatctgggctaaggccagatgttatcacttacaacacgctcatcagtgcttgctcacagagttctaatctcgaagatgctgtgacagtgtttgaggacatgatagcttcggagtgccggccggatttgtggacatacaatgcaatggtgtcggtgcatggccggtgtgggaaggctgaggaggctgagcggctgtttagggagctggtggagaagggttttatgcctgatgcgatcacttacaattctcttctctatgcttttgcaaaggaagggaatgttgacaaggtggagcacacatgtgagcaattggttaaggctgggttcaagaaaaatgaaataacatacaacaccatgattcacatgtatgggaagatgggcaggcttgacttagcagtgggtctgtatgatgagatgagggctatgggctgtactccagatgctgtgacgtatacggtcatgattgattctttggggaagatgaataggattgctgaggcagggaaggtgctggaggacatgacagatgcgggattgaagccaactttaatagcttttagtgctttgatttgtgcatatgccaaaggtgggaggcgggctgatgcggagaatacatttgattgcatgattgcatcaggtgtcaaacctgatcgtttagcgtacttggttatgctggatgtttttgcaaggtcaggtgatacggaaaaaatgttgtgtctgtatcgaaaaatgatgaatgataattatagaccagatgatgacatgtaccaggtcttgcttgttgcacttgcaaaggaagataagtgtgaggagattgaagaagttatccaagatatggaattactttgtcgaatgaatctgggaataatatcaacaatgctcattaaggcgaggtgtgtttcccagggtgctaaactattaaaaaaggcatgtctccagggatacaagcctgatattaagagcttaaggtccattatgaatgcatatgtaatgacagaaaagcatgaggaaggtctctctttgcttgaatgcatctgtgaacatgtttccttttcccaggatttgatatcagaatgttccatcatgcttctatgcagaaagcagacgagcatttctgcctatgaacagtacagtcaaaggttaatgttaaaataccctgatcaaaactgtaacttgtatgagtacttgattacatgcctcattgaagctgagtttttttctgaagcttgtcaagtgttctgtgacatgcagtttattggcatagaagcttctaaaagtatttacgagagcataatttctacctactgtaaactgggattcccagaaacagcacacaggttaatggatgatgctttgcaatctggtattccgttaaacattctctcttgtcgggtaattataattgaagcatatgggaagataaagctctggcagcaagcagaaatcttggtgaaagggctgaggcaagcatcaggtattgatagaaggatttggaatgctttgatacatgcatatgcagagagtggactttatgaaaaagcaagggcagtctttgataatatgattaaaacaggtcctctgccaactgttgattcagttaatggaatgatgagggcattgattgttgatggcagattggatgagttgtatgtcgttgtagaagagcttcaagatatgaactttaagatcagcaaaagtacagtgctccttttgcttgatgcttttgcaaaagctggggatgtattcgaggtaatgaaaatctataatggaatgaaggctgcaggatacttgccaaatatgcacctctacagaagtatgatttccttgctctgccatcacaaccgattcagggatgtggaattgatgattgcagagatggagggagcagggttcaagccagatcttgccatacttaatgctcttcttaatatgtacactgccgctgggaactttgataggacaacacaagtatatcgaagtattctagaagctggcttagagcctgatgaagatacatacaatacattgatagtcatgtactgtagaagctttaggccggaagaaggttttacattattgaatgaaatgggcaaacgaggtctgacaccaaagttgcaatcctacaaaagcttgcttgctgcatctgcaaaagcagagctgagggagcaagctgaccagatttttgaggaaatgcgatctaagagttatcaattgaatagatcaatctatcatatgatgatgaaaatttacaggaatgctggcaaccactccaaagctgagaacttgctagcagtaatgaaagaggatggcatagagccaacaattgccactatgcatattctcatgacttcttacggcactgctggacaacctcgtgaagctgagaatgtactgaacaacttgaaatcttccagtttggaagtcagcacgttaccatacagtactgtctttgatgcttacctgaaaaacggtgactacaatcatggaaccacaaaactgctggaaatgaaaagagatggtgtagaaccggatcatcaagtttggacatgtttcatcagggcagctagtttgtgtgagcaaactgctgatgctattcttcttctaaagtctctacaggattgtggatttgaccttcccattaggcttctgactgaaaggacaccatcactgttaagtgagattgccaattatctggaagagcttgaagcattagaagattctgctgctttgaactttgtaaatgcagtagaagatttgttgtgggcatttgaatgcagagcaacagcttcacggattttccaattggcagtagagagaagcatataccgtgataatgtctttcgcgtggcacaaaaggactggggcgctgacttccggaagctgtctgctggggctgcacttgttggtcttactttgtggcttgatcacatgcaacaaagtaactggaacactgagaatctcaccacatga

SEQ ID NO: 13094 - DNA, 303 bp, Zea mays
  Peptide Sequence Number=SeqID_54873
atggagtttgttgcggggaggtggccctggcgtgtggcccccacatggcagcgcaagaacagaaccagtgagcgcgcgcgagagcacgagaggctggcccgtgggcccttgctgtcggcgcacgcggggatgtctggtttccgggacccacctgtcagcgcgcagagatacaaccagggtgtgcgcgcggtgaatagagcaacatgggccgcgcggtgtcaaagggagactgggctgaatttaaggttggcggcccaggacattgatgacttttctccgtctttcttgttgtgcaagtcctaa

SEQ ID NO: 13095 - DNA, 630 bp, Zea mays
  Peptide Sequence Number=SeqID_54874
atggttaggattcaacagatcgaagcggtaagctctgatctaatcatcgacacacattttgaatcggacgctgggcacagcggcgattccaccgtcgcacggtggtgccgctccggtgtccccagacctgacacttcagatgacgaactcccctcccaaggacgtgctatgcgtagacggagacaaagcaaaacggttacagggtttctcaccacgaggcgtgcagtagggacgatagtccacggtgacgggcgggatcatgacggcggcgaaatcacgccccactccgaggatggagacccagcaacgctgagactcatcggcggcggctggctcactcctgcggagctcttaattggtggcgtgattcacggtgatatgggacacgatgagcagggagtacgacgggaggggttgcgagaggggaacccgtcttttatgtccctagaggcgcggaatcgtggagtgctagtttgcacccgaggtggagccaattccgccgcgcgactcgctcgggttgttaccgtcgcaatggatggggtgacaggtggagcccaggtcgtagtgacttgcgtgcgcaacccggagactgacacgcggggcccacttgtcagcaagcccatgtggtaa

SEQ ID NO: 13096 - DNA, 444 bp, Zea mays
  Peptide Sequence Number=SeqID_54875
atgcaggaagcatgcaaccgcgccatggttgtgcaccctttcgactccgtcacatccggcggtccagcaaggaagcccgggcccacatgtcatggatcgggaaaggggatatttcgaaaagggatccttctcggccaaggaaacgggccccgagccctcctactattcaggggttcgaaggttgcgccctccggggttcgtaaaccgcccaagagcactcgggctctgagccctctactgatcagggattcgaaggctagcccctcgaaagggttcgacagccgccccagagcacgcagagtcagggatgaccctgggtacgtctgttacatggccaaggctcgggctacgctcccgaggttgtctcgactcgggctggcgcaactggtgagggtgtgtgggctggcacgatatcaggtcgtggagctgggtggaccagcatag

SEQ ID NO: 13097 - DNA, 372 bp, Zea mays
  Peptide Sequence Number=SeqID_54876
atggggaacaaaaatgggccaccatggaatcttgtgcggcttgatgattactacactatacacatagagtggccgaattgtccagattcactcatgaacttcccttcatcgcccatgggtaggctgatgcacgacattgagcttgagcagcttgtcctctatgacgtggtgctcggcctcctcgtgagcggtggccacgacacagctaacgaagacgtgcatgaggcacgtggcgatgaggaggacccgcgcttcgtgctcctcgagtgggcggcggtcgaacctccacctagagtgcgcagaacgggtcatcgagcaacatgggagcgcttcctggtcgcagtggcctcgttgatgaggaaggcagtgtga

SEQ ID NO: 13098 - DNA, 141 bp, Zea mays
  Peptide Sequence Number=SeqID_54877
atgggttgctcaaaaccctcctatagagcccacgccaccgacccaagaagtgttgaggcaaatcctgaggttgtccattgtcctagccttgtagctagccctagatgcccccatcagctggtaatcaagggcgacccataa

SEQ ID NO: 13099 - DNA, 406 bp, Zea mays
  Peptide Sequence Number=SeqID_54878
atgccccatgttctattccagtacgccgataacaggataagaaaaaccctatccacgttctattccacatctcaatccagtacacagccgccgccgcctgctgctcgtgtggttcccgacggttgtcgatgccgcggccccatcccggcgctcggcggcgcgcatcgccaacgccgcagccccgtcccgacggtcgccgcgaccacggccccatcccagcggtcggcgacgcgcaacaagcatctcgcagctcggcggcggcgcatcccgtcgtacggtggcatccccattcccgtgaccacggtcccatcccgttgcgacgtcgtcccaccgccgtgccgtcctactccacctcccctgctaactcttcccggcgtacactcctctccaccgtctcccctacctg

SEQ ID NO: 13100 - DNA, 144 bp, Zea mays
  Peptide Sequence Number=SeqID_54879
atggagtatacgctgctaactgatttagaaccgcacaagaaacatgcgacaattcaagtgtgtattaccagaaagtggcttttccgaggtgctaatgataacgctccactgcagcatgttgatatgattctatctgatcaaaag

SEQ ID NO: 13101 - DNA, 174 bp, Zea mays
  Peptide Sequence Number=SeqID_54880
atggccagggttcgtggagattgtctcggtattgttgtgcccgttccttgttcctcacagaacgaggttgcactgtcacagcttggcgccgtggacagcttccccgccgacgcatcaacccatgtagtctctggttgttttcacgcgagcaatgtgatcttgttaggtcgctga

SEQ ID NO: 13102 - DNA, 243 bp, Zea mays
  Peptide Sequence Number=SeqID_54881
atgcagggttcttgcctgaccgccagcgcagcaaaatcaaccaaggacctccctacactgaccactcccctactgcccttgcccctttcggctctcactgggttgggcgccatttacaggaaaatccaggggctattacataaaaatcctgagactcagtcaacagtagtcaaggactgcgggttaatttgtgtactggctagggtctcttatgcaaaaggcttcagccgaagaggtatctag

SEQ ID NO: 13103 - DNA, 414 bp, Zea mays
  Peptide Sequence Number=SeqID_54882
atggccatgatgggttcaacatctaaaaagatgtacctctgtcagatatggcgcgaaccaagaccactcagcgcaaatcaaccgggcctcatggctgatgtaccccggcatcagctggcctctagacatgaaggaagtagcagtggaagcaacgaccccataggagaatttgagactagagtggagcgactcaggtctaaactacaccacgggtgtagggagtgtgcacgcgatagccgccacattgctgaactatcagcagaacaatgggagtcggaccatctagaacaactaatggaggatctgatgggggggggggggttggacctttttgcagcgcctccttccatgaaccttgaagatgaacggtctcctaaagcaggcagtggagcagctaaggacgaagaggattag

SEQ ID NO: 13104 - DNA, 435 bp, Zea mays
  Peptide Sequence Number=SeqID_54883
atgacccgccataacccccagggggaatattccgggcataaactagaaggcaaagacaccgtcgaagatggcgagatcataggcatctcggccaaaagtcagttaaagctgcgagccctgtgtatcaagaacaatcacctacaaaaacaaaaagcaatactcgaagccaagcaccagcgcgtgaccatgcaagccaaaattcggcaaatgatactggacgaggaacaaaaggctcggaagctagaacaacaaatcgcaaacatccaaggcgaaggcctataccacctggaacatggccccctcatcattccagccgccttccaaaaagatatccaaggcgaaggcccataccacctgcagcgtggccccctcatcactccaattgccttccagggggttaattacctcgacgagcgaagcccgctcgcaccgtag

SEQ ID NO: 13105 - DNA, 351 bp, Zea mays
  Peptide Sequence Number=SeqID_54884
atgagagagaaatgccattgcccgccccgtgggattatgcgagtaccgtcgccggagactcggatgaagcctgagaagattcgtcgtgatctgaggattgtgttcgtgggtctgtggagccattggtgcaagcaaggaccgagggattgctcactgttgatcggcgccgccatgggagtgtcggcactcgccggttcgtggggtcgccggtgcttctgccgtgggggtgtggcggcgccacctgtgctgaccgggaaggaagaaggcgataaacgcttacgattagatcctgagtatccctcgcttgagtcgatctggttcattgatatcaggatgagcggatgctgttag

SEQ ID NO: 13106 - DNA, 261 bp, Zea mays
  Peptide Sequence Number=SeqID_54885
atggcgtcgctctggctagcgagagcgtcgtcccagctggcgcgccgtgccgccggccaggaggcctcctccgcgtcctgcgcgccacggctccggccaacccaccagttcgtggcggcccttgggtcaccagcgctggacacaagccgccggggcttctgctccgtccggcgcttcgcaggggagagcagcgctgctgctgctgcggcggctgtcgtcgacgaggagccggagagcgggttcgcagccggcgatcagcag

SEQ ID NO: 13107 - DNA, 333 bp, Zea mays
  Peptide Sequence Number=SeqID_54886
atggggcctaggaatcacgacggcgtagacgacactcccgtggcggcgccgatcaacagtgagcaatccctcggtccttgcttgcaccaatggctccacagacccgcgaacacagtcctcggatcacgacgaatcttctcaagcttcatccgagtctccggcgacggtactcgcataatcccacggggcggcaatggcatttctctctcatggctgtgttcggctatggcgctcgctgctggtgatggtcaagaggatgcgaggagtggggaggtcgcggctaggtcccttatgctgaggtgggcggaggtgttcacatgggatgataaatag

SEQ ID NO: 13108 - DNA, 966 bp, Zea mays
  Peptide Sequence Number=SeqID_54887
atgtcgcaggctacggaggtcgtcggaaacccgtacgccgccgagctcgctgcagccaagaaggccgtcgccctagcggcccgcctctgccagagagtgcagcggagcattttgcactctgacattcaatcgaaggcagacaagactcctgttacagttgcggattatggatcacaggtactggtatgtctggtcctgaagaaggaattgccttctcactctttctcaatcatagctgaagaggattcaaaagacttgagagaagatggtgcccaagaaattatagaacacattaccaccctcattaatgaaaccatcgtaaatgatggttcatacaacatgtcgttatctaaggaagatgtgctttctgcaattgatggtggtaaatctgagggaggtccatctgggcgacattggatattagacccaatagatggcactaaaggtttcataaggggagatcagtatgcagttgcacttggactacttgatgagggcaaagttgttctgggtgtgttgggatgtccaaatcttccattaaaatcaacaaacaagaacaatagcagctcttttggggatcgaataggttccctcttttttgctacaattggttgtggagcgcaagttgaggccttagaaggatctgagccacaaaagaaacttggtgtccgagctcctcctgttagaatggatagccaagcaaaatatggtgccctagcacgtggtgatggtgccatttttctgcgcatcccgcacaaaagttacatagaaacagtttgggatcatgcagctggatcaattattgtcacagaagctggtggcatggtaaaagatgccgcaggaaacgatttggatttttgcaaaggtagatatcttgatcgtgacagaggaattattgcaacaaacaagcatttaatgccactagttctaaaggcggttcaagaggctatgaaggaggaacagtag

SEQ ID NO: 13109 - DNA, 336 bp, Zea mays
  Peptide Sequence Number=SeqID_54888
atgcccgcctccaccgccgcgaaatccgccgccgcgcatctcgcacgccctcaagcccgcatgccctctgccgcaaaaccctccgctaccgcaccgcccacacgcccgcacgccacgaaatccgccaccgcgcatctcgcacgccctcaagcccgcacgcccgctgccgcgaaaccctccgtctcccctctgcgcgtggcacatccccctgagacgcagcaacagagtgaccaacaaaaggcgaagacgcttgcgatgccgtcgcagaagggcctccaaacggggaaggggcttgggacaccacctggggggacaccgaacggcagcaacggctga

SEQ ID NO: 13110 - DNA, 213 bp, Zea mays
  Peptide Sequence Number=SeqID_54889
atggcgttcggggtagccatcgtcaaccaccatcaagctccgccttcagctatcaccaagctagaacgagccacttcttacccttcgaggctaacgttcaacatcactcgaggggtaagtggcggtgaagcgtcaccgagtgaaccacctggtgtggaggccacaagcatggagccactggacaccactcatggacatcgtgttttggagtaa

SEQ ID NO: 13111 - DNA, 1872 bp, Zea mays
  Peptide Sequence Number=SeqID_54890
atgaagacacgagccggcgcaggcctgctcttcatctcgcccctcgggaaacacctacgctatgtgctacgcctccacttctcggcgtccaacaatgtggctgagtatgaggctctggtcaacgggttgcgaatcgccatcgagctaggggtccggcgcctcgacgcccgcggtgactcgcagctcgtcatcgaccaagtcatgaagaactcccactgccgcgacccgaagatggaggcctactgcgatgaggttcggcgcctggaagacaagttctacgggctcgagctcaaccacatcgctcggcgctacaacgagactgcggacgagctggctaaaatagcctcggggcgaacgacggttcccccggacgtcttctcccgagacctgcatcaaccctccgtcaagatcgacgacacgtccgagcccgaggtaccctcggcccagtccgaggcacccacggctcaacccgaggcgccctcggctcagtccgaggcacccttggctcatcccgaggcaccctcagctcggcccaaggcgccctcggttcagtccgaggtaccctcggcccccgagggtgaggcactgcgcgtcgaggaggagcaaagcggggtcgcgcctaatcgaaactggcagaccctgtacctgcaatatctccaccgaggagagctacccctcgaccgagccgaggctcggcgggtggcgcggtgcgccaagtcgttcgtcttgctgggcgatgagaaggagctctaccaccgcagcccctcaggcatcctccagcgatgcatctccgtcgccgaaggtcaggaactcctgcgggagatacactcgggggcttgcggccatcacgcagcgcctcgagcccttgtcgggaatgccttccgacagggcttctactggccgacggcggtggccgacgccacaaaaattgtccgcacctgcgaagggtgtcaattctatgcgaagcatacccacctgcccgctcaggctctgcagacaatacccatcacctggccctttgctgtgtggggtctggacctcgtcggccccttgcagaaggcacccgggggctacacgcacctgctggtcgccatcgacaaattctccaagtggatcgaggtccgacctcagaactgcaccaggtccgagcaggcggtggcgttcttcaccaacatcatccatcgcttcaaggtcccgaactccatcatcaccgacaatggcacccagttcaccggcagaaagttcttggacttctgcgaggatcaccacatccgggtggactgggccgccgtggctcatcccatgtcaaatggacaagtagagcgtgccaacggcatgatcctacaagggctcaagcctcggatctacaacgacctcaacaagttcggcaagcgatggatgaaggaactcccctcggtggtctggagcctgaggatgacgccgagccgagccacgggtttcacgccgttcttcctattctacggggtcgaggttgtcttgcccacagacctggaatacggctccccgaggacgagggcctacaccgaccaaagcaaccaagctagccgagaagactcgctggaccagctggaagaggctcgggacaaggccttactacactcggcgcggtaccagcagtctctgcgacgctaccacgcccgaggggtccggtcccgagacctccagatgggcgacctggtgcttcggctgcgacaagacgcccgagggaggcacaagctcacgcccccctgggaggggccattcgtcatcgccaaagttctgaagcccggaacgtacaagctggccaacagtcaaggcgaagtctacggcaacgcttggaacatccaacagctacgtcgcttctacccttaa

SEQ ID NO: 13112 - DNA, 2436 bp, Zea mays
  Peptide Sequence Number=SeqID_54891
atggcgccgatcatacttcaccgtgcgttgtccttctccatcccgttgcttcatcgccgtgatgtgtcgtcgcccttacaggcctcggatgtgtcgaacagacctgaaggcctggcattattgacgagaattgctgaggacactgactgctgcgattctggacctccattgccagaccactcgccgttggagaaaagcctcatcagcaagatcctccgtctgagaggtgttttggatctgccatgtcgaagttcatgcgacgcgttggatcagttgcttctggataccctgggggttctgaaggttgcatatcccaaatgcttatcaggtgtatcaggaaaccatacatcttctgtacgggagggacttgttcacctccatcaggtcctcgtgttggttcaggattgctactcgaaaatcaagcagctgcctaactctggctctgagaagcaaacaatcatggagagcgagagcttagaccatgtaggtaagcgtgtcattgagatgcttgatcaggtgactccagtggtgaaagaaatgttcagttccatggaaagctccagttctgcacaggcggcggcggcagcagcagcttggccggaggatctcccagaaagaagaaccctccctcctgttctctgtcgcactacatcccatcatccatcagacggtgacgaggttgcgatgcacacaggacgttgcaaagttgaggcaccggcgcctgggcacgagacagatgagggcgtttgcaccagggaggaggatggccaaaccagcagccgtgaaccgctgtcagctcctattcctaccgctgagtttttaccgctgcagccgacgctgtcgtcggtgtccccacatctgctgtcggcgccgccgccgtccccgatgcccgtggttggcttgtccatgcttctgcagtcgtgggaggcaacgcaagatggccacgccaccgccgccgcagtggtgccacctgctggcgtcgcacagcctgctgaggcagcgccgacggcacacaaagacaccacgcccgtcggcaccagcatggaagtcgaaggctctacgtcctctgtgttacttgaagctggtcagcctgagccatgcgtggattcacccaatgggagcacgcaggcaccagcgcagggcggcaatgccgctgttccaaacgtgccgccgccgccgccgccagtaccggcgcacagaggcagatctcaagaggggccgtctatggacgagcccggtccggcagtgacagacacgccacctcgaccgccgtgtgaaatgcaaggagaaccacctgcactgccgccggccgccgccaaggttttgccgtcgccgtcgccgtcgccgtcgccgccgccactaccggcgcacagaggcagatttcaagagggggcgtctatggacgagcccggtcaggcagtgacagacacaccacctcggccgccgtgtgaagtgcagggaggaccgcctgcaccgccgccggccgccgccaaggtttcgccagcgccaccgccgccccctggaagcatctcggcagcggtgcgcggcaagaaagccgcgagcaagctgaaacgatcgacgcagatgggcagcctgtacagacgcctgcgagacagagtggaaggctctggcagcacgcacggcgacaggatgcggcagaaccgcaagaggccccggacggtaggcgcgtccaagagcgacgccggcggccagggcatggccgatgcattggccgagatggctaagagatcgacgtacttccgacaaatcgaagaggacgcggagaagtatgcagcggtgatcctggagctgaaggacgccatcggctcgtaccagtccaaggacatgtccgagctggtgaggttccgtcagcacgtcgagcggcagctggtgtgcctgaccgacgagacacaggtgttagccaggttcgagggcttcccttccaagaagctggaggcgttgaggacggcggccgcgctctactccaagctggacggcaccgcctcgaggctccagtgctggaagcacaccgccggccccgtatcggcgcagctcgacagattggagagctacttcaacaaggtcaaagacgaggtggacatggtagagcggaacagagacgaggagatgaagcggctgcagtcccagggcgttcacttcgacttcggcgtgctggtccggatcaaggagggcatggtagacctgtcgtccgcctgcatggagctcgccttgaaggagagccaggacgccagagagacgccgacgccgacgcgtgcgaagtgggcgagcagccacggcgatggagagtcgaggatgctgtggcgggtgttccagctggccttccgggtgtacaacttcgccggaggccaggacgagcgggcggacaggctgacgagcatcctggcgcacgagatcgaggagcgagcgctcctgtaa

SEQ ID NO: 13113 - DNA, 459 bp, Zea mays
  Peptide Sequence Number=SeqID_54892
atgggcaagagtaacaaacgcaagcgcgagccgactcctccatcggaggacttcggcgactcggaatactcggaggaggagttctcctccgagtccgaggggtctccggctcccgtctctcccccggcctcgtctgacgattcagacaactcccaggggattgtcgcggaggtctggacttatatccgggccgtcgagcgctccgggctcaagggctcggatgagtcggagtactcctcggatgaggaggactcttcggactcgtccgaggagggcggtggcggcgatggcggagacgacgacgacgacggaggcgacggtgacgaggcgacgacggcagtgatggcggcagcaggggcggcaacggcggcagcaagggcagcaacggcggcagcagcaggggcagcaacaaggccagtggctagatgccactggtctttagatgttagtataggttag

SEQ ID NO: 13114 - DNA, 288 bp, Zea mays
  Peptide Sequence Number=SeqID_54893
atggacagctgcaatagttgccttcgaagaaggcgtgagagggcaatatttgggaatccaccaatgcaagaactctgcttcagccctgtaaaagaaggatatagttcattggtgcttttacaacaagaacctcacacaacttatctccacgggataaatcatagggctcaaatcacaattcaggattctaatgtccttgagaaactgactctggagttgaagcgcgcttccagtcttgtatccgacattctgccatctcagaaatttaataaatcccacctaacatga

SEQ ID NO: 13115 - DNA, 254 bp, Zea mays
  Peptide Sequence Number=SeqID_54894
atgaagggggtgggcggcgaggcgcgtctagccgggcaggggcctgcgccggacctggcaagggatgatgacgacgcaggcgccgggagaagcttgaaggcgaagaggaggacgccgaccaagggaggcagccatggggaacagggaaccgagcagaggggttgctcgtgccctgcccccatcttgacgcgcgggaaatggggctcaggcgccgagcaccatggatccgaagcttggctggtgacctgggagag

SEQ ID NO: 13116 - DNA, 441 bp, Zea mays
  Peptide Sequence Number=SeqID_54895
atggcggaacaacgactctgtaggagtccagggagcaatttcacccacaccagtcgacttccgcgcatggccgccacattcgcgtgttctcagtgcttgagcgaacgtcctgggcatgcatccaacctgcgcacggcagtggagtgcgctgcccacggagccatgtgggtacgccgccatgagttctcacaagcgagcgacactggtgaacacaaggccatggtggcgccacttccctcaggatctacgggtctacatgctctttcggtcaaggagggtccacgaccctgggtatttatccgtagcatcgatatggaaggcggagaggatagagctgaccggtcggtcccacgagtcagggacataacgcgatgggcgtggacacgggtgagggaatgggccgacagggagaaaaggaatgggctgtcgctggaggattag

SEQ ID NO: 13117 - DNA, 426 bp, Zea mays
  Peptide Sequence Number=SeqID_54896
atgacccctgcacttctgagcaattattccttcagagacacacctctccttggtggttctggggtagataacttgattagtgaactacaatacatgcagaattttgagcaggttggtgcctcatcatcagttccagtcactactggcagttttgatgggtcaaggctacatgatacctctggccatcatctgatgacctctttacctagtgttgggaggccccttctgggtactcatgctgctgaagctcctgccatctcattaagtgtcgggtcagaacaaactacgtctctgcttggtggtggcaccgaattaccttgtacgcgaaatgggtacccatgtttcaccctgtgggcgatttttggttgcttgtgttgcatgtgtgctgccacacagttatggtggccatggaagtcagttgcatga

SEQ ID NO: 13118 - DNA, 1644 bp, Zea mays
  Peptide Sequence Number=SeqID_54897
atggacgacgcacctgcagccatcgtcaaggccaagggcggcaggggggcgttcctcgcccacttcttcatcgtgctccccgtcgtcaccctgtgcgtcgtcgtctacgccccacgctacttctccggtcccccaccgtactacggcggcggcgccaacgacgtcggcggcatctccgcgcccaggcccagctcgatgacccgtacgtcgtcctcgtcgtcagcgcatctcggcgggttgggctacgtcgctggccgccgcgatgcagacgaagacgaccagcagctgggtgtgggtgacggcggcgcgctgccgcagcaggtggttcttgacaaccaggtgggctccccgtgctcgtccctgcccaaccacaccatctgctgcgaccgctccgactaccactccgacgtctgcttcatggccggcgacgtgcgcacggacgccgcgtccctggccctcctgctgttcccgccgcgagcagcgtcgtcagcgccggagccacccgccgcggaggagcggatacggccctacacgcgcaagtgggacgcctacatcaccaagaccatccacgaggtcacgctccgggtggcccggccggaggaggccgccgccgccgcgcaccggtgcgacgtccggcacgacgcgccggtcctcgtcgtcacggcgggcgggtacagccacaacatgttccacgtcttcaacgatggattcctgccgctgtggctgacggcgcagcacctccgccgccgcgccgtgctcgcggtgctctcgtacagcccgcgctgggccggcacctacggcgagatactcgcaggcctctcgcggtaccacgccatcgacctgctcagggacaagaggacgcactgcttcccgggcgccgtcgtgggcacccgctaccacgactacctcgccgtcaactccacgcggctccgggacaacaagaccatcgcggacttccacgacttcctcgccggcgtgtacagcgacgacgacgtgcgcaacgacaaagctgcaggcggcagcagcagcagcaggaggccggagatggcgtggtacgagcggcgccggccacggctcgggatcgtgtcgcgcaaggggaggcgcgtggtcgagaaccaggcggccgtggcgcagctggcggcgtcggtcgggttcgacgtggacatcatggagacggccaacggcgcgccgctctcggccgtgtacgcgtccgtgagctcgtacgatgcgctggtgggcgtgcacggcgccgacctgaccacgttcctgttcctgcgccccggccgcgcggcgctggcgcagatcgcgccgctcggcatcaccatgctctcgcgcaacctcttcggcgtgccggcggccaggatggggctgcactacgtgcagtacgacgtgagcgcgcgcgagagctcgctgagccgcaggtatccgctcgaccatgtcgtcgtggccgacccggcgagggcaaggcgggagcaggggaagcaggagtgggagcttgtggagcacgtgtacctacgagggcagaacgtcagcctggacctcggcaggttccgggagacactggccaggatccactcccgactcaaggagcaacaacaaggtcacgcttccaggtccagtccagatgcgtcaccgcaaatatag

SEQ ID NO: 13119 - DNA, 214 bp, Zea mays
  Peptide Sequence Number=SeqID_54898
gcacttcgagtctttgacggcgagcgaggacttcgaccgcagaattttccaggttgaagatgatatgatgaatgaagaagaagttgacgacctcgtcggtcttgaaagctccatgactcggatggatggcgcgaaggaggcgggaggtgaagggctctcagcacctcaggacagctccggcgaagaccctgcgacggcgtctgctcctgtgtag

SEQ ID NO: 13120 - DNA, 348 bp, Zea mays
  Peptide Sequence Number=SeqID_54899
atgaggcaggggagcgagtgcgggtgtgggcggtgctcaaaagaaacatggggtgtgtgggcaggcgacgtggttggggatctcggcgtgcatgcacgctggtccacggtggttcgcggggaaggcagaacttacagggcggtcccacaatgcagcgagggggagcgggtgcgtggaggaaaacggttcatcgcgctgacgaaacagtcccgagaggcagagacagaaagggggggcgcgagcgagcaggcgaccgacgtcgacaacctggccccactgggcagagggagagagagcgcgcgcggaaaagaaaccaccgctgataggtggatcccacctgtcaggtag

SEQ ID NO: 13121 - DNA, 422 bp, Zea mays
  Peptide Sequence Number=SeqID_54900
atgggcgtcaagcaggtcctcgtccgcccccgctacggcgacggcgacggcgacgacgatggcggtaccagcagcagcagcagcacgggccgctgcgatgaggatgtggtcgaccagtcgccgccgcccatgtcgtctgcgcgctacctcctccaccgcgtctgcaggtcgacacactcgcgggagtggccatcaagtacggcgtcgagtcgtacgaacgccgtgcattttttcctcgccctcttctatctgggttctccctcggtggcggacgggaagcgcgccaacggcctcaacgccgacctgcagatgttcgcgcacaagactctccgggtcccgctccacgggagccaccagcccgccgccgcaccaccgtctcttccctcctattccccaaggaaccacgccgatcgcgtcgccag

SEQ ID NO: 13122 - DNA, 1833 bp, Zea mays
  Peptide Sequence Number=SeqID_54901
atggaggaagctaacgtccacgggaccagcggccggccctccaccgctccttctgatgcatctccggactcggctgttccatccacttctcaccaaggctctcgatcctgtgaggcccagctagatgaaatgcaggagccagacgtcgattccgtcaagggcgccgtcggcaaattcggagtcggaggggttcttgactggagagagaaacgcaagaacgtccagaatgagctcgacaaggtgcaggacgaggtcaccgagtaccagaagagagtacaggaggcggagtccggcagagcgcaagctctggaggagttgggaaccgccgtgagcgccgccgacgagctggcccggggcctagatagggcgcgggccgagcaggcccaggcgcggcagcaggcggagctcgccgagctacagctcgaggagttgcggcgcggcgtcgcggcgcaggcgaaggcggagctcggcgccgccatggaccgcagcgcggccgcgctcgcggacctgcgggcggcgcgagcggaagtagagtcgctggagaaggagcacgcgcgcgccgcggccgaggcgggcgcggcggtggcgcgggcgcgggaggccgccgcggcgtcgcgggaggctgggaaggccgtcgaggacctcgcggccgagctcgccgcgctgaaaggggagctggagtcctcgcgcgccgctcatgtcgaggcggaggagaagacgaggagcctggccgtcgcgtgggaggatgacaagacacggtggcagatcgagctggaggaagccgagcgggaggacaagaggctgcgcgaggtcgagatgaaggcggaggcagcttcccaactgatggcgagcctcaaaaccgagctgttcgcttgcgccgtcgaaggaacgcctggccaggaggagaagccggcggcgagcacccagtcgatgcaggagaagaccgagaaggagctggacgacgtgaaggcgagcattgagtgggccaaggacgaggtcaagtgcctgcgcgtcgccgccgcctcgatgcgcgatgagctggagaaggagaaagcggagctcaccgcgctgcggcggagggagagggaagggctctcgccagcgtccattccttaccccgaggaggagttgaggcgagtgaccaccgaggtcgccgcggcggaggcaggagcgaaggcggacgacgacgatagcaagatggccgagcgggtaggccaggcacggcgagaagcggaggaagcgaaggcgaaggcccagtcggctcgagagaaggtcgccagggccagggaagacgcgggcgtggccaaggcagccctcgccgccatggaggcgcggctggaggcggtgacgcgggagatactcgccgcggacacgtcggagcgcaggagacagaggaggcccgacagcatgcgggtggtcgaggcggtgaagctggtcgaggaggccaaggacgcggaggcgaggaagctggagaaggtcgctcggctggcgaagcggaccgagcagaggcggcaggcgctggaagccgcgacgctggaggccgacgaggcggagttcgaaaagctgtcggcggagcgggagctcaggcagtggcgcgccgagcacgagcagcagcgcgcgcccggcgagaccggctcgccccggccggacctcgccgagatctccgtgctcgacgacccggcggccggcgacgggcgcgggaacccgcacatagtcagcccgagaggagggtacatgtcggcggcggacgcggaggacgaggacgcgaggcagaggaagaccttcttcccgcggattgtcatgttcttggcgcgaaagagagctcagacttga

SEQ ID NO: 13123 - DNA, 894 bp, Zea mays
  Peptide Sequence Number=SeqID_54902
atgcaggaggcggcagcaggcgcctatccctcctacatggagccggagccggagccggagcagacgggtgcatcggcgactgtgggtgtgatgggctgccgctcgcccacgtgcccgccttggctccaagcggccattgcagacatcgatcagcgggtgcgcgcgctggcggtggacgatgccgcgccgcccacggagcactccttcgcggagcgcgccgaggagtactaccagaagcggccgcagctgctggccctcctcgccgacctccaccgccgctacctctgcctggccgaccgctactgccaccaccagcacaagcgagagcagccctcgctgccggcgtctgcctcctccgactgcggctcgtccgacgtcgacgaccgctgctccgacgccggcagctcgctctccttccaggcccagcacgcgccgccgcggccggactccccgccgacgaagaggaggagctgctggtggcggagtggtggccgcgtgggtggagcgcgacgtgctggcggacgaggcggccggccggcggagtcggcgcgaggatccagctgcaggggagcctggtggaggtgctggagtcggagcgcctggtgctgctgggcgagaacgcgcgcctggggttccgcgcgacggcgcccgaggacgaggcccggcggcgggccgacctgggctacgcgcgccgcccccgccgaagaaggccccgcctcgtgctcaggctctccgagaccacccgcgccttcttgctgggcgaaggccgaggcgctgcaggcgggtgtacgcgttggagcttccgaacggcagtgcctggaaggccacggcgcgtggaaggcgaagttcagcgcgtctacgcagagaaacgacggctttcggaccaagcattaa

SEQ ID NO: 13124 - DNA, 1155 bp, Zea mays
  Peptide Sequence Number=SeqID_54903
atggctaactgctccccacttcgtcgttgcggcagcgccatcttccaccgcggacgtcggtgggctttgctccggcgccgggagaaggacgacgcggagggagcgagtaggaagaaattagatgaggcagaaggctccgcgcttcctctcatctcgccaccatgtcagtgccacaacatgcaacacgctccaattccggctcaccaccaccggcagccttggcgcctgagtgggcccggtcccgtctgccgctggggccttgctcttccttggcttgagcagcaggacacagaaattgtggccagccggatcagcgatatcggcggcagggcttcggcttcggcctcggcctccgccgccgacgcgtccacagccaccgcgttagctgccccagggggccaggcgccaacggaccaatatacaccagcatcatatcttgatgttaggagttgccaagaaaatcctcgaagctgggtttgttctgagacttttgggccgggccactcgacggtgaagtcccaaagggacttcgcgttgattcatcttccattggatgggagacgaaatcggggacgctgctcgccaccgtctgccgcgccgacccggacccggtgcaggactttctgcgtggccgtggcgccgggcggccacaacaacgcgtcctcctcctccagcacctacccgggcttcccgtgcaagccggcgtcgacggtggtctcggacgacttattcttcgcggcgcacgcgggcggcgcgagcacggacaaccccgatggggcgcggggcgtgacgccgggcaacgtggaggcgttcccggggctcaacacgctgggcctgtccatcaaccgcgtcgacctcgcccccggcggcgtcaacccgctgcacacccacccgcggggcaggttctactccaaggtggtgcgcgccggggagagcttcgtcatcccgcgcgggatggtccacttccagtacaacgtcggcaaaggcgccgcgcgcgccatgaccgtcttcaacagccagctgcccggcgtcgtgctcgccgcgcagaccctgttcggggccgacccggagatccctgacgacgtcctggccaagagcttccaggtggacgccgacaccatcaagctcctcaagtccaagttccagaaaggatag

SEQ ID NO: 13125 - DNA, 1284 bp, Zea mays
  Peptide Sequence Number=SeqID_54904
atgggtgtgtttgattcagctgcgagctgtgaaaaagctgatgtgagctgtagtttgactaaggagagaactataattgcattcttttcggggcggaggaaccgcaaagagtcttgcataatgtgcccagagtgcatccaccacaatcagtcaggaaggcgaaaaaatcaggattacaccactgaccctggaaggaacgatttacctattgctgctcatggaccacaagttgttctcttaggatcagaccgcagggaagatgatccagggcatcgtagggtctacttcgagtcctcagaggatggtcactgggaggaattactttccttgctatctatcctcgatagcaggggcactagggaagcacatctccttacatcgatggagaagagacaagcctgcctttttgaagccatgaaaaaacatgtggaaggagggaaggcagccaggcttccagcctcatctgattcatactgctcccagacaagtagtggagatggaacttcgcccaagacaagtagtgtggatggagcttcatctgtatcagacattgagaacacttctgttcctacaagcctcaaagatagtaatttggattcatcgtctgccgtagtaattgaaagtgggaggggaggtgatgagaaaatatctatgtgggaacggctgcaagcatttgataaatggatctggacttctttttactccatccttactgctgttaaaagtggcaagaagtcatttaaggagtcactacttcgttgtggaagttgtcatgatctatattggagagatgaaaagcactgcagaatatgccattcaactttcgaggttggttttgatcttgaagaaaaatatgctgtacatgtggcgacgtgcagggagcctgaactttcacatgaggtaccaaatcataaatttctgccatcacagctacaggcacttaaagcagccattcatgctattgaggcctctatgcctgaggcagcttttactggttcttggatgaagtctgctcacaagctgtgggttaagcggctgcgacgaacgtcatcattgccagagcttttgcaggttcttgtcgattttgtaggggcaatggatgttgattggttgtacaaaagttcatctgcgagattgagaacaaatctggatgacatcattgtcgactttcagacaatgccacaaacaacatcagcagttgcactttgggttgtccaattggatgccctcattgcgccttatttggataatgccatggcaagacagctggtgaatgctaggtag

SEQ ID NO: 13126 - DNA, 1157 bp, Zea mays
  Peptide Sequence Number=SeqID_54905
atgccgtctccgccgcggccgctcgcgtcgctatgccgcgcccgtctcgtgctcttcctcgtcccggcgctcctgctgctgctcccctccacggcgcgcagcgcgggggacgaatcggcgagggcgcttagcgtcggcgaggagctcgtggccgagaccatgccgctgcgccacggccgccgggtctacaggatccacgggctgcgcccgtccgcgtggtacgaaataccgtcgagcttttccattcggcttgtggacgactggggcagcaagaacaggaggctgctcaacacggagaagataattttcaaggctgagagcagcagcccggtttatgttcttgtcactgtggaacctgagggcgtggtggcgaagccaaacgtgccagagagggagcttgcgctttttaacattgtttgcgatgagcttatgctcgggattccacactttgcctggtgggctgggattgcagcgctgctctgcatcgtgctggcggcactggcaccactcgttctcccgctgcacaagcttctgagctgcgaaggcacggagctgagcgaaagttccacatgtttcaggtgccgtgataataataataggcaaggcaaggcaccgtcagttgcacgtgcgaccgagctgcgctggctccgatctccgatgaaacgaaacccatgccggccgaaccgcatctggaggaaaccgttacgcgagatccacgagatatggcgtcgctatcagtactctactctactctaccagggcaccgtggccggaagccgtggagcaagaattggttctgctgagcctcttgaatgcgccgatggcaacctccggtcttctatacccttcttctcgtgtcccagggaagatgtggggggatcggacagccggggcctgttgccgagaaccggtggcatgaaggcgcgcagtgaaggagaaaagaacacgtaccggcgcccggcgcgggcttcgcctgactccgacatgagggcagtccggcgccaggaaggcaggcacaggccgagtgatccccacgagcacgaggcgcggctcgcgcgccaaccgcgaaccgcccagtacagcgacgcccccccatcacccgctgcccccgcctgcgtcggcgtggaaaccatcccggccacacaatacagacgctg

SEQ ID NO: 13127 - DNA, 231 bp, Zea mays
  Peptide Sequence Number=SeqID_54906
atggatcccaacgatgccgatgatagcctttatgaagcttgggagcaccaaaatttgttgctgtggcacgagctcatcttcgattggagcgtagaccatgttagcatggaggagggagacaccggtagccttgacatgggcgacggcttggggcgtggcgttggacacggcgatgtgattcattcatacccatccagaacattgtggtgccaaaagccactattgccatag

SEQ ID NO: 13128 - DNA, 510 bp, Zea mays
  Peptide Sequence Number=SeqID_54907
atgaatcccaatgaagataaagtggagaatgtaaacaacaagattccaaccccgatagtggtgaaaaggaaagatgagtcacatagatatctgctgattggaatgaagaacaacaagaggaccagaaagatgtttgggtacaagattaaaccacctcaaccacaagcaaaagcgccaaagctcgtgaatacccaaacaggaaaatcaaatcaagctcaactgttcaacatgcaggcaaccgatcaaccatcatctgctagcaatcaagcaaagttgactcacagagaggtcaaagcaagaggtgcttgtttctactgcaaggaagaagggcacttcatttgccaatgccccaagaagcgtctagaccgactcgcgaagaaggccttcaagcagaactcaactagtgataatgcagaagaaattgtctttactctcgcaaagtacaaattaattcaaacgagcgatgagagtggtaggttgctagacattcgtgtcaaaccgagagagtga

SEQ ID NO: 13129 - DNA, 327 bp, Zea mays
  Peptide Sequence Number=SeqID_54908
atggagttagggtacctcaagtcatatggttcacatattttaagatttgcaaaagaaactatgagatttgggcataaatgcaaaaaggccactcttgtgatcatatggccacttttgagaaaatttgatccaaaatcgggctgtgaggtagtcaagcacctaatccagcaactcgtacctccgattgcccaccagagcgcgctaattccaaagttcccccaaatcggtttccgccaccgtgaaaaagacctcgccgtggccaacgtgtctcaggaacacttcggtcggtccattcttcgcgctgtcaccgtgaaccgggtgatgtag

SEQ ID NO: 13130 - DNA, 507 bp, Zea mays
  Peptide Sequence Number=SeqID_54909
atgggggaaacggagcccagtcaggttctttgccgtcgcgacggggccaggggtgagtggggggaggcctggccgtcggcgagggggcactgtaccggaagggcgtgtgggcaggggcggctcggtcgctcccaggaacctctcgcccacggaggacaagccaccggcggggagcggactggctggctggacgccgagcacgccaccgcgcagcactggtcgagggagcaggggctgggtgggctccctgccggccagcggggcacgcatgtggctgcccccatgcgcacgcctgaagggcggttcctggctggatgcagggcacgtgcgggagaggcccagccaccggccatgggaagcaccggccgacgtcctgcagctagcatgcgggatgtcgttgccgcgagtgtaggggtctgcgaggagcatgttgccatggccgggagagggatgggagaagaacgcgtggggagcgagaggaagaaggatcttgtgcatacctggtaa

SEQ ID NO: 13131 - DNA, 684 bp, Zea mays
  Peptide Sequence Number=SeqID_54910
atgacgatgacgaactctgacaagcaagagagtgagagacgcgtttcaatagagaagaacgtggggagtgaaggggaggagaaacggctcattgaaactccattaacgcacggacagcgcgggtgctacgtgggggagggcgtcgggtcgctgccggtcggggtcggggacatggcagggcgtcgaggcggctctatgggcgcggcgcggtcggggcttttgtgtgggagctgcgtgtggtcggcgtcgcgtcgggctggggctcggacagctgcaggcgcaggggcgtcggtgcgtagggcgcgtctgcgagcgggcttggtcctcggtggggcgcgagtgcggccagggtcggtgtcgagcgcctggtggctggcgggtttggcgcgtcctgacgaggtcacgtcgggtgtggctcctcggctgcgcgtggaacatagcaggggaggagagaaggaaaagggaggtcgggtggggcccgctgttgtcttcaaccttgggttatcgctcatgtgcagggatgaacgtcgacgagcagggttcgacggacagggaacgacgcgatcgtcggtgagtgtttgggcggagctccggcttggggacgcgaacggtaagtacgaactccggcgggtctccaccgactccggcgacgacggtgacaaactccggcgagcaagagagtga

SEQ ID NO: 13132 - DNA, 471 bp, Zea mays
  Peptide Sequence Number=SeqID_54911
atgaactccattgatggcgccgttggtttcaatagagaagaacgtgggggcgtgaagggggagtggaaacggctcattgaaactccattaacgcacggacggcgtgggtgctacgcgggggagggcgtcgagtcgctggccggtcgcggtcggggacgtggcaaggcgtcgaggcggctccacgagcgcggcgcggtcggggcttcggtgtgggagctgcgtgcggtcggtgtcgcgtcgggctggggctcgggcagctgcaggcgcaggggcgtcggtgcgcagggcgcgtctgcggacgggctcgatcctcggcggggcgcgagcggccagggtcggcgtcgagcgcctggtggctggcgggttgggcgcgtcctgacgaggtcgcgtcgggtgtggctcctcggctgcgcgtggaagagaacaggggaggagagaaggaaaagggaggccgggtggggcccgatgtga

SEQ ID NO: 13133 - DNA, 1386 bp, Zea mays
  Peptide Sequence Number=SeqID_54912
atggcggcagggttcatcaaagaggtattccatcccgaatggcttgccaaccctgtgcttgtgagaaagaaaggagggaaatggcgaatgtgtatagactacactggtctaagcaaagcatgtacaaaagttccctaccctctgcctcgcatcgatcaaatcgtggattccactgctgggtgcgaaaccatgtctttcctcgatgcctactcagggaatgcgggtgtgacataccaaaggtgcatgaaccacgtgttcggcgaacacattggtcgaacggttgaggcctacgtcgatgacatcatagtcaagatgaggaaagcctccgacctcctttccgaccttgaagcgacattccggtatctcaaggcgaaaggcataaaactcaatcctgagaagtgcgtcttcggggtcccccgaggcatgctcttggggttcatcgtctccgagcggggcatcgaggccaacccggagaaaatcgcggccatcaccaacatggggcccatcaaagacttgaaaggcctgcctctgtaccacctcttaagaaaggccgagtgcttcacttggacccctgaggccgaggaagccctcgggaacctgaaggcgctcctcaggaacgcgcccatcttggtgccccccgctgtcggagaagccctcttgatctacgtcgccgctaccactcagttggtcagcaccgcgatcgtggttgagagacgagaagaggggcatgcattgcccatccagaggccagtttacttcatcagtgaggtactgtccgagaccaagatccgctacccacaaattcagaagttgttgtacgcggtgatcctgacgcggtggaagttgcgacactacttcgagtctcatccggtaactgtggtgtcatccttccccctggggagatcatctagtgccgagaagcctcgggggcaggcgcggggcctgctcttcatctcgcccctcgggaagcacctacgctacgtgttgcgcctccatttcccagcgtccaacaatgtggccgagtacgaggctctggtcaacgggttgcgcatcgccatcgagctaggggtccgacgcctcgacgctcgcggtgactcgcagctcgtcatcgaccaagtcatgaagaactcccactgccgcgacccaaagatggaagcctactgcgatgaggttcggcgcctggaagacaagttctacgggctcgagctgaaccacatcgcccaacgatacaacgagactgcggacgagctggctaagatagcctcggggcggacaacggttcccccggacgtcttctcccaagacctgcatcaaccctccgtcaagaccgacgacgcgcccgagcccgagaaggcctcggctcagcccgaggcaccctcggcttag

SEQ ID NO: 13134 - DNA, 483 bp, Zea mays
  Peptide Sequence Number=SeqID_54913
atgcagtacaatggatcaagcagtctcattagctgcgagaagcagacgattcgaatcgagtttttatccttgcaaggtcgctggccaggtcaaggacgacgccggtcagggacggctggacctaggaacgtcgctgctggcttgaacagggctgcacgtggggaggaggacttcctgctgccgtgcctgaagggggcgccaaggggagagaaggtggcgccatgggaagctccaagtagggggaagaagggagaggggcgccatggttgggagctcggcggccatgggaggtccctgcgcacacacaggaacagagggaagaaatggtgggggaaaaaagggaggacgccgtggggtggtgccatggaggccctgctcctgcgcgctggggaggaggaagggaggagacgccatggacagggagctccctccctgcgcgctggctgctgtgcgtgggaggaagaagggctgctgcgtgagtga

SEQ ID NO: 13135 - DNA, 288 bp, Zea mays
  Peptide Sequence Number=SeqID_54914
atggcgcccctctcccttcttccccctacttggagcttcccatggcgccaccttctctccccttggcgcccccttcaggcacggcagcaggaagtcctcctccccacgtgcagccctgttcaagccagcagcgacgttcctagccccggcttcctcgctgctaacgctgcgcgcatgccaagtgctcggcataatctagtggtcgacgccgcgtttcgcgccttgcccgttcggcgaaatgagccatgtggacagccccctgcgactagtcccattttgctcaggtag

SEQ ID NO: 13136 - DNA, 831 bp, Zea mays
  Peptide Sequence Number=SeqID_54915
atgaagatcattccggtcccttgcctggatgacaactatgcctacttaatcgtggacgagagcaccaagaaggcagcggccgttgaccctgtggaaccggagaaggttctcaaggcggccggcgaggtcggcgcctacgtcgactgcgttctcaccacccatcaccactgggatcatgctggtggcaatgagaagatgaggctgcaggtgccagggataaaggtatttggaggatccctggacaatgtgaaaggctgcactgatcaggtggagaatggaatgaagttgtcacttgggaaggacattgagatactatgcctacacacgccttgccacactaaaggtcatatcagctactatgttactagtaaggagggtgaagatccagcggtcttcaccggagataccttgttcattgctgggtgtgggaagttttttgagggttctgcagagcaaatgtatcagtcccttattgttacactgggttcgctgccaaagtcaacccgagtttactgtgggcatgagaggcatactgtgctctttatggccttacctcaccttttgcttgttgagttgcagtacactgtgaagaacctaaaattcatgctgacactggagccagagaatgagaagacgaaacagaaactggaatgggctgaaaagcagcgcgaagcgaatcagccaacagtgccctcgactataggagatgagtttgagataaatactttcatgcgtgttgatctaccagaaatacaggcgaaattcagtgtcaactctccagttgaagcaatgagagaggtcaggaagaccaaggataattggagaggttga

SEQ ID NO: 13137 - DNA, 1461 bp, Zea mays
  Peptide Sequence Number=SeqID_54916
atgtctggaaaagggaagaggcgaagcgctagattgttgaagctggaagagcagaagaacgacggcggcgccgtctgcttccttgacccctggcagatcatccggaacagcatttccgatagcttaccaagccaaacctcggtaggacagatcatcgagtatatccttgacgagttggagatgagagacaggcatgagctgtttgcaatgccagacgacatccaggtgactgattatgcagagctggtgagcaggcccggtgacttcgcgacactgagacagaagaacagggatggcatgtacacggcactggagcaattcgagggcatggcgctgctggatcaagccaagctggtgttcatgtccctgaggagcaaccagatgttctcggagtcggagctcgcggcgtggcgccagaggcacgcggaccagatgcagcagccgatcacgccggagggaagagagggcggcggcaggggaccaccacgtcacacggctgctgcgccgctgttgcagccgtccgccgccacgccgaggaagaggagcgccgccgagacgaagaagcaggaggacgcccgcaccggcgggaacgctacggggaaccagagagggaggccgcgcggcgccagggagaccaaggccacggcgcccacgccgccgggaaagagggcgagaaaagctgacacgctgttccgatccattggagacgcagcagcaacggcgggctttaacggcggccgcggtctggtggctcgaagaaggctcacttacaatgacgaagctgctgccgatcaaggctggcgggagatagcggcgacgccggtcttccaaggccggcacgttacactcagagaccagccgcaggagcagacgttccgaggcagcctgcagcgcttcgtgcggcacgcggggctgaaggcgcgcgtggccgccgagttcaggagcctcgagtgcgtcgcgcgggccaggcactgccccgtcccgcagtgctggaacggcttcgctcccagcgccggtttcctcccgccgtcgccccggcctccgggcgccgccgccgcggagccggggacgtcgtcagatcagcaggcggcggcgccggagtgcaagctggagacggacgaggtgctcaagctcttcgtgctcatgggcacgcccgctgcgttcttgagcagagccaagaaaatgttcggccaagatgagccagagaaaagcgcgcaaccggccaaggctgccgacgacgcccgggcgcgcgctggcgctgcaacgacggccgagactgggcacgggaagaagagcagcgcgagcgagccatcggccgccgcgtgcgggccgttcgcgccgcccaagttggtccccggccggctgggcttcggccagttcgccgcctcttcagcacgtccgttcaagctgaactccaagccttcggcgtcaaatgattccggcaagaagaaacttcagtga

SEQ ID NO: 13138 - DNA, 1239 bp, Zea mays
  Peptide Sequence Number=SeqID_54917
atgctgccgcggcttcccttccactgtgacctcctttcctccgcagtcctctgccttctctgtggtcgctggcctgagactccaagtggaagcacaagtgtacaaacaggatgtgccaatctttctcctgttctgcctgaggccctttttctcgaaaagcgcaggagaactgcgtcccgttatattaagaagaaggaaaaggtcatggttaatgggcttttattccagctttcattacctctgaacttccttgggagtgtgtatcgagaatctagacaaagcctcattgacatgaagtcaatgtttcagttgcttgaggaaaaacctgcaataaaggatgagcctcatgcacaacctttgcagttcaagggagggtgcattgaattcgagaatgttcattttgggtatgtaccagaaaggaagattcttgatggtgccactttcaccgtacctgcaggaaagagtgtggccattgttggaactagcggaagcgggaaatcaactattcttagacttcttttcagattctttgattcgacttcaggatctatacgaattgacgggcaagatatccgaggagtgacactggggagccttcgaaaatgtctaggtgtggtacctcaggacacagtactttttaatgacacgattaagcataatatacagtatgggcggttatcagcaaaagatgaggaggtctttgatgctgcccgacgtgctgctattcatgatacaattatgaacttcccagacaagtatgacaccgtagtaggagaacgaggattgaagttaagcggcggggagaaacaacgagtgtcaatagcccgtgtattcttgaaggagccttccattctgttatgtgatgaagcaactagtgctcttgacagcactactgaagcatcaattttgaattctctgaaatccttatcttccgatcgaacatcaatctttattgctcatcgactcacaactgcaatgcagtgtgatcagataattgttttggaggatgggaaggtagtagaacaaggaccacatgattttcttctgtcacagggtgggcgatacgcagaattgtggtatcagcagaacagcactgacgccatggattctgctgcagctagcgtagagaagctctaccggtgccaaaaaaaaacatcagacttccccagatcgcttcagggcctattagcagtgcctggttcttggtctacactcaccatagtggatcgtgtaaagtag

SEQ ID NO: 13139 - DNA, 444 bp, Zea mays
  Peptide Sequence Number=SeqID_54918
atggcgcctcagaggttaaacaacatccatttttcaaagacattagctgggatacccttgctaggcagaagctacttcaccagtcgctattcctggaatccatcagatggaaacatatatgaagcatacgagtttgaggattccagtgataatggaagccttagtggaagcagtagttgtctgagcaaccgccaagatgacatgacggaggacagcgatggcctcaatgagtttgaatctagtgcaaatgtcaattattctttcagcaacttctcgttcaagaatcatgcttccatcaattatgatatgttcaccaaaggattgaaggatgatccaccgccaagaactgaaacatcaaagtgtgaggcatggtctgttccaattgaggctgttcctacatctcccggagccgagtacagttttgctgttaccttgttttcatga

SEQ ID NO: 13140 - DNA, 561 bp, Zea mays
  Peptide Sequence Number=SeqID_54919
atgcctgcgctggcgctggccgcctcggctgctggctgtcgcttcctctcccgctcggcgtgtctgggtgcgtggggagcgggaattgggggcgcagcgcacgggagaggggggaggggccgcgacgacgcggatctgagactgggaagggcgctgccgctgaggcgggcctcaatggaatgcaagtacagtttcgacaaggaatctgtcggatgttccgcgcgtggtaccgggtccgggggtgaccgtgacccgcgggcgctctcgctcgcgctccaacgggtgggttcggatcggctcggctcaccgttcggcgctgctgctggcgcggcgcccgctgactgctgtcgaccgtggttgttgacacgtcccccccggccccggccggccaaactaggacactggagcgccgtggaaaaatggtcaacccggacggggctccttcccctgctgctctttggcggccagcaggaaactccacaccgctctttcagcagttcttctggcgaccacttgttgatgaaaaacccttgtgtatcacctgttgatgagaaaacttag

SEQ ID NO: 13141 - DNA, 834 bp, Zea mays
  Peptide Sequence Number=SeqID_54920
atgtccgtgtccggtgtcccgaccgcttcgcagttcgacgacatcttcgccaaggggctcccatctacggtgttctcggagtttcggtccagtatcaacctctgtaatgacaagagttgcgactgcagggggttagacagcttttatgctgaagtacctttaatgcaaatagtaatacttctggttcttaggaaggcagatatgattcggaaaaatgctgtcgagagtatattggctgaacgtgatatattgattacagtcaggaacccttttgtggtacggtttttctattcgtttacctcacgggataatttgtatctggtcatggagtacctgaatggaggggacctttactcattactgaggaatttagggtgcctggatgaagacgttgttcgtgtgtatcttgcagaagttgtactagctttggaatatttgcactctatgcacatagtccatagggatctaaagcctgacaacttgttgatagcccatgatggacatattaagttgacaggttttgggttgtccaaggttggtttgattaacaacacatatgatctgtctcgccctgttgttagtggggcttcactgtatggagatgatgagcctcagatgaatgaattcgagcaaatggatcaccgagcacggagacaaaatcgttctgctgttggaactcctgattatttagcaccagaaatcattttggggacaggacatggttgcagtgcagattggtggtccgttggtgtcattctatttgagctcattgttggcatacctccgttcaatgcagaacacccccagatgaggaaagaagaagatgggaagtag

SEQ ID NO: 13142 - DNA, 423 bp, Zea mays
  Peptide Sequence Number=SeqID_54921
atggccgacgtgggcgagagtctagagaggacgtcgtggtcggggttgccaaagcgatggtgcaaagtggaggtagatgcagtagcgatgagggcatatggtgtggcaacacgggatgagggaggtggggcgagaaaccgaataggatatatggtggcagagctgtcacatcgggcaaccacaacacgagtgaaggttttgtatgatgttggggcaacaaggatgatgttgaggtacaaaggaccaggaagacctgtgtcgcctagtgaggtgacaggcaaagtccccattaccggcaacaatggaagaagggaaggtggggctgcgagatgggataaaaacagtactagggtcagaagtggtgtggtacgaggcgtcggagtcagcaacctagttggtgggagtaggagtgggctacaatga

SEQ ID NO: 13143 - DNA, 366 bp, Zea mays
  Peptide Sequence Number=SeqID_54922
atggagaaccagattcagggtccaatcaaaggcaacgaacatgccctagagaaattgatcgtcttgaagggagacccgcacatggtagggaggcatgtggaccgcggcatggcgaaggacgggcgtcaagggagtaggcgcagaaggggagaggtcagcgcccgcatgccacccgtgcccccatggtgccggaggaaaggagcggccgggagtgacataggggtcgtggcaggcactgcaggcaggggcggaggtgctgacacagtgcagctatggaagggggagttgtcctcggaagtggaggagaggctcgcctgcgggtggagtggcggttggatggacgtagacggcaccactaccgcatag

SEQ ID NO: 13144 - DNA, 342 bp, Zea mays
  Peptide Sequence Number=SeqID_54923
atggacgacgagaggagcgatctgattgaagaatcacccaccgccgccagactggccacgagcgcgctggccaaggcctccccagcaccgggcaaggcctgcctagaccccgcgccaagaaatatcaatggtgccaccctacctccttggggtgtcatgaaaatcatgcacaaaaaaaatccagacatcaagaaggataggagcgagttaatcactttcactactttcatggtgcagccgcttcaatccgttcctgatctaccagagtttgcgctgtcattgagaccagaaggatacgagttgccaagaactgattcaatctgggagaatgttaatggttaa

SEQ ID NO: 13145 - DNA, 363 bp, Zea mays
  Peptide Sequence Number=SeqID_54924
atgcccaggctctctttgctgatgctgtggaaccaagttcccagaaactttaggctgctagaagaactagaacgtggtgagaagggcattggtgatggaactgtgagctatgggatggatgatgctgatgacatatatatgcggtcctggacaggaactatcattggtcctcccaatgttgaaccaagtctatttcctatgcttggcaagtgggaaagggaacatacaatggaggacatcctgagcagcttaaaaagggagatgtcaactcctcagaaccgcaggctgtaccaacctcatgaaggtaatgaagatcaaagagtagagcagaaagggctgtcccttagatgtgccgtcatgtaa

SEQ ID NO: 13146 - DNA, 801 bp, Zea mays
  Peptide Sequence Number=SeqID_54925
atggtgttcaaggggcgcttcttctcgtcgcgacacaagtcatcggaatcctcgtcaagcccagacggcagcaacagcccgcgcacgcctacctcggcgccggcctcggtatccgcggcgtcgccggcgtcgtcatcgtcttctaaatccgacaagaagaagactaaattggagactcccaaaaagcgcgacaagctctttggttccgcggctaccgcccccaagagcgccgcgtcgtcggccccgtcaagcctggcgggtgacgggaggaaggggcccgtgctgcatcatagggacgcgggcggcggaggcgggggtggcgcatcggcggccgcgctgtcgccgatcctggcgtcctcactggggctcaaccggatcaagacgagatcccggccgctgccgcaggagggccaacgcatggctgccgcgctcgccagcagcaacctctcgcacgggcagggccaagcggaaccgtcggctggctcagccggagacggcgggagaaagggcgtcagctcctcggcggacacgagtagtagcagccgcgggatagtgaaaacgaccgagctggcgatgcgaagtgcacctgggacgaacttcggagcaggagggaagaacgctgtaaaagggtgtaagagggctatgaagctcctggagcagccgacggaaccaggaatccccatccatgccataggccacaacacgatactcagcctcaacgctggagtgggagacaacaggttgctgcttcgaggaccaggagacaaggttgacatccaagaaggctacacaaccacatga

SEQ ID NO: 13147 - DNA, 525 bp, Zea mays
  Peptide Sequence Number=SeqID_54926
atggagaaccagattcagggcccgatcaaaggcaacgaacatgccctagagaaattgatcgtcttgaagggagacccgcacatggtagggaggcatgtggaccgcgacatggcgaaggacgggcgtcaagggaataggcgcagaaggggagaggaaagggcggaggtgctgacactgtgcagctatggaagggggagttgtcctcgctgcggaagtggaggagaggctcacttgcgggtggagtggcggttggatggacgtggacagcaccactggcgcatagagggaggtcgtcgcgtccgtgcgaggcgcaaggggcagtgcaagaagggaacaagaggctggttcgttcgtctgcgcagcagacacggcggcagcgccgaccgcggactaggagaggtcgttggcagtaggaaagaatcccgagggggtcgtgggtgtggggaagccgtgtgcagccagcacgggcgcgctagcagccattccaaggagggcagggccggccacgacctgcgaggcgattga

SEQ ID NO: 13148 - DNA, 651 bp, Zea mays
  Peptide Sequence Number=SeqID_54927
atggaggcagcagcaagcgccgacctgcatgtggccctcctccgctcggtccccctccacgccagtcatcgccccttcgccgcggaccggagccacgcctccgcccctccgtcgcgggtcggggctacgccgaatcctgtcatggggcggctctactcttccgccacaggccgggccgtggctcccgctacaaggccacgccgtcgggcctcccctcgcctcagagctatgccacagctcctcgtcgccgggctgcccctcgccatggagcggcactgggctcctcacagtcggttgttcccgcgccatggagctgggctaggccgccggcggcccttgccctgcctcctcgtgtcgtggagacggtcactcctccaatgctggtcgagccctccacgtcgagagatcgggtttgcgtcgcccaccatcaatcgactcgcgcgtcctcgacatcggcttcaacaacacggcttcctcattttcttcgacggtgcaactggcgtgacatgcgacgtaaccggaatgcctgcctatgtcgcgcctcttcgtctgcacgtccatctatatcggctcgtcgtcgccaccaccgatcaggaggctccacctttgacatcaccatcgtcgtctccgcctcacacgtcatcgacctga

SEQ ID NO: 13149 - DNA, 732 bp, Zea mays
  Peptide Sequence Number=SeqID_54928
atggctgcatgtagtagattattagatgatgataaatatgctattgctattgggagattccatggtgatttacaatttgagcaagagcgcatagtgataagtgatcctttgaaccaaacagtttcatgtagttgtggaatgttcaataggactggaatattgtgtgcacatggtctgaaagttcttgatttgatgaatatcaagatattgccaacacattatgtgttaaagagatggactaaagcaacacgtaatgggagtgtacaagataaggaaggaaggaatgtggtagcaaatccaatgctggaatctcaacttcgctacaaggacttgtctcataaatttctcaatttggcacataaagctgttcactctccagaatgttgtttgatgatagaaaatgcacttgattgccttggtacacagctagaggataaactcaatgcatctacttctactatgagcaacccatgcaacgaccaagaaaatgttgaaccaaatgttcagcaaggagatgacttgcttcgtgctgcacatttgaagaaaaaggaggtcaaatccaaaaattcaaggagaaataaaagttggctcgataaattcaacaagaggaagcgtaagccaacaaaaaaaaggagcacagtgttgtttgggctacagcaggactgcctgtacaacagcccacaagctgttgcttgggagtgctggagtcacccgttgcaggatggagactga

SEQ ID NO: 13150 - DNA, 186 bp, Zea mays
  Peptide Sequence Number=SeqID_54929
atggccagagaggcaacggagcgggtggccaacatgaggactggcggtggcggatctggaccggggctcccgccttgtgaaatctcggagttcccgtgcaaatatttaggtcttcccgtgtccttgggaaaattgaacacaacccagttgcatgctgacgggttggaaggcagagttgatgtctag

SEQ ID NO: 13151 - DNA, 669 bp, Zea mays
  Peptide Sequence Number=SeqID_54930
atggctttgtcttcatatgttcttaggaaggcagatatgattcggaaaaatgctgtcgagagtatattggctgaacgtgatatattgattacagtcaggaacccttttgtggtacggtttttctattcgtttacctcacgggacaatttgtatctggtcatggagtacctgaatggaggggacctttactcattactgaggaatttagggtgcctggatgaagacgttgttcgtgtatatcttgcagaagttgtactagctttggaatatttgcactctatgcacatagtccatagggatctaaagcctgacaacttgttgatagcccatgatggacatattaagttgacagattttgggttgtccaaggttggtttgattaacaacacatatgatctgtctcgtcctgttgttagtggggcttcactgtatggagatgatgagcctcagatgaatgaattcgagcaaatggatcaccgagcacggagacaaaatcgttctgctgttggaactcctgattatttagcaccagaaatccttttggggacaggacatggttgcagtgcagattggtggtccgttggtgtcattctatttgagctcattgttggcatacctccgttcaatgcagaacacccccagatgaggaaagaagaagatgggaagtag

SEQ ID NO: 13152 - DNA, 216 bp, Zea mays
  Peptide Sequence Number=SeqID_54931
atgaacgtcggcgagggggtttcgaccgtgtacaggagggacagtgggtttggcgtcgagcagagaacgacgcggtcgtcgatagacgtcgaggtacaaactccggcgaggctccacggactccgggacagacggcgaacgacgaacaactacgtggtgatgatgttgcgcgcaggtgggctagtggccgaggtgctaatgcatggcgaatggtga

SEQ ID NO: 13153 - DNA, 258 bp, Zea mays
  Peptide Sequence Number=SeqID_54932
atggaggagctacgacggccggatcgagggcgatacgagacggtggctgctggcgcgaggaagggaggaacggcgcggcttggtcgagctgggctagagacgacggtgccggaacaaactaaggacgccgcgacggctggagagtggtcgaacccgacgaccaccagagagggagccgagggcgcggccatgggcgacctgctggtgcagacttgggcgagactggagcaggggcacacagcggctggcgtggcttga

SEQ ID NO: 13154 - DNA, 216 bp, Zea mays
  Peptide Sequence Number=SeqID_54933
atgaacgtcggcgagggggtttcgactgtgtacaggagggacagtgggtttggcgtcgagcagagaacgacgcggtcgtcgatagacgtcgaggtacaaactccggcgaggctccacggactccgggacagacggcgaacgacgaacaactacgtggtgatgatgttgcgcgcaggtgggctagtggccgaggtgctaatgcatggcgaatggtga

SEQ ID NO: 13155 - DNA, 366 bp, Zea mays
  Peptide Sequence Number=SeqID_54934
atggctggaggagggagagaacaggtaggaacgcgctacacaggggagttcggctgtgcgctggagtgggattcgggcgtgccatgggagcccggggcacggaccaaatctgagcaggggaagcaggcgcgacgaccatgggaagcaagcacgcgcgccagcaggcagggcgacgacgcgagcagggaagtcggcgtgcaggggagctctggccgggcgctcggccaagaactggagcaggagagagctccacgagctggaggagcgcgcagccatggagggacctcggcagggcgctcgcccatgggagatgcagggcgcggtcgtgggaaagggaaggagcggctaggcggcaggaaaatctga

SEQ ID NO: 13156 - DNA, 345 bp, Zea mays
  Peptide Sequence Number=SeqID_54935
atgttgaatagtattcacggcgacgagagcgagtgggacgatggcgaggtccgatgttatagcagagaccatgacgagtgggacaatggcaaaccccgtgttgagtacaaggaacgacgacgtcgagctaagattagagacgacacccagacgcagctggggaggcagccgggcgccatagagaatatatggattcggcgagctgaagcaaggcgcaatctgatggagaccatgtcgggcaagcgcacggccgggcgagttgaggggcgcgacggccagggtattgaaggcgagggagcttggcacatagggagatgggatgagcggctcgtcacctgcggctag

SEQ ID NO: 13157 - DNA, 711 bp, Zea mays
  Peptide Sequence Number=SeqID_54936
atggagcagtgcatagctaggttggatgtagcaatgttcaatgctattttgcgtgaatcagatgatgaaattccaacagacccgctgtctgatcccataactgatcctaaagttcttccaatcccatctgggaaattcagcttcggtgctggggtccaactgaaaaatgctctttgccctacctttagctcatcaatcatcaagaacatcctggatgtctttttaccagatgaattttgtccagatcccattcaaggttctttacttcaagcactagagttggaggaccacctggaggttaacaagggcatacggtcgatcccgtgcagcgcatcgccaattttgtacaatgcccctgtatctggggcaatactaagcgtcatcggtgatcctaggaagagcgggtccgccatccttcacaagtccaacacgagcgatgacgagcttgatgagctgagctccccacttaccttcatctccaacacctcatcagacccgcttgcgaagctgaagcggatcagcaactcgaccacagcgaggtataggcttctccatgagaatagtaaggttgaatgcaccttcttcacaacatcttccattgcctatgaagataaggtgcggatttgtgcaatgcattggctcaccattagggatgggaaaaactcaacccgtgggtcgtgggttctatcggatcagtcaactataatgtaa

SEQ ID NO: 13158 - DNA, 2031 bp, Zea mays
  Peptide Sequence Number=SeqID_54937
atggtgctaggcctccgaaccaagacaaggaaggattctgccttccatgtggatttcaatattctcatccaagaaatcagcccatggcccccttctgaatcgttgaagtctttgcgctccgtagtactcttctgggaaaatggcgagcgcaattcaggaaagacgagcactgttgcgccttcaattgggtcaggttccacagcagggaagattgaatttaatgagttcataaacttacaggctattttccagaaggaggggtcatccaagagtggaaagtggcagaagaacctgcttgaattgaacttgtatgagccgaggagggagaagctgaagggccagcatttggggtctgcaacactagaccttgcagagcatgcaatgtttcatgaggacaccagtgttcctgtgcctctcagttccaagagaagtttcaaaaacaatgcccaacccatggtttacctccgaatccagcctttggatggcgataactcaagcgtttcttcaagagatgcattatcacaagaggcatcagttgataaagattcaaaggaatttgtctcagcaacggtgagtgaggagtatactgaagatacagagtttgcttcctttactgatgaagaagaagcaactccatacctgtaccgctcgggtgtaactgctctcacaggtagcaatagatctcatgaatccctcaagggcaaggatatcaggttaactaataatgaaggtaccagctcatcgttggattctcaacatgaagcaacagtatcctgtatgaaagtgaggaatgaagaagttgaaaagtttccaattcaagtgcaaaagcaaaatggccatccagaaaatctgtctctctcatcagatttgcccagagaacaaagtccgtctcttccaccacacaatgcattcagaagtggtcgtaaaatgtcatttgcatatggtatgactgaatctaaccaaagacagtttggggagagaacttatagcactttaactactgatagagcaaggaatgcgaggttcagtatgagagttccagatgttaatggaagtatcataaataagaaagttgattcccaggatattgcaattactcatgagaataaggccagtgttgatgatggattgcaagtccaggaaccaatacgcatttcaaataatcgaaatgacaacaaagttcgagaactagaacttaaaattgagttgcttgaagcagagctaagggaagctgccgctgctgagataggcctttattcaataattgcagaacatggtagttcagtaaacaaggttcatacaccggcacggaggctctccaggcattttgtgcatgcactaaaaaactgttcaagagacaagatgggaagtgcagcaaggaacacaacctctgggctggttttggttgcaaaagcttgtggatatgacattgcaaggttgagtttctggttgtcaaactgtgttgtactgcgagcaattgttactgaaacttctaggcaatcgggcactgtaaatagcagcaattatggtgattataattccaaaacaacatacaggaaaaactctgcatcaatgtgggagtcacttaataggaagaaaggaaaattactttcccctgagtttgataactgggaagatgttgacacatttatagctgcactaaagaagatcgaatcatggatattttctcgaattgttgaaaccctttggtggcagacattcacaccacatatgcaatctgctgatataactggtggtttgagaagtactccaaatccaaaaaaaggctatggaaagattcctgttgtgggcaaccagcaacaagcaaccatatcaatggacatatggaagaaagcctttaaggaagcgtcagaacggctttgcccagtaagggcagctggtcatgagtgtggatgtctgcctatgttaaccaagttggacttagtgtcatgtggggccaccactatcagcgtaggccacgcggccagcactagatcacgccggcgcaggcagacagttagatgtgactag

SEQ ID NO: 13159 - DNA, 765 bp, Zea mays
  Peptide Sequence Number=SeqID_54938
atggcgggcgcaccgctcgcgcagggagcaattaggacgagggggcgcggggtaggtgagctgccgaggagtgggctcaccgcaaacatggaaaagagaggagggattgacagaaggaggggcctacctcgacggcgtcatccgacggcgatgactccagacttggcgtggacggttttctgggacgaggggggttgtcggtttcgtgagggagatgaacaggatgtgatgggaactgacttatgggtccggcgctggctgactgtttggggtcggcgcgcgccgcgtgcgctgggctgcgcgagccctgtgcgggcggggcaggctggctgggctagcacgcgcgcggctgggcgggagcaatgcagcgcgggccaggggagcagcgggcgcaggggaatgggctgggggagcagcgcggctgggcgagcgtttcttctcgcgcgcgagctgggcagcggaaagcgcgcgacgcgctgggtgggcgtgacttgggccgagcaggtgggccgcatcgctgggtggcgcaggagctctggggtgggagcgggccacggggcaggccgtgggagggaaaggaggggggtgcgctgggccgcgcggcaggtcgagcaggctgggcggaggtgttacaccgaccacatcaccggagagcttgagaagctacacatctgtgacaagtactacgacacagatcagatccacaccgcaagtggctcaggagcgatgaaggccctgtctggcgacgacatgcggccgacatag

SEQ ID NO: 13160 - DNA, 1578 bp, Zea mays
  Peptide Sequence Number=SeqID_54939
atggccgcacagacagaggcggaccacactagatgtagtggggttggcgtggatgaagttcaggcgacaaagactgtggatggatggtgctggactgctgacagaccggcaaagaggggcatgcatccaagcagctgtccgttatgtgaccaagaacctgaatctattaaccacctgctggtctcatgtgtgtttgcaaggatcttctggtataaattgctcagaaagtttgggttgcatagccttgctccccagctgggcctgacatccttaatggtcaagaaagctatcaggtgtgcaatggcaactggaaaagagcagggtgcaatttccactgccagtagcggtgatcaaaccaagggcggtttgcgtggaaaattaaacaaagttgttttagcttatagtggtggtttggatacatccgttattgttccatggctcagggagaactatggttgtgaagtcgtttgtttcactgctgatgttggccagggtgccattgaattggaagggttggagaagaaggcaaaagccagtggtgcatgtcagcttgttgtgaaggacctcaaagaagaatttgttagtgaatatatatacccctgcctgcgtgcaggtgcagtttatgaaagaaagtatctgcttgggacttcgatggctaggcctgttattgctaaggcaatggttgatgttgccaaggaagttggtgcggatgcagttgcccatggttgcactggaaaaggcaatgatcaggttcgctttgagcttacattctatgctttaaatcctgaacttaaagtggtggcaccttggagggagtgggatatcacaggacgtgaagatgctattgaatatgcaaagaaacataatgtacctgttccagtttcaaagaaatcaatatacagccgagaccgaaacttgtggcaccttagccatgagggtgacatcctggaggacccagcaaatgagccaaaggaagatatgtatatgatgtcgattgctccagaaaatgcgccctcgaaacctgagtatttggagattggtatcattgctggtgttcctgtttcaatcaatggccgagacctctcaccagcatccctcctcgcggagctcaatgaaatcggtggaaagcatgggattgggcgtatcgacatggtggaaaacaggctggtcggcatgaagtcacgtggggtctatgagacccccggtggcaccatcatggcagccgcggtacgcgagttggagtccctgaccctggacagggagaccatgcagtggaaggacatcattgccctcaagtacgccgagctggtctatgctggccgctggtttgacccgctccggcagtcctttgatgccttcatggagaaggttaccgcgacgaccactggttcagtgaccctgaagctgtacaagggttccgtgaacgtcgcgtcccggaagagcccctacagcctgtacagggaagatatctcctcgtttgagaacggggagatctacaaccaagctgacgccgaggggttcatcaggctgtacggcctaccgacacgggtccgggcgatgctggagaagggtatctga

SEQ ID NO: 13161 - DNA, 2268 bp, Zea mays
  Peptide Sequence Number=SeqID_54940
atggcggtcagacgaggaattcctacattgctcttcctaaaaactgtagcggccctggcgctcaccgccgagggcctggcgctgctgacgttcaaggcggcggcgaccgacgacccgcactcggcgctctcgcggtggtccgagtccgaccaggatccgtgccggtggccgggtgtcatctgcgccaacgcctcgtcctcggcgccgtccgcggccccgcgcgtcgtcggcttggccgtggcgggcaagaacatctccgggtacatcccctcggagctggggtcgctgctcttcctccgccgcctcaacctccatggcaaccggctgtcgggcgtcatccccgccgcgctatccaacgcctcgtcgctccactctctctacctctacgggaaccgcctcacgggcggccttcccgtcgcgctctgcgacctcccgcacctccagaacctggacgtctccgggaacgcgctctcgggcgagctgccgctggacctccgtggctgccgcagcctgcagcggctcgtgctgtcccggaacgccttcacgggtgagctccccgcgggagtgtggcccgagatgcccaacctacagcagctcgacctctcctccaacgccttcaacggctccataccgcccgacctcggcgagctccccaggctcgccggcacgcttaacctctcccacaaccacttctctggcgtcgtgccgcccgagctgggccgcctcgctgccaccgtgacgctcgacctccgcttcaacaacctctccggggccatcccacagacgggctccctcgccagccagggccccaccgcgttcctcaacaaccccggcctctgcggctacccgctccaggtcccctgccgcgccgtcccgccgcccacggagtcgccgacgccgccggccacgacgaccccgctgccctccaccgcgtcctccgaccgacaccagcccatcaggacgggcctgatcgcgctcatctccgtcgcggacgccgccggggtggccctggtcggcgtcatcctagtgtacatgtactggaaggtcaaggaccggaaggggcaccgcgacggcggcggcgacgacagcagcaagagcgggctctgccgctgcatgctgtggcagcacggtggcagtgacagctcggacgcgtcctcgggcgacggcgacggcgaaggcaagtacagcggcggcgagggggagcttgtggcgatggaccgcgggttccgcgtggagctggacgagctgttgcggtcctcggcctacgtgctgggcaagggaggcaaggggatcgtgtacaaggtggtggtggcgaacgggaccacgcccgtggccgtgcggcggctgggcggcggcggcggcggcggcgcggaccgctgcaaggagttcgcggcggaggcgcgcgccgtggggcgggtgcgccatcccaacgtggtgcgcctgcgcgcctactactggtccgccgacgagaagctcgtcgtcaccgacttcgttggcaacggcaacctcaccaccgcgctgcgcggacggcctggtcaaactgtcctgtcgtggtcagcacggctgaagatcgccaagggcgcggcgcgcgggctggcgtatctccacgagtccagcccgcggcggttcgtccacggcgaggtgaagccatcgaacatcctcctcgacgccgacttcaccgcacacgtcgccgacttcggccttgcccgcctgctggccgtggccggctgcgcccccgacgggccgccctccacgggtggtgccgggctcctcggcggcgccatcccgtacgtcaagccaccggcgccgggtacgggtccggaccgtttcggcgccggcggcgggtaccgcgcgccggaagcgcgtgcgcccggtgcaaagccgacgcagaagtgggacgtgttctcgttcggtgtggtgctgctggagttgctgacgggccgaggcccggccgccgaccacgcgtcgccgtcgacgtcggcgtcgttctcggcgcccgtgtccgggtcgacggcgacggaccggtccgggagcggggagcacgggggtggcgcggtgccggaggtggtgcggtgggttcgccgtggcttcgaggaggacgttcgccccctggcggagatggtggacccggcgctgctacgaggccccgcgctgcccaagaaggaggtggtggcggcgttccacgtcgcgctccagtgcacggagagcgacccggagctccggccacggatgaaggccgttgccgacagcctcgaaaagatcggctaa

SEQ ID NO: 13162 - DNA, 1290 bp, Zea mays
  Peptide Sequence Number=SeqID_54941
atggggcatggaggaagaagtcggccccctcccccaggaagtcgttggggcgcctacgggtgcgcagaccggaacccctcagcgaccacccgctgcggggaacatagagaaggggcctgtcacccctccccacgcagtcgtttcggggcccgtagtggccccgaccatcgttccaccctgggcccctgccccggggcctgtagaagagagggccaccgccccatcgcccatgtctatggtagggcggcggggaccgaggagccggaggccgaggccttcttttgtacctatctctggctccaagcgccgagcccatgtgccctccattactgccaccaaggcagtgaagcgcggtgctgggacgtctacggggcctcgtcccgcccccattttgcccatgagacccctcaagagggcgttgaggtggtcgagcccactcttggggcacctgttgagcccggcaccatcatgatcgagatggttcccacgcacctcgcatcaccgacggaggccatcaccatctcctctggggatgaggcggaggcgggtcatgcggtgccgggcacggcgtcgccaacagtatttgacctcctgcgcgctatccctaacaccctcgaagtcgtgccaagcttggggtcatggcgcgccgaggaggccagtcccttggatccgccttgggtgctgctcgtcgacaagatcatcatcgagcctcctctctcaggggcagcgatgaccttgttcgcgcacgccagaccccttgatatgggagggctgaccctggcatggatgtccacggggggtggtccgtacttcgtcctcaacaacctcaaggagcgggaacaatgggatgagctaagggctgtgacccaggaggttatgacgaggtccatggccatgtccatctgcgttcgccgtgaacgggacatctgggcctcgctgcagtgccatcgggccacgctgctccattccaacaagcagctagcactgaggagcccccgaagtggcggacttgatgtcctggtgcgagggactgaaagaagagggtgcggtcgatcgcgagagcatgcgtcggctgagggacaaagtctgccgcctgaaggcagaggtggaccgtcgcgtgagggagatgcgacagatgaagggacaccttcaagcggtacggtggagcgggatgaagcttccctccgcatcgactccctctccaagtccctagaagccgaatggtacaagggtcgggccttgaacgcccggatacaaggcctcgagaaggatctagagaccggaacctag

SEQ ID NO: 13163 - DNA, 159 bp, Zea mays
  Peptide Sequence Number=SeqID_54942
atggcgagagtagcgtgtaccctccacggcaagaggctggacggtggtgtatatgtgctctcggtgaggaagcagcaaatttttgttgcttttgttccaaggtggttcccaaagaagaaagccaagactaaagccacgggaggaagtgtgctcctttaa

SEQ ID NO: 13164 - DNA, 231 bp, Zea mays
  Peptide Sequence Number=SeqID_54943
atggcagttacgcttcggttcgtctccatctcccagccccggcgtgcttccttcctcgacacgctgctactcccggtcccggtcccggtcccggtcccggccctcctccaaaagattcgcacccatccagccgacgcccccaaccggggggagggacaggacgcgccgtgcccgtgcgtgagcgtggcaccaacccctcaaccctacccgcccgcaagtaccctcacgtag

SEQ ID NO: 13165 - DNA, 651 bp, Zea mays
  Peptide Sequence Number=SeqID_54944
atgggcgacggtgtttgtccgtgttggtgcgagcatgctgctgggggcgcgaccgacaccgacgagttccagcacacggtggagattatcatgtgtgttcaacgtcgcgccatttgtctgcttgcctccgcctccgtcgcggccttcgcggatgttacaaagaacagtatgtatcagatgatgcagcctcagattgatatacttctttttgagataatttttcctcttatgtgcttcaatgacaatgaccaaaagttatgggaagaagatccccatgaatatgttcgcaaggtctatgatatcatcgaagatttgtacagtccccgaacagctgctatggactttgtgagtgaattgattagaaagcgagggaaaaacaatctccaaaagttcattcatttcattgtggatatttttaggaggtatgatgaagcacctgctgatcttaagccatatcgccaaaaagatggtgctcttctcgctattgggacactctgtgataaactgaagcaaacagatccatataaaacagagcttgagagtatgctggtccgacatgtctttcctgaattcaacagtcgtgttggacacttgcgagcaaaggtggaatatattagctcttcactggtcaataatgatatagaatactaa

SEQ ID NO: 13166 - DNA, 1488 bp, Zea mays
  Peptide Sequence Number=SeqID_54945
atgagcctcgccgccgtcgtgattatgatcgccgagggcgcattcggcagctcagctggcgcgcttccggcggcttacccgtccgcatggtcagaagcagcggcgtccttcattcggacgggtatggaggagaacgcgacgggcatcaattgctggactattgctctgctcactgctgggtggtaccttggtggtttgcatattgttttgatattgttgatgcttctctatgttccaccccctagatggtaccagattccagattttcattgtaacgtttgtagtttccctgctttccgtgttgtagatgctgataggtttcaagatcacttctgtcctgtgaaaatggcggatgaactacgctcaacgtctgtgggtcagaagttccatgggcagtccgtgctgttgagcagaatctcttcctattccgccatgaacaaccctgtattcaacaatgcctattctgcttacaatgtgccccagaggtcatatcatgggatgaatgcaactgctggactctcatctgtcatggcaccatctcctgtctttgcttctgccccaaaagagaaaggcttttctggatttatgatcgactttatgatgggtggagtttctgctgctgtctccaagacagctgcagctccgattgagcgtgtcaagcttttgattcagaaccaggatgaaatgctcaagactggcaggctttctgaaccgtacaagggtattggggactgctttggccggacaatcagagatgagggttttgtctcactgtggagaggaaacacagctaatgtcatccgttacttccccacacaggcattgaactttgcgttcaaggatcacttcaagcgcatgttcaactttaagaaggacaaggatgggtactggaagtggtttgctggaaatctggcttctggtggagctgctggtgcttgctctctattctttgtctattctctggactacgcccgtacgcgtttggccaatgatgccaaggctgcaaagaagggtggtgagaggcagttcaatggactcgttgatgtttaccgcaagacccttgccagtgatggtattcgtggcctctaccgtggattcaatatctcttgtgtggggatcattgtgtaccgaggtctttactttggtatgtatgattccctgaagccagtgcttcttgttggtaccctgcaggataacttcttggccagcttcttgctcgggtggggtataaccattggtgctggccttgcctcctaccccattgacactgttcgccgtcgcatgatgatgacatctggtgaggccgtcaagtacaacagctccttggacgctttcaagcagattgtcgcaaaggagggtaccaagtccctcttcaagggtgctggcgcaaacatcctccgcgctgtagctggtgctggtgtccttgctgggtacgacaagctccaggtggttgtcttcggcaagaagtacgggtctggtggtggctaa

SEQ ID NO: 13167 - DNA, 366 bp, Zea mays
  Peptide Sequence Number=SeqID_54946
atgggaacaaagctgagttttgatgagggcgcagcggccgagcgccttgacgtcgccgatgcgattgaggacgtcgagcaacactgcgtcgtggagccgctcgaactggtcggcggactcggcctcgccgcacgggcactcctcctgctgtcgcgccgcctccatcccacggaggttgcaagcagccaggcacacatatcgggatcggggagaggagcgcgcgtgctcgtgctcccgccacctcctggctcgccgccgtccgcggccatctcgccgtccgagtccggcaccgcggccccctgggggatgacggcgctgaagacggcagccgagcggaggagacttattctcacggcgggagattaa

SEQ ID NO: 13168 - DNA, 2673 bp, Zea mays
  Peptide Sequence Number=SeqID_54947
atgacgcgccgctcccaggccacgcccgccgcttcggcggcgctgccgcttctcctggccccgtttcttctgcttctgctgctgctgcattgccagtgccaccgcgccggcgcggcgacggacgcggagcggcgggcgctgctggacttcaaggcggcggtgacggcggacccgcggggcgtgctggcgtcgtggacgcccgcgggggacccctgcggtttcgtcggggtcacctgcgacccgcccacgggcgccgtgcagcgcctgcgcatccacggcgcggggctggcgggcacgctcgcgccctccctcgcgcgccttcccgcgctcgagtccgtctcgctcttcggcaaacgccctcgcgggcggcgtcccgcccggcttccgcgcgctcgcgcccacgctccgcaagctcaacctcagccggaacgcgctcgcccggcgagatcccgccgttcctcggcgccttcccgtggctccgcctgctcgacctctcctacaaccacttcgccggcgggatcccccgccgggctcttcgacccctgcctccgcctccgctacgtctcgctcgcgcacaacgacctgacgggccccgtcccgcccggcattgccaactgctcgcgcctcgccggcttcgacttctcctacaaccgcctctccggcgagctcccggaccgggtctgcgcgccgccggagatgaactacatctccgtccggagcaacgcgctctctgggcaaatatccaacaagctcacctcctgcggcggcattgacctcttcgacgtcggcagcaacaacttctccggagctgcgccctttgcgctccttggctcggtaaacatcacctacttcaatgtctcctccaacgcctttgaaggcgaaatccccagcattgcgacctgcggcaccaaattctcacgcttggacgcgtccggcaaccggctcacggggccggtgccggagagcgtcgtgaattgccgcggcctgaggtttttggatttgggggcgaatgctcttggtggagctgtacctcctgtgattgggactctgcggtcgctctccttcctccggctcgcgggcaatcctggcatttccggttcgattccacctgagcttggagggatcgagatgcttgtcacactcgacctcgcgggccttgctctcacaggagagattccagggtccctcagccagtgccgattcttgcttgaactgaatctgtccggcaacaaactgcaaggagctatcccagacacactcaacaacataacctacctcaaggtgcttgatctccacaggaaccagcttgatgggggcattccagtcacacttgggcagctcacaaaccttgttcttctagacctctcggagaatcaactgactggggcaatacctccacagcttgggaacctctctaacctgacacatttcaacatgtccttcaataacctatctggcatgattcctcctgagccagtcttgcagaaatttgattacactgcctacatgggcaaccagtttctatgtggctctccattgcccaataactgtgggaccgggatgaagcaccgcaaacgagtgggtgtgcctgtcataatcgccattgttgctgcagccctcatacttattggaatatgcattgtttgtgctttaaacatcaaggcttatacgcgtaagagcacagatgaggacatgaaggaagaggaagaggctcaaatgccatcatcggaaaattggtgcttttcagcaaagagcttgccatcaaggtacgaagattgggaaactggaactaaggcgctacttgataaagactgtctcattggcggtggatcaatcggtacggtgtacaaggccacttttgaaaacggcatgtccattgctgtgaagaaactggagacactagggagcgtgagaggccaggatgagtttgagcatgagatgagccagcttggtaacctcagccaccccaatctggttgcttttcagggttactactggtcatcctcaatgcagttgcttctgtcggaatttgtggccagcgggagcttgtatgaccacctccacggtagccatcctcatgctttctctgagagcagcagcagaggtgctggaggtgaactgtcttgggaacagaggttcaacgtcgcacttggagcggcccgtgcacttgcttaccttcaccatgattgccggccacagatcctgcacctcaacatcaagtcctccaacattatgttagatgggaaatacgaagctaagctatctgactatggattggggaagctgttgccgattctaggaagcattgaattgagtagaattcacaccgcaattgggtacattgctccggagctgtcatctccgactttgagatatagcgacaagagtgatgtatttagctttggggtggttttgcttgagaccgtgacagggcggaaaccggtggacagccctggggtagctacagctgtggttctgcgtgattatgtaagagaggtattggaggatggaactgcatcggactgctttgatcgaagcctgaggggaattgttgaagctgaattggttcaagtgctcaaattaggtctggtatgcacttccaatacaccatcaagccggcctagcatggcagaagtggtacagttcttggagtcggttagaattagttcttga

SEQ ID NO: 13169 - DNA, 655 bp, Zea mays
  Peptide Sequence Number=SeqID_54948
atggatggggagcttgaactgcccgaattcaaccctcgggaacgcgtcaagcagcagatttcagtcccgtttctctgggaggtgaagcccggtgccccgaagagggactgggtcatctcccagccagtgccagtagcgtttgcatgcccgtccccggccccgacaaagcttgttgtgagcgtgccattccagtgggaagaaaagcctgggaagcctctgcaggaagcatctcccttccatgtgctgcccccggatcacgcagcgacgcctctggcgctgcagcgtgggcagatggctcctcctccgggccgtcgtgacggctggttctcgttttcagagtcggaagactacagccactccagtggcgatacttcagcacacgacaaggagttccagtttccccgggcgccttcagagaagagctgggaggtggccaatgacgaggacaatccatggagccctccgaggagcgcggccacgacgctggaggagcttatggtgctcagccggagactgaggtgcggacaagctctgccggttgacgtcgggaagaagagactgccctccgtggtaattctctactaccactcacgagctcatgaagaagctcttcatcgtgtgttcttagctgcactgcacatggacgtgccaaaag

SEQ ID NO: 13170 - DNA, 345 bp, Zea mays
  Peptide Sequence Number=SeqID_54949
atggggagtagctctctccgggcagaatgggaatcacggcttgtgggtggtaatgagatcgatgattctggttatgactatggtgctgctagtccactacagccaaacaggatacttgctgagtatgttgatgtgtactcacccttgctctacacaccaaacccccccccccaggttgtcagcattgcaaccactgctcaggcgaagatgaagctgtggaaggagacttccaggagttccaagactacgacgagttctaggagtgggttagcggcaacccccagtcggctgcctgtgaaggccgcgtttatctacgtttcttttccgcactttgatttattgtaa

SEQ ID NO: 13171 - DNA, 840 bp, Zea mays
  Peptide Sequence Number=SeqID_54950
atgaacccgcctcggatccgtcaccaggacacgccccctaacaagccaccgtaccatattatgccatcacgcggcggtagcggcaacacgcagcggcaacaggatccaactgtggtggtggtagcctttgcgcagccgaggaggagaacgagacggcgacgcgccattatgccggtgaagagcagcgccagcttccgcatgaccgcgctgcctatggtggtgacggcgcagctgctggcggctgccgtgctcacgctcacgctcgtctgggtgctgcactttcgtggtggcgtctcgtggaagccgacatccaaccctctcttcgtctacacggcacaccctctgttcatggtgatcggctttatcatctgcaccggagaagcggtgatggcgtacaggatcgtgctgggcccgaggtcggccaagaaggcggtgcacctgctgctacatctcgtagccctcaccttcgctgccgtcggcctgtacgccgccttcaagtttcaccatgacgtcggccttcctgacatccgttccctgcattcttggctcgggattgccacgatagcgctctatggtcttcagtggttgatggcattcgtgtactttgtcttccccggggctgtgatgacgatgagggcggactacgctccatggcacatcttctttggcctcgccatctttctgatggccatttgcactgctgagaccggactggccaagttcgtctccgccttcatcgcttacccaggcgaagtgtttgtcgtcaacttcaccgggatcgccatcctcatgtttggcgttgccgtcgtcttggctgtcatccttccgtcaagatactag

SEQ ID NO: 13172 - DNA, 2703 bp, Zea mays
  Peptide Sequence Number=SeqID_54951
atggcgtcgcctggcgtgcctagtcgtcgccttggcgtccagtctgtcgccgcggatgccacacaaacgaaaaatcgagtttgcgcgcgtgcgggaaacgggagggcacggcacgcgcacgcttttggagcgcatacagggtttagggtttgcgcgcgtgcggcccttcctgcagcgtgccaaatcgagagagtgggagggaaagagagggaagagaggaagagaagaccgaagagggcggcggtagcagctgcagtccgacggccgttcgcctccatccggtgcgctgcctcctcaatccggcgtgccgcctccatccgtgaggctaatgttctgaataaactccaacctcggagtacctggtatctaactggacttggttctcttgcaacaacacaacgagaatatgttgctttacacgctttccgccgtcttagtgtgcagatgcaaaatgcaatacttcaaccaagtccagagcatttcccgaagtatcaagagcaaccaccagtcatgccagactgcttcaccccaaatttcgctgaccatctccatcgtagcttcaatggtcctcaattgtcggcaattcattgggctgcaacacatacagctgctggcacaaacaatggtgtcctaaagaaacaagaaccatggcctttcacgttggtacaaggtcctcctgggacagggaaaactcatactgtgtgggggatgctaaatgttatccatcttgttcagtatcaacattactatgctgctttgcttaagaagcttgctcctgaaagttacaagcaagttagtggtagcactagtaccagctcagagactgttgcagcagggtcaattgatgaactattgcagagcatggaccagaatctatttcgcactcttcccaagctttgccctaagcctcggatgcttgtatgtgccccatcaaatgctgcaacagatgagcttcttgctcgtgttcttgaccgtggttttatagatggtgaaatgaaggtataccgccctgatgttgctcgtgttggagttgattcacagtctcgagctgcacaggctgtttcagttgaaagaaggacagatcagcttttaatgaagggccgtgaagaagtaattgggtggctacatcagctaaaagcccgtgagcagcagctatcacaggagattgcctatcttcaaagggaactcaatatagttgcagcggctggtagatcccagggttcagtaggggtagatcctgatgttcttgctcaaagggatcgtaaccgtgatattctgcttcagaaacttgctgcgtcagttgaaagcagggataaagtattggtggagatgtcacggctgctgatattagaaagcaggttcggtcttggcagcaacttcaatatggaagatgctagggctagtctggaagccagttttgccaatgaagctgagattgtttttacaactgtgtcaagtagcgggcgtaagttattttcccgcctgactcatggctttgatatggttgttattgatgaggctgctcaggctagcgaagtaggagtccttcctccattggctcttggtgcagctagatgtgtcctggttggtgatccacagcaactccctgctactgttattagcaaagcagctggaactttgctttacagtaggagtctattcgagaggtttcagcaggctggttgtcctaccattttattgtcagtgcaatacaggatgcatccccagatccgtgaatttccatcaaaatacttttatcaaggccgtcttacagatagtgagagtgttgttaaattacctgatgaagcctattacagagatgcacttatggcaccttatatcttctacgacttgtcacatggccgtgagtctcataggggtgggtcatcttcatatcagaatattcatgaagcgcagtttgcattgcgtttgtatgagcaccttcagaagttcttgaaagctaacggtgccaagaaggtttctgttggtataatcacaccatataagttgcagttgaagtgccttcagcgggaatttaaggatgttatgaatactgaggaagggaaggatatctacataaatacagttgatgctttccaaggacaggagcgtgacataattattatgtcatgtgtccgtgcatcaaaccatggtgtgggtttcgttgctgatatacggcgtatgaatgtagctctaactagagctaggagagctttatgggttgttggtaatgctaatgctctcatgcagtctgaggactgggcatcgctaatagcggatgcgaaggccaggaaatgttttatggacctggattgcattcccaaggacttcttaccaatgaaggttccatctaatactccaggtaggaattcttccaacaacatccggaacatgaggactggtggtggacctagaccaagacacttggacatgttctcagaaccgagaactggtatgaacatgaggcccgatgaagatgagcgtctgaattctgttccaagaaaatgtttggagttcccaggaggccaaattcttctaatggcaggagagaagtgtaaggagtgtgttgctatctacaactctggtacagcatggaacaatggtgaagagctctgggacggtccagattcagcaagggcccatgacgaactccaggaatgcatggttgcctgcatgatagatgtagagatggcggtcatatag

SEQ ID NO: 13173 - DNA, 382 bp, Zea mays
  Peptide Sequence Number=SeqID_54952
atggtgtacggctataaatcaccggactgtccggtgagccaacagtcggctgggccaacggtcggccgcagaatccgcgcacgacgtgtggctagagccaacggtcagaaggggcaccggactgtccggtgtgcaccggacagtgtccggtgcgccaacggctctgaatctccaatggtcggcttcgccaaagaaggaaagaaatctgcatcggacagtgtccggtggtgcaccggactatccgaggtctcctcggacgaggagaactcctcagactcgtccgaggaggagagcggcggtgatgacgacgacgagggcaacagcgacgacggaggcgacaacgatggtgacagcgacggcggcaagggcgacggcaagggcg

SEQ ID NO: 13174 - DNA, 375 bp, Zea mays
  Peptide Sequence Number=SeqID_54953
atgaacccatcttcaacctcccgatggtcagggaaggtggagcagaggtctgtgacgcgcgtgaagggctccgcaagcgcgccccttgtcgtcggcgaggaggtgcacgtacttgactgtgtagcgtgcggagttgcaatagccacgcgcgagcgcaaagtcgaggatggcggccacgaaccagatcctgtggaagccgacgtcatcatggcggacctcgacatcggtgtcgggaggcaagggcgctggcggtgttgtggggaggagaccaggggagtcattgagccagcaaggaagtcggcgcgcgaggagttcagtgaccgcgtgagggatctcgaaggggagaccagactgaccacaggtgcccacgagtaa

SEQ ID NO: 13175 - DNA, 492 bp, Zea mays
  Peptide Sequence Number=SeqID_54954
atgggtgactatggccacggcggggggcagatgcggggcaacccggactcccgccccaggggccagggccagcgccctaacgtccagcagctcaagctcatggggcagatccacccgacggggctcacgcccaacctgcttaagctcttcgaaccgcgtccaccgctcgagtacaagcccccgctggagaagcgcaaattgccggcctacaccgggatggcacaatttgtgtcgcactttgctgagcccgaggatccagagtatgctccgccagtacccaagtgtgagaccagggcagagaagaaggctagaattcgcaataataagctcgagcaaggcgcagctaaggttgctgaagagcttcagaagtatgacccacaaagtgaccccaatgctactggagatccatacaaaacactctttgttgctagacttgtgaagttattgcactttggtaaggtttatggatttttcaatcattctaaaatgtaa

SEQ ID NO: 13176 - DNA, 215 bp, Zea mays
  Peptide Sequence Number=SeqID_54955
atgtccggtgcaccagggggactcagactcaaactcgtcaccttcgggaattcccagaggcgactcggctataattcaccggactgtccgatggcaggcgtgcccatactggcacacccggacaaggaacagttacctgtcctgtgtgtcaccggaacccccaggcggtgccccaccgagtcagaagcttccaacggcctagaatctaactgcag

SEQ ID NO: 13177 - DNA, 183 bp, Zea mays
  Peptide Sequence Number=SeqID_54956
atggcacaagcagcgtaccaaatgcgggctggtgcgagttcttatttatacgctcggtacctttggactcgggctaaaagcatgtacgatgtaaaaaagcatgatcgtgacgatggttggagttgctccgaagctacgcacagggaagcttcggctaaatggtggaaaaaggaacctacttaa

SEQ ID NO: 13178 - DNA, 477 bp, Zea mays
  Peptide Sequence Number=SeqID_54957
atgggcagaggcaagagaggcaagggatggcctcgctacgctgacgagaagcgcaagcgtcctccgagtccaccctcggaggacttcggggactcggagtactcggaggaggtttcctccgagtatgatcggtcgcctgctccagcgtcccctgtggcgttgtccgaggactcgaacgactccatggggttgtctgttgcggcacaggcgtactggcgatccattgcgcgcaccgggctcggtgggtcgaacgacttggaggaggccttctcggaggaggtggaagattcctccaacttcaaggagtggagtggcagcaagggcgacgacgacgacgaggacaacggtgacggcaaaggcgacaacggtggaaagggcgacgacggcgatggcaacagcggcgatagcaagggcgacgacgacgacaagggcgacaatgacgacggcaaggccggcggcacaatgctgctggcataa

SEQ ID NO: 13179 - DNA, 291 bp, Zea mays
  Peptide Sequence Number=SeqID_54958
atggccctgcccagcctagtttcgattccaaattttgtgctcccaccgcttgatccgtcgggtgccaagggcctctgttgctgcaagtcgattgcagtccgggagccggcggtggcagtggtgaacaacaaagctgggcgttggcctgccagcgtcaccggtgaaggtgcctcagacgcccaagccgcccatgttgcccttctacttaccgaaccgccctcgccctcgccctcgccctccagctacaagggctcgccgccgtacaaactaaagcccgccgccgctctgtag

SEQ ID NO: 13180 - DNA, 165 bp, Zea mays
  Peptide Sequence Number=SeqID_54959
atggaaaggtatgcaagcttcatcgccatctgtggaacttccgattgcctgctaagcttcggctctaagttcttcagcttcctcatcctgctgatatcaaagcagtataacgaaagctctggtttcgaggatgtggcaagcacaagcctcaaaacttcgtattaa

SEQ ID NO: 13181 - DNA, 771 bp, Zea mays
  Peptide Sequence Number=SeqID_54960
atgtcacttcttagtagattcttctacaagaggcctcctgatggactactggagtttcttgacaggatctatgtttttgattcatgcttcagcactgaagttttgcctcagggaatgtacccagtgtatttaattgggattcttacagagttgcatgaagagcatgtagaatcctcatttctggcaattaacttcagagatggagataagagaagccagcttgctgatatactacgtgaatacaacattccagtcattgattacccccgtcattttgagggttgtcctgtgcttcctttatctcttattcagcatttccttcgtgtatgtgagcactggttatccagtgggaccaatcagaacattatattactccattgtgaaagaggggcgtggcctttgttggcttttcttttatcttgtcttctcatctacaagaaactgaacagtgctgagcataaaactctggacattatttaccgtgaggcacctaaagggttcctacagcttttttctgcccttaatccaatgccatctcaactccgttacatgcagtatgtagccagaagaaatatatctccacagtggcctccaatggaaagatcactctctttggattgcctgattcttcgagctattccaagttttgattctgataacggatgcaggccattagtccgcatttttggtcgaaatcttcttggcaagttttctagcatgactaacatgactttttccatgccaaagaagaaatctcttacgaatctctag

SEQ ID NO: 13182 - DNA, 492 bp, Zea mays
  Peptide Sequence Number=SeqID_54961
atggcaagtggctcgtgccaaatacaccacaacaggagcccaacaacccatgcatgccgctccgtaggggacggggaaagcggttccaacagacccacacatgtcgtgtcttccatgcatagaaacgtggggaaagcgatttcagaagctacaggtggagctgttttactcatcctaatctgccccaccaacctagctacaaaaagtcgtactgaggcccctcaagcgatagcggtggtggatctgctagccgccggtggcctgatgctctccagctactccgactcgcctacgtcctccaagcataattcagtcctctcctcgactcctcctaaccctagtcgccaggcgccaggtgcccttgtctgccacaagtgcgagtccgagtctgtgacccgccgtccgccggccattgctgtccgtgcctccgcggtccgcccaggcagttgctgccgtttgccaggcaccctacttctatgcccagcggcctag

SEQ ID NO: 13183 - DNA, 939 bp, Zea mays
  Peptide Sequence Number=SeqID_54962
atggcacaaacaacatgtgggagaaagatggcaaactgctttaggaaggtggcctcagagttggatgactcttttgatgataccaataggcgctttgtgcgtaggatccaagaatctgaggctagggaggcattgaaaggatggaagaggaatgcaattttggctctggacacttccgttcttgataatgaccaagtggagaatctcattaagttttgccctacaaaggaagagatcgagatgttgaagggttataatggcaacaaagaaatgcttgggaaatgtgaacagttcttcctggagctgatgaaagttccacgtgtagaggccaagctaagagtttttgctttcagaattactttctcaacacaggtagatgaactaagaactaacctaaccaccataaacgatgcaacgaaggaggtcaaagaatctctgaagttacggcagataatgaagaccattctcacattggggaatgcattaaatcaagggacagcacgaggatctgctgttggcttcagattagacagcctccttaagctgtcggatactcgatctagaaacaataaaatgacgctgatgcattatttatgcaagcttcttgctgagaaaatgcccgaacttcttgattttgacaaagacctaatttatctggaagcagcttccaagatccaactgaaattgcttgcggaagaaatgcaagcaataaacaaaggtcttgagaaggtggagcaggagctagctgcttcagaaagtgatggtgcgatttcagttggctttcgtaaggcattgaaaagctttcttgatgcagcagaagctgaggttaggtccctcatttccttatacgctgaagtgggaaggaacgctgattcgctagctcagtattttggtgaggatcctgcacgctgcccgtttgaacaaggtgggcaactttga

SEQ ID NO: 13184 - DNA, 285 bp, Zea mays
  Peptide Sequence Number=SeqID_54963
atgtcgagtagtcagaatcgggccggtgaagctcgccatgccaaagagaatactattgtagcttcgcctgtccggaattgtgctctgcgctgccggaatcatgcgcaggtaatcacccctccacctaggtccgtcgaccggcctcaccaccgcaccagcgccggtatgaacccctctattgagttcgccatcatctccgctctgcgtagcagccgtctaatcgaagttcgggcatcggggtcgtccctcggcgtgctccggccatggctccgccgctctgcttag

SEQ ID NO: 13185 - DNA, 942 bp, Zea mays
  Peptide Sequence Number=SeqID_54964
atggacaagggcaaggggcctgcaagcagcgcctctgccctaggtggttccagggggtcggaggaggagaggcgatgcaggctgcgtcgcgctgatgggtcgctcgtttcagagccggctcggaaacgccagaggaccgcaggcgggaccaagggggcagctcctaggcccccagcatgtaggggcgcgctagtcccgtggtcccgccgccaccaccaccatctgaaggtgatcacccccgggagcaccagcagcagcaacaacaacatcaaccaccgccgccaacgcagcaacagcagcaggagcggcggtcgtcccgcttccagggtcgctagaagggcttcttccccctctgcccccaaggtcgcgcctcctccgccaggtaccaggcccgccggcgggtctggctctcagcagcaggaatctgttgagagtggcatcggcggtccgcaccccgctgccaccgagaaagcgccaccaggctcccatgctccagctgggggtctggcaggagcggcaccggcgtcaagcggcatcgcagcggtggaggaggtcccaactgcgcccactcccgccatcgagggtgacgcggggggcgtgtctagctccatcacgccgcccactccggaggagatggaggtggtttttgggcggtggctccggtccggcgccgagccagaagcagcgccagtccccctccctcgggtgctgcctcgtgcccatcaggctcttcatgagactgaggcggcattcctgcgggagtgggaggtgcttgaggctgagcaccagtgccttagtgactggcacacccagctggaggagcgcaccaaggcggcgtcccgccagttcgcctctgagcggtccgaactcgagcgggaccacaaggagtacaaaaggggcctccagaaggtgttcgccagggagctggaggcgtcccggtga

SEQ ID NO: 13186 - DNA, 318 bp, Zea mays
  Peptide Sequence Number=SeqID_54965
atggccacacggtggagaacgcaaccgtggcaccaatcgacctcccccgagcaccactgtcaaattgaacagagctacacgatgtgcccgcctacggcgtggaggttggtggactacgacgggtctcacacttcctcgttgcgcaccgaccgtgatcaggtttccagtaatggggaaaagcaagggggcggcaatcgttttataggcccagggcgagtcagcaccgaggaggttgaggcgatgcgatttccacgacgagtccgtcatgaggcatgcgcgcggcttcatggtaaactcggtggaaggttgaagggatag

SEQ ID NO: 13187 - DNA, 1302 bp, Zea mays
  Peptide Sequence Number=SeqID_54966
atggggcgtcgtcttctcgtgagccttctaccactactcatggtggtcatggtgacggcggcggcgttcgacatctcaagagccccgccggcgttcggggtccgaagaggggctccgaaggagtacttcgagtggcgcagaccttggggcacggcgcccttcctgctggggtcagctgcggccatccacctcggcaacaccagctcgtgcatcgccgcctacgactttggccccgggagccacgagtactaccaactctgcatgccctcttgggtggccgtcacggacaacgacatggtcctctccggcgaggctgctatgaaccacgccaccgtcagccccgggacggccatctcgggcttcacgcgcctcctcgaccaaaggctcaaggacgatgtggtgaagagcgagatgaagctttcgccgttgtacaagttctccgagagggagggacgggtcgccatccaatttaatcatccaagccggcgtggccaggtcatagagttctcgcccctagatctcaccgtcgtcctcgtctccgagctgaagcacatggcggaggctcacctgggccgtgagctctcggctgctgtcatcgccgtgccgcgtcacctcaactacaatggaaggcaggacgtcgtcaatgtgggacggtatgacgctggcttccgccgggccgccaaggccatcgaccggcagatcacgctgtatcaccaccacacggagcagggtgacgacttcacgacgcggatcgtcgactacatggcagagctcatcaaggagaagaaccagtgggacatcaggcaggacgcggaggcgttgcgcaggctaagggtggcatgcgagcacgccaagaaggcattgagcgaccaggaagagacgatggtgcagatacatgtcgccgacattgagtcgtcggcgcccctcacgcgggccaagctggaggagctcaaccaggacctgttggacagggtcatgggacttgtggacggggcggtgatggggacagggagtgggtggttgccccggccccgcgacgagagccgcacggacatggtcgacgagatcgtcctcgtcggcggcagcgcgaggatgcccaagctccgtcagctcatcgaggactactttcgtggcaggcggccaaacagccgcaagggagtggaaccagaggacgccatcgtccagggcaccgccattctttcccgtcctaaggcggcgcgctacttagaggagtgctttgactatctttacggcaaggatggtaggggtcttccaagttttgtattcagaacgtcgaattag

SEQ ID NO: 13188 - DNA, 1116 bp, Zea mays
  Peptide Sequence Number=SeqID_54967
atggcaacatggatggcagggttccgcacgctggtggccaacctcctggcgctgcgcatgcccacagtggcggtgggagaggccacacgacgccgcatgcttcgagacaaggtcctagacgccgctgctagtcgcgacctcgtactgcaaggggacaaggtggccgcgatcgagacctcatggacggcgaccccgaggacacattggccatcgccgacgccgaggctcgaagctgaggttgagcacaaggagaaggggctgggacagggaggtcatcgcagatatcaggaatggtgtcttgtgtctaggtcaaggaacatggcgccgagtcggcatcagcgccgccgttggtcgtcaggagctggggtagcgaagtttcgagcacgtgacgtgccagctcctggcttcacggataacgggcgccttggccttgatgtccgcaatccgctacctcgacatccgtccggtagaccgatcagaagctccgaccggcggcggcaggtgacgcggatggacgacggcgtcggcgacctgcggagcgccatcaagaagtggaacgtcatctaccctgtttacctcaactctaagaagacggtcgccgagggccgccgcatcgccgctgccaaggcctgtccggaccccacctgcgttgagatcgctgactgctgttcgcacctaaaaattccccacgccattgagccccacttctccccacggcgcgccgccatccccgcgcaccttcctgcgcgccgccagccccgcgcttccctgcgcgccgccagccccgcttctccccacggcgcgccgccatccccgcgcaccttcctgcgcgccgctagccccgcgcttccctgcgcgccgccagccgtcagcccgcacctgcgcgccgccagccgtcagcccgcacctgcgcgccgccagcccgtcaccgcttggagacccgcgcagccgcgcttccttgcgcaccgccactccagccgacagccgcgcttccgtggccgcgtccaccgccgccagctctgtggtcgcgccgtcagccaacccatctgccgtcgtgaggtactgaggtacgtgatctgctattctgctagtgttgttgatgatccttggctctag

SEQ ID NO: 13189 - DNA, 942 bp, Zea mays
  Peptide Sequence Number=SeqID_54968
atggcccacgcagacgcagcagcagcacctggctgtctgctgctgctgggctgggatggtagtataaagtttctggtgttctataggaatcatccatgtgttggttctaagggcacttctaatgacgagatgaaagcaggcatatctatcaatgtgacagaggatagaagcattaacagttttctatttttgatgtccatcaacatcggcacgccacttggtatgaaccttgtcgggatcgacacaggatcgacactttcttgggtacagtgccagtcatgccagccacattgccatgaacaagctaccaaggcgggtcagatctttgaccctagtagatcaacaacatttcaccgtgcgggctgcaaaacaagagaatgtcttgtagtcaaggattcccttggtctcgagtttgctaactgcatggagaaggagaatacttgtctgtactcagttacctacgggggcaggttcagcttcatgttcggctccagcctggacgtggagtacaagaactacgaagaagcgaggattgttggttttggctcctcaggcatctcattcttcaagcaagtttcaagtcagatcaactataaagctttcagctactgtctgcccagcaatgagatggtcataagatacatgaatcttggtgactaccgtggccagggcgcagatgttctttacaccccgctgttccagaccacctctaaaccgacctattcactgacggtagaagggatcgtggccaacggccagaacctagggttggcaccttcacagatagtcgtggactctgggtcattgtggactatcctattgagcgacacattcgatcgtctcgataacgtgatcacagagtcaatgaaatcattgaactatcggcgagcaagtagtggaggcaccatttgcttcgaatcagatgccgaccatatgagctag

SEQ ID NO: 13190 - DNA, 1047 bp, Zea mays
  Peptide Sequence Number=SeqID_54969
atggggcgtcgtcttctcgtgagccttctaccactactcatggtggtcatgcgtattggcggcggcggcgttcgacatctcaagagccccaccggcgttcggggtccgaagaggggctccgaaggagtactgcgagtggcgcggaccttggggccggcgcccttcctgctggggtcagctgcggccatccacctcggcaacaccacctcgtgcatcgccgcctacgactttcgcctcgggagccccgagtactaccagctctgcatgccctcctgggtggccatcacggacaacgacacggtcctctccgtcgaggctgctatgaaccacgccaccgtcagccccgggacgaccatctcgggcttcacgtgcctcctcaaccaaaagctcaaggacgatgtggtgaagagcgagatgaagctttcgtcgccgtacaagttctccaagaaggcgggacgggtcgccatccaatttaatcatccaagctggcgcggccaggtcatagagttctcccacgtggatctcgccgtcgtcctcgtctccgaactgaagcacagggcggaggctcacctaggtcgtgagctctcggctgctgtcatcgtcgtgccgcgtcacctcaactacaacggaagacaggacatcgtcaatgcgggacggtacgacgctggcttccatcgggccgccaaggccatcgatcggcagatcgcggcggccgctgcgtatcaccaccacacggagcagggtgacagaaaggctatccttgtcttgcgtgttggcggccgcacgtccgacaccaccatctttgaaagtcgcctagaggggggggtggataggcgaatcctgaaatttataaacttaatcacacactacaagcgggggttagcgttagaattaaagtcaagtccgagagagagagagggggaaaacaaatcaaatggaaatcaaacgaatgaacacggtgatttgttttaccgaggttcggttctaaagaaccttgtccccgttgaggtggtcacaacccattccctctctcaaacggtcacttag

SEQ ID NO: 13191 - DNA, 543 bp, Zea mays
  Peptide Sequence Number=SeqID_54970
atggcggcgcgccgtggggagaagcggggctggcggcgcgcagggaagcgcggggctggcggcgcgcaggaaggtgcgcggggatggcggcgcgccgtggggagaagtggggctggcggcgcgcagagaagttgcgcgtgtgcgccgtggggagaagcggtgcgcagggaaattagggatataagaaatttccgatatgtctgtgatacgtatccagaagtatccgcggtgtgtccgtatctgatacggtatccgacaccggtgcgaacagcagtcagcgatctcaacgcaggtggggtccggacaggccttggcagcggcgatgcggcggccctcggcgaccgtcttcttagagttgaggtcgccgacgccgtcgtccatccgcgtcacctgccgccgccggtcggagcttctgatctggaaaagagttttcacgaagagagaagagggggtcggtttggcgttcacgcggagcggagggcatacagctctgttggtcgctcacgagcaaggtaccggtctaccggacggatgtcgaggtag

SEQ ID NO: 13192 - DNA, 270 bp, Zea mays
  Peptide Sequence Number=SeqID_54971
atggcgcctggccacggcgagggcgccgccgtgtgctgcatgtgcggcgaccgcggcctagcggacgagctgttccggtgcaggtgctgccgcgcccgcctacagcacagctgccaacaagctcgaggagaagcgggagacgcccgcgtcggacgagaaggcgtgctccacgaggaggcgccgccgccgcccgtggagctcggccactcggtgaagaagaagaggcaccaggccgaggagaggacgcccggggaggcggtggccgggtag

SEQ ID NO: 13193 - DNA, 975 bp, Zea mays
  Peptide Sequence Number=SeqID_54972
atggaaatcttctgcctcttgcttgccgcgacgggcttcaccggctgctccagcgccggcgtcaactacggtaccatcaccaacaactgtgtctgtgtggagcagaactgcgggaggctaccgcgggctgctgctgctgctagctccaccgcccactccagctgccacacctccgtctatgactcggatggtagtataaagtttccggtgttctataggaatcatccatgtgttggttccaaggacacttctaatgacgagatgaaagcagacatatccatcaatgcgacagaggatagaagcattaacagttttctatttctgatgcccatcaacatcggcacaccacctgttatgaaccttgtcgggatcgacacaggatcgacactttcttggaaggagaatacttgtttgtactcagttacctacgggggcaggtggtcgtacacggctggcaaagtggtttgtgacaaacttaccattgggacaaacaccaggttcagcttcatgttcggctgtagcctggacgtggagtacaagaactacgaagaagcggggattgttggttttggctactcaggcatctcattcttcgagcaagtttcaagtcagatcaactataaagatttcagctactgtctgcccatcaatgagacagccataggatacatgaatcttagtgactaccgtggccagggcgcagatgttctttacactccgctattccggaccacctctaaaccgacctattcactgacggtagaagagatcgtggccaacggccaaaacctagggttggcaccttcacagatagtcgtggactctgggtcattgtggactatcctatcgagcgacacattcgattgtctcgataacctggtccagtttgcctctagtggagatggtcttcaccggtgctacggaggaggaggctgcttgccgatggagttcaagtatgctgacatgtatgcttag

SEQ ID NO: 13194 - DNA, 489 bp, Zea mays
  Peptide Sequence Number=SeqID_54973
atgggcaatgtgagcggtcgagcggaagacctcgtggacgccgacattgatgacggcaacaacatgcgacgtgcctcttcctcctctgcgggctacgtccggggcggtgggtcatcatcatccccgccggcgagcccgccgaggccgcattcaccgcggatgttcgtgccccaggacttcgttcctgacagcgtggaaagtgtatctgagctcatggcccctccctccccggactccagctacggtttccatgttcccggcgaaaaggagttctccaaggagcctcctcagctgccggcccagctctacctcggcgtgctgaattctcggagcactgaagaaggctgcgcgaggccgaggcacgtcgtcctagaccatctctacatcgagaagggctggggcgcacatccgttggtggccctcagctacacccacaggttccgctccaagtacgtgacctgcgtcctgtacaaggccatcgagcggtag

SEQ ID NO: 13195 - DNA, 219 bp, Zea mays
  Peptide Sequence Number=SeqID_54974
atgggcaacgcgagcagccgggcggaagacctcgcggacgccgacatcgacgacgccaacaacgtgcgccgtgcctcttcctcctttgagggctacgtccggggcgatgggtcgtcattatccccgccgacgagcccactgaggccgcattcaccgcggatgttcgtgccccaggtcattttaactccaacaaggtccctcaaaatagtttctccataa

SEQ ID NO: 13196 - DNA, 134 bp, Zea mays
  Peptide Sequence Number=SeqID_54975
atggcaaacatcatccgcaagtgctgggacccgaacctggataagcgccctgacatggatgaggtggtgcagttgttggaggccctcgacacaagaaagcgcgatggcatgacaccaaaaggccaggcgggcgg

SEQ ID NO: 13197 - DNA, 330 bp, Zea mays
  Peptide Sequence Number=SeqID_54976
atgagggaaccacaggagaacacgtgggccgcgaggatctctattcgaccgcggcgaaccagtgaaccgccacttcgcccatccaggctccagccccgcaccgcgcgagtgcacaacgtcgccggaaccggagaaagtgagggggagctggagatggacaaggacaataggctccgcgcccgagcgggggagaaggcgtccaagagcaggagccacgggtccacggcgctgttcgtcgcggtagactacgccttcctgctcgccttcgccggcttcctcgcctacctcgtcgggtcgcggatcctcccctccgccgtcagcttcgtctag

SEQ ID NO: 13198 - DNA, 486 bp, Zea mays
  Peptide Sequence Number=SeqID_54977
atggcacatgtcagggatggctcgaccgactcctcgggaagacttctgcctcgcccgagcagggctctaacctcgataaaagcagcaaggaatcacgacgtcacccagcacaaggacgctgatgcaccctgtaagcaggcttttacccataccacgacgttgttacaacaaccacggtatgagcaacccctcccccgagggctcgggcgtacgaccatcccctcggcctctgccttggctctcagaggaaatcggtgggcacaagtcagcaacgcagtacaccgtcacgtcggcttacaggcttacaggacactaaacatttccccttggaatacgacgaccccaggcttcgcagcatacatctcccaggacggggagaagtgcaccacgatgggtgggctatcaaggcgaagggtgggctatcaaggtggattgagtggaagaacgcaaggagtaggacatgctgtgtggcggttggagacttag

SEQ ID NO: 13199 - DNA, 348 bp, Zea mays
  Peptide Sequence Number=SeqID_54978
atgcaggtcatggcagtgcgcagggtgaaagaggagagctgcagggagggacaaggagtgctacggggagggagagggaagggagagaaggggctggcggctgagactgagagggctgcaggctgtaccgatgtagctgctggtggctgcgtcgcctcgccttacgccttttcgcttaaaagcttattatattccgtgtttgcaaaatctcacctagctctgttgcaagttgctttggctcttggttttagtggagctatggttgtggcaaacgatgaggcctttgccctagttgtgtacataactactattcacactcttatgctcctcaccattcaattgaagtaa

SEQ ID NO: 13200 - DNA, 399 bp, Zea mays
  Peptide Sequence Number=SeqID_54979
atgacgcgcagccgtacatctagccccgctttgcttgtggctatcgagtcgctatggctggctgcgttccggccggcgagcctcgccccctgcctgcgtcaaagtcctggtcccacgaatcgacgatcaagcttcggcgaccaaatgatccagctcttcgagttctacaaagttgaagatcctgagcatttgtttggtgaaggcaagaactggggtgtagttcgcttcgccgtcgtgccgttaatggggctcggtgtatgcggctcgctctgccaagagatgttcggactacaggcggtgatgaggatgatgattttttattatgattatggtaatggtaaagaaggtgtcgaggcggatctccaggagttccaggacttcgacgagttcgaggattag

SEQ ID NO: 13201 - DNA, 162 bp, Zea mays
  Peptide Sequence Number=SeqID_54980
atgggggctattggccactctgaagctttcatggaggtaaggatttgggtttcatcaagcactagagattcaggaaccttacatgcagtgaagcgacctaacttgaactccggaaagcgacgtctcaagtggaagccagaatggacatatcaatattattga

SEQ ID NO: 13202 - DNA, 534 bp, Zea mays
  Peptide Sequence Number=SeqID_54981
atggtcaaggtccgcaaggaagagcagggagcaaggagcaggtccgtgaccgcggcggacgcgggaggggtcgtccaagggagtaacgggctagtacacgcgcacgcgacgcggagggcgttcccaccagcaccgcgggcgcgcgagcttagcttacggcgctgcccctcgcctggtgcggcggcgtcggcggccgaccgggggcagtttggggagtcctggaggcgcgggcgagcgcggtgggccacgcggacacggacacgcggctggggaatggggatggtggtctggtcgctcccgctactcgtctcgtggttggccttgaccccagtggggcccgggctcggcgattgccactgggaaacgctcggggaggggagaccgtccgcagggtggggtgggtcccggttcccaggccatgcagtggacgagtgtgggttcagacttcagagtccagactcccagggagggagggagggaggtccaacttaccagaagtatgtcattgatcttgtacctggggatcttctatag

SEQ ID NO: 13203 - DNA, 660 bp, Zea mays
  Peptide Sequence Number=SeqID_54982
atggagccggacgcggatgaggactacatgggcgacctctcccgcttcctcccaccgagtccgtcctcctccccaccgaagaatctcgggcgccggaagcagccatccacgcaggcgcaggcgcagccgagggcaaagcgcgggaagggggtgtcgtggcaggagcggcggcggcaggagcgcgagcggaagcagcgggaggaggacgcacgcacgatggccgggctcgcggaagctatccctgagagcaacgtagggttcaggatgttgaagcagatggggtacgatcccgactcccgcgccgacgccggcgccgaaccggtcagcatcgagatccgccgctcgcgggcggggctcggggcggaggagcctgtgttggctctgacgccggcgctggcgccggtggagaagccccgggaggtgtcggagcgggagcgtaggcagcaggaggagatggcagcagagctaagggaagacagccgaaacggtctcccagaacacttggtgcgcctcgggcgaccggatctggtagccgagcagcaccacgccgcgctcggcgtcggcgagcgcatccatggccgcgatgaggtgcggcacggacttctgcacgtagaccacgtctgcggtgacgacgagatcgaagcggcacggggtggctag

SEQ ID NO: 13204 - DNA, 1128 bp, Zea mays
  Peptide Sequence Number=SeqID_54983
atgccgccgccgcgcggcgccggcccggagctcggggacttccacgcccatgtcgctgtgcgccttgcgggcctgagcgcgcccggcggggaggagttcatgtccgtcgcgtgggtccggcgcctgctggaggcgttcctgctgtgccaggaggagttccgggcggcggtggacgaggcgcggcgccgcggcggcggggtcacggcccccgcggacgcggagaagctggtggcggaggtcggcgagcgcgccgtcagggcgctcgacgtctgcaacgcggcgcgcgacggcgtggaccaggcccgccgctgggagcgcctcgcggggctggcggcctccgcactgctggcgcccgccgaggggcaggtgcacgagggccagctctggcgcgcgcggaaggcgctctcggacctttccctgctcctcgccgacgatgccgccgccgcctccgcgggcgccggcggcgggctcgcctcgttcctcgcgtcccaccgcaaccgctccttcggccgcgcgcgggcgtcgccgtcccgcgcctcgccctccgcgcacttacgctcgctgtcgtggagcgtgtcccgcacctggtcggcggcgcgccagctgcaggccatcggagccggcctggccgcgccgcgcgccaccgaggcctcctgcggcttcgccgcgccggcctacgccatgggctgcctgctccacctcgccgcctgggcgctcgttgccgccgtgccgtgcccggaccgcgccgccgcgctgcaggcgcaccacctcccggccgcgccgccgcgcgccgcgttcccctgggcgccgccgctcctcgcgctccaggaacgcctcgccgaggaggggaggcgcaaggaccgccgcagctcgtgcggcctgctcagggaaatccacgcgctggacaagtgcgcgcagcggctcgcggaggccatcgacgccgcgccggtcccgcttaccggcgagcgggaggccgagctgcgtgaggctgcagcggaactcgccgcggcgtgctccgccatcaaggacgggctggacccgctggagagacaggtgcgggagctcttccaccgcatcgtgcgcagccgaatggcgggcctcgatccaccgatggccaatgcagattga

SEQ ID NO: 13205 - DNA, 222 bp, Zea mays
  Peptide Sequence Number=SeqID_54984
atggcgctcaatggggtaaaggctcaggcagtaaatgggctgtccactgcgacctattgcgatgtggtaacgccctcaagcacgtggcatcatcgcgatgagcggcggacactgacaatggcattctggccgatcgtgaagcaagtgggtatggtggcccagtgcacaaactcatccatggtcacaatattttcacccacctgcctagtggatgcatcctag

SEQ ID NO: 13206 - DNA, 891 bp, Zea mays
  Peptide Sequence Number=SeqID_54985
atggcccaaaggcaaatttccctttcaggaaccgacggacacaccgacctcaacaaaggagtcgctacgccttgcttcgggatctggtatccaaaggggtctaactttgacttgattggatattcagattccgactatgctggatgtaaggtcgataggaagagtacatcagggacgtgccgattcttagggaggtccctggtgtcgtggaactctaagaaacaaacttccgttgccctatccactgctgaggccgagtatgttgccgcaggacagtgttgcgcgcaactactttggatgaggcaaaccctccgggactttggctacaatctgagcaaagtcccactcctatgtgacaatgagagtgctatccgaatagcggaaaatcctgttgagcatagccgcacaaagcacattgacatccggcatcactttttgagagaccaccagcaaaagggagatatcaaagtgtttcattctcaaaggaggtttgaaagggaaaaggtggacttggaccatgaaagacttccactgcactccgatgagaggccaaagtctgctcagtctgggttcaccggactgtctggtggtgcaccggacagtgtcccggtggtgcagactggctctgatgaacttgctgctctcgggagttcgacgacggtgtacggctataaatcatcggactggtccggtggtgcaccggactgtccggtggtgcaccggactgtccggtgggccattcacaggcgaactcgtcgctctcgggaggagtctggcaacgtacggctaaaattcaccggtctgtccggtggtgcaccggactgtccggtgagtcaacgtgtccggtgcgccaacggctctcagactccaacggtcggcttcgccaaataa

SEQ ID NO: 13207 - DNA, 366 bp, Zea mays
  Peptide Sequence Number=SeqID_54986
atggatgaggagggagagattgcgaccacgttcttatatagcccgagggaggctagatgggagtttagggggattgagctgacgacgtggggcccaaatgccagtgagcgaaggtataacgcatgtggaaaggagattggcgagcagggccaggacgtcagcgtgcgtgaagaagctggcgcacgggccccacctatcagcgccaaaacctgcagttgggccacgtggtgcaggagaatggctttggctcatctaaagaagtggttttacctcgtgagccagagccaaagccgttttttggagaagccagagccctgccaaagggccctaaaaatacgtcaaacaaataatctcaacacgatgtaa

SEQ ID NO: 13208 - DNA, 471 bp, Zea mays
  Peptide Sequence Number=SeqID_54987
atggccgcctcctccggcgacgcgcagccttccccggagtactacccgagctccaggttcaggccggtgccgttcaaccgggcgtacaccaacaagtgggtgctccttcaacggtcactccacacgacagttttttttgacgaaggggcgaagccccctatttcattaagaaataggaaaatcagtgaagagactacgataacagagaaagttttggcctacgaagaactacataagactttcttatttacaaccaaccagacaggcagaagccacaaaagacctgaacagtttagccagcaaaagacagacaactatcccaacaaggtttcacggcttcagcagttttgtcatccagaaatccgcctgtcaagaggacaccaccccaaggccctcccgaaagcttcacttgccgtctttcggattaacttgcttcctagcaccaccattctttgctccttctttttctga

SEQ ID NO: 13209 - DNA, 1509 bp, Zea mays
  Peptide Sequence Number=SeqID_54988
atggtgacccagcgtcccatcccgcccaacgccaacttcacctaccggttcgacgtcgccggccaggaaggcaccctgtggtggcacgctcacgacgccttcctccgggcaaccgtctacggcgctctcatcatacggccccggaacggcgccgcctcctatccatttccaaagcctcacaaggagatccccattctcataggcgaatggtgggagaaggaccttgcagcggtggacaggaacttcacgcgaggtcactacgacgaattctccagtgggtccacaatcaacggcaagcttggagatctcttcaactgctccggcgtcttcgaagatggctacgtgctggacgtggagcccggcaagacgtacctgctccgagtaatcaacgcggcgctcttctccgagtacttcatcaagatcgccggccacaagttcacggtggtggccgccgacgccaactacgtcacgccctacgccacggacgtcatcgtcatcgcgcccggggagacgatggacgccctggtcgtcgccgacgcggcccccggcaccggcaggtactacatggccgcgcagcccatccaggcgcctccgccggacacgcagacgccagagttcgccacccgagggacagtgcggtactaccagcaccagcacaccaggaataataagtcgagcccagtcgacgacgacgacgccgtggcgccggacatgcctgaccagcacgacaccatcaagtccttctacttccacggcaacctgacgggcctccggcagcggcagcggcagcgcgcgcgggtgccggcgcgcgccgacgagcggctcctcgtcacgctcgggctgggctccatctgccgcctccccgggcgcaggtcctgcaagagaggggaccatccggagagcatggtggtggcgaacatgaacaacgtctcgttccacgacgccgacgccgcggcgccgccgctcctcgaggcgcactactaccgccgccgccgcggcgctaacggcggcgtgggcacggcggggctccccgaccggccgcccagcgcgttcaactacaccgacccggcgctgatcccgttcgggcccgaggagatgcggctggagccgacgcggagggccacggccgtgcggcgcttcaggcacggcgccgtggtggacgtcgtgttccagagcaccgccatgctgcagagcgactccaaccccatgcacctccacggccacgacatgttcgtgctcgcgcaggggatcggcaactacgacgctgccacggatgaggccaagtacaacctggtcaacccgcccaggaagaacaccgtcctcgtaccgaatcttggctgggcggccatcagatttgtcgccgacaatccaggtgcatggttcatacattgccactttgagtttcatttggcgatgggcatggctgcagtgttcattgtagaggatgggccaacaacgaatacatcgctccctccaccaccaccaggtttcttggacggaaggccatga

SEQ ID NO: 13210 - DNA, 402 bp, Zea mays
  Peptide Sequence Number=SeqID_54989
atgtccccgcaccgccggtgcctcgcctccgcgccgcgcgggaagggagcccgagccaccgagcccacgctcaccgcgcccctgcacgccgccgaggcccacgcccgcccctgcacgccgtgcccctacccctacacgctgcgcccctcgcccgtgcacgcctgccgagccccacgcccgccccgccgagccccacgccgctgcccgcacgcccgtcgtccgaggcaccccgcccgtccctcgccgcgccgtcgtcccgcccgaggcgcgctgcaccgcatcgcgacggcctccctgcgccgtgccgccgcccacacgcccgcccgctccgtcgcgaaggtctcccagctgcgtcgtcgcccgcctcgactcgcccgcatttgcgccatcaggcaagtataa

SEQ ID NO: 13211 - DNA, 1929 bp, Zea mays
  Peptide Sequence Number=SeqID_54990
atgggcctagaggacaacggtctgagccgtgcttgggctgagctaaactgtgtcgggccacaccaagaggaccctaccgcgaccatcctcatggtggtggtggttacaaaagccacgttaagccgagttccgaagtcaattgtgattaaagcagctgcgcatgctgtcgctgtcgtcgtcgtagctatctccatcgtcgtcctctccgccacgtccatgctgccggtggccgccgtcgagcatacgttcgtggtgagccaggtgaagatgacgcgcatgtgcaagcagattccggtcactgtggtgaacgggcagctgccggggccgacgattgaggtcaccgaggggcactcggtgacggtgcatgtcgttaacatgtcgccctacaaccttacgatccattggcatggagtgtaccagttgctgaactgttggaacgacggggtgcccatggtgacccagcgtcccatcccgcccaacgccaacttcacctaccggttcgacgtcgccgggcaggaaggcaccctgtggtggcacgctcacgacgccttcctccgggcaaccgtctacggcgctctcatcatacggccccggaacggcgccgcctcctatccatttccaaagcctcacaaggagatccccattctcataggcgaatggtgggagaaggaccttgcagcggtggacaggaacttcacgcgaggtcactacgacgaattctccagtgggtccacaatcaacggcaagcttggagatctcttcaactgctccggcgtcttcgaagatggctacgtgctggacgtggagcccggcaagacgtacctgctccgagtaatcaacgcggcgctcttctccgagtacttcatcaagatcgccggccacaagttcacggtggtggccgccgacgccaactacgtcacgccctacgccacggacgtcatcgtcatcgcgccaggggagacgatggacgccctggtcatcgccgacgcggcccccgtgggcaggtactacatggccgcgcagcccatccaggcgcctccgccggacacgcagacgccagagttcgccacccgagggacagtgcggtactaccagcaccagcacaccaggaataacgacgacgccgtggcgccggacatgcctgaccagcacgacaccatcaagtccttctacttccacggcaacctgacgggcctccggcagcggcagcggcagcgcgcgcgggtgccggcgcgcgccgacgagcggctcctcgtcacgctcgggctgggctccatctgccgcctccccgggcgcaggtcctgcaagagaggggaccatccggagagcatggtggtggcgaacatgaacaacgtctcgttccacgacgccgcggcggcggcgccgctcctcgaggcgcactactaccaccgccgcggcggcaacggcggcgtgggcacggcggggctccccgaccggccgcccagcgcgttcaactacaccgacccggcgctgatcccgttcgggccccaggagatgcggctggagccgacgcggagggccacggccgtgcggcgcttcaggcacggcgccgtggtggacgtcgtgttccagagcaccgccatgctgcagggcgactccaacccgatgcacctccacggccacgacatgttcgtgctcgcgcaggggatcggcaactacgacgctgccacggatgagggcaagtacaacctggtcaacccgcccaggaagaacaccgtcctcgtcccgaatcttggctgggcggccatcagatttgtcgccgacaatccaggtgcatggttcatacattgccactttgagttccatttggcgatgggcatggctgcagtgttcattgtagaggatgggccaacaccgaatacatcgctccctccaccaccaccaggtttcttggacggaaggccatga

SEQ ID NO: 13212 - DNA, 282 bp, Zea mays
  Peptide Sequence Number=SeqID_54991
atggctcccaagagagcgaattcgaaggtcaccgcttccatcgatgatgcagcgaacgtggcccttctggctaaaaagaagggcaaggctcccattgcagacgacatccctcaggaggccttcgacgatgaagcagtcaacagcaaaaggcaacaccaaggcaatctacctacgccggagggcacgcgcgcacctgcagctccgagggggtaccttacgcgtccccgccaggcttcatccacccagaaggcgaacacaccatcgaagatggtgaaatcatag

SEQ ID NO: 13213 - DNA, 963 bp, Zea mays
  Peptide Sequence Number=SeqID_54992
atgggggcgactaggagcacacacgcaggggtcgacggtaatcgaagggagcaaggatgtgagcaactcggtgcggtggggagcagcgacggcttgccgtgtacgacgctgcagagaaacaaagacagagctaagctcgacaccgtggcgaataggagatcgatagaggcggaaccgatagccaaacaggaactgcgcagatcgatgatgcgaggcccgatctggcaagcacgacgtagaggagggcatcgctgctgctgctccgacatgaagtacttgctaccgaagcagacgagcacgatggaggctggggagctgccgacggtcgaccctgccgtcactggcgagcaccaagtctgcgcgccatgggagatgagcagagaggaactcagcatcagggaacagctgcgtccggcgcagaatgagagcccgaccaggagacttggagcaggggcggaactcggcaaggtcgcggctaaggagagcaccatggcgcggactgctccgcggcctggacgaccgccgcgtcgcgcacgatgttgccctgccacatcttcttctcgcgtgggggctcccggagcccggcgcctgcgcagaccagccacgaggcgggagcgagctggagcgccacgatggggcttgaggccggcccgatggcgagctggccgagcaccagagagccgagcagggcgcggtccggtggaggtgacgtcgagcgccatgggacgagctcatggccgggagggactcgaccggcggctatggatggggcttagcagggagggcgcggccacggcaaggtggagaacgagttggaggccgagtgccacagggaaggagcgcgcggcagggggagaagacgagggagagagagctcggcagggcgccatgggagaggacaggagcagggacgatgcgggcctgtgcgagcgcatgcaagcgtcaaaaagtctacatgcgtga

SEQ ID NO: 13214 - DNA, 693 bp, Zea mays
  Peptide Sequence Number=SeqID_54993
atggcgctctcgcgcctctcccaccgcctcctgagcccaacggctgtcgccgccgcgcacttccccatacctaaaacattcacccatggccgcgaccccttcatcctcctgaatcccggccgccgcttcttctccgcgccctcaaaccccagccccaacccctcctccacgacatcagagcccagccaaggcgccccatccgcgcccgcgtcgccggatgagatgcggcaccaggagatcgagggccccacggtggagcgcgatacgtcgccgctggccgacgaaacgcggcgggagctcgacgcgctccgccgcaccgtgcagcgcctcagcggctcgctcgcgctcctcggaggagcgcacctcgccgccggcgcgtggatatcttacggtgctccgcctctcggtgtcggatccgccgcggcagtgcagggagtggcggcgttcgcgttccccttcgcggtcgccctggtgctacgccgcgccatcaagcccatcgccttcttccagaagatggaggccaacgcgaggctgcaggtgctcacgttgtgcctccaggctacgaagaacgttaacctcatgctgctccggacacgggtgatggccatctcttgcgctctgggagtgtctgtcgcgtcagttgctgcggcgtccaggcggtggcccaacgccttgctcgcctatctcgcctag

SEQ ID NO: 13215 - DNA, 1254 bp, Zea mays
  Peptide Sequence Number=SeqID_54994
atgaaggatcttattgatctcgccaagggccgcgtgctcgaggatgaggacgactcgttcttcatcgtggaacgttgggcaccgggactgacgctgctgcaggcttctctattaggaggtttaggattcctgatggacagcacgttctgcatctggacgctgtcagtttctcttctttcgaagaagcccagggagccctccatgatcagcttcccggagccaaaggcgggggggcaatgccgaaggcgaatacgaaggcgaatcggcggcagcctccatatcgtcgaagctgagagaccagatgaacagccgccccatgtcgtcctccactgctggcagcagaataattgttcagccttcccgaacttcaacttcagcacctcgcaccatggggactacgtcggctttgcatccgagccactttgccttgtcggcctggacatcgtgtccgtttccgagccccatggagaaaccgccgccgagttcatcagcaacttctcttcgtgccttactgaccatgagtggaactgcatcgttcgtgctggcactcccagggacgtgctgacagagttctacagagaaccagttatcttctgcgctagacagtccagaagaagctttcactctgcagacagtggaagagcttacacaatctcaggggtaactggccaacagtgtagtgcagccaaggcagcagagcgtgaggtgcactaccaggcaacaagaaaaaaaaatatggagctccaggcaaggtgcgtctgcgtcgtcgcgatgctcctggtggccagcttcgcggggctggatacggcgcacggcgcgggggagtgtggccgcgtcccggtggaccaggcggtgctcaagcttgccccgtgcgcggcggccacgcagaacctgcgcgctgcggtgccgccgagctgctgcgcgccatcgggcgcgtccccaagtgcctgtgtgtcgtcatgctgtccggcaccagggagaggagcgccgtcgagcgctcagcgccgggcagagaagaccgtcgggccagggagctccaaccaatcagcgatggagcacagggccgaggaccggggagagggagcgctcggggagaggaggagcgcccaggagagccgtcggacaagacgaactccagctcgagcgccgatccgttctaagaaacgggacagtgagatggactgccgtaacagcgactgcggatcggctaaatcacaccccgatagcaaaattccgaagttgaaaggattataa

SEQ ID NO: 13216 - DNA, 525 bp, Zea mays
  Peptide Sequence Number=SeqID_54995
atgggtactgttgctgatgtggcaagtatgagtaatgatgaacaggaggcggtcgcgcctgctctgccgaaagtgcgggggcacatcggcagcgcctacggggaggaggacgccagggaagccggctcctccagcctcttcggcggtgacggctcctcggacgacacgcatccgagctccggctcgggccaccgcagcagcgtcgcgtcgagccagaagagcctggatgaatttgaatttggtgtaacctgggatggcgatggactgcaggaggacgaagtggagcaaggaaagatctttcttggcgtgtctagacttttcagaggctcagtggtgacatcagctgagtttgctgagaagcagcggacaccagcttccctggcgctaggcacaaagcggttgcggctgtcataccctttccttgagctcgcttcgtttgggagactggaggtgcacacgctaatcaatcccactcaggcggtgcatcttgtcttcttgtctctaggggcagcagcaagagaatga

SEQ ID NO: 13217 - DNA, 1737 bp, Zea mays
  Peptide Sequence Number=SeqID_54996
atggtgtttcctgccatcctccccaaggtggccgtgcgattgctcttcacgttctaccgcgccgccaggaagctcaggcgccacgccttccagctctacaaccgtaggaccgccgccaagccgccttcgttctccgtctcccagcagcaggccggtgccgccaccttcaagaccgacgccgccatccctgacgccgccggccggaccgtcgtctgtgacgtgcacggagccctgctgcgctcctccgcgctcttcccctacttcatggtcgtggcctacgagggcggcagccttctgcgcgccatgctgctgctctgcgccttccctctcgtctgggcactcggggagcgcagcggcggcgctggcgccgtccgggtgatggcgttcgtcaccttcgcggggctcaggcccagggacatggacctcgtgggccgcgccgtcctgcccaagcactacatggagcagctcaacgcgctggtgtacggcagcctgtggctcccggccaggaggaaggtggcggtgaccggcgcgccgcgggtgatgtccgagtggttcctcaaggagtacctggccgccgacgcagtggtcggcctcgagctgcagctcgtcacggtcggccgctgccggtacttcacgggattgctgtcaggccccgcgacggggccggagctgaggcacaaggcgctcatggaggctctaggcgccgaggacgacaccgtggccgacgtgggcatcatcagcaactccaacccgctcgaccacctcttcgtcccatactgcaagatatcgctgagtttgtatacaaaagaggatgaaaggaattattgtgggctacggttaaggtcactagagcttggaagggccagccgtcagcgatgctacggcctatcggacttgaaaggggacggggcacatcacaggtggaaggaagtttatgtcgtgaacacagagaatgacaagctaccgcgggtcaaatacccgaagccgctcatcttccacgacgggcgccttgccttcctgcccacccccgccgccatgcttgccttcttcctcttccttccgctcggcgtcatcctctccgtcatccgcattaacatcggcatcgttctcccttacaaggtcaacttcgtggccgccgcgatcttcggcgtccgcttccgcgcctctgggctccgcgccccgccggcggacggcgagcagcgccggggcgtcctctacgtgtgcacgcaccggacgctggtggaccccatcatgctcaccacggcgctgcagaagcccgtgcccgccttgacgtacagcctcagccggctgtccgagctgatcgcgcccatcaagacggtgcggctgacgcgcgaccgcgcgcgggacgccgacaccatgtccaggctgctgaagcaaggcgacctcgcggtctgccccgagggcaccacctgccgcgagccgtacctgctgcgcttcagcccgctgttcgcggagctcgcggacgacatggagcccgtggccctggacgctcaggtgacgatgctctacggcacgacggcgagtggccacaagtggctggatcccgtcgcgttcttcgccaacccggtgccatcgtaccgggtggagttcctggggaccgtgccgcgggagtggacgcgcgccggggggcaggaccggcgtggaggtggccaactgggtgcagcggcgactgggcgaggcactggagttcgagtgcaccgagctcactcgccgtga

SEQ ID NO: 13218 - DNA, 1851 bp, Zea mays
  Peptide Sequence Number=SeqID_54997
atggctcttttaagaattaccttgacaaaaagcgaaagatcctctagcgtaatgggtaaggattccgagtatcaccttcaggcaaactcttctggaagaaaggtgtctaaaactatgaacgggttacagaaagcaaaggccaagggcaaaattggaacactaatgatggttggttgcatgagtctgtcgattacttgcaagaaatgtgaacctttgtttctttcatctccaccagtatgccctctcatactctatataaacacatcaacagcatcgcaattagccacaagatcacttcgggaggcaagtgcgatttcgatctcgcagccaccttttttttgttctgttgtgtatctagtagttggaggagatatgcagtttgcacttgcattggacacgaactcaggtcctcaccagataagatcttgtgagggtgatgggattgacaggttggaaaaattaagtattgggggcagaaagcaggagaaagctttgagaaataggtgctttggtggtagagttgctgcaactacacaatgtattcttacctcagatgcttgtcctgaaactcttcattctcaaacacagtcctctaggaaaaattatgctgatgcaaaccgtgtatctgctatcattttgggcggaggcactggatctcagctctttcctctgacaagcacaagagctacgcctgctatatttgtgatgagtcagttcaattctacttcgcttaaccgccatattcatcgtacataccttgaaggcgggatcaactttgctgatggatctgtacaggtattagcggctacacaaatgcctgaagagccagctggatggttccagggtacagcagactctatcagaaaatttatctgggtactcgaggattattacagtcacaaatccattgacaacattgtaatcttgagtggcgatcagctttatcggatgaattacatggaacttgtgcagaaacatgtcgaggacgatgctgatatcactatatcatgtgctcctgttgatgagagccgagcttctaaaaatgggctagtgaagattgatcatactggacgtgtacttcaattctttgaaaaaccaaagggtgctgatttgaattctatgagagttgagaccaacttcctgagctatgctatagatgatgcacagaaatatccataccttgcatcaatgggcatttatgtcttcaagaaagatgcacttttagaccttctcaagtcaaaatatattcaattacatgactttggatctgaaatcctcccaagagctgtactagatcatagtgtgcaggcatgcatttttacgggctattgggaggatgttggaacaatcaaatcattctttgatgcaaacttggccctcactgagcagccttccaagtttgatttttatgatccaaaaacacctttcttcactgcaccccgatgcttgcctccgacgcaattggacaagtgcaagatgaaagatgcatttatctcagatggttgcttactgagagaatgcaacatcgagcattctgtgattggagtctgctcacgtgtcagctctggatgtgaactcaaggactccgtgatgatgggagcggacacctatgaaactgaagaagaagcttcaaagctactgttagctgggaaggtcccagttggaataggaaggaacacaaagataaggaactgtatcattgacatgaatgctaggattgggaagaacgtggtgatcacaaacagtaagggcatccaagaggctgatcacccggaagaagggtactacataaggtctggaatcgtggtgatcttgaagaatgcaaccatcaacgatgggtctgtcatatag

SEQ ID NO: 13219 - DNA, 336 bp, Zea mays
  Peptide Sequence Number=SeqID_54998
atgacgctctccctctccacctctttcctccccatccccgccgccgcgaggaccaccgcccgcaccctacgctccgtcgtcccctcccaggggatgcgctgctcgatgcgcaagaaggggttgcacccggagatctacgaggacgcgaaggtgtactgcaacggcgagctggtgctggtgacggggggcaccaagccggagtacacggtggacgtgtgccagatcgagaagttccgcaagaagtggggccacatcaaggagtactggcccgaggaccagtggagggagatgcacccagacggcgacccggagttcgagcccgagggggacaactga

SEQ ID NO: 13220 - DNA, 957 bp, Zea mays
  Peptide Sequence Number=SeqID_54999
atgcccggcataccgagggaagtcaccgagcactcgctggatatccgagctggagcccgacccgtgaagcagcctctacgccgattcgacgaagaaaagcgcagagccataggtgaggagatccacaagctaatggcggcagggttcatcaaagagtgctatgttaccatgccgtttggtttgaggaatgcgggtgcaacgtaccagcggtgcatgaaccatgtgttcggcgaacacattggccaaacggtcgaggcctacgtcgatgacatcgtagtcaagacgaggaaagcctccgacctcctttccgaccttgaagcgacattccgatgtctcaaggagaaaggtgccaacccggagaagatcgcgaccatcactagcatggggcccatcaaggacttgaaaggcgtacagagggtcatgggatgcctcgaggctctgagccgtttcatctcgcgcctcggcgaaagaggcctgcctctgtaccgcctcttaaggaaggccgagtgcttcgcttggacccctgaggccgaagaagccctcgggaacctgaaggcgctcctcacgaatgcgcccatcttggtgccccccgctgccggagaagccctcttgatctacgtcgccgctaccactcaggtggttagcaccgcgattgtggttgagagacgagaagaggggcatgcattgcccgtccagaggccagtctacttcatcagtgaggtactgtccgagaccaagatccgctacccacaaattcagaagctgctgtacgcggtgatcccgacgcggcggaagttgcgacactacttcgagtctcatccggtaactgtggtgtcatccttccccctgggggagatcatccagtcccgagaggcctcgagtagaattgcaaagtgggcggtggagatcatgggcgagacaatctcgttcgcccctcagaaagccatcaagtcctag

SEQ ID NO: 13221 - DNA, 1713 bp, Zea mays
  Peptide Sequence Number=SeqID_55000
atggagctgaggatgaggacctttgcttatattataccgaatccttctacaaggaatgggaattcatacgcgtccatccccgccccgactgtcgcgccgcgaatcgcggctgccgcatcctccaatcaataccgcggccgccgcttcctccgtccgcacggtaaacctggtggcctcttcctcgccctgcatgcctgcctcttccccacctcgacgccgccctcgcccctgcatccagcgtgctccccgcccctcccccgtgccaccgagacaacgtcgtctgcaagctcgccgcgcccaccgacccacccttcccccaacattgtcgaacaccctggccagagttcagtgaccctcgccccccgagattaccgccatctcctacccgccattgtcgcgctccaccaccagggcccgctgtaccgcgcccgcgccgtccaaatctgccgcggatctcctctccccattactgggaggtccaccatccatgtaaggtgcgccccctcctcctctacccgccatccatggaaggtgcaccatctaaaatggggctgcaatgaagcttgtctgtaccgcgtcgtggatccaccacctcaaatcctctcagtaccgcgcccgcgccgtctaaatctaccacggatctcctctccccattactgggaggtccgccatccatggaaggtgcgcccctcctcctctacccaccatccatggaaggtgcgaactcgtgaacttgcatacgcagcggaagctaggcgcgacgagctatccaaggcggtgactggcgtcgagctctccaagggtataaaagggttacgtgatgaaattgctgcccatgatgggtttcatgcaagtgcagataacatcttcctaacagatggagcaagcccggcaggtaatgatggcgcctcatgtgacgtggtcggtccgagccctgagttgggcgaggcggaggctcctccgaggtcgaggtcaagtctgtcttccaaggccgaggtcgagtccgagcccctgggtcaggcgaggcggagaccgtcggctgaggccagggctgagtccgagccctggggtcgggcgaagcggagttcgtcgtcttccggggctgagcccgagtccgagccctggggtcgggcgaagcggagttcgtcgtcttccgggtctgagcccgagtccgagccctggggtcgggtgaagcggagttcgtcgtcttccagggctgagcccgagtccgagccctggggtcaggcgaagcggagttcgtcgtcttccggggctaagcccgagtccgagccctggggtcgggcgaagcggagttcgtcgtcttccggggcggagcccgagttcgagccctggggtcgggcgaagcggagttcgtcgtcttccggggccgagcccgagtccgagccctggggtcgggcgaagcggagttcgtcgtcttctggggctgagcccgagtccgagccctggggtcgggcgaagcggagttcgtcgtcttctggggctgagcccgagtccgagccctggggtcgggtgaagcggagtttcctatggcgcctgaggccggacttggttgctgacagcctcactctgtcgagtggcacagcagtcggggcggcgcaggcggcgctgtccccttgtcaggccggtcagtggagcggcgaagtgactacggtcacttcggctctgtcgactggagggcgcgcgtcaggataa

SEQ ID NO: 13222 - DNA, 507 bp, Zea mays
  Peptide Sequence Number=SeqID_55001
atgcagtcggcacgcaaccgcgccgagtgggcgcacctcttcgactctaacgcgcccagcatggaggcccaggcccacacgtcatgcaaccggcgcgccggttgctacgtgcgagcaactgcaccgcccctcgcgccactaccgcgcctcctcgactgcggaaccagtaccgcgactcgaggcaaccctgcgtatgacccaacagtgccagcctggtggcacatttggcaggagaagcgagcgatgcttcgccttcgccataatgaccgcgtcaaaaaagggaccgggaaagggggataccccgaaagggatccttctccgcgaaggaaacgggccccgagcccccctactgatcagaggttcgaaggctggcccctcggaagggttcaacagccgcctcagagcgctcgggctccgcgcccactactggtcagaggttcgagggccggcccctcagaagggttcaacggccgcctcaggccactcgggctccgtgcccactactga

SEQ ID NO: 13223 - DNA, 1734 bp, Zea mays
  Peptide Sequence Number=SeqID_55002
atggggcgtaggacatgtggcacggccttcatccttctctacgtgctgtctacgtcgacattgcccgcgtcgtcatcgaacaccggcgacggcctcatccgcatcccgctgaagaagagatcgataatggacaccatctacggcgacctcctgccgaagccgagcgcgccggaggagaaggagaagcaagccgtcgacgacccggtgcgggacgccatagcccgagcacgcgagcggcagcacgaaatgctggtccaggccgctgccacggaacgcaggcgcaggtactactggagctacagcggggccgggggcaagggaaacggcagccgtctgcatgacggaggccagggcgaggggtcggggagcatcgccatcgttgcgctcaagaacttcctcaacgcccagtactttgggcagatcggggtcggctgcccgccgcagaacttcaccgtcgtcttcgacaccgggagcgccaacctctgggtcccttctgccaagtgctttttctcggtgagaatggcgtgtgccctcgcgtgtttattccatcccaagtatgactcccgccagtccagcacttacaaaccgaatggaacaccggcttctattcactacgggacgggagggattgctggtttttacagccaagaccaggtcacggttggcaatctggtagttcaaaaccaggagttcatcgaagccactcacgagcctggcttcacctttctactggcaaaattcgacggcatcctcgggcttgcatttcaggaaatttcagttgaaggttcacttccagtatggtacaatatggtgaaccaaaacctagtggcgcagcctgttttctccttctggttaaaccggaacccattcgacggggaagggggcgaaattgtgtttggaggttctgacgaacagcattacaaaggaagccatacgtacaccagggtcactcggaaaggctactggcagtttgaaatgggtgactttctcattggcggaaggagcactggaatctgtgtggatggttgtgcggccattgcagactctgggacttcgctgattgctggtcctctagttgccattgcccagatcaatgaacagattggagcggccggggtggtcaaccaagagtgcaaacaggtcgttgctggttacgggctacaaattgcagggctgctggaagctcagcagacaccaccatcagaagtgtgctcgaaggtcgggctctgcacgttcgatgggacacgcggagtaagtgctgctggcatcgagagtgtaccgggatccgtagacggcatggcggaagctctatgcaacgcgtgcgagatagtagtgttctggacgcaaagcgagctgagcccgaacaggagcaacgagggcacgctggagtacgtggacaggctctgcgaaagcatgcccgatccggtggggtcgcgcgtggactgcggacgcgtgggttccctgcagaccgttgcgttcagcatcggtggaagggcgttcgagctccggcctgaccagcagtacgtcctcaaggtcggcgaggggttcgccgcgcactgcatcagcgggttcacggctctggacgtgccccctccggtaggccctctgtggatactgggtgacgtcttcatgggagcctaccataccatctttgactacggcaagatgaggatcggaatcccagatatatcagcagagccaaagagtggcggacactgcgactattttcattga

SEQ ID NO: 13224 - DNA, 792 bp, Zea mays
  Peptide Sequence Number=SeqID_55003
atgggtcggcgcgaggcggaacgcaaaggggggaagaagccggagggagacaggcgtgggaggcgtaaggagaggatccagggtaatgatggcgcctcctgtgatgtggtcggtccgagccctgagttgggcgaggcggaggctcctccgaggtcgaggtcgagtctgtcttccaaggccgaggtcgagtccgagcccctgggtcgggcaaggcggagaccgtcggctgaggccagggctgagtccgagccctggggtcgggcgaagcggagttcgtcgtcttccggggctgagcccgagtccgagccctggggtcgggcgaagcggagttcgtcgtcttccggggcagagcccgagtccgagccctggggtcgggcgaagcggagcggcgctgtccccttgtcaggccggtcagtggagcggcgaagtgactacggtcacttcggctctgtcgactggagggcgcgcgttaggataaaggtacacatgattttgcagttattgataaggtctgagaaggatggcattctctgccctattccacagtacccattgtactctgcatcaattgctcttcatggtggttcccttgttccttatttccttgatgaagagacagggtgggcacttgaggttgatgagctcaagaaacaacttgaggaggctcgatctaagggcatcagtgttagggcgcttgttgttataaatccaggaaacccaacaggacagactggtccgacagtgccgaatgccatggtggtgcaggaaccattcgtctacatctatccctga

SEQ ID NO: 13225 - DNA, 360 bp, Zea mays
  Peptide Sequence Number=SeqID_55004
atggacgccaccagcgtcggagggggagggaaggcaaagaagggagcgaccaggcgcaaggttggcgagcccagcaagaagtcggtgtggagcaatatgatcagagcagttcagggcctagttgctcactatgaagatttaaaattgaagtactatgaagagatggataagaggaagaaactttataatattgttcaggagacaaaaggaaatatcatgtttttttgtcgatgccgacccttaagcaaagatgaggtgtcatcaggccagaatgcaaatggcagaacaactaaaaagacctttaagtttgatagagtcttcacgtcgaaggatgatcaaagtatattagtgataacttga

SEQ ID NO: 13226 - DNA, 927 bp, Zea mays
  Peptide Sequence Number=SeqID_55005
atgctgctcaccggcgagcgcctcgtggtcttcctcttcgcggctctggtgcacctcgctgtgtcgctcgcgatcctcgtggcgaccgccctcgtcgtggagctcgcccaagacggctccggatctgccccgcttcgcccgtccctcccccgaggagccgagaggctgagcccatgcgcttcgcccgttgctgactgtaggagtgcgccgcgctgcggggcctccacatcgccatggacaaacacgacgtctccatggatgtcgcattccagcgtgagctgcagggagtcctcaacgcccgaggccgcagatactcgcttccatagctcctggtcgggggcgcactcgtcggcggtgctgacgagatttgccggctgcacgagtccggcgagctccgacacatccttgaaggcgctcccaggcaggaccctaccttcgtctacagtgcatgtggcaagttccggtttgtggcctgccccgcctgtgttcgtggaggaagaggggtggacccgccactgcctagagtgcaacgagaacggcttgtggagagagcgaaggagcctttcttatgttcttgggctgctgtacattgtcaacacagttggaggatgggtattgggtcacgcacgccaagcaggaacagttcgagcgctagcagggattggagcatcaagaagattctccaaaaccaagatgcagtcacatggaccacagaacgtcgagggcaccgaggtgcgggagccgggagcaggcaggggaaaggttgatcctatggactacactgcaatgaggtcacacataatggaccatgctgttacactagaggtcctgagattttttttccttgtgcttttggagatgatggttcttatcaaaggctgtttccaaggggagccaagagctttccctgtgctgcaagacaactaa

SEQ ID NO: 13227 - DNA, 264 bp, Zea mays
  Peptide Sequence Number=SeqID_55006
atgagcttcacgacggtgagctgcgcacgatgcgagcaggggctcgacggcgggggcgcggggtattcggcgatggtcgctcggctcctgctcctgggcatgcggctttggtgggacgaggcagatcgggtcacggcaccggttcttgcagagcaggggcgctctgggtcgcgggtggtgacctggcggggtcgcgcggtcgggcagggcacgtcggtgccatcaggacagctctacgctctgcttcgtgttagcgtcacataa

SEQ ID NO: 13228 - DNA, 423 bp, Zea mays
  Peptide Sequence Number=SeqID_55007
atggagaggaggcccaagcggcggcggctcactctctcccctagtagtagcccccctcgggcctcgggcctcgccgccaagcctcggatggtatcgcggccagtcactcctccttccttatccctcacagtccgtcaatccattgagtgcatgtgccgaggaaactttgcggccgcgctgctgctggccaatgcctcggcgtcttccttccacagcctcggcgaccaccaccgcctcccctgctacagcaacggcaaatctgagtccgcctccgcgcccgccacctccatctcgcagccgtggtcttcgccgactacaagcacccaccggggtttactactgggtccgctcccactgggtctgcgcattagagaccgacaagactgggaaatccagagatgcatttttctaccgattagctga

SEQ ID NO: 13229 - DNA, 342 bp, Zea mays
  Peptide Sequence Number=SeqID_55008
atggcccagacggccccaaatccactcctatacgttgacaagtggatcaatgactcggggactaacaagccaatgcactaccatcgacacatcaagcgtcttccaacgagacagacccacttggctctgaggctccatgagctgtactatgtgtactatagtatcataccgaaagcatctccagatgaaacaaccataaactcgggaatcaagaacaagtggtcaacattggcgcccacctccggtgaactcacaaggaccacgacaagcttcatcatgtcgctgaagaagacgacaacaaccgatgttgtcctcactcctttggatcccaaccaaggataa

SEQ ID NO: 13230 - DNA, 423 bp, Zea mays
  Peptide Sequence Number=SeqID_55009
atgaccagggccctggaagctctggtcccttcgatgaccgacctaccctatgttcccagaggtctcggcgatctccagcttggattagaggatgggctctactctttgcctagtgtggcaagtggcaacccaagccaggagtgccttgtagccaacatgacggggatcatttccccgtgcgggaagcctaggggaaacttctgccagtgtcaaaatacgtgccacgacatctgccctaccatagctcaacctgtttcctcaggaattgacactagggccttagccttttgtagagcagccatcgctcgtgacagaacgacaacgagggccacgatggaggacggggcgatcgcacctagttgcagggcaaaggcacaccacgatgatgaatgccttccgctgcctagtttatggcagaggtag

SEQ ID NO: 13231 - DNA, 249 bp, Zea mays
  Peptide Sequence Number=SeqID_55010
atggagagtcatgatctccgggcagaaagggaatcacggcttgtgggtggtgatgagaatgatggttttggtattgactatggtaatggagatagagtctttgaggagctgctcccctgtgctcccactggtgcgccccctgcaccaccactgagcgccccagcaactggagtagctgctggaagagacccagacaacagaggcgacgaaggcagctcgagcttcagcaccgacctttcagccgactag

SEQ ID NO: 13232 - DNA, 294 bp, Zea mays
  Peptide Sequence Number=SeqID_55011
atggtggaggttgctggcgatgggcgcactggacagtccagtgtgccaccggacagctactgtgcactgtccgtcgaccgttggcgcgcagggagccgttgctccgttggctcaccggacagtctgcactttgttttggctattaactcaattttgaccaacgaagctaaagggaagggcaaggtgatcgacgagaaggagacactcaacaacgagtccaagggagaaaacgagagcttcgtcaccacgcttttggtccgtcgatcgaatctgcggttcgtcgtcaatctgtga

SEQ ID NO: 13233 - DNA, 225 bp, Zea mays
  Peptide Sequence Number=SeqID_55012
atggagaaaactggagcagggagggaacgacgtccatgggaggagttggggtcggccatgggagatggctggaaacggccatgggagggagctggtgactgccggcgtccaaggtcaggggcggaagccgagggagtagggagcgttggagcgcagcgaggtataagctttcgtggagaggtcactcgtgtgtcatgggtgataaccaacggagcagtggtatag

SEQ ID NO: 13234 - DNA, 279 bp, Zea mays
  Peptide Sequence Number=SeqID_55013
atggagggtgcagcgcggatcttggaggagagaaggcgtggagggtgcagcaagggtgtgcagcgagctcggcgtggccggcagcgtggggctcggacgcgcggtgctggcgtggcgacgcacggcgtggcgcagacagcgcacggcggcgcgaacgcagcgtctctggctgcagcacgagacgagtctaggaggccgcgggaggatggtttacaggggctgagaaggagaggagattctcgtaccatgcatgtgttcaaaacggaaagtctgatctga

SEQ ID NO: 13235 - DNA, 489 bp, Zea mays
  Peptide Sequence Number=SeqID_55014
atggcgaagcgtgccgaatgggacacagtaagaggcgacagggttgtgctcgtcgacggggccacgcaaggcgcaggcgcaggcgacgaggctacgcttggtgcaggcagggtcgacggggccacgcatggcacgagcggagtcgacgggggcgtgcatggcataaatggggtccacggggccgcttgcggcacaagcggaggtgatgggggcatgggaagagatagaggcagtggggtcacacgtggcacaagtgaagggcagcagaagaggaacatcgacacaatcgatatcgaggtcgagaggtggggaggagttagcaagagagaaaatctcctcatcaaagacaacatgatgagagatgatgatgcgcccggatggtgcaccgaaatgagtggacacccacacaaagaggtgagaaagactggtgaaggtgttggacctgcggtgaacgagaaaggtcaactagcactgagagaaaccatctag

SEQ ID NO: 13236 - DNA, 2415 bp, Zea mays
  Peptide Sequence Number=SeqID_55015
atggagcacgcagggcgccatcattatttgtttaccggggtcgaggctgtgtccgagccctggggtcgggcgaggcgtagtccgtcgtccagcgtcgaggttgagcccgagccctggggtcggacgaggcggagaccgtcttccgaggccgaggctatgtccgagccctggggtcgggcgaggcggagtccgtcgttcagcgtcgaggttgagcccgagccctggggtcgggcgaggcgtattccgtcgtccagcgtcgaggttgagcccgagccctggggtcgggcgaggcggagaccgtcttccgaggccgaggctatgtccgagccctggggtcgagcgaggcggagtccgtcgttcagcgtcgaggttgagcccgagccctggggtcgggcgaggcggagcttcctatggcgcccgaggctggacttagctgctgtcagcctcactctgtcgagtggcacagcagtcggagcgacgcaggtggcgctgtttcctcgtcaggccatccttgcattaaatgctcctgcgatacggtcggttggcgtggcgatctggctaaggttgcttctctgcgaagactgggcctcgggcctttgcagctttgtgctgatggggttaccagctgagattaggagtcttggggtacccctaattatggtccccgacagatacgttatcagggcagacgcggcggcgggcccggcattactctcccgctataaatcctactccgccgcacaaggcagaacagaagaggcctccccgctccgcgttccccagcgccagcggattgcgccgagcacgagcaccctcctccccgaaacctcttcttggctctgctttcggtggtatggtgggatgatgagcagggcggcagtgctgctgtgtctcctctgctgcctcgccgccgccggcgaggcggcgtcagtggtgggcgagggcgaggcggcggagctggccgtgtcggtggacccgtcgtggcggttccccagccagcggctgcgggacgcgtacgtcgcgctgcagacctggaagcagcaggccatcttctccgaccccaggggtttcaccgccgactgggtgggcccgggggtatgcaactacaccggggtcttctgcgcgccgctgccgcgcggggtgccgggcgccggggagctcgccgtcgcgggcctcgacctcaaccacggcgacatcgcgggctacctcccgccggagctcggcctcctcgctgacctctcgctgctccacctcaactccaaccgcttctgcggcctcgtccccgccactctgcgccgcctccagcttctcgtcgagctcgacctcagcaacaaccgcctcgtcggggcattcccggccgtcgtgctggagctcccggcgctcaagttcctcgacctccgcttcaacgacttcgagggcgccatcccgccggagctcttcgaccgcccgctcgacgccatcttcctcaaccacaaccgcctccgctccccgctccccgacaacttcggcaactccccggcctccgtcatcgtgctcgccgacaacagcttcggcggatgcctcccggccagcctcggcaacatgtccggcacgctcaacgagatcctcctcatcaacaacggcctcgactcctgcgtcccgccggaggtcggcttgctccgggaggtgaccgtcttcgacgtcagcttcaactcgctcgttggcccgctgccgcagcaggtggccgggatgcgcaaggtggagcagctggacgtcgcgcacaaccgcctgtccggggccgtcccggaggccatctgcgccctcccgcggctcaagaacctgaccatctcctacaacttcttcaccggcgagccgccgtcctgcgcgcgcgtcgtgccttcggacggtgacaggaggaactgcctgcccaaccgccccacacagcgcacgccgcagcagtgcgccgcgttctactcgcagccgcccgtcgactgcgccgcgttccagtgcaagccgtttgtccctgttccgccgccgccgccgccatcataccccggcccgttgccaccgcggcatggcccctgctcctctgcactcgggtggcgcgaccaccatcccctgctccctggcgatgtggccttcgcccctctacaaccaggtggcgtggcctcctccctctatggcgcaaacccggccgccctgcgctccggcctctcaccactcatggtcgcgccctcctcgacctcctacgacctacgcccggccaacaacgtcgaccacgacctcgtcttcgtcaccaacgagctctcgaccattctagcgactgctgccccggtcaacggcatcggtgcaaccctctccttcctagtggctgaccccctttcactatcgtgtcgatcgttccccatcctgtcccctcgtcgcccgggctactag

SEQ ID NO: 13237 - DNA, 540 bp, Zea mays
  Peptide Sequence Number=SeqID_55016
atggcggtgacaggcgggcaggagcagcggccacgtcccatccgggggcagcgagagaaccctctctcacggcgtgaagacaacgcgcccatgttccgttcctcgaacggctctcgcacgcgcaacggccgccccgccaaccactcgccccgtcgcatcaactccgcgacgggacaggcggcgcctctgggctctggcaggagaagcgggcgacgcttcgccttcgccataatgaccacgtcaaaagagggaccgggaaagggggataccccgaaaaggatccttccccgtgaaggaaccaggctccgagcctccctactgatcagaggtttgaaggctggcccctcggaagggttcgacagccgcctcagatcgcgtgggctctacacccactactggtcagaggttcgaaggccggcccctcggaagggttcaacgaccgcctcacgctactcgggctccgcgcccactactgatcaggggttcgaaggctggcccccgaagggttcacagtcgcctcagacacaaagcgagggatga

SEQ ID NO: 13238 - DNA, 498 bp, Zea mays
  Peptide Sequence Number=SeqID_55017
atgggctaccaccacctcctactctcgccgtcggtggcgcagccgccccgtcccgcccttctccctccaccccgcggccgccgcggcagcggcgtcgggcgggccaccgcagtatttgcctcggcgtccagcaccgctcgctcccccgctgcggacgacgccacgcggaggagggccgtgctcctggtcggcgtctcggtgctcccgctcctccgcctccgcgacgccgcggcggcggcggccagggcgcagctctcctcggttgatctcgtcactgatagaacagatattcaaaaggctgatgtaactcagcctgaggagccttgggaagaactacatcaacctgatgagcaaggacaaccagcaagaaatccacttgcaggtctcctaaatgcaattgcagttattgcttctggtgttttcgctggacttcttggtacttctcaacaagaaaagaaggctttgcaatcgaccatctcatctgtatgtcatctataa

SEQ ID NO: 13239 - DNA, 1776 bp, Zea mays
  Peptide Sequence Number=SeqID_55018
atggagaccaaattggttgaaaacgaggcagcaatgtcgatgctaagggaaaactatgagaaaagaatattggatgaacaagtaaaactgaagaaagaagctagaaagtttcaggaggaggaagccttcctgcaagatcagttggcttcatctagaagaaccgtaacatctttaactgaggaagttcaaagggagaaggagctagtagagcagcttaaccttgagatagatcgacttaagagcagtattgcagaagcagaggaagacaaacatttgtctgaaggcaaattgaaggaaaatatggaagtgcttgatattttgtatggcaaggtaaatctgcttagccaagaggtaaatggcaaggacgaacacatcagggagctgagctcatcactttctgccaaggaaaaggactacgagaacctaaatgtgatctgcaatcaagccaaagaggacctagagcaggcaaattcccaaataaagcaagtggagaaagatgttcgtacagctaaagatgatctcaaatcgaaggcgtcacttattaactcactgaatgagaaagttcaaacattatacactgaaaagggtgaagtggaagaaaaactaagtgctctagtgagtcagtatacatacctgaaatctgcttctgaagagagggcttctcacgattctgaactattagttcagaaagatgatatgctcaatcagcttgaagaaaaactttctgctgcattaagtgactctagcaaagacagaactcgaattgccgagttgaacaatgaattggtcaccaccagaacaatactagataatgaagttgttgccaataaaaaattgtcagaccttgttcagttcactgaagaggcactaacaggttccagaaatgaggtgtttaaactctctgaagagcttgacgcagtaaagagatcaaatcaggatttgatgactcagatttcaaaactaacagatgaggccagtgaagtgaggcaggctctggctaacaaaatagagcaggcagagtcagtttatgcaactctttcagatgagctggcgtctgtaagggaagtacttaaaaagtcagaaggagaactcgagatcacctcgaagcagttagttttggtttcagaagcacatagtgaccttaataaagaattgctggatgcatataagcagttagagtccacgcaaagtgagctagtgaaagagcgtaaaatcaatgctactcttaacatggagcttgaggctttggtgaaacaatcagtgatagagtccgaagcaagaaaaactcttcaagtcgacttggatgaggccactagatcactaaatgaggtgaataagagtacactctgtctgtctaagcagctggaaacaactaattccaagatttctgctattaaagaggagaaagatatgctgtcaaagttccttgaggaacaaaagaaaagtacggttgaagctcaggaaaacatggaggatgctcagaataccataaaaaggcttgggactgagagggagagttttgaagtaaggtctaagaaacttgaagaagagttggccacagcgaaaggtgagatattgcgtttgaggagacatattagtacaggtgggtctccgaacacccaagttctttcggaagcaggtgcagcgccaattagcagtcgagcactgaaacagcaacccatgaatgatcatgttcaaaatatcaatggtgctgatgctgtagcgtcacgttcgcctaaacggatttataggaggaaacgcaaaccagcagcataa

SEQ ID NO: 13240 - DNA, 384 bp, Zea mays
  Peptide Sequence Number=SeqID_55019
atgcctttgtccacaacgctggtcgttacaactatgaggatgccttcacctggcaaggctggccagggggagcagcgagaggtggtcgggacccaggcgaggtctgtggctgaaacatcatctgacccgtgggcgcggttcttccctattgttgatggaggcgggggtgtcactgaggcatctacatctggtggtgttgcgatggttgttgtgaggcaactacgctatgttgctgtttttactgaccaagtggtgtatggggtgcttgtggacctcgcgacctctcaactgcgttctgaaaagaaatggttggaagacaaggttgagcgtcttcgaacccagaatatcgaagctatccgggataagtctgccatgcaaaagtaa

SEQ ID NO: 13241 - DNA, 195 bp, Zea mays
  Peptide Sequence Number=SeqID_55020
atgaaggcctatcacgagaaggtggaggctcctacatgggtcgtggcttggtccaagtcctacttgtttgcggagtctcttttggcttctgttgtgactcgactttcttttggtggagctcctgtgaacaggcatatttctcgaaaagttgatacaattcttgaaggtgattatttttatgcgaagtgctcgtaa

SEQ ID NO: 13242 - DNA, 332 bp, Zea mays
  Peptide Sequence Number=SeqID_55021
atgaaccgcgcgttcccggctaacgtgcggctcgacgacgggcaggtgctcgacggcgtgagcgtgtatgggggacccgcgctcgagtccggcaacctgtacgaactggtgtacgccagggcgagcggcggggtgcctcccgcgatgcgcggcaagatcgtggtgtgcgaccgcgacgtgaactcgcgcgccgccaagggcgacgtggtccgccacgcggggggcgtcgggatggtgctagccaacggggcgttcgacggcgagggccttgtcgccgactgccacgtccttaccctactatactcagctgtacaattggacctgaaatcctt

SEQ ID NO: 13243 - DNA, 138 bp, Zea mays
  Peptide Sequence Number=SeqID_55022
atggccatccagggcgccacattggtcaccagtggttttgtccgttttggagtgtgggctattccctgcttttccataacagagaatccctcgcctacgcctccaaatcgtcgaagccgcaccggcggccttccataa

SEQ ID NO: 13244 - DNA, 600 bp, Zea mays
  Peptide Sequence Number=SeqID_55023
atgcaggcggcatgcaaccacgccaagtgggcgcacttctccgacttccaacacgcccacgcgccatgcaaccggcgcgccggtcgctacgtgcaagcaactgcaccgccactcgcaccactaccgtgcctcctcgactgcggaaccagtaccgcgactcgaggcgactcagcgcatgacccagcagcgccagcctggcgcaacggtcaatacggccaaaaacggaccggcagtaatggcggtggcaggcgggcaggagcagcggtcacatcgagaagcaagcgacgcttcgccttcaccataatgaccgcgtcaaaaaagggaccaggaaagggggatgccccgaaaaggatccttctccgtgaaggaaacaggctccgagcctccctactgatcagaggttcgaaggctggcccctcggaggggtttaagagccgcctcagagcgcgtgggctccacacccactactggtcagaggttcgaaggccggcccctcggaagggttcaacgtccgcctcaggcccctcgggctccgtgcccactactgatcaggggttcgaaggctggccctcgaagggttcacaaccgcctcagacatag

SEQ ID NO: 13245 - DNA, 105 bp, Zea mays
  Peptide Sequence Number=SeqID_55024
atggcggaggagcgaaaatacaacgatgggaaaaagatcagagagaaggcgcacaagatgcgatccacaggaaagcctccccgcacagatggcaatgggtattag

SEQ ID NO: 13246 - DNA, 444 bp, Zea mays
  Peptide Sequence Number=SeqID_55025
atggcccccaagagagcgaattcgaaggccgccacttccatcgatgatgcagcgatgccggcccttctggctgaaaagaaaggcaaggctcccatcgcagacgacatccctcaagaggccttcgatgatgaagcagtgaacaacaaaaggcaacgccaagacaatctgcctacgctagagggcaccgcgctcaccctcgccaggattcatccacctagtggcaaaagacaccatcgaagacggcagatgatactagatgaggagcaaaaggacagagagcaggaacaacaaattgcatatatgcaaggcgaaggctcacaccacatgcagcggagccctctcatcactccaaccaccttccaggggattaattaccttgacgagtgttggggtgacatgtctcaagacgaaggggtgaaccgacttaaagatgaaatgacctaa

SEQ ID NO: 13247 - DNA, 1002 bp, Zea mays
  Peptide Sequence Number=SeqID_55026
atggcccgcaagcgccaggcgccgccgccgccgccgccgccgccgccgccgcaggaggaggaggatgagtcatcctccgaggaatctggctccgaagaggagtctcctcgcctccccgagctccgaaggccctcgcaggccgccgccgccaacaacgccgactcgtcggacgcggactcggattccgacgccgacgtccaagccttccagatgcgccaggtgccccgcttccccaccaagcagacacacccagtctctcacccagaatccggtgccgaagaggaggagggcgagttgtcagagtcggagcacgagaacccggtgcctgtggttcagaagaaggccgtggcggcggcagggatgtccaagacagggcaggagaggaagaggcccgcctcggatcctgctccaagcgggaaggcaaaaaagaccaaggctgaggctacccctcctgctaaggcgaagaagggagagaagctggcgcctgatgcgactcctgcaggaaaggcaaagaagggcaagaccgagctagagacactggcacctgatgccactccagcaggaaaggcgaagaaaggtaaggtcgagaagacagctcctgaggccactccctcaggcaaggggaagaagggtggggacaaactggagaagccagcagcgctcgatcgctcaccttcagacagcaagtctgaaaagcttgcacatttttcccgcacatgggagaaagatgatgagatgaagatcttggaggctctcgcggcccatgtcaagagtgagggcgtgctgccgaagactgattttcttcttgctagtgttcgtgaccgccttgtcaggaagaactgcaactacacggatatatatgagaaggagattgaggcccatcatccatgtggggagactctgaagagagcatttgagttcattgctgatgagaaggcagaaggtctggaatccaagatcaagaagcaaagagtagcagaggcgaaggcggagaattcatag

SEQ ID NO: 13248 - DNA, 2883 bp, Zea mays
  Peptide Sequence Number=SeqID_55027
atggagaggagagttgtgagtgctcgatgtcggtatacttggccagttggccccatatgccacaaattttcccttacaaactggggtgatctgggattaatcctgtgcaaatggattgcgtctcatttgatgatggaggggaatatgtggctcaatgatactattggagttattcctaaaaattcttggtcaattgacccatttggttattcatctacaatggcttatttgcttaggagaatgggttttcataacatgttaatccaaagaacacactatgaggtgaaaaaggagcttgcaatgaaaaagaatcttgaatatttgtggaggcagaactgggatattgaagaaacaactgacatatttgttcacatgatgcccttctattcttatgatattccacacacgtgtggaccagaaccagcaatctgctgccagtttgactttgctcgaatgcgtggtttcagctatgaatcctgcccatggagatctgatcctgttgagataaatcctgacaatgtggaggagagagcaacaacgcttctagaccagtataggaaaaagtcaaccctgtacagaacgaatacacttctcattcctttgggcgatgattttcgatatgttagtatggaggaagcagaggtacaattccgcaattatgagaaactttttgattacataaactcaaatcctcatcttaatgctgaagtcaaatttggtaccctggaggattacttctccacattgagagatgaagctgaaaagataaactattcacggccaggtgaactgggttctgctgagctgcaaggttttccaacactttcaggagatttttttacctatgcagatagaaatcaggattactggagtggttactatgtatcaaggccattcttcaaagctgttgaccgtgtactcgaacagacgcttcgtgccgcagagattctgggttcatttgttctaggatactgtcagaagtttcagtgtgcgaagctccccatcagtttctcacacaaactgacagcagcaaggaggaatttggcgctttttcagcatcatgatggggtaactggcacagctaaagatcatgttgtggtggactacgggactcgaatgcacacttcactgcaagatctgcaattatttatgtccagggcagtcgaagtgcttttaggagatttccatgatagatctgaccctacattattatcacattttgagtccgtgcaggaacggtcaaagtatgatgttcagctggtacataaggttcttcaccctcttgaagggaaggcacagtcagttgtcttttttaaccctttagaacagacaagggatgagattgttatggttgttgtaagtagccccgatgtttctgttctcaattcaaatggatcttgtttgccaagtcaactttcccctgagtggcagtttgtcagcgatgaaaatatttcgactggtcgtcatcgcctttattggagagcttatgttcctccactaggtttggagacctactatgtggttactgggcaggattgtgaaaaggctattcctgctgcagtgaaaacatacacaactgaacaggaattttcttgccctcaaccatatgattgttcaaagctggaagccaaaacagtggaaatgaagaactccaattacactctttcttttgatacaagtcgtggtctcctccagacagtaactcgtcacaaggacgggcaacaaactgtgataggtgaagaaattggcatgtacaaaagccatggaagcggggcatacttatttaaaccagttggggatgctcgctcaattgtcgaggaaggaggacatttcatccttactgaagggccattggttcaagaagcccattctcttccaaagacagagtggcgtaagtcacctctctcacatagtacacgcatctacaattgtggggacgctatacaggacatgctgatcgagaaggaataccatgttgagcttgttggccatgcttttaatgatagggaattgattgtcagatacaagacagatattgacaaccaaaggatcttctattctgatctaaatggctttcagatgagtaagaggcagacatatgataagattcctctacagggaaattattacccaatgccatcacttgccttcttgcaggattcacatggtaatcgattttctgtacactccaagcaatcattgggcgcagcaagcttgaaaaatggatggctagagattatgttggatcgtaggttggttcaggatgatggccgtggtctggggcagggagtaatggacaacaagcccatgaatgttatatttcatctcctcacagaatccaatgtctcagctttgcctaaaacccatagtttgcatactcttcaaccttccatcctctcgcatcgtgttggggcgcacctgaactacccgatgcatgcttttatgagcaaaaaacctcatgaaaaatccttcaagcgggctcaacagtcatttgctccattaactgcttctttgccatgtgatatacatattgtgaacctgaaggtccctcggcccctaagatttcctcacaccgaatcagcagagccaaaatttgctgttctgttgcagaggagaggctgggacgcatcatactgcaaaaggggtggactgcagtgtacaacagttggggaagagccagtaaatctgttctacatgttcaaagatttgtcagctgtgaatgtgaaggcgacttcgctgaacctcttacacgatgacccagaaatgctaggttaccttgagcagaccggtgatgttgctcaggagggagacgttcttatctcaccaatggagattctggcatacaagttggacctacaaccaccatcatcgcaggaagagtag

SEQ ID NO: 13249 - DNA, 210 bp, Zea mays
  Peptide Sequence Number=SeqID_55028
atggacaagtggccaattggctggggcacaacaaaatttagaaagcgatatgcatctattgtaggcaatcaatcaagttcagaatacacaattttgataccaaacttgaatattcaaaggttggaactttggaaagaaatggaaggtgttgtcgcattgaagattaacaagcaagtgagcttctatgaggaggcgtacaagcagaagtag

SEQ ID NO: 13250 - DNA, 528 bp, Zea mays
  Peptide Sequence Number=SeqID_55029
atggatggggttttagaagggataaaccgagggaaagcagattataaatcactgagtgaagaggagtggaagaagcgcctgactgaagagcagtattatgttactcggcagaagggcactgaaagagcattcactggggaatactggaatactaaaaccccaggcatttatcagtgtgtctgctgcgacacccctctgtttcagtcatcaaccaaatttgatagtggtactgggtggccatcctattataaaccaattggtgaaaatgtcaagagcaagcttgatatgtcaatcatttttatgccccggaccgaggtgctctgtgcaacctgtgatgctcatctggggcatgtcttcgatgacgggccaccaccaacagggaagagatactgtatcaataggtctagggattgtgtcattgcgagtcctgctgcactttcctctgcatgcatctctgaaattgaagccccaatagttgctggatactttagcaagaagtcaactataacgctggtccgccctatgtaa

SEQ ID NO: 13251 - DNA, 189 bp, Zea mays
  Peptide Sequence Number=SeqID_55030
atgaggggcgagtcggggaggaagggacaggggctttacactgtggtcggggaggcgccgaggaggggcgaggtgctggtcgtctgggagggtgctggtcaggacattctgcgaggtggtgcacggaccaggttcaggagcgaggagccgctgttcgtgtcctggccctcgcgtacgctgaaggggtag

SEQ ID NO: 13252 - DNA, 474 bp, Zea mays
  Peptide Sequence Number=SeqID_55031
atgccaaaaataaagagtctatctaatgcatgccgagtatcattttctccagaaggtcccatatctgaagaggcgcttgagagagtccgtgcactgttagatatgataagacctctagatgtcggcctagataatgaagcccaaattgcacgcaattggagtagttctacgcgtccatcaaatgggagacgaggacgcaatggggctaaccagttcgcggctccaatcaaatatttgcacattcatgaatgtgaaagcttctctatgggtatattttgtatgccaccttcttcagttatcccacttcataatcatcctggaatgactgtacttagcaagcttctttatggacgtctgcatgctgaatcttatgactgggttgacatacctgatcatccaattgatcaattacaaaagaatatacttaatgaaaatgtacttttgggggattgggaaaagaacaaaaagacataa

SEQ ID NO: 13253 - DNA, 177 bp, Zea mays
  Peptide Sequence Number=SeqID_55032
atggcggggaagagaccacgaatccacgggcagagaggggagagcggcagtgagaaggtctcgggcggaccggagaaactccgggtttttgaaagtgcattcatcccttttgtgagttttggtgatttggatgacaagacatttaaaagactaacaagtttgctaagtgttgaatag

SEQ ID NO: 13254 - DNA, 558 bp, Zea mays
  Peptide Sequence Number=SeqID_55033
atgccagagagagggagaggagacggtgttggcagggtgaatcggccgtcgacggggttcaacaatggttctctactgttgacccagtccaaggatcgaggaggtgtggtagcatgggtggaggtgggcgaacacgggagagggtccattttggccagtggtggtttggagcaggctggccacatcggggtggtaggtcaccgcagtgatagggaaaaggggaggctcatcggagtgaagggaggcggcagcgccggctccgatcgagctcgagggagggcagaagagaggccgacggccggtgcaggtttgagaggagctccgggcgctccttttataggtgcccggggtggggagcgatggccagctggcctcctacgggcggtgcacatcaacgggtacaacggtgtgcacaacagcggtgatggaacatcatggcgaggggagaggggcggtgacatgcagcgaagaaggggaaagggggacggtgtccggcggggaagccatcgtcgtttgtacgcccatgagggatggggagaggctgacaagcggggctag

SEQ ID NO: 13255 - DNA, 1035 bp, Zea mays
  Peptide Sequence Number=SeqID_55034
atggagtccgacaccgagcgagacgtccacaactcctcccgctccactaaccctagcggccaccaccagcgaccgcttcggttagtcaagtctacggcgttcaagcgggaggagcgccgcaagcgcaaggaccgcaagcggcagaggcacctcgttgacgagctcgtgcggtggcaacctctcggcgccccgacgcccctcccagccgccaccggatccgtgtccccctcccaagcgcagcccgatacgccttggccgtgtgacccgccgccgcctccggaccccgcggaagccgactcctggagctggggcccgcccgccgtaccctcgccgacgccgacgcaacccacagtcgacgtggcgggcgcggtccccttgcaccctcaggtcgtcgccgtaaggtcctgccgcgcgttctttgaatcgcagttcgaagaggacgaggaggaggagaacgagggcagtgcggctcgattcttcagcgagctgctgggcagcgacgcggcgctgagggggttctacgaggcggagcgggacaaggggcacttcctgtgcctggtgtgcgaggggagcggcgccaggctgggcaagaggtttgccggatgcgccgcgctcgttcagcacgccgggtcgatcgcccggaccaagtggaggctggcgcaccgcgcgttcgccgactccgtcggcctgctgctcggatggggcgcaggccggattgctcctccgccggtaccgccaccggcagattctgacagcgacggttcttttgatcaagtaggcagctctcagatgggcactggataccgcagtgtattcttctcgatcctcttcaggacacttctcccgtttcaacattaccgaatggacctgaaagcaggttgctctatcaatgaaggttttgggcacctcgtcagcttaactccgtgcggtctggttctcatatctgagccaggctggccagaagcgaaacaatcattcactgacgaagcagctctaatgaagacagtatacggtcagtggggcctcaccttataa

SEQ ID NO: 13256 - DNA, 129 bp, Zea mays
  Peptide Sequence Number=SeqID_55035
atggggagagacatggaacactcacctagacttgttgagtacgccagagtgatgggcccagcctacaccttcgaccactacgacgtcacccctcgatgtagtagattgggacgacagggaattcaataa

SEQ ID NO: 13257 - DNA, 420 bp, Zea mays
  Peptide Sequence Number=SeqID_55036
atggagaacaagaccggcgtcccatccggctcgccccgctgctgccggagacccgcgcccgtgttcccgaccatccagcgcgctggagaccgtgccaagcctccccgagctccgccccaagacattctcaccgccgctctcccctctctgccgtggattcgtggcctcttccccgccattgagttcgtcgtggcgccctcttcccctctgcccaactgcggtgaccccggagccaccctagctcgtgctcgcctcaactccggcgacctcaccgtcgaggagaggagcagcgccgcccgcagccattcaaccaccctcggtctgatcccctccgtccgatccagatcgaacggctcggaccgcgggtaccgcttcgtgcacgtccgtttccccggtctgatttcccccgtccgatcttga

SEQ ID NO: 13258 - DNA, 459 bp, Zea mays
  Peptide Sequence Number=SeqID_55037
atggaatgtggggctgaggagcaggtggagagcctcgaggatgaggagctggcatttgtggccagttggttcacacggtttcacaacaatcaccagaaccggtggcttggtagatcaaaggatggatgctacaactatggtgacctcgaccacttcatcgccagttttcccaagaagggcaagcaggaggctggtccacgcgaccaccactctggccgatgcaagggcaagtgggagtacacctctaacaagcagaagtctaagggaggattcgacaaggaggcgctcaagaagaagtacctccaaaaggcgaagatcaaggagtgtgccttcatcgcctccctcagcgacctcgaccacgactccgacgacgcaacgtcttcctcgagtgacgaggagactgacaggcggattgaggacacactacaagaaaacgttgaaggagtgtcggttatttaa

SEQ ID NO: 13259 - DNA, 330 bp, Zea mays
  Peptide Sequence Number=SeqID_55038
atgaacgatcgtgatttaaacatccgaagggggactcaacgtgatgtttataatcatggcggctcggagaggggattcttaccgatggtgaacgcgcagggaacccagaccacgccgatgtgtggccctgcggcagcgccgaagtcgcgacttcttctattcgcccccgaaaatcatactggtgaccaacaacggcagagcgcgacgtggaagatggccagacttggtggcggcgacctcctgctctccccgaatgacaagcaccgccgcgattctaccagtcaggcagatacacgccaagctccgcccactccgtcgcgacgaggatag

SEQ ID NO: 13260 - DNA, 210 bp, Zea mays
  Peptide Sequence Number=SeqID_55039
atggagaagaatttggccctcaaaactaaccatgagaagaagggcacggttaaagtgcaagaagacactgaaagctcaagaaatggtgaagtgaatgatgtgaatcttgcacttatgtatctatcttcttgcatcgagggcatcttctgctcctccatagaaacttccttctaccgatgccagcagcctgcagatggccacttgatgtaa

SEQ ID NO: 13261 - DNA, 306 bp, Zea mays
  Peptide Sequence Number=SeqID_55040
atgtctatcatgagtccaatcacatctttcttcatgcttttcaaaacaagatctcttatgagttgcgatttggatggccacccaaggttaccatttcaagatcaacagggtgagaccatctttgtggaggaggagcacgacgatgctaactggggtgatctcaagcccactccaccgactgccccagttgagcctgcgtccaagactttggatgatgggcccaacatgagtacttccatgacttggggtctgctcgagctggagagtactaagcctacaggagctgaggctactggtgaggggtag

SEQ ID NO: 13262 - DNA, 3549 bp, Zea mays
  Peptide Sequence Number=SeqID_55041
atggccttagcagctccatgcaacaatggtgacgtcctagcgtctagggcttctgtcatgcgggtctacgagattaagggatgttttattacaaggactaaagtttatggccatgcctcccctcacaagctccctcctctcccgctccaccaccggcggctcctctacccgcgccgcggcagcggtcgcagcgatctccaggcccgccgcaccttcctcctcgtccccgcccgcccgctcgaccccgaggccgcgctccagcccggcgtcgcccttcgcatccggcctcgcgagccgcctctttcggcggccaccgcgcccgtcgcccgctccgcgtcgtctgcagccgccgtcttcgagcgccggtttgcctcagcggcgaccaggaactcgtacgatgaaatcctgacgggcctcgctaagccaggaggcggagaggagttcggcaagtactacagcctgcctgcgctctccgatccgcggattgatcggctcccatattctataaggattcttctcgaatcggcaatcaggaactgcgatgacttccaggtcaccggaaaggatgttgagaagatcctggattgggagaaaagtgcaccgaagcaagttgaaatcccgttcaagcccgctcgtgtcctcctccaggattttactggtgtcccagctgttgttgatcttgcttgcatgagggatgctatgagtaaacttggcagtgacccgaacaaaattaatcctctggtacctgtagaccttgttattgatcattcagtacaagttgatgtggcaagatcagcaaatgctgctcaggcaaatatggagcttgagttccatcgtaacaaggaaaggtttgggttcttgaaatgggggtcctctgcattccgtaacatgcttgttgtccctcctggatctggcattgtccaccaggtgaatcttgaatatctggccagggttgtgtttaacaatggtgggatcctttaccctgacagcgttgtaggcaccgactctcacacaactatggtagatggtcttggagttgctgggtggggagttggtggtatagaggcggaagctgcaatgcttggccagccaatgagcatggtcttaccaggtgttgttggctttaagttatcaggcaagctgaggaacggagttacagccacagacttggttctaacagtaactcaaatgcttcggaaacatggtgttgttgggaaatttgttgagttttatgggcaaggcatgagtgagttgtcacttgctgatcgggcgaccatcgcaaatatgtctccggaatatggtgcaactatgggattcttcccagttgatggaaagacgctggactatttgaagcttactggccgaagtgatgatacagtggccatggttgagtcctacctgcgtgcgaataagatgttcgttgatcacagccaggttgacgctgaaagggtatactcttcctatctagaacttaacttggaagaggtagaaccatgtctatcaggaccaaaacggcctcatgatcgagtgacattgaagaatatgaagtctgattggctttcttgcttggacagcgatgtaggattcaagggttttgctgtccccaaagaatcacagggcaaagttgcagaattttcgttccatgggactcctgcaaagataaagcatggtgatgttgtaattgcagcaattaccagttgcacaaacacatcaaatcctaatgtaatgctgggagctgctttggttgccaagaaggcttgtgagttgggcctggaggtaaagccatggattaagacgagccttgcacctggttccggtgttgtgaagaagtacttggataagagtggtttgcagaaatatctcgaccagcttggctttcatattgttggctatggttgcacaacctgcattggaaattctggagagcttgatgaatctgtgtctgctgcaattactgagaatgatattgttgctgctgctgtgttgtctggaaacagaaattttgaaggacgtgtgcatcctttaaccagagcaaattaccttgcttcccctcctttagttgtggcttatgcattggctggcacactaacaccatcaatatcgtcgtctctttatagcattgatcctaaatacctaaagcactacatcgtctggaaaaagcatacatcaaggaatattctttgtatgtcctttgtaattgggaagtcatcaaggcaaaaagatcggtaccaatatacttctccactcatcaggtgttggctaccaacacgtcaaaagctaccgcaaagtctaaggctcctccctcatgattctaagtttctaactaccatatccaaaacctccataaaccgccttgaaacccgcactcgttgtgcctatatgtccattgacgtctcctatgaaaagcttctcactaatagttgtctctgtgtaccaaagcttgaagctggtatcacccacctcgtttgcatttcagactttttacatttagtctcttggacatataagatatttacccgtcttccagtcgttgtttcaactaactcccttaacttatctgttaatattgattttgagaaagaacctattggcatctcgaaagatggaaaagaggtttacttccgggatgtttggccatccacagaagagatagccgaggttgtcaagtcaagtgtgctccctgacatgttcaagagcacatatgagtcaatcaccaaaggaaatcctatgtggaatgagctgccagtctcaacaagcactctctacccctgggatccatcatctacatacatccatgagccaccttacttcaaggatatgaaaatgagtcctcctggcccgcggcctgtgaaggatgcatattgccttttgaattttggtgacagcatcacaaccgatcacatctcacctgccggaaacattcacccagacagcccagctgcaaaatatctgaaggagcgtggcgttgaaaggaaggacttcaactcatatggtagccgaagaggaaatgatgagatcatggctaggggaacctttgccaacattcgtcttgtgaataagttcttgaagggtgaggttggacccaagacaatccatgttccatctggggagaagcttgcagtttttgatgctgctatgaaatacaagaatgaagggcatgacactattatcctggctggtgccgagtacgggagtggaagctctcgggattgggctgcaaagggcccaatgctgcagggagtgaaggctgtgatagcaaagagcttcgagaggattcaccgcagcaatcttgctggcatgggaatcatccctctatgctacaaagcaggggaggatgcagacaccctgggcctaaccggccatgagcgctacacggtccaccttccaaccaatgtgagtgagatcaagcctggccaagatgttaccgtgacaactgataatggaaagtcgttcacttgcacactcagattcgacactgaggtggagcttgcttactacgatcatggtggcattctaccatatgtcgctagaaagatagcggaacaatag

SEQ ID NO: 13263 - DNA, 444 bp, Zea mays
  Peptide Sequence Number=SeqID_55042
atggtgacttcgggcgaggcggggatttgcctgaggttggagaccctcggggagatgcctcgggttaggagaccagtgagcaacaatatttcgcacttatgtatccacacctataatattatgctagtaacttgctcagtactcaccttgaggattctcatgactgaacacacactcccacaaaagctttacccagtacaaaattctttccctagattccgtctgagcaggaaaggctccacaggagtccatctctccaaagccaagggacatggtttctttgttagcacacctttccggctttcccagctatcatgtccagatgaagaggaagggtggaaagcctcaccagtctcctgcgcagtcatcccagaattcactgacattcttaaggtcaaattcctggacaatgccaactcccaatacagcgacttgatatcctga

SEQ ID NO: 13264 - DNA, 228 bp, Zea mays
  Peptide Sequence Number=SeqID_55043
atggacattgatgttgttcagctgaagaagatgcaccaagaaaagcagctggacacacttgtcgacaagggcctggagagcaaatatgaccgcattgagctagaggagatggtgcaagtggcgcttctatgtacccagttcttccctggtcacaggaccaatatgtcagaagtggtcaggatgctggagggtgatgggcttgcaaagcgggatatgttggtattgtaa

SEQ ID NO: 13265 - DNA, 714 bp, Zea mays
  Peptide Sequence Number=SeqID_55044
atggcggcgtccacggcttctgttcgagaccgagcgaggaagggggaggtcctgatgagtgggtcccatagatcagtgatacggcgcacgtcaacagactggccaccgggcccctggtgtaagtgcgcgcaatcgtggagaaatggaggagtgcgggagaagaaatgggccggttgcagagaactgggccaaaaggcggcgctaatgaaggtgggccagaaggcggcgccccagaaggtggcaaaggagaggaccaatgaaggggtcgaccgtcttgaacgtctcgacgtcgaggacgggcaggccatggctgaaccttccaatcgcagagaacagcagaaggcagaacacgtccccgccggccagaagacccagcttcctgcgaacgaacgcggtcgaagcaatgagaccacgggaatgggaagggcgcgtgtgacaggtcacatgataaggttcgtacacgtaggagacgagcttggactcggtggcgcatccccgagcttctcaatctggatgacgccctcgagcggcacgccttcgtcggtgacgcgtacgaggaccgggtcctcggtggaggaggcggaggggccctcacccgcggaggctggggtcggcgcggcgcggggcttggtcggcgccagcgccggagagcgccaggcggcgacgcaggaggcgagggttggcgaagagcgggtaggggcagccggttgctag

SEQ ID NO: 13266 - DNA, 234 bp, Zea mays
  Peptide Sequence Number=SeqID_55045
atggtggtcaggaagggcttagggcaagcacacgggatagtaaacactggcagtgatcccattgaggatagcagcagcagattgcaacttttagaatacccttatatccaagcaacggtaacaggccaatcacttgatcttccgaatctcggatttgcgagaaaatggcgctgtgttattaactcagggaatcgaagaacatacacggtggtcagggaattgaagaacatataa

SEQ ID NO: 13267 - DNA, 318 bp, Zea mays
  Peptide Sequence Number=SeqID_55046
atggccctgagctctcctccctcgccctggcgcaaagttcggcacccggccagccggcgggcgcgctgggctgcctgcggctacacgtacgtcgtaatcccgctctcccgcctcgcccgccccggtcgtcccgggctcccggccacaacaactacacatagacacatggcgcatgatgagccaggtttcgcgtacgcggactacttcgcggcggcggccggcgccggggcgacgttcgtgccggaggtggacgtcggcggcggcggggaagagggtcttcacctctacggcctgcagccgcaccaccagcaccccggg

SEQ ID NO: 13268 - DNA, 153 bp, Zea mays
  Peptide Sequence Number=SeqID_55047
atgcccaaacagaggactacgcctctcatcgtgatgttcggacaaggtcacgaggaggatcagatgttgcagttccacaagctcatggtttctccagtgttcgccaatagggcggatagtgttgtcttcttggacctaggctacccaagatga

SEQ ID NO: 13269 - DNA, 555 bp, Zea mays
  Peptide Sequence Number=SeqID_55048
atggtggaggagatgtactcggaggagatgaaggaccccaaggagggcgcctgcagtaacgcgaacagcagcgtgaacactggcgccggctacgcctccgaggagctagggcagccgctggggcacgggggcgcctgtggtggcgtggacgagcagaagccgacgcgggcgcagctggtccacgacgccgggtcgctagcatcagccgtcagcatcggcagcagcagggaccagcagcagatcagcagcatcaacttccgcatgatggaccacctcgacttcgacgcgtacagcggcgaccccgccgcggccggcgggccagcagctgggttcggtggtgctggtgcttccggcggcgtgtcgctcacgctcgggctgcagcagcacgccgacggcgacccccacggcggcgtcaacatcgcgttcgccgcggctccgtcggccgcgcacgagttcctgttcatggcaggcggcggcgagcatcggataggtcgcggctggcgccgtgcacccgtcgtcgtcccacggccacgatatttatcctcaaaaatctga

SEQ ID NO: 13270 - DNA, 318 bp, Zea mays
  Peptide Sequence Number=SeqID_55049
atgtcgccgcaccgccaccgctgcgccctcgcccgccgcgccatctcccaccgcgacctcgcctcgcccactaccgcgccatctcccgccgtcgtgaccctgcacctcgaccaccgccgcgcccttgccggcgcccgcccgctgcgcctcgccctcgcccgaccaccacgcacgggacctcgcccaccgccgtgccatctctcgccgccgcgcccctgcacctcgcccgctgcctcgccgacgcccggccaccgcgcctcgccctcgcccgaccatcgcgcccctcgcccggccgccgcgcccgcgcccctcgcctga

SEQ ID NO: 13271 - DNA, 495 bp, Zea mays
  Peptide Sequence Number=SeqID_55050
atgatggttctcgccttagttgctaccacctcgttcgccattctacttcttttctctctcccctcatgcctccacctccgcgccaccccattctcggcagagtgcgtagaagcatgtgcctccttcccgtattcgtccgacaccgactcgctcagtggctattgcatgtccacgagaacgtttcacatcatgcgcacaccatcattttcatcgtcgtcggacatcccgttcatcttcccggccttcgcactgttcttcatccccaacctgttgcccccgcccacggtcacagccacgagccgaccgacgctcgtcgacgcggccctaaccaccaaaaatggccgttggaagactgctgtcgcatggcgcaccggacagtctggtgcgccacaggacactgtccggtgcgccagccacgtcagcgagccgttggggttcgactgttggagctctgacttgtggggcctctgggctgtccggtggtgcaccggatag

SEQ ID NO: 13272 - DNA, 273 bp, Zea mays
  Peptide Sequence Number=SeqID_55051
atgcagagcatgcgttgtgttcttctctgccttgccatgagatatgaggctctgttgcttccagatgctaaatactgcaacgaccttcacttgaaagtgtcccgtttggagtggctaacttttacaacgtattgtcttgataatggtttctacaccattgtctccaagatatatatcttcttcaacgatgttattcactacgggtccacttctagaaggtatgtatctgagaaatattttcctcatcgcaaggttttatccgatgccacgtag

SEQ ID NO: 13273 - DNA, 492 bp, Zea mays
  Peptide Sequence Number=SeqID_55052
atgggtaagagcaagaaaagctcgagctcctcgcaccattccggcaataagcggaaacgcgagccgactcctccctcggaggacttcggcgattccgagtacttggaggaggagttctcctccgagtccgaggaatcgctggtccctgcctctcctccggtgtcgtctgatgactcagacggctcccaggggatcaccgcagaggtgtggacctacatctgggccgtcgagcacgctgggctcgagggctcggatgagtcagaggtctcctcggaggaggagaactcctcggactcgtccgaggagggtggcggtggcggcgatggcgagggcgacgacgatggcggaggcgacgacgatggcgacagcaacgatgacggcggcgaaggtgacgacaagggcgatggcggcaacggcagcagcaagggcgacgacggcaacggcagcggcaagggtggcagcagcagcggcaacggcagggccagtggctag

SEQ ID NO: 13274 - DNA, 378 bp, Zea mays
  Peptide Sequence Number=SeqID_55053
atgaggaacccgccgggaaggcacctcctccgcctcaccaaccgcgcagtgcgctcttcttcttcctcctcgtcggcgcccggcgccggccccggcgcctccacctcggccgcgtccccacgcccgcgcgccatcgcggacgggcggcccctgcgcgccagctccccgcccccgccttccgcggtcgccgccgccgccgccgcgtactgggagtcccgcgcgctccgccgcgacggggaggagggcgactgggaggaggtcgtcgccggggtccccggtaccggggagatggaggaaggagaggagtacagggtggtgttctggtgcccgcccaccatagacgaggtcaccggcgcagtcaccagcatacaggagtaa

SEQ ID NO: 13275 - DNA, 762 bp, Zea mays
  Peptide Sequence Number=SeqID_55054
atgcagtgccttttcaacatggaagtctatgtatttctattttctttctatattattaaagctgaacgcaaagctgctcccacgttcatccacgtcagctctttatgtttctgccacatgatgctcttacaatgtccagaaatgtacgtcagaaagcgcaaccgtccgggagttttgagacgtgcgataaagggtcgctactggaattatgaaaaacaaagccgcctccttttcaccgtcagcgccaccatcacagcgacagaagctacgaccgaatggggagcagattgctatttggtaatagattcagatagtgcaagtcctgatttcgtagtttatccacatttttgggggttagggtttagggtttacccatattcgcccaaagacataaatatcacttcatattatacttcaaactttatagagatacttaatatcattcgcaacgaagaaaccttgaatggtgaaattgaatcaaatcaacatagcaagcttatgttagccaacccagttgagaacttcactatcattgttgatgcagatgatgacttacttaaagttggtacaagcatttgctcttcagcacctaaaattgttgaaccccagcagcaacataactgtacctctgtaacagaagatcatctgacaatccctaaagaagctgacaatgtttgtgggcagcattatcctatcactggtgagaatttcagtcttctttggctggtgtctactgtatttcatattgatttaattgcatga

SEQ ID NO: 13276 - DNA, 1290 bp, Zea mays
  Peptide Sequence Number=SeqID_55055
atgcaacacgaagaagtgtgcgatactactacctgcggtgaaggcaatggtcgaggaggtgaggaagaactcgagatggaggggcactcgttgatgaggatgaagaggagggatcacttgctgctcactgacggcgccggcgccggcgccggggcggggcctcttgcggtgcagacgccgatggagcccatggagttcctgtcgcggtcgtggagcgtgtcggcgtcggagatctccaaggtgctggctggcggcgtcggcgggaggcggagctccaacttcgtcgtcgaccgcctgtccgggatgctcatgccggagacgctcgcgctcgcagcctcctcctcctccgccggcaccaacaacatcagcccccgcaagcgcaccctcaggagcaggagcgcgatctccgcgcaccaggtccaccacacggtccacgcgatcggcaagtggttccaccactgggacgcgggcagcagcaaggtggacaaggcccgcgccgagcgggcgcgcgtgcacgccgcggtctccgtggcgagcgtggcggccgcggtcgccgccgtggccgtggccgcgggcgcgagccccgaggtggacgtcaccgacgacggcgccaggatggggagcgcgctggcgtccgcgacgcagctgctggcgtcgcactgcgtcgaggccgccgagctcgcgggggccgaccacgaccaggtggcgtccgccgtggagaccgcggtcgacgtgcggagcccaggggatctgctcaccctcaccgccgcagcggccacagctctcagaggggccgcggcgatgcggcacagggcgcagcgggaggcgaggagcagggcggccgtagcgccgtacgacaaggcctgcagctaccgcgcggacgtctggtgcaaggaaggcgcgctcctcaaacgcaaccgcaaaggcaagcgcgctctgcactggaagcaggtggccgtgtacatcagcaagaagtcgcaggtgatagtgaagctgaagagcaagcacatcggcggcgccttctccaagaagaagaaaggcgtcgtctacggcgtctacgacgacatcccggcgtggccggcgcgcgagggcgtcgccgcgcaaagctcggcgccggagacgtgccacttcgggctgaggacggcgcatggcctgctcgagttccagtgcgaaagcagggcacagaggcgggactgggtggaggcggtgaaggacctgatccggcaggtggccggcgggactgctctgctcgagcactccttcgagtcgctaaggctgagcgcgtcttga

SEQ ID NO: 13277 - DNA, 507 bp, Zea mays
  Peptide Sequence Number=SeqID_55056
atggggagccgcactagggggggggggctgctccctgcgcgcctcgtccgaggccggacagcgccgccgaggggggccgcgccgagctccgagccgcctcggtgggcagagcgccatgtgcctgccggtcgtgccctgcccgcacaggagccgggccggtcgcgctgtggcctaccaccggcggacgtcgaggagcccgcgccgggggccgctccaaccagccacgtcaggccgtccttgccgggacccggccgagaccgcttcggggctgtgcgccgcgcgcccggtggccagcgcccgagccgccgggggccggacgctcccgcctggggctcgccccacgcgcgcgcccttgaccgcgccgttgaggccgacgtccgagggctcatgctcgagtcgcaaaggccggcgtccgcgcctacggccgggtcgcgtctgagcgcgcttgcggcggagcgctcgggcaggctaggccgcccatgccctgcccgcatctgccagggctaa

SEQ ID NO: 13278 - DNA, 282 bp, Zea mays
  Peptide Sequence Number=SeqID_55057
atggtcggagaggaaatccaccgatgcggagacggaccgccaaaacggactgcgatttgtggccgcttccgcttccgaggcgaacggacttcactggtcagcaacaggacgtggtcctcgtggtcgtcgtcggcgccgacctccaccggctccgaatcggccttgtgccgccagatccgcgccgcgtcgccccttctcgcccgcgttcccgagagccgtcgagatgaagagaagtggacctggaactttccgccgtctggcgcgggcgccggcttccgctag

SEQ ID NO: 13279 - DNA, 447 bp, Zea mays
  Peptide Sequence Number=SeqID_55058
atggcgcggtcggtcacggggtctttggtcggccgtcgatttcgagccctaggcgctgctcggcggatgagcagggcgcgtcgtcctgtgggcgactgggcaggagctcgggtcgcatcgggcgcgttcttgcgggtgggggagggcgtcggggttggccggctccatgggagcggacggagcgtcgcgcatcgagctcgcggacgtctaggagcagggcgcggctcctggcgggcgttgctggcgtggggctcggggcgcgcgccgcccgtgcggggctcggccaggcggcttgcgcggcatggagaagaaagcagggagagaggagagagtcgggtggggcccgcgcgcagaaatgggaagaggaagagaagatggcggcggctggagaccagggaggaggttggggcggcgactgcttctagttgggcccctagtgggctttag

SEQ ID NO: 13280 - DNA, 461 bp, Zea mays
  Peptide Sequence Number=SeqID_55059
atggcgacatgtatgccacggctggcacgcagaggcggctgccgcgcgtccacggcgcgtccggcggcgtcggtctcccttctcgagcgcattcgtgatgtcgtgctccgcctcatcatgctctccgccgtatccagggcctccacgcagcccaccagcagcagcggaagcggcaagtcggccaaagcctcgtcgcccggcgatgccagccagcaccgtgaatctgacacgtgcgtggcagtggcagcgacgtgccgccgggaggactccatcaggaacgaggccgtggaggattgcatcgagttccttaaacggtcgtcggccgagggcgacgccgccaagctctccactgtcagcgccgccgacggcaatctgaccgacgtaggtggggaggacaaagagataggggcgttcttcatcctcaacgtcgaggcacggcgtgagatctcaccgagcagcgg

SEQ ID NO: 13281 - DNA, 186 bp, Zea mays
  Peptide Sequence Number=SeqID_55060
atgtccatggacaatcatagatcccgttatcaagatgaatacaatcaattccagacctcacgggcttgccttcaaatgcgggtgcagcgggaggttcttcggcgacgagttctggagttggttcccgagcctcttcttcttgatgtgcctcttgctcttggatcaagacgtactctccgcccgtga

SEQ ID NO: 13282 - DNA, 210 bp, Zea mays
  Peptide Sequence Number=SeqID_55061
atgcgcgatgtcccgttgagggcggatctgaccgctatggtccaccggttagcggaacgggcgcagggcgcagtaacgggtctgcccttggccccatttgtcagtatgcttcaggatatggttgatggtgtgacttggccaaccaccctgccaccgggttggacggtcgagtgggatgctgctccagcaggagaggagcaggaggagtag

SEQ ID NO: 13283 - DNA, 177 bp, Zea mays
  Peptide Sequence Number=SeqID_55062
atgacgaaagatgaagccgtactgaacacgaccctcaacctcaccgtgagcgtgctctgcgggactcatcagtcgagccccatggtgtacgaggttgccatcgtcgaccagcagccaagctctgccctcgacacctacgaggatggcccaagtcaccgcttaatcgaagaagtctga

SEQ ID NO: 13284 - DNA, 609 bp, Zea mays
  Peptide Sequence Number=SeqID_55063
atgtggtcgggctcgtccacgggggctccttcgccatgtccccctcagccggctcttctgacagcgccctcctatggtgtcccaccaccctcggcacctctggctccgcccccgttctcacttccggggactctaacctctgtcgtggttcccgtgccggttcccatgcctccctaccatgtgtgtgtttcccttcacgactgtcagcttctccaacgcacatttgtggcctttgaacgagccatgaaccctgttctccgtgtcagcgtcgagctccagcctcagacgggccgccacgctactgggtcgcttgtattcaacagtgttgcgattgcctccctagcgatcaaggccttgtcatctccactgttgaaaccgttctccatgactgcgtcgagctccaacctcagacgggccgccacgtactgggtcgcttgtattcaacatttttgcgattgcctccctggcgatcaaggccttgtcgtctccactattggaaccggaccgccgacacatgtcgtgtccgtcgggccgtcgacacacacggcgtgcccacctaggccgtcgggtcacgacacacgcgctcgcatgcatagcagcgggctttag

SEQ ID NO: 13285 - DNA, 420 bp, Zea mays
  Peptide Sequence Number=SeqID_55064
atggagtccgggtggcgtggttgttgtgcggaggagtggtctgacggtggtgaggaactcgggcggcggctgccgaccgacggtcggagcaggggaggagctggcggtgggtcagagacgttagcagatgggtgtaggtcggcgtcgggggtcctggcatcggcgctgcagtggaggagacgatgcggtgcggagacgacgcgacgcagacagttggaagcggcggactgtggcgcttccggacggtggcgcagatggaccactaagagacggttgaaggcgaggaaaggaggtgggaggtggcctagggtggccgttggctgggagggaggggcggggagagaaaaaagcctagttctataccaagttggaatatgtgaaaccctaaccctaatccagggttgggagtatactatatag

SEQ ID NO: 13286 - DNA, 924 bp, Zea mays
  Peptide Sequence Number=SeqID_55065
atgacgcaaggtgcaaggcaagagggcatcgacaagagtcgcactaccatacgcggatacgagatacgaccatcgtgccataccagatgccagccaccgggtactcgaccgttaggtacctgtatccgacctgagacgtatgttccatccttcttgccaccatcatttgcaaaagagcctgagaaaaagaaggaaggggagaggccaaaggaaaaggaaaaggaaaagggaaagccacgagtaatagatagattcttggaggaaatcaagcttgaacaagagcagcgagagaagcgccatcaggatcgagatcaccgccgtgaaggtcgccatggcgatagctccatgtcctcgagccggtttgatgaactaccagatgaatttgatccgactgggagatttccaggatcatttgatgatggtgatcctcaaaccaccaacttatatgttggcaatctatctcccaaggtcgatgagaattttcttttgaggacatttggtcggtttggacctattgctagtgtcaagattatgtggcctagaacagaagaggaacgcagaaggcaaagaaattgtggttttgttgccttcatgaatagaacagatggacaagcagcaaaggatgaaatgcaaggtgttattgtgtatgactatgaactgaagattgggtggggtaaatctgttgctcttccgtcacaggctttgcctgctcctcctccaggacacatggcaatcagaaataaggagggtggtacagctacagtcatactttctggtcctggcggccctgctgttgcatctattaaaccacaaacctcagagctgaaaatacatgatctcttgaatcgtgtagactgtagactgaaagggagtacatggcttgaagataaggaaggttatcccgagattccaatcaaatcctaa

SEQ ID NO: 13287 - DNA, 324 bp, Zea mays
  Peptide Sequence Number=SeqID_55066
atggacgacaaacgtctcaggagggtggttcgccctcgatcggttgatcacgcctatagcgtgcgaggcggagatgacaatgtcgacgtcgatggtggagccttccgatcggtggtgacgacgatgagccgacgtagattcacgtgcagacgaagggacgtgacacatggaggcgcttcagttacattgcagtccacgccagacgttgaagaagatgaagccggtgttgtcaaagctgatgttgatgatgcacgagtcgacaggcggtgggcgacggggacgcaaacccgatcacaaatcggggaaaaaatggaaaagacatag

SEQ ID NO: 13288 - DNA, 2379 bp, Zea mays
  Peptide Sequence Number=SeqID_55067
atggagtggaggctgcaaccgagtcgttggttaggggcgaacgacgcgctggtacggattcgtggagggcggcagtgtgcaggtagggaagtcgccaaagcctacatccgtggagagcgtgcggctcgtcgagctcgtcacagacgcaactggaagcgacggtcgagcacaagcaagccggaggtggagctaccaccgaccgccgtggagtggaggctggagtcgagtcgctcgcgaggggcgaacgacgtccttacaccaaatgttcctgatattgtggttgctccacctgatgatgggcatcttcggcatgtgattgacacaatggctctgcacgtacttgatggtggatgtgcttttgaacaagctgtaatggagagagggcgaggaaatcctttatttgatttcttgttcaatcttaaatctaaagagcacacatattatgtttggaggctatactcatttgcccagggtgatactctacaacgatggagaacagaaccctacatcatgatcacaggaagtggaagatgggtcccacctcccttgtcgtccaacagaagccctgaacgtgaaaaggaatctacatttgctgctggtagaagcaggcgtgttgaagtggagcgtacattgactgactcacagcgtgatgaatttgaggacatgctgcgagctttgacattagagaggagccaaataaaagacgccatgggatttgccttggataatgctgatgcagctggcgagattgttgaggttcttacagaatccttgacactcaaggagacgtctattccaacaaaggttgctcggcttatgctagtgtctgacatccttcataacagtagcgctcctgtgaagaacgcatctgcattccgaacgaagtttgaagcttctttgccagatgttatggagagctttaatgacttgtatcgcagtatcactggaaggattactgctgaagctctgaaggagagggttatgaaagttctacaagtttgggcagactggttcctgttttctgatgcatttcttaatgggctgagggctacttttcttagatcaggcaactctggtgttgttccgtttcactcgttatgtggtgatgcacccgaaattgaaaagaaaggtagctctgaggacggaaatgatggatttaagcttaatgaagacggtgccttggctactggaaaggcagcagcgacaaaggagctattagggctcccgctagctgaacttgagcgccgctgtagacataatggcctctctctgtgcggtggtaaagaaatgatggtcgccaggctgcttaacttggaagaggctgagaaggaacgaatttacgagaaggatgttgacgtgaaatatgtgcagggtgaacagcatgtggttggaagagaggacagtggtgtgaatgctcatagtacttcaaggtttggtgaaggttctaatggtgatgaattagatgtctctcggaacagtatgagagctggtaaaggacgttctggaggatctgcttctgccgaacttgaatcatttccaagcaagaagccgaaatacgatcctgttttgccagcttctaaatggagtcgagaggatgacatcagtgacgatgaagataggaaaggtggccgaggcttgggattaagctattcgtccggaagcgatattgctgatggtctcggaaagaccataagctacttttgggctcagtctatagttacttttgagtttcaatccagctcatgggtgaagttttggcagaagttgaggcagattgaaatttctgtcatgcagtaccgtgaatctcttgaggagcagggtctgcgtgacttggatgagattgagaggaaggttgccagccatcgaagacgtctccagtcagaatatggtttatccactccaactgatggtgctaacagcaggcgatcttctgcatcattgacttccacaactccatatattactttgggcactaacaatgagccatgctgtacccctcaacttcattcagtcttcgctgctcctatattttgtaagctaggcacgcattttaaacagtactctattttgcagaaagaacatcatcgtcgtcggagcggaaagagaggcatggcgatgcacatgatcatcctaggaaacgtcgccggagccagagtagaagctgcagtcctccaaggaagtctcaggagagggatcgagagcacaatcgcagtagggaccgagatagggtacgcgagaaaagtgcaagccgagggcgagacgaccaccacgacagaagccgagatagagaggacaggagaaaggggaggtgaccgacccgaaaaacctcgtcactatgcaccatttgccctaaccgaagggcccaggagcatcatttga

SEQ ID NO: 13289 - DNA, 441 bp, Zea mays
  Peptide Sequence Number=SeqID_55068
atgtcggatcctcggaggcacgcgccgcaaagtggaaaacagcgccactcgccccgctccgactactgtgccacccaccagggtcaggctgacaacagccaagttcagcctcaggcacaacaggaaactccgcctcgcccgaccttaggcctcggcctcggaaggtggtctccgcctcgcccgaccccagggctcggcctcaacctcggcctcagaaggaagtcttcgcctcgcccgaccccagagctcagcctcaacctcgacctcggaaggtggtctccacctcgcccgaccccagggctcggcctcaacctcgacctcagaagaatcgcgtcctcgcccgaccccggtctcggcctcaggagaagtctacgcctcgcccgaccttgggctcggaccgatcacgccacggggatacatcattaccctacccctagctag

SEQ ID NO: 13290 - DNA, 648 bp, Zea mays
  Peptide Sequence Number=SeqID_55069
atgacggatgaggagatggacgtagccacagaaagacgactggagtctccgcctcgatgcgattatggagatcgtgctatcttatgtgaggacactgtgaaagagtggttatatggttctatgtcccattggcctgagccagagacaaaggaaaagaaaaacaatgagtgggtagaagagttgaagtctgatctagtactctgcaaatgtggtattgaagctaagagacgagaaaatgcagttgggagagatacgtcgataaagaagagcccgatgcgtgttgagcgaaggagattgaaggcggcaaatgcgaagagagcacatgatgcaagggaatggaaggcggctagagctgagaaacagatgttggggaatcttgctggtcgtctgagtggaagaaaaatggcgacggtggagctaatggtggaggaggacacatcaaggttgagtgagcttatcgcgcttgctaaggcaggattacatggggaagaggaggacgacacatcaaggttgactgagctcatcacactagctaaggtaggattacatgcgcaagaggaggaggacgagtttatgtctcaggctgtcgaagaagtagagtcctcttattacaagcagaagtgtgatgaggctaaggctgaggactag

SEQ ID NO: 13291 - DNA, 906 bp, Zea mays
  Peptide Sequence Number=SeqID_55070
atggaccagcgcgggtgggcatggcttggcgcgggtgcgtgggctggcgtgcaccgggcatctgagtggttttgggtcaagggcagagagttgtcgcctcgtcaatgtgccagtgtcacaaggccgagttccgagtccattccggtcaattccgccgaaggtgaagacccacagcactgtgcagggagctggatgaggaaagcgacacgaccgagaaggcgttatgaccaagctcaattagctctcgaccacgcaccagatgctagcaggacgctagcgagtagatcccactttcttcttgaacaaagggatgcatgtgagcgttctgcctatgatcttttggcggcgaagggcgaggccaccgaagcccatgcctacgccgcgttgatccatgacgcttacgatgccttggtcgagacgacaaggagggatgcaaaattggcgacccttgcacatcttggtagtgtgaaggtgagctccctccttcgtatcctagagcgaggaaaagaggttgccaaggcccgagtcgcgaccttggaggaagagttaggaggtcgaaccaaaaaggaggagaagctcctggcctcttggcaaggtagcgccttggacagcctcttccaaaaattatgcatctgttgctcgctttcccctttttacggctcatgtcctccaccgtcagccatacaagggaaattcgatgacgccgattggaattgtttcaaggtgcaatgtcgcctagaggagctggagaacgagaggcgcctcctatcaaaggtggtgggcaccatgtgcgggcgcatcgaagcacattgtttgccttggttcaagttgctggtctctcgcctcgagggcctcacaggcctgtttcaggagctcgaggtggaatctttctgccaagggatctga

SEQ ID NO: 13292 - DNA, 348 bp, Zea mays
  Peptide Sequence Number=SeqID_55071
atgacgctgctcaaacctcgtgccttgtgcggtgccgtagctactcgcatgtcggagagcgccgcttgctcgctagccttgggagtgtcgccgcctcagggccccggggatgccgccgcttgcccgcacaggggccccgccatcgctcgccctctagatcggggagccgccaccaccgtgccaccgacctgggaaccaccaccactactccggattgaggagccgctgccaccgcacgttcgggtcaaggagccaccgccaccacagccaccgatcgggggtccgccgctacgcgcgctctcgggcaaccaccgctgtcgcatgcgccttgctgggcatcgtcgctaa

SEQ ID NO: 13293 - DNA, 417 bp, Zea mays
  Peptide Sequence Number=SeqID_55072
atggcccactttgcctcccctatggatccgcctctgccattctccatggatttgtcagttgttgtcgcattcttcgcatcgccagggaagaatgagagttatagacggagtggattggctcacaacccatcatatgcttgtaggatttctgagagaagatcctcagaggtcctggctgacacacctctggggatgctcatgccagcctccagagtgggtgatgggggtgaggcgctacccggaggacaaaggttcatcggggtgcgaccaaggggtgtgggcttggacgctgccctcatcaatgcacgagccacctttccctggatgcccttctcgccttgcgcgactgcgattcttccccccgcatcccctggtagagggggcgtggattctattttcatgggggttgtagcatag

SEQ ID NO: 13294 - DNA, 1629 bp, Zea mays
  Peptide Sequence Number=SeqID_55073
atggcgtcgcagccgccgccccctgccgcagccgcggcatctggagctccgccgccggcacaagtggtgggcaacgccttcgtgcatcagtactacaacatcttgcaccagtcgccggagctcgtctaccgcttctaccaggaggccagctgcctcgggcgccccgccggcaccggtgccgacggcatggacacggtcaccaccatggacgcgattaacgacaagatcgtgtccatgggtatcgaccgggcggagatcaaggcggtggacgcgcaggaatcgctctgtggcggcgtcagcgtgctcgtcatgggtcatcttacggggaggaacagcgtcagccgccagttcgtgcagtccttcttcctcgcgccgcaggagaagggctactttgtgctcaacgacatactgcgctacgttggggaggggggaggggacgagggggctgagaagcagccagcacctgaggttgctgcggacgcggagacgaccacctctgcccctatcctggccaacggcactgtcggaggagacgccacgactgttcctcaggatgcttcgccgcagcctgagtgccaggtggccgagcctgcacttaatccaaaggaggaagttctgaacggggaggtttgtaactcgctaagtgatgtggagaagcctgttgctgaggaaacgccggttcctgatgtcataaatgaagtgccaaataatgttgcagtggctccaccaatttcatcccctcctgtaccattgaaggaggcaccaaagaagtcatatgcttcaattgaatctgtggccaagaacctcaagtgcacgatcccgtgctcctacttgatgaggctatgggtgtggctgatcgcgttgctggaggccgaggaggacagggagacacatgacgtgatacaggcacagtgctgcatgtgtgcgcagctggggaagaactggatctcatgcacggtgcttaagggatcttcatttgtcattaccttgtctctgttgacgctggtcgtgactaccgctgctttctccgccttcattgatgcggttgcctgttggcagcaggcccccacttgcgcttggcgtgtgcctatgatcggaaatggaaaaggaaagaggagattttgccatattcccaacgttgtctgtaatctgaagcttaaatgttgtgaagtaaaagtcatgaaagaacatcggccattagcacctgcagttccttccagacctgcacccccaataacagagaagcaagcctctcctgcccccactccagttactgaggctccagctttctcccctaatcctcagagcggcggctttcaagatccagaagttgatgcacatgccatatatgtgcgaagtctgccattaaatgccacaccacaacaattagaggaagagttcaagagatttggaaccattaaacatgaaggcatccaagttagaagcaacaagatccaagggttttgctatggctttgtagaatttgaggatgccagtgcagttcaagctgcaatagaggcttctcctgttactattggtgagcggcaatgctttgtcgaagagaaaaggactactggttctcgtggcaagtccataaaatcccttgactttattttgtacccacaataa

SEQ ID NO: 13295 - DNA, 999 bp, Zea mays
  Peptide Sequence Number=SeqID_55074
atgactgatggatctaatacaagtaatgctaatggtgttccgattccgggggcggggggttcaactgggatttatgaggaccacccaggtctgaacccgaccgatgaaatggtggtggaatatcaagccggtataagggagcaaatgagtgaattaatgaggatggacggggagcaccccgaagttgtggctgccgccgaacgtgtgcatggagaaagcgataatatcgcatttttgcaagggcagctcgaggatttaagggcgcatggaagagaaagtgaagctttcaagtacggagtgtcgaatgacgcggatcttcctggaggaggaaacccagcgggaagctcaggaggagttgacctagcgaatggaaatgaggcggggagttccgcaggagttgacctgatgaatgtggatgatgctgcaggttttgcagcagagagccccctggatcaatttggaattcacccaattctggatctgaatattaatattggtgagtactatgtctcattcacaaatctatccttgtctatgctactcactctcggtttggtcttacttctgactttagtatttatggaattgtccggccagaaacggggaagagcccatgctgtcgtagaggcctcgtcgagtgcttccgctatgcctaattctgaggatgacgataagcggaaaaaagtgtcccgccaagacgccaatggcaaagagtcagagccgcccataaatggggcgcaacctgaagtaccatccatttcgttcttaaagaaaagaattaaaacagttctaaggtcctgtcgagataggaaccctagggagagcacattacgctctacttacgaggatcttcaccttgaaacggcgagcgccgagaagcgggcaaccttggcacctttgcaagctcttcgcaacaggttccagggaggaatggatacgagtagcaacatcgggagatggaagctgacagacctcgtaattgaagcggcaccaagctga

SEQ ID NO: 13296 - DNA, 1731 bp, Zea mays
  Peptide Sequence Number=SeqID_55075
atggaggaaatcaagtctcatgttgctcctcagaaaatgcgtatagtatatagtaatagtaatagtaatctcattggcccactagataaggatgggacaaacgctctagtgtatgcgaaacgagcattgcgttttgtccgagaagttcgtgaaagagtgctcgttacatcaaaagagatggcgatgatctgtcaaatcgacattgtgtcggtgttcagtctcccgctcctgttctcaactatactatggctttcgttactatactatggctttcgttgggtagagcacgggagaataaagtctatagttaaaccctttatgattgcaacttgtgggatgcctggaatcccactaaatcgagaatcggaatcggtggaggatgtgcatagggtactccgagccctccccttatttagagaaatggaaggtatcttgcgtgagaggaacctgaatctcccgtcagtacaggaaataagcgctttccgtgtgaatctattctctggtatccggcgtgagagtgcgattgcggactacgacgctttttggcgctccttactcgaggagattcacacacctcagggacgtagttgttttggtcagagaatacaagatctgcacgcccgaatgtctgccgagggcaactgggactacttgattgcccaacaaggcagagggtattttggtaacctacctaatctcaacagcccgttggatcaatatcaatttggaattcacccaattctggatctgaatattggtgagtactatgtctcattcacaaatctatccttgtctatgctactcactctcggtttggtcctacttctggtgctgccaatgattcttcgttcattagaatgtcgattcctcacaatcgctctttgtgatgctgcggaaccatggcaattaggatctcaagacgcagcaacacctatgatgcaaggaatcattgacttacatcacgatatctttttcttcctcattctgattttggttttcgtatcacggatgttggttcgcgctttatggcatttcaacgagcaaactaatccaatcccgcaaaggattgttcatggaactactatcgaaattattcggaccatttttcctagtgtcattccattgttcattgctataccatcgtttgctctgttatactcaatggacggggtattagtagatccagccattactatcaaagctattggacatcaatggtatcggagtgcgcctcttaacgagggtgatttaagtgcaacaaaatgtaccggtgcagtggcatacaactttggacctaagggccggccccgttacctttcggaatgggggatccccgttggcaacaaccacggtagtagttgcggaactactgggccaagagaggacaacctgttgttcctgctcctccttcttcgcttcggggacggaggtcatacggtgtcaaatgtgatgctgtacctggtcgttcaaatcttacctccatctcagtacaacgagaaggagtttactatgaaagaagaaaaagagttgtgggatgcaagtcgaactagactgaatgtgccaggcttctatttatcagggccacaagtagaaagtgagtggaggcaaatgttgcatgcaattgactcagatgtccctccaagttttccctggaaccaaggtcataaaaagatgtatctagagtgggcgtcggttgacttttcttttatgggtgggtcaaacctagcctag

SEQ ID NO: 13297 - DNA, 270 bp, Zea mays
  Peptide Sequence Number=SeqID_55076
atgagaaacatatacactcactgtgttacaagcaagactgacagaacaaaagacaacacctcaattgtccatgtacacgtagagaagactaagagcgcacactacaacatctggttgtctttctatctaataagcaagcagtgggtgcaagaactgcagcaaagctatgcagatgatgactggatagagggattgaagaagcaagctaaagaagatcactcatacaacacaaagatcacagtgcatctaggcactgaatttattttttag

SEQ ID NO: 13298 - DNA, 183 bp, Zea mays
  Peptide Sequence Number=SeqID_55077
atggggaagggcgtagctggtgtaaaactaaagctatatcttttcttctttgcttgtaacaaacagagctatctaaagcttgaaaccatccccttcttccgtgaaaggagtattcttaacggacagtggtactccctcttcctcttcgtccgtaaatcggccatccccaaacccgaccgatga

SEQ ID NO: 13299 - DNA, 870 bp, Zea mays
  Peptide Sequence Number=SeqID_55078
atggcgctctccatctcctccctcgccgccgacctctcccacctctccctcccatcgacctccacccccaagcctcacccagccccgctcctgcgcctgcgctccacctaccgccgcgctgttagcctcgtgctccgtgcctccacaggcaaagccgccgaagccttcgaggcaggcctgcccgcggaggaggtgatggctgtcgaggaggaggaggaggatgccctgtcgggaatcgtgctgcaaaacactctctgggcgctcattcaccaggacgaccgccagcgggttcgcgacggcaccgcattcgccgccttcccggtctcgtccttcaccgtcgtggtcgcgctcgccgccgaggtcctcccgcccccgcagccgccaccgccaccacctcccgcgtgcgtccttgagatgttctcagaggaggagatcgctgtggccgaggactctgacgagattgtcccggtgatggagcccgtctcgatcgtgggcacctctgggcagatggagaaggaggtgagtgcggcgcgggacgttagggccatgaaggatcacatagatctcgaggcctcacagtcacagcaacctaggaagctgccacccaaggacctcaaggagatcgccaggagcttctggcttaccgcctcgatgttcagtaagaagtggcagaaatggaggggcaagcagaagctcaaagcaggaggcaaggaaaatcgtgggtctgatccaccgccgcgccacgagccacaaacaatggaaaaggctcctgtcactactaattcaacactcggaaagcaaatacaagaagatttttgtcaaagagaaatgtcgcaagatggaacacaacaaccattttcatcagattga

SEQ ID NO: 13300 - DNA, 429 bp, Zea mays
  Peptide Sequence Number=SeqID_55079
atgggggatggcggcggcggatccgagcttgggcgaggctcaatattttctgtgcgcgtgcgatttcagaagattagcgaggccagaggacgagcgatgccaggtagtcttatgcccccaccttcccccgcgagaataggtcctatggtaaccgaatcccggcgaatacggagctcaaacgcggactcgaggcgaagacggagctcgcagcgagtggggaggcgtcgggtcggcgaggagaagggaccatggggctcgatgcttatccacgggagcctaggggatcgtggaatccgcggcgtagctggcgacccggtccggattgttgcgaggatcacgatggctttcggtggtcagcgcgcacacccgaggatggcggagcttctgcgtagctggccccacatggcggtgattcgctgcgcgctgtga

SEQ ID NO: 13301 - DNA, 3135 bp, Zea mays
  Peptide Sequence Number=SeqID_55080
atgcccggcatatcgagggatgtcgccgagcactcgctggatattcaggccggagcccgacccgtcaggcagcctctacgccgattcgacgaggagaagcgcagagtgataggcgaggagatccacaagctaatggcagcaaggttcatcaaagaggtattccatcccgaatggcttgccaaccctttgcttgtgagaaagaaaggggggaaatgccggatgtgcgtagactacattggtctcaacaaagcatgtccgaaggttccctaccctctgcctcgcatcgatcaaatcgtggattccactgctgggtgcgaaaccctgtccttcctcgatgcctactcagggtatcaccaaatccggatgaaagagtccgaccagctcgcgacttctttcatcacgcctttcggcatgtactgctatgtcaccatgtcgttcggtttgaggaatgcgggcgcgacgtaccagcggtgcatgaaccatgtgttcggcgaacacatcggtcgcacagtcgaggcctacgtcgatgacattgtagtcaagacgaggaaggcttccgacctcctctccgaccttgaagtgacattccgatgtctcaaggcgaaaggcgtcaagctcaatcccgagaagtgtgtcttcggggtgccccgaggcatgctcttggggttcatcgtctccgaacgaggcatcgaagccaacccggagaagatcgcagccatcaccagcatggggcccatcaaggacttaaaaggcgtacagagggtcatgggatgtctcgcggccctgagccgcttcatctcacgcctcggcgaaagaggtctgcctctgtaccgcctcttgaggaaggccgagtgtttcgcttggacccctgaggccgaggaagctctcgggaacctgaaggcgctcctcacaaaggcgcctatcttggtgcccccagctgatggagaagccctcttggtctacgtcgccgcgaccactcaggtggttagcgccgcgattgtggtcgagaggcaagaagaggggcatgcattgcccgttcagaggccagtttacttcgtcagcgaggtactgtccgagaccaagatccgctacccacaagttcagaagctgctgtatgcagtgatcctgacgaggcgaaagttgcgacattacttcgagtctcatccggtaactgtggtgtcatccttccccctgggggagatcatccagtgccgagaggcctcgggcaggatcgcaaagtgggcggtggaaatcatgggcgagacaatctcgttcgcccctcggaaggccatcaagtcccaggtattggcggacttcgtggccgaatgggtcgacacccagctaccgacggctccgatccaaccggagctctggaccatgtttttcgacgggtcgctgatgaagacgggagccggcgcgggcctgctcttcatctcgcccctcgggaaacacctacgctacgtgctacgcctccatttcccggcgtccaacaatgtggctgagtacgaggctctggtcaacgggttgcagatcgccatcgagctaggggtcagacgcctcgacgcccgcggtgactcgcagctcatcatcgaccaagtcatgaagaactcccactgccgcgacccgaagatggaggcctactgcgatgaggttcggcgcctggaagacaagttctacgagctcgagctcaaccacatcgctcggcgctacaacgagactgcagacgagctggcaaaaatagcctcggggcgaacgacggttcccccgaacatcttctcccaggatctgcatcaaccctccgtcaagatcaacgacacgcccgagcccgaggcaccctcggtccagctcgaggtaccctcggctcagcccgaggcgtcctcggttcagcccgaggtaccctcggcccccgagggcgaggcactgcacgtcgaggaggagcagagcggggccacgcctgatcgaaattggcagaccccgtacctgcaatatctccgccaaggagagctacccctcgaccaagccgaggctcggcgggtagcgcgacgtgccaagtcgttcgtcttgctgggcgatgagaaggagctctaccaccgcagcccctcgggcatcctccagcgatgcatctccatcgccgaaggtcaggaactcctgcaagaaatacactcgggggcttgcggccatcatgcagcgcctcgagcccttgtcgggaatgcttttcggcaaggcttctactggccaacggcggtgactgacgccactagaattgtccgcacctgcgaagggtgccaattctatgcgaagcagacccacctgcccgctcagactctgcagacgatacccatcaccaggccctttgttgtgtggggtctggacctcgtcggtcccttgcagaaggcgcccgggggctacacgcacctgctggtcgccatcgacaaattctccaagtggatcgaggtccgacccctgaacagcatcaggtccgagcaggcggtggcgttcttcaccaacatcatccatcgcttcggggtcccaaactccatcatcaccgacaacggcacccagttcactggcagaaaattcttggatttttgcgaggaccaccacatccgggtggactgggccgccgtggctcatcccatgtcgaatgggcaagtagagcgtgccaacggcatgattctacaagggctcaagccccggatttacaacgacctcaacaagttcggcaagcgatggatgaaggaactcccctcggtggccgtcttgcccactgacctggaatacggctccccgaggacgaaggcctacagcgatcaaagcaaccaagttagccgagaagactcgctggaccagctggaagaagctcgggacaaggccttactacactcggcgcggtaccagcagtccctgcgacgctaccacgcccgaggggtccggccccgagacctccaggtgggcgacctggtgcttcggctgcggcaagacgcccgagggaggcacaagctcacgcccccctgggaagggccattcgtcatcgccaaagttctgaagcccggaacgtacaagctggccaacagtcaaggcgaggtctacggcaacgcttggaacatccaacagctacgtcgcttctacccttaa

SEQ ID NO: 13302 - DNA, 1722 bp, Zea mays
  Peptide Sequence Number=SeqID_55081
tgggtctgctcattgatggaaggcaaccagattttggtccagtcagagcagagccttataccaggtgtgcaaactcttgtcatcggtcaagagtttgcagatgttgacacttgtcggagggctgtcaaggacatggccattgctttgcactatgagctccgtgtggtgaaatctgatcgtagccgtttcatcgcaaagtgctcaaaagaaggttgcccttggcgtgtgcacatcgctaagtgccctggtgttccaactttcactgtcaggactttgcatggggaccacaaatgtgagggtgttctgaacctgcatcatcagcaggctactgttggttgggttgctaggtctgtcgaggcaaggctcagggataaccctcagattaagccaaaggagatactgcaggatattcgggagcagcatggtgtcgctgtttcttatatgcaggcatggcgtggaaaggagagaagcatggctgcagttaatggtactcttgaggatggataccgccttcttcctgcatactgtgagcagattgttaagacgaatcctggtagcgtcgcaacatatggaggtattggaccagggaatgccttccagcggctgtttgtctcgtttcatgcatccatttatggtttcttgaatgggtgcaggccccttctagaaattgacaaggctgacttgaagggaaagtatcttgggacattgctttgtgcttcagctattgatgctgatcacatgatgttccctctagcatttggtgttgttgattctgagagtgatgataactggaattggtttatatcggaattgaggaagatgcttggagttaacacagataagatgccggtcttgactatactttctgagagaaagcggcaagtggttaaagcagttggatctaatttccccactgcttttcatggtttttgcctgagatacgtgagcgagagtttccttgacgagttcaagaatactaaactgcttaaccttttctggagtgctgtttatgctctcacagcatcagaatttgatgcaaagggtatcagatacggccattttagtcttgggataaccgagatattgtacaacttgtcgcttgactgtcacgaacttcccatcgtgcaggccatcgagcacataaggcaccaactgacttgctggtttgctgagcgtcagaacttggcacagtcatacaactcagttcttgttccgtcagctgagaaacttgtttcagaagccatccatgactcgcagtgctaccaggtccttcgagcaaacaaggtggagtttgagatcgtgtcgtcggagcggacaaacatcgtggacactgaagctaggtcctgctcatgccgccgatggcaaatctacggcattccatgcgcacatgctaccgccgcgctgctttcgtgtggcgaagacccgcgcttctatgctcatgactgcttcagtgtaatgaagtaccgagaaacatattcgcagccaatacatccaattccagacaggagccactggagcaattcttctcccgggttacaaggtgtggccagcaaggccgatgtgatgatgctcagcccacccaatatccggaggcctcctggtcgacccaagatgaagattctaaagatcgagagcatgaagcggccgaaacgggatcgttcagtgtggacgatgtcatcttgtagggcattctcaaaagaagtgctctctgcgaagctgtga

SEQ ID NO: 13303 - DNA, 435 bp, Zea mays
  Peptide Sequence Number=SeqID_55082
atggcggctcgccggcagcaccgccgcggcttcccgctggtcccgctcctgctctccctcctggccgccgccgcgtacggccgcctcatctccgacggcggcccgtccgcgcagctcctctcggtgatccgcctctcggggtcctcgccggccgcgggggcggccgccaaggccgaggagaagtgcgagcagtcctacgggttcctcccctgcaccaccaccgtgctcgggaacctcttcctcgtgctgacgtacggctacctcatgtacaaggcggccacgtacctgtcggcggggagcgagctgctgctcgagatcatggggcccggcctcgtcggcggcctcctcctccccatcctcggcgccctccccgacgcgctcctcgtgctcggttcgctctccgtacccctcgcccgcctcatttctgtgctttga

SEQ ID NO: 13304 - DNA, 483 bp, Zea mays
  Peptide Sequence Number=SeqID_55083
atggacctgctgcttgcctgcttgcttgttcgatcgcttctcgccgtcagagtcgcttcacagagaggcacggaaaggtacgcgtcgtatccagccggcgccgcctgctcctccgcgggccgcggccgcggcagccatccgtccgcgcccgggatcggcgcggcggaagaggagggggaccgcggcatgagcgcggccgcgatcgccgcgctgcccacgttcgcgcacgccggcggggcggcgctcgactgccccgtgtgcctcgcgcaggtggaggccggcgagaagctgcggcggctgcccaagtgcgcgcactcgttccacgccgactgcgtcgacgcctggctccgagcgcactccacctgccccatgtgccgcgccgccgtcctcgtcggccccgccgcggccgccgccgccgccgccgccaccaagcagcccgaccccgccgccgccgccgcggaggcgctgccgccacccgtgtag

SEQ ID NO: 13305 - DNA, 816 bp, Zea mays
  Peptide Sequence Number=SeqID_55084
atggaccggatggtgctaggaagaggtggattggggggtatgagtggggatgaggatgtccgtgtagaggtcgtcgaactcatcgtcttcctccatcgcggtgggatccggggaggtggaggatgcgaggcggtggcggctggatggaccggatgggagatgacggatgatgttttgataggtactgaactgaagaatgagaagcattacgtccgaagcctgaatacgacgactgagcttctctcccctgacttcacatctgccaacgagccacgcctccgccgctgcctgctcgaaccggcgggatccagctcccccacgcggtctcatcccatccatcagcccggatctcgcgtcccgctccctctgaggaccctatcgtcctcctccttcgccgccgctgggacctccttcgagaagctggagctcgctactgccggcgccgcggacggcaagaggagcatcgacctcgtggaccacggttggtatggggctgcgcatgcacgagcagctgtctcgctgagatggaggatgactccgccgtggtcccatggttcgtcgacgttccagtgcgcttgcacaccagccgttgtgaccttgacggcctgggcctcaacgctgactactgtcgggagaggttacaagacaagcaagcatatctgtggcggccatgagctgtggtcggtggccgccgagaatgtgggctcaactgcggttgtcaccagtgttctcatcccatgttgtggtcgccaactgcggagattcagatatcgttctccaccatggaaaggatgtagggtcgagatggcggactag

SEQ ID NO: 13306 - DNA, 405 bp, Zea mays
  Peptide Sequence Number=SeqID_55085
atggaggaagatgatgagttcggcgacctctacacggacatcctcatccccactcataccccccaatccacctccgcgctatccaaccctgttctagtcgaaaccctacaccgcccgcctccacaccctaatcctacccccatggcggcgacagcagaggaggtcgacgatgactggctcctaggagggagtgaatccatacctggggtcgacccgaccggagattgggtcgacgaggacgacaatggaggggagcccgcacctcccgcttgtgaggatggtgtcgccaccgccgttggggcccgaggggagcgaccgaacagagctagggttaggagtgtagcgggctgcagctttgaggtggagcgagaggacatgtgcccgatgttgcgcaggcggcaatga

SEQ ID NO: 13307 - DNA, 252 bp, Zea mays
  Peptide Sequence Number=SeqID_55086
atggcgaacacagtggggcctcaccgagggggtcaaggtattgaaggcgacgagaggtggcggcgcaacagactctggcgaggcgacgacagtgcgacggcgatggtgagcgcaggcattgagatgcgaggcacagaagggggtgctggagatgatacaaggcccacaggatgcaagaggggaaaggaaattgcatgcgacaacgagccagagatggcaattacacttgtttcaggcaattacaagagatga

SEQ ID NO: 13308 - DNA, 351 bp, Zea mays
  Peptide Sequence Number=SeqID_55087
atgaaggacttgggtgagctgccaagggaggtgtcggcggcggctgtcaagggaggaccgacggatgggatgggagggaagagaaagctagctcgatatcatattggaatatttgaaaccctaacgcggggttgggttaagatggctgtacagtacatgcggcgaatcattcagaaaagagctaagtttgacataatggatctaaatgttttaaggttggctcccaagatgtttatccctgtactatttggacatggtctgaatgatatgtttattcagcctcaccattgtgatcgtattcaccaggcatatgggacatacaagagaagggataaggatggtgagttctag

SEQ ID NO: 13309 - DNA, 897 bp, Zea mays
  Peptide Sequence Number=SeqID_55088
atggcaacgcccgcctccacgccgaccccaccaaaccctaacctcgtctccggcaacccgccgtcgctgctgctacagcagcagcaggaggaagaggtgccagagccagtcccggagacggcgccgatgcccctcacaacctcgatcgaccccaccccctccggcggcgaggagagcgagagcgatgactcgtcgtccgtctggtcgacgccctcctccgcgcccacacccgtccccgcccccaccctcgcccccgcggccaaggacatcctccacatctccttcaaccaggactacggcttcttcacagcgggcaccaattcgggcttccacatctacaactgtgaccccttccgagagatcttccgccaggacctcgccgtcgagggcggagtcggcgtcggcggcgggggagggggtatcgacgtcgtcgagatgctgttccgctgcaacatactcgcactcgtcggcggcggagataacccccattaccctcccaacaaggatgggaggctcattgcaactgctaccaccaaggggactcttgttagaatctataatgcatctgaaggcaatctcctgcatgaagtatgctttctttcacgcgctcgtagctatattgtatacatgagggtgtgggttcgagttcttgctctgcaatattttttgcgcggtagctgtgcggggaagggtcatatgctgggtgcagaagcttactcggggcaggtggtcgggcctacaatgtcaggcaggtataacgggagccctgggcttcgaatattaaagagagcctgggtcggtaacagggtctcgtccgctgaatcgacggcgcatgggtatgatggagacgagacagagagcatgcaagaccgacggctccgtgacgcggttggttaa

SEQ ID NO: 13310 - DNA, 591 bp, Zea mays
  Peptide Sequence Number=SeqID_55089
atggcgcttttccccctcctccttgcggaaaggcgacgcaggggcgtatgtaaaaaagtcgagtctgtccctgatcgtcctctcaccctgtgcagaggctcgggggctgctctcgcaaacccggctccggccaaaccgttgacagcgtcaacataccagcccgagaacttggaacccgaccggctcggactcgggctcagccccggaagacggcgaactccgctccgcccgacccagggctcggacttgggctcagccccggaagacggcaaactccgctccgcccgacccagggctcgaacttgggctcagccccggaagacggcgaactccgctctacccgacccagggctcggacttgggctcagccccggaagacgacgaactccgctccgcccgacccagggctcggacttgggctcagccccagaagacgacgaactccgcttcgcccgacccagggctcggactcagctttggcctcagccgacggtctccacctcgcccgacccaggggctcggactcgaccacggccatggaagacaaactcgaccccgacctcggaggagcctccacatcacccaatctag

SEQ ID NO: 13311 - DNA, 105 bp, Zea mays
  Peptide Sequence Number=SeqID_55090
atgccgcctgatctgcagttaattcagtacatcaaaaaggatttccttatcaactcggggtcttcgtcttcggttccaatttccagtgcaaccaaggtttactag

SEQ ID NO: 13312 - DNA, 870 bp, Zea mays
  Peptide Sequence Number=SeqID_55091
atgacgaatcgcaattctcaggttggagtactgaggagcatcatcatcaactctctagtagccttgtatatcattgtcagcttcatcatcttgttctacaaaggtcatgatcatgaagtacagttgccaatggtggtcaagcatgaacaccaagaaatgcagaccaaggtggcagctgagcaccacgaacaaatgagagggaaagacaccatcaggacggttgcttgtgacaaatatggcaggaaggatgtcacgtaccagcactggagatggcagcctcatagatgcgaccttccaagggtagtaattgacaatgaaaagacagatggtggatacaaagtcggatacaaagcagcaactacagattatttgggacactggaagagaagggcagaagggcatacacattcagatactaagggagatatgaaaggaaaattaagaattcgtcgtcttaagtttccaaattcaaaattaccggtgggaagttacccagatgatcctgagttggagcggtttcttgacttggagcgattgcatcgtctaaacgaattcatagtcgcatcaactgggaaaccggcttcgttgcctgttgctcatggggtggaggaattccatggaggccggttttgggctcttggaaatctctccgattccgactcagaggctgatgagaactctgttttgccagaggtcatcgagacacgagcttcagggacgtgcagtgatcggctaagcgagtttcgtcaggctgttcgcacgcctcggctttcagcagccattacgtctgcggcggctccttgcgcaaggggtgcgaaacttcgtccatggcagggcaggctgccgtcccctcggtgtcgccaaaactga

SEQ ID NO: 13313 - DNA, 276 bp, Zea mays
  Peptide Sequence Number=SeqID_55092
atggtcgtggatctggccgccggctctctcccccgcccccctctgcaggccgtcgtcacacgcataggcacccgcccagctctcggcctcctccctcttgccgccggtccagcacaggcccatgcccggctgaacccgccctaccgcgtgcctccctctttcgtcgccttcgtcggttccgtcgctgtcgtggccttcccatccggatccatgtttgctatggccatcccggctagatctgccatccctttggccggatcacgtcttccttgctga

SEQ ID NO: 13314 - DNA, 828 bp, Zea mays
  Peptide Sequence Number=SeqID_55093
atggcgaggccgagctgggagaatgcagcgtgcccgagaagaaggggcaggggcaggggtcacgcgccctgctggccgaggggaggagcaggcctgggcaccatgggaggaaagggagccgagctccctgggctgatccaactttcaaccaagcccaaacgtttcaacaatgcgtttcaagggaggtatagccatggtgaaagctcggagtctggctctgctttgcagcggagcgtaggtctcctaggtgggcgggggtctgtcccgcaggtcaccctaccacctatttctgggtcaccggaagtggcaggtagaccagcttcagtaccttcatcgttggagcttttggcgcaagcgatggttctgttgaatcaggcctttgtgcatcctgcctcgcttgataatactgcaaaggcttccattccggcaggtccgctggatggcatcgatgcagggaagggcaacaatgatggaaagggcaaagaagtgatgaaggatgagcacaacaatgatcagcaaagagcagggaagccaccgttgaaggaaggcaagcaaccttactgctttcgttgtttaacgaaggggcacgttatgcaggtttgtttggctatgctctactgcgagatatgccggtctaaggcgcataatactgacaggacccattttccatctcgggaggagttatcccacatgattgagtggggagtagtgcaaacaaaattcaatgctgcgatgaaaattgaggaggcaacagtcaaatcatttgccaaagctgagctcaaaaagtgtcactactacagtaaacctctgtaccggcggtccggttag

SEQ ID NO: 13315 - DNA, 327 bp, Zea mays
  Peptide Sequence Number=SeqID_55094
atggcgccgtcggtttcaatggtgaagaacggggggaaaggaacggtcggtttatgcctcattacgccgagggagcggacggcgcggggtcggcgtgggctcggccgtgggcggatcctggcgcggcgtggcatcggggtcgcgacacaggtggcttcgcagtcggagtcgaggcatcgagtcgtcgcgcttcaggcgcggcttctcggctggcgcgcgcggctggcgggcgtgtcgggtccgccagatcgaggcagtcggctggggctcggcgccgtggacgtgcagggcggcctgggcgcggtacgctgggcgcgtgcggcttga

SEQ ID NO: 13316 - DNA, 336 bp, Zea mays
  Peptide Sequence Number=SeqID_55095
atggcgggcggaaatgagctcgccggagctaaggaacggtggctggccggtgagggattcgagttagggatcaaggtgaacatccctgatctttggctcaagtcactcggtggttacctctataacgctgatatcaccagtaaccactcggtcgttaattctaaaaacactgatgtggccctgccatcattcggacactacttcagaagcaccaatgttgtcaataataactcggtcgtcaccccaaaaagcgacaatgtgaccccgagtgactcggccactaccttcgaggcaccaacgtcgcagcaatcgtcaactgaccgggaggcaaagtaa

SEQ ID NO: 13317 - DNA, 357 bp, Zea mays
  Peptide Sequence Number=SeqID_55096
cgcgattccttttcgcctggttccggggttctggcggtcgaacaacgcccccataagagatggcgcatgacgaagagtcaaggaccttggcgatctatgtccatcgctcctgagccctcagggtatgggagtgcgcgaccgtacaatgcgggcaagggcgctcggcgaaacccgtgccgactggagctggcgaagtctccgggccaggacctgccccgacggggctacctatcgtatcgtatggatctctcccgaatcccgttcggcctggcccgccggcttttggacatgcacgatgggtttgggatcgcgtcgtggtccccacaggccacaggcgacggagttagtgacgactga

SEQ ID NO: 13318 - DNA, 426 bp, Zea mays
  Peptide Sequence Number=SeqID_55097
atgcgcgtggctgaggccgtgcgcgctgctgggggtagcaccttgcgcccgcgcatgccaggtccgcgcgcccgcaaccgctgctgggcccctacggccggatgccgcacccgaccgcgctccgccgtggctggggctgtcgtgcctaagcttgcgctgtcgtgggggcgcaccaagaggctagcagtcggcacgacttcctcagatctgccggacgacttgctgttcgtcaccgactcaccagcaaccaacgtcagccatcagccggcagcaggggaagctgggcggagggtcattgcggcacggcgtccaggcgtacagcaggcaccagcaacagcccatggcaaacggttcgtaaatcgtaactctgcatccaattcctacgccgctccgtacttgttccccaccccgcatctgaaaccctaa

SEQ ID NO: 13319 - DNA, 1032 bp, Zea mays
  Peptide Sequence Number=SeqID_55098
atggttcaaatgggtgtccttgttcctactggagatatgactgttgtcagaagaaccgctcaatttttccttaatagctttcaagagtgcctaacagcacaaaggaaggagagagaaatggcaaccgcagaactgggtttcaaaaagcaattaactaaggaggagaagtttgaaaagaggaagcagagacttgctgcaatcggagaggatcttttggcgattgctgctgatcaaccatttcgcttccctgccacatttacatttgtggtcagagcattctcagttctagatggtactgggaaaggccttgatcctaggtttcatattacagagattgctaagccaaatgccaaggaattgctaagatttaatgacgctggtgttgaaatagttgtgaaggcaagtttcaacatttggtgtgtggagagacatgtgtattcctcctatgacgaattccttaggctccatgaagtgtatcaatttgtcttagtatttttattcgtggggatgcctgactcaaatgaactcatgttcaacactgagcaacctacttataattttggagcctataaaatttctaagctaaaaaaggagaggagggcgcagcttgattcaatccatgtcaagtcagaggctgctgcgaggtcctgcttcgctttcatgtggatttatcttgcaaatggtatgtggatccgttccagaggcaatgagccttgcagccaggagattgttcttgtcaccccaaaaatgttcccattctactttcgggcagtgtacctacactcagttggaaaacttcaaccacactgcaacaaggtttataaaaggtttgctatgaggaaaaacaaatttatgggctcaaacaaaaaccaagccaagaaaacagatatcaactgtgacgccacactcaaaagcttgtttggtgagagggataaggttgggatgctggagatctctaagcttttgagccgtggcttcccgaaaatctccaagcttttgtggtccatggagccagggatggctctttggtaa

SEQ ID NO: 13320 - DNA, 707 bp, Zea mays
  Peptide Sequence Number=SeqID_55099
cgctgatagaacatattcttgatgctcttgcaaacagtgaagacccaccaagtgcaacagttcaaaaatatgtcttgggacaatgtaggaagtggaatttggtctgggttggtcgccacagagttgctcctctcgagcctgatgaaatagagttcctgcttggttttccaaaggaccataccaggggaatcaacagcaccgagaggtacagatctctaggtaattcattccaagtgcatacagttgcttaccatctttcagtgctaagggagatgtttccaaatggcatgaatgttctctctttgttctctgagattggaggagctaagatagctctgcacaagcttgggatccgtatgaagacaatggtctctgttgagcacatgcctagtgttgccagcaagcctggtaccttcttcctttcaagagccactccttttgctgaaatctggatgggccacgatggtggtttcttggttgcgggggcgggcgctttgactggcatatcctctgcccttcatgctgagagcgtcgcctgtatgaaaggtttggagctggctgttttctttggaatgcaaaatgtgatgattgaaaccgatgctgcgatcctgaagacggcgttgacctcacaagaatatgacctatctgctttgggcgtactgctcatggagcaaattcaggtgacgttgactctagtttatggctag

SEQ ID NO: 13321 - DNA, 594 bp, Zea mays
  Peptide Sequence Number=SeqID_55100
atggcggagaccagcgcggagtcggtggagggcgccgggggagcccaggtggcgtcggtgacgagcgggcgagtggcgtggaagcttgggggtggctaccgggtgaagcgggccgacgagatggggcctgattccacggtggtggcgagagcgcccgtgcacgtcggctaccctgggagaaggctggcggcacacgcgctggttgccgcggtggtggtggccgcgagcgcggaggtagttgcggcggcgacgctggccatggcggggtcggggagggctgtcgggatggaggcggcgcccacgaggaatgcggcgacgcggcttgagttaactgggcctagcccattacatagggtgagagtaattacacgggaagaaccccaaaccctaaacaggattctaacaaattcatccccagagaacggtatttgtggtgcagcagtaacaaggaggtgctttgttcccaagcaaagtcgagagttgaaaattaatacaatgatgaaacatatttatctggctaacctgcagttcccagcattgatcacgtcacagaaggaccaaaaatctttattagcgtggtttcttggatcttga

SEQ ID NO: 13322 - DNA, 2229 bp, Zea mays
  Peptide Sequence Number=SeqID_55101
atggggagcgacctcaaggagatgaagtacaggcggaggatcggggtggaggagcggccgcaatgcagcgacccgaggggcggcgcggactgggccgcgctgcagcaggaccccgtcgagctgctgcgcaagctggacgagctgagggaccagatcacgcgctcctgcaacgtcgtcgtcggccagccgcgggagcaccgcagggtcagccgccgtgcggtctccatgctccccgagcatctcgagccaccgcctctgccagggtaccaccgctcccgctacggtgggcggtatgggcacggcttgccgccaccaagcccatacgcaccgccacgccctgaacatggggaaaggtatgcgaggcagtctagtgggcactaccgccagtaccctcccaggcactgcgagaacggtgggatggggcctgggacctaccatcaccatgggtgtgcctgtccgcactgtctgcatgggcagaggactttcccgcaggaggagaacatcccaatggcgagatacttcgccgggcagcacgaatcataccggttggagaggtcgccttctgtttcatccgattatgatcgtgggtctgtggcgtcatcactttactctcatcggtctgtatcgaagatgagggcagagtacttcaggaagaaggcagaacatatctgccgtccagtggatggtgccgcacctttctctgtatgcagttcatgttataaactactgctgatgcctatggaaaaatgcgtagggaggaagcagaatcggtttcaatgtgggtcttgttgtcagataattagtttgaagcatcaggaagaaaatggtatcccctttgcacttgcaccatcatcatccttacatgcgcctgaaatggagcaaagcacaagtgaccagatgaggcaagattctgtccatcagcgccatgaggatttcaattttatgttcaacaattcaaatgatcattgcgatatgcaaaacaacatggatttcaccgatgataattcacttccttcgaccgcgagtaatgacaggattgagattgacaaagagtgtgggtcaactagaagcattcagtcaaaagctgagggtctctctttctctccaagtaggtctgtagacattggtagcccaaaggatatattgtgcgagagggataaagacagcaatgtggagccttcctcagatggtccacttagtccacgatctccaactttagaggacaaacttgttgacccgttgtgtgcccaggaaaaaggtaacgatgaggacgatcaaggcacggcttacagatcgaacctaacatgcaaaggagaatatgatgctaacgacgagtatgatggggacgttagtacaagaagcaaaccggagagcaatgtaaatgacaaagataccactgaaggcgaaacctcatgcagaaattacaaggaagacaactgttgcaacattgaagatagtagcaaaacatacgagcagaatagtggagaagatgacaccagtagtctagtagatggaaatgagaagtatgagtctatgaatactaaagacgatgatagcagccctggaggtgaggacacatgcaataggtatgagccaaaggttgaagacgatgaaaattgtgttcttggagctgagagcattagcaacaattgtgatgaaaataataaagatgccataaaaactggaagcataagtgagagacatgaagagctgataattgaagaagaaaatgagaaattgcagcaggcatttattgaagatgccaattcccaagcagggagtggttcatcaattaatgagcggacgaattctgggttttctcgcggttcatcagaggctgggttagatgaagatcagtcctcaaccggtaagagtggggactcatcattttttgctggtttcttgaagaagggtttcaaggacctttctttattaaataagtccatggatagcgttaaggtttcaattaatggtcatccaatctctgaaagagcccttaagaaggcagagaagaaagctggtcctgttgacccaggttcatattggggaatgttggaggctgacttttgttacataaaccttaatattggctctaagaggatggacaggggaactcttgtagatgctctaagactagcaactcctttgggattctttcccatgttaactgtacatgctttgtgttatgggcagttgatggggccagctgggctgggcctattggactga

SEQ ID NO: 13323 - DNA, 321 bp, Zea mays
  Peptide Sequence Number=SeqID_55102
atgacgactggcacaaaggaggcagggatgagggcagagaccagcgtggaggtggcagcgacggggcgcagcaaacagcatggagaaggcagggacagagacggaggtaatgacgatgacaccaagaagagtagagaatgcatccaagctagaatatgcatgcttggtgacgggaagcagtgctgtgctaatgccatcacctcatacgtccttggcacaatcaatactaggggaacaagggagcaatatgcaagttctatggtgcattgcattgagctacaggcatttagtgggggcactagcaacaccaaacaagaatga

SEQ ID NO: 13324 - DNA, 1524 bp, Zea mays
  Peptide Sequence Number=SeqID_55103
atggcggccgccgcgttggacgccgaggccggcgccaccaacggcagcggcggcgtcagccacgccgccgccaagccggggcccacggccggggccgatgccggcgccgccttcgtgctggagtccaaggggacgtggtggcacgcggggttccacctgacgacggcgatcgtggggccgacggtgctgacgctcccgtacgcgctgcgcgggatggggtgggcgctcggcctcaccctgctctccgtcatggccgccgtcacgttctacgagtactcgctcatgtcgcgcgtcctcgaccactgcgaggcgcgcgggcggcgccacatccgcttccgcgagctcgccgccgacgtcctcggatccgggtggatgttttacttcgtggttaccgtgcagaccaccgtgaacaccggcgtcagcatcggctccatcctgctcgccgccgactgcctccagatcgtccgggctcgtaaaagcttcgggctccgccagttgactaataatgctatgcatgagttgggcatgataggcatccgtatctcaactgttcgttgcgatggctttatccgcacgcacatcatgtacacgagccttgctccgcacggtcccctgaagctgtaccacttcgtcatcatggtggccgtggtgctggcctttctctcccagctaccgtctttccactcgctgcggcacatcaacttcgtctcgctgctcctgagcctgggctacacagtcctcgtggcagccgcctgcgttcgtgctggtttgtccaagaatagtcctgcgaaggactactcgctaagctcgtccaagtccgagcagtccttcgacgctttcctgtccatttccatccttgcctccgtcttcggcaacggcatactgcctgaaatccaggcgacgttggcgccaccggcagcggggaagatgatgaaggcgctggtgctgtgctactccgtcatcgtcttcaccttcttcctctcgtcgatcacgggctactgggccttcggcagcaacgtgcagtccaacgtcctcaagagcctgatgccggactcgggccccgccctcgccccgacgtggctgctgggcgtcgcggtcctcttcgtcctcctccagctgctcgccatcggcctcgtctactcccaggtggcgtacgagatcatggagaagggatccgccgacgccgcccggggccgcttctcgcgccggaacctcgtcccgcgcctgctgctgcgcacgctctacctggccttctgcgcgctcatggccgccatgctccccttcttcggcgacatcgtgggcgtggtcggcgccgtcggcttcgtcccgctcgacttcgtgctccccgtcctcatgtacaacatggcgctcgcgccgccgcgccgctccccggtcttcatcgccaacgcggccgtcatggtcgtgttcgccggcgtaggggccatcggcgccttcgccaccatccgcaagctcgtgctggacgccgacaagtttaagctcttcagcaacaatgttgtcgactaa

SEQ ID NO: 13325 - DNA, 231 bp, Zea mays
  Peptide Sequence Number=SeqID_55104
atgtgcgcccctccctctctcatttttcccgtgcagcaacttcctctcccacctctcttccacctccttgcccttaggtgtgatccggtggacggttttcgccgattgtttggatcccgaagttggcgaagtccgaaggagttgcaggtgaagaccagagcagtcaagcagccccagtgcaaggaggaggcagagcatgttttcattgtggagagcaaggtcattaggtga

SEQ ID NO: 13326 - DNA, 174 bp, Zea mays
  Peptide Sequence Number=SeqID_55105
atggggaagcctgtcccatcaatcctcatgctcctcctctgccgagtgaccgcacttgtacccgccataaccagaatgggagaccacatctcaggtcgtgtgaggggtaaagtctgctgccaggttcactcagtgggtaaaaccttacctctgtgggttattctagaagtttga

SEQ ID NO: 13327 - DNA, 201 bp, Zea mays
  Peptide Sequence Number=SeqID_55106
atggctggcgcgtgcggtatgtcggatgcggggaaggaagacgcgcgcgagggcacggtgatgcctgtggacgccctcgttgtgcccttaagtgatcaaggcattggagttgggctgctccttgggcttcctgaagatcctgttgaacttggacaattggacatgggtgcactggcaatagaaactcaaagagcctgctaa

SEQ ID NO: 13328 - DNA, 315 bp, Zea mays
  Peptide Sequence Number=SeqID_55107
atgcggccgacggtacaacacggcaacagagaagaggagcttctgacaggggctccaacggctgacttgaggccggcaagaaggcagcgacacagtgggaggcgaggagatgctgcgcgggctcggcagggtcagactccactaacagagaagcgagtgagcagacagagagtgaggggaaaactcggctgtgggagggagagttccgtgggcgtggttgtccaatttatagagaaggagaggggaggggagagagcgccggagaagaggaaacggtggccggccatcaatggcgttcatcaacagagggattaa

SEQ ID NO: 13329 - DNA, 165 bp, Zea mays
  Peptide Sequence Number=SeqID_55108
atgggctccacggtatttgaggttgctgaattggatggagcaaaaatgatttgtcacactaacaataagatgaaagaagcagagtacatgaagtacaaggatccaaaacaacctattaactctagaacagggatcttattggttgttctaaaggaagcatcttaa

SEQ ID NO: 13330 - DNA, 570 bp, Zea mays
  Peptide Sequence Number=SeqID_55109
atggcctctgcaaaaacgttcagttgcatggcagaatgtctgcaccaaaagggacctgaggacacgcgcggcgcgccccacgctttcttgctcgctagctctttacagccactgcactctcatcagaaagaagcccacgctaacctaagccgccaagccaaagacatttcagttaatgagttcatgctcatttctttaccagagcagcagcacggccgtgcatgtgccgtgctcatgtcttaccagacccacaaaaatgctctgcttcttctcccatgtactacacagtacacgtttacggacagctgcgcagcgctcggctcaggggttaaactctgcgacctgctgcggcggatcctcatcaatgcgaggcgaggagaggtacccgatcatggtagtgctagccagcacagcagtaacttaaaccagtcaatcagtattcttgctggcgtgcggggtgcagagcgcctacgggcatccgaggagcgccgcctcctgatcgggtggcaggtcacgtcccctgggctcaggcggcgtgacgctgaccgtcgcgtcgccatcggcggctag

SEQ ID NO: 13331 - DNA, 249 bp, Zea mays
  Peptide Sequence Number=SeqID_55110
atggctctcgcccgtgccgcattctccggtcgtcgtctcctggccgcgtcgggcgccgtgctgctgctgctgcctagcttagtagcaggttttttaaattttcctggcgtggcagtggcaggcggcagcgtcctgctcctgctccgctcttcatctggccctacactgttccgggcgcgcgggagttatggtgaagccgattgccgcttgcaggtgaaaaggacgcgcgccgtgtcgctgcgcaattga

SEQ ID NO: 13332 - DNA, 489 bp, Zea mays
  Peptide Sequence Number=SeqID_55111
atggcgcctcgcagccgcctcctcgacctggagaggcacgacgtgctctccttctacggcggtggtgcctaccaccagagcgcgagcgcgtcagcgtggccgcctacggctacgggatcgttttctggcccgatcgacttcctcgtcgccgccctgctcctccacctcgtcgtcccgttcccgcacgccgccgccgccgtctgcggggcgctctacgtcgcctactgcttcctcctcgaccgctcagcgcagcatgtacttcagaaggagcgtgagctgaagcgagtcaatgcgccatgtgcaccatcaaggtatggggataccgagaaggcgacaaggtcgcaatggaggatgatgatgtctatttatctgaataccattaacaaatacctcatcatggttagcttgacctcaaatgacaaatatgacctagcctgggatgtggatgacaatgtcctttttaatgggagatctctaaagaaatattga

SEQ ID NO: 13333 - DNA, 243 bp, Zea mays
  Peptide Sequence Number=SeqID_55112
atgacgtatcaagttgtattgtattgtggctccggcgttcgcgcggagacgctggacgacacagctatagatgttccaacaggcgacatggcccggctcgacccgagcatcatcatcgttcctcgattatctccgatgcctttgaaggcgaggtacagagggggaggactggaggagacagagcatgggcacgagcaccaaactattagatcaccagcacgtcagaatgaccgagaccgatga

SEQ ID NO: 13334 - DNA, 735 bp, Zea mays
  Peptide Sequence Number=SeqID_55113
atggaagttgttgaagaaatgtctgagatcaactatgtcgcaagaaagaaatgggcgaagaagtatcttttcatgagaagcaatagatgtgatggatttttattcttcattaagattctcagaaaagctcttcaaaaagctgctccaaacaggcctattgaagcgaagacggaacaagccctcgatcacctcttgcacttaccagttgacaagttttatgatgcagggcaacaagataaggcaaacgaaggcagatgcgggggctcaaccatcgaagagcgaagaccccatccacgcaagatcgaaggcacaaaccacgcgaagggatggcctgtctcctccaaaccaggcctgtcggtgaaagcccatggcaaggacgcctgcgggcgagttcatgccagcaagccaaggcctcacgctgaccttcggcgaagagtcgaacgacttcactgcctcgacgatagaaacatgtctatgaagacagcatccacagtttggctaaggagggcccactcccaactgagcaacgatggccccacttatcaacctccatggagggttcaatcgggatcaggtaggttgaaccggccacttcaactgggatcaggcaggttgaacgggccacttgaaccaggatcggctctgcacaatcctggttcaaccgaccttcaggacagttcaaccgcattcgcacatattggtttccagattttgtccctgatttctctctggtga

SEQ ID NO: 13335 - DNA, 345 bp, Zea mays
  Peptide Sequence Number=SeqID_55114
atggcgctcctgcaagggattacagggggaggccctcgggaggattttgcgggatgggaggtgctgcaagggaatgctgcattggagtttcctataaactgtacgggttttctgaagctagtggagcttgggaaaggcctcctagtgttaccttgcctcgcctcgtcggtaaagtgtatggaaagtctcgatctcttggagatgggtaacatggcttgtggctacagggtaccacctctgcagagtgtaaaaaggggctacctagcggagtccccggccgtgaacagcttacgaagcttctgctcacttcactctctgcgacctgaagcgccatctagtacatga

SEQ ID NO: 13336 - DNA, 303 bp, Zea mays
  Peptide Sequence Number=SeqID_55115
atggtgttcgatccgaggcagtgccaccaccggccactgattccgctatcccgggcggatgtggaggactggaggcatgtcgaattggcctcgtcctggggagatctgagccttgagactatcgaggaaacatttggtagcttcggggatgagatctcgattgctcgtgcatcgatgacgcaagattttatcccttccaggcagcgtctcttcgcgcggtcgatggccagggtggaggtgttattgtccgcccagtgggaggctgagcaactccgagtgggagccactcgttatgaagcatag

SEQ ID NO: 13337 - DNA, 183 bp, Zea mays
  Peptide Sequence Number=SeqID_55116
atgtatgatggacctgctagaagtttatacttagtcgatgcaagtcatttgatctcatgggaggtcgtgggcctagggggcttggggcccaacattccttctcatgagtctgaggatctcatggacataggacctgaatatggcgccttgcaactaagtgcttctaccctcatgatgccttag

SEQ ID NO: 13338 - DNA, 99 bp, Zea mays
  Peptide Sequence Number=SeqID_55117
atggcgaaggatccgggagttcttcaacggccgagcgtgagggaaaggagagagctgaccgcgcgggacccacatggtggtgtctggggtttcctttaa

SEQ ID NO: 13339 - DNA, 297 bp, Zea mays
  Peptide Sequence Number=SeqID_55118
atggggacgggaaacatattccacatccatgtttctcaggacatacatcctaattataatttaagaggggacgaggaatctagtcgaggatttatcctcgcgggaaacaggaacaattatttttcgaaaagattcacctttgatctcctaaacgacttaatagcttttttggaccctttgttcagcgccaaatgctatgacgccgaggacctggctcgtctagtgggttttggtgattttgataacaatacacttaaaggactaatcaatttgctaagtgttgaacatgaaagttga

SEQ ID NO: 13340 - DNA, 2175 bp, Zea mays
  Peptide Sequence Number=SeqID_55119
atgcccggcataccgagggatgttgccgagcactcgctggacatccgagccggagcccgacccgtcaagcagcctctgcgccgattcgacgaagaaaagcgcagagccataggcgaggagatccacaagctaatggcggcagggttcatcaaagaggtattccatcccgaatggcttgccaaccctgtgcttgtgagaaagaaaggagggaaatggcggatgtgtgtagactacactggtctaaacaaagcatgtccgaaggttccctaccctctgcctcgcatcgatcaaatcgtggattccactgctaggtgcgaaaccctgtctttcctcgatgcctacttagggtatcaccaaatcaggatgaaggagtccgaccagctcgcgacttctttcatcacgcccttcggcatgtactgctatgtcaccatgccgttcggcttgaggaatgcgggcgcgacgtaccagtggtgcatgaaccatgtgttcggccaacacattggccggacggtcgaggcctacctcgatgacatcgtactcaagacgaggaaagccttcgacctcctttccgaccttgaagtgacattccgatgtctcaaggcgaaaggcgtgaagctcaatcccgaaaagtgtgtcttcggggtgccccgaggcatgctcttggggttcatcgtctccgagcggggcatcgaagccaacttggagaagatcgcagccatcaccagcatggggcccataaaagacttaaaaggcgtacagggagtcatgggatgtcttgcggctctgagctgcttcatcacacgcctcggcgaaagaggcctgcctctgtaccgcctcttaaggaaggccgagtgcttcacttggacccctgaggctgaggaagccctcggaaacctgaaggcgctcctcacgaatgcgcccatcttggtgccccccgctgccggagaagccctcttgatctacgtcgccgcgaccaccctagtggttagcgccgcgattgtggttgatagacgagaagaggggcatacattgcctgtccagaggccagtatacttcgtcagcgaggtactgtccgagaccaagatccgctacccacaagttcagaagctgctgtacgcggtgatcctgatgcggcggaagttgcgacactacttcgagtctcatctggtaactgtggtgccatccttccccctgggggagatcatccagtgccgagaggcctcgagtagaatcgcaaagtgggcggtggaaatcatgggcgaaacaatctcgttcgcccctcggaaggccatcaagtcccaggtcttggcggacttcatggctgaatgggtcgacacccagctcccaacagctccgatccaaccggagctctggaccatgttcttcgacgggtcgctgatgaagacaggagccggcacaggcctattcttcatctcgcccctcgggaagcacctacgctacgtgctactcctccatttcccggcgtccaacaatgtggctgagtacgaggctctggtcaacgggttgcggatcgccatcgagctaggggtccgacgcctcgacgctcgcggtgactcgcagctcgtcatcgaccaagtcatgaagaactcccactgccgcgacccgaagatggaggcctactgcgatgaggttcagcgcctggaagacaagttctacgggctcgagctcaaccacatcgcccggcgctacaacgagactgcggacgagctggctaaaatagcctcggggcgaacaacggttcccccggacatcttctcccgagacctgcatcaaccctccgtcaaaatcgacgacacgcctgagcccgaggcaccctcggcccagcccgaggtaccctcggctcagtccgtggcaccctcagctcggcctgaggcaccctcggttcagcccgaggcaccctcggcccccgagggtgaggcactgcgcgtcgaggaggagcgaagcggggtcacgcctaatcaaaactggcagtccccgtacctgcaatatctccaccgaggagagctacccctcgaccgagccgaagctcggcggttggcgcggcacgccaagtcattcgtcttgctgggagatgggaaggagctctaccaccgcagcccctcaggcatcctccagcgatgcatctccatcgccgaaggccaggagctcctataa

SEQ ID NO: 13341 - DNA, 723 bp, Zea mays
  Peptide Sequence Number=SeqID_55120
atggaggacttgagtaatatgaccccgaccattgtgattggaaaaattgcggcttttgagatgtcgcgaaaaatgtgtcggggagaggagccaacttcctcaaggccatatgcttttgcatggctcggcccccgtctcggcctcggaagatggacttcgcctcgcccgaccccagggctcggactcaaccacgactcagaagacgacagactccgcctcgcccgaccccagggctcggacatagcctcggttcggaagacggtctccgcctcgcccgaccccagggctcgggctcaacctcgacactggacgacgaactccgcctcgcccgaccccagggctcggacacagcctcggcctcagaagacggtctccgcctcgcccgacccggggctcggactcgacctcaacctcggaagacagactcgacctcgacctcggaggagcctctgcctcgcccgacctagggctcggaccgaccacgtcatagggggggcccatcattaccctacccctagctggctcaggctacggggaacaagaccggcgtcccatctggctcgccccggtaaacaaataatgatggcgccccgcgtgctccatgacgacggtggctctcagccccttacggaagcaaggagacgtcagcaaggattcgacagccccgacagctgtccttctgtagggctccagctctcctccgacggccacgacatcacatga

SEQ ID NO: 13342 - DNA, 1413 bp, Zea mays
  Peptide Sequence Number=SeqID_55121
atgggcttggacgcgtacaggttctcgattgcctggtcaaggcttattccaggaatacagccgcacgtgaccatctatcacttcgaccttccccaggctctccaggatgaatacaacggcctgctcagtccgagaatcatatggccatggcatgaatggatccccctgaccgccgtgcgtaccgtacgcagcgatgattttaccgcttacgcagacgtgtgcttccggagcttcggcgacagggtgaagcactggatcacggtgaacgagcccaacatcgagcccatcggcggctacgaccaaggctacctcccgccgcgccgctgctcctacccgtttggactgggcgtcacctgcacccacggcaactccacgacggagccgtacgccgtcgcccaccacctcctgctcgcgcatgcgtcggctgtgtccctctacagacgcaagtaccagggcgagcaaggaggacggattggactgacgttgctggcctggtggtatgagccagcgacgcagaagcccgaggatgtagaagcagctgccagagcaaatgacttctcgcttggatggttcatgcatcccctggtgtacggcgactatccgcccgtgatgaagaggaacgtgggggcaaggctgccgtcgctgacggcccgagactcggccatggtgcgcggctcgctcgatttcgttgggatcaaccagtacggcgcgatcctggtcgaagcagacctgggccagctcgatcgggacctcagagactactacggcgacatggctaccaacttcgtcacggtaccgtttgagagcacagtaacgaggaaccagcaggtgcctcgacttgggctgcggaaccatgaggcgccgtgggctctgagcaaattgctggaacacctgcagacgcactacgggaaccctccggtgatgatccacgagaacggtgaggccggccaagcgcgcgcgctctctctctctcgtttcagctgccgcgcacatgcacggttcctttcatcccctgagctgatggttccaccaccaccaccaccaccaggagctgggcacgagcccgacccgtccggcgggttcctgtacgacgacgagttcagggcccatttcctgcgggtctacgtcgaggcggcgctcgcttccgtccggaacggctccgacctgcgcggctacttcgtctggtccttcatggacgtgttcgagtttctcttctcctacaggttccgcttcggtctctacggcgtggacttcgccgccgacaaccggacgaggtacgctcggcgctccgcgcgatggtacgccggcttcctccgcggcggcgcggcgacctcacgcccgcctctgtttcaacgcggacacacggctccacctattcggagtgaaaatcagccgcacgtgtctgtgttatag

SEQ ID NO: 13343 - DNA, 1119 bp, Zea mays
  Peptide Sequence Number=SeqID_55122
atggccgcaccttccggcacgatgcgcgccgtgcagtacgacagatacggcggaggagcacaggggctcaagcatgtggaggtgccgatcccgtcgccgaagaaaggcgaggtgctcatcaggatggaggccaccagcatcaacgtcgtcgactggaagttccagaacggcttcgcgcggcccttcatgcccaggaggttccctttcatctctgttttggcttttgacgtgccgtcccgagtgcgtgtgcgcatgaggacgggagagttgcacaggcgagtaatcgtgtttgctttctggaggacaggttacgatctagcaggagaggtcgtagagttgggtgctggagtgagcagcttcaaaccaggggataaggtgatcgccatcaacttcccgaacggcggagggctcgccgagtacgcggtcgcgtcagcgtctcgtacagtcgcaaggccgccggaggtgtcggccgtcgaaggtgtctgcgtgccgatcgccgcagtcaccgcgctccggtcgctgcggacagccggggtcacagtcacactggacgacccggctcgcgcccccgccacgcccaagaacgtgctggtcaccgcggcctccggcgccgtcggccacttcgccgtgcagctcgccaggatgggcggccacaacgtcacggccacctgcggcgcgcgcaacctcggcctggtccggagcctcggcgccgacgaggcgctggactacaagacccccgagggcgccaggctgcggagcccctccggcaggaagtacgacgcggtggtgcactgcgccgcgaaggggctcccgtggtccgtgttcaggcccgtgctcgccgcctcgggtacggtcgtcgacatcacgccagggttcgtggccgtcgtcaccgcgatcctccaggtggcgaccttctccaagaagaggctggtgccgctcatggtgacgcccaacaaggaggagatggagctgctgctgggcatgctgaagcagggtaggctcaagacggtcatagattcccagcacccgctgggcagcgctcacgaaggctgggccaagagcatgagcggccacaccaccggcaaggtcgtcatagagatcggagccgcgcaaccataa

SEQ ID NO: 13344 - DNA, 1056 bp, Zea mays
  Peptide Sequence Number=SeqID_55123
atggcctgcttgatgcacgtgtcgcagaagacatggccacaagtcgtcgtggaaggctcctccatcttattccaacatattgggcagccgagcaagcaagcccacttcaggcgagtccatgaggaccatgaccacgaggcggaccagcccaagcccatgaacgcgaaaacaaaccctagccacgaggacaagggcaacgacgccaacaccgcgcgtgaccgacggcgaaggaggcgtgctccggccggtggcgccgccaacgccgttggaaacgatgatggcgaggagcagcacctcaacacctttctcgacgctgcgaatgcgtcgtccgcctcctcaagggtgcagttcaggaatatggcgtcgcgcgcgcggtgggtggaggaagccggcgctgcggaggtggtggagaacaggggcaagctgtggctgaccaccggtgtcactcgggccggcaagctgtactacaacgttgaggagaccgggttcttggccgaaatgggtgccttgattcttctcaatgataaggatgagacgataggaattgaagatatctatgggaagcttgctggaggaaattatgggtgctcctgggataccttccaggcatataagcacttgaaatcacttggatatattgttggaagatttggtgttccctggacaatgaagcatggtggtactcatcacaccattgctccccagatcaatatacttgagactgatcagagcttaaatagagttgacggagcctccaatgacataaccaaattgctcaaggaaatacagattgacgggatatgtccatcttttgaagtttatctgccaaatagcaagttcaaaaagtcatccccagggggtaaaccgccctcaagggttgaattggaagcagtggaaaataatttcagaggcattcctctgaagtatgctcatgtggataatggacgggctgcacctgtgactttcggatttccaactgcaacaaatgctactctcttcctagttcctagcctcaggcttcaggtgctcgcgagtactgagggtgtcaggcactga

SEQ ID NO: 13345 - DNA, 423 bp, Zea mays
  Peptide Sequence Number=SeqID_55124
atgccgccaccaaaaaattacgctggtgtttacctaaccccacttgactttcattcaaacacaataaaaactgtgatcacctcgttccatcccttattatacatccgaccaaacataccatccccggttatcctcgccgagaaatcacttgcagtgcaagaacaaagctcacagtttggtaccaaggctcctccgtctaggtctagggaacaggatgaagcagaactgaaggcgacgacgcccaggtccatccagtccaggggccaaaaaggctcagagcaggtccccaagaccggtcgctctcatgttgttcgccttcacgggctcgtgccctcagcggtccatcatgcacccaacgaccagattatcatgcctggtaacgatgggaaggcgtctaccagcgatgttggcgggaaggcgtga

SEQ ID NO: 13346 - DNA, 433 bp, Zea mays
  Peptide Sequence Number=SeqID_55125
gcgcgcccgcccctgtccccagcctgacggcctcggctctgctcccttggccgtgcccagcctcgccgcctataggtcgggctcatgccccacccatgggccgggacctcggtccaagcacggcccgatgcattgggccagcccgaaattatttcgtgatgctcgatgccaccccatggccgacgggctagctctggcctatgcgcctgcgctagcccccctagctgatgcgcccactcctacgcccctggctggcgggctcgaccttgcaccgacccctaccaccatggccaagacaagcacactcccctctagtcgggccttcggctcccgcctgtccctgttcccctggccgacatgcgagctactacgcccgccccagccccctttactggcgcgcctgcactcgccgtccctgctctgctccctctag

SEQ ID NO: 13347 - DNA, 1689 bp, Zea mays
  Peptide Sequence Number=SeqID_55126
atggtgaatgctgagccatgctcgatgggtggaattatggattacggtgttggtgtgggcaccaaatcttcaccacgcagtatggccattgagaaagctcaggaggagctcaggcaggagtctgatgttcgcgatgaatggaggagagaattggaatttctagagaaagtatgcccgcaccagggaggcaacccattggatttcaattttgcacatctggaaacggtcggtgtacactctgcttctctcacaaatcaagtagaagcacaaactgtgataagtgacgcgaaaggtagtttttctgcatcacctcttggagattcggtcgagagtaccgacaaaccaggaggttccatgtgccgcgaaaccaacacagcagacaatcttatgcttttgggtggaggtaaaaatgacattgcagaagaaaaggttgtaaaaagaggaaccaaaagattaaatgcagcacaacccaaacattcattgcccagtgacggtcacaaaaacacaaaaaagcctgctgcttctggtttgtcacacctcggtgtcaaaagccaggcatatgttcggcgcaacaggtcaaagccaagtagggagagcgggaatgtcacatctattagatcttctatgatccctgctaaagtctatgagccaaatgatgaaaaggttacagcacagaaaaacaatgcagacgatcatggtgtattgtccgtttctagtataaaacagtctggacctaaccgtgacattgcaccaaagagtatagcttctgatgaccatgcagcaatggagctggatggcattcaaacaattctcgaaagtgaatgtgtggtgaacgacaaagtaaacaaagctggcaataataacaaagctaaacagttgtcatcaaatgacacaaatcatgatcgtttccttgttgggtgtggtgagatagctgctgaagtttcatctgcggaaacccctgatgccaatttaaaagttgttataaagccatgttattctagtgcatctacatatgatgagaaagagtcatgtgctgttcacgaaaaggctgatgatggacacctggatgaatgtatggcccatatccgtgaaggggaacttggtcacagcaggacacttccttgtgttgtagaagcttctacttcacacaatgatgtagtgggcccatcttgtgaaggcactgtgaatattgttgatgaacatgcagatggggacatcaatactgttgcagggaagattgattctcatgaagacctagatagtagtagacattctaacatgattctcaaggtaagtggcacatcgatagatttcagcaggcctgcttctttgaaggaaagttctgatcttgtacgacctgaagccagtaatatttctcatgtgaaagatgaaattgaagtttgtaacagtgcaatagttgcacagaaagacacagagtgcttgtcttctggccgcagcatgaacattgaggaaagtccagtttcggttaggaaaaatagctatgttgggaattcaaactctgcacatcctatatccgtaggcatcgatttgtctgatgccttgtctccaccaaaaaatgatgaatctaacgtggagagtgagattaaaaaatatgagaacctgaataagatggaaaagaaggcctatgaagattctattcttaaaaatgctcgcgttatagaggtatag

SEQ ID NO: 13348 - DNA, 267 bp, Zea mays
  Peptide Sequence Number=SeqID_55127
atgacacgtacctcaccggcgcgcggacctagggttagggtttgggtagaggagggcgagcagccgcggaggtgtgcagacgggtcgcaggggcactggggaagtcttccggaggattgtgcagcggagaaccgcgaggtggacgccggaggtgggcgtggcaacggtggggttgggctgggcgcggaggcgggaagctcaagagaggcacatacaaggatactgagccctgacatatgggcccaggggcaaaatggaaggaagtaa

SEQ ID NO: 13349 - DNA, 339 bp, Zea mays
  Peptide Sequence Number=SeqID_55128
atggcccccagaggcggtcgcctcggtgaggcacggcgcagctgcgaatcgctcgacccggcgagcaattgcccaagcacagagacaccgacggaggaactgatggcttacggagctcgcaggaaccacgacaccgctccagaataccccacggatacccgagcgaccacgattctcgtgctcgtcggcggcggatcctcacttttcctcactgctgacacacgggtccggtttgccagcgactgttcctttcctgagcgcgtgagcgaagtgtgcggctggtcaagcgggcccacgcggcagtgtcaccggtcaagcgcgcgcgagggccatctgtag

SEQ ID NO: 13350 - DNA, 1902 bp, Zea mays
  Peptide Sequence Number=SeqID_55129
atgggcgagacgatctcgttcgtccctcggaaggccatcaagtcccagatcttggcggactttgtggctgaatgggtcgacactcagctcccaacagctccgatccaaccagaactctggaccatgtttttcgatgggtcgctgatgaagacagaagcaggcgcgggcctgctcttcatctcgcccctcgggaagcacctacgctacgtgctacgtctccatttcccggcgtccaacaatgtggccgagtacgaggctctggtcaacgggttgcacatcgccatcgagctaggggtccgacgcctcgacgctcgcggtgactcgcagctcgtcatcgaccaagtcatgaagaactcccactgtcgcgacctgaagatggaagcctactacgatgaggttcggcgcctggaggacaagttctacgggctcgagctcaaccacatcgcccgacgctacaacgagactgcagacgagctggctaagatagcctcggggcgaacaacgaccgacgacacgcccgagcccgagaaggcctcgacccagcccgaggcaccctcagcccagtccgaggcaccctcggctcagcccgaggcaccctcggcccccgaaggtgaggcactgtgcgtcgaggagcggagtggggtcacgcctaatcgaaactggcagacctcgtacctgcaatatctccaccgaggagagctacccttcgaccgagccaaagctcggcggttggcgcgacgcgccaagtcgttcgtcttgctgggagacgggaaggagctctaccaccgcagcccctcgaacatcctccagcgatgcatttccatcgccgaaggccaggagctcttacaagagatacactcaggggcttgcggccatcacgcaccgcctcatgcccttgttggaaacgccttccgacaaggtttctactggccgaccgcagtggccgacgccactagaattgtccgcacctgcgaagggtgtcagttctatgcgaagcagacacacctgcccgctcaggctctgcagaccatacccatcacctggtcgtttgctgtgtggggtctggacctcgtcagccccttgcagaaggcacccgggggctacacgcacctgctggtcgccatcggcaaattctccaagtggatcgaggtccgacccctaaacaacatcaggtccgaacaggcggtggcgttcttcaccaacatcatccatcgttttggggtcccgaactccatcatcaccgacaacggcacccagttcaccggcagaaagttcctagacttctgcgaggatcaccacatccaggtggactgggccgccgtggctcaccccatgacgaatggacaagtagagcgcgccaatggcatgattctacaagggctcaagcctcggatctacaacgacctcaacaagttcggcaggcgatggatgaaggagctcccctcggtggtctggagtctgaggacaacgccgagccgagccacgggcttcacaccgttctttctagtctatggggtcgaggccatcttgcccacagacttagaatacggttccccgaggacgagggcctacgacgaccaaagcaatcgagctaaccgagaagactcaatggaccagctggaagaggctcgggacatggccttactacactcggcgcggtaccagcagtccctgcgacgctaccacgcccgaggggttcggtcccgagacctccaggtgggcgacttggtgcttcggctgcgacaagacgcccgagggcggcacaagctcacgcctccctgggaagggccgttcgtcatcgccaaagttctgaagcccgggacgtacaagctggccaacagtcaaggcgaggtctacaacaacgcttggaacatccgacagctacgtcgcttctacccttaa

SEQ ID NO: 13351 - DNA, 1128 bp, Zea mays
  Peptide Sequence Number=SeqID_55130
ggcacgggcctcaggatgcagtccttggtccggaatgtctgccgagccggaagccgtggagcggcggcgaggctcctggaggccgccgcggttcatccgggggcggcgcagccgtcctcggccgtcagacacctcaggcatccttgcgggttcgctcgtccgatcggggtagatcaacccaagcctgtgcagcgccggaccattttgcgtgatggcggccgcgttccggctgccgcctccggattcggtctctgcgcgaaagttctcgttgcgacgaggggtctgtcgacggcgggaaatgctgctgaggttgcctctgattcggacgattccacctctcctgcggttgagcaccccccgcgcatcaagttcaagaggcctgacaagaccgctagacacattatgaatatcctgaacaaagaggcggtcgaaaaggtccgctcggagagggcgattcctgatgtgcagcctggatgtatcattcagatgagattgatgactacaaaacttgagcaatcttctgcggagcatcgcccagcaaaattcgcagcaccatcgtctttgacccccaagatctcaatgtttggggcaaaagctggattcatcatacctaagaacaagctggccggctcactcgtaatccggagcaccagtgacaagaatgaaacaccaactgcatccaacgaagatagcagcaggcatgttcacagaaagacaaagtgggggcctgaccttgctttggaccctgtcgtgtgcaaaggaagggctttggcctaccagactcgagtggagcaaatttccaagcagctgaagtctggagctttggacacgtccgaaattgatggttcagtgtctgctggaaatgaattgaattctattggtcctgacatcttgaaagagaacgagctgggaaatgttgaactattggaacttgaaagacgagagcttatcggtcagagaagttatctttttctcctggtgaacggatgccaaaccgagcactttggattgggcacgctggggacaacggtgattgtgggtggtagggtgaacggatgccaaaccgagcactttggattgggcacgctggggacagcggtcaatctcaaggcccaggggctgaggtag

SEQ ID NO: 13352 - DNA, 684 bp, Zea mays
  Peptide Sequence Number=SeqID_55131
atggcaagcccgcggagccctatggctacaagtgaagataaggtagagcttcaagaaattgatggtggaggaaatcccacacagcaggagcaaatacaaggagctggtcaacaagaaactgaagaagaacagaggcaaagcgttgcagctggagcaagagcacaacaacgtgggcaaaaaagatcaagatcagatgttgattcatctacaaacccagcaagttctcgcaagtctgaggtatggaaagacttcaagatcgtttcaccagaaggtggacctgaagtagctgagtgcttgcattatggtgatatgtccagtgattatggtaactttttgagtactcgtcgaactcatgaagagaaaacacagctggaacttcatttggctgagccaacaaaatatatacatgagaaattggatgttttagattattggagcaagacatcagcacgctatccagagcttgccttaaaggctcgtgatattcttgctgttccagtgtcttctgttgcatcagagtcggcattcagcttaagccgcaaagttataacccatactcggagttctcttgattctacaactattgaagctttgatgtgtttacaggattggcaccgtgaaaaaatggatgaagcacagaaggaactgaaaatattaaaaatggaaatgggttacgcctgttga

SEQ ID NO: 13353 - DNA, 456 bp, Zea mays
  Peptide Sequence Number=SeqID_55132
atggggagtttatcatcatctaccttagtgaatcctctctttggcctacccgtctctaagaaggtgacaaagtctatccatgcgctatgggtgcaggttagggctgctttccacggtgcaaagctgcttagcttgctggacggtgacaccaagaaagagtatatcacatttagtgagttgttcaattggcttctatatttcaagacccatactggtctcgcctctgataggagatttgtcaatgtcatgacccaagaacatggtgctaacaagaatgagattatgggcatggtaacaatagggggtgtggccctagcaactcgaatcaatagtgacagatggggaaagcacctcatctaccaagtttgcttcaagaaaaaactcacaactgttgagtactggcatatgtctgatgaaaattttgttctggatttaaacttgttggctctatcatag

SEQ ID NO: 13354 - DNA, 1182 bp, Zea mays
  Peptide Sequence Number=SeqID_55133
atgtcgtccggcttgagtggcagaggtggtaccagtgggggaggattgagtggcggtggaggaggaggccgaggcggtagcgagtattggcagttggatatgcaacctgctggatctgctcatccgaatgagccggtgaactccataggcgacagattcccccaaatgcatgtgaccggcagcggtgaactcgacctcaacggcggggataccttgcgtggaggtggagtagctttccactcgtgtgtgcctggacaggcgagagtcgtcgcagatccgttagattcatccttgttcggcggcagggagttcttcgacctagataacgacattgacggcgaattcgatattaatagcaatacatgtcctgataatcagtcacaatcaaggcaagttggaccaacaacccccacatcaaggccaaaccataagcgatcaaaaaatttcagtgatcaagaagatgaagttttggtttcgacatggttgaatattagtatggatcctgtggtaggtaaagatcaaaaagttgggaggatccagttaagacgtcagagtggtacttcaatgcaagacatgctttggtatgtctacttaacacatgcaaatcttttggccagggttgcccagtcatgtgcgttgtataagtctgaagatgaacatcaaaaagcttttcaattcatgcactgctggaataagctgagaattcaacccaaatggcttgctaaagttgatgatttgtatgctgctaaaacttcaaacaagaggcataagaccactcgtgatggtgatgctaatggaacaccaccaaatggaactaatgaatctcaagttcaagtaatagagaataaccaattgacaaggccaaatgggaagaaaaaagctaaagcaacacttttacaagagaagaagaaaagtgtgactgcggcaatagaacatttgtgggctggaaagaaagaaagtgatgctgagaaagatctgaaaaaagaggagaggttcaataaagcgtttgcacttgaagtcgaccgagttaacatggaaaaggcacttctcaaggtgaggaaagaggagattgaattacagaagcaaagtgacgaagagaggataatggctatggatcttggtgcattgacagaagagcaaaagacctactacatgaggttgcaggctaagattatgggctag

SEQ ID NO: 13355 - DNA, 822 bp, Zea mays
  Peptide Sequence Number=SeqID_55134
atggcgcggcggtcgacccctctcctacgccgccttctcgccccgtcaccttccctccccactcccctagccgacgccgtatcccgccgcaccgtcacctacatgccccgcccgggggacggcgctccgcgcggcgtcaccctcatcccgggcgacggcatcgggcccctcgtcacgggcgccgtgcggcaggtgatggaggcgatgcacgcgccggtctatttcgagacgtacgaggtccacggcgacatgcccacggtccccgccgaggtcatcgagtccatccgccgcaacaaggtctgcctcaagggcggcctcgccacccccgtaggcggtggtgtgtcctccctcaacgtgcagctccggaaggagctcgacctctacgccgcgctcgtcaactgtttcaacctccctggcctgcctaccaggcacgacaacgtggacatcgtcgtcattcgggagaacagtgagggcgagtactcggggctcgagcatgaggtcgttcctggcgtcgtggagagtctcaagctgagaaaccaatgtgtttctgcatttgttatggaaaaacctgctgcgtttttgtcagttcatttattatgtgtccagcaagctgatctacctgctgtgaatatgagggtgcatgttattgctatccctgtcattcttaatggtatggaaacagtgcaacaacaacaacatagccttttgtcccaaacaagttgggataggctagagatgaaacccacaacaaacaaggataggaaaaaagaccgaaagggtaaaataaagacagtggagttaaggaggacgccagaagcatga

SEQ ID NO: 13356 - DNA, 822 bp, Zea mays
  Peptide Sequence Number=SeqID_55135
atgtcgccgccgcgggcgttgtcgctcaagccatcgtgggagctgtatgtatttacgatagaacgaggttacgacgaagaacctaaagcccaacttttggatcagcatctggacaacaaggtggaatgtgacacccttgaccaattaattaggaaagctagtgagagattaccttactcgaaaggggtaagcggggaggcatcactgcagagtatagttgtcgggtacccgagaacaaggtgcccgaagaaggcccaaaagtcctcccaaggacggcccactaaccgaccgacccacttgccgagcaacccggcggggcgggtatgccgaccaaacccgcccgccgaacaacccggcggggagggacaaccgaccaaccagcctgacaagcaacccggcaaggcggaattgccgaccaacccgctcgccgagcaacccagcgaggcagggttgccgatcagcttgcctgccgagcaacccggcaaggcggggcaaccgatcaacttgcctaccgggcaacccagcaagacgacaaccggctctcggatgaacacctctacaggggggaagagacgacctagtactatcaagccacgacgacacgatgaaacagatcatcaacaagctgtgtctataccgtgggagcagtaccagagggtctctatcaagcacgacgctaggtgcgtatccccgctgactcgtgggaccagtcaaccccagtcgcagggacctcagcatcggggtctctacagtgacgcatacaccagaagggacggggaaatacgcggtaccaggcatacacctatgcatgatgaaagatga

SEQ ID NO: 13357 - DNA, 1239 bp, Zea mays
  Peptide Sequence Number=SeqID_55136
atggagaaagatcaccaagatgcccagcggaagaaacggaaggcccctcttcggctggtggacccatgccgagatgctaaggtggtgcggctcaatgtgaagggagctgctccgcctgtgacgatgactccccccgcagtgctggccatcgctatgaaactgccttcgccgccgcgcgtgactgagacgacggtgtcggggaccgaggggacgggccaggagttgtcaatggacgactacctggtgggcagagtcgctatgtttgatgcccagactgggctgccgcctactggggcggaggctgggcaactggcgttggtaccgtttacggtgcctgctgacctcgtgggtacagcgaagggtgacacagggacttcattggacccatggtcaaaattttgcgccaccactgatggcggaggcgaacttgcctcggcggttgccgcttctggcgtaactgggtctgtcgcgcggcagctgcgatatgtgagtttttttgctgaatttggaaaattgagatgtcaggtgacgaccttcgtggaccaggttgctttgggggcactgaccttgcagctgatttctgagaggaaacgacttgtgggtggggttgagctcattcggaggcagcataccgaagcaatcacggacaagtcggcggccgaaaataagagtcgaaaccttctcgagaagatcgaagatgacgtgttcaagcgctctgcgggggcactttacgataggatgtggggccctcatggacgcggtgtcatccgagagagggtcgaccgagcgcgggcacaagcgatgagggatgaagaggtggaggacctcgccggcctcgagagctcggtggctcgaaaggatgctgcggtggaggcgggagcggaggagctatccttgcttcaagaaggtggcgctgagggtcctgcagcggcgggtgcttctacgcaggttgaaaaaaatgttccggcgactaggcctgtgcaagcaaaccttgatgataacacgaatgatgatatgttggtgtgtggaaatgttgtgattcttagtagtgacgcatctgaggaatctgatgttgggtcgtggtcttcggaaggtgaagaactagggagcttgtttgcttggatagatgacgaatcttcggaagatgatttagattattttgtggcgctagatttagctgtagcggagtctcctttgaaggtcgcccccttgaggcagcgacgacttcggtcagggtag

SEQ ID NO: 13358 - DNA, 324 bp, Zea mays
  Peptide Sequence Number=SeqID_55137
atgaggtttgctatccgtgaagggtgggagagctgtgtcattccgctaagacagaaaaaagggtacaatgggccaagagcagaggccaaagctgagtacaaaaccccactcacccactcaaaacaacctagaccagataacaaacttgccgcaaacagaaaaagaaaacttgaccagcagagcctgctgaggaactcaccgagtccggacgcccctgctaaacaccacaggacaaacccatggtttgaaggagctcagcgatgttgggctgaaccctgtcaaaaacacaagggttcctatgcttccaaacttcccatgccataa

SEQ ID NO: 13359 - DNA, 315 bp, Zea mays
  Peptide Sequence Number=SeqID_55138
atgcggccctggccatggctccccgctgcgccttccccctccctacagcgcctaggctggccagcttgccaccatgaagtgattcgttaccgagcttcagtgaaccaacaatcaagctttggtgatcccgagattaagctctttaagttttacaaggttgaagaccctgagcatctgtttggtgaaggcaagtgtcctctaagctacttatgtcatattcacatgaaacttacattcccacacaacatgattcaatcacgattgactagctatctatttacactatccttgtttaccttttgggttgggctgtga

SEQ ID NO: 13360 - DNA, 492 bp, Zea mays
  Peptide Sequence Number=SeqID_55139
atgcaggcggcatgcaaccgcgccaagtgggcgcacttctccgactcccaacacgcccagcatggaggccccaggcccacgtgtcatgcaaccagcgcgcccgaaacgcttcgtgcatgcaaccgcaccgccactttgcgccaccaccgcgcctcctcgattgcggaaccaatatcgcgactcgaggcgacccagtgcacgacccagcagcgccagcctggcgcggcgggaccgggaaagggggataccccgaaaaggatccttccctgtgaagaaaccaggctccgagccaccctactgatcagaggttcgaaggctggccccccgaaagggttcgacagccgcctcagatcgcgtgggccctacacccactactggtcagaggttcgaaggtcggcccctcggaagggttccacggccgcctcaggctactcgggctccgcgcccattacttatcaggggttcgaaggctggcccccgaagggttcatag

SEQ ID NO: 13361 - DNA, 207 bp, Zea mays
  Peptide Sequence Number=SeqID_55140
atgtgcatcaaattaagaagggagacggggaggctcaccgcggggaacgagggcggcgtcgacggatggcgggcgcggcgtggacggacggcaggctcccttcttcgcgacggcggccacgggctcccttcttcgcgggcgggcgggccgcgggcggcgcggaattatgttaatatatggaccaccgtgaaatcgaggagaagctga

SEQ ID NO: 13362 - DNA, 249 bp, Zea mays
  Peptide Sequence Number=SeqID_55141
atggagaagagctatgctataaagattgctgacgagatactagctggattgtcggatgattctgaggatagtgaagactttgactttgatagtgatgctgatgatatcgaagatcgatcatggagaccgagtcatgttaacatcgggaagtcaactgtaaaaacggggcatattgaggctatgaaagactcagactccgactatgctgggtgcaaggttgatagaaagagcacattagggacttgttag

SEQ ID NO: 13363 - DNA, 198 bp, Zea mays
  Peptide Sequence Number=SeqID_55142
atggaggcacaagatcttcaaggtactagagcaagggagaaggtcaaggtgactgaggaacctaaagtcaaggaaggtgaccaagaaagtccaagtcgatcggagaaagaatcgaagaaaaaggacttcgataccatctctttgggcgtactagacattcaacaggactggtccgttggcgcaccagacctccaatag

SEQ ID NO: 13364 - DNA, 117 bp, Zea mays
  Peptide Sequence Number=SeqID_55143
atggcggcgaggcaaaccagcgacacattcccgatcgactatgaaccggacatccgatcgacaaaccagaagcgtggtgacgaagctcttgcagagccggtcactgcgacattctag

SEQ ID NO: 13365 - DNA, 237 bp, Zea mays
  Peptide Sequence Number=SeqID_55144
atggagttttgcatatggttcggacgaggggccttaccatgggcgaacggccgcgctaccgtgccgagcgccagccacgccggggaagaaggagaaaggaaaagggggagaagggaggatggatgcgagctcaccacggtgacgaacgacgactccggcaaggcgagcttggacgccgacgaggatgggggcgctaggcagcgctgtcacgcgggctgggaggggcggttcggctag

SEQ ID NO: 13366 - DNA, 138 bp, Zea mays
  Peptide Sequence Number=SeqID_55145
ggaattgaggttgatcaagccaaggacgagtgccctagtggacggggtgttgcgctccacaagatcgtgacagtcataggaggtggtgtattggttgctaaggcacagtgtctttggaaggctgtagtcgggccgtga

SEQ ID NO: 13367 - DNA, 600 bp, Zea mays
  Peptide Sequence Number=SeqID_55146
atgggtggaggtaggaggggtcgtggttggcctcgccacgctgatggaaagcgcaagcatgtttcaagtccttccttggaggacttcggggactcggagtactcggaggaggcctcctctgactctaaccgctctcctactccgacttctcccctggcatcatccgaagattcggatgactccatggggctctccaccgtggcctgggcgtattggtgctccatcgagcgcgccgggctcggtgggtcggatgagtcggggatctcctcggatgaggcagactcttccaactcctccgatgagtggagcgacggcgacgatgacgatgacgatgagggcgacggcagcagcagcggtgatgacgataagggcgacggcagcagcgacgacaacgatgagggtgacggcggcgacgacggcaatgacggcggcaagggagacgtcggctatagcagcggcgacagcagcaacgacggtggcaaggacgatggcaacagcgacgacagcggcaagggcgacgacggtagtgccgacgatgacgacaacggcaagggtggcggcagcgacggcaaggctagtggcataatgccacttgtttaa

SEQ ID NO: 13368 - DNA, 692 bp, Zea mays
  Peptide Sequence Number=SeqID_55147
gcgacgagcttcacgacggcgaggaggcacagcgcgagcagggcacgatgcgagtacgtggcgttgttgcgggtgtcggggtgctgcgcggacgagctctggcatggtgggcacgagttctggcgaggcactgtgggcgagctccggcggtgaggtttcggcaaggaaagagggcgcgagaagagagcgagcttgagcagggagaaggaagggctcggctgggattttatagagaaagagagagggagagcagaggtcgtggccatgaatggccagggggaagagtaacaggcggcatcaatgggtcgcggcttcggatcctagcagcgaggtcgcgcggggtggctcagttgctgctcggcctgggcggcgtcgggctgggcgctcggccgatcctggtcgcaggcggggctcctggcgtcggcttggcactgcaggggggcgtggtcgggaggtggcggctgggcgctcggcttggcttcctgggagcaggcgggtgtcacggcgcaggggctcggggtcgcggatggccgagcgcgggtggccgggttctggcgtggcggcttggtccttggagctgcgcgcgggcggttgagagcagagggaaggagagagagagagaagagagagggaggaaacggctcttggcggcggctgggagcagggagagggaacagggcgcggctggctag

SEQ ID NO: 13369 - DNA, 147 bp, Zea mays
  Peptide Sequence Number=SeqID_55148
atggcccctagtgcccccctcgccttcgccactgtcgaccaggtcggccccaaccccgacctaattatctcaactagtttggccccgaccaagtcaagcccgaccttggtcgccctaagcaaaccccaacctggttggcccggctag

SEQ ID NO: 13370 - DNA, 1005 bp, Zea mays
  Peptide Sequence Number=SeqID_55149
atggcgaggtgggtctgcgacggctccggtcggtgcacgcggcccgcccttcatcggcggcgagcggggaactgggtggacaccggaccgcagaatcgcggattcgatgggagaggggatgggaggaggcagcagagggtgaggaggcgtgattggatccgctgcgggacggtgtgtgagaccggcgccgaggtggacgccgtcgcggacgtgtgcggtgtggcggtgctacaggaggactgcgcggcgaggcatgagcggcctgggtcagacccaacacgggcgatggtggggacggtggggatccggcatgcagggagaggtgagggagaggtgggcgagggggcggatgtgcgagggagggaatgggggagaggcaggggcggcgggatgcggctgcgggcgggagcggggtgcgtcagcgggcagaacgtgcaccatccggaggtcttattcttcgcgacactatcgaagccacaagcgaacccaagaagggttgggcgacgtggaggctcctccgaagccgaggttgagtctgtcttccgtggccgaggccgagtccgagcccctgggtcgggcgaggcggaggtcgttcggcagaggccagggcggagtccgagccctggggtcgggcgaagcggagttcgtcgtcttctggggctgagcctgagtccgagccctggggtcgggcggagcggagttcgccgtcttctggggctgagcccgagtccgagccctggggtcgggcggagcggagttcgccgtcttccgggacttagcccgagtccgagccctgggtcgggcgaagcggagttcgccgtcttccgggacttagcccgagtccgagccctggggtcgggcggagcggagttcgccgtcttccgggacttagcccgagtccgagccctggggtcgggcggagcggagttcgccgtcttccgggacttagcccgagtccgagccctgggtcgggcggagcggagttcgccgtcttccgagacttag

SEQ ID NO: 13371 - DNA, 526 bp, Zea mays
  Peptide Sequence Number=SeqID_55150
atggctcgttatcctgctagaaacgtcgtcggttctgcctgcgtttcttccacacgaatcgtacacgcgctcaatgtcaagatgcgtattaaacttttggctacagacgtccctgcatcagcaacaaaattgcattcaacatatgcccccatcgctcaacgctcctcgcatccgtcgctagggttctcaacaccacttgcccacgccagcatcgcgacaccagcacgagtggcacaccggcgaggcgccagtgcgaccatggctgtgatccgccagcctgacggcggctgtacacagcatcagtgcatcagctgctacgcgaagcaccatcctggcaaaggtgcgagcaagcggtcccaggtggcgcggtcatctttgactcaagcaactttccgtcacgcatctgctccaccacttggccaacacagcctctccgacctggatctccaggcatccggatctgcagcacctgaagacagccatccgctgccaatcaactgcccccatctgcagagcacctgcttag

SEQ ID NO: 13372 - DNA, 1764 bp, Zea mays
  Peptide Sequence Number=SeqID_55151
atgccggcgaatggcaagctctcggcgaagccctccccctcgccgatggttgctcccgcctcgcgccccaaatttacagctgttacctttctcggtgactgcgacgacgacgatgacttccaacctcctcgcccccgccccttgaagccttgcattggcgccgccgcacttcggttccgtaagaagctcaaggctccatcctccgggaaggagaatagttccgccgccggtggtgccgttactgtggtgggggtcgcttcgacggccgtgaaggatgccgaaaccctagccgccggctctagggttagtggcgacgttcccaaaacgaagagacgaaagaccggtgaaagttgcggcctgtcgaggtacggatctgatagcactaaactaagctgtaaaccgaagatagaattggatagatacggatatggcaaagggtgctgcagtttcttgcccagtgcgatagactcgacggttttggcgctcggtgcggtatgtgattttggagttaggcgttgtgatgaggctcaaatagctgtctccaggcattgtacctcagttcttgaggcggggcacgccacagaagagctgacaccgacaggctctgggtgtgatccacccaaaacggagaagaagccgggcagttctgaagctgtggagggacatcacgactccaggttgattgaaccgaggcttgttgaatcagatgcaaacctcgagtttgtaactgggattcttggctcactgactgataaacaggacacgaagaaagcaaacggggtggtatttggatgtggtgttggatttcagaatgggaactatcacttggattctctacagccagagcttctaacgtcgaactcaaagtatgattctagagtttgtgttagcaatgaaatccaagagcctggtttgggagcctgtaacttgatttcacaggagaggaaagtagcagctggacattctgcatgtgcaacccctgaaaatgtgactgcagagaataaatcaagtgcacctgaggcttgtaaggggcaatgccactccgattcatctgcatcaaagcttccagaatcccatatgatccatgactttgaagttgatggttgcgataattttgagattgggacccagctcagtgagctcattaacttgtgtatgaaggattccatagagggacaatcaaactttggtgcagctcccatggaacagaacactttagactctaagagactcagttcagactatgaagcgaaatgccctctatgtggatcggatatttctgatttaagcgaggagctccggcagctgcatactaacaattgccttgacgaaccagctaagggcaagcatggtgtagtggtgagagctgtctcactagttccctcggtcgtgggtttgaagcagtctctccgcatttgtggaaggaaggaatctagtcccaaccataaaaaagagcccagtgttggacaaaatgttgaaactggacgtgttgtcgaatggttaagaaaccttgggttatccaagtatgaggaagtttttatcagagaagaagttgactgggaaaccttgcagtggctcactgaagaggacctgttgggtattgggatcagctctcttggaccaagaaagaaaattatccatgctctaggagagttactgaagaaacatgatgatcccagtgaaatggaagctgtgttaaattcaggaaatactaagaagactaaacttccgatgaatggatgcatttcgctacttgagaggtga

SEQ ID NO: 13373 - DNA, 891 bp, Zea mays
  Peptide Sequence Number=SeqID_55152
atggcgtcggtgcagctgtctgggccgcgggtggtggcggctgcgaaaccggctgcgttgggcgggctcctcctgacgccgtcccttgcggtgccaaaggggcggagggccaggggcctcgtggtgagggccgccacggtcgtgtcacctaagacttgcagggcgcgtctggtagccgctgttcggttctgtgggtgttgggcgtatacgtccataaaaccattgggagacagagtacttgtgaagatcaaaacctctgaggctaaatctgatggaggtattttacttccagtatcagttcagacaagaccacaaggaggggagattgttgcggttggagaagggagaagttttggaagtaaccgcattgagatcagtgttccggttggtgcacaagttgtctactcgaaatatgcaggcacagaattgaaattcaatgacgccgaccatctcattttgaaagaagatgacataattggtattcttgacagtgatgatgtgaaggatatgaaaccactgaatgatcgcattctgattaaggttgctgaagctgaagaacgaactgctggtggtttgctattgacgcaggcaactaaggagaaaccttctgttggatcagtggtagccgttggcccagggccgttgggcgaggacggcagcaggaatcccctgtcgatcactcctggaagcaacgtgatgtattccaagtatgcggggagtgagttcaagggcgaggacggtgagctaaccagtgttcagctggtgggtgagctgaccagcacgtcgggttcggctgttcttcctgatgtcagcgttgtacgccaaggttggccaacggcatcaatattactaatagcatctaggctaccgtttgagtttttcatggattaa

SEQ ID NO: 13374 - DNA, 1299 bp, Zea mays
  Peptide Sequence Number=SeqID_55153
atggccgccggcagcggctatggcggcggggtagaggcgaaagcgaccaccacggctgtgtcggccgcggcccccgcggaggttcccacgtcggcggcctccgtcgacatctcgctgccgctcctgaagatgtcgcctcgcatcatgcaagtaccccgtccccacatctatcttcgatcctcttgcttcggctcgcgctcgcgctcgcgcttgcgcccggcctggtcacgctgtgaggtcgtgtcatgttcgggtactcgcgatcgcgaggcgtcgtacccgtgctcgggaacgagccgagctctctgcaaggaattggtcgaagggtggtcgtcgattgacagctcgctcttctccatcgagaccgtgtccgggggcatcacgaatctattgctgaaggtttctgtcaaagaagacaacggcaatgagtcttctgttactgttcggttgtatggaccaaatacggacttggtgattgataggaaaagggaattgcaggcgataccatatctctcagctgcagggttcggggctcggctacttggaatatttgagaatggagtagttcagtcattcatctatgctcgaacactgtcaccagcagacatgaaagaacctaaaatagcagctgaaattgccaaggagctacgcaaattccatcaagtagacataccagggtctaaagaaccacaattgtggaatgatatattcaagtttttgaagaaagctgcagcattgaagtttgaggataacatgaagcagaagagatatgaaaagatctcatttagagaaatacaagatgaagttcaagaacttaaggatctcttggacattctgcgcgcgcctgtggtttatgcacacaatgacttgctttcaggaaatctgatgctcaatgatttggaagggaagctatattttattgattttgagtatgggtcatacagctaccgtggctatgacattgcaaatcatttcaatgagtatgcaggatttgattgtgactataatttgtacccagataaagatgcccagtatcacttcttcaggaattatctacacactgatagacctagtgaggtggatgcacaagatatggaagtactttatgtggaaacaaacactttcagactagcatcgcacatttactgggcattatgggcccttattcaggcaaaggtatccccaattgactttgactatcttggatacttcttcttgcggtatggtgagtacaagaaacaaagggagtcctgcttctccttggcacaaagctttctctccgagctaaaaaatggctag

SEQ ID NO: 13375 - DNA, 531 bp, Zea mays
  Peptide Sequence Number=SeqID_55154
atgtacatgcacatcaatgacaatgatgggtattcttccaagaagaaagatttggcacttaaagctaatcaagagaagaagggcaaggccaaagttctagttgaagaagaatcttcaagtgatgatggccttgatgccaatattgccttgatgcctaagaaaaacaaattcaatggcaagaaagatgatgaaagtgaagatgagaagaaggaaaagaagtttttcaagaaaaaggatggtaaacaaaagaggttccacaaaagaaagggtgggaaatcttacattgttggtgatgggctcaccgatattgcatccacaagcggctcttcctcaagtgaagaggatgatgaaaaggttgttgccgtcgccgtcgccgtggatttctcttcgccaccagcatcaccttcatccactacacacctatgccttatggataaaggtgaacggaaggtacaaaatgatgttactaatgaggttgagtgtggtagtgatagtgatgatgaatatgcttccctacctatgatgagctag

SEQ ID NO: 13376 - DNA, 132 bp, Zea mays
  Peptide Sequence Number=SeqID_55155
atgggtaaaaccctaagtacaaaagtactcaacaagacttactcgactaaagaaaagactctcaagggtatgctggtttcaaaagggattcaagttttacttgtcaggttgagtaaagttacctacatctag

SEQ ID NO: 13377 - DNA, 324 bp, Zea mays
  Peptide Sequence Number=SeqID_55156
atgccaaccttgagagataaattggtgcgaagcccaaccttcgtcgtggatttgcgtgggtgggatgcgggcgctttcgtgcgggaactagagtcggaggctgttaagattgtcggaaaatatgcgtcgaagactgaaatgttaaggagttgggacattcgcgggggaggcgtcggcgatgatcgaggcaagcaagtgaaaccccaggccgacaaaggctcctcaaaggagaaggctccggttgcaaccgctcgaaagaggaaattaggtatgggggatgttgagactgggtcgagggccactggagttttgttgaggagttaa

SEQ ID NO: 13378 - DNA, 264 bp, Zea mays
  Peptide Sequence Number=SeqID_55157
atgatggactcgctccccatctatcgtgatgggtctcaagtcctacgcgtctctcgttacttgcgaggggctgcgaatgctttgtctcatgagggatgcagacattttgaagttttcgaccgagcgaacgaggacttcaattgtggactcttccaaattgaagatgacgtgctgaagcacttcgctggggcactttatgataggatgtggggtccccacggccgcaacatcgttcaggaaagggcggaccaagcgctggcgtag

SEQ ID NO: 13379 - DNA, 402 bp, Zea mays
  Peptide Sequence Number=SeqID_55158
atgagtgatctatggagttcacaaaacgtgtccgatgcagctacgagcgcggtcgaggactgggattccgggaattgcttgctgagttttcgtgtcgccgtgaaaccacataggaccgtggagtgcttcattgccaccatgatttcggctttagcacctaggtgttgggtggggagtggcctagtcctagcattagcatgtcgccgggaggccctccgccgcggggtggccggcgcgtcgtcgctttctggcgaggggaatggccgaatggggctcggactcaagcgtcctggccaccgccctggggaagaaggtcttgtgaccattgattccgtgatggacggcttggattttatcgtggataccccttcgtctcataaagatctggccgttgctgggtga

SEQ ID NO: 13380 - DNA, 315 bp, Zea mays
  Peptide Sequence Number=SeqID_55159
atggatttcaaaagtgaggccagcaagggctacaccttcgacaacctcatcttattgaaggcatcccacaggccgtgggggcgacgggggcctaccacgcacaccggtggctttcaagggaagcgccaagagctacgtagcccgctacgtcactcggagttagccctccttcctctgccattcagtggtagtggaaagttgcaatatgacttcttctacctactattgagtttcaggaaggaggcgaacaacggcaacgccttcatcaacctcaccacaacggagggggccaagggggcctaccacatgcactag

SEQ ID NO: 13381 - DNA, 240 bp, Zea mays
  Peptide Sequence Number=SeqID_55160
atgacgcccaaaaagctccgtccgcgggcgtcccgacgctttgccacggctttcacccgcgcccaatggcagcgtaaagaccaccggaaaggagcagcactagcaatgccgccggacgggcgggggctttcacctggcacgagcaaaagtcgccgatcatgtaagctgttcaatcatgctacgtcctatgtagtgcacgtcgatgatgtcaccatctatcaccttgcatcccgatactaa

SEQ ID NO: 13382 - DNA, 1308 bp, Zea mays
  Peptide Sequence Number=SeqID_55161
atggaggtggaggcggcggggccggataggccggagcctccctcgccggcgaaggggactggcgagaatggcgcggccaccacgctgcagaaggtgtaccgcagctaccggacccggcggaagctggccgactccgccgtcgtcgtcgaggagctctggtggcaggcgctggactacgtgcgcctggagcacagcaccgtctccttcttcgacgagcccaagccggagacagccgcctcgcgctggaaccgcgtcagcctcaacgcgtccaaggtgggccagggtttatccagagacggcaaggccctcaagctggctttccagcactggatcgaagcgatcgacccgcggcatagatatgggcacaacctgcacttctactacgacgagtggtgccaaagccaagcaggccagccattcttctattggcttgatgttggagaggggaaggacctagaccttcctgaatgtccaagagctttactgaagatgcaatgtatcaggtatcttggtccgcaagagcgcgagcactatgaatacatcattaaggagggaaaagttatccataaacagtctggagaaccgcttgatacaaggggtcctaaggggactaaatggatatttgttatgagtacagcaaaaaagatttatgctggacagaaacagagaggcgtattccagcactccagctttttggcaggaggtgcaactatagctgctgggagatttactgcagaaaatggagtgatcaagtccatctgggcatacagcggccactacaaacctagtgcagagaacctcctcaacttcatgaacttccttgaagggaatggagtcgatctcaaagaagtcgaggtacgctcatcgaccagagaagactacaacgaagatccagtgcctaatgactcgcagaagttcgcttcagctaccatggaaccaacaaatcttccacagctggtcccccctctaaacaccacgcaaggcaatgaaggcgacaatgctcctaagatcaagctaggccaacctaccaaaggaccttgtcgggcgaaggcgattcttgagaggatgaagtccaagagcgggtctaagtcctaccagctcgggcacaggttgtcccttaaatggagcacgggggctggtccgaggattgggtgtgtcaaggactacccaatggagctcaggatgcaggctctggagatggtggatctttcgccaagggcgtcaactccgtcggcgtcgaggcgactgcctccgtgcttgtctcccactgaaatcgccttgccaacatcactgctcgccctgatctag

SEQ ID NO: 13383 - DNA, 399 bp, Zea mays
  Peptide Sequence Number=SeqID_55162
atgggcaagagcaagaaaggtagcggttcttcacaccattctggcgataaacgcaagcgcgagctgactcctccctcggaggacttcggcgactcggagtactcggaggaggagttctccgagttcgagggatctccggctcccgtctggacctacatccgggctgtcgagcgcgccgggctcgagggctcggatgagtcagagtactcctcagacgaggaggactccttggactcgtccgaggagggcagtggcggcgatggtggtgatgatggcgatgacggaggcgaaggcgatggcggcagtgacagcggcaggggtggtgacggcggcaacaagggcggcaacggcggcggcagcaagggcagcagcaagggcagcaacaaggccagtggctag

SEQ ID NO: 13384 - DNA, 399 bp, Zea mays
  Peptide Sequence Number=SeqID_55163
atgccaacaaaccccgcgcgatgcgtggatggcgttgaccttccagaatctgcgagctgggaaaatctgggtcggaatcccatctcccttgagcatataaatccattgccacggccccgccatcctatcaatgtcgagagggcaaagaaaacccactgggcggagagctcttcatccagtgggcaagaacggggccctgccaccattagaactaggctacacctttatccctacccagtaaccggcccgggagcttctctgggacgcttgagtgctggggcgacccccaatttggcgtgggtggccatagtgatcggtgaattcctcgccaacgtttgctttcaccgcaatgccgccctccaccgtggacagtactcctgcgcgcgtaacgcgtggtaa

SEQ ID NO: 13385 - DNA, 1065 bp, Zea mays
  Peptide Sequence Number=SeqID_55164
atgcataggtgtcagagtgatgtcaaacaatatattgaactggaggtggggcgtgttcagtggcggatccacagggtatgccagatcggaggaatggtgagcgcgtcgagcctgctcctcccgacctccgtgcgggacctggcctcctgcgtctccgacggcgccgtccgcgtcgcctgcaccagcccggcgtccacgctcacggtctcctcctcctcctccaccacctcctcgccgccgccggccacgctctccgtcgccatctcctaccgcgccaccccgcaggccccgtcgtcgccgccgctcttgctgcgcctcacctggtcgcactcccggcacgggcccccgacgctctccttcgccggacccaccgcgtcgtcccccgccgtcctcctccgccgccgcaggggcacctactgcctcccctcctccacctccacatccacccacatccccccgctcgctctcttctgggacctaaccgccgccaggtacagtccggcctcgtccccgtccccggagccagcctccgggttctacgtcgtcgccgtcgccagcgccgaggtggtgctggccgtgggcgacctggcggcggagttcatcaaggcgaagttcgagggccagatcccctgggcgcggtccatcctccccgtgtcccgcaccgaccgggtcgtggcggcggcgccgcggccgggcggggcggttcacacggcgcgggtccggttcggcgagggcgcgccggagcacgaggtggccgtgggctgctgccgcgccggcgccggcaggcccggggaggaggagctctgggtcagcgtggacggcaagcgcgccgtgcacgcgcggcgcctgcgctggaacttccggggcaaccagacggtgttcgtggacggggcgcccgtcgacgtcctgtgggacctccacggctggtggttccaggacccgcccggctgcgccgtcgtgatgctccgcgccaggagcgcgctcgagagccggctctggctggaggaggaggccagggcgcccgggttcgcgctcctcgtgcaggccttgaggacgccgccctga

SEQ ID NO: 13386 - DNA, 195 bp, Zea mays
  Peptide Sequence Number=SeqID_55165
atggccgacaaatgcagcgctgctttcacggtccatgaacacgttgcttccaggctaaattacgcagcgtgtaagacgtattgtaatgctgctttgcttggttgctgtccagcacttcgcgctgtttcagaaaatcctgttagtttcgaaatggaaccagtcaagatcatcatatttgctgatgacaacagttaa

SEQ ID NO: 13387 - DNA, 480 bp, Zea mays
  Peptide Sequence Number=SeqID_55166
atgcgcttgagaccttgctacgtcgggcacttgaccagcgcacttggtcaatcgagtatcgttgtgtggtctaccatcacagtcgcggggtatacctggaccactggcaggcgacttactaggtgcgccgtccggaggatggtctctagggtgcagagtggggtggcccacggtcttaacctgaggtattacccctgccgtccaactgacagaactggatgtgtggttttctcacctattggtgaggacaatcctaggttgaccagcatagtcaacctagccgccgtgctcaataccaagctggacgatgctttagatgagctgagtagggctcgtgctgagatcgcccagttgcaggctgagcgcgcggagcgctgtcagtccgtcaccatgaggatggctctcccgcctacgtcaagactcagcacccgtaccgctcgcctcatgcctaggacaacactgactacaggacccagataa

SEQ ID NO: 13388 - DNA, 393 bp, Zea mays
  Peptide Sequence Number=SeqID_55167
atgttttcggagagtgacaaaaaagaagatgatggggagcaaatagctccagtaatgagttcattctttgatactttcaaagaagaagctgagaatgatattgctggcacaacactggtgccgaaggacccaatgccacctgatgaagaagagtctggtccaaatagttcagaatttgaatgtactattgcagcggtgactccttcggtagtcatagcaactgaagacaaaggttcctccaaacctgccctagcggaggagaaaggaaaagggcttgctaaacttagggaggccaaaaagctatcgaagatgacacaccgcttggtgaagggcccttcgaccaagtcttgggtggccgaagatatcgggttcaccatgccgcagggaaaataa

SEQ ID NO: 13389 - DNA, 561 bp, Zea mays
  Peptide Sequence Number=SeqID_55168
atgccacaaagagatgttgaagacgttctctgctgccgaagctctgtccaaagagaattttttttcgattttgacttagagggtttgatgaggtgggtactcggcgagacccgtgcgttcaagggtgtcctctcggctcgagaggtctattgtgcttggaaaagcgctagaagcactgctttggttctgctgaaagcagggtgcaaacacgtgaaggcttgcatagaccctaacttcaatgtctctgctaacctatacaaagatttggaagagggtggaaaagagttaagtattgaggaatccattaagaacagagagaaggcaaggcaagcatccgaaaaggatgtggacatttggaaaaggcttcagagcaaaaaaaccaaagtttccacttcacaggtcgtgattgaggtaaaacataccgaagctgaagctaaggatgctattgccgaagttgaggccatctctgtcagggcaataaagaaagccaaagacgatgcaatcttgaagatctgcgaacagatttatgacgaagcaatgcgaagtgacccaggaaattga

SEQ ID NO: 13390 - DNA, 519 bp, Zea mays
  Peptide Sequence Number=SeqID_55169
atggtgccccttctgctcagactgcgtctccctctgctcacgcgctcccctgttcatctcactgcgcatgcagcggtgttcggctccagctcgccggacctccctgcccagctcccagcgtcgagcttacctctgtccatgccgcgcgcccttcctgctcgccgcgtcgcgccccagctctctggcgtgccgagctcgccctacgcgcgctacaagtttccttctccaatcgccgcgcgccgcgcacgctgcttcctggagctcggccgtgacctcgccgtcgttcatcagctccagcgcacagccgaactcccctgcctcccatggccgagtgtccagctcccttgttccctgatttctgcgcgccgcacgcgcctctccccgagctcgcccaaatcagacagtgtctccctcagctcgatccctgtcgtgaagctttctggctcgccggcgtttcacccgtgcgcgcacgttcctgccgagctcggtcctgtccatcttgccgcgctcggtctctag

SEQ ID NO: 13391 - DNA, 135 bp, Zea mays
  Peptide Sequence Number=SeqID_55170
atggagctgcaacgagatggggcacgcaggagcagaggaagtcggtcaggccagggcgtgacacagggggaagaagcagaggaactcgagtgggagaggctgggcgtgcgtcgcgagcagataggcgagcgctag

SEQ ID NO: 13392 - DNA, 519 bp, Zea mays
  Peptide Sequence Number=SeqID_55171
atggtgccccttctgctcagactgcgtctccctctgctcacgcgctcccctgttcatctcactgcgcatgcagcggtgttcggctccagctcgccggacctccctgcccagctcccagcgtcgagcttacctctgtccatgccgcgcgcccttcctgctcgccgcgtcgcgccccagctctctggcgtgccgagctcgccctacgcgcgctacaagtttccttctccaatcgtcgcgcgccgcgcacgctgcttcctggagctcggccgtgacctcgccgtcgttcatcagctccagcgcacagctgaactcccctgcctcccatggccgagtgtccagctcccttgttccctgatttctgcgcgccgcacgcgcctctccccgagctcgcccaaatcagacagtgtctccctcagctcgatccctgtcgtgaagctttctggctcgccggcgtttcacccgtgcgcgcacgttcctgccgagctcggtcctgtccatcttgccgcgctcggtctctag

SEQ ID NO: 13393 - DNA, 1731 bp, Zea mays
  Peptide Sequence Number=SeqID_55172
atggcccaagggcacatttccctttcacttctccccccaacctcccccctcggaatctacaggaacaatggctatctgatggtctcctgcaacggcgggcttaaccagatgcgagcagcagcctcaaggttccacctatttttgttgttgttgagacagatttgtgacatggtaaccatcgcaagacgagatcgcactccgcacctgacgccgccagtgccggagccgacggagatagcgggcctccacctccgatctagtggtgcgcctccttaccgaggttcgacgagctttagcggcaaagaacaaagggcattgggagactgggagtggttagattggctcgtcttggagggatgcgatcgtagccgggcctgcacttttcgtggtgacgcgctcgatttctcgttaataatgcgggcatcagtgactattcaaacaacaggcgtggtgttacagtcatcactcatcagcagtggcggagcacgacccaaaattaagggcagcaggctttccaagcagccgaatttgaaagcagcaaaagaaagcaggcggagcagtggagcacgggctgcacatccgaagcaggcggagcaaagcaaagcaggcaagcagccgtggagcagtggaggtggagcacggccgtgcggccgccggccagccaacgcccaacgggtcaaccggacaagcacgcgcgcacagcaggaaggcagaggcagccaccagccaggcaagaccgcagcccgcaggaagcagaagccagagacggagaaacatttggagaaccatacccaacaaaataagcaccagcatttcatcctttgtctcggcattccaataataataatgtggaaacgtaatccctttgggggtaaagcacatagtggactggatgggcgcactattgttgttagaagtctgaagatctcagtacgaaatgtcattgcacaaggaggcttctcttgtgtatatctggcatgtgacacagtacatccatcaaagatgtatgcattgaagcacattatttgcaatgactcagaatcacttgatcttgtcatgaaggagatccaggttatgaacctccttaaagggcatcctaatgtggtcacacttgttgcccatgatgttgttgacatgggccgtacaaaggaggcacttcttgtaatggagttttgtgagaagtccttggtgagtgcaatggagagcagaggtagtggttactatgaggagaagaaggtgcttttaattttcagagatgtctgcaatgctgtctttgccatgcatggacaatcactgccaattgcacatagggatctgaaagctgaaaatgttcttcttggatcggatggtgcatggaaaatatgtgattttggaagcacatcaactaatcataaatgctttaacaaaccagaagagatgggcattgaggaagatgtcatcaggaagcatacaaccccagactacagggccccagagatgtgggatctctacagaagagaagttatcagtgaaaaagttgacatttgggctttggggtgccttctatatagaatatgctacttcaagtctgcatttgacggagaatccaagttgcaggtactcaatggcaattatcatatccctgagcaacccaaatatagcattgctgtcacagggctgatcaaagatatgctggaagcctcaccaaatgccagaccagacatcacacaggcaagagctttgattgattga

SEQ ID NO: 13394 - DNA, 312 bp, Zea mays
  Peptide Sequence Number=SeqID_55173
atgggtgtgatcctgttgaagctgaccccaatggggtgtgatcctgcaccatcttttgtccgcatttttgatgaggacgaagaagaggaagaagaaatttcgctaattcgcaagaatagcgggcgttatagagccccaaccaccaaaagaaccgctggtggaggcgctgtcgtatggcgcaccggacagtccggtgcgccaccggacagtccgacgaccgttggcgcttcgagccgttgctccgcttggtgcaccggacagtccggtgctacacctgacagtccggtgaattatagcggagcggcctcctga

SEQ ID NO: 13395 - DNA, 573 bp, Zea mays
  Peptide Sequence Number=SeqID_55174
atggcctctcctgaaccacttctcgccatcttcactatcgagattccagccaaatcatcgtgggcctcattctctataatacacggtggagaccacaccgtaaacaaggaagccttgtttcccttacatagtcgagggagtggtggatgttattacatggagaatgcaatgagaagaggccctacttccagcggagggggaggagacttatattactcgcacctaagtgcttgcagtagggtttacaagctgagcgggagagggaaggatcccaagtccctgaggatgattgaggcaaatgccaataccaagtggaggagaaaactcgtgaagtgttcgcctgcccctcctgaagctgtaggtgaaagtgcacagtgcagaagtcagaagtcagagctgcgaagtcagaacacaccagacatgtccggtgccgcaagaggacaagagacttcaacggtcaaccgctccaaaccccaacgatctgctaatgtagcaggcaccagaccccttgtccggtgcaccaccggattgtctggtgtgcccatcgacaacaacgactggaatagtggttga

SEQ ID NO: 13396 - DNA, 3189 bp, Zea mays
  Peptide Sequence Number=SeqID_55175
atgcagtcactgaattggctatgcagcagcagtagcaccaccagattacacgtgccttcctttggtattgccttggttgtcctcctctcctgtgtgtccgtcgccagctcctgcacagatcaagagaggagctccctcatcgacttccgagatggcctctcgccggacggcaatggcggcctccacatgttatgggccaacagcacagactgctgccagtgggaaggaataacctgcagcaacgatggcgcggtcacggaagtcttgctgccttctagaggactcgaagggaggatcccaccatctctcggcaatcttacggggctgcagcgactcaacctgtcatgcaattcactctacggcaatctgccaccagaactggtgttctccagcagcagcagcatcctggatgtcagcttcaaccacctatctggtcctctgcaagagcgtcaatccccaatttctggccttcctctcaaggtactgaatatctcaagcaacttctttacaggacagttatcatccacagcactgcaagtgatgaataatcttgtcgctcttaatgcaagcaacaacagctttgcgggaccattgccatcttctatttgcatccatgcaccatcgcttgtcacgcttgacctgtgcttaaatgacttcagtggcactatttccccagagtttggcaactgctccaagttgacagtactcaaggctggccacaacaaccttaccggaggcctaccccatgaactgttcaatgctacctcattggagcacctctcttttccaaacaacaatttgcaaggggcacttgacggttccagcctagtcaaactcagaaatcttattttccttgaccttggatcaaatgggctggaaggaaacatgccagattctattgggcagctgggaagattggaggagctccacttagacaacaacctgattgttggagagctgccatcggccctaagtaactgcagaagtctcaagtatatcaccctcagaaataatagttttatgggagatcttagcagaattaacttcactcagatggatctgacgactgcagatttttcactgaacaaattcaatggaacaattcctgaaaacatatatgcatgcagcaatctaattgctttgcggttggcttacaacaattttcatggccagttctcaccaagaatagccaatctcagatccctttccttcctttcagttacaaataactcatttacaaatatcacaggtgcacttcagaatctcaacagatgcaagaaccttacctccctgctaattggaaccaacttcaaaggtgaaaccataccacagtatgcagcaattgatggttttgagaatcttcgggtcctaaccatagacgcatgcccattggttggggaaatccccatttggttatcaaaactcacaagattggagatattagatctatcatacaatcaccttacaggaacaataccatcctggattaacaggctggaactcctcttctttctggacatatcaagcaacaggcttacaggggatatcccacctgaattgatggagatgccaatgctacaatctgagaagaattctgccaagttggacccgaagttccttgagttacctgtattttggacacaatcacgtcaataccgtttgctcaatgctttccccaatgtattgaatctatgcaacaacagcttgacaggcataattccccaagggattggtcagttgaaagtgctcaatgtcctcaactttagcaccaacagcttatctggagaaataccacaacaaatttgcaacctcacaaacctgcaaactctagacgtatcaaataaccagctcacaggtgaactcccatctgcactgagtaaccttcacttcctttcttggttcaatgtgtctaacaacgatctagaagggccagttccaagtggaggacagtttaatacttttacaaattctagctacattgggaatcccaagctatgtggtcctatgctcagtgtccattgtggctcagtagaagaacctcgagcctcaatgaaaatgaggcacaagaagaccatcttggcgcttgccttaagtgtgttctttggagggcttgccatccttttcttgttgggacgtcttattttgtccatcagaagcacagaatctgctgacagaaacaagagcagcaacaacagggacattgaagcaacttcattcaactctgcttctgagcacgtgcgtgatatgataaagggaagcactttggtgatggtacctcgaggaaagggagaatcaaacaatctcacattcaatgatatcttgaaggccacaaataattttgatcagcagaacattattggttgtggaggtaatggtctagtctataaggctgagctaccctgtggatccaagcttgcgatcaagaaactcaatggtgaaatgtgtctgatggaaagagaattcacagcagaggttgaagcactctctatggcacaacatgagaatcttgtgccactatggggttattgtatccagggaaactcgaggctcctcatatattctttcatggagaatgggagtcttgatgattggcttcacaacacggacaatgccaactcatttctagattggccaacaagactcaagattgcacaaggagcaggacggggcctttcttatatccacaacacctgcaaccctaacattgttcaccgtgacgtcaagtccagcaacatcttacttgatagagaattcaatgcttatgtcgctgattttggccttgcaagattgatccttccttacaacacacatgtcacgacagagctggtaggcactcttggttacattcctcccgagtatggacaagcctgggtggccaccctgagaggtgatatatatagttttggagtggtcttgcttgagctgctcacagggaagaggcctgtccaggttttgaccaagtcgaaagaacttgtccaatgggtaagagagatgaggtcccaagggaaggatattgaggtcttggatccagctctcagaggaagaggacatgacgagcaaatgctgaatgtgcttgaagtagcctataagtgcatcaaccacaatcctggattgaggccaaccatccaagaggtggtgtactgcctggaaaccatagttgagccccagcaggtgcaagtgcagctgtag

SEQ ID NO: 13397 - DNA, 1047 bp, Zea mays
  Peptide Sequence Number=SeqID_55176
atgtacaaccggctcaagaccttggtgaaccaagtgcgcaacctcgggagcaccaaatgggatgaccatgagatggtcaaggttattctaagatccctcgtttttcttaatcctacgcaagttcaattaattcgaggaaatcctagatatacactaatgtctcccgaggaagtaatagggaattttgtgagctttgagttgatgatcaaaggctcaaagaaaatcatcgagctagatggcccctccgcacccgaagcgcaaccggttgcattcaaggcaacggaggagaagaaggaagaatctacatcaagtagaccacccatcgatgcctccaagctcgacaatgaggagatggcgctcatcatcaagagcttccgccaaatcctcaagcaaaggaggggaaaagattataagccccgctccaagaaagtttgctacaagtgtggtaagcccggtcattttattgcaaaatgtccactatctagtgacagtgataagggcgacgataagaagggaaagaggagagaaaagaagaaatactacaaaaagaggggcggcgatgcccatgtgtgtcgcgagtgggactccaacgagagctcctccgactcctcatcagacgaggacgccgccaacatcatcgtcaccaagggactcctcttccccaacgtcggccacaagtgcctcatggcaaaggacggcaaaagaaagaaggtaaaatcaagatcctccactaaatatgcttcctctagtgatgaagataactctagtgaaaatgaggaggataacttgcacaccctttttgccaacctaaacatgcaacaaaaagaaaaattaaatgaattaattagtgctattgatgagaaggatgaactcttggacacccaagaggacttcctaattaaggaaaataagaagcatgttaaggtcaaaaatgcttacgctctagaagtagaaaaatgtgaaaaactatctagtgagctaagcacttgtcatgatactatgtcaaccttagaaatgagaatgctaataatgctaaggtggatttaa

SEQ ID NO: 13398 - DNA, 174 bp, Zea mays
  Peptide Sequence Number=SeqID_55177
atggccgagggtggaggaggcgtgggcgaccgccaacccgatgccagagtcgaggcgatggggacgactgtggaggtggtggggaggtttccggacgcggtggggatggtcggcgcgcgcctgatgctatggggagatttgaactgcaagtcactcaaaaatggaaaaccatga

SEQ ID NO: 13399 - DNA, 330 bp, Zea mays
  Peptide Sequence Number=SeqID_55178
atggggtacccgaagctcgaacttggcctgtgtgcaatgtcgaaggatgatcttgcagatagtcttgcttataatagcctgaagggcgatcgtgagatggctgatgaagcgattagaaaaaatgagaaagaatctcacgacgctcaagaagaagctaaacgagttgaagaagttgctgagggcgcaaggcttataggtcacattgttgctgaggccgaagatgcccttctggctgctgatcatgacttgggggaggcgccagtggtgggggtggtggtagctaagcctaggaagcttgagagtgacttgctaaagcagcagaacccgtag

SEQ ID NO: 13400 - DNA, 198 bp, Zea mays
  Peptide Sequence Number=SeqID_55179
atgaagcatgcaagcttcttgcaaatccttgttggagcccctatgcaaagggtagcccacacgagggaaaagctcctggtcaggtgtggagcacaaggatggttgtcgagggcgaaggtgaaggtcatgtgggttcgtgccgatgtgaaggacgagcactgggacttgatcgagggatcagagtctatgggtgactag

SEQ ID NO: 13401 - DNA, 192 bp, Zea mays
  Peptide Sequence Number=SeqID_55180
gtgtcgccgtcaggccaaatcaagagaagaactaaaaatgcgagtagaagtgatgaggggatgagagacgtgcacgctgctggagcacttcttgagaaggtcggaaaggtcgcccggagacaggcgaggaaagccatggcaagagggaccctgcccgaggcgagggcggaggcatcggaggaggagggctga

SEQ ID NO: 13402 - DNA, 288 bp, Zea mays
  Peptide Sequence Number=SeqID_55181
atgcggcgagaaaatcgtcgatccaatgtcccggcctcctctgatgtttcagccctcctcctccgatgcctccgccctcgcctcgggcagggtccctcttgccatggctttcctcgcctgtctctgcgtcaccggatggtccccaaggttctcttggtggaggacaagattaggaactttagatgcaaggcgattagaattaaaattgttgaggtggagatggacctgagtactggccaaggcaaaagcgaggggtacatgtggggcggtggggaaacaggactgtag

SEQ ID NO: 13403 - DNA, 204 bp, Zea mays
  Peptide Sequence Number=SeqID_55182
atgaggggtcccaagagggcctccaagatgaggaagcttttcaacctttccaaggatgatgtacacaagtacgtgaacacatacaggacattcactaccaagaacggcaagaagaggaagcgcgctagaatcactgataagaagaagaagatcgctaaggagtctgaggctgccgagtaccaaaatcttcttgccagaggctaa

SEQ ID NO: 13404 - DNA, 780 bp, Zea mays
  Peptide Sequence Number=SeqID_55183
atggacaagctgcaggccggaagcggcggtggcaaggcccgcgtggctgcggccaagcagcaccgttcgtcgtcggcggcggtgccggccgagatgcggctcgaggcggccctcacgaggaggtggtggtggccgccgttgcggaaccgcgcaacggtgaggacgatggccctgccggccctcttcgtcgtggcggccgtggcggcggccgccgccttcgtgctcaccgccggctggggctcctcctcgtcgaacgacatgccgacgtcctctttcttcgacgggcggcaccgcgctgccgagggcaatgaatggtgtgggagaatttttagccccttcacttccaaacaagctctagaccagggaacacgggtgatagagccgctcccacctcgtcgtcatgcacgccttaggggtgccgtcgttgctcacgtgtacccgagatccgtcgtcacaccgccgcagccgctcccacctcaccgtcgtgcgcacctcaaggggtcgttgccgcgtgcacctcaaggagaagctgccacgctagtgccccctaggatccggcgccgcggctgctgccacctcgcagtcatgcatacctcatggggccgccgtcgcgtgcgtgccctcgggatccgataccgcaaccgctcccaccttgccgccgtgcacgcctcagggggcctcgtcgtgcgctggcctcagggatccgtctccatgagcgtgtcccccggatccaccgtcgcgcgcttgctcctagaatctgccgccgtgcgcgcctcttag

SEQ ID NO: 13405 - DNA, 351 bp, Zea mays
  Peptide Sequence Number=SeqID_55184
gaaaacaacgccgctcgcccctctccgactgttgtgccgcccgccagggtgaggctgacaacagctaagtccagcctcaggcgcaacaggaagctccgcctcgcccgaccttgggcctcggcctcaggaggaggtctccgcctcgcccgaccccagggctcggcccccgcctcggcctcaggaggaggtctccgcctcgcccgaccccagggctcggcctcaacctcgacctcgggaggaatcacgtcctcacccgaccccgacctcggcctcaggaggagtctccgcctcgcccgaccttgggctcagaccgaccgcgtcgcaggggatacatcattaccctacccctag

SEQ ID NO: 13406 - DNA, 483 bp, Zea mays
  Peptide Sequence Number=SeqID_55185
atggcgcccaacgtattcaacaccggatcccccgccaatctcgcagccgtcaccagccccgtccccgcagccgtcaccaacgcccgccccatccatgccgcccaacgaattcaaccccagatccctcgagcggccgcccccttcaccggagaggtggcatcccacgtcggacgcagaggtgcacctgcgtcggcgccacgacacttgacccaggtgaggtcgctgtcgatgccaccatgtcttcttcatctatctactagcctcatctcgccggcgacgagatccaccgcaccgccttccttcccgtattccctcgccgtcccattctataaggatctccgccgtcatcccgggatagttctccgagatcagccccatgtggcccggtgcgccccgctgctctgcttgtgggcgtccacatttgcttcaccgtgccccgccagccgtagctccatgcgcaaggagaggaacatggggacctga

SEQ ID NO: 13407 - DNA, 1125 bp, Zea mays
  Peptide Sequence Number=SeqID_55186
atgggcgacccgccgacgctcaagaggcccaagctcgagaaggccgacgacgactccacctactgcccccgcccgtcctccaatggcgccgcgcccgtacgcacaccaggcgccaccgccgccataggggcggcgccgggtgacgacgtggaggaggaggatgacatcgcggaggaggcggtcatcgccctgatcgcgcaccgcgagcgcgacgtcgagcgctgcaagctcaagttgctccactaccagtctctcctggacaccgcggagatgaagctggaggaggcgcactcgaggctcgccaggttccgagatcgcaagccgccgccaactcggtcggaacccaagccaccgacgccgccaatccagagggaacacaagccatccccgccgccgatccagagggatctcaagccatcgccgcagccgctaatccagaaggctccttcgcccgcgccgcagccgtcggcgaggccgcagcttgtcatccctgggaccagcaaccgaccgaccccgcgccctgagcccatgcctgggttgaagagggccgccgccccgtcatcgtcttcatcaccggcgccaccagagcggtcaaggaaagaggagaagaagcccaagataaagatggaacagaaggagcatcagaacttgattccgagtgttgggaaatcatctgcgactgtgcttagatttcaaggcggaaatttggtctcgagccaacacaggaggaagcttaggtgtcttgagctatgccctgctaatgatcagcttgttgttaccagtgcgctggacggattggttactttatggcaagtggagactagagggcttaggcaatctgaggttcatgcatttggttggaaacaagagagcagtgagtctcagtcggctctaattaaccagtcatggtctccagatggatggtacatgtcgtctggttcagcagatcctgtgatccacatcttcgacatcaggcatcatggccagaatccttgccagtctgttcaggcacaccagaagcgggactttgcatcaatcgaagatacagcaaattcagcatgctttcgctggacctgcttcaccattgactttctctgtgggagaaccatgcagctcagcagctga

SEQ ID NO: 13408 - DNA, 1836 bp, Zea mays
  Peptide Sequence Number=SeqID_55187
atgggtgtgctgagaagggctgtgcccgtgccgtgccctccgcgccgcggtcgactcaggtataccaggccagcacgcggcgcgccattggagctggagaagagggccggtaggtggactcccacagactttgccttcctctcttccgcagtagtgcagtaccaagaccaaccactgtccggcaggctgtcgtcatccaccggccggcacattgtgcatgcacttgcgcatcggatcgcatcagctgctgcttttgtccaccaagcaactattccctttccttccgccgcccaaatgccctcgtgcccggcaccggcaccggcagtggccaccttcctcctcgtcgcgcttctctcgtgcggcacacgggccatccggacgcacggcggctatgtctccgcggtcggggaccccggcatgcggcgcgacggcctccgcgtggcatgggaggcgtggaaacttctgcaacgaggtcgccaggaggccccccggcatgggcagccccccgcggagacgagctccgacgaggaggggcggccggtgtactcggtggcgcacctggtgagcgacgccgacaaccgcctgggcgcgggcgacccgttcccggggtccccgccgggcgcggcccgcgtcacggacgccgacctctacgcgccggccaaggagctgtacctcggcgaccgctgccaggtggccgacaccccggcgccgtggcagttctggatggtcatgctcaagaacggcaacctcgacaccaccgccgccgcctgcccggagaacggccgccccgcgcgcccgttcccgcagacgtcccgcttcccgtgccccgccggcgccgggtgcatgaaccagccgctgctgttccacaaccgcaccgcgctggacgacgccggccgccggctccgcggcggcctgttcgggacctacgacctcgacgccgccgcgggtctcggcgccggcgacgtctccttctactccgtgacgtgggagaaggatgtggcggcgagcggtcgcggcggcgggtgggcattccaccacaagctgtgcacgtccaccaagtacccgtggctgatgctgtacctacggtccgacgccaccaggggcttctccggcgggtaccactacgacaccagaggcatgaccaagacagtgccggagtctccggacttcaaggtgcggctgaccctggacgtgaagcagggcggcgggcgcaacagccagttctacctgatggacatgggcagctgctggaagaacgacgggcgcgcctgcgacggcgacacggcgacggacgtgacgcggtacagcgagatgatcatcaacccggccacgccggcgtggtgctcgccgtcgcggatcgaccagtgcccgccatggcacaccttccggaacggcagccgcgtgcaccgccgcgacggagcccgcttcccctacggcgcctaccacgtgtactgctcccccgggaacgcggcgcgcgcggagcagcccaccacctactgcgacgcctacagcaacccgcaggcgcaggagatcctgcagctgctgccgcaccccgtgtggggagagttcggctacccgacggccaggggacaggggtgggtcggcgaccccagggcgtgggacctcgacgtcggcgccatgtcccaggcgctctacttctaccaggaccccggcacgccgccggccaggaggcggtggacgtcgctcgacgtcggcacggagatatacgtcagcgacagggccgaggaggcggagtggacgctcagtggcttcgacatccttgtgccggacaagtgtatcaagtcacagcaacgggccagcaacagctgctggtag

SEQ ID NO: 13409 - DNA, 546 bp, Zea mays
  Peptide Sequence Number=SeqID_55188
atggcgccccgcacgctccctgacgacggcagctctccgcccccttacggaagcaagagaacgaaggaccagggccctcttagagagggttggccgcgcggggacgaggacgagacaggcgctcacttgaagccgctcgctccctctcccgcgtggacgcttgtaatcccctactgcaagcgcacccgacctgggtgcgggacgaacacaaaggccgtgggatttccacctctctcacgcctgtctccggccacctcacttccccccttcgcgctcggcctcgcgtcgacccatctgggctggggcacgcggcgacattcactcgtcggcctagggaccccccggtctcgaaacgccgacactactgattccaaaggtcatcgaacacgagacaaaatggatcatctggtaaaataccataaagcggaaactataactgattgtgaagtccacatgtgccttaaaatggatggagagggttatgcagtatttgagctagttctggagcataaccatcaccttcacctggcaagacctcacacttaa

SEQ ID NO: 13410 - DNA, 330 bp, Zea mays
  Peptide Sequence Number=SeqID_55189
atggcgcgctcgtggcccaagatcgccgacgggtacgagagcaatggaccgagaatcctgagatcgcgcatgggaagcactgtttgtgccatcaccacttgcttctccgatggcgtccttggcaccgtgcttggggcgtgcctcctgtcccctagcctagaattgtcgctgcttcacgagaaggttcacagggaggctgctggaacagcatcgctgagcgatgaacggttcgacgaccccgtgtctgcggcagaagaggcagcgttctgcaaagcctgcgcgaggttcggtttcggcctttacctgtaccatgaagacgagacaccatag

SEQ ID NO: 13411 - DNA, 315 bp, Zea mays
  Peptide Sequence Number=SeqID_55190
atggagagtgaatcgtctcctgttgcttcaccatttcctgttccaaattcatccaaagaacatgaattggagatgactaagaattctactagtgtggtgcctgaaatgactagcagcaacagtatgcctaacttggatgctgcaaaagatggaaataccaaggttttatcttttgaattccgagcacttgaggtaaagctactcaaggggggcgcaagagaatcaccagcaggaggcgagggcgacgctgttccagcagctcaggcgcggcctgcggaccacaaggcccaacaagaggagctgcacaggccctaa

SEQ ID NO: 13412 - DNA, 3681 bp, Zea mays
  Peptide Sequence Number=SeqID_55191
atggacgaagaggacgacgaccagcgcctgctgcacagcctcggcgtccaaactgaaccgaagcgcgatgacgagccaggagcagccgtcgatgaccccagcgggagtagtgttgcgcctgagtttgatgcgcaggccaatctgcaccagaagctgcgttccgtgcaactcgagatcgatgccgtagcttccaccattaaaagagctaagaacgccagcgttgatggacaagataaaaagaagcagaaacaagccaatcacacttctcaggatgaacctcatggaggagcgctccagcaggctcttgccactgagcgccttaaaagcctcaagaaagctaaagctcagattcagaaagagatattgcagtcggacccctacccatctggctcggacaacaggaaagataaaatgctagccatgctggttgaagaggagccaaggcgtaagaagaagtcgctaatgccggctcgagggcctaagaaaacgtcagctcctagactgaaaaccatgagttatgatgacgacgatgacttcgatgcagtgcttgatggggcttctgcaggatttatggaaacagaaagggaagaactaatcaggaagggcttgctgacaccatttcacaaattgaagggctttgagaagcgtgttgaattacctggaccttctcataggcaaaatgatccctccgaacaagctgaagaagcaattgaagcttccaggattgctagagtcgctcagtcaatgcagcaaattgcacaaagtcgccctacaacaaaattgcttgatccagaatctttacctaggctggacgcacctactgctccatttcaaaggcttggaagacccctaaaacgccctgtacctcctagttcagaaggacgggaaaggaagagacaaaggaataagaccaagaggcctttgcctgacaagaaatggagaaaagccaattcaaggaaggaatcactattggaaactgatggtgaggatgttggggactttgcgacatcagtttctgaggatgatgatcaagcagcagaaggtggattatctcctgttattcttgaaggtggtttgagaattcctggcacaatttatgaacagctatttgattaccaaaaagtgggagtgcagtggctgtgggagttacactgtcaaagagccggtggaattattggagacgaaatgggcctgggaaaaactgtgcaagttctatcatttcttggttctttgcataacagcggcattggcaaagggaggccagtaggtggtatccaaaattcaaggtggaaatcttacatgattctgcaaatggttcgagtaaaaagagcaaggcatatagtgattctgacagcgaaggtttcttgggatagtgatcaggaagaggttagacgtgcaaagcctgcaaagaagtgggatgacttgatttcacgggtagtaaattcgggatcaggtttgcttttaaccacatatgagcagctaagaatcttaggggagaagttgcttgatatagaatggggatatgctgtgttggatgagggtcatcgtataaggaaccctaacgctgagataacgctggtgtgcaagcaactgcaaactgtgcacaggataatcatgacaggtgcacctattcaaaataaactttctgagctctggtctcttttcgatttcgtgttcccagggaaactaggtgtgctgcctgtatttgagactgaattttctgtgccaattactgttggtggttatgctaatgcgacaccattgcaagtgtcaacagcatacagatgcgctattgttcttcgtgatcttatcatgccatatcttcttagacggatgaaagttgatgtcaatgcacagctccccaagaaaacagagcatgttcttttttgtagtctaactgcagggcagcgttctacttatcgtgcttttcttgctagttcagaggtggaacaaatatttgatggcaatagaaattcactgtatggtatagatgtcctaaggaaaatatgcaatcatcctgatctactcgagagagaacatgctgctcagaatcctgactatgggaatcctgaaagaagtggaaagatgaaagtagttgagcaagttctcaaagtctggaaggaccaaggtcaccgagttcttctgttcactcaaactcaacaaatgcttgacattttagagaacttcctgacggcctgtgactaccaataccgaagaatggatggactaacacctgcaaaacaaaggatggcactaattgacgagttcaataacacagatgaaatctttgttttcattctgaccacaaaagttggtggtttgggtacaaacttgactggcgcaaacaggattattatttatgaccccgactggaacccttcaacagacatgcaggccagagaacgtgcatggcgaattgggcaaactagagatgtaatggtttacagactgatcacacgtgggacaatagaggagaaagtctatcatcgacagatatacaagcatttccttaccaacaaagtactgaaaaaccctcagcagaggagattctttaaagccagagacatgaaggatttattcacactacaagatgatgaagggaatggttcaactgaaacgtcaaatattttcggccaattgtccaaagatgtgaacgttggagttccaaatgatggtcaacagcatcaggtacatattgcttcggctttgtcaagcaccagtgaagctgaaccatctaatggtgggaacagtaaagtggatgataactctgaccaagcagacgaagaatcgagcattttgaagagtctttttggtgctcaaggcattcatagtgcgatcaatcatgatgccataatggatgctaacgatgaccagaaagtgcgcttagaagcagaagcttcacaagtggcacaaagggcagctgaagctttacgtcaatcgcgaatgctcagaagccatgacagttttgctgttcccacatggaccggaagatctggtgctgctggggcaccctcctctgttcgcaggaagtttgggtccacagttaacagccagttgatcccttcctcacagccatcagaaacgtccagcagcaggaatcgaagtcttccagtgggtgctctgagtggcaaggcactgtcatctgctgaacttctggctaagattcgtggaacccgagaggcatctgcttcagatgcattggagcatcaactcaacgtaggatcatcttccaatcttgtatcaagtccatctgggaatggtggccgtgcatctaaccctcctaacagaagcatgatcgtgcaacctgaagtcctgatccgccagttgtgcaccttcattcaacataacggtgggtctgccacctccacgagcataacggaacacttcaagagtcgcattcagtccaaggatatgcttctcttcaagaacctgctgaaggagatagcaactttgcaaagaggcgcggaaggagacttaacacgaagaaatcttaggcgatgtgttggtgttgtgaatacaagaataggaatcccaacatgctatgatcttggagaaaggatagcagattctttgcaggccacaaagggtagcgccgctgtgggaagaaaattaggaacagatctacatcttcctcgtgcattcattgctgacaagagggttatgttggccgtccgaatttga

SEQ ID NO: 13413 - DNA, 342 bp, Zea mays
  Peptide Sequence Number=SeqID_55192
atggcggagcgacggggtatgagcgggaagatgaatgcaatgaaggcagcaaacaaggagctcaagggaatgatgaaaactgtcaaaattgatgaaattgataatatgcaagatgaaatgacagatctgatggacgtgagcaatgagatacaagaaactcttggtagaagctacaacatccctgatgacgttgacgaggaagaactgatgggcgattctgactttgatgctgacctcaacttacctgctgcaccaagtcgccctgcaatggtcccagcaggcgggctgcaggaggatgagctaggattgccagcggtgcctcgggcatcacttcgcagttag

SEQ ID NO: 13414 - DNA, 603 bp, Zea mays
  Peptide Sequence Number=SeqID_55193
atgtccggtgcaccagaggactccaactccaaactcgtcaccttcgggaaattccagaggcgactccgctataattcaccggactgtccggtgtacaccggacatgtccggtgctccaaggaagagagtcctcaggaactcgccagcctcgggaattcatttcagctgctccgctataattcaccggactgtccggtgtacaccggactgtctagtgtaacagcggggcaacgactacttctggcgccaacggctacctgcgtcgcattaaatgcgcgccagcgcgcgcagaggtcaggcacgcccatgctggcgcaccggacactcaacagtacatgtccggtgcgccaccggacatccaggcgggcccagaagtcagagctccaacggtcggaacccaacggctttggtgacatggctggcgcaccggactgtccggatctggacaggctggaggcgaggctcgcagactacttcgactacatcgccaggaccggtgggctcgtcatcacgctgctcacttcgcccggcaaggacaagcggcctctctacgttgccaagaacatcaaccacttgttcttgcatccattcacatcgccctaa

SEQ ID NO: 13415 - DNA, 360 bp, Zea mays
  Peptide Sequence Number=SeqID_55194
atgatgcatgcaccggacagcggctccattacccccgagcacgaactcgcacttgactacagcacacatcacgctggcgaagcacaccaccgatgccccccggtcaaaccgaggatgcccaagtgcagggaggagcagagaaatgaagaatacgaaagagagtgcctcaccgacgagagaggcgaagacaaggaccggtggacgacgcagcaacggagtcgcggaaaccatgggatcaacatcaccagactcgggaaggagataaatctagataacaggttccgcatggcggtgaggaccatcggcatgcgcgagcagcaattctgttgcgatgatccggtggatacgatgaacggctga

SEQ ID NO: 13416 - DNA, 873 bp, Zea mays
  Peptide Sequence Number=SeqID_55195
atgacctcgaaggggcacgctgcgtcactcctgcgtcctctccggagccgacctgaacgccgacgtcgcccgtcccatctccctctctctaggaggacacctcggtggccaacacgagctgcccttctccagctctgccccctagtacgcgccgatgtcgagttcagacctgaggatgccgacatgtcaaatcgagaattcttgtaccatatactggaggaagtcataaaagttggggcaaccactcttaatatcccagacactgtcgaatacactcttccttatgaatttgggaagttaatttctgacataaaggaaaacactcttagaattgaaaatgccatcatttccactcattgccagaatggccttggccttgcaactgccaacacattagcgggtgctcatacaggagcgcgactgttagaggtgactattaatggtattggtgaaagagctggaaatgcttcattggaagaggttgtcatggcaattaaatgtcgtcaggagctcttagatggtctatatacgggaataaattcccaacatattactttgacaagcaaaatggtacaagagcacaatggacttcatgtacaaccacatgaagctattgttggtgccaatgcctttgcccatgaaagtggaattcatcaggtattaactgttggcgatgttcctattggtagtgttacaaaagtattggtagtagggaatatcaataatgtcatctttgtatcaaagctgactgtactagaaggttccttttgcaacctcaatttgagatttaagggaggattaccaccagaggcagtatacaatatcataattgatccaaagaataaaagggtgttcatgattagtaatatttag

SEQ ID NO: 13417 - DNA, 243 bp, Zea mays
  Peptide Sequence Number=SeqID_55196
atggaggtggtggagcaaaaccttgtgcggaagatggattcgaagtggaagacttctgtggcaccaaatgtgttcatggtgttgaaggacgacatcattgatcacgacttgatggctcgtgcagaagcacgaggcgattactcacggatttatacaggttcggcccgctttgaattgcgtaacactctacttcctgttggaggcattgatgttgatttctggagcgtggggattataagctga

SEQ ID NO: 13418 - DNA, 2217 bp, Zea mays
  Peptide Sequence Number=SeqID_55197
atgccgttcggtttgaggaatgcgggcgcgacgtaccagcggtgcatgaaccatgtgttcggcgaacacattggccgcacggtcgaggcctacatcgatgacatcgtagtcaagacgaggaaggcctccgacctcctttccgaccttgaaacgacatttcgatgtctcaaggcgaaaggcgtcaaactcaatcccgaaaagtgtgtcttcggggcgccccgaggcatgctcttggggttcatcgtctccgagcggggcatcaaagccaacccggagaatatcgcagccattaccagcatgggacccatcaaggacttgaaaggcgtacagagggtcatgggatgcctcgcggctctgagccgcttcatctcacgcctcggcgaaagaggtctacctctgtaccgcctcttaaggaaggccgagtgcttcacttggacccctgaggccgaggaagccctcgggaacctgaaggcgctcctcacaaaggcgcctatcttggtgcccccagctgccggagaagccctcctggtctacgtcgccgcgaccacccaggtggttagcgccgcgattgtggtcgagaggcaagaagaggggcatgcattgcccgttcagaggccagtctacttcgtcagcgaggtactgtccgaaaccaagatccgctacccacaagttcagaagctgctgtacgcggtgatcctaacgcgatggaagctgcgacactacttcgaggctcatccggtaactgtggtgtcatccttccccctgggagagatcatccagtgccgagaggcctcgggtaggattgcaaagtgggcagtggagatcatgggcgagacaatctcgttcgctccccggaaagccattaagtcccaggtcttggcggatttcgtggctgaatgggtcgacacccagctaccgacggctccgatccaaccggagctctggaccatgttcttcgacgggtcgttgatgaagacaggagccggcgcaggcctactcttcatctcacccctcggaaagcatctacgctacgtgctacgcctccacttcccggcgtccaacaatgtggccgaatatgaggctctggtcaacgggttgcggatcgccatcgagctaggggtccgacgcctcgacgcccgtggtgactcgcagctcgtcatcgaccaagtcatgaagaactcccattgccgcgacccgaagatggaggcctactgcgatgaggttcggcgcctggaagacaagttctacgggctcgagctcaaccacatcgctcggcgctacaacgagactgcggacgagctggctaaaatagcctcggggcgaacgacggttcccctggacgtcttctcccgagacctgcatcaaccctccgtcaagatcgacgacacgtctgagcccgagaaggcacccgggggctacacgcacctactggtcgccatcgacaaattctccaagtggattgaggtccgacccctgaacagcatcaggtccgagcaggcggtggcgttcttcaccaacatcatccatcgtttcggggtcccgaactccattatcactgacaacggcacccagttcaccggcagaaagttcctggacttctgtgaggatcaccacatccgggtggactgggccgccgtggctcatcccatgacgaatgggcaggtggagcgtgccaacggcatgattctacaagggctcaagcctcggatctacaacgacctcaacaaattcggcaagcgatggatgaaggaactcccttcggtgttctggagtctgaggacaacgccgagccgagccacgggcttcacgccgttctttctagtctatggggccgaagccatcttgcccacagacttagaatacggctccccgaggacgagggcctacaccgaccaaagcaaccaagtcagccgagaaaactcgctggaccagctggaggaggctcgggaccaggccttgctacactcggcgcggtaccagcagtccctgcgacgctaccacgcccgaggggtctggtcccgagacctccaggtgggcgacctggtgcttcggctgcgacaagacgcccgagggcggcacaagctcatgcctccctgggaggggccattcgtcatcgccaaggttctgaaacccggaacatacaagctggccaacaatcaaggcgaggtctacgacaacgcctggaacatccaacagctatgtcgcttctacccttaa

SEQ ID NO: 13419 - DNA, 648 bp, Zea mays
  Peptide Sequence Number=SeqID_55198
atggaaccgacggagccaaggacgagcatcaaggtagcaggcacaaagagggagaccgaaaaggtagtgacggacaatgaaggagcgcgtgcggtggggtcggtcggcgcggtagttgccgccatagtgggcaccatagaggtggaaagcgcatccgcggcgagggtgtatgcatcggaaaagagagaaggcagggctacggaggggccgtcaaggagaggcgttgcagcgaggggcggggtggagggaaggtggagcgagaggcatcgtagcgaggagcgcggtacagggaaggtggagcacgctagcatgctcgaaggagaagagaggcagcaagtcgtaggtggggagggaggcccacggccgcggggatggtcgtcgctgcgcgggaagaggcgcaggggtggggacaagtgctggcgcgtaggaggtgtcggcgctgggagggaggccatcgttggattttgggatcctcggctcgtcctccctggttgcacccgcacactggaccttgagcgaaaagtcgcacaggcacggattgtcgttgaccgcggtgaggccctagttgacgatcaagccgacggtgagagggatccgcagagatcaaggcaaatgaagacgggggaagttgtcaacgaccgtgtctag

SEQ ID NO: 13420 - DNA, 300 bp, Zea mays
  Peptide Sequence Number=SeqID_55199
atggagaagcgggccaatgtgaaggaagatgcacacatgacagggaaaaggaggcacaagagccgagggggtggcgggaacgacgaggtgggagcgccgtgtgtgctgctgctgcgcagtgagggcagcggggaagattcccgcggccgcgacgacgcgtgtagcggagcccgaggagagctggccgatggcttggttcatgtccggcatcgcatggaggaaggggcgcagactagggcgagcggaggcgaggtccagcagtgcctagctcctgcacaggctagaacgaggagggagtag

SEQ ID NO: 13421 - DNA, 843 bp, Zea mays
  Peptide Sequence Number=SeqID_55200
atgaatgttgtggtaacttctcaccggctcgtctgtttatatagccccactggtgaagaaggcgaaccgccgagacgcgcgtaccggctgatcagtggactgatcgagctcgttatgaaaaaacgacctcgacctaacaccgcgaaggcgctactgttggaggtcttcttctccgccgaaggtcctcaagacgaagatatcgtttgtgtgtccttcatcaccttcgtccaaagatcgttatatccgaaaggagataatgcttcgaaggacgaagtctgcatcgcgtcaccatcgttggaggtggcgtccaacgtacccacgccgcgcgccagtagccgcgcgtcgcccgtgttggggccgtgtcacgccactcgctggagccacgccacgcctgatccgtgccgcgccggaagcgccagagccgtgccacgccggggccacgtcacaccggctgcgccgccggagccacgccgtgggtgctcgttgagagttgagacgcagtacccgcggtcgcaggctttccccgtcgtactttttcgcgggcgttccggggcatggccaaaattcgcagcagatggaggagggatgacggggagtagtattaaactcgctagctgctcccccgcctctgtgcccgaaattcgctgccgctgcaagcaatacccggaagataaggacgtgaggaaaagaactcggtcaagacggctggcagttggcgagtcctccgtctggcgaatcaacaggcggcctcatttcaaaggtgatattggtgctatagatggatcacatgtgaaggttgtagtgtctactgaggaggtgatcaaattacccttgtcgccatag

SEQ ID NO: 13422 - DNA, 465 bp, Zea mays
  Peptide Sequence Number=SeqID_55201
atggaggattccgcgcgctggaggagccgggagggcgcggccctagctcggccatggaatcggaaggcgcgcgacatgggcgagtgcagagagctcgccatgggcgccgtgagcagaggagcagggagctccggcgatggcgaggggccagaggaaagagagaggaaagggtcgcaggaatgggcgccggcagggagcaggggaagctttggcctgacgcggggagggagatccgagccggagaactgccgagcagggagatcgtcgccatgggagagccgagctgggggctggggaaagctcagccggcggtctgcagtcgagcagagagagagaagggagaagcaaggggcgcaggcggccatggctggggaccgagtagagggtgggcgagctcggcagggagagctccgggccggggctcggccggcaccatgggcaggggagctcacggttggagattga

SEQ ID NO: 13423 - DNA, 1533 bp, Zea mays
  Peptide Sequence Number=SeqID_55202
atggtctgtacacctccaaatctgcctataaagctttattcattggagcagaatcctttgagccctggaaaagaatttggaagagctgggcagcgcctaagtctcagtttgctagagtcattgccatcacttgctatacatggttttgttcttccactagctctgcaatggatatcgccaatgcttaaaagggactcaaattcggttttgtatgctatggctgttcgattactctgcaagatatgggctgtaaccgactgggcatttccaaacttacaagacgagcgacatcaaggtaaacaagacccctacaatatgtcgataacaagtaggatcctcaaggggttcaccatttgtggcacaaagatgaacattgagttctatgggagtctcaatccgttgatcaacaagagaagctcgatcaagaagatcctaaatgtggttctggatcctgagaatttttccaatttcatctctgacagagagatctctgcaagtattgccacatcaatacgcgatgtttgcaagcaaaatccagatagaggcgttgatataatattatctgtctctttttgtattgagagtcgtgattctgtggttcaagctcttggcctcgagagcctctcgtacctttgtgaagcagatgtggtcgatttctacacggcgtggaaagttatatcaaagcaggtgcttgattattacgttgagcctgctgttgctcacagtttgtgtattctgttgaggtgcggagcgatggatgctgaggcatattctgtaatatctggtaaccttgtaagaacattgtggagaattggaacatccaagaaaaataatcccgatccactctgggataaagcaagaggaactgcttttcactccttgtccaactacaaggtatcacttattcaagatgctattcctgatttctggaaactaaactatgagttctttacgaacgaacataatctggcagttctcaaggccatggagcaccttcaagatgagatcatcagatatgagcacatatgcttagtgtcactcttaactgatgaaccctgttcacatagaaatcgtcgtcgagtgactactgacaaaagaactgcagtgcataaatttgagaagctactggaggtttttcctcgggcggtatttaaagggatgttatctcatcatcagttgcctggtgctgctcttttaactctcaattttactccaaaggacatacttaatgaagggaaacctaaggatttgcctagagttcattccgcttttgagcaagcttttgtggaaattgctgaatctatgtatgtgtcaagaaacatagtggtagctcttcttgccttgcagtcatggaagtcatttgtttccaactggatgcaagcagttgtggcattgcttgacactaaagactcgtcaaagttgaacaaagcaatgaaagctgctaatgatatatttaaggtttatatttgtatctttagcgtattcccgatttcctttctatttgtttgttccactctaagtgatgttgcataa

SEQ ID NO: 13424 - DNA, 2505 bp, Zea mays
  Peptide Sequence Number=SeqID_55203
atgtgctctctagaaagaggagataatttcctgctcatcacaggaacccaagtgcctgcacacttttgcagcagaggatctgcaaaagttatctcaaaaactgaaagctgtcttgtaaaaggagcttgtggactggcattaggctatgtttgccacggtcttttgacaagagcacataatgctgttgattcagaagtagaggctattacacaactcaatgagcgtgcatcagttgaggatattcttcatgctttggttaccttgttaattcaactatgtccatcctcatgctattctctgaagaagcttagtatatacggaatatcctccatgggagggatggaagaaaatattcatagcttcagtgatgatccttgggctgtcgctggacttgtcattggtctgggaaactctgttgttgctctgtatagacttggagcttatgaagcagttactgaagtcaaggatgtattgatatcatggataccaaatgttgattcgaactctgcattatttgatgaaatagattcagtatcactatgtatgggttcatgtcttgctcttccatctgttgtggctttttgccaaagagtggagctgttgaatgacgacttggatgcattgttcaatcgctacacttctttagcttctgagctcctgaacctcaataaatctgggattatctttcagaatttgttaatggcaatctgtattggtgctggatcttttctctcttctatattgaatgatggcgtgcatgctatggaatttaatggtgttaaaggctttctggacactctcagacatatatatacccacccttttcctccccttgttcatttgggaggcatgtttggtgtggtcaacgcttttggtgcaggtgcaggagatcttactggggtgttttcaaagcctatgacttctcaaatcaaacatgaggagtcatcttttgtgagtggttcattactgacaagtcctgttggtgagactctgtcaacatcaatgattcaggaaatatttcttcttgctaaggatgctaaggataagcacatacaagattatgctgcatgggctatttcatttctcagaagcaggtggtcgaagaatcagaatcagattctttatgaggacaatggttctaatagaagtcctgatgatcatgatcaagcttcaagtttttctgaacaaagcttagtttggaacttaagtctctggttgagtgatctaaaatttgaaaagtctggtgatgtggtgccaataagtacagttggaacagttttaaaatgcctttccaaagctccccgattgccaactacagactggggagctattgtacggaggtgcattaaagctgaggcgcagatttctcataagttaaccaatcaggaagatcctaagatactaaaggaggcatgcttatatttgactctagctcatgctgctcacataagtccccttctgcagtttttggatgatctgactgacatactcagattccagagattagatataaatgttcagtctattttgctcaaacatttgttacacctaatgaagctattctctgattcaagattggataaattgcatgaggattttaccgaatacttgtattcccccacttcttcatacttgaattactcatctgaacagaaaagcatgctaagaatgtcgttctgggaaggcatttatacgtgcctggtggatgtttctgaagaatctggtgttttttcattcattgaaaaatgcattcagtgcttgttgcctcttttgacgctccatagtgatggtcaacctgaattcatgaaagagtggtctgttgctatcttatgtcttacaaacgcccagaaaaaatggctggatgatattttgcagattcgcagtactgccttagtcaatgaaggacatgttgatgttgcaaaaaagattatcctcagagcaagattgtgtgcaactggttgtggttcaacacatgagctgggaaatataaagacagcaatattgtgtacaaaagctgatggtgtttggtggagtgtccttgttgagatcacttcagccttaaactcagccgaaaacatcatcaaaagacagtggcttctggatgcattagacattggctgtgttacagctcacccctcaacggtgctgtgttttgttggcttgctttgtggtagctgctgcatctatatgccgcttcttcttgttaattcgataaatgtactgagcgacttgccggtcaccctgcctgcctttctctccaccatcgtttctgatgatttcaggaactctgtggcagacaggctatggctgttgactactgacatctatacttgggctgaacaattagctcacggacacgatcaacctggacatgatcgtattcatagaagtgaaactgagattgcgacttttttggccaatattctgctctctacatgcattacagtcgaggactacctgtctgttgataagcggctaaagcttgcaaatcttgaagcactctaa

SEQ ID NO: 13425 - DNA, 441 bp, Zea mays
  Peptide Sequence Number=SeqID_55204
atggcgtcccgcgccggtccgccgcccgccgtgcaactgatctcggcgccgccgctgctgctgctgcttgctcatcgtcaaaacatcctgcagaaccatgtaactaccactgtactagcagagcgggacggacacgagaaagctttgctagaggtagccatcagaccgtcgcagccggcgcttacggctaaaagaaaaacgtgtggtgtgctggtgatgctcccgtacgtctctccatctgtctcttctgaacctctctttgctccggtagaggccagtagagaagtagatgccagcgaagggcgctgtcgcccagctgacactggtgtacatagcgcaagacttggccaccagcagcagccgtccctctgctcgctgcctggctcggcgacaagccgacaacgagcacatcctcgtccgctcccttcagaggttggttag

SEQ ID NO: 13426 - DNA, 390 bp, Zea mays
  Peptide Sequence Number=SeqID_55205
atgcagctttccatgcctccctcccgcctacgccgccgcacggcggcggcgttcgtcttcgtcgcgctcctcgtcctcccgtccatgctgcaagcggccaggacgacgccgagcgatggccgccacggacgtgtacagcagcagcaggaggaggaggaggtgcgtgccgcggcggcgacgacaacgacgagtggcggcggcggctgtgccgggtccacacctgcgccagcgtcgtcgtcggtgcaagaaaggccgcacccgctcacactgctgccgccgccgccgccgccgctcaccaccaccaccaccgttgaggaggaggcatcatcgtcgtcgtctccccgcagccggatgctcggctcggtgcccagccccggcgtcggccactag

SEQ ID NO: 13427 - DNA, 504 bp, Zea mays
  Peptide Sequence Number=SeqID_55206
atgacgccgacatcctgcgcctctgctacgacgctgccgaccaggacgcgaacccctccgtcgcgcgtgctctacaagtctggatccatcattgtgctcagcaggactgacttccttaggccagacatgctggcaagcttggcaaactattttggtctagggaagcaaaggcgcaggagcctggatgatgtgaaaatgaatattgacgttctcaagaactgtgctacagtcctgttcctgcctcatttttttgttttaatatcattcaaaacggacgatacaaggagctcaggtgccttttctgggttcgttgagctagacgacgtttcaacggagagtatcaagatctcaggtccgagagcgatcgtccagcacaagggttccccgctccagctcatcagtccaggtctggaagtccgctgggtcaacacaaaggggtcccaaacagcccacatcgaccaaaggattcctacctttggcagtggccacaccgcagtctgctag

SEQ ID NO: 13428 - DNA, 1590 bp, Zea mays
  Peptide Sequence Number=SeqID_55207
atggacagcgcgctgctcgcctgctcctctgctgcggtggcaatggtgcggctccagcagacctgctcccgtcagtgcgcttcgcagcgcactgtggtcgagcgagcgagcgagggcatctcgtcgctgggcgcctcaggccacaggaagggcgagccgcagaggatgaggaccacgtgccccccccccccccccgggttccgtgatcacgtggtggtggcagcacgcacacagcagcagtggcctgctagtctgctgcaatgctgccgcggcgtccgcctggctccgtgcgccggctggacgcctgcaccggaacggaggcgatgggacggggacggcccccgccgctcacgtgcatgctgtgcggtgctgccgctgcctcactcagacggccacactgtggcgtggtgtggacagtgccatttcccagcgcccccggccccggctccggctccgcacgcgcgtagccgcgtttgtccccttccggcgtggtggtggcgtcagtcgtcacccacccacccacccgcgcttggagcggagtggagtggagtgcccgagtgggtcccgcccacgctgacgagggagatacccagcccagcagcgccgcgctgcctgttccgcgacaggggcacagtgcgcgtgcgtgcgcgtgctgtgcggtgcggtgcggccgccgctgcctcctgcctaccttgcccgcccgccgagacgggattatatttttttattaaaatactgtacgtgggcggctgggcgccgctcgacgtggaccgagccccgcgcgcgcgcgcggcggagacacgcttcgtggcctgccgctgtctggtagggccgcttttccccattctgcccccggccctgggtgaccccacggcgcgggacccgagggcatcgctcgcttcaggcggcacgcctgccgcgcccctccttccccgcaccgcacggccaagcaagcgcgctggcagcggcagccgcggaaatacatgcccaagtccaggggtattgtcgtctgcctcccacacgggccggagagagagcctttcaaggctcacgccactgctcccctcgcccccagttccccacccacccccacacccccgtctccctcgctcgcctcgcgcggcgtgttgcctttccgtgtggtctcttctcgccccaggcttctccacccgcccaccccaacatccacacctccttcgctcgcccgctccttctctcctcccctcccctccgctccccacccagacgagcgcgcgcggcgacccggacccagtcagccggactcccatcccctcctccccaagcgagccgagctgcgagcgctgctcgcgcggtcggcccatggcgagcggcggcggcgggggcctgggtgcggctggcgcgggaggccggatgcccacgtggagggagcgcgagaacaacaagcgccgggagcgccgccgccgcgcgatcgccgccaagatcttcgccggcctccgcgcgcacggcggctacaagctgcccaagcactgcgacaacaacgaggtgctcaaggcgctctgcaacgaggccggctgggtcgtcgagcccgacggcaccacctaccgccag

SEQ ID NO: 13429 - DNA, 425 bp, Zea mays
  Peptide Sequence Number=SeqID_55208
atgagctccgcgcgagctccaagtcggcgattcggctcctccctgcgcggcgtcaaacgagagaggaattctgggcggatttgtgggagggaggtggtcggttggacctggaagtcgtgggcgcggctcacggcgatagctgcgcgcgggtggttggggacgctggggctgcgcctgctcggtcgcgaggtgatctgctacgagagccctcggccgccggcggggatccaccgcgtggtgttcgtgctctaccagcagacggcgcgcggcgccgtcgaccagccgccgcttctccgccacaacttctgcacccgcagcttcgccgtcgaccacgggctgggcgcccccgtcgccgccgccttcttcacctgtcagcccgagggtggcaccggcggccgccgccacgtcctccgccagccagcaag

SEQ ID NO: 13430 - DNA, 180 bp, Zea mays
  Peptide Sequence Number=SeqID_55209
atgtcaggggagcccaacggctacgagggggccctggctttcactaggggaaaatacgaacgtctagaaccatgggtgtttatgggagggcctagtagtgatttagacgtctcgagccatgggtgtttacgggagggcctagcgacgaccatgggtcccaacattcactgggggctctag

SEQ ID NO: 13431 - DNA, 558 bp, Zea mays
  Peptide Sequence Number=SeqID_55210
atggaagatatggaatttgatagtttattctatagtacaagttggtcgctgatgttgtatttaaagaatttgcttgacatccaaaggtctatatttggaatggtgaagtacatccattaccaagggatggagctcaaggacacgcctgcaccgctagagaagtttttttttgcaattttcattgcattttttgctttgtcggttggtcctggaatatatttgaagggctgtgataacatcctagcacagcttcacactgcacatccagaattttgtgacacatttggaggaattctagccatgcatattgatgacttaagggctttagcacctctgtggctctcaaaaactgaagaagtgaggcaagataagtcccattggtcaaccaatattactggcgatatatatggcatgggttggatcagtgagatgtacgggtattcatttggtgctgcagaagtaggtctacgacacaagataaatgatgacataatgatctacccaggttatactcctagacctggcattgagccacttattcttagactacccgtctag

SEQ ID NO: 13432 - DNA, 879 bp, Zea mays
  Peptide Sequence Number=SeqID_55211
atgaaggtgcacaagaagcatatatgtggaccttcctacatcaaagaacatgatatgtttgctgtcgacttcttccacaagatcactgggctcaccactgagttcgttgtcgtcaacacccctttacgcgttgtagaggtcattgcctatctgctggcggggctcccaatcgattacgacccattcgttgcctacataacgatcaaggctgagctactcttcctcgacgacatgttcgtgcacctagttgtgtacaacttcaacacatggccatattacagatgcaacacactgcctttgccaacttcttggatcatgacaacccctctcatggtagtgtctttggtgaccatggccacggtagacactctcatggtgattcttgcggcaataaccctcgtcctcaatgctagatttgtggcaagcttggccacacaccaccatcaaagcccagccgcggacgcgcgggctcattcttcttcgttcactcaaaccgcccctgcccctgcccgaccgtcgccctgccggagcgccgccctgcccgaggccgccgtcgaggccgcccccgagccgccccgcccgaggccgccgtcgaggccgcccctgcccgacgcccgcgcgcctagccgccgtcgaggccgcccccgccccgcccgaggccgccgtcgaggccgcccccggcccgcgctgcgccgccgcccctgcccaacgcccgcgcgcctagccacgccgccgccccggcccgcgctgcgccgccgcccctgcccgacgccccgcgcgcctagccgcgccgccgcccctgcccgagctgcgccgccgctgcgccacgcggccacccgcccccgggccgagcgcgcgacgccgccccgacccagttaa

SEQ ID NO: 13433 - DNA, 1455 bp, Zea mays
  Peptide Sequence Number=SeqID_55212
atgcaatcctcggaccccgagctcccggggttcttcttgctcccctccgcaaaatcccccaactaccgcgcgcgcctcgcgcctgtcaccgccgacgacacccgaatctccgcctccctcaagtctggtcacctccgggaggatatacagccgtcgggtggcgacaagccggccgcggcggcggctgagatggcggaggccaagggagaaggcaaggttttggtgtgcgcgcgatgccactcactgcgccactacggccgcgtcaagcacccggacgccgagcgcctcctcccggacttcgacttcgttgccgccgtcggcccgcgcctcgcgtcgccttccggggccaggtcgctcgtgctgctcctggcggacgcctctgacttcgatgggtcgttcccgcgcgccgtcgcgcgattggttgccgcagccggcgaggcccatcgcgcggactggaagcacggggccccggccaacctcccacgcgcgttgctcgtggtcaccaagctcgacctgctccccacgccatcgctgtcccccgacgatgtgcatgcgtgggcgcactctcgcgctcgcgccggtgcgggtgccgaccttcggctcgctggggtgcacttggttagcgccacgcgcggatggggcgtccgcgacctgctcgaacatgtgcgcgagctcgcggggacgcgcggcaatgtctgggccgtgggtgcgcggaatgttggcaagtcaacgctcctcaatgcgattgccagatgctgtggcatagtcgggcgaccgaccttgacggaggctccagttccgggaacgacccttgacgtgattaagcttgacggcgttcttggcgctcaagcaaagctgtttgacactcctggtcttctccatgggcatcagttgacatctagactgacgagcgaggagatgaagttggttcaaacagaacattctatacatattggtggactggtgcgcctggacgtagaagagttaactgtaggatcgatctatgttacagtttgggcatcaccacttgtcccacttcacatgggaaagacagaaaacacgacaacattgataaaagaacactttggcttgcaattacagcctcccataggccaggagcgggtaaaggagcttggtaaatgggtgaggaaacagttcaaagtttctgggaacagttgggatacaaactctaaggatatagccatcgctggtcttggttggtttggaattgggctgaaaggagaggcagtgttaggattatggacatatgatggtgttgatgtcatctccaggagctccttagtccatgagagggcttcagtttttgaggaagctggtttcacagtttcacagattgtttctaaggcagatagcatgaccaataagctgaagagcaccaagaagccaaaaaaggagagaatgaaacgtacttcccccacagagccggaagcttga

SEQ ID NO: 13434 - DNA, 309 bp, Zea mays
  Peptide Sequence Number=SeqID_55213
atggagagctccagactcacctaccccgaccgcttctacgccgtcgcggcctacgccccgcacaaggacgaggccatcgtcggctcgccatctccctcctttctatgggatgagcccttcccgtcctctgtgacggcgacagccgcggctgcgggtggcatgggccagctcctcctgatgtgcagcttcggaggccggatcatcccatgctcaaccgtctctacggacaaggaccatgacaacctcgtcgacgagtatgactacatcgttgtgacctcctacgacggcggatcctcacgcacctcttag

SEQ ID NO: 13435 - DNA, 155 bp, Zea mays
  Peptide Sequence Number=SeqID_55214
cagcagctggacgcacgaaggtagctggtaacccagataattatgcatggctggaggccataaacactccagtgaatatcaacatgcacactggcatgaacttcagacatgatgtaaagatgaaccggagcatcaagcagcagctggagacatga

SEQ ID NO: 13436 - DNA, 348 bp, Zea mays
  Peptide Sequence Number=SeqID_55215
atgccttgccgcggcgcctgcctgcaggctgcagcagatgcactgcttgcttcgctttctttcttctacctgtccgtcggcggcccgcctgccgaattcagctcgaaccgactccgcacaaaaagccagcttttggggtggtactacttaaggtgtaagcaagttggctggcagcagaggagtcccagcaagggacgacagatgggcaaggaggcactccaatcagggcccccacgactgccacgcttcgtccgctcaggtgtgccgttgttccctaattttgtgggtaccagcgtgtgggccgcgcacttcgcgggtcatatagataattccaggattaggccttga

SEQ ID NO: 13437 - DNA, 229 bp, Zea mays
  Peptide Sequence Number=SeqID_55216
atggacggcgggttgatttcatttatcccaaggggctcatatggaaaactaccaggacgaaagggtattggagagttctggccgctggattttgcgcggacggcgcagattagattccacccgcgacgaacggggggaaaggcccgcgacatctccctgttcagagtggggggaatcgtccatgacatcacggagacgaagaagcagaacctcgccggcggtgataaag

SEQ ID NO: 13438 - DNA, 162 bp, Zea mays
  Peptide Sequence Number=SeqID_55217
atgaacgtatgtgagctcactcttgctgtctcacaccccccacaggttaagaacaggtaccgcaggatgaggcgcatggaggatattgcgatgcatccgtgctttcttcgtgatgcccatgatggcgccccggcgtggcgatggtgtgacagcccggagtag

SEQ ID NO: 13439 - DNA, 2007 bp, Zea mays
  Peptide Sequence Number=SeqID_55218
atggcaggtatcgttaaagggatacgtgatgaccatcgtagtaataaagagaagacaaaagctagaaaagaaggcgaggaagataaaaaagaagatgctgataaccctaaaaacgcgttgggagccaatttagggacagatgtaggtacaacatctcgtgcagctcgtatgttaaaagtaggtcaaattggaagcatggttggaaaagcaacgggcggactcgcggggttagcaatgggtgcaggacttggaccagaaggaatggcagtaggaacatttgctggaagtaaagcaggtggagttcctggtgcagtaacaggaagaacattggcagctggacttgaaggagttactagtgctgggaagcatattggttcgagtgtgaagaaaggtttagatacgtataaagggttaaatggagaacaatatccagagttaacagatgaagatattgcacaagacttagctacgaaagattttgaaaattggaaagctgataatcctgattctgcagttgcgagccgtttaaaacaagcattccctggtgcatccgatgcagagattgcaaaaaaagtagcaaaaacaaatagtgatcaaatgtctcatttcaaaaatcagcgaaaacaagatttacaaaatatgaagaaaaatgctacaccatatggaaacgctagagatttagttaacgctgcaactaacgcattccaaaaaggatatgaggcagaccataaagatgcgtttatgagtcaattaccagaaaacatgtcagcggaagagaaagagaaaaaatggaatgaccatctaaactcaaaagttcaaggatttagaaatcatgcagaacaagcggcaataaaagctggagcaatgccagttgatgcgaaagataagcaaggcaacaacctgtttgataagtcctatgtaaataaagatgcctttgcttctcaacttgcacttggaaaagttgggaaagcagttgaaggagtaaaaggagaaacattagagagtggccatcaaaatatgggacaagtagactcacttgtgggtgcatccactgctgcatttaaaaaggcatatacagcagatcataaggctggattcatgaagcaattccctgcagatgtaccacaacaagaaaaagaggctgcatggaacaagcacttgagtcaaaaagtgcaagggtttaaaaatcatgcacagaaagctgccgaacaagcagggattgtgcaacaaaaagatgggactagctatgctaataaggaagcttttgcttctcagctatcacaacaattacaaaacaatccaaatataaatgcaatgggtgtatctagtgtatctggcattcaaaaagcggtaaatggtgtgaaaacacatagtttagcaaatggatatggaaaccagaaacaaaaaggtgtaagtaatgttgggaatttagtacaagcatctacagaatcctttaaacaaggatatgcagcagagaacaaagcaaactttatgaaaaacttgtctccaactatgtctcaagcgcaaaaagtagaagcttggcagtctcacttgaatgataaagggaatgaatttaaagcagtcgctcagcaagcggcggtacaagcgggtgcgatgcctgtacaggcaaaagatacgagtggaaagagtcttcataatcaatcgtatgttaataaagatgcctttgcttcgcaattgacaaaaggtttgcaaagtcatgcaagtcttggaacagtgagtcaacaagtaggttctggaattactagtgcgattcaaggtgttcgttcacacggtgttgcgacaggtggtgcaatcaacaaagctgtgtttgcagctacgcaaacgcaagcgagtatggcgcgtgcaggaaatttgtctgtttctgaaattgaacgctcttatgcagatgcatcagctagtatagctaatatttcgcaaagtgctggaaaaatgacgattccaacttcagcagtgggacgtatgacacagcaaagtaagatggttggt

SEQ ID NO: 13440 - DNA, 144 bp, Zea mays
  Peptide Sequence Number=SeqID_55219
atgccgccgttcaagggtcccagaatctcttctcaagacgttgagcagcccgtggttcatgactgtgttgccgaagatcttcctgagcaacaacctggtgaaggaaagtgtcctctgacctattatgtcctatatactttataa

SEQ ID NO: 13441 - DNA, 318 bp, Zea mays
  Peptide Sequence Number=SeqID_55220
atggcgcgtgcggtggcctcgttgcttcgcgccaggccgcaccacgcttgcgtattggaggccgccagctacagccactcctctagctccacagcgtgcagtcaggctcgggccgcctctagctccgcctccttctcccgcagcgcgcacgtggcaccagtgcctcgcaggctcgcaatgccgaccactccagctccagttccgcacataggcactcacaccgcctcgtgtccacctccacgtcctgatactgcagctccgtcgctccagtgtgtccgttgtgaacaacgggcgaagaagggcgacattgttgaataa

SEQ ID NO: 13442 - DNA, 744 bp, Zea mays
  Peptide Sequence Number=SeqID_55221
atgaagagggatttctacaaggatgcatctttgtcatcagcaagagtagctaaggagttctgctttgctgctagggatgttttgctcctttatagggctattgtgccggttcagctagagaagcaatttgatagcttaagtcaagtggctgctattgttcacaatgacttttaccatttgtcccaagaaattctgggccttgcatttcagatatgtcatatgtacaaactatttattctttatcttccatatttttttgtttatgccgctgatttgtccgtgcgttcaatattttttgtgacgtaccgtgcagattttcctagtgatctacagaaacaggttgtttttgtggatttagccccaatcttctccctgatggcgaatgctatattgagaagacaaatacaactcactgttgatactataagtgaggctatagatggtgctgaaggttttcagaacacacaccaacctcagcattatgaatccgcaaaatttagtattgagcaggtcgtgtttattttggaaaagatacgcatcatgtgggaatcgatactgccaagatcaatttacaggaaaagtatgtgcaatgtccttgggtctgtcttctctagaattacgagggatatgcttctgatagatgacatggcagcagaagagacattgcaggtgatacatgttatgccatactggtttgaggtgatacatattatgccatactggtttgaggtgataaaatcttag

SEQ ID NO: 13443 - DNA, 858 bp, Zea mays
  Peptide Sequence Number=SeqID_55222
atgatcgaagatatgggcttagaagcttttccaattgatgaagaggagcatgaaaagctctccacattattcgacataccattaaaggaaatacaggaagcagcagaggacacatggggtgctatagctgaaacgatagacggcatatcaccaaagcataaagaaaaaatttctatattactagattgttatccagtgagggggaaacaacaaatgaagacagtagcaatatttgatgctttagagccaaaaggaattgtaaccattcagcaatttaacaacgaattatctcgtggagaaactgccgttacttttaaagacttttatttagctttaaaagaagtgatggagcaaggtacacaagataatacccattactctagtggtgtactcccaaaagggtgtgtaaaacatgaagtgttatctaagagtggtgataagcaagctgtttggattgaagcaccaaaggctcagtgggatattcaattttttgaacgaccgtttcaacaagtgggctttccgcgtctgttattccgttatacggtttatcaaaaacgagttacaaatatctctgtttttgctgtaaaagaagatatggagttagaagaaggaatgaaattatatcaatttccatattctaatgttcatcctagtggatctgtatgtacgggtagagttgtgatacctgaattccggactttaaaagatttagaaacatttcatgttttattctttgcaagttcatttaatcacgaccttacacatactcatacggaaccagtgggagagctattcaagcgatttgaaaatcaaagttttgatgattctattttaatggaatcggaaatgactttttaa

SEQ ID NO: 13444 - DNA, 243 bp, Zea mays
  Peptide Sequence Number=SeqID_55223
atggaggtgaaggtaggttacctgatagctagtggtgttaatcacaatggcgtaaatgtccaaggtgttggagaagataagatgtttgatatcttctattatgcgaatacagatgaattaaatatgatttttgactttaaagaattaaaagagggttgtattcgtgtagcaacaaacttatatggtagaaattcatctgaagtacaagctgtccaacaagcttttaaagcagcttatatttaa

SEQ ID NO: 13445 - DNA, 177 bp, Zea mays
  Peptide Sequence Number=SeqID_55224
atggcggatgctatattgagaagacaaatacaactcactgttgatactataagtgaggctatagatggtgctgaaggttttcagaacacacaccaacctcagcattatgaatccgcaaaatttagtattgagcaggtctgttccattgttaaagagtatgggctttttgaaccttga

SEQ ID NO: 13446 - DNA, 333 bp, Zea mays
  Peptide Sequence Number=SeqID_55225
atgaagtatcaaaacatagagagctcgccgcgacggagagagaagggttgccgccgatggggtgctccatctacggtgttgttcgttcctgttgttcggattaggagcctcattgacaaccatggaacctgctcatcacgtcttcaagaggaatcacggtcgatcacttggctgggtgttcgtcggggtagagccgccgtgggagatcactgcgccgccatgggatcgggcgtggggatcaaagcatacccctatggtcgcgctgatatgcaaaagaaccctcggacctctatgaaatcaacccgcagtctgtatgtagtgttagaatattaa

SEQ ID NO: 13447 - DNA, 264 bp, Zea mays
  Peptide Sequence Number=SeqID_55226
atggcgttttggtttgtgcggcggggcttgtgtggggcatacaaaaatgttctgcacgaggaggtgcatgtgttgtatgaccagctacacccaaacatgccatcgaaagttgcagagatgggagctggcgtagcaggagcagatgacggaggtctttatggggagctggacatcttcggagcccctcctcctatgaacgttgctgataatcatcctcccaaagctagcagcggatctggagcaaccaaggatgtggaggactag

SEQ ID NO: 13448 - DNA, 975 bp, Zea mays
  Peptide Sequence Number=SeqID_55227
atggcggacgcgggggtgacgggggtgctggccaagctgggtgagctggcggcggaggaggcgacggcgctgctgcgcgtggacgccgagatccgggcgttgcggcggaagctggcctacctgcaggcgctcgtacgcggggccgaccgccagcgccgcggccgcgcaagcgagctgctcctgctctggctgcgcgagaccagagaggttgctttcgaggttgaggacgccgtcgatgagttccacctccgcgtcgaggcctgccgccccggggcccggtggcgccggcgccgcagatggtggtggggctggcaccgcgacgccgtcagcctcgtccaggacctcgccacgcagatgatttgttttggcgcattcttcttgaaatccatcaatgcggaaaaagaaaagaaatgcataatacatgaagtctatatgagggaaatatatgctgagtacgaaatggggttttttgtacgtcatgggctgtcaaatcaaatatctaagatcaatgaaaggattgatgagcttaaccagaacaaggaaacatatcaaattgaaagttctccttctgaaatttggagttcttcatcggttgaaatggatcctgagtggtacgaagataaatatgttataggctctagagaacgtgaatttgctatccttaaggacctaatcatcaacaaagagggagatatgcctcaccgggctgtcatctctatttttggggagcgtggcattggaaagactacacttgcaaaacaactgtacaatgacccagatatcataaaacactttgaggtccatgcatgggtatgtcttccaccacatgtcaggttcagggactatgttgagattatgcacatgcaggtcaacccacagattccagaagcttctgagaaaaatgataatacaacatttgcactcggtaacgaagaaaccactgatatggaattcaacctttcggcagaaccttga

SEQ ID NO: 13449 - DNA, 276 bp, Zea mays
  Peptide Sequence Number=SeqID_55228
atggcgaagggggcagggaagttgaagtggcagtaccgcgccgtgcggagcatgggaagctttgccattacaggatacaaggacgagataggtcgagagaatcacgcggatttcggccgtcgttgcgcgtgcgacggaatcgcctcccctgcgcggaatctgcggcgtccagcgcgcgtcagcccgcagaccggcgaagaagaccaacaagaaacgggaagcactgacctcgctggcccacgcgccagcgcccaagcgcagaagcacagagactga

SEQ ID NO: 13450 - DNA, 318 bp, Zea mays
  Peptide Sequence Number=SeqID_55229
atgagcaggcggagcaacggaggcctctattccccgattggatctgtgtgcctccgacctgttgttgctctcacggcgagacgcagatccaaatgcagacatcccgccgcggctcttggtgctggcggcttcacctgcgctcatggtcgacgcgccgtccccgcccccgccatggtgcccgagctccaggccgaggcgcccgtgccgaccactaaccccttgtctagctccctcctcacgaccccaaagtcgtccaagtccgccttcgacatccccgagggcgtgcagtggcgcaacaacgagttcctatccgcataa

SEQ ID NO: 13451 - DNA, 792 bp, Zea mays
  Peptide Sequence Number=SeqID_55230
atgagcgcaggtgaagccgccagcaccaagagccgcggcgggatgtctggcctccgttgctccgcctgctcatccgcctccgtcgcaatacgcacagatacaatgaagcatggttatgggcaggacagaagtgatccactttcttcatgcattcttgtaccgaaacagggtaacctcgtgctaactgggccatcaatggccacctcggcagaaagtccaattgccttcaccttctacctccatgatggcagcccgcaagccggagaagccgctgaggacgacgaggacatcgggaggataatctgcgactgcatcggcgacgacttctccaactacaacagggccatagtcgagactgtccaaatgggctatggcctcgctgaagtgatctatgccgtgctgaacaacggcgtccaaggccgggtcgctgtcaaacttgctcgcctgccggtgtccaaagccggagaagaagacgccaccgccattctcgggaggatcgttgctcgcagcaagctgttcgacgtcggctgcgtgctcttctacaaagagggtgacaatggagtgagcgtgcgaccgggggggctgattcagctggcgagggaagcgctcgccgtgccgctgcacatgccgctgacgattgagcttgacctgcatcgctgttccggcgatgaaattgttggaggggtccttgagttcaatcctgcgattgacggccagcacacggaacgacttgttggacaaaatggcgctgaattggaagtggcaatttcatggtcggagtacccttggtaa

SEQ ID NO: 13452 - DNA, 267 bp, Zea mays
  Peptide Sequence Number=SeqID_55231
atggtgaacgcgaggcgtggtcgcagcggctctattctctctctcctactcgtcgctgtgcttcagcgtaatcatccatgcaaggttgcgctagctcccaagcctggttatggcggaaggcacatgggaatcgggttttataaacctgtaacgccatctgtcggctcatgcccggttgttacgcggttgttacaggcaccgacgatttttctgggatggttcagcgttcgtgctcgtatgcagggtgccccacgtgtcggtgtctga

SEQ ID NO: 13453 - DNA, 243 bp, Zea mays
  Peptide Sequence Number=SeqID_55232
atggtgaacgcgaggcgtggtcgtagcggctctattctctctctcctactcgtcgctgtgcttcagcgtaatcatccatgcaaggttgcgctagctcccaagcctggttatggcggaaggcacatggggatcgggcaccgacgatttttctgggatggttcagcgttcgtgctcgtatgcagggtgccccacatgtcggtgtctgacatggaaggaacatacgtccccggcagttaccagtag

SEQ ID NO: 13454 - DNA, 267 bp, Zea mays
  Peptide Sequence Number=SeqID_55233
atggtgaacgcgaggcgtggtcgcagcggctctattctctctctcctactcatcgctgtgcttcagcgtaatcatccatgcaaggttgcgctagctcccaaccctggttatggcggaaggcacatggggatcgggttttataaacctgtaacaccatctgtcggctcatgcccagttgttacgcggttgttacaggcaccgacgatttttctgggatggttcagcgttcgtgctcgtatgctgggtgccccacgtgtcggtgtctga

SEQ ID NO: 13455 - DNA, 444 bp, Zea mays
  Peptide Sequence Number=SeqID_55234
atgactgtggcggctctggaaattaggtcggttgcggacctagtggagctgcgagaagtggcgaggtgggcggagaatacccggacgaatccatttattcgcctagaacgtgcttggtccatgtgccctcggtttgcgcgtggtggtttacaccgccgcgacaagtccgcgcggacgttccggaggaggaagacgagttccacgtgcggcggtcacgggactgcccggtggggtccacatgctagcgactggtggcggaaggaaactgggctagcgcgtgggagagcctgccccgcgggccccacgggtcggtgtaacggagaggaggaagacatgggcacgactgacctggagggcccacatgtcagcgccattttgctgttctgggccgcgcacaaggaaagcaaagaggaggtgggccgaggaaatctgaggcccagttag

SEQ ID NO: 13456 - DNA, 225 bp, Zea mays
  Peptide Sequence Number=SeqID_55235
atgggcaggaccctgcatctgagctttcttctcctcgcaacggctaaaggaagaagggtgaaaatgccagatatggtgtgtgctggtcactcacttttgatttctaaaaggtgtggagcacagggacggtggtcgatgactgaggtgaaggtcacgcaggctcgtgtagatggacagggagcagtgaagggcaagggctcggtcttaactgacagaccaaaatag

SEQ ID NO: 13457 - DNA, 1089 bp, Zea mays
  Peptide Sequence Number=SeqID_55236
atggggacccagggccaggacctagtcctacagcaagtaccaaaccaagaagggctctgcaactctcccccagctgggaaggacccttcaaggtccgacaacctagggtccggctcaggagaatgggcactcgtctcctggggtggtccggatcttggccgaggccgcctcccgggagttgctgacaaccctttcagatacgctggtatccagcctcgacacatcaagcttgcatcccaggcggggggccaggtggtgctggtggtctcaccagcggaggcaaccacctttgcactgggcagcctcaccagcggcagcgaccacctctgcaacaagcagaccccgccagcggagcccccgggcggcatcggagcagcgtggccggcagcgcaagcgacgctatgggtgcggcggacctgcgcacgacgcgactttcgcccgtgcgatggacggatagccacgccccactcggtggcaggaggcagtgttggaggcggcaccaaagccgtccagcccaaggggccagacacgcggcagctgacggcgcttgtagccagccggccccgcgtagccgaggtttgcctcctccgcaaggctggtcaacatccttctcctccaaatgctggaggaagaagtgggtcaccagccatgcggaaggcaggaccccgactcggctcgcgttccaccccagcaaggatgatgaacatccttgaagctaagggcagggggaggccgcagcctggctcgcttctctccaccacgaggctgaagagcgccaacccccacggggtcgcgcccctccaacagcagcaagaagaagacaagatcggcagcaccaccgtgcaggaaacgaagagcgcgagatcctcggcagtaagaccgctggggggtgaccctaacgtggattcccccagcgaacaccggcgcgccccatccagaggctcggaaggtggaagggcgcagtggatgcgagaaatgcgaggcatggctactgcccggggggtgagcccctttttaaaggctgatttccccgctcgtgccacgaagcgtcacgggcaagtctcccccaacgcacaccaaggcacctag

SEQ ID NO: 13458 - DNA, 177 bp, Zea mays
  Peptide Sequence Number=SeqID_55237
atggtcagggaactgcggctgcgggtggatgactacggggagaaggagctgacaccggtgggtccacacgtcagggagtgcaagtgtgccaaggaatatgggccgctcagtgatgaaggcttggtggagctggtggtggtggtggaggttgttgttgtcgttgtcaagatgagttaa

SEQ ID NO: 13459 - DNA, 1470 bp, Zea mays
  Peptide Sequence Number=SeqID_55238
atgccgacacaggggagaggagcacagggtatccatgtcggggaagaggtggccgacactggtgagtcccgcctgttggggagctcggatgggggcgccggcagcgctgatccggaggtcgatggcagtgaggagtcgcggcgagccagcgacggctgcggaggccggggcgccgcgtacgccgcctgcagcgccgggctcgtcggcggctgcgctgctacggggcgcgcgaggttgaggcgttgggcgcggtgcaggagctcggcgggaccagcggcacgcgtgctggtcgcagcagctttggcggcgtcgctggacgcggatccggtggggctgaggcggcggatcccgcggctgtgccggcgaagggagggccggtcgcgcggccgtgcgccagctgggaggggaggggcgggcgcgtcggcggcagacgcggccgctactacatccatggataaatctgccttgtcaaccagtcaagctgatagtagctctggagttccaggaattactgttgataaatcagtagagttctcgtatgaagaactttttaatgccacagagggatttagcatgagtaacaaaatcgggcaaggtggttttggtgctgtctattatgctgagctcaggggcgagaaagctgccataaagaaaatggatatgcaggcttctcacgagttccttgctgagttaaaagttttgacacatgttcatcatttgaatctggtgcgcttgattggtttttgcaccgaaagttccttgtttcttgtctatgagttcatcgagaatgggaacttaagccagcatttgcgtggaactggttatgagcctctgtcttgggctgccagggttcagattgcactagattcagcaagaggtcttgagtacattcatgaacatactgtcccagtgtacatacatcgggacatcaaatcagcaaatatcttgatagacaagaactaccgtgcaaaggtcgcagattttggtttaacaaaacttacagaagttggtaatacatcactacccacacgtggaatcgtgggcacatttggttacatgcctcctgaatatgctcggtacggtgatgtttctccaaaggtcgatgtttatgcctttggcgttgtcctctacgaacttatttcggccaaagacgccattgtcagatcaaccgagtcttccagtgattcaaagggattggtttatctgtttgaggaggctctcaacacaccggatcccaaggaaggccttcaaagactgattgatccggcgctcggcgaggattaccccatcgactcgatcctcaagatgacggtcctggcaagggcgtgcacgcaggaagaccccaaggcaaggcccacgatgagatccatagtggtggcgctgatgacgctgtcgtcaaccagcgagttctgggacatgaacgcgatccaggagaaccaaggtgtcgtgaacctcatgtccgggagatga

SEQ ID NO: 13460 - DNA, 639 bp, Zea mays
  Peptide Sequence Number=SeqID_55239
atgggggcggagacccgcgcgcacgcatcaaacctgcccagctggccggtacccagcgcggcagaatccaggaacccgtacgaacgaatccaggcaaaaggtggcacgcgcccacgcacgcgcggggacgctagggggcggagatcccgccgggatcacgtacgacggtgcggctctcacctgcgtccggaacatgggcgagtcatcgagtttggcgaaatacatggcctgccgccgccgccccgcttaacacagtcacccgccgcccgccgcctcctaccagcccatccgcggggcacgctgcgggcgctctctggccgccggctgtggcttcctccggttcgacccgacccgacccgccaagctgggggaggggaggacgacgggagggagaaggtgcggtggcagcgggatcgtcgcggcagggcggggaagggaatggcggcgatctgggcgcgcggggggcgggggaattggtcgggtggctcggcgagaagcgaggcgagcgaggaggggagcgaaagggggagggaagggaaggagaggagtggagcctggtgcgaggtggtggaaatgcgcaagaggagggagggatggatggaaaacgctgcattgagtcccactctctctctctcttag

SEQ ID NO: 13461 - DNA, 408 bp, Zea mays
  Peptide Sequence Number=SeqID_55240
atgtccggtgcaccagaggactccgacctcatagtcttcgctctcggaaatttccagaggccactccgctataattcaccggactgtctggtgtgcaccggacatgtccggtgctccaagaaagaacggcctcaggaactcgccagcctcgggttttcacgccagtcgctccgccataattcaccggactgtccggtgtgcaccggactgtccggtgcatctacggggcaacggctacttcaggcgccaacggctacctgcggcgcatttattgcgcgccagcgcgcgcagagtttcgccctattcaccccccctctaggcgactatcatcaacacgcagcaggcccctacctggcgcgccaactgtcggcgtttcggacccaggggatcctcaaccggaccgactag

SEQ ID NO: 13462 - DNA, 1032 bp, Zea mays
  Peptide Sequence Number=SeqID_55241
atggagcctgatcgagtcagtcccgtccttatcgcctctctctgttcgcacgcgactaacagccagcccccgacacgtgaacaagcacaagggcgtcgcctcgcctcgcgcgcgctggcgccgcgcacagacacgcaagcgtggatcgcgccgccgctcatcggggcatcgtccgtcgcgacaggggtccgtcgccgccgccgccggccggtagtagcggcgtgccacaggcggcgggaggcggcggtgtctcttggggcggcccccggttgcgcgccgaggacgagcacgccgtcatcgtcgcggcgctggctcacgtcgtcggcgccgggacgcggagctcgccaccggccgggctcggccagcaaggtacgtgcccacgtgctcgtggtgcacgggcccacgtgcagtgctccacactttttacctacagcggggtggatatggatgaaccggttttactccctgttacatttgtgtgacgacgacctgacaggccgacacgctcccctctcctgcgtggattcagtgacgcaccgcagggccgtccacgcgccggcgacggagccacagcggcggcctcggtaccgcggcgtgcggcagcggccgtggggcaagtgggcggcggagatccgggacccggtgaaggcggcgcgcgtgtggctcggcaccttcgccaccgccgaggacgccgcgcgcgcctacgacgacgccgcgctccgcttccggggcgccaaggccaaactcaacttccccgctaacgcgggccacggcaccgctgccgccttccagccccgctaccgcggccagcatcggccggggacgccgagcgctgctgctgctcctgttggctgtcacgaggagccgtcgtcgtcgttccccgacctcggccagtacgcgcgcatcctgcagagcggcggcggcgacttggacctgcaggccgccttcgcgggcggggtggcgccggcggggcggtcctcgacttccgcggcgtcggcgtcggcgtcgtcgccgtggcaaggtgctacttga

SEQ ID NO: 13463 - DNA, 162 bp, Zea mays
  Peptide Sequence Number=SeqID_55242
atggcgttcaccagcccacgacggcgctttccagacgcgatgccccagagccctggcaagttccactccacatcctcctccattgcatcggtggccgcaggagcatcagccggagattgccaccagcgtgaccccaatatcctcgccttgcctctcgcttag

SEQ ID NO: 13464 - DNA, 255 bp, Zea mays
  Peptide Sequence Number=SeqID_55243
atggaaggtgacgcaagagcattgacagaggatgaagtcgtacagaacacgccatacctcaacctcatcgtgagcatgctctgcgcgatccatcaggtgccaaaggttcaacacaaaccaataaaaagtccaagaaagggtttaaataaaaaggagcaaaaccaactgaaggctgccctggtctggcgcaccgtcgccaccttcgggtttctgggaatgccactccgctataattcaccagactgtcggatgtag

SEQ ID NO: 13465 - DNA, 547 bp, Zea mays
  Peptide Sequence Number=SeqID_55244
atggcgtccaactacgtggacacgacgggcgaggagggacggttccacggccctcacagccacagcaccagcacgaccccgacgggcggcgcggcggcggcggcggcatcgccgcgcaacttccggcgcagcttctcctccgcgtcctccgcgggccacagccacggcggcggcggcggcggggccaagtgcgtgtgcgcgcccgcgacccacgccgggtcgttcaagtgccggctccaccgcaccaactcccagggccacggccacggccacccgcacccgtccccgccggcctcccccgccgcgccggcgcagggcgtctcgtcttccgcttcctcccgcaccgtcgaggccctttgtcgtggtcgaggcggcaagcggcaacggtggcatggagaggaggcggtggcgttcgacgattcgacaagcacggcggtcgactggagaggaggcggtggatgtctcttcggcgggaggatcctacatgacatttatgatttagccgacgatgaagctctggattctgacagaggaggagcgttccgag

SEQ ID NO: 13466 - DNA, 345 bp, Zea mays
  Peptide Sequence Number=SeqID_55245
atggaggtctctgtttgtccagatggaccgaacactttaggaggaagggaaacaactggtgagtttgtcggttggattagtttgtgttgtaggaaaggactatgccatctgtcattgtttgtgttggagaaccggttgaagcaagtacaagaaatgcaatcgaattgtgataaaggcctcaaacacatgagctgtgaagctcctctgctaggacctatggctgagctatggaagctgaagaacccagatatttctgagagcgagtgggcggtgcaagccgccgccgcatcaatctactcgacctgcaacatgaccatgataacggagaatgtgccttgcttctga

SEQ ID NO: 13467 - DNA, 477 bp, Zea mays
  Peptide Sequence Number=SeqID_55246
atgaagaaggtggtctactacgagaccgactcttcgtcaccctcaacctctggctcggaatcagcatccaccacttctaagcgccatgagcgcaagaagtatagcaaaccacctatgcttgaaggtgaagattattctatgtggagtgataaaatgaggcatcacctaacctcactccacaaaagcatatgggatattgttgagtatggagcgcaggtaccaaaaaggggagacaaggattacgattcagaggaggtcgatcaaatccaacacttcaacttccaagccactactatactcctcgcctctctaagtcgagaggagtataataaggtgcaaggattgaagagcgcaaaggaaaattgggacgtgcttaagaccgcgcacgaaggagacgaggtgaccaagatcaccaagcgggagacgatcgagggggagctcggtcgcttcatgcttcaccaaggggaggagccataa

SEQ ID NO: 13468 - DNA, 327 bp, Zea mays
  Peptide Sequence Number=SeqID_55247
atggcaaaacgcgacgagaacctccgaaaatcagacgtcaggacgaggaagtcgcatgcgccgctgagccgggctgaaggcatccggagacgctgcggagccgcggaggaggcatcgcccaccgagtaccgaccgtgtgattccacgtgggagaggacttcggcaccgtccggcgtcgtggcggcgccgtggctaccggctatcccgtcactgcggtgcggggtaggggaggccgcatccacacagtcacaatcgatcggaggaaaaatctccgtctccatcgccgcgaaagatcgcggtagagattttggtccatcgtttgtataa

SEQ ID NO: 13469 - DNA, 1011 bp, Zea mays
  Peptide Sequence Number=SeqID_55248
atgcattttattagacttggagagtattcggccccaatcatcgtcagtagtgcagttcgtgctgtagatgctggaggccaagatgctggtggccaaggtgacccagaagagtgcggtgtaaaagcatacgagctggtctgtagcaacgacaaggctacaatccgcatcaacacggggacatattttgtcaccagcatcgactatatcaatcgttccttctgggttgtggacgccaatttggatatgcacaacagctgccctcttcctcgctgggatccgttacttgcaatatgcatgttggatacggctccgtatacaagggcctactactcgcagcaggcaatatgcatgttgccgtcaagatgctgggcaactccaactgcaatgggggcgagttcattctccaccatcggtaggattcaccacatcaatgtggttcgccttgtgggcttctgtgcagaggaaatgaggagggcactggcctgggaatcaactacatacctgcatctagggtgcgacatgcagatccttcactttgacatcaagccacacaacattcttttggacaacaattttgtcccaaaggtttctgactttggccttgccaagttgtaccctagagacaagagctttgtgccagcaagcgccatgcggggaactattgggtacatagctcctgaaatgatatctcgtagctttggtgccatatcaagcaaatctgatgtttatagttttgcggaacaagaagctggcgagatttctgttgcggcagacatgcatgagttggagaggaaactgtgcatcgttgggctacgctgcattcaaatgaagccgcaggatcgtccgaccatgggcgagatcatagagatgctcgagtgtggcactcatggcctgggcctgcaaatgccttctaggccattcttctgtgatgatgatgatcctaatatgcctgcagcagattcttaccatttctcatcggagcttactgcaatatctgaggaagatggttga

SEQ ID NO: 13470 - DNA, 1296 bp, Zea mays
  Peptide Sequence Number=SeqID_55249
atgatgatgaggacgaacactctcttcctcctctcgctcgccattctcctgggcacatcgctcgccgtcaccgatgtgtcgcaggaggcccagctcagcaagttcatgacgaccagggccttgaaacggctgacgacgaagaggcccagggtgaacgggcccgaggaaaccgacccatgggccgaccctagcgccttcgcccacctggccgaacgctgcaagggcccgccaagcggcagcaaggaggccgacagggtcctggggctgccgggccagccgccgcgcgtcaacttccggcagtactccgggtacgtgacggtgaacgaggagcacggccgcgagctgttctactacttcgtggagtccccccacgacgccgcctctaagccgctcatcctgtggctcaacggagggccaggatgctcgtcgctgggattcggggccatgaaggagctcggccccttccgcgtcaaccccgacggcaccctgagaaggaacaagcactcatggaacaacctggctaacgtgatcttcctggagtcgccggcgggcgtcgggttctccttctcgaggaacgccaccgactacgacacggtcggcgacaggcggaccgccgaggacacgtacgtgttcctcgccaagtggctggacaggttcccggagtacaagggccgcgccttctacgtcaccggcgagagctacggcgggcactacgtcccggagctcgccaccgtcatcctgtacatgaaccgcttcccggacttgctgactcccatcaacctccaaggcatcttcttcggcaacccgttgctcgacgattacctgaacgggaagggggagctggagttcctctggagccacggcgtgatctccgacgaggtgtgggcgcggatcctcgccaactgcaccttcaccccctccgacgactggccgtgcttcgtggcggcgcactcgttccagagagggaacatcgacaagtacgacatctacgcgccggtgtgcctgcagtctgacaacggcacctattactccagcagccactcgctgcccggctacgacccctgcagctactactacatcgagccctaccttaacaaccacgcggtgaagcaagctctgcacgctcgggtggacaccaactggacaggctgcagtgaagatttggcgtggaacgacgcccccgagttcatggtgccaatcatcaaaaggctgatcaacgaagggctcaagtatggatatacaggggtgatcagatcaggtcctcttctcatgattacagagtcgtgctacgactag

SEQ ID NO: 13471 - DNA, 1176 bp, Zea mays
  Peptide Sequence Number=SeqID_55250
atggagaaaggaaaacacatccagccaccaacttatggcaaccttgtaactattctttctatcgatggtggagggattcgaggaatcattccagctgttgttctcacctttctggaatcagagttgcagaaactcgatggagaggaagccaggttagcagattactttgatgtcattgctggaacaagcacaggggggcttgtgacctcaatgctggttgcaccaaacaacacaaacaggccactttttgcagccaaggatattcaagcattttatatgaaccatgctcccaagattttcccacagcagaggggtccatttggtagggtaatgaggatattccgatcactgtcaggaccttcctatgatggtaagtaccttcatgatgttgtcagaaagaagctaggaatcaccaggctgcatgagactttaacagatgttgtaataccaactttcgacatcaagcggctacaacctattattttctcatcttatgaggttaagaatgagaagtacaacacaatggatgctctactatcagatatttgtatcagcacatctgctgctccaacttatcttcctgcgcactacttcaagacagaagattgccatggaaacaccaaggagttccatcttattgatggaggagtggctgccaataacccggctttagttgccattggagaagtaaccaagcagatattcaaggaaaacccagattttttcccaataaaacctatggattatggccggtttctggtcatctcactaggcacaggctcagcaaagtttgaagcaaactacaatgcacaaacggctaaatcatggggactgttgggttggttgcttggcagtggatccactcccttggtagatattttcacacaagcaagtgcagatatggtggatatccatatctctgctgttttcaaagcattacattctgagcaaaactatctgaggattcaggatgatactctgcaagggacgctgtcctcggttgatgttgcaaccaaggaaaatatggagaagcttgccagagttggagatatgctcctaaagaaacctgtctcacaggcgaacttggaaactggccatatggtgcctgcttgtcatagggcagagatgaccaatgaagaagctctaaagaggttagctttacctctacacctctaa

SEQ ID NO: 13472 - DNA, 1077 bp, Zea mays
  Peptide Sequence Number=SeqID_55251
atggcgccgccccagttcgcggcggctcaattcgtgccgttccacgccgtcgtgcagtcgccgcagctggcggcacctgtgccagcggtcgtcctgggatcgccggcgccgcatcaggccgggcaggaggagaacaagaccatctgggttggtgatctccatttctggatggacgagaattatctgcacaactgcttcggctacaccggcgaggttgtggcaattaaagttatccggaataagcagaccggacagtctgaaggatacggatttgttgagttctacagccatgctgcagctgaaagggttcttgaagggttttctggtcatattatgccaaacactgaccagccctttaggttaaactgggcatcgtttagcatgggagataggcgctcggatgttgcttcggatcattccatattcgtaggcgaccttgcttccgatgtcaatgacgccacactgctggaggttttctccagcaggtactcctctgtcaaaggtgccaaagtcgttatcgatgctaacactggtagatccaagggttatggcttcgtgagatttggagatgacagtgagaagacgcatgccatgactgagatgaatggtacctctggatcaaatggctcatctgctcgaccagacggaggagatttgacaaacacaacagtatttgtgggcgggctcgacccagatgtcagtgaagaggaccttaggcaggccttctcccagtacggagaaatttcttccgtaaagattccagttgggaaacagtgcggcttcgtgcagtttgctcagaggaagaacgcggaagacgcgttgcaagggttgaacggcagcactattggcaaacaggccgtgcgtctctcatggggtcgcaacccagcaaacaagcagtttaggggcgacaatggcaacatgcagtggaagaacgggggcgtgtactacgcggcgcccccgttctacaacggcggctacggctaccctgcggcggccccgttccctgatccaggcatgtacgctgctccagcctacggcgcctacccgttctatggcaaccagcagcaagtgagctga

SEQ ID NO: 13473 - DNA, 771 bp, Zea mays
  Peptide Sequence Number=SeqID_55252
atgtaccatataaagaaattgctaaaaatccttgatatgcgttatgagaaggttgatgtgggtaaagacggtcgtatgcttttcggagaagataatgggaaagaggagaactgtaaagtgtctatcaaaccgagccccggcgacgaggcgcagcacccagtgaagctgctgctgggggacggcgtcgaggtgctcgacatctccttgccggaccgcacggtacgcatccagacaaaaatctcgtgggtagagtatgccgccgagttcaacggctcatggtccgttccggcgccggacgggcccttgatggtgtcgaccgcgcgcaactcctttgtggccttcgggtgcaacgtgctggcgaagctcatcccctacggcaccgtgcttagctacgccagcacctgcgccgcagcctgcatgaatacgcccgatgtctcctcctgctccggcgttcgctgctgccagacgtccatcgcatctctcggctcagacctgccttggtacggtatccaggttaaacatctagaaggagaaacgggtaactactaccatagagcagttttcatagttgaccaggactggttcaacagagttgaggccgcgatggcgagcaacttcagcactctattttttggaaatagattttatgagcaggtagtgttggtggatagcgttccagtggtgctggagtggtcgttgaatctaatacgcgactcaggcttgtttgtgttgtcccctataggacccaatcgtcagacttcagatgcctaa

SEQ ID NO: 13474 - DNA, 774 bp, Zea mays
  Peptide Sequence Number=SeqID_55253
atgtgggagctcctccgaagccgaggtcgagtctgtcttccgtggccgaggtcgggtccaagccccaggttcgggcgaggcggagatcgccggctggtgccggggcggagtccgagccctggggtcgggcgaagcggagttcgtcgtcttctggggtcgagcccaagtccgagccctgggtcgggcgaggcggagatcgtcgtcttctgggacttagttcgagtccgagccctgggtcgggcggagttcgccgtcttccgggacttagcccgagtccgagccctgggtcgggcggagttcgccgtcttccgggacttagcccgagtccgagccctgggtcgggcggagttcgccgtcttccgggtcttagcccgagtccgagccctgggttgggcggagttcaccgtcttccgggacttagcccgagtccgagccctgggttgggcggagcggagcttcctatggtgcctttggccgggcctgactgcctgtcagtctcactctatcaagtggcaccatagtcggagtggcacaggcggcgctgtccttctgtcaggccggtcagtggagcggcgaagtgagggcggtcacttcggctttgccggctggggggcgtgcgtcaggataaagggcctcgggcgagccggaaacatgttcgccgctgaaggggggcctcgggcgagacggaaatcctccgggctttgtgctgatgggggttaccagctgagaattaggagccttgagggtacccctaattatggtccccgacagtag

SEQ ID NO: 13475 - DNA, 210 bp, Zea mays
  Peptide Sequence Number=SeqID_55254
atgacggtatggagactggccacggcgaggagcggctttgcggcagagcaccagagccagccactggaattaagcgatcaccgaggaggcgattgggtggttctcgagctcgagacaatgcgagggagggtttatatccgtgtggggcacacgcccccgcaggaagccgcaggccgggagttcgccgcagatttcgacgtgtttgttaca

SEQ ID NO: 13476 - DNA, 240 bp, Zea mays
  Peptide Sequence Number=SeqID_55255
atggcgcatatcgaagaggttgaggaccttggtgatctggatagcacgctgcccgaggcatcgggggcggagccgacgcctccgtccgatgctggcgaaggcccctcggcgaccccgcgccaactggagctggagtcctcggatgaaggcttggattattttgctgcattagatgtggctgcagcggagtctccgccacgcgacatcgtatggggatggagcgtggccgtcttcgggtag

SEQ ID NO: 13477 - DNA, 711 bp, Zea mays
  Peptide Sequence Number=SeqID_55256
atggcgcttcctattgacgtggcgggcctgtgccctaggtcgggcgacgtggaggctcctccgaagccgaggtcgagtctgtcttccacggccgaggccgagtccgagcccctgggtcgggcgaggcggaggtcatcggcagaggtcagggcggtgtccgagccctggggtcttagcccgagtccgagccctgggtcgggcggagcagagttcgccgtcttccgggtcttagcccgagtccgagccctgggtcgggcggagcgaagttcgccgtcttccggggctgagcccgagtccgagccctgggtcgggcggagcggagttcgccgtcttccggggctgagcccgagtccgagccctggggtcgagcggagcggagttcgccatcttccggggctgagcccgagtccgagccctgggttgggcggagcgaagttcgtcgtcttccaggtcttagcccgagtccgagccctgggtcgggcggagcggagttcgccgtcttccggggctgagcccgagtctgagccctgggtcgggcggagcttcctatggtgcctttggcagggcctggctccctgtcagcatcactctgtcaagtggcgctgcagtcggagtggcgcaggcggcgctgtccttctgtcagaccagtcagtggagcggcgaagtgacggcggtcacttcggctctgccggagggcgcgtgtcaggataa

SEQ ID NO: 13478 - DNA, 866 bp, Zea mays
  Peptide Sequence Number=SeqID_55257
atggcatcgctgagtgctgacctcttttacgacatactcaagcgtctcgatgctgcagctctggcaagagcaggctgtgcctgcgctgattttcgtgccatatcaaatgaagaggatctgtgggaaaatgcctgcacatctctgtggccatcaatgagacgagatgacgtcatatggggaattcccagctcagacagtgccaatggatggttctacaactacccgttccggatcgacctgtctcaacactcggctgaaaacaacgagaacaacaacggagatgtattcctatccactgtcagtggcgtgtcaccggtaccctcaatggagcaagaaaggaaagacggcaagctatggagggagttgaacgatggtgtaaagctgagctggattgttgtcaacaagaagatgaagagggcagtgaacctgacgagctggcacccgctgagcgggcagaggcactggccgaccgatgctgacttcgttctgcggttcgggtctgtgcttccggcgaaggaggtcctgccctgccaggtggcggaatgcatcctgctgatgaagttccgcgtgacaggcatgggcggcgaggaggctggggagccttcgacgctcgcgctgacggaactgagcatgcagatccaggacatgggcggcgtccatctcaacggccgctgcagcctcctcctcctcaaggaggcgctgagctgccaccgcagcaggaactacgatgaggtgctggagtcttgcaatttgtacctcaaggcacagagtgagctgaaggaagagaagatacgcagcgagtgccggttcgacacgctgtgtgttttcagtggcattgcaatatttgctgctatctgcaccatgtg

SEQ ID NO: 13479 - DNA, 204 bp, Zea mays
  Peptide Sequence Number=SeqID_55258
atgaaactcattgactattgtgatggcgtccaggcgattagaggggacgaaggtgatggtattgagccccagcatcttgaggaccctgttgaagttcaaggccaagagtctgctcagtctaggtgcaccggacagtgtccggtgcgccaggctggctctggtgaaaaggccgccctcaggaaatcgtcggcggcgtacgtctaa

SEQ ID NO: 13480 - DNA, 1068 bp, Zea mays
  Peptide Sequence Number=SeqID_55259
atgtccgcggctccttgcggcgatgttgggggaacaggttccagcagtgcgacccgtatcgaggcaagcacgggtaacaaggggcaaacgaggaagagggcctccagttctccagtctgggaggactttgaacatgtgttcaactttgagaatgatggttctctgttgcgttgggagtactctagtgaagttgcacgcactgaacttgtccgattaattgctagagaggatcttccattgtcgtttggtgagtctgatgcttttgaggagtacatagctcgtgcccataaccctagatttgttaaatcttctaggcaaacaactgctagagactttgtgaaacactataatgggcgtgtagagatgttaattgaggtctttaaaactggtgtatcctctgttgcccttacctctgacatttggtctggaaaggctaaagaggattacatttctgttgttgctcactttgtgaaccctaattgggagttagagaaacggttgcttggtctaaggccaattgaagacggccatactggtaagaacattgctgaacgtgtttccttggtggtagatgagtatggcttaactgataagatctttgcaattactcttgacaatgcttcatctaacaaaactgccatgtcatatcttatacctttgttctctagttaccttggcatacctgattatgaattagatgatactcataatatgtcctctattctgttgcatcaacgatgtgcttgccacattattaatctcattgttaaatctggtttgaaacggttgaactcatgtgttaatgattttagaactgctatcacttatttgaattcttctaatcaacgtattgctgtatataagagctattgtttgagtatgggtatccgtcctcggaagtttggtgtcgatatggatgtgaggtggaattctacttacattatgcttaaacatgtgctgtctcatcgtagcaccttctctgttttcatcaaaacccagtatcctttagctactgatggcacccctttacttactgacaatcactggattattgctgaaaattgttaa

SEQ ID NO: 13481 - DNA, 108 bp, Zea mays
  Peptide Sequence Number=SeqID_55260
atgtcgcccatccgcgtcgtgcccccaacattgcgtgtcgggatccaggactccagcggcaaggcgaccactacgccgcgcgggcacggtcacatgaaaagattctaa

SEQ ID NO: 13482 - DNA, 1119 bp, Zea mays
  Peptide Sequence Number=SeqID_55261
atgaagcagcctctgtgccgattcgacaaagaaaagcgcaaagccataggcgaggagatccacaagctgatggctgcagggttcatcaaagaggtattccatcccgaatggctagccaaccctgtgcttgtgagaaagaaaggcgggaaatggcggatgtgcgtagactacactggtctaaacaaagcatgtccgaaagttccctaccctctgcctcgcatcgatcaaatcgtggattccactgctggatgtgaaaccctgtctttcctcgatgcctactcagggtatcaccaaatcaggatgaaagagtctgaccagctcgtgacttctttcatcacaccttttggcatgtactgctacattactatgccattcggtttgaggaatgcgggtgcgacataccaaaggtgcatgaaccacgtgttcggagagcacattggccgaacggtcgaggcttacgtcgatgacatcgtagtcaagacgaggaaagcctccgacctcgaaacgacattcaagtgcctcaaggcgaaaggcgtaaaactcaatcccgagaagtgcgtcttcggagtcccccgaggcatgctcttagggttcatcgtctccgagcggggcatcgaggccaacccagagaaaatcgcggccatcaccaacatgggccccatcaaggacttgaaaggagtacagagggtcatgggatgccttgcggctctgagccacttcatcttgcgcctcggcgaaagaggcctacctctataccgcctcttaaggaagatcgagcgcttcacttggacccccgaggccgaggaagccctcgggaacctaaaggcgctccttacaagcgcgcccatcttggtgccccccgttgccggagaagccctcttgatctacgtcgccgctaccactcaggtggtcagcgccgcgatcgtggtcgagagacgagaagaggggcatgcattgcccgtccagaggccggtctacttcatcagtgaagtactgtccgagaccaaaatccgctacccgcaaattcagaagctactgtacgcagtaattctgacgcggcgaaagttgcgacactacttcgagtctcatccagtgactgtggtgtcatccttcccctag

SEQ ID NO: 13483 - DNA, 807 bp, Zea mays
  Peptide Sequence Number=SeqID_55262
atggcggggcagccaccgccgtccggggcctccgaggacgacttcctcgagcacttcttcgccttcccctccgcggcctccgccggcgctgccgggggccacgcgggcgccggtgttggcggggaccaccccttccccctcgccctcagcctcgacgccgccgccgaggccaagccggaccgtgatcccgtgcagctcgccggcctcttcccgccggtgttcgctggcgccggcggcgtgcaccagccgcacctccgcggcccaccgcctccgcagatgttccaggcgcagccgaagccgggcgagggaggcatggcgccgcagccgccagccccgcggcccaagctaaggagagagagaattgcagaaaggatgagggcattgcaggaattagtccccaacacaaacaagacagatagggcagccatgctagatgagatccttgattatgtgaagtttcttaggcttcaagtaaaggttctgagtatgagcagactgggcggtgctggcgcggttgcgcagctggttgctgatattccactctcagttaagggcgaggcaggcgacggcgggggggcgccgcagcagcagcagcagcagcacgtgtgggagaagtggtcgacggacggcacggagaagcaggtggcgaagctgatggaggaggacatcggggcggcaatgcagttcctccagtccaaggcgctgtgcatgatgccggtctcgctcgcgatggcgatctacgacacccagcaccccctggacggccacggccactcgctgaagcccgagcccaacgcgtcatcctag

SEQ ID NO: 13484 - DNA, 309 bp, Zea mays
  Peptide Sequence Number=SeqID_55263
atgacgacgacacactacgcgcgcggtttccgtaaaccttatcttaagagcgggattggtgtaaacgaacaaagcctacaggagtccagaattcctgaggatgcaagcactccacctctaaatgcatgctcatacctccgctccgctccaaaaagatcacctgccaaggaaaaggaatcatctggtgctgttcatgaggagaccatgggtgggggtgggacattcgccagaggtcatacaaaccatcaaaacatggaagatatcgtctgcaaaaccgagcacttcgctattcatagaatgccacgatag

SEQ ID NO: 13485 - DNA, 345 bp, Zea mays
  Peptide Sequence Number=SeqID_55264
atggccttcttcttaaagcaatatcctggggaatcggataaagttgtcccccttgggatcgggtttttgatggtaagcactgttggagttactggtacacgtgcaaatgtaagcggcaaggtgcaatctcttcttcaggatatcaagaaggtgacagaaaaacccgtggctgttggctttggtgtgtcgactccagagcatgtccggcagattgcaggatggggcgcagatggtgtgattatcggtagcgcagtgatgaagacgttggaggaagctgcttctccagaagaaggattgaagaagctagaagagttcgccaagaacctgaaggccgcattgccgtga

SEQ ID NO: 13486 - DNA, 291 bp, Zea mays
  Peptide Sequence Number=SeqID_55265
atggcctctcgccggcgaccggatgcagcggcgccccaacctttcccgacctatccaatgactctaaaacgcagaaggaataatcgcgagtccgttgggggaaatcttaccgacgttggtgctccacagccaccaccggacaccgaatgtacagccgagatcgacgacctcaaactcccgacgccgcgacaatcttcaatcgactgcgagctcggtggtgaggctgttgatgggtgcaagcgcggaaaaggggagaggtggacagcgaccgagctccctttaacggcctag

SEQ ID NO: 13487 - DNA, 1695 bp, Zea mays
  Peptide Sequence Number=SeqID_55266
atgggctgtgccccggtggtgtgggccgcggtgtggttgcttgctgccgcggtggcagggttcgccgatcccggcggcctcgagcgcgctccattgtcccaatggcttattgctttacatgaatacggggttattggcccctatcggtcgggcaaatcttttcttctcaaccaacttctctccctatcatgtgacaatggttttggagttggacacatgcgggatacaaaaacaaaaggtatatgggtatggggttcccccgttgaggtggatatcggtggctccaaggtgtctgttctatacctggacaccgaaggatttgagagtgttggaaaatcaaatgtatatgatgataggatatttgctctggcaactgttttaagttctgttctgatctacaatcttcctgaaacaattcgtgaagccgatatatcgagactttcatttgccgtcgaaattgctgaagaattctatggaagtttgtcctttgctaacatatttccattttgccctttggcttgtggtaaactagagtcaagaagtatatcaaaatcatgccgtggggctctgcaggggcaagatgttgcttttgagccagccaaacttctgtggttgatccagagggattttctccgtacctacatttttgaaagtaacttccatgatccagaaggaaaatcggttcagcagatggttgatgaagctctccaacgggtacctaacaacaatggagacacaaatattgacgagttcttattgaagaaaataacgttagtgttacatcagctcaaccaaatcagagactctttggcggttatgggagataacagtacagcttttagcttaccacagcctcatctgcaaaggacaaagttatgtgatatggaggaccaggaacttgatccgttgtatgtaaagaagagggatcagttgaaagaagtcgttgcatccatgataaaaccaaaaattgtgcagggtagaactctgaatggaacagagtttgtatccttcctagggcagatagttgatgctttgaataaaggtgaaattccatcagccgggtcgctggttgaaattttcaataaggccattcttgaacgttgcttgaaggtgtacagtgaaataatgggcagagcaggtctaccagtgtcagtggatgaacttcgggagttccacgacctggcaaaagatgaagctagaaggcttttcaacaagcagcatttcggtaaacatcatgctgctcggtccatcctcaagcttgatgaagagattaaaaagatgctggcaaggtcccgtgctcttttcatcaaggagtacaacaacaagctcttcaactggctcgccatattctccctggccatggttgtcgttgggcgcttcttggtcaagttcttcctgctcgaagttgctgcgtgggtgatgtttgccttcctagagacatacacgaggctgttctggtcgtcggagtccctgtactacaaccccgcctggcacgcgatcgtctcttcttgggaaaccgtcgtctacagccccgttcttgatcttgacagatgggcgttcccgatctgcgctgtcctgttgtttttggcgttttattggcgttgcctcggtggaaggaggggaattgcccggtcactgctacctctgtacaacggggcttattacagaagctccagtcgcacaagaacagactga

SEQ ID NO: 13488 - DNA, 750 bp, Zea mays
  Peptide Sequence Number=SeqID_55267
atggccttcgcgctcaaggccgccgccgcggggtcggcgtcgttctccgccgcggggccgaggcggcgcgccgcggcgactggtagggtctcgttccggagcgccgcgcccgtggtcgccgtcagggccgcggcggcggcggccgccgctgtggcggaggacaagcgcagcatctccggcaccttcgccgagctcaggcagcaggggaagactgccttgattcccttcatcactgctggagaccctgacttggccaccacagcaaaagcactcaggatccttgatgcgtgtggttcagacgtgatcgaactgggtgtgccttactccgatccattggctgacggccctgttattcaggcctccgcgacgcgcgctctggcaaagggcaccacatttgaggatgtcatctccatggtaaagggggtgatacctgatctgtcctgccctgtagcgcttttcacatattacaacccgatcctgaagcgtggtgtccccaacttcatgagtattgttaaagaagctggggtacacggtcttgtggtaccagatgttcctttggaagagacagatgtcttgaggagtgaggctgccaaaaacaacctagagctggtgctattgacaacaccgactacaccaaatgaaagaatggagaaaattgcacaggcttcagaaggatttatttatcttattcaagaacagttgcagtacctaagattcaagaacaattgcagtacccaattacatatttag

SEQ ID NO: 13489 - DNA, 258 bp, Zea mays
  Peptide Sequence Number=SeqID_55268
atggcgttacctgtgagcatcactcttgccttatgcttcgtgtgtttggtcacttccagcatatcttgcaagctcgatgtacaagagcatgatacttcagtgagtttgaactctgattcatgtatctctggttatggctcaagaaaaccgctcatgatcggccatgttcaggtcttgaaatccctactaattctaaagctcttgctaagctatggaatcaggggtcagcaatggcttttctactttattttggtgtga

SEQ ID NO: 13490 - DNA, 177 bp, Zea mays
  Peptide Sequence Number=SeqID_55269
atggattccaggaaggaccacaggcgctggatccggctagtggaagggcgaggggagacagtggaagagcgaggggacgcaggcaccgcagtgcgcgagctgcgggtctcaggaacgagggaggaagatgacggcgcccagttccagatattggatttcgtaatagaaagaaaatga

SEQ ID NO: 13491 - DNA, 3240 bp, Zea mays
  Peptide Sequence Number=SeqID_55270
atggggcttcgcgcgggtttcctcctcctgccgccgccgccgctcctcctcctcctcctcctcctcctgctgctcatttcccctgcgcgtgggcagctgccctcgcaggacatcctggcgctgctggccttcaagaagggcatcacgcacgacccggcgggctacgtcaccgactcctggaacgaggagtccatcgacttcaacgggtgcccggcgtcctggaacggcgtcgtgtgcaacggcgccagcgtggccggggtcgtgctggacggccacggcatctcgggcgtcgccgacctctccgtgttcgccaacctcaccatgctcgtcaagctctctctggccggcaacaacctctcgggcggcctccccggcaacgtggccagcctcaagagcctcaagttcatggacgtctcccgcaaccgcttctcggggccggtgccggacggcatcggcaacctccggagcctgcagaacctgtcgctcgccgggaacaacttctcgggcccgctgccggagtccgtcggcgggctcatgtcgctccagtcgctcgacgtgagcggcaattctctgtctggcccgctgcctgcagggctgaaggggatgaagagcttggtcgcgctgaacgcgtcctacaatgccttcacgaagggcatcccttctgggcttgggctcctcgtgaacctgcagtccttggatctgagctggaaccagttggatggtggtgttgattggaagttcttgatcgagtccgctgtcgctcatgttgacttcagcgggaacctgctcaccagtaccacgcccaaagagctcaagtttctggccgacatttcagagacggttctgtatctcaacctgagcaacaataagctgactgggtcattgatagacggtgtcgagctctctactttcgggaggctcaaggtgcttgatctcagcaataatcagctatctggtgacctcccagggttcaattatgtttacgatcttgaagttttgcgactcgcaaacaatgcattcactggatttgtgcctagtgggcttctcaagggtgattctctggtcctaagcgagctggacctaagcgctaataacctgacagggcatatcaatatgatcacatcaactactttgcaagtccttaacctgtcctcgaatgccctttttggggatcttccattgcttgctgggagctgcactgtgttagatctttcaaacaacaagttcagaggaaatctatcagttattgccaaatgggccagcgatttggaatatgttgaccttagtcagaacaacctaaccggtccagttcctgatgcgagctcacagttccttcgcctaaactacctaaacctttcccgcaactctctatccgagaccatccctgaagctattgctcagtaccccaaacttaccgtgcttgatctgagctccaatcagttacgtggtcctatgcctgctaatttgctaacttcgtccatgctgcaagaactctacatccgagataacatgctttttggtggcctatcctttcctggttcctcatccaaaaatttgagtctccaggtgcttgatatctctgggaatcgcttcaatggaagcctccctgatgatattgcctccttatctggcctccgagttctcgacatctcaacaaacaatttctctggcccactacctgctgctgtgagtaagcttggagctctcactgatattgatatatcaacgaatcagttcacggggccattgcctgaggatcttccggataacctccaatccttcaatgcatcctataacgacctttccggtgtcgtgccagagaacctgaggaagtttccagaatcttctttccatcctgggaactcaaagttagaatatcctgctagctcgtctggatctggcagttccccatctgggtcagcaggtggaaaatcactcagtacaggtgctaaagcagcaatcgtagcagctagcattgttcttcttgtcatcctcatacttattgccattgtatgccactacaagaggatctcacggcagttttctagctctgaaaaggtttcagacaagagcctccacaggaccactaaagacagtgctgtcatgcaaggaaaggacaacaaaggtggtttggtgtcagcagatgagcttgccactcctcgaaaagggtctacatctgaagcactcagccaggaagagaagtcagccgcggggggcttctcgccgtccaagggcagccggttctcgtggtcaccggactctggagaggcatatgggcaggaagggctggcgcggctggacgtgaggtcgcctgacaggctagcgggggagctgcatttcctggacgagacgatcacgctgacgccagaggagctttcgagggcgccggctgaagtcctaggcaggagcagccacgggacttcgtaccgggcgacactggagaatggcgtgttcctgaccgtgaagtggctgagggaaggcgtcgcgaggcccaagaaggagttcgcgaaggaggccaagaagttcgcaaacatccggcatccgaacgtggttggcttgcgtgggtactactggggcccgaccccgcatgagaagctcatcttgtcggattacgtcgctccggggagtcttgcaagcttcttatacgatcgaccaggaagaagaggtcctccactgacctgggcgcagcggctgaagatcgcggtggacgtggcgcgcggcctcaactacctccacttcgaccgcgcgatgccccacgggaacctcaaggccaccaacgtcctgctggacgggctggacctgaacgcccgcgtggccgactactgcctgcaccgcctgatgacgcagtcgggcgtggcggagcagatcctggacctaggcgtgctgggctaccgcgccccggagctggccgcgtccaagaagccggcgccctcgttcaaggccgacgtgtacgccttcggcgtcgcgctgctggagctcctgacgggccggtgcgccggggacgtcgtctcggggcccgagggcgccgcaggcgtcgacctcaccgactgggtccggctgcgcgtggcggaagggcgggggtccgactgcttcgacgccgccatggcctcggactctgagagcaacccgcaggctgtgaagggcatgaaggaggccctgggcattgcgctgcggtgcatcaggccggtctccgagaggccggggatcaaatctgtgtacgaggatctttcgtcgatctag

SEQ ID NO: 13492 - DNA, 591 bp, Zea mays
  Peptide Sequence Number=SeqID_55271
atggggagtcatgatctccgggcagaatggggatcacgactcgtgggtaaagtgggcaacctctgcagagtgttagaaactggaggagatgctggcaacatggaggactttgaggagttccaggactacgacgagttctacgccctgctacacgccagctctgcccctatcctcctcgagtccccccgcctctacagccaccgagttggcctgtggggaggttggccccaccctgcccgagattgcccctcgccccccaagattgccgccgtcgaaatgtatcatgcacaaccggcgccgcgtttgccaccgtccagttccatgtcgaccgtcgtgctcttcctgtccgtaggaccatcatccagttccgacagcgaccagcgacagcaaccccaccactacccgttccttaacgcgactgccgcgacgtccctccccgcccctcgcctccattgtcacgacgtccctcctcattgtgcagctcgagcatgtgaggtatccagtggcttggaagtcccagcatgggtgagtttgcctacacgagccgtccctagcgcagccacaacgcgaaggctgatcctgcttccagag

SEQ ID NO: 13493 - DNA, 411 bp, Zea mays
  Peptide Sequence Number=SeqID_55272
atggagatccaaaggaggagaggtggctgcaccttgggggaggaggagaggtggctgcaccttggggaggaggagatgggggggcagctagggttggacgaagcatttgagaacaagtcgccaacattggcgcccacctccggtgaaccctttttcgaccaccttcggcaagcactaaccttcgtcatgccgccaaagaaagcttcagtgcctagaggctgcccgctctacagcccactggacccaaaccagggagaccttttctcttttaagagggcccgaacccggaagaggaaagggccactatcccaacacttccagaaggaggagttggaactagaaatcataaacatgggaaaaaatcctccacaaagtacaaaggaagaaggaaaaaatggccctactggttaa

SEQ ID NO: 13494 - DNA, 405 bp, Zea mays
  Peptide Sequence Number=SeqID_55273
atgggcagaggaagagggagagggaagaagcaaaccactgtcaggagccatgaagacaaaggtagcagcggtgaagaagtcgtgcctgcaaagaagaggaggggaaggccccaaacgtgcttcgccagtaagattgatcaagcagatgttgaaaactttgtagaacaggtcgatgccgaccaagaagaagctggcgatgccaagctaaagaacagtgctgcagctggtggtcccaagagaggcagactactgaaagggcgctccaatattgccatagaagatactaattctactgttcgattaagcagtgatgaatcaacgaggaccaatgggttcacgcagattgggagccgacggaaaaacaagcccaggcgagcatcggaggcagggctagaatgcaagtga

SEQ ID NO: 13495 - DNA, 165 bp, Zea mays
  Peptide Sequence Number=SeqID_55274
atgcccttacacctagtttatattgtgaaggatggagatttagagatgtacttgtacaggatacttctggcgatctcaatggaacaaggcattgtgcacatttttgcctctatgaggaagctaaccacagagttacaagaagtcatggaccttcttaatgagtaa

SEQ ID NO: 13496 - DNA, 198 bp, Zea mays
  Peptide Sequence Number=SeqID_55275
atggtcgaggagccccccattgatctcactaacaccgagtatgacaaccacgtcggagctactgtaggagatggtggagccactggaggaggagctccaaagggaggagcgtcaacatcaacaagtgccactgccctcgagaacactgccaacatcaacaccagccaaaaaggttgttacttccttttactatcttga

SEQ ID NO: 13497 - DNA, 3216 bp, Zea mays
  Peptide Sequence Number=SeqID_55276
atggaggcctccgcttccgcccgcagatccgccgcgggccccgacccccgcgccaagaagccgcgcctcgcgccgccgcctcgggaccccagatcttacgccgccaccgcctcctccaatggcaacacaagcgccgccgagcaagcgctggtcgacgagctgctcggccagtaccggaccgcgctcggggagctcaccttcaactccaagcccatcatcaccaacctcaccatcatcgccggcgagaaccttcaggccgccaagcccatagccgctctcatctgcgccaacatcctcgaggtgacctttgtctttgactcctcttacgctcgtcaaactgccgtcttcccctcctctttctcaattgaccatgtaaaagtaattctaaggcgccatcaagtagtgacaagcacccactggctgtctgttatgctagatatatcacatgtgctcggtggtgcggttccaagtgaacagaaactaccatcactatatctacttgacagtattgtaaaaaatattggaaaagattatgttaaacatttctcagcaagattaccagaggtgttctgcaaggcatataaacaagttgatccttctatacatcatagcatgaggcacctttttggaacatggaaaggagtgtttcctctacctccgctccaaatgattgagaaggaacttggttttcagtcatctgccaatggatcatctagtgctgcaccatcaaggactgattctcaatccccgcgcccatccaatagcatacatgggatacttggaagtggtgctaagacaactgtaattgctgatacaggcggtgatattgagaggcctaataggctaggtactgatagaaatgcggggagacgattagatgcttctaatgctagacctaacatacaacgcactcagagggacccttctagcaattctcttcatgaaaaacaggcagttagagatgtgggaggccttggattctccaacatttcgcagcaggctgttgtgggaactggtcaagttcgctcaaaacctaaagctcaagatggaattggggggccttattatgcctctggtgttgggtcttctgaagaacaatttgacagacgcagcaacttttatgcaagcaaggatgctcgaccatcaggatctgtacgtttggaaagtgcacttcttccaactccatcaatcaatgccgatagagttggtaagccttcatccaacaaaagctggaaacactctgaggaagaagaatatgtctgggatgatgtacattctaaagcagcagaatatggtggtagccataatgtaataaaaggagaatggatgtctgatgatggcaatgctaagtttgcaaacctccaaagggctaaatgggcagatgcaggacctgtggaacgtatagatcccaacacacataaacttgataacgtgtcaagatttggacttggagcaggtcaagaaagaagaatttcagaatacatggatcaggaagagtaccttcttggcaagcgtgaggtggaagcaagaattgataaggaaattaggtctgatggacaacagttcccagcagctcgaggttctcctctctgggtgtcccaggaaaaaacactcctagacattgggttggagcctaggatatcaaggttttcaactcagccagcagagaggtccaccatttatactggcaccatgtcagcaggtatcacttcatctgtacctgttgggttatcaggaaactatgctggaaggtcaagcctagatactgcaaatggtatgccaataagatcaactgaggcttttgggcagcagaagcatagatattggtcatcttcccctccacaagctgacacatcttcatctactgcaccctttgcacgtcagggttctccaaatcctgccgagtctgatttttatccttccagatcactttctcgccaaaatcctcaagaatatagcaaaagagcattgccggtacttgctaaagattctcatgttgtggttcacaatgatggatttactcagggccaacctagtctacaggcaacccggcagacacaaaagtaccctatcttacagtcgaagtcgcatattaagccatctgatcaattgcaggcaagtttttcgcgtgaaaattctccatcattgttcagaccttccatcgaacttggagaagtctctttacccagtgactccacccccataagctcagatctgacaagtgctagtaatttgttggctagtctcgtaaagagtgggttcaaaccaaataaccacagtgatgcacaggctcttggtccaagtggaccacttccagtggcttctttatcacttcaaaatgctgctggtgaaaataccactttgcaggcacatacaccaaacacttctcgtccaccattgccaccacctccatcaacacagagtgcggagaaagctgcgccgctctcaagtcttctcagttccctggttgcaaagggattaatctcttctccagcctatgattcatcgagtgctgtcatttcacagccaaataaagcatcaagcatgaatgttaaagatgccacagcttcagctgtgcctttgctagctctgagaccttcagttggtaaggcgtcatctaattctgattcatctgctccaacaaacgcttcattaaccaaagctatcgaaattaagatgagtgacctcattggcctggagttcaagccagagaaacttcgcaagtaccatgagcacgtgattagcagcctctttgacgacgaccaaagccatcagtgtaaaacatgtggcaataggttcaggcttgaagaactgagcttgcacacatcaagctgtgggcaaaggaagtctgagactatatatactggtatcgcacctaaaagatggtaccctagcaagaacatttacattgatggatcacatgaaattgaggacagcactgaggcttctgatggagatttaggttctgcagaagaagtgtgtgagtttatggtcccttcagacgagaggcaaattatctgtgcactatgtggggaaccatttgatgacatatattcttttgagaagggggactggatgtacaaggatgcagtgtttttggattaccccaagggagaaagcagctgcagaaacagtgttgagggtgaagagcatgtgcccattgtccatgtaagatgtatgccaagaggctcaaacgatggcatggaggttgactag

SEQ ID NO: 13498 - DNA, 363 bp, Zea mays
  Peptide Sequence Number=SeqID_55277
atggcctgtctgaagtacttgtacaagtattccggcgtcaatgaccccgaccaccattcccccgatcctcttaggctggccgaggttgaggcttgggtcaaggagattggacctatggcgtcatgtcttctaccccttcccgaggatgtctctatcaaggcggagaagaaacgaaagagggatgtgaatgcgaaggcctcaacgagggataagccggtggtagacctctttgcgctcgtggtgcccacggagcgctacatggaggacgctagagctaggcatgacgacagttggcgctgtgtagccgttactccgctggcgcaccggatagtccggtgctacaccagacagtctggtgaataa

SEQ ID NO: 13499 - DNA, 945 bp, Zea mays
  Peptide Sequence Number=SeqID_55278
atgggcaagacgggtgacgagaaggcagagcggcagaagcagttgtttgccgcggcggagaccctggagggagcagtggaggagtgctccaaggggagacccagacccttcttcggcgcgacagcgtcggaccgtcacaccctcggtcgtgacaggtttctgcctccactgccttccccaccgccgccatgccctcctccgccgcccgggccctcacatccgtctcccgcgcagccttctcctggaagccgactaaccctcctctgccagacggggcggccgcagcaaacgctggcggcggcggtgagcaggtcgggcgtggggctccactcgggagcgcgcgtcaccgccacgctgtttccgacgcaagctggagagggtaggtatttcctcgtggagggtgatgaggaggcgagggtagcggcagaggtggggaacgccgagccactgtcgcagctctgcacgacgcttcgtcggggcgaaggcgcccacacgcgggtccggacggtggaacaccttctttcggcgatggaggcgcttggcgtcgacaactgccgtatcgaggttagcggcggggatgagttccctattttcaatgtgggaaggtgtagagttatcgttgtattttccatttatgtgaaagtgattaagcaatgccagattcctttgcttgatggatcagcgcaagagtgggtagaggcagtacaaggcgttggcttgtgtgcggcagaggatgccaatggggaaaagttggataaactggcgcctgaaattcaggagcctgtttacctacggaaacacgattgctttatagctgcattccctagcccacaaatccacataacctgtggcattgatttcccaaagatcctagcttcgcccctggtaaggatggctcaggaaaagatgatccaacaggagaagatgaagcatcagaaggattga

SEQ ID NO: 13500 - DNA, 411 bp, Zea mays
  Peptide Sequence Number=SeqID_55279
atggagccgtgcctctgcacctccatgggcagatcctgcctccatcttccatctggccacctgccgctcgccatggctaccgcgctcggcaagcatcacagagtcatcaaagtgctcaaacaagggagagtgaaggctgaacggacccagaaagggctggccgcggagggtaaggcggtggccgtgaattttgggcgagacatacggcggtcggaagtgaggaagaacggcggtgcggtgaaacacgtgtttatcgccgtggcagtaactccggtggtctacggggagttcagaggaggtcacggcaatgcgatggcgcggttgggacacgcggtggccaacggcgagggcacgacggcggtgagcactttacccgcgggcggtgagccagggaagatgtactacggctag

SEQ ID NO: 13501 - DNA, 702 bp, Zea mays
  Peptide Sequence Number=SeqID_55280
atggagccgatacattctcctccagtcctcaaccaaacacaccctaagatcacccgcaagatctcatcgcaaggagtccttcaagggatatgcgcagcacagctcatggatccgcatgcgccgctgcatatacaacaacaaacagccaagcccaaacagagtcaggccaggccaggtgaattatcttttgaagtgagggccaggcgcgttagctcgagcccgggttgcggcttccgactggcagagaccgcaacagagcgcagggccggaccacgacgagtcgcggatggagatgggtgtcagctcaggaccaccatctcaaccggtggctccaatgggggcgaagcagctgacccccctagtgcaactgccaacggatggacaaacccgttccggagggggaggagcaggaagccgcgcggcgagacggcggaactccagagggccgcgggcgcttgcactttcggtcgccttttctccatcagccgccacttcatcgtggtggccaaattttcccacgcgcgcgagaacgtcgctctccgggtccagtcgtccacccgcgcgtcgcagtgccacctcaacgctgttcgtggttatccacagggaaaaggaggggcgaccacgacgtggcgaccggcgaccccgagccacagccactgggtcgtcgcaatggatcctaatccaaatgtttcttcacaataa

SEQ ID NO: 13502 - DNA, 1890 bp, Zea mays
  Peptide Sequence Number=SeqID_55281
atgaaagagtccgaccagctcgcgacttctttcatcacaccttttggcatgtactactacgttactatgccgtttggtttgaggaatgcgggtgtgacataccaaaggtgcatgaaccacgtgttcggcgaacacattggtcgaacggtcaaggcttacgtcgatgacatcgtagtcaagacgaagaaagcctctgacctcctttccgaccttgaaacgacattccggtgtctcaaggcgaaaggcataaaactcaatcccgagaagtgcgtcttcggagttccccgaggcatgctcttggggttcatcgtctccgagcggggcatcgaggccaacccggagaaaattgtggccatcaccaacatgggccccatcaaagacttgaaaggcgtacagagggtcatggtatgccttgcggctctgagccgcttcatctcgcgcctcggcgaaagaggcctacctttgtaccgcctcttaaggaagaccgagcgcttcacttggacccctgaggccgaggaagccctcgggaacctgaaggcgctcctcgcgaacgcgcccattttggtgccccccgctgccggagaagccctcttgatctacgtcgccgctaccactcaggtggtcagcgccgcgatcgtggttgagagacgagaagaagggcatgcattgctcatccagaggccgatctacttcatcagtgaggtactgtccgagaccaagatccgctacccacagattcagaagctgctatatgcagtgattctgacgcgacggaagttgcgacactacttcgagtctcatccggtgactgtggtgtcatccttccccctgggggagatcatccagtgccgagaggcctcgggtaggattgcaaagtgggcagtggaaatcatgggcgagacaatctcgttcgcccctcggaaggccatcaagtcccaagtcttggcgaactttgtggctgaatgggtcgacacccagctccccgcagctctgatccaactggaactctggaccatgtttttcgacgggtcgctgatgaaaacaggggcaggcgcgcgcctgctctttatctcgcccctcaggaagcacctccgctacgtgctgcgcctccatttcccggcgtccaacaacgtggctgagtacgaggctctggtcaacgggttgcgcatcgccatcgagctaggggttcgacgcctcgacgctcgcggtgactcgcagcttgtcatcgaccaagtcatgaagaactcccactgccgtgacccgaagatggaagcctacttcgatgaggttcggcgcctggaagacaagttctacgggctcgaggtcaaccacgtcgcccgacgatacaacgagactgcggacgagctggctaagatagcctcggggcgaacaacggttcccccggacgtcttctcccgagacctacatcaaccctccgtcaagaccgatgaaacgcccgagcccgagaaggcctcggcccagcccgaggcaccctcggctcagcctgaggcattcttggcccctgagggtttctactggccgaccgcggtggccgacgccaatagaattgtctgcacctgccaagggtgtcaattctacgcaaagcagacgtacctactcgctcaggctctgcaaacaatacccatcacctggtcgtttgctgtgtggggtctggacctcgtcggtcccttgcagaaggcacccgggggctacacgcacctgctggtcgccatcgacaaattctccaagtggatcgaggcggtggcattcttcaccaacatcatccatcgcttcggggtcccgaactccatcatcaccgacaacggcacccagttcatcggcagaaagttcctggacttctgcgaggatcaccacatccgggtggactag

SEQ ID NO: 13503 - DNA, 1044 bp, Zea mays
  Peptide Sequence Number=SeqID_55282
atgaccgcgtcaaaaaagggaccgggaaagggggataccccgaaacggatccttctccgtgaaggaaacaggccccgagcctccctactgatcagaggttcaaaggctggcccctcggaggggttcaacagccgcctcagagcgcttgggttccgcgcccactactggtcagaggttcgaaggccagtccctcggaagggttcaacggccatctcaggccactcgggctccgcgcccactactgatcagggcgagaacgatcttgtgacggaatcccatcagagggaggcatcgagccctcggaccccgtcgaaaggggaccgggtccggcagatcacccgcagggctcggactcgggctcagccccagaagacggcgaactccgctctgcccgaccctagggctcggactcgggctcagccccggaagacggcgaactccgctccgcccgaccccagggctcggactcgggctcggccccggaagacgacgaactccgctccgcccgaccccagggctcggacttgggctcagccacggaagacggcgaactccgctccgcccaaccccagggctcggacttgggctcagccccagaagacgacgaactccgccccgcccgaccccagggctcggactcgggctcagccccggaagacggcgaactccactccgcccgaccccagggctcggactcgggctcggccccggaagacgacgaactccgctacgcccgaccccagggctcagacttgggctcagccacggaagacggcgaactccgctccgcccgaccccagggctcggacttgggctcagccccggaagacgacgaactccgcctcccccgaccccagggctcggactcgggctcaaccccgaaggacgacgaactccgcttcgcccgaccctagggctcggactcagccctggcatcagccgacggtctccgcctcgtccgacccgggggctcggactcgacctcgaccttggaagacagactcgacctcgacctcggaggagcctccacctcgcccaacctag

SEQ ID NO: 13504 - DNA, 1908 bp, Zea mays
  Peptide Sequence Number=SeqID_55283
atgcccggcataccgagggatgtcgccgagcactcgctggatatccgagctggagcccgacccgtgaagcagcctctgcgccgattcgacgaagaaaagcgcagagccataggcgaggagatccacaagctaatggcggcagggttcatcaaagaggtattccatcccgaatggcttgccaaccctgtgcttgtgagaaagagaggagggaaatggcggatgtgtgtagactacactggtctaaacaaagcatgtccgaaagttccctaccctctgcctcgcatcgatcaaatcgtggattccactgctgggtgcgaaaccctgtctttcctcgatgcctactcagggtatcaccagatcaggatgaaagagtctgaccagctcgcgacctctttcatcacacccttcggcatgtactgctatgttaccatgccgttcggcttgaggaatgcgggtgcaacgtaccaacggtgcatgaaccatgtgttcggcaaacacattggccggacggtcgaggcctacgtcgacgacatcgtagtcaagacgagggaagcctccgacctccttttcgaccttgaagtgacattccgatgtctcaaggcaaaaggcgtgaagctcaatcccgaaaagtgtgtctttggggttccccgaggcatgctcttggggttcatcgtctccgagcggggcatcgaggccaacccggagaagatcgcagccatcaccagcatggggcccatcaaggacttgaaaggcgtacagagagtcatgggatgccttgcggctctgagtcgcttcatctcgtgcctcggcgaaagaggtctgcctctgtaccgcctcttaaggaaggccgaatgcttcacttggacccctgaggccaaggaagccctcgggaacctgaaggcgctcctcacgaacgctcccatcttggtgccccccgctgccggagaagccctcttgatctacgtcgccgcgaccactcaggtggttagcgccgcgattgtggttgagagacgagaagaggggcatgcattgcccgtccagaggccagtctacttcatcagcgaggtactgtccgagaccaagatccgctacccacaaattcagaagctgttgtacgcggtgctcttgacgcggcgaaagttgcgacactacttcgagtctcatccggtaactgtggtgtcatccttccccctgggggagatcatccagtgccgcgaggccacgggtagaattgcaaagtgggcggtggaaatcatgggcgatacgatctcgttcgcccctcggaaggccatcaagtcccaggtgttggcggacttcgtggctgaatgggtcgacacccagctcccaacagctccgatccaaccggaactccggaccatgttcttcgatgggtcgctgatgaagacaggtgcaagcgtaggcctgctcttcatctcgcccctcgggaagcacctacgctacgtgctacgcctccacttcccggcgtccaaaaatgtggctgagtacgaggctctggtcaacggtttgcgcatcgccatcgagctaggggtccgacgcctcgacgctcgtggtgactcgcagctcgtcatcgaccaagtcatcaagaactcccactgccacgacccgaagatggaagcatactgcaatgaggttcggtgcctggaagacaagttctacgggctcgagctcaaccacatcgcccgacgctacaacaagactgcggacgagctggctaaaatagcctcggggcgaacaacggttcccccggacgtcttctcccaagacctgcatcaaccctccgtcaagaccgacgacacgcccgagcccgagaaggcctcggtccagcctgaggcaccctcggctcagtccgaaataccctcggctcagtccgaggtaccctcggcatag

SEQ ID NO: 13505 - DNA, 1092 bp, Zea mays
  Peptide Sequence Number=SeqID_55284
atggacgacgcccacagtttccaccggcagtctccggtcgccccggccccctcgcgcaacgaggagcttaattggaaggaagcagtactggaggaaacgatgagcttcggtactgtgggcatggaggaggagagcggcgccgcggcggcggccgcagcggcggaggagatccggcggctgccggccgaggtgaactgggagatgctcgacaagtcgcggttcttcgtcctcggcgcggcgctcttctcgggcgtgtccgcagcgctgtacccggccgtggtggtgaagattcacctgcaggtggcgccgccgccacaggcggccagggcgacgaccgccgccatcctacggcgggacggcctgcgggggttctaccgcgggttcggcgcgtcgctgggcggcacggtgcccgcgcgcgcgctctacatggcggcgctcgaggccaccaagagctccgtcgggccggccgccgtccggctgggcgtgtccgagcccgccgcgtcggccgccgcctccgccgcggcgggcgtgtccgcggctgtcgcggcgcaggtggtgtggacccccgtggacgtcatcagccagcggctgatggtccagacccccgcgtgctgccgctaccgcggcggcgtggacgcctgcaggaagatcctcctcgcggacggcgtccgcggcctgtaccgcgggttcggcctgtccatcctcacctacgcgccgtccaacgcggtgtggtggtcgacgtacgccgtggcgcagcggtgcctgtggcgcgccgtcgggcccgagcgctccgagagctgcgcctccctgatggccgtgcagggcgcgagcgcggccgtggccggtggcgccgcggcgctggtgaccatgccgctggacaccgtgaagacgcggctgcaggtgatggaggcggacgcggcgcggcccacgctcgcgagcaccgtgcgcgggctgctcagggagggcggctgggcggcgtgctaccgcgggctggtgcccaggtgggggtccatgtcgctgtccgcggccaccatggtgaccacctacgagttcctcaagcggctctccgccaaggacggctccttgggctag

SEQ ID NO: 13506 - DNA, 1488 bp, Zea mays
  Peptide Sequence Number=SeqID_55285
atgggaagcttcgtgatggtggaaggaagtttctcaagaaagttcgcagtggttcatgttgttatctcttctgttattgaagtgttttgtatcttagagtccaactgcattactgacataaatgcccctcttctattgtaccagggcattgaagcaagcattagggctgaagtttggcccttcctactaggagtctatgatttgaatagctctgaagaggaaaggaactctatcaagatcaagaaaaggaaacagtatgaaaagctgaggaggcagtgccaacaaattctgaatggctacaagggaaatgggttgaaggcaataactgaacttaatagtgatgagtgttctagtttagatggtattgctgaaggatcagaatcaccttgttttgaagatgccaatgctatacgtgctcctgtttcactcgaggaggtgaagcctgaacagaatgaagctgaccaaccagacaacattctctgtgatgttgttgaatgcatggaagaagatgcagatgagttagcttatgcatatccatgcaaagcagagtcagaatcgtctgattctgaatcatctgatgaggatgaccctggagggatttctgtgtctggcgacgagaactgtgacccagatactaaatttaccatgagcaattcattcaaggcagatttttttaggtctagcagaacatcagaggacttcgccacatggcagcgcatcataaggttggatgctatccggtcaaacagtgaatggattttgttctcccgcaaccagtctgaagttcccaaggagagagcattgcagtctgcagcatctgttgggttgaaagactatgagcacttggagcccagtatgatttatcatgcagctcgattagttgggttgctcgaagcatatgcggtctacgatccagagattggctactgccaaggcatgagcgatctgttgtcacctatcattgcggtgatggaggatgacgatgaagcgttctggtgtttcgtgggtttcatgaggaaagcaaggcacaacttcaggctcgacgaggttggaatacgaaggcaactgaagattgtctctcagattatcaagcgcaaagattcgcacctgtataggcatctgcagaagttgcaggccgaggactgtttcttcgtgtacagaatggtggtggttctgttcaggcgagagctcacctttgagcaaaccgtgtgcctgtgggaggttatgtgggctgaccaggcagccatacgagccgggatcgggaggtccacctggggaaggataaggctgcgtgctcccccaactgacgacctgttgctctacgccatcgccgcctgcgtcctgcagaggaggaagctgataattgagaagtatagcagcatggacgagatactgcgagagtgcaatagcatggccgggcagctagacgtctggaggctgctagatgatgcacatgacctggttgttaaccttcatgataaaatctga

SEQ ID NO: 13507 - DNA, 273 bp, Zea mays
  Peptide Sequence Number=SeqID_55286
atgacttatcttaaagaaggaaccctcctacaagggactgtttgcaagatttttccgtatggtgcgcgggttaggattgctgggacaaacagaagtggcttacttcacatatcgaatattagtcgaggcaatgttttgtccgtaagtgacatcctgaagatagatgatgaggtgaaagttatcgtgatcaagtcaaatgtcccagacaaaattgcagtgagttgtgaactagctgctgtgtttgtctggatcttaccgaatactttctttgtg

SEQ ID NO: 13508 - DNA, 294 bp, Zea mays
  Peptide Sequence Number=SeqID_55287
atggggtacctgtggagggtgcggctgtcttcatttgctgccggcgcggcgacggcttcggcggcggggttcttcctcctctacaaggaccacctgctcgcccgcgctgccatcatcagccagaaatattacaacctcatgatgaattttccatttatgtctttgttttcccttatcaggccggtggaggacatcaaggaaacttctgaaaagcattatgcagccctaaataagaggatatcagcactggaaagcagaagagaaccaggaactatcaaagaggcatcagattaa

SEQ ID NO: 13509 - DNA, 834 bp, Zea mays
  Peptide Sequence Number=SeqID_55288
atgaccgagccatgcccgaaccgtgaaagcggtaccgaggggtctctgtcaaacaagacaacgggaccaaggggaccggacaacccctgctatagaaacattagcatcgggcgctggacgccggaggaagaggccgcgctcaaggccggcgtcgccaagcacgggcccggcaagtggcgcaccatcctccgggactcggacttcagcgcgctcctgcgcctccgctccaatgttgacctcaaggacaagtggcgcaacttgagcgtcaccgcaggaggttacgggtctagagagaaggcaaggatggcgttgaagaaaggcaggcgcgtggtgcctaagcttactgctgagccaatggatgtagatgagaaggatatggacaacgctcatgacacagtcattgatgtggaaccgctcgatgatctcatagtagaagctataaggaagcttaacgagccatctgggtccaataaggcagtcatttctggatatattgaggtaaaccaaaagtacagaattgcaccaagttcttccttgggcggaataagcactaaggtatcctcttctgaagggatgaacacagaaaataataatgttaaacggctaactaagcctcaagtggttgctgaactggagaagatgaaaggcatgaccagggaagaggctgctgcctttgctgccaaggcagttgccgaggcagaagtagcaatggcagaagctgaggaagcagcaagagttgcagaggctgcagaaaatgatgctgaagctgcaaaggcttttcttgatgctgtcattttgtcaatgagaaacaggaacgctgcttccatggtatag

SEQ ID NO: 13510 - DNA, 270 bp, Zea mays
  Peptide Sequence Number=SeqID_55289
atgacccatatatcgggactctgcgacacaaatcggtctcgcgccgctcaggggagcgcacctgtgcacgactcgtccgttgcagggatggtggactccaaggagttcgccgtgggcatcttcgacgcgctggcgcggcggcggcggcagaacctggagcggatcagcaaggacgagctctacaagttctggctgcaaatctctaggtacggttgtactggagaccggaggaaggactcgaagcgacgaacagacgaagcgtttccgtga

SEQ ID NO: 13511 - DNA, 987 bp, Zea mays
  Peptide Sequence Number=SeqID_55290
atggtggactccaaggagttcgccgtgggcatcttcgacgcgctggcgcggcggcggcggcagaacctggagcggatcagcaaggacgagctctacaagttctggctgcaaatctctaggatggaaaatgggcagctgtcaaatgaatgggctgaagaacagaacgaacaatacttgcatgatgattgggctgacagcttaggtgttttcattgagaatccagaatatgcgaacacatttgaggatgacacgacctctcagcaaacgtttccatcccacgagaaagcaaaaggtaaagaacagaagaaactaggaaagcagaaaaatgttgcccatagagggtctgcctttaccaaggaggaggatgctgtgatttgctcggcctttctccatatcgatgatgctgtgaagatgtacgaggagaaggaagctttccaattcttgcactattggaagctgctacataatgagcccaagtggaatgataaagtgctagagctaaacaacactccgacaaggaaaacacaacaaccagaaggcccctgtaatcccgttggtacacaacccaacactgaaaatgcagcaattacaaggcctgaaggtcgtgatactgcaaaaaaaagaaggttcaaggaagacactgcatcatctagtgctgctgtagaagtgctgcagcagatgcaagagaggaatgaaaaaacagaagagaagcaagatgaacagatgcaagagatcctgacattgaaggggaataaaatgaggcttactgagaagatgtttgacttgcagaagcatgaaatggaagttaagaacaagttgaaggaggagcagctcagtcttaccaagcaggacatagaagcaagggccaaacaaagtgaggcacaactgcttactgctgaattgggcatcatgggagcagacttagataaactttctcccagtgtgagagcatactatgtcgccatgcagcagcaaatcatggagtga

SEQ ID NO: 13512 - DNA, 234 bp, Zea mays
  Peptide Sequence Number=SeqID_55291
atggcaaaagaggtccataggccagacgatctgaggaccgagaacatcgacggagatgtcccggaggaggctagaggcatgggcggcccagctagaagaagagaggagggaacgtatgaagatggaggtgagaatgagggcggaacgggaggtggagtgggtggctcgcttggcggatcagcagacgatgatggagatgtttcagtatatatagagccttggcgccgcatctag

SEQ ID NO: 13513 - DNA, 174 bp, Zea mays
  Peptide Sequence Number=SeqID_55292
atggatgatcacctattcactccctctaggttctctcaattggtattggagttggtctcttctgttgagtctaccgaagagatggacctcaaagggaagggcaaggtgaccaacgagaaggagacgatccccatcgacgacaagcccaaaggagaaaagatcatcgactcgtga

SEQ ID NO: 13514 - DNA, 786 bp, Zea mays
  Peptide Sequence Number=SeqID_55293
atgcagatcgctgatcggcgatcgcagcacgttgcagtcgcagcgacgaaggaggaacggcggaagcggaacagacgaagagtcatcgtcgtatttatgtattctactggtttattgggctgcaaatggaactatatgtataagtgggctagattttacagggcgctcaatcagttggcccagtcaaatgaccagatcttgatttctcttcaagattattttaaatcaaaatctctttctcaaagaccaatggcccgagaagatcttactcaggtcttgggcaagcgggtggtttctgatgaggacactttaagcaaggctcagcgtcttgcggcaaagcgcaatttagaaatcagtgagtattcgtttcttccttttaagcctaaagttattgctaccaagttaaataatgttgggattcgcttgggcagaaacgataaagaggttcttacctcagctatttctattaagaatatagaggtcgatcgactcatggcttctagtatttcatccccatccattcgtcgtgctgttttaaatgaagaagatgataatgacattgatgaacatctttcacatgctattaagcgatgggatgaaaattctgagcatgatgatctagagtggggatacgaccttagtgctgttccatgccgtgtaaatccagttgttttcgacgttggagctatcgatgagggggatcattactctaaatttctccttagaaataaatcagatgattttaaatgggggagatttcaatataatgaggcggccagaggataa

SEQ ID NO: 13515 - DNA, 390 bp, Zea mays
  Peptide Sequence Number=SeqID_55294
atggaggatcgctggtgcggggactccgataggccgcaccagacggcgacaaccaagacttcgcattatcccgggagcgaagtccctgtcaccctttgtggcctgccgaatatggagcccttgccaaacatccgttcagcaaagtcggccgaagggcatctggcggcttcatactttagaggtgactctcattaccctcgcgtctggcggatgatcgaggggaagctggtgcgaagattctcgaggacaccgtcggcaggcatgccccgcacggctcggtacaaccctgcggggagcacgcccggaggcccacttgtcagcgtaacatgcgggttggcaattgcatcgttattccctaattgccaatcatcatcaggggtccgaatgtag

SEQ ID NO: 13516 - DNA, 786 bp, Zea mays
  Peptide Sequence Number=SeqID_55295
atggctcccccgctcgctcttgccaccgttcccgccagccacctcgcctccctcgctgcctcttgccatgttcccgctctccgcaagtctcatggggtcccctgccactacctagttggtggtgaggacccttattcccagatttggttcttcggtgcacctaccctaagactggtgcacgttacgtctatctttgcacggatttctcagggtttaggccactatgagaagcactgtttcaataggcgtgcaaagtcgtcgacgcgactactctggaggcccaaggtacagcgcattaatgaggcagtggcaaacagtgaaagggtgcaaactgctttggaagttgttccgcttgctctagagcaacccaaggtgctcccggcaaccggtcccacaaaatccactagcaaaagtgaccttttgcattctgacgattgcaactgttcagttcctccttctgagaaaacccctccctctcctcgcctagggttttctccgaagaaaagtcggattctacagtcttctacctccttgatcatggccaactttgccgcttatctaagaccttttatccctcaagagttggtgatcgatgatggtggcaatgatcgtcgctcgcgggtgcgaatccatcttgcgctcgagcaggaagcaaggcgtgatgattttatcattgcaactgatgtcaaaggtgtggttcccccgctggatggtggtcacccacatgaactacatgtgtatccatcaggtggtggcctcctttggcaagctgttgaggtggcataa

SEQ ID NO: 13517 - DNA, 855 bp, Zea mays
  Peptide Sequence Number=SeqID_55296
atggcaaagttccatgttcccgttggtcttccaaacgtgcttgctctgttgaagtctgaagatctagatgtgcagatccatgctgtcaaggtggttgctaatcttgctgctgaagatgttaatcaggaaagaatcgttgaggaaggagggctcgatgctcttctatcccttctagaaacatcagaaaacaccactattcatcgagtcactgctggtgctgttgctaacttggcaatgaatggatcaaaccagggagtgattatgaataaaggtggagctcgattattagcaaatgttgcttctgaaactgatgatcctcaaactttgcggatggtggctggcgcaattgccaatttatgtgggaatgaaaagctgcacttaatgttgaaacaagatggtggaatcaaggcactactgggaatgtttcgtagtggacacgccgatgtcatagcccagatagcacgaggaatagcaaactttgcaaaatgcgaatcccggatgataagccaaggtcacaggaaagggaggtcccttctgattgaagatggtgttctttcttggatggtggcccattcaactatgttttctgcttcaacacgaagacatattgagcttgctttttgccacctagctcagaacggtaagcacattgaggtttgctctcgaccattttgcgctgatatcttaccaaatatcgcccacatctttgcagaagacaacacttgtgacatcattgcttctggcggaatcaaggagctgcttcgcatatcgagggagtccccgagagaagatacacgtaatttagctaagaaggctttagattcgaatcctgcttttttaagagagatccaatga

SEQ ID NO: 13518 - DNA, 177 bp, Zea mays
  Peptide Sequence Number=SeqID_55297
atggcgaacgaggtggcaacaactgaggcgaggactgtcattatcgtgcggagggatgctcgcttaagtctacttgtacttgaattccgcatagcccgttctgttaagaaatatgagctgttgttcttatataagctgttgctcttaaaatcattccttatgagctatggcaagtga

SEQ ID NO: 13519 - DNA, 522 bp, Zea mays
  Peptide Sequence Number=SeqID_55298
atggaattaaatggacggaggcacaaatacaacctctaccaggattcgagctcgagacctctggctctgataccatccgccgtcgcggccctccctcccccagccgccgtcgcggccctctcctacgctcttctgcgcgcgctgccagccgctgttgcggccaccgcgcactgtccgcccgcccctgcgctcctttgcgcgcgccagccgccgtcgcggccatccctctgcgcggcgcgcgcggccagccgccgtcgcggccaccgcatcgtccgcccgcccctgcgctcctttgcgcgcgcccctgctctgtctgcagcgccgcccgcctctgctccgcggatctgcctccgtctgcgcgcgtccctgctacgtctgcagcgtcgttcgcctttgctccgcggatctgcctccgtctgtgtgcagccctgctccgtctgcagtaccgaccgcccctgctccgccgtcgcggctttgcctccgtcagcaaaggcccctgctctgccagattctctgtgctag

SEQ ID NO: 13520 - DNA, 408 bp, Zea mays
  Peptide Sequence Number=SeqID_55299
atgtacctgttgcggccgatctacaagacccagggtcagcaacaagttgattcgatggagaagaacttagcagatctgaagcaggtgttggaagacaacatggctgttgttcatgatcttacctcgtggaagcctcaaattgttgctgaggttggatctcttcgtactgatttgggaaaggtgtctgatacggtggacaatctggatatggtctcgggatgtcgtgccttctactatggactacgaagactgctgatcgtgcggcaactaatgcgtcagtgcctggggatttctctctgcatatgtccagtgcaggaccctttactcatcgccctcaccgaacatcaccgaaaagttccacgcgctcgcttaaatgctcaggagaagcgtccagttcgcccgacgtaa

SEQ ID NO: 13521 - DNA, 198 bp, Zea mays
  Peptide Sequence Number=SeqID_55300
atggccctgacttcgactagcgacatgaatcggtggatccctcgatggtgtacgcaagtggtggcggaaaagcgcatggatgatagtgtccggtgcgccaggctggtttctggtgaactggcccctctcgggaattcgtcggcggcgtacggctataattcaccggactatccggtggtgcaccggactgtccggtga

SEQ ID NO: 13522 - DNA, 393 bp, Zea mays
  Peptide Sequence Number=SeqID_55301
atgaacacaagtgttgacatgaggacccgatcgatttctggtgttcctggggtaggcggggcaatgatgagagcgatctacggtgggaggcttggggggtctcgtccccgcttccggtggacagaagcttatcgtctagcgcggattagacgatcgatcatccgtctagaggagagaccggcggcaaggcagctgttttcaaggagatgtgatgatttttatcctcaggtagttggtcgtcatgctgtgccagaggtccgagctcctgattctcatgcagttcacgaagacctccggcaagctttcatggaggtgggcatctcggcagatgagaggaaggtctaccaggattcgacgtcgaaaccgcaagtacgagcctttaaaccttgctga

SEQ ID NO: 13523 - DNA, 448 bp, Zea mays
  Peptide Sequence Number=SeqID_55302
atggagttcgccggagatgcacaacgctcgattcagagcccaacggctcaccccgaatggctcaccacggattattgtgcgggcgagtctggccacgcggtggtgtcgctcgacgaagtccgacgagcaattgcccgcaccgcagtcctcttccacaccaacggcgcccaccaacgactccgcgacatcctggtggatgtaccgggtggcgcgtcaggggtggggagttggtacagaggcgggtcgtccgtacttgtagccgaggcgaggcggacggttgcaaagttagcgggctccaacggggatctcggccatggccgagggaaaaggagaccgactaatggacctgagctgtcggcgcggagcgctcagcggacccaaacacctgaccagtgggtcccaatgcgcggtgagactgggtcatgtggtggcgcgaggaaacggagtg

SEQ ID NO: 13524 - DNA, 336 bp, Zea mays
  Peptide Sequence Number=SeqID_55303
atgggctccctgggtcctagcgtggtgaccctgcaggaacagcagcagcagcccaagccccgcaaaccggcggcggcgggcggcggctgccacgagctggagcagcagagcagcaactgcggcgggtcgtcgttccggatgccgctgcactacccgcggtacaagaaggcggactacgaggccatgccggagtggcgcgtcgactgcctgctccgcgagtacggcctccccgtcgccggggaccttcgcgggaagcgggagttcgccatgggcgccttcctctggcccggatccagtgattcggtatgcatcagctcgttctcgatcgttccatga

SEQ ID NO: 13525 - DNA, 504 bp, Zea mays
  Peptide Sequence Number=SeqID_55304
atggccaccgcgacgctgcccctccgcctcctcccctccaaaacgctgactctctccactctcccctccctgcgccgctccctctccgtcgccgctttggagccccggcgctggcgcctccgagccgccgccgaggaggcgcctgaggccgtggaggttgagttcgtggagcccgagacggaggctgaggagaaacccgcggtaccggagcccatcgaggctcagctggccgccgcgggggccgggaaggacgcggacatcttcgctgttgtcatgatcatattaaacaaggtgctactggtgtcaactagagaaaaagcttacattgggatgccagtgggacgggatgataaagttatagtgttcaagtacaagaagaagaagaagtaccagaggaaacttggtcacagacagccaaacacaaggttaagaatcacaggcataagtggatacgaagagtaccctgctgacccaatacttgaccctgctgcagctttaaattaa

SEQ ID NO: 13526 - DNA, 222 bp, Zea mays
  Peptide Sequence Number=SeqID_55305
atggctgcggtggcggtggttcctcgatccgaagtagtggcggtggttcccaagtcggtggtcgcggctccccgatccagagggcgagcgacggcggggctcctgtgcgggcaagtggcggcgtccccggggccccgaggtggcgacactcccaaagcgagcgagcaagcggcgctccccgacgtgcgagtagcgacggcatcgcacgaggcacgagtgtaa

SEQ ID NO: 13527 - DNA, 498 bp, Zea mays
  Peptide Sequence Number=SeqID_55306
atgaaggaggtggtgctccacgtgtatgacgtgaccaacagtgactccgagaagacgaacaacaccatcctccagatcaaccgcatcttcaaggaccgcatcggcctcggcggcatcttccacagcgccgtccaggtctatggcgaggacgagtggtcgttcgggttctgcgagtccggcagcggcgtgtttagttgccccataggcaagaaccccatgtacacctaccgggagcgcatcgtcctcggggagaccgagtgcggcatcgccgccgttaaccggatcctgcgggagctcagccgcgagtggcctggccactcgtacgatctcctctccaggaattgtaaccatttctgcgacgtgctctgcgagaggctcggcgtccccaagctcccaggttgggtgaatcgctttgccaatgccggtgatactgctgtggttgttgctgagaacacagcagttaaggtttggagctttaaatatcgattatgtgcatag

SEQ ID NO: 13528 - DNA, 267 bp, Zea mays
  Peptide Sequence Number=SeqID_55307
atgtcggcgcccacaggtttggttgggtcgctcagctgggaaaacttgggccgccaagtgtggttttggcccagcctctacatgtcgtggaaatctacgaccactatatcatatgattggaaagagaagtacttccatgacacatggataacgaaagaacgtaggcctgctttcactgcctccatgtatcaaatatggaacttactcacgtcccatgactcctccatgagtttgcccaaggttaacatgaacttgcgaggctcgtag

SEQ ID NO: 13529 - DNA, 798 bp, Zea mays
  Peptide Sequence Number=SeqID_55308
atggccagcaccgctgccactccggaagcaggcaacaatcacagtgaagacgacaccatagtggagcttcccattgtcgtcatcggcagcaccgggcaagaatccattgatactccatccaccaggtatttgttagcccctagccatcatgtatctagctccagcttcaccgtagacattgagctcctgtggagactgcggaagtacctgctgcttcttggcatcttagctgttggtgttacatacaatactggattgactccacctggagggttctggtcgaagaacacacaagggcaatctggacatgaagcgggtgaccctgtcctccgggctctcttcttcccacggcacgagggctcggactcagcctcggctccggaagacgacgaactcgacctcgcccaacctcagggctcggactcagtcttggcctcagacgacggtctccgcctcgcccgacccggggctcggactcgacctcgacctcggaagacagactcgacctcgacctcggaggagcctccgcctcgcctgacccagggctcggaccgaccacgtcacagggggggccatcattatcctacccctagctacctcaggctacagggaacaagaccggtgtcccatctggctcgccccggtaaacaaataatgatggtgccccgcgtgctccatgacgacggcggctctcagccccttacggaagcaaggagacgtcagcaaggactcgacagccccgacagctgtccttccgcaaggctccagcgctcctccgacggccacgacatcacatga

SEQ ID NO: 13530 - DNA, 876 bp, Zea mays
  Peptide Sequence Number=SeqID_55309
atgagccaggagcagccgaggaggccgtccggccatgaggagacgagcggcggcggagagcagggcgccgtccgctacggcgacgtgttcccggcggtgagcgggggcctcgcggagaagcccgtggcgccgcaggacgcggccacgatgcagtcggcggagaacctggtgttcggccagacgctcaagggcggcccggcggcggccatgcagtccgcggccaccgccaacgagcgcatgggcgccgtcgggcacgaccaggccacggacgccaccgccgtgcagggcgtcaccgtctccgagacccgcgtcccgggcggcggccgcatcgtcaccgagttcgtcgccgggcaggctgtcggccagtacctcgcgcgggacgacgacgatggcgccgccgccacggctggcggcggcatcgccggccccggcgccggagcgggaggcggcgcctctgctggcgtggcgggcaaggatatcacgaaggtgaccatcggcgaggcgctcgaggcgacggcgctcgcggcgggtgacgcgcctgtggagcgcagcgacgcggccgccatccaggcggcggaggcgcgcgccacggggctggacgcgaacgtgcccggcggcctggccgcgcaggcgcagtcggccgcggcggccaactcgtgggcgtggggagacgaggacaaggccacgctcggcgacgtcctggcgaacgcgacggcgaggttggtggcggacaagccggtggagagcgccgatgcgttgggggtggctggcgcggagaaccgcaacaggaacgacgggacggcgaggcccggaggcgtggcggcgtccatggctgcggccgcacggctcaaccgtaacgaggcggtctgggagtga

SEQ ID NO: 13531 - DNA, 528 bp, Zea mays
  Peptide Sequence Number=SeqID_55310
atgaggatccacccagcatcccccaccgccggcggcaagaaggacctccggcgcctgccgcacgtgtacagcaaggtgctggagctgccgctcccggcggacaccgacgtccaggtgttcgaaggcccagacgccttccacttcgtcgcggcgccggccgccggtgcgcgtgccgccgccaccgtgcgggtgcgcaccgtcaggatccaccccggggtcaccaaggtcgtggtgcaggccggagccgccgaacgggccgctgacgacgacgccgccagcgacagcatggagctcgacaggtggcggtcccggctgcccgagccgacctgtccggccatggcggtggccgggtacgtcgacggccagctcgtcgtcacggtgcccaagggccccggtgccgaggaaggcgccgacgcagggcaaggcgaggttacctggagggctacacaaccagaggtactgcagcttgatgaaccatgttctgatgttctagagaaaagtccaaagatcaacgagaagatcatatga

SEQ ID NO: 13532 - DNA, 2244 bp, Zea mays
  Peptide Sequence Number=SeqID_55311
atgaagagcctgttcaagagtaagatcaggtggcagcaccggtccaacgacccggcgtccccgtcggggcagccgcagccacagccgcagcaggcgttgggcccgccgtcgccgtcgccttcgagctccccgtcgtctgcggcgccgctctccgtgtcaacggcggccacctcctccccctcctcgcccccctccgcggcggcgacgcccacgggtgctggggcagcagcggcagcgggagcgggagcggcaggggaggactacatagcgtcggaggaggagttccagatgcagctggccatggcgctgtccgcgtcttccaacagcgattgcgtgggggacctggacggggagcagatcaggaaggccaagctcataagcctcgatcgcttcgctgcccaccgcgacgagggccacaccgcggagtcgctctcccgccgatactgggactataactttcttgattatcatgagaaagttattgatggcttctatgacatctttggctctatggaatcctctaggcagggaaatatgccatcattagcagatctccaaacaggcataggggacctaggctttgaagtcattgtagtaaaccgtgccattgatagtaccttgcaggagatggagcaagtggcacagtgcatcctgttggacttccctgttgccaatattgcactcttagtgcaaagaatagctgagcttgttacagataatatgggtggacctgtcaaagatgctaacgacatgctcacaaggtggctggagaagagtactgagttgagaacctcgctacaaacaagtttgttgcctattggttgcatcaagatagggctatcacgtcaccgtgccttacttttcaagatccttgcagatagtgttgggattctatgcaaacttgtcaaagggagcaattatactggtggtgatgatgacgatgctataaacataattaagatggacaatgaaagggagtttttggttgatctgatggctgctcctggtgctcttattccagcagatatcttaagttggaaaggcaattcgttaaattctaatagaaaacttggcctgagtcagacagctggatcatcgagtaccgttggtgctaatatgggtcctagtgtattgccacttgaacctaaagatggaccatcaacttctgctggtacatcatcccagcagaaagttgtacctcaaaacgaacatccacggaatttaaaccgtcttccagatttgcaggaaattccagagtcaaaaaacctttttgctgaccttaatccttttggggatacgaagtccaagaaaacttcagtaccattcaaaggaccagatcaaaggaacaatgagttgcaaaagcgcagagagaacattgtccctaatggtggaagaccacagcagcggttagttatgaagaattggtctccttataatgatgtttctaacaacaaacagtacaattatgtcgaggattcatttgcacgtagaaatgttggcaacaatgccgcatcatcatcatcccagataacacaacaagccgcaaggtctaatcttaattctggattgcgtaatgatgcatcatatcataattatgatagtattatggctggtacctctgccacgaatattacatctacagctgagactgggaaggttcctgaaagggttctgcgtggtgatttggataaaggtcaaacaaattatagacttcaggatcaacatgttgtaggtcaaccaccacaggaaagacttccatggggtaatcctgctgaaggaagagttccaatgaatagatttcagaatcaagcaaaacaacacatgggaaacattgatacaaagcaagaccataagaaattgctccctgatccaaaaaaatctccccttgacagattcatggacacgtcattgccatcaagaaacttggacgtgaggtcacagaggcttgactttgatgatgtgtctgaatgtgaaattccttgggaagatcttgtgattggtgaaaggattggcttaggttcatatggagaggtttaccgtgctgactggaatggaacagaagtagctgtaaaaaaattcttggatcaagatttctatggtgatgctctggatgagtttaggagtgaagtccgaattatgcgtcggctgcgccatccaaatattgttctctttatgggtgctgttacacgccctccgaacttatctattgtatctgaataccttccaagggggaagcttatataa

SEQ ID NO: 13533 - DNA, 2934 bp, Zea mays
  Peptide Sequence Number=SeqID_55312
atgggggttcaccgtaggaattattcagatgatgaattttcagttgctggcgagaggccagaagtagaattcatggacttccagaacgacgacacctttcaggattattcatgtgaagatacccctgtgcttgtctcagctcctttccctttcgaggatggaaaaccaaaatctgcacttgtcggagaaacatcagctgataccatacagattgagaatacctctcctgaatctgtaaatctgtggagtgtaagaattttctcttcgaacccagaagacagctatgttctatcaatgatgagaccaccgtcagatgatgctaatgaggaggaaaagcatgcttttcttgctttgacgtccgtggaagaccgtacacttctgcctggacaaacccttacagtttggctgtcttgtacgccaaaagatattggcctgcatacatcaatcgtgcatgttgatatcggtgatgagaagattgagcgtgtggcttttcttttggcagatgacaatgtctcccaggccttattttctgataagccttattccaggagacgtgaccaagttaagaaatttgggccttctccaactgtgccaggtcgtcgtccaactaagcagcacgttcaaggattcaaacataggcttcctcagtatgcaatacctgcgcacatccgtgagctcattgaaagtaaacagaaacctgatgtcttatatgatgagttgagcatggtaaactatgcagaatatttcagcactcttctagtcatggaagagctcaatttggaggaggagatgagaacatatgacatggagggtgtcttaatgagaaggaggggtatgcattttttgtctcttgaggtccctggtttggcagaaaaaaggccatcactagtccaaggagacttcgtagttgctagatatgctgggaatcatgctcaggcttaccaaggtttcattcacagggttgaagctgatgagatatttttacaatttgaccatcagtttcacatgaatcatcatgatagaaaccggtaccatgttagcttcacatataacagagtgaacatgagaaggctttacaagtcaattgacgatgcaaaatatttgggacctggcattttgtttcctcgccaatcaccttgtagagttttgaaaaggtggccgtttaatcctctgaatccacatataaatactgagcaagctgatgctgttgcaatggtacttgcctgcagaggaggttcaccatatgtgatatatggacctccaggaactggcaagaccatgaccattgtagaagccgttttgcagctttacacgggaaagaagagggcaaatattctcatttgtgctgcttccaatactgcagctgatcatgtactggaaaagctccttcaagctagctatctgatccggccaagtgatatctttaggctaaatgctcagagtcgccaatacgaggatgtcagtactgattttatcaagttttgcttctttcaagatcgggtgttcatgtgccctcccttacaagcattggtgcggtacaggatagtcatatcgacctattcgagttcctatcagctgcaggctgagggcattcgccaagggcatttcacacacattttcctggatgaggctggccaagcctctgaaccagaggcgatggttcctttgtcggggctgtgtggaagagacactgtggttgtgttagcaggagatccaaagcaattaggtccggtggtttactgtaagcaagcagagaaggatggtctggggacatcatatctggaaaggctgctgactgacttcgagccgtacggaacaaggaatcctaactacgtgacaaaactggtgaggaattaccgctgccatcctgcaatcctggagctaccatcagagcttttctatgagggtgaactgattccctgtaaagaaggagagtcatctgcttatgattgcataggccttcctgacaagtccttccctgttcttttcatcggaattcaaggatgcgatgagagggaaggcgccaacccatcatggttcaacaggatcgaggttagcaaagtggtctctatcatcaggaacctgacaaggggcggggacgttgatgcatctgatataggagtaatcactccgtaccgccagcaagtcgccaagataaagaaagccctagaggcattcgaaatgcccggcctgaaggtcgggagcgtcgaacagttccagggccaagagagggaggtgataatcatctccacagtccggtcgaccgtaaagcacaacgagttcgacaggtttttcaacctggggttcttgagcaaccataaaaggttcaacgtttctatcacccgcgcgaaatcgttgctcgtcatcgtcggaaacccttacattatcaccaaggaccgtcactgggataggctcctgcgatactgcgctgacaatggctcttatcaaggatgcccccttccaccaccggaatctcatgcttattcagacggtaccagattcttctccgagcatgacgacgggcatcaagctggaccttctgggcaggacgactactacaaccaagaagccacctactgcagctacaacaaccaagagccttctgacttcggtttcaggcttgggcagtgggtgctgaacctgcttcggagaaccaagagttaccgtccgaggagctgcctgaggacgagaagcagccattattcagcaacccccaagcggatctcgaggagacgccgaagcaggacgtcgtcgaggaaggggctgcacagggaggcgtgctggccgacccgacatcgtcgacaaccgccgacgatcagctccagggtgcatatgcggagaagtacagcttccctcctggctggtgcgacgtttcgagcatcccggcgcaaggctggggcgactgatcgtcagacctgcgatcgccattggtag

SEQ ID NO: 13534 - DNA, 441 bp, Zea mays
  Peptide Sequence Number=SeqID_55313
atggccgacagaccaagcgaacgagcctccgcaacccacgctcgtgggcacgcctacgagccccagcgacgaccgaacgccgcccatgcatgcaccaccagagtagacgactgtcctactcagtgggacccaaccggcaatctccccacgctgaccctctctcccctcttctccaggttgcgacagacggaccctgcctgtcagactggcacccgcacccgtaaccatgccactgaccagcgggcctggacgcaccgtggcccgctattagtcgccccacgcactggagctctgtcgtgcgcctcgccattcaccccgtgccgctgcccatggggcccgcgtgtcagccgcacgcgccccgctcggtctaatctcgaccgtgggtttgagatccgatggttgagggagtctgatacccctttgccccacgcgttttgttaa

SEQ ID NO: 13535 - DNA, 441 bp, Zea mays
  Peptide Sequence Number=SeqID_55314
atgagtcagacttgtgtcacctttgtgttgagtgttgacggaggggctagttgtccctcctcgcagaactctgcgttcaagaagaggtacgaaaaggatgtcgtgaaggaaggattgcagctgcaggccccgcgacaagccgacgccaaccgaccacgccaccgaacgcagaaaggacgcaggactttattccggaaccggaagagggtggttggatgcggcgtgccagcacggggtcacggtcgaagccgtcggcgtcgggctgacggggtgggcggtggtggcactacgcctggtacagtgatgccattcatcttttgtccgattccgtttcgagcgaatgatgcgactcggtccttcaggcgttacatgatgcttggcgcagcagcggagggtgataagaatgggtacgagtggctctttgtcagccattccccgtag

SEQ ID NO: 13536 - DNA, 408 bp, Zea mays
  Peptide Sequence Number=SeqID_55315
atggccgtgccggcgcccgcgaaggcggcgcgcttgcttgcggcctccgcggcggtgctcgtgctgctgtggtgtgtccatttccgcggtgggctctccttcggctcccccaccaacaagggcctcatcttcaacgtccccggctccttagttttattggaatctgattaccgactccgtgaacccatccccgcaaggcgaaggcgggtccacgaagatgacgccaccatccaaggacgctatgcgtcggcggtggcaactagtggcggaaagcacctggatggttctcaaacctggaggaataaggtgttcctgacattacccaccattgtatacatggacaaactgaagaaagcctgtacatggggtttgatttggattgatagcttgctccattctcgctcttga

SEQ ID NO: 13537 - DNA, 270 bp, Zea mays
  Peptide Sequence Number=SeqID_55316
atgagctggtgtggtgtggccgtgtggtgcaggagactaggcttacaaggccaatgtgccgtcgaagcagagtcggggagcgcaggcacagcagctcctccgctcaaagagtctcacgagaaacgctcagcgcagaggctgattgatcgagactgggccgccgaattcaacaaggtatttatgcaattcgttacactgcgtaaaaaatctggcatgttgttcactggtggacgcacctccgggttggagcgtaataaccttaagttttga

SEQ ID NO: 13538 - DNA, 402 bp, Zea mays
  Peptide Sequence Number=SeqID_55317
atggcgcctcctgttgacgtggctggcctgcgccctaggttgggcaatgtggaggctcctccgaagccgaggtcgagtctgtcttccgtggccgagcccgagtccgagccctgggtcgggcgaagcggagttcgccgtcttccgagacttagcccgagtccgagccctgggtcgggcgaagcggagcttcctatggtgccttcggcagggcctgactgcctgtcagcctcactctgtcaagtggcaccgcagtcggtgtggcgcaggcgacgctgtccttctgtcaggccgctttatgctgatgggggttaccagctgagaattaggagtcttgagggtacccctaattatggtccccgacaaatggctcacagaattgttaatgaagctaataccaaataa

SEQ ID NO: 13539 - DNA, 237 bp, Zea mays
  Peptide Sequence Number=SeqID_55318
atggcactccactatgttcttcaccttcaaccatcccctccttctataatgattgtgtacattgatgctgactgggctaggtgttcggacacacatcgctctaccttcgactatgttgtattcctcaacaccaatctgatttattggttatcgaaacggcaaaacacggtcacccaatccaatgttgagatatttgagtatagaggacgtgatttagaggacgttgttggaaagtaa

SEQ ID NO: 13540 - DNA, 2076 bp, Zea mays
  Peptide Sequence Number=SeqID_55319
atggcgctcatagaggaagatgcttgctggtgctctggcaatgacatgtgggtggagagattggtcggctatgtggcgatgtcttccaggaccttcgtggtggcgtcggtggtcggtgatggtgtgatcaacaatatttgctcggactcatcgtcacccgccatctcctataccagattgataggatccgaaatcctattgtggctgcgtaagttgtacgggttaattagtgaaggaaaattaagtgatgctcttgctgtgtctgatcgttgtttgcgcaatggagcatctgataatttgcttcagttgctcatcgaacagaaggaagaaaaaggtccaggcacaggacaaattcatccatatggatctcacagtcttgggaatgatacttctcagtactgcttgaggctgagagacaaaaaagttgcagctcagctcgctctaaagtacttgcacagctgggaccttgatgctgcaaccaatgttctaactatgtgcatgtgccacttacctgagaatgatcctatgcgcagtgaggtgttgcacatgaagcaatctttacagaggtatggccatatcatgagtgctgatgagcactacactagatggcaagaggtggaagctgattgtgaagatgacccagagggcttggcactccgtcttgctgccaaaggagctgtttccgctgctttggaggttgctgaaagtgcctctttatcaattgatttgcggagggagttgcaaggccgtcagcttgtcaaactgctaatcactgatccacttaatggcggaggcccagctgcagcttcaagatttctgtcaactttaagggattccaatgatgctcttcctgtagccattggtgctatgaatttattacctgacctgcgttcaaagcagcttcttgtgcatttcttcctcaagcgtacagttgggaatctatcagatgctgagattgcacggcttaatttgtgggcattaggtctccgtgttctttccttattgccattgccatcacaacagcgttgttcttctctgcacgaacaccctcagttgatcgtagaagtactgttgatgatgaaacaactccagtctgcttctttgattttgaaagaattttcttccttgagggatgataagttaattattgcgtatgctaaaaaagcaatctcaattaacagagaagcacgcaaagcattctcatgggtcccccgtgatagtggcactaaaacacccccaaaagatatccttcggaaaagaaagagttcaggctctggaggtgatagatcctcttgggaagcaatgcctggtttacaggaggagcggacacctgtatatccttctgaggcgcaagaaagacttccttttgtctctgctcctgatgagtgggtgctgacgggagatcctgacaaggatgatgcaactcgttcatcccataaatatgaaacctctcctgatatcacactgttcaaggtagttgaaaagtttagaaaaaaggcattgatatccttgtgcaccaatgagtcagtagctgcaaaaggtgcacttgaattgtgtatgactcagatgaaggttgtgctaagctcccaacagttgcctcttgatgcctctatggacaacatagcccgggcttatcatgcaacggaaacttatgtacaggcactctcttatgctaagaatctatttaaaaagctcgttggtagtagtgatttgtcaagtggctctgaaagaagtaaggaagttgatgatgtttctgtggacactggcagttcaagcactgggagccagtatctggatgagctgtctgatttcctaactcaagcagacatgtggttagggcgtgcagagcttcttcaaagcctgctgggatcaggtattattgcctcgctggatgatatagctgacaaagaatcttcaagtagactacgtgacagattggtcaacgatgaacggtacagcatggctgtatatacttgtagaaagtgcaagattgatgctgtaccagtatgggttgcatggggccatgcattagttcgaatggagcactatgctcaagctcgtgtgaagttcaagtaa

SEQ ID NO: 13541 - DNA, 234 bp, Zea mays
  Peptide Sequence Number=SeqID_55320
atggacttcatcgacggcctccctaaggcccactcttctaaggttatctccagcagtctctcatatcctatctcttatttcaaactccactctataaacagtgcagtttacagtgcaaaccagtgttctgcacagccatatgtgcaacctgttgtaaatggcctaaagggtgctcgtctccatgatgtgttccacatggggctgctcaagccattccacggggacccccaatga

SEQ ID NO: 13542 - DNA, 1311 bp, Zea mays
  Peptide Sequence Number=SeqID_55321
atggaagtgattgcaaagccgaatgtggccacaaaggatggtgcatcaaagttcaatgtgggcatggaggatacaacatcaaagctgactgtggctgatactgcagcagtagaaccaactttgctggaaaccagcattgcagctggatcaaccgttgtagctggaaatgaacagtgtgataactcaaactcaagtggagcaagtctacagcagcaagccattgacaatgtattgatgtccactgttatgctagctgaggacattgccacacctgtggctactgccgagctcaagcctgcaagacgcttcactcgattgctgctcaagaatcatgagccaaacaaagaagagtctgcagcttgtgaaagtcaggcaacaccagatggcagcaaggatacctcatttgattttgctttgctcctggagaagcctcagagaaggtttacaaggtcgttgctcaagacaaaggttgagagcaatttggttggatctgacgatgcgctggacagtgcatctgatgcccgtccatcagtgaagaagatggagatgaaaatgagacggaggcggcgaaggcggagatggcggccatcagcgacgcactcgattgccttggcggtgttggcggccacagaccgacggcgtgacacgttgatgtgcgaggaggtggaggagttggttgtactggtgagcggagaggcggggaacgacgtcggcgtcagcatcgacggcgacgtcgaaagcacactattcctctccctcggttccaacgccaccgcggcggcccaccaacgcgcgctcaccctccgcccccacgttgctggcatcgaggccaacgcggccgccgcccgctacgtgctccacgccttctcctccctctccttcccagcacacatcaccccttactcggttctcctctcctaccccgtccacaccgctccctctccctcgccgcggcacccggccttgccgccaggccgttccccttggtgcatgagacctataaaggtcctcccgacgtacttcgcctactcgggatccggctccgacaacgccgaggtcgtctacgccaactacggccacaacgaggattatgcttacctcgcctcccgcggggtcgacgtcgcgggcaaggtcacgctcgtgcggtacagtgacatccactgcgagaacatggcgggcgggcggggattgcgcgttcgtggcggcgattgcggtgcgcgggcggatcgctggcgcgggcgtgcgccattgcgagcgctggcatgggcgtgctggagctggattcgcggcggctgcggcgcgcgggcatga

SEQ ID NO: 13543 - DNA, 1068 bp, Zea mays
  Peptide Sequence Number=SeqID_55322
atggaggtccaggtccagcagagaggatcccctgcccctgcggcggagctggaggtctccctccgcgagttcaccctgtcggacgcggacgcggaggcgttcatgtcgtgggcgtccgaccctcgcgtggtccgcttccagcgccgcgacgcctacgagcacgtggaccaggcccgccgctacatcgccgaccacgtcctgccgcacccgtggtaccgcgccatctgcgccggcgcgggcgcgcccctccccgtggtgggttccatctcagtgaaggccgggcccgccgaggacgggcggctgttcagggcgtccgtggggtaccgcctggcgcacgcgcactgggggcggggcatcgcgacgcgcgcggtgcgagcggcggccgcggccgttttcacggcgtggcccctggctgctgcggctggaggccgtggcggacgtggacaacccggcgtcgcagcgcgtgctggagaaggccgggttcgccagggagggcgtgctgcggaagtacgtcctgctcaagggccggcccagggacatggtcatgttcagcatcgtcgtcgagacggagcaggacaatccggatgggctgtagatcgtgggccgcgatgctatgggctcctggcctttcgctgctgcgtaacgttccaggcagccatgtatcatgtactgagttacatgtggaccacgatgatcgatgtcgcgatctccaagctggagagcgaaacaggggagaacctgatgctcaccgaaattgtcggccttgaacaaattgcagaggtgatgagtcggtggacgggtattccggtgactcggcttggctataacgacaaagagaggctggtcgtccttgccgacaggcttcaccagaagctggtcggccaaacagatgttgagaagggtggccatcgcattgccaccgttgatgtacctatcaaatggccggaaggacggagagaccatcttccccaatgcagagatacaaatgagaggtttttgggcttcccagaaacaaactgccgctttaagggatctgttagagaaatgtttaaaatttacccctactaa

SEQ ID NO: 13544 - DNA, 204 bp, Zea mays
  Peptide Sequence Number=SeqID_55323
atgcggatggagaacccgaaagtaggtcttccaaatagccccatccctacatgtagtcgagctaaagaaggcgaagggggacactctgagttccaaaagttctacagaagcctgtcgacccagctgaaggatgttgtgtggaagtgcgacagcgagagtcagttttgcaacaagttctttggtttatttgttgacggcgagtaa

SEQ ID NO: 13545 - DNA, 393 bp, Zea mays
  Peptide Sequence Number=SeqID_55324
atgggcggggagatgagatcggctgcggaggcgaggccgaggggggcggatctcttgcgcctcttgggagatgctgatgccaatgggttcggaagggaagagatggggcggccggagcgcgtgatggcaatcagtgagtcatcaagattgcattcttcgttgcaaaaggaaagtgttcctataaggagactcattgtgaaccaagttctgccaccttcaacatcggactgtagattctgtgctataaaaagaaaggatcaaacgcatgcattggatatgatacggactggcctagagttaaaaggtttgaatattatccaagcacctcttgtggacatggagattagaggtgttctggctcacaattttttgggtgatatactgtggaagtaa

SEQ ID NO: 13546 - DNA, 1092 bp, Zea mays
  Peptide Sequence Number=SeqID_55325
atgacgacgccaccgcgcaacgcgaccctccccgtcctccttgtcctcctcctgctcgcgccgcacctcctcgccacagcgccggcgtttgctagccgcggcctcagcgcgtccgacgccgcccacatccggaggcgccagctgctgcagtaccacggcggcggcgccggcaatggcagcggcgtggtcgtcgacccgtcctacgcgttcccgaacccgcgcctccgcgacgcgtacgtggcgctgcaggcgtggaggcgcgccatcctctccgacccgcacaacgtgacgggctcgtggacgggccccgacgtgtgcgcctacgccggcgtctactgcgcgccctcgccgcaggaccccgacctcaccgtcgtcgcctccgtcgacctcaaccacgccgacctcgccggacacctcccggaggagctgggcctgctcgctgacctcgccgttctccacctcaactccaaccgcttctgcggcctcgtgccccggtcgctggacaagctccacgcgctccacgagctcgacctcagcaacaaccgcctcgtcggcgccttccccgacgtcgtgctccgcctgcccagcctcagatacctcgacctgcgcttcaacgacttcgagggacccgtgcccagcgagctcttcgaccgaccgctcgacgccatcttcatcaactccaaccgattccgtttccagatccccgacaacttcggcaactcgccggcctccgtgctcgtgctcgccaacaacgacttcggcggctgcctcccggcctccgtcgccaacatgtcgtccacgctcaacgagatcatcctcatgaacacggggctcaagtcctgcgtgccgcccggagctcggcgcgctcatgggcctcaccgtgctcgacctcagcttcaacaagctgatgggcgccatccccgacgagctcgcgcgcctccacagcatcgagcagctcgacctcggccacaaccgcctcgtcggcgacgtgccggaggagatctgccgcctgccgcacctccagaacttcacctattcctacaacttcatcaccggcgagccgcccgtctgcctgcacgtcaagagccttga

SEQ ID NO: 13547 - DNA, 345 bp, Zea mays
  Peptide Sequence Number=SeqID_55326
atggggatggagttggaggagacgccggtgggggagaaggaggaaggaggggatggggacgggggtggaggagacggcggaggaggtgaaggtggtggaggagatgttggaggaggcgaaggtgggggaggggatggtgatggcggaggaggggatggtgggggaggcgaaggcggcggtggagacggcgacggtggaggaggagacggcggaggaggtgaaggtggtggcggcaggggtggcgacggcaggatgaacttcttgcacttgaaggcatcgcagttgacgtggtggtggttcctgaagaagttgcattgctctggcgacctctggtcggggcggtag

SEQ ID NO: 13548 - DNA, 567 bp, Zea mays
  Peptide Sequence Number=SeqID_55327
atgttctatggggccatggtttgggatccgtggctgatcgtgtcgcagatcgtgtgcctgcagtgcctctactacctgtcgctgggcgtcgccatggcgctcctcgtcggcacccgcgtcccgcgactcacccttctctacttcttcgacttcgccacgctcaccccgcgcacccccacgggttggtgcgccatcgcatcattcattcttgccgctgtcgcaggtgctgggttcatgctttatgtgattgagagagccaagaagtgcctggactttgcagcaacactctacataatccatctcttcatttgcattgtttatggtggatggccagcttccattacatggtgggttgttaatatcactggtttggcaatcatggctctcctaggtgaatacctatgcatccggcgggagttgaaagaaattccaatatcacggcttcgtgcaaacttgcagtataatgctattcctgctctggcatttaaaatgttgcttctttctttctcattttatgacaaatgcagtaatcttcatcaaaccataggtgtgcgaaaggggctctag

SEQ ID NO: 13549 - DNA, 588 bp, Zea mays
  Peptide Sequence Number=SeqID_55328
atgtcatgtatcgttgacttggttgatcacgagaagtcaacgaaaaagcctaagatatttaccataaagatcaggaggtcaaccagggacgattatcaaaatgtccctaaacaatatgtgtcaggtaggcctctactcacctgggataaactcaaaacggttccagctggtataaaaaggttgcatgactggtacatgagagtatcttctgttggtcatgaagcgaccattattaccttcgaggacatatggttgatgatgaacctcaagaaacttgacgtacaacttgtaacaatgtttgcattaatgcaatatgatcagcataagatctgttatggttcggatcctcaacctaatgctagtacatggcttgggtatctcaacccaatgcgaatatgcaagatcagcacatattcactattggttcagacccccaaagaattaatggagaggtcacctgaagaagctaagaagtgtatagaggaaatgaagaagaattttgaagacaaatacgttgtctacctaggacatgcaatgcttcagtttcatcacaaggaatctataatggccccatacaactttgggtaa

SEQ ID NO: 13550 - DNA, 192 bp, Zea mays
  Peptide Sequence Number=SeqID_55329
atggcggggaacctgcaccccgccacgacgccctaccacggagtgggccgcggcctgctggaggcggtgttcgcggagagcaagaggttcttcagcctgcctatggaggagaagatggagctgctgagctatctgattagactgcacatgaatctaggaactaggtgtagcgggttgaggaaaattccataa

SEQ ID NO: 13551 - DNA, 393 bp, Zea mays
  Peptide Sequence Number=SeqID_55330
atggacgacaaccgatgtctccctacacctggtgcccagtttcagtccactggatgcataaaccgtttccagaattctgttaaggccagctgttggagtgcatctctttgcacaatgaaaactgtaggggtatgggaatggaggtcgttggtcctaaagcagcaccagcagagaaggaaagcaaatgcaaaagaacgtgaggaggcagctgttttcggttcagagacaactactaatgtcactgatctagcacctccaaaggatgtgaaggatgagtggcctaaacctaagcagacttatgccttctacttcatcaaggtccgctcatttgaggatcttaaactgagggcaaaactcgagcagtctaacaaaaaattccaaaagaagatctaa

SEQ ID NO: 13552 - DNA, 408 bp, Zea mays
  Peptide Sequence Number=SeqID_55331
atggcaaagaaaaatcgtccgtggcaagataagagcatttgtactggccacaacaattctctatgcaaagacaatagggagaagcacagtcatgctacctttcagaaaaagtgtcacgctgaacctatcaacaacggtcaattaatattacatgaatgcccgcaagaagccttggaagctgtgtctactcgaatatttgctgcagctagatttcctgatttgcctgaactgtgtgacctcagacatttattcacagagagatatgggagttctgtcgagccttttgttaattatgaggaggatgcaagcagatcatttgctagagttaaactccaccagcagtcaactaagagaagtcaatgttgtgaggaggagcaggttgtgaccttgtgttacttcattgtctga

SEQ ID NO: 13553 - DNA, 294 bp, Zea mays
  Peptide Sequence Number=SeqID_55332
atggcgggtgcacgggcgcggtcggcctgggcgcctgggctgctcgaggtcggcgcgtcgcggctgggcggcgatgggcgcaaggtcttcgggcgcggaaggccgggtcgcgccctggcgtgtgggctcctagcggcgttggggcgggttgttccctggctgcgcaagagagagaagaggaggggaagaagaggagaggacgccagagagaaagaacggttgcgccaaccaccaataattacgcacgaagcagtaaatgcaatgcgggagacggacagccagcacgacagctga

SEQ ID NO: 13554 - DNA, 435 bp, Zea mays
  Peptide Sequence Number=SeqID_55333
atgtcggcgtttcgagaccggggggtccctaagccgacgagtgaatgtcgctgcgtgccccagcccagatgggtcgacgcgaggccgagcgcgaaggggggaagtgaggtggccggagatgggcgtgagagaggtggaaatcccgcggccttcgtgttcgtcccgcgcccagctcctccgaagccgaggtcgagtccgtcttccgtggccgaggtcgagtccgagaccctggttcgggcgaggcggagaccgtcggctgaggccagggtggagtccgagccctggggtcgggcggagcagagtttgtcgtcttctggggctgagcccaagtccgagccctgggtcgggcggagcggagttcgtcgtcttctggggctgagcccaagtccgagccctgggtcgggtggagcggagttcatcgtcttctggggctga

SEQ ID NO: 13555 - DNA, 237 bp, Zea mays
  Peptide Sequence Number=SeqID_55334
atgggaagagccgcaagtgaaagtgacagggacgaagacaagaaggggaagaagaaggagaagaagagatactacaagaataagggcggcgaggcgcacatggggcgggaatgggactctgatgagagctcttccgacgaggatgccgccaacatcaccgtctacaagggcctcctcttacccaatgtcggccacaagtgtctcatggataaagacggcaaaaagaagaagatgtag

SEQ ID NO: 13556 - DNA, 651 bp, Zea mays
  Peptide Sequence Number=SeqID_55335
atgacgcgattcctctctctaatgcttgaaaccaccgagcgccccactccccgcatctcgccaagcacccgtccctcgctgtgttctggcctgagcttccccgtgcggccctcagccgagctcggcggcgtgtgcgcggcggcccggcgcggcctgcctacgtggcagtcggcgtggccagccgtcgcggccctggtcgagctcccctttgtgcatggcctgcgtagctgttgcgcgcggctcgcccgtgcagcttgcaggcgcagccgtagcgcgcggccccgcgtgcccggcgtggctcgcctgcgtggcggtgcggcatgcgcccgacgcggccagctgtgcccccagcgcgactgcatgcgcccgccacgttgcagcccacacgctcgccaacaccgccgttcgccaaagcagcgtctcgccgcgagtttcatcgtcacgctattgtcgtcgctgtgcaacagggtctacatcgctctcgtcgtcgccgaggtgagcttcgtctacctcggtttactctccgtctacttcatgcacgatgcctgtctaccccccgtctacctcttctaccccctgcacgtgcgcgcgttcgcgccgttcgcacgtgtcgttgttgccgttcgcgtgcgcggtcgattgtcgcactag

SEQ ID NO: 13557 - DNA, 2286 bp, Zea mays
  Peptide Sequence Number=SeqID_55336
atggaggatggcgccgagaaggcgacgacaccggattcttcttcttcgcaagcggcaccgccagcgctgagcgcggtgtacgtgaacaggcgcctcgtggcgggcaaccgcgccatggccgccgtccacgtcgcgctggtcgccacggtcatcggccagcgcgccctggcgctgctctctgctggaaccagcagcgcgtcgcccgcgtcccggtccctgcaggtgcagcacgtggccatggcgctggccgacctgacgctgctgttcgtgtgggcgctgtcgcagtcggggctgtggcgtcccgtgacgcgcgccgcgttcccgggccggctgctggcggcggtgccccgcggcgcgctcccgcgcgtggacgtgctggtggtgacggccgacccggacaaggagccgcctctcggggtggtgaacacggtggtgtcggcgatggcgctggactaccccggcggcaagctgagcgtgtacctgtcggacgacgccgggtcgccgctcacgctgctcgccgcccgtaaggcctacgccttcgctgccagggcctgggtgcccttctgcaggaggcactccgtgcagtgcccctggccggacaggtacttcgccggcgacgacgacgacgctgacggcgatcggcggcgggaggagctcgcggaggagagggcaagagtcaggaaactatacgagaagttgaaagcggatatagaggcggctaagaatgacgagactatttctgggagctggtcaaaagacaaacgtcagaatcacgatgcttacgtggagatcatcgaagacggcgacggcgttgaggagattccggcgctggtgtacgtagcccgcgagaagcggagagcgtggcctcaccacttcaaggccggcgctctcaacgccctgctgcgagtgtcgggcgtggtgagcaacgcgccctacgtgctggtcctcgactgtgacatggcctgcaacagccgcgcctccgccctggacgccatgtgcttcctcctcgaccgcaggccgccgccggacagcctcgccttcgtgcagttcccgcagctgttccacaacctcagccacaaggacatctacgccaacgagctcagatacatcttcgggacccgatggttcggcctggacggcgtccggggccctcccctctccggctccggcttctacgtcaggagagacgcgctttacggggccacaccgaccgcggacttcatgcccgatgccaccgccgtcgccgagctcaagacaaggttcggccactccgaccgtctcgtggcatccttacgcagccccggcgttccaccagaagcagaagcgatgatgtcccttgcggcgctggcctcctgcgcatacgaggccggcaccgcctggggcgccggcgtcggcttcatgtaccagtcggtggtggaggactacttcacggggttccagcgcttcttcgcccgggggtggacctccgcctactgctacccggagccgcgcccggcgttcctcggcagcgtgcccaccaacctcaacgacgtgctggtccagaacaagcgctggatgtccggcatgctcgccgtcggcgtctccaggcgccactccccgctcgcctgccgcccgctcctccgggcctccctgctccaggccatggcctacgcctacttcggcttcgccgcgctctgcgccgtccccgtgctctgctacgccaccctgccgcagctctgcctcctccggggcgtcccgctattcccctgccccgccgccaccgcggcggcgttcgcgtcctcgcttctgcagcacatggcggaggtgtgcgtgtccaggcggggtaggctggacctgcgcacgtggtggaacgagcagaggttctgggtgctcaacgccctcacagcccagctcttcggctgcgtcagcgccgcccaggagctgctcggcgcacgcgccttggacttcgacctcaccagcaaggccgccgtcgacgggagcctgtaccaggacggcgtgttcgacttcacgggctgctccgcgctgctgctccctgccaccacgctctccgtgctcaacgccgctgcgatcgtcgccggcacctggaagatgtcgtcgtcgtcgtcgtcatcgagcggcggcttccacttcgccccgcagctgttcctcatgtgctacggcgcggcgctcagctacccgctactggaggggatgttcctcaggcgggatcctgcgagggttccgccacgcatcaccgcactctcggtcgcattggcagccgtgctgcttgccgccatgcttggatga

SEQ ID NO: 13558 - DNA, 210 bp, Zea mays
  Peptide Sequence Number=SeqID_55337
atggggtggcggcctgaggcaaatggcggcatgaagaagaagaagctggagaaggagtcgtcgctggactgggagcttttcaatctcaggagacggccatgtcagatgtctggccaacatcctgcttctcccaaggtcattggccagtacaaggcaccagacctatccagtgtgggatcctgtggcacatcggatacctcgagggcttaa

SEQ ID NO: 13559 - DNA, 204 bp, Zea mays
  Peptide Sequence Number=SeqID_55338
atggcggctagggttaggatgttgggcctaatgggccttaggctccatgaagatgagttccaggcatcaagaggtcaagattccaggaggcctaaaataggtgtgtggacagacatgtgtattcctcctatgacgaataattcaggctccatgaagatgagttccaggcatcaagaggtcaagattcctggaggcctaaaatag

SEQ ID NO: 13560 - DNA, 519 bp, Zea mays
  Peptide Sequence Number=SeqID_55339
atggaagaggctatgcccccacagcagagttatgcacaaggtggtcaggatggtagaggcaggagaacatctattgctccttccgcacctgggtcttatggccaaccatcagcacctggatcttatggtcaacctaatacacctgacagggggctggaccagcatatggtggagataactggcaaagaggttctggtcagtatcctagcccaggtgaaggacaaggaaactggcagaggactcttaacagaccaggttcttgaggaccttacaatgtacctgagacggcagagggaaggaggtgacgatgctggcgcagtagtcgcctcctctagagacgacaacgacgtcgagacgatgccggagagctcagagccctaccagcacgcttcctccagagacgacgacatcaaggcaatgccggagagctcggatccgtaccaggggcctgcacacgcatgccaagagatgggacgtcgacccatttttatcccttgctcatcctacgtgtgggattaa

SEQ ID NO: 13561 - DNA, 340 bp, Zea mays
  Peptide Sequence Number=SeqID_55340
ggaaccagcatccagtgcttcaggtagggcagcatctggcatgtcaagtgatgaaaagaaccagcgtcagagagatgctcgagttcttatgccgccaccacgctcattagccccaaatagaggcagacatgcagataaacgtgcgatatccagctcgagcagtacttcaaacagcacaagcggcgaatcatttaaaaatagaagagtaccaaatcgccccgcggataataacagtaatctgagctcaaattctgatgttcataaaccacggcgcaaaaggaggcataagaagaaaagaaagctgtctcacaacgctgcctctgtatctcagcaggcatga

SEQ ID NO: 13562 - DNA, 741 bp, Zea mays
  Peptide Sequence Number=SeqID_55341
atggcgcacggcggctacccgcgccgcggcgctgccgtacgcaggcccaagtcctcggcctctgccgctgttgccgaccgcaagcggaagcggaccgccgccgccgccaagaccacctcccttaagaaccagatccgctccaccgagcgcttcctccgcaaggaccttccggatgagattagggttgctcaagagaagaaactggaagaactgaagaggcaacaagagcttcagaatcaacttgttgtccagcggacattacagtttagagatagaaagataaaattctttgagagacggaagattgagaggatgataaggcgactcgagaagcaacaacgttcaaatggtgacggtgtcaacaataatctgtcaaaattgcgagaagatcttgaatatgttagagttggaggttctaatcaaccattttttatttgtacctgcttgaatcctgagttttttcctaagaatgagaaatatgtctcgctgttcactggagggaacagtcaagatattgttcaagagaggaataaatggcgcaaacagatcaaggagaatttcatgggtgctgcagcaaacggaaaagatttagaagagacagcaagcgacggcgataccttggatgtgagtgatgatgacttttttatgtttggaagttcaagtgatgaagaggctgatgatgagtggactgacaaaagtgctaagtatggttcacaacccccaacttttgtaccctgttga

SEQ ID NO: 13563 - DNA, 541 bp, Zea mays
  Peptide Sequence Number=SeqID_55342
atggatttcagctgcttccagccccacatgggggtctgtagctacctgccattcgacccgtacatgcagcaagacggacgctacgagctgcatcctgttgagcaccatcatccgtttgaagctatcggggactacacgcctgcaaccttcgacgaccttggacgccagttgttctttgcagagagcaagaagcccgtgtccggccatgcttcgcctatcggtcgtagtagagttgggtcgtctcagctgccgctgctgactcccaaagctgaggtttctcatctcatggacatcagtggccttgctggatcatacaaggcgtacgagacgaacggcaggttcctgccgagaaagaagacctcctcgaacaaagccaatgtcgtgaaagggcagtggacagcagaggaagacagagaagctggtaaaactagtggaacagtttgggctgaggaagtggtcctacatagcacagctgctgccaggaagagtgggaaagcagtgcagagagagatggcacaaccatttgaggccgaacatcaag

SEQ ID NO: 13564 - DNA, 588 bp, Zea mays
  Peptide Sequence Number=SeqID_55343
atgcagatgctacgaagtgaggcagtgaagtgtatgaaggttcagacttcgattcacaggcatgcacgcttgggaaaagaagagtatttgctgttaagagcactggcgcagggggcacctttgcggtcaataagagtgaggatctcccaccagtggaaaaatggcgccagcaagccaacaatacagtattggctgggtttactcctagtccttcctatggtgcatgccaccgtgtcatggttccagaagatcagaggcgtcaccgtgttcttgagtgagcacatatccatggagatgaacgacctggctgaatatcatcagggtgcaagcacattccaaaacgactggcaaaagccactggaggagacggtaaccaaccatgcaccatttgccaatggctatgcgagtacttgccaaccggtcgagtggtggacctgctgcccaacaccgccaaaaggaacaatcaatggaaggggctccatgggaggctggactgggagggcagcttcccccacgtccgtgtccgatccccagcctgtgggcaagctcggcatgtgcttccaccctgagcagattctgtacctctaa

SEQ ID NO: 13565 - DNA, 504 bp, Zea mays
  Peptide Sequence Number=SeqID_55344
atgtcctcctccaccgcgtcgtggtcgcgctacggcgccctccccacctccccccctgcgccgcagctcaagccggaggacgtcgcggccgcgggcggcgatgcggcgccctcctcctcctcggcggcggcaacggcggcggaggccggggtcgccttcttctcccgcgcgcgagcgttcgccggggccgcggcgggccggccgcgcgcgtggcgtgaggtgctggacccgacggcgttctcgtgcccggacagctgcggggaggcccgcgcgcgggcgcgccgcaacctcgcctacttccgcgccaactacgcgctggccgcgctcgcgctcgtcttcctcggcctcgtctaccgccccgcgtccatgctcgcgttccaggcgctcttcgtcgcctggctcggcctctacttcggccgcggaggcggggagccgctcgggattcttggtggctctgatccattatcggattttgcaaggcgttcatcatcgttggtgctgtga

SEQ ID NO: 13566 - DNA, 387 bp, Zea mays
  Peptide Sequence Number=SeqID_55345
atggccatggatcgaagtaggagaaaccggaggtgcgttgtggtggaggaggggtgcacgcaccagagaagtcgggcagcagtggctagcaaaggagctcgtgcacggggaaggggcctcggcgaggtcacggctggagggactctagggaggagcgttgacgagctccaagagccaagcagggcactgtccggtggaggagcgccatggaagggagaggaaggagctctggccatggagaagcagggagatgggcgcagtccaagcggggaggagctaggagaccgtggcgcacagggagacggcaaggctatgcgatgcgtaggggagagatatggccgtgagagctccacggcagaggttgaagatgacctcgcgatgggataa

SEQ ID NO: 13567 - DNA, 705 bp, Zea mays
  Peptide Sequence Number=SeqID_55346
atgagcggcacgaccggcggcgtcgtgggtgtgcagacgacggcggcggcggttcctgatctctcactccacataagccctccgtcgccgccaccggccggcggcgtcgaggcgctgccggagccgaggctgctgctggggctggggctggggccggggccggggctggagctcgacgacgacgacgacgccgtggcgacgaagaaggtggacgacgacgacgacgcggccgcggcggcgcgggagcacaaccttcacgcgcagcggctccggctgcagttgcaccagccgagccagacggcccacgggttcaagaagagctcgtcgggcaccgctgccggcggcgggaggagaagctccagggcgccgcggatgaggtggaccaccgcgctgcacgcgcacttcgtgcacgccgtcgagctcctgggcggccacgagagagcaacaccgaagtcagtactggaactgatgaacatgtacagaacagtgaagggtagtacagacagatcatgtgtagcagcagcaggccatggcggccatgccggagacatggtccttctcagaagaagaggcgctggtgaaggggacggcggctactacgatgttcccatctgcaacaaaaacccagtgaacaccaccgtcgaccctactttcttcaacaacaacaacagcaacattactgataggttcgcattgctgcattaa

SEQ ID NO: 13568 - DNA, 162 bp, Zea mays
  Peptide Sequence Number=SeqID_55347
atggccaccaatgggcccagatttgggggaggaaggggagggccgacaactgggatggtgtcgccctccgggagggaactcctggggagcgacgttggagcagggctgacggctgttgggaggctggaggacgttttaagggtctgtatcacctcgatgtaa

SEQ ID NO: 13569 - DNA, 1380 bp, Zea mays
  Peptide Sequence Number=SeqID_55348
atgggaattaatgggcatctcgacctcgacacgggaagtaaatccgtagttcaaaagatgaacctgatggttggtgcgaaggggtgtgagagatgcagggactggcaggagcactactactgggagcatatggatgcgagcaagatccgcttcttcaggtgcatgacaggagactttgctcatcgcattagcgtgccagagaagttcgcaaagaacttcaaggggcagatcaccgaagagtttcacctgaaatcacctagcagcgctgagacatggcacgtcggtgtagagaagcatggcgacaaactattcctcgtgtcagggtgggagaatttcgccaaggctcatgagctggaggagaacgatctcctgctcttcgcttgctctggaaactcttcctttgaggtcctagtcttcggagcaagtggctgtgagaaagtgtcatccctgtttggcagtggacttggtccggacatgggcaaacaattcaatgatgtggtgcgtcgacatggtgtgcatcactctgtgactgtgagtgattctgaggataccgttgcgccgtcccagctggttcgatcccctcgtaacgccttgcctttgaaggaacccagtgggaaggctagaccaagtaaatatgaatcaccaaactccagcaacttcatcgtcaggcatgtggcaactggcaaagagggcactgatgatgagtatgctaactcaaactactactattcgttgtctgccaatcgactaggagacgaggaaaaggaagaaataataggtttggctccccatccgaccgaacaatcctgtatttgtgacccttctgaggaaaaaccatgttcagcgcagaaacaactgtctggtgagtttattcatatagctaaagtaaatgaaaatggttggataattgatttgcatatattagttctttgtaagttagattctgatttgttctgcaatcttactatcatcccaagcaagtttgctgctgatcatcttggggaaagagcgcacaacatcatacttcgtaggccgaacaggaaggagaaatggcatgtcagctactatcactcacgccacacccggtgtttccagaacttagcgctgttcaagttcacgcgcgagaacaagcttcacgagggcgacatctgcgtcttcgaactgatgaaaggcgagaggagagtgacgatgaccgtccatgtcgtcagaaaggccaatggccggggtagcattgcaaactggaagtgcctagtgatgcttgcaaggaatgcaactgcggttttgtgtcatgtaagatctcccatctggtacagcagtgcttttgaacttcagaagtattatttcaaggaggaaaaagggattgttggttggtctacctga

SEQ ID NO: 13570 - DNA, 1011 bp, Zea mays
  Peptide Sequence Number=SeqID_55349
atgactactttgcacccgagatcaaaaaacagtgggggtactagcaaggggctcaccaagggtttcgacgacgacgaggatgggctgcgcagcaagcacgagattgatgacacgcgacgaggggagtggagaatgaacgagagggctgctgcgccgatgcggacaatgcgcagcgatgaaggctatgcgatgcagggacgaacgacacgcagcttgctgcgcttttcgtcgagcaggttcaatgcgaggcttgagggtgtgttgctgctgctatttggtgcgacacgatgcccgggtgcgtggcacaagcttgcagcgacacggccaccacgcagagacttgcgcgtgaactctcgaacacacgacgagcatggatggtgcaggggctgctcgccacagagcggagtggaagtcatggcgtcggatgagactgatcccgaccatggcggcacgcgaaggaggagctcggggcgccgcaacgctgctggagcagagggataccaatgccgtccacaaccagtgtggaggagttcgaggaggcaagggcgcgacgctgggaacgagggcttgccgcacgtccctagcattgctcgagcagagaggagggtggccgtcgaggtcagagcactaggcgcccagcgcaccaggggcaggggacaggatggttggcggccatggggaggcaagctcgaggatccacggcgaggggattgccggacttggggcaagaaattctgggcgagcagggatagggcgaattggatccggcctggagctggacggcgtgggggagaacttcctgcgcctaggaatggagggggaagggatttgcgtgcgctatggcagagctccgagcggggaggagaaaggagaggggtcggacgccatggaggccctgctcttgctggggagaagggctctctgctgccaaacgccgtggagaatgggggctcggtagagagaggagcagggggcgtcgaggaagaagacagggtgatgcttctgcactaa

SEQ ID NO: 13571 - DNA, 459 bp, Zea mays
  Peptide Sequence Number=SeqID_55350
atggcagcacgcggaggaggagctcggggcgccgcaacgctgctggagcagagggataccaatgccgtccacaaccagtgtggaggagttcgaggagagaggagggtggccgtcgaggtcagagcactaggcgcccagcgcaccaggggcagggggcaggatggttggcgaccatggggaggcaagctcgaggaaatccacggcgaggggattgccggacttggggcaagaaattctggacgagcagggatagcacgaattggatccggcctggagctggacggcgtgggggagaacttcctgcgcctaggaatggagggggaagggatttgtgtgcgctatggcagagctccgagcggggaggagaaaggagaggggtcggacgccatggaggccctgctcctgctggggagaagggctctctgctgccaaacgccgtggagaatgggagctcggtag

SEQ ID NO: 13572 - DNA, 1155 bp, Zea mays
  Peptide Sequence Number=SeqID_55351
atgctgcgcttatctttgatggtgatagattgtgacttcggtctcaatgcagcacttgactttgataagtacccatgtcatttcccatgtgctgtgtgccgcctttggatgggatgggagcatgggacgctcgtgcggtcgcgggctggcggcatcgtggcctcatctcgcgctcaagctgctccccgtagtcccattgagaccaacggcagcgctcgcgttcgtgcacaggcagccgaggcgagccccttccgctcagtggccgccgccggaccgtggacgcagctagcccatcagcccatggcagggacggacgtcgcaggctccgcacgcggctccgatgccgcgctcggcaagacgggcgaaccacccgccgcggcgcgctctggcgcagccaagaaggtgactctcgctctgctagcctccttctcggcgctgctgtacagccagattcagccgccgccgtctaagatccccggcacgccgggcgggcctccggtcacggcgcccagaacaaggctcaaggacggccggcacttggcgtacctggaatccggcgtcccaaaggagaaggccaagtacaagatcatattcgttcacggcttcgactgctgtagatacgacgtgctgaatgtctcccaggggctgttggaagagctgggaatttacctgctgtcctttgaccggcccgggtacgccgagagcgacgcccacccggcccggacagagaagagcgtcgcccttgacatcgcggagctggcggacaatctccagctcggccccaagttccatctcatcggcttctccatgggcggcgagatcatgtggagctgcctcaagtacatcccgcacaggctcgccggcgtggcgattcttgccccggtgggcaactactggtggtccggcttcccgccggacgtgttcaaggaggcgtggcgcgtgcagtttccgcaagaccagcgcgcggtctgggtcgctcaccacctgccgtggctgacgcactggtggaacacccagaagctgttccgcggatccagcgtcaaggacggcgaccctgccatgctatccaaggaggacaggcttgtagctgacaagttcgagaagcgaacctatgaggcaagcggccattggcgtcgtaggctattgaaatcatga

SEQ ID NO: 13573 - DNA, 345 bp, Zea mays
  Peptide Sequence Number=SeqID_55352
atggcgccgaggtacgtgctgcgttggcacaaacggacgtcgtggcgccgacgtggtaccgagctcggcgccatgaatcttggcgccgagctccgttctgtacagaaaacttgtctagctcagttggtaaaatacaaggttcttaaacttgtggtcgtgggttcgagccccacggaccaaaatgcaaaaaattcgggtactcatgcaaccaagccacaaacgccaggccaagcggagtcccttgcatgtgcgcaaccaggttcaaacaagggcgctgtcatcccatggaccaggttggatttcaactgggcaaccaaaatcgaaatccgtattctccggatctga

SEQ ID NO: 13574 - DNA, 303 bp, Zea mays
  Peptide Sequence Number=SeqID_55353
atggcgctgcccattcctcccctcaccggcggcacggatgccgcggctgtggccaccgccccggacgccggcgccagcacggacctccccactagtgccgccgctctagcacccgccctcctctttccaaccggcaaggacgccgccacccccacgccgccaccgttggactggctgctggccagagcgcagctacagtcacggccatgcctgcacgcggacatgggccgtcacgcgtggctgaccctcaaggaacagttcctcgggaaccgggacgctcaagctcttcacctcgacgcctag

SEQ ID NO: 13575 - DNA, 516 bp, Zea mays
  Peptide Sequence Number=SeqID_55354
atggctgattgtcaatttgcatctccaggaaactcagacagcaaggaaaaagctacatgggctagtcgtggtttaatgtgggaggagtgcatcatggaaagaacacctttggatatgttgcaatggcaagaggagccgagaccttaccgaggagtatttggggaggttagttgccacaatataccaaacctgagtatgcaggtgctaagtcccctcttcattgtggatttgaaatgggggccgaataagaacattgtcgatgacgttgaaggcaaagccaccaagagggttggtccaatcgtggatagcgaggttgctataaatgtggagatccaaaaaggcaatatctgggtcaatccaatttttaggttaatgtgtgtgaagtatggcgcacatgttgttatcgacaaaggaaagggtgttgtattgggtggaggcgagagtagagttgtcattcaaaatggtaaacggaaggcaaaaatagtcggtgcgaaagccaagaggccctatatctag

SEQ ID NO: 13576 - DNA, 225 bp, Zea mays
  Peptide Sequence Number=SeqID_55355
atgggcacttcttcgacaacagtcatcgggggcatggttttgggcatccacatagccaacaccatctcccgaccaatgaaggagattgtggaggcttcaagaactcaggagtacaaaaaatatgattcaagtacaaccaacaagactccatctcatggacctttcccactgcctccaccgcccaagaatgcttcttgcaaggcagtggactcaaaagcaacataa

SEQ ID NO: 13577 - DNA, 495 bp, Zea mays
  Peptide Sequence Number=SeqID_55356
atgagcggttaccgtggaacaccggcgctgcgcaaggatgcagagtggcggcacaccggcgggcgggagtggggctccttcttcgtcgccggcagcggcacaacggtgatgtacccggagcacgcagtggtgccacacttggagagagcaccggtgacggttgtggacgcggagtgcggcacacttggagagaggaaggggcatatgtggtgtgtagaggtagggagagaggagggggagcaatggggggaaggcagccgcgagacttcatggatgagatctttgagggagaggatgggaagaaagagggcgcggagggagcggctgccatggatggaagggggcggaaggagcgcggctgccatgaagggggagcggggcgcgactgatgggcgatttgcggcggatctctggctcgatttgtgggcggggacagaggcgagcggggtgcggctagtgggcgatttgcgggaatctctggtgcggcttccatga

SEQ ID NO: 13578 - DNA, 228 bp, Zea mays
  Peptide Sequence Number=SeqID_55357
atggagcgaggacggtcatgtgggctgctcatgcgaggaggcctcggccacgcatcggcctgctgcgcgtggatgggaaagagaaaccagaggagagagggagaagaagagggggctcacctcacgctcgcgacaacggccaggacggcgaggtgctccgacgagggcgtgggcaacgtcggggcgagctcgcgacggaagccggacgcaacactagcggcggcctga

SEQ ID NO: 13579 - DNA, 2283 bp, Zea mays
  Peptide Sequence Number=SeqID_55358
atgcgcgaccttctcgcgctgcagcgctcgcgatcgctccgggacccgtccacgcgccgctccgtcgagtcgtccagggtggcggccgaccccgacgatggcaccgacgacgacgacgacgacgacgccgatctccccgccaagtcccgccgcagcgccggggcgctcaagacgctcctggaccagctagccgagaacccccatccgaagcccggccgccgcccgccccgccggttcaaacgtcgggcaggccgccgcgccgccgctgccagcaagcctccagaccgcgcggccgcgctctccgtcaactccagctcccaggaggccgtctgcggcaacaaatacctgttccatggcggcggcggcggcgacgacgacggcgatggcgtggtggagctgcagcagcatttgccgcaggactcgcgcaacgtctgtggcattccatggaactggtcgcgtctgcaccaccggggcaagtctatcctcgacatggccggccgcagcctttcgtgcggcctctccgactccaagtcggcggcggggcgaaagtccgaagcgcccgccgcctcaggtgtccgtccccttttccccgttaagtccgagaggctggcttcgtcgaccagttcggactcggacgcgctgcccctgcttgttgaggaggctgccacctccggtgctcgcaaacgcattggcgtcatttcttctggaagctactccggagagcttgggattttctctaaccagacaagcgagatggactccgacctgctgtctgagtctcagtcggggcacaagtcactggcctcgcgctcgcagcatggccgtgggcgtcatcgtagcctgacacagaagttcgcaccaaagacgttcaaagacgttgttggccagagcttggtggtgcaggcgctgtccaacgccatcctgaggaggaagattgggttggtgtatgtattctatggtccgcacggcacgggcaagacttcgtgcgcccgtgtctttgccaaggcgctcaattgcctctcctctgagcaccccaggccctgtgactcatgcacgtcgtgcattgctcacaatctcggcaagagcaggagcctgatggagattgggccggttggcaacatcgacatggagggcattgtggacgtcctcgataatgtgatgctttcacctgcaccatcacactacagggtgtttatatttgatgactgtgatactctgccagctgacacttggagtgctatctcaaaagttgtggaccgggcaccccgtcgagttgtgtttatccttgtcagtccaaaccttgaacttcctcacatcatcctgtcgagatgccagaagttctttttcccaaagctgagggagtccgacattgtcaatacattgcagtggatttgcaccagcgagagtctagatgttgataaagatgcaatgaagctaattgcatctcgttccgatggatctttgagggatgccgagatgactcttgatcaactcagtttgcttggacaaaggatttccttgtctcttgtccaagaattggttggtctggtgtctgatgataaactggtcgatttgcttgatttggctctatctgccgacatggtgaacacagtgaagacactacgagacatcacagaaaccggcgttgagcctttagcactgatgtctcagcttgccacaataattactgatattcttgctggttcgtatgcatttactcgagaaaggcccaggagaaagttcttcaaacgtcctaccttgtcaaaggaagatatggaaaaactacgtcaggccttgaaaacactatctgaagctgaaaagcagttgagggtttctagtgacaagacaacctggcttacagctgctctgcttcagcttgctcctgataagcagtacctgctgcctagttcatcaactagtacaagtttgaaccatggtgtgctggttggtccctttcctgataggggtgtagggagggccccagcagttgagaataaaggtaacctggcaggcacgtcttatggggaaaagagaactgttgaacacacagaaaatggtcatgtgttgtcaaccagttctgtcagagcaaatgagggaactaaactcagaaaagcggaaaatgaaatggtctggcaagctgtgcttgagagtatccaatcagatacattgagaaaaatgatggctaaagaggccaggctaaactctatcagccttggaacaggtaaggttctcaatctgtcatccatatcagtctttgcaaccatcacaattttccaagaataa

SEQ ID NO: 13580 - DNA, 1011 bp, Zea mays
  Peptide Sequence Number=SeqID_55359
atggccggtgcacacgatgatcttgtgacctactccgccaagatggacctcatccttgagcaactcgccgccatcaatgcctgtctggatttccacgacgctcgtctggccaagcttgagcaggcgtgggtcggccccactgcttctatcgtgggcggcatgggcgcgggcaacctgggcgcaagcgagggcggcctaagcgcgggcggaggcggccggatcgaggacgatggggtcgatgtgctgcaacgcggcgcacccagggaggagctggaggcggcgttcggctttgtggaggtccaggcgtggctcgactatggctcagatcaatttctaacatcagcttcctttctgccaacagaaccaacagtgcaactaataattagctcacatatcagtaagtccaaagccgaaaactacagagctcagattctgcaggcatttgagtccgttcttcgttctgctataatacttgaaattcgatatgaatcaaagaatgatgcaaaaccaggtcatactccatcaatgtttccttaccctgagaatgactcgacactgaggaggtcctttactaaacatagtccactctcttctggaggtgagattctaatttcgaggtttaaaaaggatagtgttgtgaagggagctaactctagtaagactagatggatgcaatctgatccccacatattaacagaaggtgaaataattgaagttggaccttctcgcatgcattggcatgctcaaacaaataatgatgttcttgacgtaaatgaaagaagaaaggagaacacatgggaggaagaaacttcgtcatcaccaaaccaagagagcgtgactaatccaaaaggaagaaatgggaacagacagaatcgacagaacagcatagtaagaggaaaggtatctcttgctcatgttattgggagggctgaagcttgttctcagcgaggaggctggtctagacgaaaagctatatcgattgctgaaaagctagagcaagagaatttgtaa

SEQ ID NO: 13581 - DNA, 558 bp, Zea mays
  Peptide Sequence Number=SeqID_55360
atgaatgtctgtatcactgtatggataccatcagcgcatgcagtctggacgtatggataccatcatacgctctcaaccgctcaagccctccaggccagcaagatccaaagctcggtggactcctccaaggtcgtctccaccttctgggctcccgtgctgctggggagtcgcgccagcggaggacggcgacaacggagacgggtgggcctccagctctgccagaatcgcaactccttggttgccttctttgcggctgacgaccccttcgcgctagcgaaggatggcgatgacaaagacgacgaggccatgcggtgcccgcccaaggaagcggatgtagacgccttactgagtggggacgtgataggcttgaaggggctggaatcagcgctcctcctaaggttacagcatgacctcgctaacagcgccggggatgatgacctgactgccgcaatcgacatctggctggcgattgcatttgatttgcaaagaaaacgtgagtacagtggactgcagtgggggcaagcagggagatttactctgaaatacgaggtgctttga

SEQ ID NO: 13582 - DNA, 549 bp, Zea mays
  Peptide Sequence Number=SeqID_55361
atgaaccacggaggcggagccgacaacggtgtgagccccggcaacgtcccggtgtgctactacggcgcggcggggcgcgtgccggcggcgctggagcggcgggtgcgcgccgcggagctgttcatgcggtgcgcggcgtgcgggctcgcggtgctcgccgcggcgctgctgggcgccgaccgccagacccgcaccttcttctccgtggagaaggcggcccggttcaccgacatgcagtcgctcgtattcctggtgatagcaaacgggatggcagcgtgctacagcctgctgcagggcgggaggtgcctggtgatggcgtacttcacgatctcggcggtggccgtggcgatggaggcggcgatgatcggcaagtacgggtcgcagcagttccagtggatgaagacgtgccacctctacaagcgtttctgcgcgcaggcgggtggcgccgtggcctgcgcggtggcggccagcctgaacatggtcggcgtctcgctcgtctcggcgttcaacctcttccggctgtacggcagcggcaaagggaggaagtga

SEQ ID NO: 13583 - DNA, 195 bp, Zea mays
  Peptide Sequence Number=SeqID_55362
atgggctgcgcgggagtgaagggatggtgggccgaaatcgttagtctgcggcccaggttatcctccacaaattacaagttgggtattaaaaatcctaccccccttaaaaataatctcgtcctcgagattagtaagcagaagggttataccgagcttatggttgttattctagagtgggataaatatgttgattag

SEQ ID NO: 13584 - DNA, 411 bp, Zea mays
  Peptide Sequence Number=SeqID_55363
atgaagccacgctgcctcggcgacaccgttggccacatcgcggtactcagcctcggcctcaccgctggagtgggagacatcgagctgtcttttcaaaaaccagaatccaaggttgttgccaaggaaaacaacgaaacgggaagtgggccgataggtgtcgggacaaccaccccaatcagcgtcggtgtagatagcaaggttgatggtcacagattgacaaaggagaatgtcaaagttggtggtgccacagaggtaccgaaggatccgcttcgtagcagtgagatgtggctcccgcggggcgtacatataatggcatacctgatggacgacgtaggcgatgtcggggcgtgtgaagatgaggtactacagggcctcgataagactccgacagctggctggattagctactag

SEQ ID NO: 13585 - DNA, 537 bp, Zea mays
  Peptide Sequence Number=SeqID_55364
atggagcacgtggggcgccatcattatttgtcttaccggggcgagccagatgggacgccgccctgggtagggcgaggcggaggctcctccgaggtcgaggtcgagtctgtctctgaggtcgaggtcgagtccgagcccttgggttgggcgaggcagagaccatcggctgaggccagggctgagtccgagccctgtggtcgggcgaggcagagttcgtcgtcttccggggccgaggccgagtccgagccctggggtcgggcgaggcggagttcgtcgtcttcccggggtcgaggccgagtccgagccctggggtcgggcgaggcggagttcgtcgtcttccggggccgaggccgagtccgagccctggggtcgggcgaggtggagcttcctatggcgcccgaggccggacttggctgctgtcagcctcactctgtcgagtggcacagcagtcggagtggcgcaggcggcgctgtcctcttgtcaggccggtcagtggagcggcgaagtgactgcggtcactttggctctgtcgactga

SEQ ID NO: 13586 - DNA, 776 bp, Zea mays
  Peptide Sequence Number=SeqID_55365
agagccgattctggagattcgtccatcaggccattcttccgccaggccgtcgtcagcgccgagcacgaggcgacatctggtgcgtccgcaccctcgacggcggcggcaccagccgggagtaccgctccaaatggctagtcgtggccacaggcgagaacgcggagcccgtcgtgcctgacatcgacggcatccatgccttcaggggcctcgtcatacactccagtgactaccgcagcggcgagagctaccggggtaagaaagtgctcgtgatcggctgcggcaattccggtatggaggtgtctctcgacctctccaaccacaatgtacacacgtccatggtggtgcgtgactcggtgcatgttcttccaagagagatcatgggtgtctccacttttggtttgtccctatggcttctcacgcatctatcaattcagaaagtggaccaaatactcctggtgctcacacagcttgtgctaggagacaccgcacgcctcggcattcctcgacctaacattggtccgatggagttaaagagagtctctggaaagacaccagttctggatgtgggaactatagccaagatcaaatctggagacattaaagtgtatccagcaattcaaagttttcaagagcatggggttcagtttattgatggcaagtctgaatcatttgatgttgtgattcttgccactggatataaaagtaatgttccttattggttgaaggataaggatttgttttcagagaaaaatggatttccacataattccaaatga

SEQ ID NO: 13587 - DNA, 486 bp, Zea mays
  Peptide Sequence Number=SeqID_55366
atgtcttggtctagtgggcacgtgaggccaaatgcgcagcaactccgtggtgagttcaatgtcttggtattgaaggagacgaagaacacggaagattttgttgactgcattaccaggcttgttgttgatctatgtctcctcggtgacaacatcactgacaccaaggtgaccagtaggttgcacactatcgagcagcaacacaagccagcgttcgtccttcacaactatggtcgactgcttctctgtaaagaggacagttcaataggctcaaagtccacaagtccaaggagaggggcggcaggagtagctccactagcgctagcaacaaaaagcacagtggccacaggtattgtcgtagcaagcccaagggtcacaatagaaggatttggcactatgttgtttaaggacaagatctatgagcacctcccgctcatgggggtgtacttcatcctaaggttgaataccaacaccatcagccttggctag

SEQ ID NO: 13588 - DNA, 909 bp, Zea mays
  Peptide Sequence Number=SeqID_55367
atggaggaggagatgttcctggcggtgaagcggacggagcacgtcgaggtcacttcccgggcgatggattccgcgccggcggcggggcccaggacggtgcgggtcttctgcgacgacaacgacgcgaccgactcgtccggcgacgaggcggagggcgcggccgcgcgcaggagggtgaagcgctacgtgcaggagatccggctgcagcgggcggtgccgtacgcggcggagatccgcgacccctggcgccgggtgcgcgtctggctcggcaccttcgacaccgccgaggaggccgccaaggtgtacgactcggccgccatccagctccgcggggccgacgccaccaccaacttcgagcacgcggcggtccccgtccccgtccccgacgaggtcgcgggtcgcctcccgcagccgccgccggctccggcgtccaagaacgcgtcgtcctccgccacgtcctcctacgactccggcgaggagtcccacgccgcggcggcctcgccgacctccgttctccgcacgttccctccgtcctccgcggccgccgacgccacctgcaagaaaccggcgccggccgcggagaccgacgagtcgaccggcgtcggcggcagcaggagcagcgtgtacgcataccccttcttcgccaacgacgactgcttcggcggcgacttccccccgctgtacactgacttcgacctgctggccgacttcccggagccgacgctggacttcctggcggacatccccgaggagaagctgccgccgctgccggagccgttccccgcggcgagccccgacgagtgcccgtccgacgcggaggcggcgtcgccggcgaggtggcagcaggtggacgacttcttccaggacatcaccgacctgttccagatcgacccgctgcccgtcgtctag

SEQ ID NO: 13589 - DNA, 405 bp, Zea mays
  Peptide Sequence Number=SeqID_55368
atggcgcaccggatagtgtccggtgcacaaggaccgtacaactcaaacaaccactctcgagaaaacgaaggcgcgctccgctataattcaccggactgtccaatgagccagcggagcaatgactctctgcgccaatggtcgactctgcaaagtgctacagtgaagaacattgtcgtgcagaagtcagagcagcgaagtcagaggggcaccggactgtctggtgtggcatcggactgtccggtgctgcaagaagacaaagctccaacggtcgatcgagctccgaacccttatggttgggtgacatggcagcgcaccggacaaggaacagtgcctatccggtggcacaccagactgttcggtgcgcccttcgccagcagcctccccaatggctatggaagtggttga

SEQ ID NO: 13590 - DNA, 120 bp, Zea mays
  Peptide Sequence Number=SeqID_55369
atggctggaaaaagaaggtggcgaacacagagatgggaactttaccgaggattagatcaccgggaagctcgcccaccaatcacggcggaggaaaagcaagccacacaacagttcaactag

SEQ ID NO: 13591 - DNA, 453 bp, Zea mays
  Peptide Sequence Number=SeqID_55370
atggcacatttccctttcagtctccttaatgtttcgacctccgcgtgtaagaccgtggagccccaggccctcaccgggggcccatccattggcgatttcaacgctgctacgaacatcacgctggggtcatcgccctacctatctttgagccctctgtgggtctgggggtgccattcatgcaacttttgtcaatctgtcatacccgtgcgggtcgagcccctactcgatgcagaggtccatctgggggcttgcctcatctttttgggtttactctcccccgtgcatccccttcgcgggtatgaagagaggagcaggatccaagcttggggtccgctggggaccgtcctcatactcccagacaccgactcatatagttgtcgatcctattcgaccaggacagatgctcctgtgaaaggaatttcgaacgagtttagggtcctaaccggaaagtaa

SEQ ID NO: 13592 - DNA, 687 bp, Zea mays
  Peptide Sequence Number=SeqID_55371
atggcgcggccccgacgaagggcgcagcatggtgcgttgcgtggcgcgatcttggcgccccggcccggcacgacgcgtgcgtccccgacctatcgcggcctacaaccatggcacggctccggcgcggtgcgcggcgcgccctcccccaccccgagatcctctgcctccctcgcgctcggccctcggcgtggcgagcgcgacgccttggcgcggaccatcatgcacgcgtgcccccagcgtggtccgccgagttcgcgacatggcgcggccgtggcgctcgggccccgccccggcacggtggccctccccacgcggcggccccctgctgccccggcgcggcccccgatgcctgcgcgtggcgtgcccgacgcagcctgcccgcggcgggcgcgcgacgtgctcgacgcagcctgcccgcgacgggcgcgcgactcgttcgtggcgcgaacgactcgttcgctgcgcgcgcagcgtggccagctcgcggtgtccctggccccggtggcgatgagaatggtggttttggtattgactatggtaatggtaggtgttcatacagtgggcattaaatgcgcacgtcctgaggttctgagaatttggctgagggcgggctggccctggacttcgcccgagatgccctcgggtgaggcagaaatgcgttttttgtccaagggtgtcctcgggtga

SEQ ID NO: 13593 - DNA, 372 bp, Zea mays
  Peptide Sequence Number=SeqID_55372
atggagagtcatgatctccgggcagaaagggaatcacgacttgtgggtggcgatgagaatggtggttttggtattgactatggtaatgaaatagtgttgaaaagagaggaatcggattgcaaaagacttggctgtgagcagcccaaacttcagctcggactggcacaccggactgtccggtggtgcaccggactgtgtccgatggcttgtcttagacacactgcacggaagtccgtcatccccttcttgccctctcatctcgctgagcgcccgcttcgccatctagtgattggtcagtctagccacttggagaggctgcaccaccgcctgcatgaggagcaggagcatcgacgacaggagctggatcagtag

SEQ ID NO: 13594 - DNA, 1686 bp, Zea mays
  Peptide Sequence Number=SeqID_55373
atgcccttcccctcccgccaccagcgcctggcgtcgctgacgaagctgctgaccacccacgtgaacgccggccgccaccgcgacgcgctcggcctcttctcccgcatgctctcggcccccgacctcccgccgctcaccgacccctccttcgcccacgccttcccgctcgcgctcaagtccgccaccgcgctccgcgtgcccggcgccgccgcctccttccacgcgctcgccgccaagtgtggcctgctctccagcccctttctcgcctccgcgctcgtcgcgtcctacggagcgcgcgtcgtcggcggtgcctgcggtgcctcctacgaactcactcgccgcctgttcgacgaattgcccgcccgcaacgccgtcgtctggagcgccatgatctccgtccacgtccgggcgggagacctcgccgccgcggcgtgggcgcttgaccacatggacgtccccccgactgcctcctgcttcaacaccgtgatagccgcggtcgccgagtccagggaacacccagcccgagccatcgaggtgtaccgacacatgcgaagagtgggcgtcccgccgagtttcatcacgctgctggcgctcgtccctgcatgcaccgtgataggcgcattgacttcgatcaaggaggtgcacggctttgcagtgcggcatggcatgtgcgcgagatcccacattggcagctccctcatcgaagcatatgggcgctgcggttctcttgctgccgcgcagagggtttttgaccaggttcatgatcgggacgtggttgtttggagctctctggtttcagcctacgctttccatggtcgtgcggaggtcgcaatgtcgcttttccaacacatggaggaccaggatgatgttcggcctgacagcatcatgttccttagcttgatggcggcctgtgcccattctggtcatgcagatgacgcattgcagtatttcgatgtgttgaccaggagatatggagtggaagcttgtggagaccattattcgtgcttggtggacgtcttgggccgggcaggacggctgcaccaagcttatgaacttctacgaacaatgccagtaaaggttacagcaaaagcctggggagctcttcttgctgcatgcaggaaacatggggatgtgcggttggcagaggttgccgggagagcattgtttgagatcgaaccagagaatgcagggaattttgtttcgctcgcaaacatctattcaggtcgtggcatgcatgaggatgcagagcgggtgagaagggagatggagcagcgagtgaccttttatgaaaagtcaggcatacaattcagaagtgtcatcgttggtgcacagaaaattttgttcagatgcagcgaccatttatccatggaaagaatcatgaagttctcttctggcaatggagtgaatcagctgcaacagtcaaaacaaccagctttaatccgaagcgaacagaaaagagaaattcgaaataaaaaggaaaaacgaaaccctaacggacggcgtggatgggatggtgcaatacaacggacggctgtgccaaaggttcacaataagccaataaaaagaccaagaaaaagggttcaaacaaaagagcaaagggacaaccgaaggcaccctggtctggcgcaccggactgtccggtgtgccaccggacagtgtccggtgcaccagaggacttcaagctga

SEQ ID NO: 13595 - DNA, 351 bp, Zea mays
  Peptide Sequence Number=SeqID_55374
atggaggagctcactgctgcacctgtagtgggcgccgagcagagctggaaacagccgagcagggagctcgcagagggcgccatgggagccgatccctgctgccggaagtggaagaaaaaagggggcgccgtagggaagggtctctgcctactgccgagcgcaggaaggagcaatggaggtgagggactacttttaaaggcggtgctcgctgcagccattggcggacacgagcggcatgctgcagagctcagtttcctgagagacatagaaaggaacacgtattgggtgactgttttcatcgttttctgtttggaatcggaccttgaccaatgcagaaaatatcttccttga

SEQ ID NO: 13596 - DNA, 195 bp, Zea mays
  Peptide Sequence Number=SeqID_55375
atgcggcaacaagacggagtgggttctccggggcttgcgagcgaggacgagggggtcacggcctcgggttgtatactcgaggttaagagtcggttggcgaggaatccggaaggggctcatgcgattggtggcggcgtagggaccccgcagaccctctccgcgcaggcacccgatccactaatggcgacaatctaa

SEQ ID NO: 13597 - DNA, 216 bp, Zea mays
  Peptide Sequence Number=SeqID_55376
atggccaagggagcgttcccacgaaagaacacaaccactcagacgcggccaccagcgaggaacctcgacgttgaagctggagtaatcaaaggcgtccgatctgcaaaaactgagacggggaaaatggagcagggtcgacggctcgacggcgcccacggctttgggtcgggctcagctttggtttacttagaagtcagacaaaaatttatctggtaa

SEQ ID NO: 13598 - DNA, 255 bp, Zea mays
  Peptide Sequence Number=SeqID_55377
atggccgtgatgggttcaacatcggaaaagatgtacctctacaaggtaccaaactttggggttttaaatgataaagctgagaccggacagcttagcctcggacagactaataccagaaaggccaacacgcaatgggagtggagagatggcgagagtagcgtgtacccttcgtggcaagaggctggacggtggtgtatctatgctctcggttggcgtgaacccggtctggtcttaacaaacccggtggcgagttga

SEQ ID NO: 13599 - DNA, 549 bp, Zea mays
  Peptide Sequence Number=SeqID_55378
atgaccgctacgtgcagcagcggggggcgtaacttgcgggtgacgttaaaaactgtcggggatcataaagctcattggttccttaaaagtgaggaaattgacaaggttcgcaaatgttttgctggcttatggagtttggatgacgaatatattataaaaactgcagtggaaaaacctgagttgtttgtattgaagcctcaacgtgaaggcggagggaacaacatctacggtcttgatttgagggaaacgcttgtcagactacagaaggaaggaggggatgcgcttgcagcctacatactgatgcaaagaatcttcccaaaagcttctcctgcttatctcgttcgtggtggtgtttgccacgagggtcttgcaatttctgagcttggaatatatggagcttatctgcgtaacaaagataaagtggtgatcaatgagcaatgtggttacttgatgcgaacgaaggtttcttcatcagacgaaggtggcgtagctgcagggtttgctgttttggatagcttatacctgactggcaagataaacagtttctga

SEQ ID NO: 13600 - DNA, 521 bp, Zea mays
  Peptide Sequence Number=SeqID_55379
atgggttttgattggtttggcgcgcaggcgcggagacgtctcccggatttggagacaacgcacgatggaatgtgcactgagatggacgtgactgccttcgcggagcaagttgcctcaggggcgctgacctcgcagtttgtttctgagaggagacggctcgagggaaggattgagcgccttcgaacgcagcacacggaggcaaccgccccttttgacgagttaggggaggaggtgggggtccgctttctggggtggttgcaagatgatggactcgctcccatctatcgtgatgggtctcaagtcctacgcgtctctcgttacttgcgaggggctgcgaatgctttgtctcatgagggatgcagacattttgaagttttcgaccgagcgaacgaggacttcaattgtggactcttccaaattgaagatgacgtgctgaagcacttcgctggggcactttatgataggatgtggggtccccacggccgcaacatcgttcaggaaagggcggaccaagcgctggc

SEQ ID NO: 13601 - DNA, 390 bp, Zea mays
  Peptide Sequence Number=SeqID_55380
atgccggagatggatttgaagtggaagacttctccggggttgaaggatggcgtcgttgatcgcgactcgatggtttgtgccgcagcatgcaaggatgactcgtggacttatacagacggtatccctacatatccggagtcctcttcatccatccgtccgagttaccgccgagggtttagcctgtcgggtttcaaatgcacccttgctggccatggcaagctcagcaagtcagcatctgctgcccggcgccgtacaattccgctgccaaaagcggatcggatcgcaggatgcacgcaggctgctgccggcctgccgcagctcgccgcctgctccaatcccatcggcgcgccggccgcgctcgtcaagcagcagaggttcctgaactgctag

SEQ ID NO: 13602 - DNA, 183 bp, Zea mays
  Peptide Sequence Number=SeqID_55381
atgaagtattatttgagttttctcgtgacctatggtccgaccgtaccggtacaacttagcatcatattgttgacgcatggaggtgttatacaaactattgtggctgttcgaggaagtgagatggtgtttgatgctttatcaaggggagtgggaagtagcggcacgtttgcacacagtgcttaa

SEQ ID NO: 13603 - DNA, 231 bp, Zea mays
  Peptide Sequence Number=SeqID_55382
atgggtatccttgagaggatcaaggagattgaggccgagatggctcggactcagaaaaataaagcaacagaatatcatcttggacaactgaaggcaaaactagcaaagttgaggacacaactattagagcctccaaagggttccagcggaggtggagatggttttgaagtcacaaagtttgggcatggtcgtgttgcacttattggatttcccaggtatcctttcacttga

SEQ ID NO: 13604 - DNA, 1353 bp, Zea mays
  Peptide Sequence Number=SeqID_55383
atggacgatcacgatgtcgtccgtatcatgctaaggtcatttatcgttcttgattctaatcttgttaacttgatccgtgagagtaccaagtacaccaagatgacgctcgaggagatccttggcaaatttaagatatcgctggtgatcaaacgcttcaagactgctttgaaggggcacaaggactactccaacaagaacaaatcaagggaaaagtgtggcttcttcaagtgtgagagagagttatttagagaactattggatgctctaatcctaccatcacaaatgtcatgctcggagcctacttgtgcttccgagctgcatcagcgtgcttgcacgtggattggtgctgaaaaatgccagccgtcggatcagcgggctcgcgtgccagatctatctggacctcaagagcccattgcggtccagaggaacccagcgtccacaccacagcccacggctgagactcagatcatgcatcgttttgtcaaggaaatcgccgcaaccgatcctccagagcatctcaactctctcctcaatgtgcttcaagcacgaggtgaaaagattgtttctcctggagcaaaaagagggttgattccatgtgttgttcccttatcagaaagtccagcaggtgatttgacatctctccttagatggccaaccgctccaactgggtacactaaatatactgctatttttatatccatggtgaaacagtatatccacagaatacttgttgaggctgacttcagtgctggaactggtgatgatttatgggctgctgtgggcgaagctggtaaaaacctttacgctaaaggcgaattcaaagagtcgcaggtggcagaccttgatgtctatttgttgaagaaggttggacttttccctgatgttatagagaggaaaacattgcgccatctcgaaaaaggagataatgtctcagctctcattactggagaattctatactagagatcaatttccaggatttggaagaccctttgtgttcaatgcagagatttttaaaagagttggacgtacatctgaagccaaagattcagctcgagtggctctgaaatcaccatggtggacacttggctgcagttacgaagaggctgctgaactagctgggtgggaggatgagcagctagagtttataagagagaaggtaactgaggagggtaagcgcgaggacctgaagagaggaaaggctccagaacaggtgattcttgacgaggcggcattcttaatggatttagcgtccgtggatggtaactgggacgaggttgtggatcggattgctgaatgttacagagaggctgggcttcatgacattgcgaatttcattgcctacagggaatag

SEQ ID NO: 13605 - DNA, 258 bp, Zea mays
  Peptide Sequence Number=SeqID_55384
atggctcttttggatattgatcccttggctttgggacatccctcgccccttgggcctttaagacacaaagggctctcagggccatcaggggttcttgggtgcgttgcgctgtccaaggcccttaatgaggccctgtccaaaggtgtcagggttgttggtccgtctaaggctgatcgcgtcgagggcttggactcggtctccgttgaggaggtattgtgctgtcaacttgtcgatgtctgtggttgcattggggtctaa

SEQ ID NO: 13606 - DNA, 2364 bp, Zea mays
  Peptide Sequence Number=SeqID_55385
atgggaacaatggttgcagcggtggcgttgcgagggggaagcagcgatagcggaggatttgataaggttcccgggatggactcgggaaaatacgtgcgctacaccccggagcaagttgaggtgctcgagcggctctacatagattgccccaagccaagctcctcacggcggcagcaactgctgcgcgagtgtcctatactctccaacattgagccaaagcagatcaaggtctggttccagaaccggaggtgccgcgataagcagcggaaggagtcttcgcggcttcaggctgtgaacagaaagttgacggcaatgaacaagcttctaatggaagagaatgagcggcttcagaagcaagtctctcagttggttcatgaaaacgcgcacatgcggcagcagctgcagaatacttcattggccaatgacacaagctgtgaatcaaatgtcactacccctccaaaccctataagggacgcaagtaacccttctggactccttgcgattgcagaggagaccttcacagagttcctctcaaaggctactgggacagctattgattgggtccagatgcctgggatgaagcctggtccggattcagttggtatcgtggccatttcgcatggttgccgtggcgttgctgcccgcgcctgtggtttggtgaatctagaaccaacaaaaggcatagagatcttgaaagatcgtccctcttggttccgtgattgccgaagtcttgaagtgtttacaaggtttccagctggaaatgggggaacaattgaacttatttacatgcagatgtatgccccaacaactttagtccctgcacgtgatttttggacactacgatacacgacaacaatggaagatggcagccttgtggcatggagtgttcctgaagtgcttcgaccactgtatgagtcttctagagttgttgctcagaaaatgactactgtggcactgcgccaccttagacaaattgctcaagaaacaagtggagaagtagtgtacgccttgggaaggcaacctgcagtcctacggacctttagtcaaagactaagcagggggtttaatgatgccattagcggtttcaatgatgatggctggtctgtaatggggggagatggcattgaagacgttgttattgcttgcaactcaaccaagaaaattaggaataccagcaatgctgggattacatttggagccccaggaggcattatttgtgcgaaggcatccatgttactgcagagcgtcccaccggcagtactggtacgatttctgagggagcatagatctgaatgggctgattacaatattgatgcgtatttggcttcatcattgaagaccagtgcgtgctcacttcctgggttgcgacccatgagattttctgaggggcagatgatcatgccacttgctcacacagttgagaacgaggagattcttgaagttgtccgccttgaaggtcagcctcttactcatgatgaagctcttctttcaagggacatccaccttctccagctttgcactggaatagatgagaaatctgtgggttcctccttccagcttgtgtttgcaccaattgatgagcatttcccagatgatgctccattgatttcttctggctttcgtgtcataccacttgatgatggtgtatcctctggtaggacgctagatttggcatctagtcttgatgtgggctctgctgcaccccaagcctcaggggaatctccagatgactgcagtttgagatctgtgctgacaatcgcctttcaattcccgtatgagatgcaccttcaggacagcgttgcagcaatggcccgtcaatatgttcgtagtgtcatttctgctgtgcaaagagtgtcgatggctatatctccctcccaatctggtctaaatgctgggcataggatgctttctggcttccctgaagctgccacacttgctagatgggtttgccagagttatcactaccatctaggtatggaattacttaatcaatcagatggagctggtgaagcattgttgaaaatgctctggcatcatccagatgctgttctgtgctgctcctttaaggagaaacctatgtttacgtttgcaaacaaggcagggctggacatgttagaaacatctcttgttgccctgcaagacctgacgctagacaagatcttcgacgagtcaggaaggaaagcactattctcagacatctcgaaactaatggaacagggctacgcgtacctgccgtcaggcgtgtgcatgtcaggaatgggccgccatgtttctttcgaccaagctgtagcgtggaaggtgctcggcgaggatagcaacatccactgcctggcgttctgcttcgtcaactggtccttcgtgtga

SEQ ID NO: 13607 - DNA, 1176 bp, Zea mays
  Peptide Sequence Number=SeqID_55386
atggggtcatgcctaatcgaaactggcagaccccgtacctgcaatatctccaccgaggagagctacccctcgactgagccaaagctcggcgactggcgcggcgcgccaagtcgttcgtcttgctgggtgacggaaaggagctctaccaccgcatcccctcaggcatcctccagcgatgcatatccatcatcgaaggtcaggaactattgcaagaaatacactcgggggcttgcggtcatcacgcagcgcctcgagcccttgttggaaacgccttccgacaggggtttctactggccaaccgcggtggccgacgccactaggattgtacgcacctgccaagggtgtcaattctacgcaaggcagacgcacctgcccactcaggccctgcaaacaatacccatcacctggtcgtttgctgtgtggggtctggacctcgtcggtcccttgcagaaggcacccgagggctacacgcatctgttggtcgccatcgataaattctccaagtggatcgaggtcagacccctaaacagcatcaggtccgaacaggcggtggcgttcttcaccaacatcatctatcgcttcggggtcctgaactccatcatcaccgacaacagcacccagttcacaggcagaaagttcgtagacttctgcgaggaccaccacatccgagtggactgggccgccgtagctcaccccatgacgaatgggcaggtagagcgtgccaacggcatgattctgcaaggactcaagccacagatctacaacgacctcaacaaattcggcaggcgatggatgaaggaactcccatcggtggtctggagtctgagaacaacgccaagccgagccacgggcttcacactgttctttctagtctatggggccgaggctatcttgcccacagacttagaatacggatccccgaggacgagggcgtacaacgaccgaagcaaccggaccaaccgagaagactcactggaccagctggaagaggctcgggacatggccttactacactcggcaaggtatcagcagtccctgcgacgctaccacgcccgaggggttcggtcccgagacctccaggtgggggacttggtgattcggctacgacaagacgccgaggacgccacaagctcatgcctccctgggaagggccattcagcatcgccaagattttga

SEQ ID NO: 13608 - DNA, 360 bp, Zea mays
  Peptide Sequence Number=SeqID_55387
atggggcaggcgctctcttggggccgctcgcttctctcacccgcgtggacgcttgtaaccccctactgcaagcgcacccgacctgggcgcgggtcgaacacgaaggccgcgggattcccacctctctcacgactcgtctccggccacctcgcttttccccccttcgcgctcgcccacgcgctcgacccatctgggctggggcacgcggcacactcactcgtcggcttagggaccccccggtctcgaaacgccgacaagtatttctattttgaggcctacacatcaggtgggtttggcagttacctatttggtatgagtcaaggcattgctaagcaagcagcagaggccaatgatgcctag

SEQ ID NO: 13609 - DNA, 351 bp, Zea mays
  Peptide Sequence Number=SeqID_55388
atggagatagggcagtacgccacgagcagcttctccaaggagcatcagaagatctataggagtgatttcctaatttcgttccccctactctgtttccttcgactggggcaaccattcctggtggacgagctcaagatggttgtccgcctccgcgggccgctgcggcgggacgccgtgtgggaggcggtggacgccgacgtggcggagcccgtggccgatgagatgctcgccagcgccaggaggtggagcgcggcggcgtgggacgcaatggcgcccgacgggtcctcgaacgtgctcacgcgcctcagcgcctgtctaggcgttcgtggacaaggtgtccccgcgagctaa

SEQ ID NO: 13610 - DNA, 2178 bp, Zea mays
  Peptide Sequence Number=SeqID_55389
atggccactgcaacgcaccacagcgacgccccgggcctgaacggggccgagggcatggagatgatggcagaggccaacgagctccgccggcggggcaagcccagcgacgaccgcacggcgtcgtatggggccggcgcggaggaggacgaggcggcggccgcggcggcgccgtcgtcgtcgtccgtggagcgcgcgttcgcggaccagcccgtgccgtcgtggcgggagcagctgacgctgcgcgccttcgtcgtcagcttcttcctggccgtcatgttcagcgtcatcgtgatgaagctcaacctcaccacggggatcattccgtcgctcaacatctccgctgggctcctcggattcttcttcgtccgcctctggaccaaggccatcgagagcgtgggcttgctccggcagcccttcacgcgccaggagaacaccgtcatccagacctgcgtcgtcgcctcctacggcctctcgttcagcgggggctttggtaactacctattagccatgagtgataaaattgctgccatggtaactgaggcaaacaatgctcaaaatataaagaatccacaacttggatggataatcggtttcctgttccttgttagcttcatcggactcttcggtcttgtgccactgagaaagattatgatcgttgactacaagctgacttatcccagtggcactgccacagcctaccttataaacggctttcatacgccccagggtgccaagctcgcacggaagcaagtaaagaagctgggcacgttcttcgtccttagcttcgtttggggtttcttccagtggttctatactgctaacccggacgaatgtggattccaaaaatttccatcactaggcctgcaagctttcgacaacaagtttttctttgatttctctcctacgtatgttggggtgggaatgatttgctcacatattgtcaacgtatccattctcctgggagctatcctctcatggggaataatgtggccgctcatagccaagaaaaagggagtttggttctccgctgatctcgacgacaacagtcttcacggaatgcaaggttaccgggtcttcatagccattgccttgattctcggggatggtctatacaacttcctgaagatattcatcctcaccgtggtctcgttaagatctcaagtaagaaaagctaacgctagcacacttcccatctctgacgatggcacagttaccagcaccgcacctacctcatacgacgaagagcggcgcaacgaacacttcctcaaagatcaaattccttggtacgctgcacttggaggctatgtcgccattgccgccatatctatcggtactgtcccacaaatattcccacagctgaagtggtaccacatcttggtggcctacatttttgctcctatactcgccttctgcaatgcctacggaaatggcctcacggactggtcgctggtcaccacctacggcaagctcgcgatcttcgcattcggtgcatgggtgggcgcctccaatggaggcgtccttgcaggcctggctgcctgtggcgtgatgatgaacattgtgggcaccgctgctgacctgatgggggacttcaaaaccgggtacctgacactagcctcaccgaggtcgatgttcatcagccaggtcatcggcacggcgatgggttgcgtcattgcgccctgcgtgttctggctcttctacaaggccttcggcaacatcggcgtcgctggcagcgagtaccctgcgccaaacgccgttgtcttccggagcatggcagtgctcggcgtggatggcttctcctcgcttcccgagaactgcctcactctctgctacgtgttcttcgctgcagcgatcgtcatcaacctgatcagggacctggtgcccaagaaggtgtcgaggttcatcccgatcccgatggcgatggcgatacctttctacatcggtgcgtacttcgccgtggacatgttcgttggtacagtgatactgttcgtgtggcaaaggctggacagagccaaagcagacacgttcgcgcctgcgattgcttccggcatgatctgtggtgatgggatatgggttctacctcagtcagtgcttgctcttgccaaggtgaagcctcccatctgcatgaagtttctgtcgagggcgatgaatgacaaagtggatgtttttcttggatcgtga

SEQ ID NO: 13611 - DNA, 423 bp, Zea mays
  Peptide Sequence Number=SeqID_55390
atgtgggttcttgttgctaagttgaaaagaggggctttagacatatctaatttgaatgttgatgatcgaactaaagtgttctattttgatttctcagctacttatgtctcttctccttggaggcatcatttcgtggggagtaatgtggccacttatcagcacaaagaaaggaagttggtatcaatgtattggaagaaacatgccaacacacttgctgtgtcggacaatgggacaccacctccggccccaactgaaactgggtcatttgatgacaagcgtcgcattgagctattcgttaaggaccagattcccgaggcagttgcattgggtggctatgttttgttctggcagctatatcgatcggctgtctccctctcattatccctcagatcaagtggtaccacatctttgcacctgtactag

SEQ ID NO: 13612 - DNA, 2199 bp, Zea mays
  Peptide Sequence Number=SeqID_55391
atggctccagcagcaggcaccgccaccggcagcgcttccggcggctcagccgtacacgacgatgccgaggccgtggaactaggccacaacaacctgatccgccggcgccaccccggcgccgacgtcgaagacgaagccgacgacaggaacgtcggcgccagtgccgccgccggtaaggagctggccccgtcgtcggtggagcaggccttcgcggatcagcccgtgccgtcgtggcgggagcagctgacggtgcgcgccttcgtggtgggggccctcctctccgtcgtgttcaacgtcatcctcatgaagatcgacctgaccacgggcatcaacccgtcgctcaacgtctgcgccagcctcctcagctacttcctcctccgcacctggaccagggccatcgggtgcatgggcttgctcaggcagcccttcacgcgccaggagaacaccatgatccagacctgcgtcgtctccgcctacggcatcaccttcactgattctaatctaacaggtggatttagcagttatctgtttggtatgagtgcaaaaattgctaacaaaacagaggtgaacgatcctcaggatatcaaggatccccatcttggatggatgatggggtttatgtttctcgtcagctttcttggtcttttcgctctggtgcctctgagaaaggttatgatcgtggattacaaactgacttatccaagtggcgctgcgactgcttacctcatcaatggattccatgcacctgagggttctgaacgtgcaaagaaacaggttaggacgttaggcaagtacttctcccttagtttcctttgggcgttcttccagtggttctacaccgccgggaatcactgcggatttggttctttcccaacgctcggccttgaagcctataaaaataggttcttttttgatttctcacctacttatattggagttggaatgatctgcccctatattgtaaatgtgtctcttcttcttggaggcatcatgtcctggggaataatgtggccattgatcagcacaaagaaaggaagttggtaccccgagactcttccggatagcagcctgcatggactgcacggctacagagtgtttctaaccatatcagtaattcttggggatggcctgtacaacatcttgaaggtactttatagcacaatcgaagccttcgtatcaaggtacaggaatagaaaagcaaacacgcttcctgtgtcgaacgatggcacccctgctgatgccaccactgaaaccgagtctttcgacgacaagcgtcgtcttgagctattcacgaaggatcagattcccaagacagttgcgttgggaggctatgtcgttctggcagctataacaatcggttgtctccctctcataatcccacagctcaaatggtaccatattttggttgcgtacatcgtttcacctgcactggccttctgcaatgcctatggatgtggcctaacaaactggtccttcgcaagtgcctatggtaaacttgcgatctttagcttcggtgcgtgggcaggtgcttcacatagtggtgtgattgtggcactggctgcgtgtggtgtgatgatgagcattgtgggaacagctgctgatctaatgcaagacttcaagactgggtacctgacactggcctcaccaaggtccatgttcataagccaagtgataggcactgccatgggctgtgttattgccccctgcgtcttctggctgttttacaagtcgttcgatgttggagccaccaatggcgcttacccagcaccttacacatttatgtaccgtaacatggcgatcatgggcgtcgatggattgtcccttccaaagcattgcctgacattatcctacatcttctttgcggccgccttcgctgtcaatatggtcaaggacctggtgccgaagaaggtggcgaagttcatccccatccccatggcagtagccattcctttctatgttggagcatacttcaccattgacatgttcttgggctgcacaatactcttcatttgggagatgagaaataaagctgaagcagactcgttcggaccggccgttgcatcaggctgcatgtgtggtgatggtctctgggcactacccgaggctattctttctcttgcaaatgtgaaacctcccatttgcatgaagtttctgtcaaggtctgttaatgccagagtggactccttccttgggaattag

SEQ ID NO: 13613 - DNA, 261 bp, Zea mays
  Peptide Sequence Number=SeqID_55392
atggccggatctcgcgcccccctgctccatctgctcggcgccttttctctgcccctcatccatggtggctcgactggccatggcgcccgggttccctgcaacctcctctcctctgcgacaacaagcttcctctacctctcctctcggatccatggccactgctcctcaggtgccatggccaagctctcccctacgacaacagtcgctgcctacctcgcccaggagcacggtcctcagcgcccgcgcctctcagggctctag

SEQ ID NO: 13614 - DNA, 183 bp, Zea mays
  Peptide Sequence Number=SeqID_55393
atggaagctgcttgttttgcttcggcggttgaagaggccccttcgccaaattcagcgggtagtgataatcagggtaaacgaagccgattgcatcaaatacccatgttcaatcttttcttccctgggcccccgaaggctacggacaaaggcatcatcttcggccttggaatatgtcccgagtag

SEQ ID NO: 13615 - DNA, 306 bp, Zea mays
  Peptide Sequence Number=SeqID_55394
atggcgaacgacgatcacgcggaggatactaaatattgggcccccgaccgtcgcctctgctgcatgggctcagggccagccctggctggagtcgcgaagcaacaacggaggcgcaaggactcgacggggcgacgacagcgggactccggctgcgcgaagattgctccagtgagcgtggaccggacgaaacagagagggagagggcacaccgaagggtgccccgagcaactgacagcgaggcggagctcaccgtggcactggatggggcgcagacgcgacggtggccgcagaacaggcagcggttga

SEQ ID NO: 13616 - DNA, 204 bp, Zea mays
  Peptide Sequence Number=SeqID_55395
atggagatgggcagagccgagcaccatgagagaggtggagaagacgacctggcgactggcgccatggcacagggcaaggccaagctaggaccggaaaatcgcatatattttggatcacgatttttagcgatgaaggtgactagcgcatcgtcaaactcaaaactcatcaacgtcatctgcgaagtcttcgtcatcaccctttga

SEQ ID NO: 13617 - DNA, 168 bp, Zea mays
  Peptide Sequence Number=SeqID_55396
atggggaggctagaaccccgggcagaatgggaatcacggcttgtgggtaaagcgtgcaacctctgcaaagtgttagaaactggttgtccccactgtactcagtgctcaggaggtgaagttggcaacatggaggactttgaggagttccagaactacgacaagttctag

SEQ ID NO: 13618 - DNA, 402 bp, Zea mays
  Peptide Sequence Number=SeqID_55397
atggatatgggcagagccgagtgccatgagagaggtggagaaaacgacctggcgatcggtgccatggcacagggcaaggtcgagctaggaccggcgcacgcagggagcaccaagcttgaggaagtggctgctaggcgcgcggctaagggggcgcgccatgggagggggagaagcgccgagagagagagagagaacgacgcagagaagaagcgcgcgacaggggaaaggagcacgacgcacgtagaagaagataaggacggcgcgcgtagaaaaatcagggagaacggcggaaaatcgcagatattttggatcacggtttttagcgatgtatacttggttgacacgctatacgactacacatttcattctccgaattatgaaacgaaagaatcagaggattaa

SEQ ID NO: 13619 - DNA, 297 bp, Zea mays
  Peptide Sequence Number=SeqID_55398
atgtgcgcgtgttccgccgccgctctcctgcttggcatcggcctcgtcgagcgcctccgcgtcatgggccgattctgcctcccgtccgtgactgcctcagaggcctgcctcgacggcttctcggagttggtttctggctcgccagttggcctaccgagctggtcgctgatgtgctttcgtgactcagaccagctcatcatcattccgttctattgcaccggtgtctccacccttctgataaagaagaagaaaagagaagagttggctgtatacagccaagaggctgtttcggtctag

SEQ ID NO: 13620 - DNA, 102 bp, Zea mays
  Peptide Sequence Number=SeqID_55399
atggcgcacggctcgtggccctatgtcccaagcatccctcccactcgctcttcctgcacggaccgctcggcgcgctgccccaacgtggcacgcccgctcacg

SEQ ID NO: 13621 - DNA, 1692 bp, Zea mays
  Peptide Sequence Number=SeqID_55400
atggcagggcaagcagggaacccagtaaaccaccctataagtccccacgtgataagtggcgctttcgttcagcaatattaccacattttacacgaacaaccagatcaagtgcacaagttttaccaagattcaagtattcttggtcgaccagattccaatggaattatggcatatgtaaccactatgcgtgatattaatgaaaaaatcatgtctatggacttcaggaactgcttaacagagatagagactgcagatgcacaattatctcacaaggatggggtgctcattgttgttactggttccttgacttcggatgaaggcgttttccgtaggtttacccagtcattcttcctagcaccacaagaaagtggtggctattttgttctcactgatgtatttagatttatttcggaaaggaaaccagctgagataaatcaagttgctactcaagaaaatgaaatcagtcagaatgttagacctgcatctgaaacatgttcagcactaccagaacctattccagctgatgggagtgtgatctcagaccatgtgacagctgatagtaatgtcacggagaagcaaataagtgatctttctgctaatgggactgccattgaaagtaatgataatacccagccacctgtgcaagtgcccaaagaggatccaaagaaggccctacttgttgctcctccccctccaactcagatggatgttactaagaaatcttatgcatccattgtcaaggtcatgaaggagggcccaccaactccagttgtcaaaacaacatccattattagcaatcttgtcactgtattgacttaccctgcagagcaaggctattcaattttcatcaagaatttgcctttccatgccaatattgaaatggttgaggaggaatttaagaaatttggtactataaagccaggtggtgttcaagtccggcacaataaggttgatcgatttggttttggttttgttgagtacgagtcccagctgtctatgcaagcagcaattgaggcatctccgattcgtatggcggacaaagaagtcggcattgaggcgaaaagagccaattcacgagtcattggactcttgactctgtacaatggtgtaggtggccgtttccaatctggcaggggagtgtaccatggtgataactttagagggcgaggaagtggctatgtggacaacacaaactacagaagcagcggcagcttcaaccgccagaatgaaggggagatgtacaaccgcaggaatgaaggggagatgtacaaccgcaggaatgaaggggacttctacaaccacaggaatgagggggagttctacaaccgacggaatgatggtggcgagaactacaaccggcgcaacgatggtggcgagaactataaccggcgcaatgatggtggcaagaacttcagccgcaggaatgacagtggtaccgagaacttcaaccgcaggaatgacggtggcggcgagaacttcagccgcaggaacgatggtgttggcgagaacttcaacgtcaggaatgacggcgttggtgagaacttcaacaggaggaacaacttcagaaatcagaatgacttccctggacgaggacggggttcacctacaccagggaacagttactaccagaacgggaatgggaggttcagtcgcgtgaacaatggcgccaagcaagctcctgtggccgcgtag

SEQ ID NO: 13622 - DNA, 1032 bp, Zea mays
  Peptide Sequence Number=SeqID_55401
atgcaggcggcatgcaaccgcaccaagtgggcgcaccctttcgactccaacgcgtccagcatggaggcccaggcccacacgtcatgtaaccggcgtgccggttgctacgtgcaagaaactgcaccgccactcacgccactatcccacgggagaaggcgcgacggtcgatacgaccagaaatgggccggcagtaatggcggtggcagcggtcaagtcgtcaaccaagctcacgtcccctcctgggacaacgagagaaccctctcccacggcgtgaagacggagaagcaggcgacgcttcacctccgccataatgaccgcgtcaaaaaagggaccgggaaaggggataccccgaaagggatccttctccacgaaggaaatgggccccgagcccccctactgatcagaggttcgaaggctggcccctcggaggggttcaatggccgcctcagagcgctcgagctccgcgcccactactggtcagaggttcgaaggctggcccctcggaagggttcaacgaccgcctcaggccactcgggctccgtgcccactactgatcaggggttcgtaggttggccctcgaagggttcgatagccgcctcagacgcagagcaagggatgaccctggcggccaagtccggcctcgggtgccataggaagctccgcctcgcccgaccccagggctcggactcgggctcggccccggaagacgacgaactccgcctcgcccgaccccagggctcggactcaggctcggccccagaagacaatgaactctgcctcgcccgaccccagggctcggactcggcctcggccccggaagacgaagaactccgcctcgctcgaccccagggctcggactcggccttggccccgaaagacaacgaactccgcctcgcccgacccaggggctcggactcgacctcgacctcggaagacagactcaacctcgacctcggaggagcctccgcctcgcccgacccagggctcggaccgaccacgtcacagaaggggccatcattaccctacccctag

SEQ ID NO: 13623 - DNA, 834 bp, Zea mays
  Peptide Sequence Number=SeqID_55402
atggcccctcctatgacgtggtcggtccgagccctgggtcggcgaggcggaggctcctccgaggtcgaggtcgagcctgtcttccgaggtcgaggtcgagtccgagcccctgggtcgggcgaggcggagttcgttgtcttccggggccgaggccgagtccgagccctggggtcgggcgaggcggagttcgtcgtcttccggggccgagtccgagccctggggtcgggcgaggcggagttcgtcgtcttccggggccgagccctggggtcgggcgaggcagaattcgtcgtcttccagggccgagcccgagtccgagccctggggtcgggcgaggcggagcttcctatggcgcccgaggccggacttggccgctgtcagcctcactccgtcgagtggcacagcagtcggagcgacgcgggcggcactgtcttcttgtcaggccggataaggtgtcaggccacctttgcattaaatgctcctgcgacacggtcggtcggtgtgacgatccggccaaggttgcttcttggcggagactgggcctcgagcgagctgaagctttgtgctgatgggggttaccagctgagattaggagtcttgggggtacccctaattatggtccccgacacccatctaccatgggctcatgaatctcatacacctctatcaaggaagcgaggcaggctgcgcgcgagctatacactgtccaccggggcccgcctgtcggtgtcgaactggactggtgggcgcgacagagctgtggcgcagtttaagtgggctggcgtggggctgagcgctatgtggcaggtaaagaggaagtgggccaaggtgaggtag

SEQ ID NO: 13624 - DNA, 256 bp, Zea mays
  Peptide Sequence Number=SeqID_55403
atgtcgggagatcacgccaagagggagatcatgaccagcggcgacaagtccgcaagctcggggagaactcattcgaaggagtccggccacaagcataaggaggagtctgcttcctccatcaagtcacaacagagaggtgacaagaagaagaagatgaagaaagtggtctactacgagaccgacacttcgtcaccctccacctccggctccgaatcgtcatccgtaacttctaagcaccatgagcgcaagaagtata

SEQ ID NO: 13625 - DNA, 813 bp, Zea mays
  Peptide Sequence Number=SeqID_55404
atgacgggcggcgaaccaccgactgggggtagttcaggatttccccgaaggagtccccctgcaacgtacctattgccgagcattctctccacctccctaggcctagtaccatcccataatggcgttggggaatggtacgcgctgtcagccggcgggagcttcacgcctcacgtcatcatcgtgggtactggggaggatgtggcggcgcgcgtcatgtcgttttcgcagaaaggtccacgctcggtctgcatcctctccgccaacgggacaatctctaacgtgacgctgaggcagccgggctcatctggtagcaccttcacctacgagggccgtttcgagatcctgcagctgatgggctccttcacaatggctgaggaaggtcgtaagaggacaggcggcctcagcgtctctctcgctggcccagacggccgtgtggtcggcggcgtagtggctgggatgctgcgtgccgcaagtcctatacaggtgatcgtgggaagcttcctgcccaacagcctgaagcagcaccagaggcggatgagcgcgcagcagcagctctccccggttccggcactgccagaacctgaagcgcccccacccgtgctcaccgcagccaccccgatctctctggcaggtcctgggaacgggttccatgatgcgccgccaccctccgccgcacctccccagccccacgccagcgccatgaacctgaacgcgacgggcttccccgtggctggctggcccgcaagctcgccgcagcagatggtgtacagggcttcccctgacatcaacgtcagcttgactccccaggagtag

SEQ ID NO: 13626 - DNA, 114 bp, Zea mays
  Peptide Sequence Number=SeqID_55405
atggctaagaagggaggttcctggattggggttgaccgacgaggacgtcagtcttctaagctgtcaagatatgctccagaggaggttgctgacgatgagaggaaacaggagtga

SEQ ID NO: 13627 - DNA, 162 bp, Zea mays
  Peptide Sequence Number=SeqID_55406
atggagggccccaaaggtaaacgaccgaaccaaagactgggcacgcgctgggaaaatagtggtggggctagggtggggtcgagcagctcacatggagggccccaaaggaggtcactgtcccaggacaaagggattaataccttgtctgggcaacattcttaa

SEQ ID NO: 13628 - DNA, 489 bp, Zea mays
  Peptide Sequence Number=SeqID_55407
atggcggcgtggacacggctacacggcgagaagtccgatgagtgcgagcagggggaaatagaggggattgctagcgaggaggcagagctcaccggagcaacgaacacaacaggagttcgacaacaggagcaacggacccgaggtcacggcgaacggcgatggtgctccacgggcgcgcgcatggtgcgagagaggtgcgaggggtctgtagaggagcgctactgggcgaaaggaatatttgaagtgctagccttgtccgcagcaagagaagcctctgggctggcaaatgtctttagcatagtggtcacattttcagcagcagatgtgctaagtggactttcgataaccttcggcgctacgggcgaagtcatccttggtgtccctccaagcgctgtcttaaacttcggctgcacttcagcctcggatagcaccactggttgcaaactagccaagggagcatctacttggattggcacctctacacgctaa

SEQ ID NO: 13629 - DNA, 366 bp, Zea mays
  Peptide Sequence Number=SeqID_55408
atggatcccgagtttgttgcaggagacttccctaagcagcaacctggtgaaggcaaagtgctcgtggttatgagcagccttgggagtctaccctcctctgttcctcaactagaggtgccccctgcaccaccacaggggaacccagctgctggaggagaccctgatggagacgatgacgacggtggcagttcaagccatagcatggagccttcggaggaggacaaatttttgaaactatctcgctatgcatctgaggatgtcaacgctgatgccaagagcattctgctctttggaattcaagattcattgggtgcaccaaaggtgcacccaatgggtgtagcccccgagcttcgagtggatttttga

SEQ ID NO: 13630 - DNA, 321 bp, Zea mays
  Peptide Sequence Number=SeqID_55409
atgggcagaggcgctgacgggtggggcagccgggcagagaacgcgcgatcgtgcggacaagcgagggagagcgccgatagggcgggcccgccggaggacttcgacgactctgagttctcagaggagtggttctcctccgagggtgaagagtcccaaccgctagtgccccttcgccatcatccaaagggtggagacggagcggacgggagcaactacggcaatggcgacgacaaggtcggcagtggcggtagcggcgacgacaacggtagcagcaagggcaacaaaagcggcaagggcagcgacaaggcgccagtggcataa

SEQ ID NO: 13631 - DNA, 579 bp, Zea mays
  Peptide Sequence Number=SeqID_55410
atggaggtaccgcgcctcccccagggtgcccttccatccatggcgttgtcgcggctgtccccgcaatcaactcccagatctcgtgctcacctccccgcaatcaaggtcgtcacgcccgatgaggatggtcgccagtcgccgcacggcggttcgggccccagcgatagctccggcgcaggcgcgaggaagaagctccggctcaccaatgagcagtcgacgctgctcgaggacaccttccgcgcccacaacatactctccaacgcgcagaagcaggagctcggacggcaggtggatctcagcgccaggcaggtggaagtgtggttccagaacacacatgttcagataacacacatgttcatgctcatgctgaccccacacagagggcctcctattgtgccctctgacagaagcatctcgcggacgagagagtcttcgtttaatgtgtccaaatattttcttttttccatgtcgacaaatatcttgtgttggcacaaaccacacatgagagaagcatgtttagctacagctgcaactatctatgccagcaaagaggctgcatgggggaagaagaaagattaa

SEQ ID NO: 13632 - DNA, 477 bp, Zea mays
  Peptide Sequence Number=SeqID_55411
atgccaagcttgcatgcgctgaggctaacctcgctctctagcatgctgcggaggcggaggcgagccacaggagcctgcgcggctatctggacaaggcggaggcctctacccgcacagaggtcgaccgagcgcgaggaaccggaggtcgaagacgcgatgctaaagcggtctgctggggcactttatgataggatatggggccctcacggtcgtgatactgtccgggaaaggtctcaccgggtgatggagcaggtggcgaatgatgaggaggttgacgacttgggaggcctggagagcacgatggctctagcagagggtgccagggcggggattagggagcagccggcgccgccaactagtgctagcgaagacgaccctgtggcagccgccgcgttgcctgaagacactttggtgggagccgcacaggctgccgaagaccctgcagcgtcggccggcccttcgcatgtggcgggatag

SEQ ID NO: 13633 - DNA, 183 bp, Zea mays
  Peptide Sequence Number=SeqID_55412
atgggagttgtagtacaaaattgtaacctcgctgacggagagtacgtcctcattccggagcagggagttgctcaggagggagtccaggagccagcaccagagcttgccatcgaggatctccctaccctagcttttgaaggcttgtactgtgcacttaagtgtaggagttacctgaaaccctag

SEQ ID NO: 13634 - DNA, 1713 bp, Zea mays
  Peptide Sequence Number=SeqID_55413
atggcggcgttcctggtggggctggcgttccccagcgagggcagggtgtcgaggctgctggtgagcaagaccaacttcgtgctcagctccttcgtgctgccgctctacgtcgcccacgtctgcctctcgctgcgccagaccacggacgacatcgaggtggcggggctcacgcgggacgaaggtttccgggcctacgtcatggagctgcctttcccgtggtggaaggtcttcttcgtcactgtcatgggaacgctcgggaagctcacggggtgcgcggcggcagggctcctccgaggcctggggtggctggaggcgctggcgctggggatgctgctcaacgtcaagggctacttccacctctactgcgcgcaggcggcgttcgacgccggcatcattacggacaagtctttcatggccattatcttcatggtggccctcaacgtggcggtgacacccatggtcggggtgggcatcgcgtcgtgggcgcggcggagtgtgcagtggcggctcatggggctgcagcaccacgacccgtccacggagctgcgcctcgtggtggggttgcacggcccgcaggacgtgccgacgctggcctacctgatggaggcgctgcgctggggcggcggcgccgggggaggcggcgagctcgccgtgtacgccgtggacatggtgcagatgacggaccagacggcggcggccatcgtgaagggcggcggcttcgacggcgttaccgtggtggacgaagaggtgtcggagatgcgtaagctcatcggcgaggcgctggacgcgtaccaggcggagtgcggcggcggcgccaaggtgaaggtgcggcggctgctggctctgtcgtcgttcccggacatgcacagcgacatctgcatctgcgcggaggacgcgatggcagcgctggtgctgctcccgttccacaaggcgcagcgggcggatggcaccatggaaccgggccactacggcttccgggtcgtcaaccagaaggtgctgcagctggcgccgtgctcggtgggcgtggtggtggaccgaggcctcgggaagcacgccgccgccgtcagcagcggctcccagacacagacggcggcggccgttgtggtggtgttcatcggaggcgcggacgaccgcgaggccctgacgctggcgtccctgatgtacaagcacccgggcgtgcgtctgacggcgctgcgcgtggtgcagaacgcgacggcgcaggcgcgcgctaaggcacggacgagcctgttcgagagcaagggcagccggcgcggcggcggcggcggcggcggcggcagtggcatcggcatcggcgccccggcgtcgtcggcgctggggcaggaggaggcgcagatgcaggtggacgacaagttcttcgcggagttctaccggaagcacgtggccgggagcaggcagcagggcgccacggccatcgggtacctggagaagcacgtggcggacggggccgagctggtggcggtgctccggggcatgcaggcggactaccggctcttcatcgtggggcgcggcagggaccgcagctccgtgctgacggaggggctggatgagtgggccgagtgcctggagctcggccccgtcggcgacatcctcgcctcctccgacttctccaccaccgcctccgtcctcatcgtgcagcagtacgacgccaagaagcactacaaggtcatcgacgaggagttcatgcccttgtag

SEQ ID NO: 13635 - DNA, 706 bp, Zea mays
  Peptide Sequence Number=SeqID_55414
atggactgctccatgacgagcagcatcctgtcggccaactacaacacgatcctgttcgagttcggcgtcatcctgctgagcagcaaggtcctgtatgcgctgctccgcaaagtttaccagccgcgcgtcttctccgacctgctgctcggcatcatccttgcccagttccgtgtgctctccctcaccaacgccatcaacctcgtcttcggcaagatcggcggcttcgtcttcgcgccctacctctttgcgctcggggtcgagatggaccccaccacgctcctcgacgcccccaccggcgactccgtcgtcgcttacgccggaatcctctccacctgcgtgctcgtcacgctcttccacatgccgctcatgcaggccacctccggcgtcgtccacgagcggtccctccgctccttcctcggcctggccgccgtgctcgccaacaccgcctcgcccgtcctcacccgcctaaccaccgatctcaagatcgccaagaccgccgtgggccgcctcgccgtgggcgccggcctcgcctccgacatgctcaccaccatgctcatcgcagtcggcagcatgatctggcgcgacaccggcgtggacggacgcgagtccgacgactcccccatcgtgcagccggtgctcacggccgcggtcctcgtcgtcgtcatcgtgtccgccttcgtgtccagggccatggccgagtgggtgg

SEQ ID NO: 13636 - DNA, 2697 bp, Zea mays
  Peptide Sequence Number=SeqID_55415
atggattgccatggaagtggcaagggcaatgagaaggccatacttgacagcggcgaatcatctggtgcagctggtgggttgtcaaagacatatgtagttactaaagaaggaaaaaggatagaattgaaaggaacaattaaggacccatggagccatggcactaagaggggtaatgtgaaaccatgtttcaatgcgccacgtgatgttaagaacatattgttggaagaagtagcattgagcaaaaagaagaagagggatacaacggaaaatcgtctctatatacaaaaggctctcgtagagcatgattataggacaactattgctagacttaacgaagaggaacaacttgagatggcaatgagggaatcacttagggatgttggattgacctatgatggtagctcaaggggtagtggtattgttattggggctgcaagtggtactagagtatccaatagtgtggctggaaattatggccagacaagtggcagtaggtctggtagctcaactaaacaaagttcacttcgtagtttctaccctggcccaagttcttcaaaagctccttttgacatagatttggcgcgtagtagagcaccctcacagcctcaggtggatatcatgttgtgtcgggattctaagctgaagctctggaaagctttatcaaaatggttccatgccaatgacatacctggtaggaaagctgattgtccctattttagggctgcaatgaaattggctcaacaacttggggaagtgcctctcccaaaaggaaaagatatagatggtcaactattagatatgaactacaatgatttggaagctcacatggaatcttttaaggaagattggagtcgatatggggtaaccatcatgtgtgattcatggacgggtcctacaatgatgtgtataattaacttcatgatcttttgcaatggtcgcatgtttttccacaagtctgtgaacgcaaccgaggaagtccaaaatgcagaatttatttatgattgtattaaagaggttgtggtcgatgatgttggggctaaatttgtcgttcagatagtgatagataatggttctaattacaagaaagcatgcaaacagctcatagccgagcatccacacattacttggcaaccatgtgctgctcatactgttaatttgatgctgaaggacataggaaaatttgatgatgttgcaaatgtagtggacagtgcaaagcgtatatgtaggttcttctataaacataataggctgcatgctatgatgagggagaagattggtggggagctaattcgttggaatgccactaggtttggcacagtgtttatgtgcttgcagagtttttgggataggcaggaccagttgaaggcatggatgatctctgctgagtggagaaatagtcaatggagaaatgaggaagaccattcatttgcatatgattgcctaacagataggatttggtgggatgatatggaattggtgttgaatgccgttggaccaatcttctttgttcttcgatatgctgaccagcaaaagaatgctaccttatctggctttcttccaaagatgatacaagcatataatgatataagtgcaaaattaaaaaaaagtgaacgtggtaaaggaggtctacttaagaggacagctgaagtaatcagtaagagaattagatatcttctcaatgaaacacttatgcttgcaggtgctgcacttgatcctcaagagctatataggtcaaatcttgcaaagaaatcaagttgtcaattggctgtgactttggcaattaagaaacttgccacctcaactaaagaagctgcagctgcaattgaccagttttctaggttcattgaaaagaaaggactatttggagatccagaagctaagtggtcagcacttaatggcaaaccagatgcagccaagtggtggggttcatatggagggcaatgccctgaattacaaaggattgcaagacgcattgtctctcaatgcatatcatctagtggatgtgaaagaagttggagcacctttgctctagttcacacaaaattaagaaataagctaggctttgagaagctgcacaagttggtgaaagtgcattataacctgaagttacagatcgaacaatttgaagctgattttcaaagccttcaagaaaaggattctgatccatgtagtatgctgatggatgttgctctttatgatgaccaaaacccaatcatggattggctaaacaattctatgagtgattctgcaccaactctggatgaatatgatgatagtgatcttgattggagcacacctagcaggtttgtcactgaaagtttacaaatgggcatagaagaggtggctgaatttaagagggacctttatatggggaaaaaggctgtaaaaacaaacagagaatgcaatgggatggagaagatgctgaaggtaccgcagaagactatgaaactgattcttcacaagaacaaggcagcccaatttatgctgagtcaggtgacagtagttccaatgatgaaggtgatggcaataatgatgttggtgccgatggaagtggtggcactaggactgctgatggtcctgccaaaggttcgagacatggggaaccaactcctttgcgtccaagatcaacaagaaaaaggaagccaactctcaagagcattactgaattataaatggttagattaccctttcacctaa

SEQ ID NO: 13637 - DNA, 807 bp, Zea mays
  Peptide Sequence Number=SeqID_55416
atggcacggaggggagaggagcgggggcatggtgtcgccctgtggatggtgggggcgggtggggcgaggatggcggagagcggacgggggcgagaatggtgggggctgccgcggagatttctgccattaaagaaaacgaagattcgagtccatggcaggccagccctcaagcctgcagctggacctgggctatatgtgagagaacagccgctgtctattgcctgttgggccgaactgggcagcgtggaaaggctacgaagagcggagaggcgctccattgaagcggacggcgacgagctctgcatgctgcgctgcgcccttctcaccgccgccagcccgccagaacgtctcctccccgtctctagagtggctctttctttctccgtcaaatggctctcgcgtgcgcctctcacgcgtgccgctttctcctcgccggccaggcgagatctttccacgcccagccctaccatgtcggatccttccttcccgggtgcagccaaggtcggcgtggtggagttcctgaacggcgtcgggaaaggggtggaggcgcacgccgcgaagctggaggaggctgtgggcggcgacctccagaggctccttgaggcccgcacgctgcggctcaagaagctcggcatcccctgcaagcatgctagaaccttgccaaaccagaagcaccagcaaaagaccaacgagtggcatcatcatcgatgtactgcaggaggtggacacaaggagatgccctctcaaaaacacaagcgttgcgatgtttccacagccaccgagcaaccaagatcaccacagaattga

SEQ ID NO: 13638 - DNA, 984 bp, Zea mays
  Peptide Sequence Number=SeqID_55417
atggcgcggctcggcgcggtcggagctcggccacggcgtccggcgcgaccccggcgtcccgcgcagccccccccccccccccgccgcttgcggtcggccccggcacgggcgctcttcgcgcgacacgcggctctgggcgcgtggcctcgccccggctcgcctgttctcccctatcccatccccgcggcccgcgacctggagctcggccggcgtgcctccggtgcgcggccagagctcggttggcgcggccgtggcgaccccacgcggcgtgccctagcccccggcgcgggcgctcttctcgtggcgcgcggccttggcccggctcgcccagcgcgcgtccagggcgcccctcgtgcggcgtggctcgcccggtgtggcgtgcccgcccgcgaccccggagcggctcgcagcgcgcagtgcacggttgctcgcagcgtggctgctcgcggcggctttgctcgtcctgctcgcagcacgcctgcgctaccgctcgtggtggccccgtgcgtcgtggctccctgcccggcacggccctccgctgcttggcgcgtccgtggcacgcagctcggccccggcgtggttgcccatagcgcgcagcgcggttcacagccaatgtccccagcgcggcgtagcatggctcgtcttagacacactgcatggaagtctgtcatccccttcttaccctcctatctcgcggagcgtccgcttcgccatcccgtgaccggtcagtccagccacttggagaggctgcaccaccgcctgcatgaggagcaggagcgtcgacaacaggagcagcagggctcttctttctcgctccaacaggagatagagtctgtgaggagctgctcccctatgctccccttggaggcgccccctgcaccaccactgagcgccccagccgctagagtagctgctggaggagacctagacgacgggggtggcgacagcagcttgagccacgacaccgacctttctgctgactag

SEQ ID NO: 13639 - DNA, 633 bp, Zea mays
  Peptide Sequence Number=SeqID_55418
atgtttggccgcggttttttcggcagtgaatctcgttccaatgacctaaccactcgcctcactgtccactttggctccgccatgatcgacaccacagtcacccgcgacgccgcggtcgccgacgagtgggtgcgcacagtccgcgccgccaacccgcgtggcgcccctctcatcgttggcctcgactgcgagtggaagcccaactaccgtagctggacgacctccaaggtggccatcctccagctctgcgccggcgaccgctgtcttgtccttcagctcttctacgtcgaccgcatcccggcgtccatccggagcttcctcgccgatcccgacgtgttcttcgtcggcatcggcgtcggcgaggacgcggcgaagctggccaccgattacggcctcacgtgcgcgtcgcccgttgagttggaaagccgctgcaatgactacctgggatactacactggagggccgaggctggggctcaagggctacgcaagggaggtgctggggctggtcatggagaagccacggggtgtcaccatgagcaactgggagaagcatgacctcgaggatgcccagatccgctatgcatggtcgtacgacttcgagggactcaagcctaggatctataacctatag

SEQ ID NO: 13640 - DNA, 951 bp, Zea mays
  Peptide Sequence Number=SeqID_55419
atggagtgctccagggttcgtggtctatcccttgtggagcgcttgaacgacatccctagacatgttttggacatcgtggagttcgacgttcatcggggagagaccattgctctaattgtcggggagctctactctggtcacatcctcttggacatggtcgacctttcgcgcaaccttccgagtgaagcgttggaagagatgttggggaatgagatccgcgacatttcgacaggaagctcgatagtggagacggctgggagcatccgagagaagccagaagcgaagtaccacttgcacatggagaaggtaaaggaagtatgtgtccaagatatgttggttgacctggagaaaggcaagtgcttgctacccatagaggacaatagtgggatgaaggttaattcaatagctgggcatgcaagtacaatgcggcccagctcatgggatgatcttgtagcactgaaggatgataagagtcaccacatatgttgtttctcttcacaccgtcaagattcatctgttaaaagtggagagcctatgaaagctgaaggggagatcaaggttgggattttggataagtcaactgctgataaggaaaataaaaaatggtataagaagccgccacgacctccaagatcacagactacttcaccattagaccctgctgatcagaagctcatcagtgcactatcggagcttgcggtgttaaagaaggctaggattgagcgtatgaaggcattgaagaagatgaagaattccaaaccagcatcttccattgggaacttggtggctttgatcattaccgtcatcttatgtttcttcatactttggcaaggtataacaactgtgtactactggtctactgcatctttgaagctgttcagctgctttaaaagcatagctgcagccattgttttcagatcgcctgatcgtctgatcgatgccactgggtga

SEQ ID NO: 13641 - DNA, 330 bp, Zea mays
  Peptide Sequence Number=SeqID_55420
atgcgcggcgcgcgagccaccgccgagatctccccaccggcagcgagggggtgtgcccacagacgggccgattcggatctacgccgacaacatctacgacaggaggaggcgctcgatgacttcgtcgacgacggcgttgacgacctggtggtctcgctctaccagatggacctcgatcgcacgctcttcctcctccgctcctacctcctcctggagaagatcaagaagtacacgatgcatatctctaggtccgatgacctccttactcatctctcacagcaagagcgcctggttggggcatttatcacaattgtttgcgccaccttgtga

SEQ ID NO: 13642 - DNA, 561 bp, Zea mays
  Peptide Sequence Number=SeqID_55421
atggatcacatagtcgggggcaagttcaagctcgggaagaagatcaggagtggatcattcgggaaactttacctcaccgtgaacgtgcagaatggcgaggaggtggctgtcaaactgtcacttcatctgtgccccctgccgccgccgctaagcctccagccatggcacctcgggcgtgcctctcccgagcccaaacctgagacccatcccgccgtggatcaccgcgcgaggaggggcgcaccgaccggcgggccagatggtgtccggcgccgtaaggggcgagtagcgcggtcagcgtccacgaacgggatcggcggcggcgcagcgaggtggcggtcggggcagggcaccatgtctgcggtagtgtgcagcaagaggtcctcctcgatcttcggcgatgatcttgtaccttccccttcctccgctctgtccccttcctaccaccaccaccaccaccccgccaagagggcccgctgctccccgacccgccggagcgaggttctgcttcaccacctcttcctcgacatggatccccaggttcgtcatgttcttgcttcctga

SEQ ID NO: 13643 - DNA, 243 bp, Zea mays
  Peptide Sequence Number=SeqID_55422
atggcggcggcgtcgcggcaggatgcccacccggagcacgaggcaggccgtgccggcgtcgtcgagggtggcgatcatcggcggcggcatcagcggcctggccgcggcgaagcagctggcggcgcacgaccccgtggtgttcgaggcgacggcgtccgtcggcgggtgtgcagcactgcgtgtaccgctcgatctcggcttgcagacgtcgcggcggactacgagttcttcgactactcgtga

SEQ ID NO: 13644 - DNA, 549 bp, Zea mays
  Peptide Sequence Number=SeqID_55423
atggcgacagagcaagcggcggagaactacacggtggaggacctcgtggccctgaacccctacaaccccgacatcctcaacgacctcgagaagttcgtcaatgagcaggtctcatctcagacatataacttggatgcaaatctcagccttcttcgcttgtaccagtttgagccagaaaggatgagcatacagattgtggcccacatactgattaaggctctcatggcaatgccagcccctgacttcagtttgtgcttattcttaatccctgaacatgtgaggtacatacttggtctaacttatgttcaaccagtagaaatagaaaaggaatctatagctaaccgtaagaatttttgcttaaagactgctaggttcagtcaattttgggatgaagcagcaaagaaccgccacatatcggaagcagtgccaggtttcgaacaagcaatccaatcctatgcgattcatgtactttccttgacataccagaaagttccaaggcctattcttgtagagtattccctggtaattggtgttcaagttcttcagtaa

SEQ ID NO: 13645 - DNA, 210 bp, Zea mays
  Peptide Sequence Number=SeqID_55424
atggcgtccaggactccctgcgccttttctccactgcatctgcctccctctgctctttcctttggagtagagagcgcagggacatgctcgacgtattgcagcagcagcgacaccctccgctgcgctgcgcccgtcgggtcgggccactcgccgtcgatctgcgcagcgcttgagagccgtcgtcaaaaatctttggttagagtagattga

SEQ ID NO: 13646 - DNA, 543 bp, Zea mays
  Peptide Sequence Number=SeqID_55425
atgatccgctttcaagaggggcccggccccggcggctggtgcttctcccgcaacggcgtcctcctcgacgacggcaccgaggtggaggccgacctcgtcttcctcgccaccggcttcgagggcaaggacaaggtccgcgccgtcctgccggagccgttccgcggcctcgtcgtcgacaggtccggcatgatgccgctgtaccgcggcaccatccaccctctgatcccgaacatggcgttcgtggggtacgtggagagcgtgtccaacctgcacacgtcggagctgcgctgccgctggctggcgggcctgctcggcggccggttcgcgctgcccagcgtggaggacatggtgcggcacgtcgacggcgaggcggaggccatgcgccgcaccacgcgcttctacaaacgccactgcatctccacctacagcatccacgacagcgacgccatgtgcgccgacctcggctccagggttctccgcaagggcaactgcctagctgagctcttcgcgccctacaacaacaaggactacaaggaagactga

SEQ ID NO: 13647 - DNA, 468 bp, Zea mays
  Peptide Sequence Number=SeqID_55426
atgccggcgttcccgccgggcagggggccggaggtgttccgggggcaggtgatgcactccctggactactgcaagctcggcgaggaggagaccgtggagctgatgagggggaagaaggtcgtggtcgtcgggtacaagaagagcgccatcgatctcgcacttgaatgcgcccaggccaaccaaggtgagggaggcgaggcttgcaccatgctggtgagaaccctgcactgggttgtgccgtcctactccatctggggcctgcccttcttcctcttctactccacccgcctggcgcagttcctgtacgagaggcccaaccagggccttctccgctccatgctctgcacactcatggcaccgctgagagcgggcgtgtccaagttcatcgagtcctacctggcgtggaagctcccgctcgacaagtacggcctccgccccggaccaccccttcgtggaggactacgctag

SEQ ID NO: 13648 - DNA, 300 bp, Zea mays
  Peptide Sequence Number=SeqID_55427
atggcgccctgctcccaacacctgtttggcatggcacctgctgggacagctgggttaaacagtaaccataatggcttccctgcgctcggcgtcacaggtgctctgttttctccagcgcacgtcaccggcctgccgcgcgaggaaacgggccgggttcctgtggtcctggaggaaagaaatggaccgctggttaaaggctcctttcagaatgccggccagcaggatcgtagcagcagtatatacttttgccggccattggttgccagcaaatgctcaggtttaattccatggccaaattaa

SEQ ID NO: 13649 - DNA, 247 bp, Zea mays
  Peptide Sequence Number=SeqID_55428
gcgacatccagatcctgttcccgggccaaagggaactttcactattcaggcggccctcaccaccaagccatcggtgacctcttctccgcaggcgaactcaaagcctgaggaagacctcgcgatacccacgaacgaagctcaagccgtgacctctatgcggccgaccgaagaaaccaaaagaatcaacctcgggttcgccgatgaacgcaagaccgccatcatcagctccagcctggatgacaaatag

SEQ ID NO: 13650 - DNA, 369 bp, Zea mays
  Peptide Sequence Number=SeqID_55429
atggcgcaccggacagtgaacagtgcctgtccggtgcaccaccggacggtccggtggccccacaagtcagagctccaacggtcgaaccctaacagctgggtgacgtggctggcgcaccggactgtccagtggcgcatcggactgtccgatttgcatatccacccccctctaggcgactttcaacagagcttcaaggagatctacgccacgctctgcgactgtagaatggaccccgacatagctgtcgagaggctcatatcccaggaaaatgaagttctggtgagagttcactattacgggcacaaatttaacctgctagaatttgttgagctcatttacattcttttgcaatttcagatattttgttga

SEQ ID NO: 13651 - DNA, 513 bp, Zea mays
  Peptide Sequence Number=SeqID_55430
atgagccaaaataaccttggtggtggaggtcaaatacagtacaatcttcccaatgtgaagcttgagaaactaaaccttaatcataaccaactacaaggaaacatcactgatgtattttccaacctttatagtttgtcagagctggatctctcctttaattctcttatcggtgatctaccacaaagtttcactggattgtcaagcctgaaaagaatgtatttgcagaacaaccaatttactggttatatcaatgtcttagccaaccttccccttgaaactcttaccatatctcataacctgcttgtctctatgaatgttggaaacaaccatttcactggttggattcctagtcagcttaagaagataaacaatctacagaccgacggaaattcttggagcacaggaccagcgccacctccacctccatatacagcgcctcctcctccaaaccattggaatggcgcgggtcagaatgatgatggttcatcaagttctcctgcctttctcggatag

SEQ ID NO: 13652 - DNA, 915 bp, Zea mays
  Peptide Sequence Number=SeqID_55431
atggcggcgtcagcaggcggaggcgcggtgcgcgcgctgtcccagaaggagcaggacatacagatgatgctcgcggccgacgtccacctcggcaccaagaactgcgatttccagatggagcggtatgtctttaagcgtcgcaccgacggcatctacatcatcaacctgggcaagacatgggataagctccagctcgcggcgagggttattgttgccattgagaacccgcaagacatcatcgtccagtcggcccgcccctacggccagcgtgctgtcctcaagttcgcgcagtacactggcgcccatgccatcgctgggaggcacacccctggtaccttcaccaatcagctccagacctctttcagcgagcctcgcctgctcatccttactgacccaaggactgaccatcagccaatcaaggagtctgctctggggaacatcccgaccattgccttctgcgacactgactctcccatgcgatatgtcgatatcggcatcccagccaacaacaaggggaggaacagcattggatgcctgttctggcttttggccaggatggttctgcagatgaggggcactatcctccctgggcacaagttgatctgttcttctacagagacccagaggaagcgaaaggagcaggaggaggaagctgctgcggcccctgagtttgctgcagtcactgattaccaaggagctgatcagtggggtggtgaccagtggacctctgatgtggctgcaccacctgttgctcctactggtgctgattggggtgctgcaccagcttcggttcctaccggtgatggctgggatcaaactgtggcccctgttcctgtggatggcactgttcctccagtggtcgctcctactggttgggaatcagcagcccagcccactgcccaaggctgggagtag

SEQ ID NO: 13653 - DNA, 147 bp, Zea mays
  Peptide Sequence Number=SeqID_55432
atggccatcaagattgacagaagaagtcgtcaaccggcttcattggtcatcctccacaacgaaagaaagaaagcagaggatgacgctctgcgtcccaacgtgacgtctgtgacgactggcgaggtgcacaacgtcgtagactcgtag

SEQ ID NO: 13654 - DNA, 1533 bp, Zea mays
  Peptide Sequence Number=SeqID_55433
atggcggtgaacaaggacaacgacggcatgccgattcggacgaacgatgatcctgccgctgccggcgacgaagcccgtcccaagctgaagccgctgcactgggacacggtccgggcgtcctccgaccgcgacatggtctgggaccggctcgagtccaactcattccagttaagatacattctcataccagacatacacacacacacgcacacacacacggctaaatcatacgtaaaaaaagtgatgttgacacgagtttttcccggcaggttggatgaggacatgatcgaggtgcttttcacgaacaatgctgcaaatgcgcctcctagggatacacttagaaagcctggagtgccgctatgcggtgcccaagagaaggtccttgatcctaagaaggcgcagaacatcgccatcctgctgcgcgcactgaacgtcactctggaagaggtcacggatgcgctgctagacggcaacgctgaatgcctgggggcggatctgttggaaaccttggcaaagatggctcctacaaaagaggaagagctcaaactccgcaacttcactggggatatatcgaagctcggttccgcggagcggtttctcagggcgctgcttgacatccctttctgcttcaaaagagtggacgccatgctctaccgggcgaatttcgacggcgaaattaactacctcaggaaatctttccagacactagagggagcctgcgacgatctaaaaggcagtagactgttcctgaagctactcgaagctgtcctgcaagccgggaaccgaatgaacgtcggcacgaaccgtgggcaggcaagagccttcaagctggacactctgctcaagctcgcggacgtcaaaggcgccgacggcaagaccaccctgctgcacttcgtcgtccaggagatggtccggtcggaggaggacgcgaggacgacgtccgagagagccgcagaggatgaggccagaaagatcgcgagagacgagacgttccgtagtaagcaagggctgaaggtagtgtccgggctgagcggcgagctcgggaacgtcaggaaggcagccgccatggacttcgacgtgcttcacggctacgtgtccaagctccaggccgggctcggcggggtcaggtcggtcctcgcgctcgagaagcagtgcgcccaattgcaagcccaaggccaccaccacaggtttttcgccaggatgcgtgggtttctcgaggaggctggggcggagatcggacgagtcaggcgcgacgaggagagggccctggggagagtgaaggagatcaccgtgtatttccacggtgacgctgccagggaggaggcgcaccctctgaggatcttcgtggtggtcagggacttcctgtccacgctggaccgtgtctgcagggaggtcagccagcaggacaggacggtggttgggtccgcgaggtccttccgcatgtcagcggccacggcaatggcgaacctgagaatgtacggccagcatgcaagaggagacgatgacgacgaggaggagagttggtcgccgtag

SEQ ID NO: 13655 - DNA, 678 bp, Zea mays
  Peptide Sequence Number=SeqID_55434
atgtctccagctccactactcaggctcgcctcactcctcttcctcttcctcgtccactcggccgccgccggcgacaccaggcgtgcgctgcacgagccgctcttccctatcgaatggaccccgccgccatccaccacggcgcctccagcaccgggattcgcctccgatccctccacacccgtcccacccgtctacaacggggggccggcgctactccccgctccgccgccaccgaacactgtcgccgcggacgcctcttcgtcccgcactggcccggccccgcggcgccacggcggcggcggcggcggaacgcccaaggcggccatcgtcgtcgcctctgcggccgcggcggccgtcctcgcgctgctcgccttcgccgccgcgtttctcctgacgggccgtctcgcgcggcaccccgcgtggacgcacaaacccaccggcctcgccgccgccgcgcaccccgggccagcctccgcggtcgtgctgcacgccgacgcggtgggcacctctgcggcggcggcggcggcctcgtcgtcgggtgcgactgccacttccacaccgcaccggaaagcccgctcggagcgcgccaggtggggcatgtgccgcgacgtcgacaccgtcccgagcctggaactcaggccgctccccgccgctccggcgcgcggggtttccgactag

SEQ ID NO: 13656 - DNA, 276 bp, Zea mays
  Peptide Sequence Number=SeqID_55435
atggctaaaaagcttgcaaaaggtgttgccatgctgcagccgcggagtcacaaagcatcatatgtttggttggcgtattatctcatcctggctcatgagatgcaaaagacgtacctcagccaggctctgcgtgaacgtaaccagagagcatctcgccgcatgcaggaatccaggaaaggtgtgctctctggttcgcagcctagccaagccagcagcatgccaaagctgaccgctgcaacgacgacggcgagcaaagtagcaaacgacggcggatga

SEQ ID NO: 13657 - DNA, 476 bp, Zea mays
  Peptide Sequence Number=SeqID_55436
atgacgattaaaattttattaataaagccgcgcggctgcgctccagcctccaggctcctgctcggctggtccaactccggcgtccggcgtgctactccaatgctccagctcccagattcccccgcccgcccaggtccagcgtccatccggccaacgaaccagcatccgctgcaactccagtgtgccactccctcgctgcaagctccggccacaacgcaagctcttgtttgcactcaagattggatgaggcgtgcatgtcatatcaccaatgaagaggatactgaggagttggccaagctggaagaagcactttttgcggaaatggatagttcgaatattgccaacaatactgatacagcttctaaggacaaggaaattgcgctcaggcatggcgtgagtggagttggtggacaaggacacaaggtggtggactgggctgctgacactggcagcgtgtgcgtgtctgtgtgtgactg

SEQ ID NO: 13658 - DNA, 2439 bp, Zea mays
  Peptide Sequence Number=SeqID_55437
atggctcttgaaacggataaacggaattctagagaagccaagaaagttggtggaaattttcagcgtcatgactccctatatggggatgcagaaagagtatcagacacaggatacgttgtctctgagtgcattggagtgatatacggcgacataggcacatcacctctgtatgtgtatgcaagcacctttacaagtggcatcagcaacgttgatgatctctatggagtcctgtcacttattctttacagcttaattcttctacctatgatcaagtatgtcttcattgtgctgtatgcaaatgacaatggagatggtggcacatttgctctttactcgttgatatcgcggtatgcaaaagtgagcttgattccaaatcagcaagcagaggacgcaatggtctcaaactacgccctggaaaccgtatcagcccctatgaagagggctcagtggacaaaagagatgctggaaagtagtaaggctgctaagcttgcaattttcctcctcaccgtgttgggcacctccatggttatcagcgatggcgttttgaccccagcaatatctgaccaaatggtatggatctctgtcgccattctagtggtgctgttcgctgtccagcgttttggcacggacaaagtgggctactcgttcgcgcccatcattctgctgtggttcatgttcattgctggcattggaatctacaacttggtcgagtacgacattggtgtcttgagagccttctatccaaagtacatcgtggactacttcagaaggaatggaagggatgcatgggtgtcccttggcggcatccttctatgctttacaggcacagaagctatgtttgctgatctaggccatttcaacataaggtcgatccagctcagcttcagcttcattttgttcccggcggtgtcgttagcttatattgggcaagcggcgttccttcgcaaacacccagaacatgtccatgacaccttctacaaatcaattccaggaccgatgttctggccaaccttcatagtagctgtctccgctgcgataatcgcaagccaggctatgatatctggctcgttcgcgatcatttcgcagtcacagacattgggctgctttccaagggtcaaagtactccacacctccaaactctacgaggggcaggtgtacattccagaagtgaactttgtgcttgggttactctgtgtggtggtgacattggcattcaagacgacgaccaacatcggaaacgcgtatggaatttgtgttactgctgtgatggttatcacaactatcctacttgcagttgtgatgcttctcatatggagggtgagcatctggctgattatacccttctgcctggtattcggttccatagagactgtctatctttcttcagttctatacaagttcaaacaggggggctacctgcctattgtgagcgcaacagttctggtgacgatcatgggtgtttggcactacgtccatgtgaagaaatactggtacgagcttgagcatatagtgacaaaccaagagatgcaagagctggctcaagcacacgacataaaaaggacctctggggtaggcttcctctacacagagctggtgcagggtgtcccgccaatcttcccccacctcattgagaaaatgcccttcgttcactcggtcctagtctttgtctccgtcaagcacctgcccatccctcgcgtcgaggttgcagagcggttccgcttcaggagagttgaatcaagaatctccaagatgttccggtgcgtggcacggtatgggtacattgacaccgtagaaggggctaaggagttttctgcctccctggttgaaggtctccaatcatatatcgaagaagggcattttatgacaactgtggagattgaggacactgagcctgaaacaacaacaacctcgatcacggagagtcacacaagaacacgtagctccacagtgcacattgaggaggcactgaggccaagcgaaactacagagctcacccagcctcgcatgggcagcagctactcagcacactcgtctggaaggatcagcgatgaacagtcccgcgcaattgcggaggagaaacaatttgtccagagggagctgcagaaaggagtagtctatatccttggagaaactgaaatctgggcaggacccaattcttcctttctcaagaagatcgttgtcgactacatgtactcgttcctgaggaagaacttcaggcaaggggagaaggcttttgcaatcccaaggcagcaggtgctcaaagtggggatggttatccatttggcgtcacagaagctctcaagttgggccatccttcagcaaaaggagttgcggccgttggttgtggagggttggctatgtgcattaggcagaggccggaagtttgtgtaccaagacttttttttgcgaaaaggcaggaggtctgccaagatatattga

SEQ ID NO: 13659 - DNA, 2541 bp, Zea mays
  Peptide Sequence Number=SeqID_55438
atgtcgctggaggtggacaacccagctggaggagcaggcggcggcggcgagtcggccaaccggctcagcctgaagcgccacgactcgctcttcggcgacgcggagaaggtgtccggcggcaagtaccacgggtccgagggcagctgggcccggacgctgcacctggccttccagagcgtgggcatcatctacggcgacatcgggacgtcgccgctctacgtctactccagcaccttccccgacggcatcaagtacaacgacgacctgctgggcgtgctgtcgctcatcatctacaccctcatcatcatccccatgctcaagtacgtcttcgtcgtgctctacgccaacgacaacggagacggcggcacgttcgcgctctactcgctcatctcgcggtacgccaagatcaggctgatccccaaccagcaggcggaggacgccatggtgtccaactacagcatcgaagcgccgacctcgcagctgaagagggcgcagtggttcaagcagaagctcgagtccagcagggcagccaagatcctgctcttcaccctcacgatcctcggcacgtccatggtcatgggcgacggcacccttacgccgtcaatatctgtgctgtctgcggtgagcgggatcaaggagaaggcgccaaacctgactcagacgcaagtggtctggatctccgtggcgattctcttcctgctcttctccgtccagcgcttcggcaccgacaaggttggctacaccttcgccccggtcatctcggtgtggttcgtcctcatcgccggcatcgggctctacaacctcgtcgtccacgacgtcggcgtgctgcgggccttcaacccgtggtacatcgtgcagtacttcaaacggaacgggaaggaagggtgggtttcgcttggcggtgtcatcttgtgtgtcacaggcacggaaggcatgtttgctgacctaggacacttcaacatccgggccgttcagatcagcttcaacggcatcttgttcccatcggtggtactgtgttacatcggccaagcggcgtacctgcggaaattcccggagaacgtcggagacaccttctacaaatccatcccagcacctctgttctggccaaccttcatcatcgcaatccttgctgccatcatcgcaagccaggcgatgctctctggcgcgttcgccatcctctccaaggccttgtcgctgggctgtctccccagggtgcaagtgatccacacctccaagaagtacgaagggcaggtgtacatcccggaggtgaacttcatgatggggctggccagcatcatcgtcaccattgccttcaggaccaccaccagcattggcaacgcatacgggatctgcgtggtgaccacgttctccatcaccacccacctgatgaccgtggtgatgctcgtcatatggaagaagcacatcgtctacgtcctcctcttctacgtggtgttcggcctcacggagatgatctacctctcgtccatcctgtccaagttcatccagggcggctacctccccttctgcttcgcgctggtcctcatgacgctgatggcgacgtggcactacgtccacgtgaagcggtactggtacgagctggaccacatcgtgcccaccaaccagatgacggcgctgctggagaagaacgacgtgcggcggatccccggggtggggctcctgtacacggagctggtccagggcatcccgcccgtgttcccccgactcatcaagaagatcccgtccgtgcactccatcttcctcttcatgtccatcaagcacctgcccatcccgcacgtgctgcccgcggagaggttcctgttccggcaggtcgggcccagagagcagcgcatcttccgctgcgtcgcgcgctacggctacagcgacgcgctggaggagcccaaggacttcgcgtccttcctggccgacaggctcaagatgttcatccaggaggaggtcgcgttcgcgcagaacgacgcggagaacgacgacgaggcggcgacggaccaccaggcgccgccgaggccgcccaggcggtccacgggctctgtcgtgcacagcgaggaggcgatccagtcgagggggagcacgcactcgggccggatcaccttccacgccagccagacggcggaggaggagaagcagctcatcgaccgggaggtggagcgaggggtggtgtacctgatgggggaggccaacgtgtcggcggggcccaactcgtccgtcctcaagaagatagtggtcaactacatctacacgttcctgaggaagaacctgaccgagggccacaaggcgctggccattcccaaagaccagctgctcaaggttggcatcactgtggttttatcaggagtgcaagcgaaattggaaaaagcacagagcgccgcagcgggctgctcagctgctcgcctgctcctcatctctggcggcggcacggcgctctgctcggctgctcggcagacggcattcccgctctggcgaccggcgctccactgcggcgctgcttgtcttggcctgccgtccgccgaggcagtaagccagtaa

SEQ ID NO: 13660 - DNA, 1233 bp, Zea mays
  Peptide Sequence Number=SeqID_55439
atggaggcgtgctggtgttgtgctggcatggaagggaagcgtgctggagttgtgttggcgaggaagggagtttcatttaaactatcaaagagaaaggtggatgagaatctccagagcctccatactgtattgtatgggagaaaatcaaataaccattttctgaagagaaacatatctcaattttctgggtttgtttggacagacaatcaagaaaaacagaggaacagaataaaggaaaagcttgagaaatttaacaaggagaagttgctagatttttgtgaaatactggacgttattgtaaaagtaactatgaagaaggaagaagtttctgccaagctcttggaatttttggagtctccttgtgttactcgggatgttgttctcactgataaaaagaaggggaagaaacggggaagaaaatctaaagtaggtcgtgagacaactgctgaaggtgcttctacagagaagaaaaggaaaagagcccataaacaagcagctgaagatggtaaagagaatgatggtgaggatgatgatcccactggttctgaggatgcatcaacaggagaggaagctgatggggactctgaggcaaatgatcatgctttgagtgatgatgaacatgatgagcctgcctcaaagaaaaagtcttcagatgttaaacaaaagaaagaaacaggttctgatgcaaaggaaaaggatgcaccagggaaaaaaggttctacgaaacgtgcatcaaagccttctcaaaacagtaaaaatgagcctgaggtagagataaaaaaggttggcaagagagaaaagagttcaaaagaaactgacgtgtcaccagattcaaataagtcaaacaagaagatttctaaatccaaaaagggtgatggaaaagaaacccaaaataataaagctgccaggtcatccaataagagtaaaggtaaagtcaaaggtgggtcagtggctgggactgccccaaccactgaacagcttcatgctgttgttagtggcattttgaaggaagttgacttcaacacagcaactttggctgatattctcaggcaattagggacccattttgaaatggacctcatggacagaaaagcagaagtgaagcgcattatagaagatgtaattaatagtatgtctgatgatgaaggtgaggaaggctcagaagatgaagctgaagacgatggtaaggcggataatttaaagagtgaacccgatggaggtgaagagaagtga

SEQ ID NO: 13661 - DNA, 966 bp, Zea mays
  Peptide Sequence Number=SeqID_55440
atggacaaagaaaagaagaggaacataaaagaaaaagcccagaattctttccccttcatttcccccttcctgggccgctcggcctccctggcccacgcgccttcgcctccccccccgcaccctgctcgcgctcctgggccgctgcgcgcgcccacggcccagctggaccgcgcccctggctcgctcccacagcgcgcgttgccggcccaccccgcgtggcccagcgcgcaggcacccacacccaggtcgccaggccagcgccccctccctggcccagcaaccgcgacccacccagcacgctcgcgaggacgcgcccggccatcgtgcctcgctcccgcatgggcgaacgttgcccctgccctcgcgccgccgggcccaccggccaccctaatcaactattcatcttctttaggcactcttcatgatttgcgctcccattccgccaagaaccgcccagctactcgtgctcctgtcgatctcccacccctccactccccgacggttggtggccgtctcgccaaagtggcccagccggtgcagccgagatggcgaagggcgatgggcgcagaggaggaccgcgggggcttcgaccggccatgcggcgacatcatccatggtgtcgacaattggggcatggagctctggcggtgctgctccgcccaggcatcgtccgatgtgctcaacgctatcgacacgtgcgctacggtgctgcagaccgtgtggctcgtctccaagacatgcgacaacgtctctaggaaagagaagcatgagatgatcgtgtcttgccccttcctgctgtacctcgtctcgtcacaggataaggctgtgcagacaacgagcagtctgtgtttcctgaggaagttgcagaggaagtccctgatcagcagtttggtgaaggcaagtaaagaagaaggcgtcgaggtggatctccaggagttccaggacttcgacgagttcgaggattag

SEQ ID NO: 13662 - DNA, 153 bp, Zea mays
  Peptide Sequence Number=SeqID_55441
atggcctccgccgtggccctgtacggcgccgccctgatgctaggcactaaattgggggtgaatcagtatcattatgttaattggaacatggagcgaccacccggaaaaacagtgctaccacaagggtttaatgggacgcccttggctgattaa

SEQ ID NO: 13663 - DNA, 153 bp, Zea mays
  Peptide Sequence Number=SeqID_55442
atggcctccgccgtggccctatacggcgccgccctgatgctaggcactaaattgggggtgaatcagtatcattatgttaattggaacatggagcgaccacccgggaaaacagtgctaccacaagggtttaatgggacgcccttggctgattaa

SEQ ID NO: 13664 - DNA, 336 bp, Zea mays
  Peptide Sequence Number=SeqID_55443
atggccacgctggacaccgactggtggtccccattgctagccactcagcgccagcccatctcgatgttgggcgcgtcgacaggtaggcccgccagaaggttaggaggggtctcctgcaaccaaggaaggtgcacggatgatctatcgggcgtgaagaaccgccggtcgaatgcaatttctcgctggacctcgcggatccaccatgggccgctgcgtaccgtgggcgtctatgtggacatcgtccctatctccgacgagccagtcaccgaggatccaggtgttcagcaggtagaagttgttgagcaggagctcattcaaggcacgttgttcccttga

SEQ ID NO: 13665 - DNA, 534 bp, Zea mays
  Peptide Sequence Number=SeqID_55444
atggcgcctcctgtgacgtggtcggtccgagccctgggttgggcgaggtgtaggctcctccgaggtcgaggtcgagtctgtcttccaaggccgaggtcgagtccgagcccctgggtcgggcgaggcagagactgtcggctgaggccagggctgagtccgagccctggggtcaggcgaagcggagttcatcgtcttccggggctgagcccgagttcgtcgtcttccggggctgagcccgagtccgagccctggggtcgggcgaagcgtagttcatcgtcttccggggctgagcctgagtccgagccctggggtcgggcgatgcggacctcactctatcgagtggcacagcagtcggagcggcacaggcggcgctgtcctcttgtcaggccggccacctttgcattaaatgctcctgcgatactgttggtcggcgtggcgacttggccaaggttgcttcttggtgaagactgggcctcgggcgagccgaagctttgtgctgatgggggttaccagctgagattaggagtcttgagg

SEQ ID NO: 13666 - DNA, 351 bp, Zea mays
  Peptide Sequence Number=SeqID_55445
atggtctatgctgcagtggcagatgcctccgggacggaggttcttgccgcccgcgaggaccctgaaggcgtgccaagggggggcaggagacggcggcaccgaggacgagggacggggtggcggttgaggatagaggcagggtcacgacctcttcgaagatgggtgcgagggcgaggcgacgtgccgaggacggtggtcggacatttggggggcatcgcggcaccaaggggcggggtggggacgcaagcggcaattgctagcgggcatctcgcgacaggggcagcgaagatgggagcggaggcatggaatcgctgtggacgcatactttacattcttaatagagtagtatag

SEQ ID NO: 13667 - DNA, 573 bp, Zea mays
  Peptide Sequence Number=SeqID_55446
atgggagcggacggttccattccagattttgagagtggagcggctccattccagattctaagagcggagtggaaccgttccattctctgtttgggcccaccacaaagagagggagaagcggatcatactttttccatgttaagatttgttaacgctgacatagttttatttgggaaaacatccagcttcatctttgaaaaattcaagctactgtttgttgcactccgctacgttactgcctccgtgctctacctcaaggcccatcactacagcatcatcatcaccctgcatatgcctttgctttgtgcttgttatagtgctattttctacaatgcatttctgtcatatgaagggaaagacttgtcaaatgtagaacacccctttgatgatattacctacaatatacctgagaagccagtgacatttactgaaggtgcttcttatagtcttgtaatactcgccgggctcggaattgcaggactggctggatatgctgtgttcaaagagcttatatttgagccaaaagaaatgataaatgatacaactgtgactaattgtattttgacattataa

SEQ ID NO: 13668 - DNA, 2100 bp, Zea mays
  Peptide Sequence Number=SeqID_55447
atggaggcaactctctttgacatgcgtaatgctgacttcctagacagccatcatctgcagcaagcgttcgagcagcaactctttgaacagatcccagccgccgcagtggatagcagcgacaacatcatccacggtcgctccgacgcgctggtggacgagtttgagagcaagtcgtgcagcgagaatcccgatggcaccgcctccggcgatgatggccagggggacgaggaccctaaccagcggccaaacaagaagaagcggtatcaccgccacacccagcaccagatcgaagagatggaggccttcttcaaggagtgtccacacccggatgacaagcagcgaaaggagctgagccgggagctcggtctcgagccgctgcagaaccagcacgagcggcaggagaacgcgcagctgcgcgcagagaacgacaagctgcgagctgagaacatgcggtacaaggacgcgctaggcacagcgtcctgccccagctgtggcggccctgccgccctgggtgagatgtccttcgacgagcaccacctccggctcgagaacgctcgccttcgcgacgagatcgaccggatctcgggcatcgccgccaagcacgtcggcaagcccatggtctccttcccggtgctctccagcccgctcgccgcccgttccccgttcgaccttgctggtgcctacggtgtccagccgcctggtggtggtggtggcctcggcgccgctgaccacctattcggcggtgccgccggcgacctgctgcgaagcgtgtcggccgggcagctcagcgctgacaagtccatgatcgttgagctggccgtcgctgccatggacgagctcctccggatggcgcgggtcgacgcgccgctgtggaacgggggcgtggcaggggtgccgcagcagctggatgaggaggagtacggccggacgttcccgggcgggcttgggcccaggcagtacgggcttcgtccggaggcgtctcgagacgacgccgtcgtgatcatgacacgcgacagccttgtggagatactcatggacgcgaaccgatttgctgcagtgttctcaagcatcgtgtcgagggcttctacgcacgaggtgttgtcaaccggtgtggcagggagctacaatggtgcattgcaagtgctgacaagattattggctaatcatcaacttgcagatgtcaatggagttccaggtgccgtcaccgctggtaccgacacgggagagctactttgcgaggtgacctgggttgagcatgttgaggtggacgacagatcagtgcacaatctctacaggcctttggtgaattcaggcctgggatttggtgcgacaaggtgggttggcacgctggaccgacagtgcgagcgtctcgccagtgccatggccagcaacatccccaacggcgacctcggtgtgatcatgagcatagaggggaggaagagcatgctgaagctggcagagaggatggtggcgagcttctgcggtggcgtgaccgcgtctgcggcgcatcagtggacgacgctgtcggggagcggagcggaggacgtccgcgttatgaccaggaagagcgtggacgacccaggcaggccgccgggcatcgtcctcaacgctgccacctccttctggctgcctgtcccgcccaagagggtcttcgacttcctccgcgacgagacctctcgcagcgagagcgcaaactccaaccagagcaacatgctgatcctccaggagagctgcacggacgcatcgggctcatacgtggtgtacgcgccggtggatgtggtggccatgaacgtggtgctcaacggcggcgacccggactacgtggccctgctgccgtcaggcttcgccatcctccccgacggaccgccggcgccgggcatggctccccatcacggaggagagggtgctgccggcggcggcttggaggagttggaggccgccggcgggtccctcttgacggtggcgttccagatcctggtggactccgtccccaccgccaagctctcgctgggctctgtagccacggtgaacagcctcatcgcctgcaccgtggagcgcatcaaagctgccgtctgcggcgctgaaggcaacccacagtag

SEQ ID NO: 13669 - DNA, 519 bp, Zea mays
  Peptide Sequence Number=SeqID_55448
atgggcacacggctggggagagcgcgcgccagagggaaagaagatccgggcgcagggcgcgcgtggaagctgcaagtagagctcagaggaacgcgcgacagtgagagggcagagggagagaagcgcgtgctggggaaaaaatgcagcgccgtgagagctccacgtcgagggagaaggagctccggcggccatgggatgcgcgcaaagaggagggagaaaaactggcagccggcgcttggagaaagttgggcgctgtgcgagctgtgcgcagagaaacgcgcgcgccataggagacagaggagcgcgccagtagggagctcgcggttggccacagaaatccgagccagagggcgcggcaggggaggagcgcggcgctgggaggaagatggcagccatggcagggagcttggggaagccgcgacgcaggaagaagctagaacagggacggacagggagctccgagcggatggacgcggctgcgcgcgagcgaacagagggaaggacgcgcgcaggaactag

SEQ ID NO: 13670 - DNA, 258 bp, Zea mays
  Peptide Sequence Number=SeqID_55449
atgcaagatgctgcacggcgtgcgcttccgctgtactgctcattgttcagcggggtaactaacggccttgacctgaagtactaccctcgttgttcgaccggcagtgctggaggggcaattgtatcaccagttggtgagggaaatctcatgctgaacagcatggatggtggttccctcgctcctgtcgatattcggtacccttaccgcttgccgtcccgtggtcgctttgcttatggcatccctgactgcaggacctag

SEQ ID NO: 13671 - DNA, 387 bp, Zea mays
  Peptide Sequence Number=SeqID_55450
atgaagcttcaaggagagttgcatcatcgagatctaggttttcgtgcagcaatggttacacctctcgacataagggggaagggtaccaccccttcatttagcaatgaagtttcaaggagaacttcaaggagagggatgacatcgagtcttgggctctcatgcaacaatggttccaactctagaaacagctggagctccgccgccgtcgacccgaggcctccctgcgtcctcgctgttgctcaagcgctccagagtctccactcgagaccttcgtcgtggccgtgccctcgcctcctgcgaaacctcgccgaggagacgggcggcgccgccatgagcaggccagccacccagcccgagcccaccatcagatctcaggcgtccatctag

SEQ ID NO: 13672 - DNA, 1974 bp, Zea mays
  Peptide Sequence Number=SeqID_55451
atggtggtggagcaatttgatgagggcggtgagttcggctgtgttggaatcccccatggctggtgtgtcagatgcggcagcagggttggggtcctgctcttcttctccgggactcgccggcgtcaaggccgcagccccaagaggctccttctctggctggcataccagctggcggacagcacggcaatgtacgccctgggcaacctctccctcagcagcacgctgcggcagcaccggctggtcgccttctgggcgccgttcctgctgctgcacctcgctggccccgacaacatcacggcctactccctcgaggacaacaagctgtggaagcgccacctgctgacgctcgtggtgcaggtgctgggtgcagggtacgtcatctacaaccatatcgccggcggcgggatcctcttctcgctgggcgcggccttgacgacggctatcgcggtcgccaagttctgtgagaagacgtgggctctccggtgcgccaacttcggcgtcatccgggagtccatggaggcggaggacgccgagcagctcggaaaatgtgatctttacctggaggacagaccgcctcgaggagggttcagagagaaggtggtggagaaggaagagttcctcatgctgcgcgcgcacgccgtgttccgggtctgcaagtccgccatggtggattcctcgaagaacccagggagctacatagttggcatacttaaaaacctcaaggagaaggagatggggtacatgtggacgctggtggagatggagctgtccctgatgtacgacatcctgtacaccaaggcgcccgtgatccacactctgcgtggctactgcatccgcgtcgtctcgccgctcgccgtggctgcttccctcctgctgttccagttctacggcagggagggcgccaggaccgcggacgtcgccgtcacctacgccttgctgggcggtgccttcctcatggagacgacggcgctgctgagcgcgctctgttctacatggacgttctccttcctttgcgcgacgcggtggagtagtcttcggcactctgccctgtgtctggagcggtggcaccggcttcgtcgcatggtcctgtctctccgccggcttgcccacagcactggaattgctggcttcttcaggctgtcaaggaagtggacgggcaccatggggcagtacaacatgttagagatgagcaccgcgaggcctggctggtgggcaggctgtgacatgtttgggatgtgcactgtgatgcatgactggttggcaggccatggcatgccggctgttgctgttccagatggtctgaaagatttggtggtcacttacatacagcacatgatcagaagtgggtacatcaacacaccgggaatggtcagagggagttggagcacggaggcgctggagcgctggaaggaacatagtggcattagtattgatagcaagttccttggttctgagctccaagaggggatcatcatctggcacattgccactgacgtcttcctcgccagaaggcaggccgagatcgagggccgagataaagtgaaggaagtgcaggtactgtccaactacatgatgttcctcctcgtcaagcgacctgacatgctaccgggccttgctcagaacaagctgtaccagtggaccaagacgagcttggccaccaacgtggctaattctgacgacgtcaatcctgccagcgccctatacaagatggagatcactggacatcatgtccagaagtttcgactattgctggcaatcgagttggctaaaacactggtacacaccaagaacgcgctggagctggtctacgaggtctgggccgattttataatctacactgccaaccggtgcagcagggagtcccatgccaagaagctcaacagtggtggcgagttcacaaccctggtatggcttatgacggaccaccttcaccaagtgcgtttcaacaaggatctttacccacctagtgaataa

SEQ ID NO: 13673 - DNA, 162 bp, Zea mays
  Peptide Sequence Number=SeqID_55452
atgacgaaggtgatgcttgccgaaggtgttcaaaactcaaaaatggaaacattatatcccttcgggtataatgaattccagacgaaggttatgaaggaagaaaccttcgtaagttcgatagatgataaggaagaatttcgtatatgggaatacaaagaataa

SEQ ID NO: 13674 - DNA, 177 bp, Zea mays
  Peptide Sequence Number=SeqID_55453
atggcgaagggcgacgggcgcagaggagggtcgcggggacttcgatcggctgtacaatttcctggtgtgagcttgcatcctggcgcatccattgaacaccagatctctggactgaaaacttgtgagccggagtttcttattgctacccctgagaggctactaatcttgtttcgttaa

SEQ ID NO: 13675 - DNA, 204 bp, Zea mays
  Peptide Sequence Number=SeqID_55454
atggccagacacgttctcgcgagcgcgctgggtgggccgcagttgctgggccagggagggggcgctggcctggcggaatgggcgtgggcgcctgcgcgctgggccgcacgagtttttgaattcaaaatatacctttgccttatgaatctagacgaatgcataacaaagcacaatcatcataaaaaaatgggtgctccagcatga

SEQ ID NO: 13676 - DNA, 318 bp, Zea mays
  Peptide Sequence Number=SeqID_55455
atggccatgatgggttcaacatcggaaaagatgtacctctgccagagtctcggtgtagtgtctccgtctgagtcgattaaggaccatctcgatgtaggcctgctgactgaggaccctttagctggtcacatgcctcatcatggaagcagtggaaaagaaggaaaattgctccttcaaatataccggccaaaccatgaggtcaagtataccttcgacaaggaatcacgaaagaatgtaccaataacacaagacatgcctttggcagagatgtttttgtatagggatggtaccttcatcaacagtattactatacaatag

SEQ ID NO: 13677 - DNA, 1743 bp, Zea mays
  Peptide Sequence Number=SeqID_55456
atgatgcgccctggtgctagagaagcggatggtttcgaggaccatcctggcgtagagtcccatcttgagggtgaacaggagatcgaagaaattggtgcatctatagtgaataattgtccagaagacatggttccaaaaattggaatgaaatttaactctgagcaagaggcatatgacttttataatgcttatgctagagagataggtttcagtatccgaaggaacgactgccattatgtggggacttctttaaatatcaagactagggtattttgttgctcccgtgaaggagctcgtcgttttgacaaaaggtcaaattcagttgacaaaaataagagtgccattaggtcagagacacggtgcatgtgtcaagcatctatgaagataaaccttgtagatggattctactatgtctatcactttgtgtcccaacacaatcacaaccttgccactaaagaacagaatcaccaattaagatcacaaagaaaaattgatgatgcacaaatttcaaggatagaagttgcaaaatctgtaggtatcactacaaaagcagcggtcgatttgttggcaaaagaagtaggtggaatggagaatcttggattcactcgtgtagatgtgaagaacagattatactcaaagagatcactaaaggtacaccaaggggacactggaggtgtattagaatatatggagaagaggacatcagaggatgctaagtttttctactctattcaagttgatgaaaacgatctgattactaacattttctggacagatgctaaaatggttgcagactatgaatgttatggtgatgttgttggctttgatacaacatacagaaaactggacagtggtcgtcctcttggtttgcttgttggagtgaataatcataagaaaacaactatttttggggctgcgcttctatatgatgagacagcagagagttttatttggttgtttaggacatttctaaaggttatgtctggaaagaaaccacagacaattttgacagatgaagatgcagcaatggctaaagcaattagaatagttataccagatacccatcataggctatgcgtgtggcatatgaatcagaatgcatgcaaacatcttgctacaacagttaaggattataagaaatttaatagcgattttcagaaatgtatttatgatctagaagaagaggatgattttatacatgcttggaacatattgcttgagaggtttgagcttcaagatgagaaattggcagaagacatagagaataatttgaagattaagcctagctcaaacctgaacagttcctctactccacgaggctcaaaggaaactgtgcagactaggaagccaaggggtgtcaaggtcaaggcaaaggaaattcgtggatcagcaagacctattggtggcttagagaaatcatcacgaaacaggaaaaggataataaaagacactaatactatggcgcaagcaccaccaccacatccacaagcatcagagatgaaaatatacaaatacatgtggggcagtggcagcctcgacgtcttttttgtgcgcctcctcgcagctagcagtggctgcgaactcacagggaagaccaagcaacgcaccggtgttagaggcgacgaacgggtgtctgaaggcgagcaacagagtcagaaggatgcaacttctctcatccgtgcagccgcggcagacagcaagcagaagcaccgacgcaaggcgattaggcgatgtggatcttga

SEQ ID NO: 13678 - DNA, 273 bp, Zea mays
  Peptide Sequence Number=SeqID_55457
atgtctgttgcctcggtaagctccgccttatcacccgcaatccgggacgcccttcggctcgccccctccgcctctggttcgcttggtccatgctcaccggagctttcctcgtgcagccgcagttctgtcaccgtcgacccgcgtcctcgtcgtgccctggactttgttcgagagaccccgagcctcccctcaaggtatcttcggactcgagtcggtatcacagtaggagaagcccaaaataatacgaaggttgatacagcgccgaagatgtga

SEQ ID NO: 13679 - DNA, 522 bp, Zea mays
  Peptide Sequence Number=SeqID_55458
atggctggactgcggctgctgttatgcccttcccagctatttaggactatttcacatcctcacatgcaagcaattatctatccgattctgcaacagcttgagagtagtttgatcgagagggacctgaaagggaagggtcgatgcaaggatatagtgagtaggaggaggatggaggattggaaaaaggtttccggtagggatgtggaaagggaggatgaatgcgggatctgcatggaggcatgcaccaagatggtcctgcctaattgcagtcatgcaatgtgcataaagtgccatagggactggtataagagatcagagtcatgccctttctgtcgaggaagcctcaaaagaatatgctcgacagacctttgggtgcttacaaattccaacgatgtcatcgaccctgcacatttagaaaaggaaaacgaaaggatacaactagagactactcgattatacaggcaagctggtgtcagcccctttagcatgtttcttgaatttttgcctcctaaaccatactga

SEQ ID NO: 13680 - DNA, 972 bp, Zea mays
  Peptide Sequence Number=SeqID_55459
atggaacatggtgttggcatgccaccattaatcttcgatgggatgaactacctgtactggaagatccgcatgtcagcatatcttcagagtattgggtcgaaggatggatgctacaactgtggtgaccccgaccacttcatcgccagttgccccaagaagggcaagcaggaggcttgcccacgcaaccaccattctggtcagcgcaagggcaagcaggagtacacctccagcatgcacaagtccaagggaggatttgtcaatgaggagctaaagaagaagtgcctctacaaggcgaagatcaaggagtgtgcctttttcgccacccttagcgacctcgaccatgactctgacgatgaagcatcttcctcgagcaacgaggagactaacaggcgggtcgaggacaagctgaacggttatgtttcatcgctgacatcgtatgaggtctttgcactatggctcttggacatcgatggtggctctgcttctaaggtatcacactccgccgatgatcttgccactaagatagaagagttgaatgttgttttggcaaatcaggacaagttgcttaggcttgctgctcatgagaagaaagattttaaatttaagtatgagagcacacttagggagcttgagtctactagagcttcagttgtggtgtccgacgagactgaatgtgatgggtgtgcctttcacatgttgaacatcgccactttggagaccaagcatgccaccttgctagatgagcgcgatgagttgatatctagatctagcttgttaggtgcctgtaccgcttgtcctagcttgcaaactgagctagcggagagaaacgctaggatagcctcgcttgagaaggctaccttagtgagtgcatctgcacctactcagtgtgctatttgtgagggtttgcaatatgctcttgggtcctacagacatgacaagacccagatcgaggaagaaaacacatacctttga

SEQ ID NO: 13681 - DNA, 465 bp, Zea mays
  Peptide Sequence Number=SeqID_55460
atgggggtttctttggtgaatgatggtcctgtgacaatgcaaatcgactcaccctcaccgcaagatgttgctcggtcatggtacattgaaatatggagtgcactgtactgtaggtgtgtcaggctttctactaaggctgttggagttcaagattattatggcttgctaaaaagtatattactgtggtatgatggcctctgtctgattgtgacaagcctagctgacccaaatctctcggaccatccactgccattcatacgccatacacatccatcctcaataccttctatctatttaaaaacccctaatcgatcgatacgccatacgccagtgaagccacgggtcgctaaggacacggtgctaaagtatgtacctgttcattttattagtttgtacaactctaaaattcaaatgattttgctatttgctgaaggtcagtgttatttgctgaaggggagctcttaa

SEQ ID NO: 13682 - DNA, 1035 bp, Zea mays
  Peptide Sequence Number=SeqID_55461
atggcgggggctctcctctcctctccgcacactctcccgagccccacatctcagtccccgttccgccccaggcacgcactccctctgccgcttacacgattccctgctcgccgcctattcgtgttactgtgcacagaacacccaccctccttgactgcgctcctgattttggttcctggggattgcgcaggagcaggggaccactccacgctggggcagcgcgtgttctgccaccgaggaggagggcctttgtgctcgcttcgtgctctcgcgagcctgccgctaggaaccgcgggttggaggtggagaggaggcgccttctcatgtccgggctcgtgtcttctttcgcaatcatgctccccatttcagtgctttgctcgcaacgattctgtagaagcatatgctgtcatggagactgatgaagacgtgaagatgaacacacaaattgatgagatcaatgcatactcttttctttacccggtggaactgccagggaagaaatttaccttcaaatgggtagagtccagaaaaccagagcgatattcctctgcagcgccactatcgcgtctctatgcagctgatgcaaggcaacgtatcgtatcagagcgagttgacatgatacacaatgttgtcatctcggtctcgattgggccaccgaattcacgttttttgccttcaaaagacaagagctcgtgggatccaaaagatgttgctgattgcattttatctgatagatctaccatgaaggtgacaactggccagcgcatgacagagagttctgtccttgacgcacacgttgcagaggttgatggagaaccatactggtattatgagtatcttgttcggaaatcaccaacaaaatctgcaccagaaccaaatttgtttcggcacaatgtagcctgcactgctgagcgtgatgggtacctgtactcactgaatgcttccactcttagcaaacagtgggaatctgtatgtctcctatgtcccgttgttgcatactaccacttcagcaaagaaatattcttcagtgtttga

SEQ ID NO: 13683 - DNA, 236 bp, Zea mays
  Peptide Sequence Number=SeqID_55462
agacgacagaactggcgagcatggctgtcagcttctactggggttggcacgccgcctacgtgctgggggcggttgctgcagcgctcgagtttacacagtctggctctagcgcggtggggaattggtgcctcgcaccgccgaggctagtggtgacgcagctgagcgggtctcgaaggcccaggcctagtacatggccgactggaggtcccatggctcgtgaagctgagagcacctag

SEQ ID NO: 13684 - DNA, 1191 bp, Zea mays
  Peptide Sequence Number=SeqID_55463
atggccttggatcggcttgaagaagctgaggatgagatcaaacggctaaatggagaggcagaaaagcgcatattgatttttgatcctttagacgaacccattagacagcctggtttgcgtgggagaaaatcattccgcagtttcaaagtaactgaggatgctactactcaagatcccattgaggtactggcttcccaaacagcaactatgacaggatctcagttctcacaggatgttatgcatgctgttgctgacaaaaatgaacagtctgttccttcacgatctggtgaagctatttcagatgtttcaggaaaagaagattcattagctgagaaggatggccgtgatgatttggcttatttactgacctcgatccaagatttggatgaatctgaagaggaagcatttatccggaagaccttagggcttaaagaaataaggaagggaagagttagtctctgtaactccattcctggagtcaggtccttaagaagcgatactgaacaaaaaggttcaatgaaggttcgccctccagaaagtcatttgcctcagactcgccaagatcgaatttcagagttggagaaacatttatttcctggaggtgcagcaaatgctaaatgcacagatgatgaatctgaagggtcaccagatattgtgatgggtgaaccatcattagtgcatgattcttccgaggttctgatgaccaatgagaactctactggaagtgaaattgacaggaggaccccaaatctgtgtgccagagcagcagaccacgctcttgatcctgaaccaaacttgcctgatcatgcatacgaaaggcaaaccagaggctcctcacttggtttgtgcaaaaacacagaagttgccaatgaacacgaggcatgtagcaagagcaatatttctgtggagatgcttgttactaaagaagatgatgtacacatagaatatccaactactggcgggtctacttatcaaacagaagtttcttctcatgatttggagggcagcttgacagaagaattggtcagtgaaccaggtaggcatgcggctccagatgatatctataggacttcacatgcagctgaggatagcattcaacatctaattactgagtgtatcctgagatcaggttcctgttttgtggcacaggaagtggtcaaacagggtggtgttctacaagatatatcctag

SEQ ID NO: 13685 - DNA, 639 bp, Zea mays
  Peptide Sequence Number=SeqID_55464
atggctgaatataacatagacaagtcaagccagtcgttggagatgcctctggaagatattgatccactatatcggcctcagatgcatggtggaagcactaagaaatcgacacctgttctgtgcaatgcactgtccccgatcgaacagaagcaacaagcagctcaagaagggaaaaggaagcaacaggcaaagagggcccggcccttaggtgctacaccacctctgctgggagatgaatctagccatgcactggaaatatcccaagcaaatttcgaaccggagaatgaacctcataatgttgacgtgaacatggagcaaccgacagttatgagtagcgccaaggggcaaaagggagctcaaaggagaaacaagaccaaaaaattgaatcaaagaaaaatccttggagatgttgaccttgcgcggcagtctggagtgagaagaagctcaagaatacgctcgaggcctttggagtattggcttggtgaaagattactatatgggccgatacaggacactttgcctgcagttattggcatcaaagcatactctcctggccaggatggcaagaaaacattgaaagtgaaatctttcgtgtctgaacagtattcagatcttgtcgctcaatttgcgaagtactaa

SEQ ID NO: 13686 - DNA, 1136 bp, Zea mays
  Peptide Sequence Number=SeqID_55465
atgtctactgcgtcctttgtcacctaccttcagcggccccgggagctgccggcgccggagttccgggcgccgccgccgtccccggtcaccggcgttctgaccggcagcagcagctcggggtcgtccgggtacggcgagtgccaggatgacgacgacatcggcaggttcctgcgctgctccgccagggtcccagtgctgcgcctgccggaggggcccaggcccggcccacggagaaacaaaaacaagacggtggcggcctgggcgccgcctgtcgtcgacatgcgcctgcttgacccggtgccgtcgggggatggagggtccgcggtggaggcaatgagggcggccgccgtcgcgtttgggtgcttccagatggtcggacacggggtccacgcgagcttgctgtcggcagcgtcgcgtgctgccaagtccagaagatcgccggcgttggagacggaggggatgcgagcaggagacgaggacgagctgtggtggctgcggggcgaaggagaccaagaaatggcgggaactcagccgttgcgaaatggccccaaccaattcaggaacgaagcagacgatttgtttacccaacttgagcaggcttcaaccaagctcctgcacgccttgcagcacgccagtagtgcagcagctgaatcgttgcctaaagctgaagcgaacggctcgcttctctgcatccgcaagcaccgactcggcggcagcagcgcgtccggtccgatcagtcaagatgacgtcctgcggatgctggtacggagctcgcggtgctcccgcgctctcgccctccatctctgccccggcgcgtcggcgttccacgtcttctcgcggcgaggctggtccaggttctcgcccctcgacggcgccctcgtcgtcaccgtcggtgaccaactacagtgcgggctctacaaaagtgtgtccggcaaaccagcttacaacagtgacctccaaggagacagcagcgatgctatcgcggcagagttcttcctttcctgctcttcagcagctgcggcaaaggaggctcctccgaacatggacatggacgccatgaaaaccgtcccgctgaatctgcaaatcatggttgcagcttgccttgtgcttgtctactatgtcttcctgtcatgctc

SEQ ID NO: 13687 - DNA, 459 bp, Zea mays
  Peptide Sequence Number=SeqID_55466
atggccatcaagtcgctgagcatggtggaggccagcctgcctccggggttcaggttccacccgcgcgacgacgagctcgtgctggactacctggccaagaagctcggcggcggcggaggccctgtggtggtgagcatctacggctgccccaccatggtcgacgtcgatctcaacaagtgcgagccctgggaccttcccgacatcgcgtgcattggtggaaaagagtggtatttctacagccttagagatagaaagtatgccactggccagcgtacaaacagagcaactgattcgggatactggaaggccacagggaaagaccgtccaataagccggaaagggttacttgttggtagagccccaaagggaaagaagaccgagtgggttatgcatgagtttcgcatggaagggcgagatgatcccatgaaattacctttcaagttttccaataatatatga

SEQ ID NO: 13688 - DNA, 189 bp, Zea mays
  Peptide Sequence Number=SeqID_55467
atgtcgaaggtggatgctttgccgaaagttgtggaaacgaaggccatgaaggacataccttcctcatttcagcatataaatgtgaatgtaaataagaaagtaaaggaacacaaaggaataaagcctctttcagtcatcatcatacttgagctacgtcaacatgttcagccgaagtcccttggcttctag

SEQ ID NO: 13689 - DNA, 447 bp, Zea mays
  Peptide Sequence Number=SeqID_55468
atgcacccggctctgtcccttggaatcgggtgtgacataaggggaggaacaataccagctcagaacgcgagtcgaagccggtcctcggcgcagtgcggctccacgacggatgggaagtccggcgagcaattgcttgagtgtcggtggagttcaactcgaattgagggcacagcagctcccccaggcgaagaagattccctcagaccaacaccgaggacagggaacccaaggggaagagattcaccagtggcggatcgtgttcttgttaccgcggcggcaatggagttggcgttggctgtctcggggtcggtgctagatcgtgcgatgatcgcgtcgtccgccatgcacggcgattctgttgggaggaagcgtatcaaactgacttccaggtcccaccacacaaattcaaatttgaatttaaattttggttatgggattcatccatga

SEQ ID NO: 13690 - DNA, 291 bp, Zea mays
  Peptide Sequence Number=SeqID_55469
atgaatgagcatatggctagcatttttggccgaaaacggccaaagcagactccaacggagaaattagcggccgccaaggtgtcaaggggtcacggcgcaactctggagtgccccacagatatcccagagcccgtggtttacgtgttctacggcggcgacctcagatggggtgctgcccgggtcgacggccgcaacggcagccgtgatcagcgggaggtcatggagcctggggaagatctacagtgcgacccggtcgcgttgattggtcgctgcgagcgtggtcccacctga

SEQ ID NO: 13691 - DNA, 567 bp, Zea mays
  Peptide Sequence Number=SeqID_55470
atgggccatgacgcgaggggttccgcggcggagctaggacttccgacgaggaattccgtgtgcatagagactccaacggagaaattagcggctgccaaggtgtcaaggggtcacggcgcaactctggagtgccccacagatatcctagagcccgtggtttatgtgttctacagcggtgacctcgtgctctcccgacgagctcacggatgggtaggtcggaaacgaggaataggtcgcggcgtcttggcttttatagtcaagagatggggtgttgcctgggtcgacggctgcaacggcagccgtgatcagcgggaggtcatggagcatggggaagatctacagtgcgacccggtcgcgttgattgagtcgctgcgagcgtggtcccacctgaagagaaacgcgcgccgcacgcgaaggctggctgacccgtgggtcccgctagtcagtgattacggaagcgagggcgcgcagctcgtttctgccgagtgggcccaaggcattggtgtgtgcgtggcagcgcgtaggagcgagccgatttgtaggccctgcctgtcggcgttatggtga

SEQ ID NO: 13692 - DNA, 330 bp, Zea mays
  Peptide Sequence Number=SeqID_55471
atggcgagggtcgagggcgggtcggtcggcggagatcgcttggggagctcgcctctttggcgcgacaaagcccccaggcgcataccggtgatggcagagaagggaggggagaacgggcgggggagagaaaggagggaaaggggattggcggttatcacccttggtggagctcgaccgagcagctcaacggaagggtggcggtgctccgagcatggcaagtgcacatgcgacgacggagggggtcctgagactcggcaattgcgcggacagcgacactcctcggcgaacttcggtgaggcacggtgggtgaaggggagaggaattggctag

SEQ ID NO: 13693 - DNA, 345 bp, Zea mays
  Peptide Sequence Number=SeqID_55472
atggcgctccacgtcgtgcgcatgcaggaggaggacgaaggtcctaacacctgggacccttgggccagcctctcccgcgccgctgctctcgctctccccttcgagcctctagcgagtagaccccacccgccaggttgcgcccgtgcctcacccttcaccgctgaccggtggagccctgtggccccacgcctttatttagacgacgagcagttcgtggttcttaagcgtgttgccgaagatcttcctgagcaacaacctggtgaaggcaagtgtcctctgacctattatgtcctacatatttataattcactgtcccacattacaatattgaaacctaagtattga

SEQ ID NO: 13694 - DNA, 2727 bp, Zea mays
  Peptide Sequence Number=SeqID_55473
atggcggccctgacgcaaagcgccattgacgtggtgctgggccagctgtcgaaggtggtcaaggacgaggtgcagctgatcggcggcgtgcacagagatatgaagttcatcaaggacgagatggacagcatgaacggcttcctgacgcacctgaacaagatggagagcgagcacgacgaccaggtgcgcgcctggatgaagcaggtgcgagagaccgcctacgtcgccgaggactgcgtggagcgctacgtgcgcgacatggaacgcttgggcgtcagccagggcgggtgcgcggcctacgcggccatggcgctcctcgccctcagtaaacccaagacgttctgggagctccaccagctcggcaagcagatcaccgagctccggacccgcgtgcacgaggtcggcgagaggcgggtgcgctacgacgtcaaagtcccggacaagcgtaaccgcaggctggtgcggaacgaggcggcgtctggccaggacgaggagaggagggagtgcttcgtgcgcagtctggaagaggagctgcagcaggaagacaagaagagggcgagggaccagggccccgacccgcttggtcgtccatcacttgttctccgcgcgcacgccaagatgggtggcctgcttgctctgccactgcgactcggcggcggcggtggcgacaccattgcccagcttcctggtctcgtatcatctgaatctgccagagtacgtcgcattctcaagagatgctgtcctcctcgtccggaccaccccagacccaccctcaccgatgctgaagcagagaagttcagatgcaccaagaagatgtttgtgtgtgctctgtacgtgtacccttacctgaccaacgcagagctgaagcagctcaaggtgggagtggaggcacccggagtagaagcacaggaggccaggaaccaggtgatggtcttctgctacagtatgctgtccacacagcagaagagctgcctgcagtacctgaccgcgttcaagcacgagacggagatcagcagaacgagcatggtgaggcgatgggtcgccgaagggcttgtgggcaaagagccaggagaggggtccacggccactctacaagaagcaggcgagcgctgcttccgcgagcttcggctccgaggcttcattcgccccgctcgctggggcgataacggcaccgtcaagagctgtgtcatggatggcccagtccaagacttcgtcgacggcatcaccaggagcgagaacttcctttccgacctgccggcacacctgcagcgccagctcgagatccgaagcatagttcgatacggtcgtccctccatgtcggcgccggcggcggcgccggcgccgttgaggagcgtgctgctcagctcctgctgtggcggtggcgtcaccaggaccagcaggtacgacgatgagcaggattacgcggcgtcgaccgccaccctcctcaagcatcgcatggacgcgctggtggatttcgtcaaagaactccctaagctataccggctgaatgtgctggacctgggaggctgcaagggcctcaggcgccgccacctcgtggccttcaccgagctggaatgcctcaggtacctgagccttcgggacacagacgtccccggactggttcccgaccgccatatgaacaggttcgagcagctggagaccctggacatccggggaacacgcataccgcctcgcgacaccaagaggatctacctgcccaagctcaagcacctgctcgccggccgcttcaccatggcctcggccgagaaggagatgctcgtcaccgtggacgtgcccgacaggatcggttccatgaggggcatggagacactatcccgcgtccgggtgtccgtggacggagccgagctggaaagagtcgccaagctgcggcagctgcggaagctcggcgtggtcgtccatgccaacactgccactgctgcagttttgggtcgagtgctgtacatgctagctggaagcctgcgctccctgtcggtttgggtcgtcgacgccaacgccgacgccgtcgcccgcactcgcactcgcactcgcatcgccgccaccagcacccagcaaggatcgggcggcgaaggcatcctccacatttcctccttgcacgagatcgcccgcagcttggccctcgagaacctgcacatcaagggaaaggtgagcctcccttcgtggatcggaacggctccgaagctcaccaacgtcaccctaagcgacaccgagatggacggaggagatgctctgaggaggctcgccaccgtcgtgaacctgtgctgcctcaagctcagccgcaacgcgttcaccgagcaggcgctccacttcaaggacgtccagttccaagctctcaggttcctcgtcgtcgagggcgacgccttcaccagactcgccttctccgccggcgatgcagctccgaagctcgagaggattgtctggtccataggaggaacacgagcggcgcagaagaacgaggagctcatcgtcggaatccaacaccttcccagcctgaagaggattgagctgagggccagcttcagggagcacaatcttttggaatggatgcggcagcagcggcaaacaaccacttcatcggcagcgaagtatcgcatctactacgtatcctcctcaaccgatagacgaaatcaaacaatcgctgaggtcccaaaagctgctactgatactaccttgacacttccggctgctgttatccatcaactaacttaa

SEQ ID NO: 13695 - DNA, 315 bp, Zea mays
  Peptide Sequence Number=SeqID_55474
atgcagagaaccgatttgggggaagaactgaattggggcgctacggtggctaatcggaggcgagggctggtgctcttgcttcgtaacaacctagcggagctaatggtgcactcaatttatagcctccaagagcggtggctccgaattttgaagaagaaagctggcggccggagggagggtgagtcaccggtgaacgctatcgtggctttcaccgaggcaatgttacaggtgatggacagacttcctatgacggtgtactgcgacgtgataaggcttcgaagcacgtggcatccgggtggcacgcggcagactccg

SEQ ID NO: 13696 - DNA, 177 bp, Zea mays
  Peptide Sequence Number=SeqID_55475
atggagattcctcgcacatgggaaaagactctaaaggaaaagaccgtggatcacctattcacccccctcgaggtgctctcaatatgtgagctcacccttgttgtactcacatcccccgaggtcaagaacagaactccgttatatattaatgatgtgacattcgtttatgtaccatga

SEQ ID NO: 13697 - DNA, 660 bp, Zea mays
  Peptide Sequence Number=SeqID_55476
atgttttataacatcactggtgacaagactgcagaaccattaataatgtatgattatactaaggtttttgctgatattacttgggccaatgtggatgaagttgttggtgcagcagagggtctaaggggctgtaacttgcctcgtgctgctgcagtttctagccatattcttggtctagaaagcgacaaagggacacaacccaatagtctaaagtaccccagccttgaacctttgctagatgacttgctcccaaaaaagtcacctatgattgttgttaaatgccaaaatcatcttaatcttgtagtggtgaataatgttcctctatttttcaatatacgtgatgatcctgatatcatgaaaaagttccaagtggatagaggtgctatcaaatttgttctatctggcgcaaacataatgtgtcctgggttgacttcacctggtggtgccttagacgacgaagtcgaggaggaaacaccagtggctataatggctgaaggaaaacaacacgccctggcaattggatatacaaagatgtcagcaaaagacataaggaccatcaacaaaggaattggtgttgacaatatgcactatctaaatgatggcctatggaagaacaatttgccctcaattggaagtgaggaaatccataacgatctataa

SEQ ID NO: 13698 - DNA, 417 bp, Zea mays
  Peptide Sequence Number=SeqID_55477
atggcgagagtagcgtgtaccctccgtggcaagaggctggacgatggtgtatctgtgctctcggttggcatgaacctggtctgctttgccttcaatcccacaagccagcatatccttgagagtcttttcctttatcgggtccttaggacaaggacatctgtaggtgggcctaataccttgggagatttcgtgacagccaggggcgcacgtaaccgacaggtgggacccaggggcagggcgtgctcccgcgaagcggtacccaatgatctagaccgatggatcgagatcaaacagtcaagatcaaacgtcggggggtcggcggatgcgggcagcgctgcttctgcccacgatggcaaagtcactggagttagggcgggtgcaggctctagggggtttgaggtcacaggagttggctag

SEQ ID NO: 13699 - DNA, 168 bp, Zea mays
  Peptide Sequence Number=SeqID_55478
atggacaggctttctatgacggtgtactgcgacgtgataaggcttcgaagcacgtggcatccgggcagcaggcggcagactctggcgagaagtctgctaaaagttgaatttgttttgcttcatatatgggcagtccttgatgaaatgcctggactttccacaatttga

SEQ ID NO: 13700 - DNA, 465 bp, Zea mays
  Peptide Sequence Number=SeqID_55479
atgggccaaccgaaggcacctctgagcgactccgctataattcaccggactgtccggtgtacaccggacagtgtccggtgctccaagggagagccgcctcaggaactcgccagcctcgggttttcacttcagccgctccgctataattcaccggactgtccggtgtacaccggactgtccggtgcaacagcggagcaacggctatttcggcgccaacggctacctgcgctgcatttaatgcccgcgcagcgcgcgcagaagtcaggcgcgcccatactggcgcaccggacaatgaacaccccgcccaagcgcaagttcaccggagctcgctctgcgcacggcgtgccagcggccgcccgagccccgaccaccgtggaccggccactccagccctcctccaccccatccaatccctcggagctcctggacctcacccaaccctccaccggacctctcccaccgccg

SEQ ID NO: 13701 - DNA, 1527 bp, Zea mays
  Peptide Sequence Number=SeqID_55480
atggctgccggtggcggcgatggacgtcagtacggcggcaggatcaccgtgttcgtggtgctgtcctgcgtcaccgcggccttgggtggcgccatcttcggctacgacctcggaacctccggtggcgtgtcgtccatggggtcattcctggaggagttcttcccggacgtgtaccgccggatgaagggcgacgtgcgcgtcagcaactactgcaagttcgacagccagctcctgacgctcttcacgtcgtcgctctacatcgccggcctgctcaccgcgatgctcctctcgtcgtggttcacggcgaggcgcgggcgccgcccgtccatggtcatcggcggggccgcgttcctcgccggtgctgcggtcagcggcggcgccgtcaacgtgtacatggccatcttgggcagggcactcctcggggtgggcctcgggttcgcgaatcaggctgtgcttttgtacctgtccgaaatggcccctgcacgatacagaggagcattcagcaacggcttccagctcagcctgtgcctcgggtccctcgccgcgaacatcatcaactacggcgcggagaagatcaccggcggctggggctggaggctctcgctgggcctagccggcgtgcccgccgcgctcttcacgctgggcgcctacttcctgccggagacgcccaacagcctcgtgcagcagggcgaggaccgtggcagggtgcgagcgctgctgcagaagatcagaggcgcggacgacaccgccgccgtcgacgaggagctggacgacatcgtcgcggcgaacgacgcggcacgaggcggcggcgacagtggcctgcggctcatcctttcgcggccgaggtaccggccgcagctggcgatcgccgtcctgatgccggcgttcacgcagcttaacgggatcaacgccatcgggttctacgcgccggtgctgctccgcacggttggcatgggcgagagcctggcgctgctctccacggtcgtcacggtggtcgtctacacggcgtcgacggtcgtgttcatgttcgtcatcgaccggttcggccgccgcacgctgatgatcgccggcagcctccagatgctggtctccgagctcctgatcggcgccgtcatggcggccaagctgggcgacgagggtgggatggcacgcggctacgcggcggcgctcttcgtcctcatcggcgtttacgtggcggggtacagctggtcgtggggccccatgacgtggctggtgcccaccgaggtgttcccgctggagatccggtcggcagggcagagcatcacggtggcgtccgggttcgtgttcaccatcttcatcgcgcaggggttcctcgccatgctgtgccggatgagggcctggctcttcttcttctttgctggctgcatcgtcgtgatgacggccttcgtgtacctgttattgccggagacgaagggtatgcccatcgaacagattgggaaggtgtggcgggaacactggttctggggaagggtcgtagggttagatggaacaaatgacaaggtgtga

SEQ ID NO: 13702 - DNA, 900 bp, Zea mays
  Peptide Sequence Number=SeqID_55481
atgtcattctctggagtatccttcgttggaaacagctatctgccgccatcatctgcccctcccacacacgtctattccggcggctaccatctgctcgtggtcaatggctactcgcgcacaaagcaggacacccccaacggcagctgcctacggtcaaacccgttcaagatcggaggccatcgttggaccatcgagtgctaccctaacggctacgaacaggagaacagcgactacatatccttttatctcgttcttgacgatttcaacgtcgtcgagcctgtcgtggcgcagtatgcgtttagcttctttggccaggttcagccgtcagagtcatcgttgttgctcgccgccggtgcaaggggaccgtaccgtttctctagcacggacgcattcagcttcccctatttgatgaatagacagcagttcgagaaatcgaagcatctcagggacgacagtttcactatcaggtgtgacgtggccatcgtcaagaatgtcaacatcggggaagcggccgccgccaggcggttcgttaccgtgcctcctccttccattctgcaccacctcggcaatctcctcctgtcgcaggtgggcgccgacgtgacatttcaggtcggcggcgagaagttcatggcgcaccggtgcgtgtttgccgcccgctccgctgtcttcagggccgagctctttggctccatgaaggagggggcggcagacaccgtggtgcacatccatgacatggacgccaaggtattcaggctgttgctcggtttcatgtacaccgatcatgtgccggacattgaagaggaggaggaagaagaagaagagtatatgtggcaggacctgcttgtggctgcagatagatatgacatcccgaggcttcgactgatctgttttagtttatga

SEQ ID NO: 13703 - DNA, 483 bp, Zea mays
  Peptide Sequence Number=SeqID_55482
atggcaatgaatgatgtgtgctgtaggtgggaaggtgaaccgccaaatcgcccacactcgctgaacagtggaccactcggcgtcgccagatcgctcgtatccgctgagcggtggaccgcccgatgcttgggaatatttcaatcgtttctcgtcaacgagctcagggaaggtgttttttggaccttcggcattccgaagcctttgagattttttgcggatcgagctcgttatgaaaaacgatctagcactgtgaaggggctgctgttgggggccttcttcttcaccaaaggtcctccaagcagaaacaccttcggcagtgtgatatgcgaactgacacaacacgaaggtacaagccgaagctacaatccagggagcttcggcatgacaactgttggggccttcatcttccgaaggtcctcaaaaacacaactaatatgttttccaagtataatacattcacatggaccttcggactcggaatga

SEQ ID NO: 13704 - DNA, 249 bp, Zea mays
  Peptide Sequence Number=SeqID_55483
atggggaagcctcgcccatcactcctcatgctcctcctctgccgagtgactgcacttgtacccaccataaccgaaatgggagaccacgtctcatgtcgcgtgaggggtaaagtctgttgccaggttcactcaggtctttgtgttaaaaatcacagaaaaagacccattggatatttagttgtgatttttccaaagtttaaagtcaaaaagaggggcttagcaaaattttccagtgaactatgtgaatga

SEQ ID NO: 13705 - DNA, 2529 bp, Zea mays
  Peptide Sequence Number=SeqID_55484
atggcttccccacctcagacggagctccaagcggtagcgctcgcgctcctcgtcctcctcctcgccggcgcggcgccggcgcgcgcgcagcaggagtacgaggccaacaagcagaacgcttgctatgccaccaacgccagctccgtcctcggctacacctgcaacgctaccaccgcctccactccagcctgcgactcctacctcatcttccgctcctccccgacctactacaacacgccggtctccatctcctacctcctcaactcctccgtctccgccacggccgccgccaacgccgtcccgtcggtgtccccgctcgcgccctccagcctcgtcctggtccccgtcccctgcgcctgcacgcccggcggctactaccagcacaactcctcctataccatccagttccgcggcgagacctacttcatcatcgccaacatcacctaccagggcctcactacctgtcaggcgctcatcgcgcacaacccgctccacgacagccgcggcctggtcgccgggaacaacctcaccgtgccgctccgctgcgcgtgcccctcgcccgcgcaggccgccaaggggttcaagtacctgctctcctacctcatcatgtggggcgacgacgtgacctccatcgccgccaggttccgcgccgatccgcaggccgtgctcgacgccaatagcctcactgccgacgatatcatattccccttcaccacgctgctcatcccgctcaagaccgcgcccacgctggacatgctcgcgtccacggcgccgccgccggccccgaccccgccgcagcccgcgcccgcgccgtcgggtcggtcgggtagcgggaagttggtcggctttggtgtcggcctcggctgcggcgcgcttgcgttggcaggaattctgggcctgctcttcttacgggccaggcggcggcagcggctcccggtcggggaaagtgtccgccaaggcagcaaggtggttatcgacgtgtcatcgtcggcggattacggcgcgctggcgtcggggaagaagataactaatacgaccacctcttcgatgtcctccgcggcctggtcgctggtcgccagcgacgtgcgcggggccgtagagtcgctgacggtgtacaagtactcggagctggagaaggccaccgcggggttcgcggaggagcatcaggtgccgggcacgtcggtgtaccgggccgtcatcaacggcgacgcggcggcggtgaagcggttggccggcgacgtgagcggcgaggtcggcatcctgatgcgcgtcaaccactcctgcctcgtccgcctctccggcctctgcgtccaccgcggcgacacctacctcgtcttcgagtttgcggagaacggcgcgctcagcgactggatccacggcggcagcggcagctgcagcggcagcaacaccctccggtggaggcagcgcgtgcaggtggcgttcgatatcgccgacgggctcaactacctccaccactacacgaacccgccgtgcgtgcacaaaaacctcaagagcagcaacgtcctcctcgacgccgacctccgcgccaaagtgtcgggcttcgggctggcgcgcgcggtcaccgcggcccacggcggcgcgcagctcacgggccacgtcgtgggcacgcaagggtacctcgctcccgagtaccttgaggacggactcatcacgcccaagctcgatgtgttcgccttcggggtcgtcctcctcgagctgttgtccgggaaggaggccgggttcgcggatgccggcacgggcgaggaaatcctgctgtgcgagtccgcggaggaggcgctggtggcggacggcggcgaggacatggaccgcgccaaggtgcgcgcgttcatggacccgcgcctacatggcgacttcccgatggacctcgcgctctccatggctgctctggcgctgcggtgcgtggcgatggagccccgggcgcgaccggccatggacgaggtgttcatctcgctctcggcggtgtacaactcgacgatggattgcgatccctcggattacggcacctccggatcttcgatgatcgggcggtaccatcccattgtcaacagtctttgcgggaggattgatgatgtcgggtgttcttctgttgatgcctttggccaaggccatgctcgggcgagacagaggcttctcccgaggccgaggtcgggccgggctcgaggctgggccttcgaccgagatgccctcgaggaggcaaatttttgcttcctgtcagagggggcccctcgggtgccaggtgcaagggcatcccccgaggctctgcacatggcaagacgacaatcagggaatgccttaacttttgatgatacacctcttcattgcctttccgcaaggacttctagctccgacctcaggggccaagggcccgaggagtttggggccaaggaggctaggcctgccccggtctgggatgctctccaatgggggccgaggaagcgtggcttgccctgggagggtagactgtgcgaggggatgatgctgccgaggtcgtcgtggcgtcccccgtaa

SEQ ID NO: 13706 - DNA, 135 bp, Zea mays
  Peptide Sequence Number=SeqID_55485
atggaccagagttctccatccgcgacccgccgagccaagaccgccgtcgagttcgccttcgttgaccgcacctatccgcaacctcgcctagccatcttcaccactggactcctctatgtcagatctacggtttaa

SEQ ID NO: 13707 - DNA, 555 bp, Zea mays
  Peptide Sequence Number=SeqID_55486
atgacgacgacggcaggggaggagaaagagaaacaggcgggcgggtcatccatggagacggaggaggagacgacgcccaaggcgaagaagcggccgcagtcgctactcgggagcctgcgggaggcgatcaccaaggtccggttcctgctctcctccagcgcgacgcggtggatgctgctcaggtccctggcccgcggcggcggcagcggcggcgccccggcgcggcgcctcagcttcgacgcgcgaccgggcctgctcgacaccatcgccgcgtcgccgacctcctcctgcagctccaggacctccaggtcggccagcctgggcacggcgaccacccggaccctgtcgcgggccagcagcgccgcgtcgccggaggccctgacgagggcctcgtcgtcgtccggcggccgctccccggcgtcgtcggccggggacgacgacgtcgaccagcgcgccgagctcttcatcgccaacttctacaggcagctgcggatggagcgccaggtctcgctgcagctgcggttatcaccaaatctggatgaagaagtaagataa

SEQ ID NO: 13708 - DNA, 501 bp, Zea mays
  Peptide Sequence Number=SeqID_55487
atggatcctaagggaaaggggatggtgatcaacgacaaggagaaggagtccttcatcaatgagccaaaagacgacaagcccactgactcgggctcaagtcataagaagaaggacgggaagaagaagaggtgtatcaagaagatcgtctactacgacgacagcgacgagtcttcttcttcccaaaaggacgacgacaacgactacgagaaaaagaagacggttaactcgaacttttcttttgattactctcgtattccggatgaataccataaggtgagcggcttggataacgccaagcagatttgggacaccctcagggtctctcatgagggaaatgacgtcaccatgctcaccaagatggagttggtggagggcgaacttgggaggtacaccaagatgtcgcccgaggaaatacttggaaagttcgtaagcgggtggatgatgatcaaggaggcaagatacgtcgatgaggcgttgaatggtccaattcatgagccttaa

SEQ ID NO: 13709 - DNA, 591 bp, Zea mays
  Peptide Sequence Number=SeqID_55488
atggggaaccacgcctgccccactcgcccctgcctcccgctcccccgcatgcctccagcgcttctctccagcgccgccgccactgtcccactcgctcctgctaaacttgcaaaattgcggcgggagttgctcactccaacatccaaaggtggtggtggtgcaggtgaaggatttgatgtgacgaagagtggagatgcacatgttggtttagttggctttccttctgttgggaaatcaacattgttgaacaagctgacagggacatttccagaggcactaaagatgcaaatggaggttcagaagcgactacatgagcaactcgagatgatcattgaggagcaacaaaagcttggtggatcaattaaagcttctgaggatcagaagctttctgattcacctccaagcttagatgactacccagagatcatgcaaccttctcctaagaaaccaaggatagacgcattatcaccagattcaaagcgcgatacaacacaacctgaatttgaatcccatttgatcggtccatgggatcacaacattgcattcccattggaggagttcaaagcagaccctgctatgagcaagtcataa

SEQ ID NO: 13710 - DNA, 1389 bp, Zea mays
  Peptide Sequence Number=SeqID_55489
atgccaaggagaacaggaaatgctgctccaaccaaatcagttgaattggtcaaacaagaccaattggagtttgatgatcctgatgaggtagatgacgaggaagaagttgagtatgaagaaattgaggaggaggttgagtatgaagaggtagaggaggaggaggaggaggatgaggatgaggaggatgaagaaatggaaggtgtgcatgaaattgatgctaatgatgaaagtaaaatggtggatgctgatgggaaggttgagaatgaaaaagagaagcatgctgagcttcttgctcttcctcctcatggagctgaagtttatgttgggggcatatcttctgatgtatcttctgaagatctcaaacaactatttgaatctgttggagaagttgtggaagtgcgaatgcgaggaaagggggataacaggacttatgcttttattaatttcagaactaaagcgatggccttaaaggccatccaaaatttgagcaataaagacctaaagggccttggaatcagtttgagaattagcaaaggaaagaagataaaagtttctccctcccaggctaagaacaggctatttattgggaatgtaccccatgactggacacatgatgatttcaaaactgcagtggaagaagttggtcctggagttttaaaagttgaactcatgaaggcgccaggcttagatcgcaataagggttatggctttattgaatactacaaccaggcatgtgcagagtatgctaagcagaagatgtctaccccagaattcaaactagatacgaatgctcctactgtcagctgggcagatcctaagaatgccaatgaagctacatctactgcacaggttaaatctctatatgtcaaaaacctccccaagactgttactcaagagcagctgaaaaagctgtttgagcatgttggagaaattacaaaagttgttgttccacctgcaaaatctgggcatgaaaatcggtacggttttgttcattttaaggagcggtacatggctatgaaggctctgaagaacactgagagatatgaactcgatggtcagctgctggattgttcacttgcgaaacctcctgctgataagaaggatagtactgtatcaacacctactgcaaaaggaggcccgttactcccaagttatgccccacttggatatggactggtgggagcttataatccacgtggaaagggattggcagatgcttataataacccccttggaaatggactggcaggtgcttatggtgtgctttccgctcgtgctgcacaggggttatatcctactaagggcttgtcagggcctaagaaggcccatggaggggctgcggtagcagcagccatgggccctccaaggggattagataaggatagttag

SEQ ID NO: 13711 - DNA, 1833 bp, Zea mays
  Peptide Sequence Number=SeqID_55490
atggcgccacgctcttccaccttcctctcccgcgtcgccgacgccgcgcgcccgctctctgtctccgctcgtccccgtctctcaccgtcctgtccctctcacaccgccgccgcgcccgccttcagcccgcccgccttccacacgcacctcgcatccgtcgcgtcgcacctcccctccctcctagccgctctctcccgcgcccgcgccgcgcggctcccgctcctcccggtcacccgcgcgcttgccgcctcagcgctcctccgccacggtcgtctacccgatgccctcgcacacttcagtctcctcccggattctgaccccaccgctcctttacccgtaccgctatgcaattcccttctctcagcgctagcgtcgtccactgggtctctcggccacgcgcgcaaggtgttcgatagaatgctggcaggagctgtcgagctgaacaccgttgggttcggggtgtttgttaatgccgcaggtaggaaagatgacggactggctgaggtcctgcgcctggtggatgtggtgggctgtcaagggagacgggttaacaggtcggttgtggtggcaatgcttgtggacggtatgtgtagggagggacgaattgaggatgcttggcgtgctatggatgagatgaggctacgtgggtggaaaccagatttcttggcatataggattgtggccgaggggtttagggtacaggggagggtggaagaggaaggaaggatcttgaagcagaagaggaagcttggtgttgcgcctagaaaggatgagtacagggaatgtgtgcttgtgttggtgtccaacaggctgtttagagaagcgaaggagattgccgaggcggttgtgttgggagatttcccaattgatgatgatgtgctgaacattttggttggttcagtgtctgagattgatgtcgatggtgctgccatgttctgcaagttcatgatggggaaggggaggtttccaagtactgagatgcttgcacacctttgcgagagtctttgcaaaagtgggaagggcgacgaaatgtgggagattttgagggtgcttttggacaaggggtattgtaggaatgcaaggggttaccatttggtggtgtcattcttagggaaggctggaaaggttagggaggcatatgatgtgctcaaggaggtgaaaaaaaagaggctagagcctgacatttcatcatataactcccttatggaagcgctgtgtagaaatgaccttcttaggccagccaagaagttgtgggatgagatgtttaccagtgggtgtagcccaaatctgcagacatacaatatactcataacaaaatttacagaaatgggtgaaagccaagaggtccaacaactctttgaccatatgttccagaaaggtgtggccccagatggtgcaacatacacgtccttcatcaatatgttgtgccaggaaaataaatatgaacgggccctggaggtctttaataaatcttggatgcaggatgctggagtggctagttttgtgctgagtagttttatacttgcactctgcaaacaaggtaatttcaaagcagcattgagtgttatgtgtaatgttccatctaatgttgagaacttgaactcacacatcatcttgctgaagcatctaaccgatgttggggaagtggagatggccattgagcacctagaatggattaggagcaactgcagctctagttttgagaacataatgaatgagttcatggcttctctatccacatcagccagtcttcaacatgtgacaaagttgatacagtatttacactcacggagacttattgatgatgcacattgtaggttgggggaagaatga

SEQ ID NO: 13712 - DNA, 243 bp, Zea mays
  Peptide Sequence Number=SeqID_55491
atggaggagagcagggggatgggcgcgccgtcatgggagagcgcccgagagctgcgcggtccgagcaccatgggacgagcggagttcggggaggagctcgactgcggtgcgtgcgcagggagttgggatcggcagggaaggaagaagccgcgacgggcagtgaaccttggccgggcgcagaaggatgcgccatgcgagcaccgcgcgcagaccaaggagaaacaggggacgcgccatagctga

SEQ ID NO: 13713 - DNA, 309 bp, Zea mays
  Peptide Sequence Number=SeqID_55492
atggccatccccctcgtctccggcgagacctcgccgtggagccgagcagtgtcgccctcatttgtaagaccttcccagcgtcgatctccaccgtccgatcctaatcgcgtggtccagatcactggataccggttcgcagatgcgcgccctgtccccaggaccgcccgtcagcgcctgcgccccctggcattgagcccgaccgacaatgagcagcccgtggttcctgagtgtgttgcgaaagatcttcctgagcaacaacctggtgaaggcaagtgtcctcagacctatcatgtcctatttactttataa

SEQ ID NO: 13714 - DNA, 513 bp, Zea mays
  Peptide Sequence Number=SeqID_55493
atggcaccacggaacggcgaggcattagcacggcacgaacggggttcgacgttgggcgcgtatggtccagtaggtgtactgcgcggtcgtgtcgatggcggacggcgtaactccggtgatgaggctccacgaatggcggacgaatggacgaatggcgtggtcacagtcactggggatggagctgggcacgggagttcgacggcgtcgggcgcgttgggcttctgggtgcggtcgaggtcgacgcctgggcgcgaggcgcgttgctcggcgcgatcgggtggggctcggcggcctgggcgcgcatggcgcgagatggtcgggcagctcggctcggtgctgcaaggcggggaagaccgagaggctgggcagggcgcggcagggggctggcggctcggtgttcctagcgacgcacgctgtagagagaagagagggaaagggagcaggcggcggccagcagggagcggatgggagcggcggcggctaagcaatggagcaggggcgcgcgcggcttag

SEQ ID NO: 13715 - DNA, 306 bp, Zea mays
  Peptide Sequence Number=SeqID_55494
atgggcgtggggctactggagcgcgtgttgacacgactcgattgctgcgtgggcgtggctgtggtcgtcgagtggggtccccgggccatgttggcgagaaggaaatattttcgtcgcgggaacagggatgaggagttattctctcatgggaaattctccgttgtcatctctagtatggttccatacctccatccgaagtattacctagctaaggccctgtcgaaggagaaatcctctgacggggtgacggagtgcacccgccctgattctgagctgagggaggagttcaagtacctgcctatctaa

SEQ ID NO: 13716 - DNA, 1106 bp, Zea mays
  Peptide Sequence Number=SeqID_55495
ctggctgcgctccaaatgcaaaagtgttgcctgaagaacctgattgcccaaatgtaaatgtgctgggtggggatgaacttgagccaaaagggttgctaaaagctgaggctgaagaagctgtagaggtgctggcaaatacactcgtactggccgctgttgatgcaccagcagaagagctaggtgaagaaaatgtgaacccagtgcttgaactagagctaaatggattcgcaaaagtagctccagttccaaatggtgaattgccaaatccagtccctgatgtggaagttgctgcaccaaaagaggcagtgctaggtcctgatgaggaagttcctgccccaaaagagaaaactccaggtgcggaagatgaagctccgacaccaaaagatgcagtgcctgaaccagttgaggaagctccaagtccaaaagatagcgtcccaggtccagacgaggatgctccaactccaggagtcatgaccgggaatgcaagtgacgatgtactgaggccagtagattgggctggggagctgaacccaaaaaggttgtttccagagctcggaaatgtaaatgaaggggttgaagcagactgtaaacctggtgcagtggaagtactagatggtgcagccacagatattccagcagcatcacttgaagatttcacttcagcttttgtaccccctataccaaatgataaggtgctagctgccttattttcagcagttgtgccatcagatttagctgatgttaccaatgacaatccaaccggagcactggaagaaaaactaaatcccgtaaatgcaggagacgatgaaatagctggactgctactggatacggcaaatatggaagtggaaacagctgagctgatagcaggtttatcagtaggtggaggagttgtgagctttggtggtgagtatgacaagccattgctcaggctcgaagtagatgccacagatgtaaaatggagaggtgcattcagtgttgttgatgcagctgaaggcaacaccttctcagatgggttggctacatcttctgctttttctgttttatcacctctctctgaactagtgctggctaatgttgtgggcttggtgacactggaaaaataa

SEQ ID NO: 13717 - DNA, 1008 bp, Zea mays
  Peptide Sequence Number=SeqID_55496
atgtacccaagcccgtacgacggttccggcgccggaggaaagatccggcgccgcccgcacctccgcgccgcctccacgccctacgaacggccccccgccgccgcggcggcgcaccgcctcgcggccgctgctgcagcggcttccgcatcctcggagcccggcggggagcgcggcggcgggggcggtggctgggtgtcccggctggtggacccggcctcccgcctcatcgcgggtggcgccgcgcgcctcttcggctcggtgttccgcaagcgcctcgccccgccgccggccccttctccgccgctgtcgtcgcctcctggacgaaacaatgagccaaaacagggcttacctgattcaacacatgttgattcacttccaatcccagagggtggaatggagaaagggaagagcatagttgacacatcagatgtcaaagcaatgtctgaagtagagcacttgttaatgcgaaagacatttactaaggttgagtttgatcgtcttacagacttattgcgtgcaagaaccattgagtctgatccacctaaaccaattgtttctcgtgaggaaaagaatgaagaaagtatcaaagttgatggaattagaggctcagcgttacgtcatatggacctagatgattctcctgctgttaaatgctgctgctccctctctgctggttacacaccctatctgtggccctcttctgcgaccacccttcctgaaggggtacataatcatggtgctagttctcctgcagaactcgcgaaacaatatatgagctctcgttatttgagggaaccccaatccagtagtctgcggagccgattgtttcttgagaataaaggtgaagcaagcaacactgtcaatgataggaggtctgtaccaccaattgttcagacaccacttgaacttcggaatgaaaaccctggtctccctgtaaatggctatgtgacttcgggattacgtgggcgttcagcgatatatagaatgtctcgctctccatatttttaa

SEQ ID NO: 13718 - DNA, 748 bp, Zea mays
  Peptide Sequence Number=SeqID_55497
atgactggttttgccgaaccgctgaagccagaaaaattctctggtatgcacttcaagaggtggaaagtcaaggtcattctctggcttaatgctatgaatgtgttccatgttaatcaaggcaaacctaagggtgtactgactcctgaagaggagaaaaagtatgacgatgccaatcctatctttacgggagcaattcttagcgtccttgttgatcgtttggttgatgcgaatatgcaatacatagacgagaaggaattgcaggatgcacttactactaagtatgttgcatcggataatgacaatgacctatatgtcatggagagttttcatgattataagatggctaataatcactctattgtagagcaagcttatgcaatacagtgtattgccaaggagctcgaccagcttaagattgtcctccttgagatatcagttgaaaatatgatagcgtctctagatgttgagaagaaaacccaggctaaggacacatgttctaaaggaggcgagggccactccagcgccaacatggttcagaagaaccacaacaagggcaaaggaaaaacaaaatctaacaagcccaacaaaactaccaacttcaagacgaagaacaaggctggactgacatgtttcgtgtgtggtgagatgggtcattttgacaaggattgtactgatcgagcgtatcgtcgtggcaaaaagggcaatgccaacacagtggtcgctagcaatgagggagacaaagggtatg

SEQ ID NO: 13719 - DNA, 318 bp, Zea mays
  Peptide Sequence Number=SeqID_55498
atggcaccacggcacggcgaggcacgagcacggcatgaacggggttcgacgttgggcgcggatggtccagtagggtggagctgggcgcgggcgttcgacggcgtcgggcgcgttgggcttctgggcgcggtcgaggtcgacgcctgggcgcgaggcgcgttgctcggcgcggtcgggtggggctcggcggcctgggcgcgcatggcgcgagatggtcgggcagctcggctcggtgctgcaaggcagggaagaccgggaggctgggcagagcgcggcaggggcctggcggctcggtgttcctggcggcgcacgctgtag

SEQ ID NO: 13720 - DNA, 387 bp, Zea mays
  Peptide Sequence Number=SeqID_55499
atggggacggtcgttggcagggcggatgaggcacctgcgccggcatgtgggagggaaggaccagatgctggagggtgccatggatgccaccgtggcctggcgttggccacagcgcccgattcgaaccgtgaggccgcacatggaatggtgatcccgcctgggtgccggaagccgaactcctcggcctcacacatcaactccttggatagcagagactatgcttcgtattgggctttcttaaggatctgctcacaaaatgtgcttgttagatggttgtatcctgcagttagcaaaaacatgttttgctacattcttagtggtaatatgcagttgttacaattaaaagcggttgcggttatttgcacggttgcagttttccaaaaatga

SEQ ID NO: 13721 - DNA, 348 bp, Zea mays
  Peptide Sequence Number=SeqID_55500
atgaagatgatcttcgtgtccctcagcccggtgcgcagatcggccgtcgggggagacgtccccggcacccccacacgagaggacgagatcaccgtctatatctcctcgctccctcccgaccgaggtcaccaccgcctcctccatgttatccccttctccgacttcgagaggatctccgaagacaacaaggagagcttcaaggagtcggagtcggaggacaagaagggtggccacaacggcgacaagggcaacaacggcaaggacgacatcgagggaagtagcgagggcaataatgatagagatggcaagggcagcggcgacgccggtggtaaggtgccaccggcttaa

SEQ ID NO: 13722 - DNA, 498 bp, Zea mays
  Peptide Sequence Number=SeqID_55501
atgcatgatccagatgcagatggcggtcaacttcttgaactcggtgatggggtttaccacaatgaccctatacaaagcgctggcacagaaggacatgccgttgcatttctggtgcctcaaggatgccaatgtgtcgcagctgaaaaacatgtgcaagctgctgggcgagaaggatgccaacagcctggcaccatctcagacctcaccaagggtgatatcccacggctgcacgtcaccaaccagagcctccagcagcagcgcaccatccaccacatgcatgagcatgatggagcaggaggcctggcatccccagcactgcctgtcggccggatgcacgggatttgcctcgtcattgtaatatgtgcgcaagtgggcatcctcgacgtaaaattagtaattgcattgacaggccctgcaggctatggtggaggtgcatggtgggcattgaccggccctccaggtggtgcatgcggcagtgccatggcggctgggagctag

SEQ ID NO: 13723 - DNA, 699 bp, Zea mays
  Peptide Sequence Number=SeqID_55502
atggcgttcttctctcaccaccatctccagcagccacacccgcagcaggcaccgcccccgaatcagcagcagccggtgcttccttccttcaggaacgcgctaccggtgcctgtggatggccagatcccagcgcccctcaccttcttcaacccgccgcctgccttcccggagcagcccgcgcagacaacgctggtggatgcggtggggctgacggcagctgctgggcttgggtggaggcagccgagggagcaggaactgcttggagaaaactcccagatgtcgtccatcgattttctgcagacgggctcggcggtatcgacggggctggcgctgtctctggaggaccggcgccacggcggcggcggggctgggaactcctccggcgattcaccgctgctcctgctgcccatgctggacgatgacatttcacgcgaggtccagcggcttgacgctgatatggaccgcttcattaaagctcaggtcacccactcatctttcttgctaaggctattaccagtccaaaagtatcatacttcaatatccaaaaacgctaaatataatgaaaagtatggagaatcagaaggatcagctcctcacgaggatcaggatctagagctaaagaagctggagctggagctttgccaaacgggcctgggattttcaagtataagacggaataatgctgtgtcattttgttga

SEQ ID NO: 13724 - DNA, 468 bp, Zea mays
  Peptide Sequence Number=SeqID_55503
atgaccgcatctttctacctcctaagggaccgagacggaggtggtcgaggctcccaacgatatcgagaaactcgcctatctggggagtcagggctttcgaggccctgcccgtggtttctttattgcctcgtcgggtttcccaatgtgaatggtcgttccgggagcccctgccatgccaacgctgtttccggccatccgaagtttagagaatttcatcgcggaacatcaccattgatgctcaaaactcatagtagtggttacaagcgggcgagagagggaggagaggctcccaagtctcttttttgggaggaagtggagctttggaaggtacaaggtggagtcctagctaagtcttggctcggcaatggggctttggcctcctggtcctcgtcggcgctgctcctcctcctgttcatccttgtgggtgcgtcagctgaaggcgttcagggtcatctggttgtcctatga

SEQ ID NO: 13725 - DNA, 906 bp, Zea mays
  Peptide Sequence Number=SeqID_55504
atggccggcaccacactcctggcgcgcgcgacttggaagaagaaccttttccttgcaagaatgcccaaccctcctcctccttgtcagccagctacttattggcccaggcaggcaggagtcgctctggggaaggaacgccacagactccgggaaattgccgttgcatttgcagcaggagggagcagtagcacgcacccactccgatcaagctcaagatcaaggccgtcgtcgctcaccgctgcgtgcgctctcaagacgccctcgaatggcggatcgagggggaaggtcaaccccagggacctcttcaccttctcccacaagttcagcaccgacatcccgatgagcgaaacgcaaggggcgtccatcgatgagtacctgcggaacagtcccaggatcgtcggagcggtgtttccggaccagcgcaagagaaggaagatcaacgacgaagaatggagcgtgcagctcctgcccatccggttcctgttcctgtcggcgtcgccggtcatcgtcatgcgcttcgtcagcaagtccggcgggaaggagtacccgcccaacgtccccgtccacgccaccagcctcctcctcatggaagtgacagactacaagctgaatggtctggacagcaacgccatgccgtcgcacctggccctcaccgtccgaggcctcatgtacccgcagcggcagcgggaggggaggaagagcctcaagggccacgtcgagatgaccgtcggcttcgacctcccgccggtgctcgccttggtcccggcgagcatcatcagaggcgtcggcgagacggtgctgaggcagatggcggagcagatgaagcaggacatggacacaggacttgcagcagatttcaacaagtacaggagggagaagctaacagagaggcgctcatcgccctga

SEQ ID NO: 13726 - DNA, 576 bp, Zea mays
  Peptide Sequence Number=SeqID_55505
atggcagctccctcgtcgtccctcaccccgccgccgccggcagcggctgtggcctccacaacgctgtccgggaacctcacggcctcctcgctcctgtctattacgccgccgcgaccgcgcctcgccgcctcgcaccgccgggcggtcgtggccgcggccgcgtcgccccgtcccccgccgacaccggagggcgacggcgacgagcaggaggtggagagggcgatggggatggacggtggcatccccgggacctcgggggagtttctgcgccgcgtctcctcccgcgcttacggcatgcggcgccacctcatggagtcgctcgactccctcgcctacgacgattttgcacaaattgaggtatttgaggatgaggatgatgctgtaaaatactgcaaccttctgcagggcggcggccaagggtgcgagggaattgcggagatagaagcatcatcagttttcagcatgtgccgtaaaatgaaagcccttgctgttcttttccgccgtggaaagactcctccattgcctcaaagcctcgagcgcgacttgagggcgagaaagaggtcactggaggactag

SEQ ID NO: 13727 - DNA, 696 bp, Zea mays
  Peptide Sequence Number=SeqID_55506
atgaggcaggtggcgtacaagacgaggcgtaccatgagccatggacgagccgacgggccaagtcagacgggagacgtcaacaacgaagcggaacacggagtggtggcggacacggagacgtggtccccttcagtactacgcggcggccctgtccctttccacgatctgtttcttgctcagcgatcagcacggccaggtccaacccaacggctatcccaagacaaagtccacgaggagcagcagaagaagaaagggcaagggccaggccccaccaccgagaagcgagaagcagagcgaggaacatcctccggtggccgccgccatggcccggctgctgcgtgttcctccggtggccgtcggccctcgccgtcgcgcatcggctaccgctccctcgtcgacgcggcggccgacgccgccgccccgccgtcgacggtgacggtcgtggtcgggaaggagcggcgggcgttcgcggtggaccgcctcgtgctcgactcctacccgctccggctgctcctggagacggcggcgcgcagggaggagcgcagggccgggggcggcgccggcgccatcttcgtggacgtcgacgccatcctcttcgagcacatcctctggctcgcctgcgacgcccgctccgtctcccagatcctgcacctcgacctcaaggagatcatcgacttctacgcccaggacgcgtga

SEQ ID NO: 13728 - DNA, 315 bp, Zea mays
  Peptide Sequence Number=SeqID_55507
atgccgggtcaggtcaggtgccttaagagcatctctaccagtgctttaaacaagtgccctatattttttgtcaaaaagaatagggcacatgctcaagttacccatatatactacactagttcgaggtgccctatatgtttagcgcgtccacagatcttcaagggggcattttcccacgccatagccaccagagatgcaagaaaaggttccaccggtccctgctctgccgaggcagacctccttgtgccgctcccatcgtcctgtcgcgtcgagcctccttgccgccgacgagatctggacagagagcgacgttga

SEQ ID NO: 13729 - DNA, 456 bp, Zea mays
  Peptide Sequence Number=SeqID_55508
atgggcaagagcaacaaacgcaagcgcgagctgactcctccatcggaggacttcggcgactcggaatactcagaggaggagttctcctctgagtccgaggggtctccaactcccgtctctcccccagcgtcgtccgatgactcggacgactctcaggggattgtcgcggaggtctggacttacatccgggccgtcgagcgctccgggctcgagggctcggatgagtcggagtactcctcggacgaggaggactcgcccgaggaggacggcgaaggcgacgacgacgacgacgacgacgacgaaggcgacgacgacgatgacggtgatgacggcggcaggggcagcaacggcggcagcaggggcgacaacagcgacggcaagggtggcgacggcggcagcagcaggggcagcaacggcggtggcagcagcaaaggcagcaacaaggccagtggctag

SEQ ID NO: 13730 - DNA, 201 bp, Zea mays
  Peptide Sequence Number=SeqID_55509
atggcgtcttacgagcgaaccccacctggcagcgatccttgcgcgaggaaccagcagcgaccggcaagcgggcccaaagtgatagtgagaggtgagtggaatgcaaaacgattaaggaagcaactctcctttattaggttttacaatatgggtattacaaatcctacctcccttaacaggaatctcgtcctcgagatttag

SEQ ID NO: 13731 - DNA, 318 bp, Zea mays
  Peptide Sequence Number=SeqID_55510
atggagaaccacccgagaaaacagtgctaccacaagggaaagctagtggatgactaccttacccgaaaggggcaaggtgaaggcaatcctaggttgaatagcatagtcaacctagtcgatgtgctcaacaccgagctggaccacactcttaacgagctgagtagggctcgtgctgagatcatagagttgcaggatgagcgcgcggagcgccgtcaccaggagtatggttctgccgctccactgggactcaacagccgtaccgctcaccaccacgagggtaccatgattatggcactcccgactgcagaaccaaaatag

SEQ ID NO: 13732 - DNA, 2427 bp, Zea mays
  Peptide Sequence Number=SeqID_55511
atggcggtggtgagatcggcaagggccttcgtcatggtgtcgatcttttgctctagcgctgtgttggcggaattggtcgcggcagcagatgcgacatcgctggtgttgttgtcgttgcctggcatctctgataccagattgttggagctacgacttctaagaaggtcatcttctctttgctatggtgatattcatccggatgcactacttaacaaggagaagcacataaaaaaggatgagaaggcatatcatgttaacttgcttaattaccattccaaggataaccctagtaatcagatgcaaggagttatgcagctgaaagctactaacagtggaatgcccatgaagggttgcacaaagaatcgatgtttcaaagtttatgtcatacatcaaatgactggactgttcatggcagctttttttatgcctgactattactttggtgtcatcacctgtctaaattccgtggcacttttgacttttcaggttagtagaacacagctcaaccatataaagagactgaagcaatctggggatggtattcagaccaagcatgtttcacgtgtaattggcggccttgataaatctcatgtgaaaccttatggagctttattagaggatgaacagaggagactgcgcgagcattggctggaaatgtcttgcaatgatttacctgctgcctttgaggttcttagggaaaggaaggtgctgatggagaaatcaataaagttattaggccttgagcttcagcagaagaatgtatctgtcttgagaaaggcagaccagttaacagacataatgaaagggctaggacaacctggtgctagtgaaaatgatggtaccccagtttttcaaaatgaccaggtagaatgctcaccccaaagtatattgcaaggtgggcatgttcagagcacatctcttcaccatcaggatgatgagcagtctgtttaccatattcaccgtatgaatgtggaagatcatgatctcatggtagtcaggggtatagacataactagtcagagtgagaaaaactctgatgtgccagatcaaagtcgtaatggtatcagctgcgtagataaaggcatttactgctgtgccaacaaccctgataagcagagtgatgttctcatggacatcaaattatgtaaaggtggactggttgtttacaatcctgactgcaaaaatacgcaactagaagatcttgatggagtttcttacaaaggtccatcagttcatgcttgtgaccaagatcaggacctggaaagcatcggccatgctgttgtgaaccacaattgtcacaatagtccaaatatttcttcggaaatgagtcatccgacgacgaacgctgtaattgaccaggaaactgagaatgttatggaaccatcttgcagttcttcacaactacctaagtcgtctggagaacaaatgcatgtggaagattttctgtatctaaatgaccaagcagcaaaatttgagaaagtcagtgggcagttggcaggccctcttggccctccagagaatatgatgtataatgactcaggtgacttgcagattaaacagacttatctctcttcaggacaacatttttcttcagtttacttgaataatggcattttaagccatcagcaacctcaacttgccacaccagcttttgctttggacaatccagcatcatttattgagcctttctcaaatctgcagagcaatcgtcagcccgagacagaaaaggacattggagcagtcttctatccctttcgacacgcaactaacatcaaacagtcagcgagtttgcattgtttagtgaataaaggcttggctcaatctgcttcatttcccaggttgttgcaagagcggcatcagttaatcgatcagagtgacagtgacctctatgcacaacctcatgaggattactgcacagatgtgagttgtccaactaaagtgaaccttcatatctccgaacagcattcttatactgcttttgcttcgatggatcataggtataactggttccccgagggctgtcagtcacataataataatgataatctgttggggttgcagtcaggtaacttcttaccccaggccttaccaagtggaagcagcaccgatggagctctgttcagcaccgcatcccagtacaatcagccatcagtacacatgggacatggtgggtcaaaccgcagccaactcattgagccaaggaatcaatttggcccacctcagaattttctttctaagagtcaagacacaaaccctatgtttccggatatgtatggcttcacccagaatatagccagtggcacaagcagtcaggtagcacctatagggtctctggattgctcacattggacaaatttcatacaacaaaattctggaatgccgtctgactttacaaacaggccatctcgagggccttggaccagataa

SEQ ID NO: 13733 - DNA, 192 bp, Zea mays
  Peptide Sequence Number=SeqID_55512
atgagccccgaccaccccgtgcttgtcatcgtctggtgctattctttactgaatcgactcataagtattgcgacatctgaattggtgagcgacatcattgttcgcatagggactacaaagttttatcttcacaagctgaagttggcttcgatcggtacggctgcccaatttcgctgctatgtgctctactag

SEQ ID NO: 13734 - DNA, 543 bp, Zea mays
  Peptide Sequence Number=SeqID_55513
atgaagcatgggttagtcctcagtcagattgaagagcttgctggcactagcctttcaatgatgaccttgttggtgcacttatcttcccaacacctagccctgctgcgaatgcatttcaatgccatgtgggaccatgccaatgaagagaatgacatgcaggggagccctcatgagtctgttggtgccaccgaacaaggagtgccatcttctacacatgaaggagcaccccacattatggaggcctccagtgatgacgcacctagtggtggcagccctagtatcaaagctgctatggtacctatagggcacaaggccaataagaacttcccgattggtcacacatcccagagttgctccaagttgagcacacttaactttgagggtaataacccaacccaaaaggttaatccttatgttaatcatagtatgcgggacagtgaattacaaagtaaatatgacataataggtcagaggacacttgccttcaccaaattgttgctgctcacgggcttctcctacgacttcctcggactctgcggatga

SEQ ID NO: 13735 - DNA, 252 bp, Zea mays
  Peptide Sequence Number=SeqID_55514
atggcatatcaaatgctgccgctatggttcatatttaaaagccccagggctttgcaacttggtggaccccatctgtcattgactgttgctattctagcaaagggaagggaccttcgaactcagaatgaagctgcatacaatatgaaaagcatggccgagacgaaggttaaaccaggtccgaagctatgcgcaaggaagcttcggctcagtagcagaaaaaggaaccgacttaaagaggaaaaggctatctag

SEQ ID NO: 13736 - DNA, 270 bp, Zea mays
  Peptide Sequence Number=SeqID_55515
atgacgaaacagccatcaagcatcagcatctctgcgaagccatacgggatcaacttgctaggactgggactgatctttgatctccccacccgatggttcgctctaggcggcggcagcgaagatgctgatcctcactctcaacaccatggactgctctgttatgagtcggtggagctctcaaatgcggcgacagctctacaagcagtggccggcagcaggtggcacaagcgctggacagctgtaggatgcggcgcaagcggggggggtgag

SEQ ID NO: 13737 - DNA, 309 bp, Zea mays
  Peptide Sequence Number=SeqID_55516
atgatgactcgcttgcaggtgtccactctactgtcgctgactcctacagaggttgcaatcattctaatgatttgtgtttcatatgtggcctttagatctgtgagacaaatccggttgttcatgttcgctacaaagattcggtttaaccaagcattggaggacatagcgtacatgctggagcaggactctctggtgttccaagagtatttggacaaggtgaacaacgagaataaccatgttgacaacgactacgtgccctccgacttgtcctcaccaaccccaactgaagcacatctcggtgaagactag

SEQ ID NO: 13738 - DNA, 183 bp, Zea mays
  Peptide Sequence Number=SeqID_55517
atgggggagacttgcagtttgtttgttccaatttgcagacttgtcacaaatatggttatttgcttcattgcttattgggtacttgtttcaggtgaccagcgagtcgtcagacttcaaaactatgcaacccaccccgagacccagcgacattcagtcgtgattagggatggcaatcaaacgtga

SEQ ID NO: 13739 - DNA, 171 bp, Zea mays
  Peptide Sequence Number=SeqID_55518
atggcagaagcaaagctcccacgtgttcgacgcgggctggcactcgggggcgcgctcagagcacgcccggtagctccgaccacctccgacgccgacccgcacaccgacgtgaccgtcgtgacctccccgacgtcactgaccaccccgccggagctctactgccgtcggtaa

SEQ ID NO: 13740 - DNA, 588 bp, Zea mays
  Peptide Sequence Number=SeqID_55519
atggcacaagccttcaactggaagcaagctcgtcgtctgcattcaatgcgagcgggaagagagccacgagttactcgtggagatccatggaggctagtggaagtcattcttcatcacacacgttggtcgaaagagtttcagatcgcagaaagccgactaggagaaaagtgttgttgggagcggtcgcgtacacatgatggtggaggtggcggaggcaacgagacaactccacccgcatactatggacccgggagctaccctgtgcctccaccccatagttctttgatacttcgtggcgggccccttgacgagggacccgtcatcgtggcgcaacctacgcctccttcctccctttcccggagtcggagggtggagtttctaccttcgggttgcttgcccttgctcgagggaggtaccctctcctactgtgtcaaggcaaatacctacgtggtttcttataaccgcatactaaggaactgcgcagcggggcccatggtccggacttgtatgatgagaccattggcctcgggacaggtccggtgccacaacgtgtcctcgggtgaaagtgctcagggagatgtgctttaa

SEQ ID NO: 13741 - DNA, 321 bp, Zea mays
  Peptide Sequence Number=SeqID_55520
atgtattttgagagagacgtgtccacgcctcgcaacgtgcttgcttttgcaggtgtcgcggttggatgcgggtggcaatcgttcgtggcgtacgtgaacgtcgcgtgctactacggcgtcggcatccccctgggctgcgttctcggattctactttgatcttggtgccatggggatatggggtggaatgataggcgggttatttgctcaaacgctcattcttacctgcgtcacacttcgtgctgattggaataaagaggtagaacaagcgcgcatgaggctaaataaatgggaagacaaaaagaagccccttttgacataa

SEQ ID NO: 13742 - DNA, 1443 bp, Zea mays
  Peptide Sequence Number=SeqID_55521
atggcggccacggcgagcgatcagaagaccccactcctcctgccgttgccggatggcggcggcggcgggcacggggcgagcgcgcagctggagcgtatcctcggcgacgagtcggcgccgcgggcacggcggctggcgcgcgcggcgcgggaggagctccggctgctgctggccctggccgcgccggccgtggccgtctacatgatcaactacgccatgtccctgtccacgaggatcttctgcgggcagctcggcacgctcgagctcgccgccgcctcgctcggcaatgtcggcatccaggtcttcgcgtacggcatcatgctgggcatgggcagcgcggtggagacgctgtgcgggcaggcgtacggcgcgcacaggtacgagatgctgggcatctacatgcagcggtccttcgtcctgctggccggcgccggcgtcccgctcgccgccatctacgcgttctcgaagcagatcctgctgctgctgggggagcccgagcggatcgcggaggccgcccgggcgttcgtggtcggcctcatcccgcagatcttcgcctacgcgctcaacttccccatgcagaagttcctgcaggcgcagagcatcgtggcgcccagcgcctacatctccgcggccacgctggccctgcacgtagccctcagctgggtcgccgtgtacaggctgcgcctgggcctgctgggcgcgtcgctggtgctcagcctcagctggtgggtcatcgtcgccgcccagttcgcgtacatcgtcacgtcccggaggtgccggcggcgcacgtggacgggcttctcctgccaggccttctccggcctgccggagttcttcaggctctcgtccgcgtccgcggtcatgctttgcctcgagacgtggtacctgcaggtcacagtgctcatggcaggcttgctcaaggacccggagatcgcccttgattcgcttgcagtatgcatgtccatatcaggatgggtgttcatggcgtcggtaggattcaacgcggctgctagcgtgagggtgagcaacgagctcggcgccgggcaccccaaggcggcatccttctccgtcaaggtcgtcacgattgtgtcgttcacggtggcgtcgactatagccgccgtcctcatgtgcctccgcgactacctcagctacgtcttcaccaaaggggacgacgtcgcgcgcgccgtgtccgccatgaccccgctgctcgccgtcaccattgtgttcaacggaatccagcccgtcctgtctggtacacactcctactcatcaaatctgtctcgatcgagcaacgtgctagctacttcctctatagtattcctattttacttctccctctatatatctcatttctacatagtagcgttctctaaatttcgttctttattcaccgccgggccaataccggcgcacactcggctcgtcggcaaacgtgcaatataa

SEQ ID NO: 13743 - DNA, 1500 bp, Zea mays
  Peptide Sequence Number=SeqID_55522
atgggcagcgccggcggcggtggcgagagcaagctggagagcccgctgctgggcgcgtcgtcgacgggccacggcgaggcggtggtgagcgggcagctggagagcatcctgggcgacgcgtccgtgccgtgggggacgcggatggcgtcggcgtccgcggtggagatgcggctgctggtgcgcctggccgcgcccgccgtgctcgtgtacatgatcaactacctcatgtccatgtccacgcagatcttctcgggccacctcggcacgctcgagctcgccgccgcctcgctcggcaacaccggcatccaggtcttcgcctacggcctcatgctgggcatggggagcgcggtggagacgctgtgcgggcaggcgtacggggcgcacaagtacgacatgctgggcatctacctgcagcgctccaccgtcctgctgatggccacgggggtgccgctggcggcgctgtacgccttctcccgccccgtcctggtcctgctgggggagtcccccgagatcgcgtcggccgccgccgtcttcgtgtacggcctggtcccgcagatcttcgcgtacgccgccaacttccccatccagaagttcatgcaggcgcagagcatcatggggcccagcgcctacatctccgccgccgcgctcgccgcccacctcgccctcagctacctcgtcgtctaccgcctcggcctcggcctcctcggcgcctcgctcacgctcagcgccagctggtgggccatcgtcgccgcccagttcgcatacatcgtcaccagcagccgctgccgcctcacctggaggggcttctcgtggcaggccttctccggccctgcccagcttcttcaggctctccctcgcatccgccgtcatgctctgcctcgagacctggcctcctcaaggaccccgagcttgccttggcctcactctctgtctgggtgggtgttcatgatctccgttgggttcaatgcagcagccagcgtaagagtgagcaacgagctcggcgccggcaacccaagggcggcggcgttctccgtggtggtagtgacgctgctctccttcgtcctgtcggtcctcgtctccgccgtcatcctgctgtgccgggactacatcagctacatcttcaccgagggtgaggacgtgtcgcaggcggtctcccggctcaccccgctgctggcgttcacgctcatcctcaacggcatccagctccagcccgtcctctctggggtcgctgtggggtgtggatggcaggcgttcgtcgcgtacgtcaacgtcggctgctactacatcgtcggcatcccgctcgggtgcctcctaggcttctactttgacctaggagcagcgggtatttggagcggtatgatcggcggcaccttgatgcagaccttgatcttgatatgggttacattcaggaccaactggaacaaagaggttgaagaagcacagaagaggttaaacaaatgggacgacggcaaggctcctctgctgtcagcgcaagaatga

SEQ ID NO: 13744 - DNA, 471 bp, Zea mays
  Peptide Sequence Number=SeqID_55523
atgcgagcattgtacatgtcgacatacctctgttttctggataaaccttctccttgtaccacgctgcttcgctcatccggcgaccggcggtccggctcagcctcggcgtgccgcaactccggcctccagccgctccaagcgactaggcgagggagcaacgactacatcaacaacttcctgcaaccatgggacaacggcggacggctgcgtcgctgcggcctgcggcagtgctctggcagctctgctgctctggacctctggctcggcggggcggcggctccggcctccagccgctccaggcgagcaggcaagcgagcggcggctcggggccgtcggggcgtggccgccttggggccttgggcgccctgggcggtgccgcggacctgcgttggtcttggatgccaggcattccgcgatgagcgggtagacagtgggctcgtcttgacgatggcagttgattttttggtgtag

SEQ ID NO: 13745 - DNA, 570 bp, Zea mays
  Peptide Sequence Number=SeqID_55524
atgccggaggacaaggagtacgcgcccctgccactcggccaggcggcggcgcctgaccccgaggaccccgtcaagtcgccgccgcgacccagctcgcctgccacgtccactcgcaaggcatgctttgctgttcttcaaagctgggtgtcaagaaaatttatgaccggatgtgtagttcttttcccaattgctgtcacattcttcctcacgtggtggtttattcaatttgttgatggttttttcagcccactctatgcaaaactggggtttgacatgttcggccttggattttttacctccctggtgttcatacttcttgttggaatctttgtgtcttcttgggtgggttcaactgtcttctgggttggagaatggtttataaaaaaaatgccatttgtaaggcacatatactctgcatcaaagcaagttagtactgctgtttcaccagttgatggggccagttgggctgggcctattggattgagcagatccattaggatagagttagttggagataagattaggacagagtttagagataagatagatttggttaagatatttgcatag

SEQ ID NO: 13746 - DNA, 633 bp, Zea mays
  Peptide Sequence Number=SeqID_55525
atggcacagctgtttgtctctagcgtgcaggcagtggaccctgccacgggcacagggctccacttctttgctgggcgccaccgcaacttcgatgggctagccaccgccagccgccaggcggtatgtctgtgcacggcgcaccgctggccatctttgcacgggcagcagcaagcattccgtgccatgagcttcacatgcgagtgttgtggccgcgagacgtttggttgttgcccggagctgagcatgcgcaggtgcacgaccgtggcggctgctgggcgctgtggaccagaggctccacgccgccgagttcgaccacggcgaagcggcctgccgctactcgcgctggcgtactacattccaacccgggtgctggcgcagcccctccggccaagcacggtctcaaccaggcgcgactttggcgtaggcatgtctcctggcgaggcttcgacgcagacgcttctggcgtgggtgtggctcgaagcgggcacaacacaaggacaacgacgacaagttcttggcgcatggatcacaatacatgcacatcgacagatcaagaataatatatccaatttaagcataccgcacgattgcgtagagggaatcgaagcctgtcgcataggacagttcggctag

SEQ ID NO: 13747 - DNA, 2364 bp, Zea mays
  Peptide Sequence Number=SeqID_55526
atggacgtcaacgaggaggcaatggcggcgcacaagcgcgccttcctcgacttcctcgaccaagacgtcgggaagggggtttacatgcaggccgtccgcgacatggtccagaacaagcgccaccggctcatcatcggcatggacgacctccgcaaccacaacctcgatctcgcccgcagggtgattcggagccccggggagtatatgcagcctgcgtcggacgcggtttcggaggtagcgaagaaccttgatcccaaatttttgaaggaaggggagcgggtgatggtgggcttctcgggtccgttcgggttccacagggtcacgcccagggatctcatgtcctccttcatcggcaccatgaaggtttgtggtaattcaattgatacctctgtggtaaaggaaactgcaaagcagaatgcgtctttgtccttgttaactggttcattggtaaggccaaaagttgttaagagtgttcacttttgccctgtgactggggcctttctctcgcgtgaatatagagacatcacttcttttgtaggcttgcctactggctctgtttatccaacaagggatgacaacggcaacttgttggtcaccgagtatggaatgtgtgaatataaggatcaccagacattgtccatgcaagaagtgcctgaaaattctgcacctggacagcttccaaggactgttgatgttattgtagaagatgatcttgtagattgttgcaaacctggcgaccgtgtctcaattgttggtgtgtacaaggctctaccagggaaaagcaagggaagtgttagtggtgtgttcagaactgtccttattgcaaataatgtgtcgcttcttaacaaagaggcaaatgcacctgtgtatactcgggaagatttgaagcgtatgaaagaaatatcaaggagaaatgacacctttgacttactgggaaactcacttgctccgtccatttatggccatctatggataaagaaggcagtagtactattgatgcttggtggtgttgaaaagaatctaaaaaatggaactcacttgagaggagatataaacatgatgatggtgggagatccttcagttgccaagtcccagctcctaagagctgtcatgaacattgctcctttggctatatcaacaactggcagaggttcatctggcgttggattgactgctgctgtgacttctgatcaagagactggggaaagaaggcttgaagctggtgccatggttcttgctgatcgtggtgtcgtctgcattgatgagtttgataaaatgaatgatcaagaccgagttgctattcatgaagttatggaacagcaaactgtaaccattgcaaaggcaggaatacatgcctcgctaaatgcgagatgtagtgtgattgctgcagcaaatccaatatatggaacttatgatcgttcattgactccaacaaagaatattgggcttcctgattcactgctttcccgttttgatttactttttattgttcttgatcaaatggatcctgagattgaccggcaaatttcagaacacgttgcacgaatgcatagatattgcactgatgatggaggagcaaggtctcttgataaacagggatatgctgaggaagatgatggtgatgctaatgcagccatctttgttaagtatgatagaatgctccatggtcaggatagaagaagaggaaagaaagccaagcaggacaggctaactgtcaaatttttgaagaaatatattcattatgcgaagaaccttattcaaccaaagctcactgatgaggcatctgatcatattgcgacttcatatgctgagctcagggatggtagtgcaaatgcaaagtctggtggaggtacacttccaattacagcaaggacattggaaaccataattcggctatcgacagctcataccaagatgaaactgaggcatgaggtactgaaatctgatgttgaggctgcattgcaagttctaaattttgcaatataccacaaggaattgactgagatggaagagcgagaacagagagaagcggagatgaaacagcaagctgatcacgatgcagatgcaactggtggcactgtggatggacatggaagctccggaaatgatccaatggatgtggatgttgggaacacttcaaacgatcagaatgttcctttagcgagaatggaagcatttgaagcatttctgggtcagcatgtgttggcaaaccatatagatcaaatgtcaatcgatgaaatcgagcaggtggttaatagggaatcaactgcaccttacaccagaagccaagtagagtttattttggagaggatgcaggatgcaaacagggtaatgatacgagatggtgttgttcgaatcatataa

SEQ ID NO: 13748 - DNA, 465 bp, Zea mays
  Peptide Sequence Number=SeqID_55527
atggggaggccgaggtggtgggccaagcggtggaagaggagctccgggtccgcgcggacgctcggcgtcgcggcggtggtcgcgctcgtcgtccccctctgcttcgtcgccagcagcagccgtctcccggggacactgggtggcggcgccctcgcttcagttccatacacagggaccatggcagcggcagcaggagcccatcatcccggcgatcaggcggcggcgactcatgggttgcaggagctgttctacatcgcacgacgacgacgccggcggctcgcgggaggcggcttggggtcgcacccgccacggtgcgcctccaaatgcggacgctgcgacccttgctacccggtgtccgtgcccctgcccgtgccgcggggggttctggacttggtcaccccggagtcggagtactacccggaggcgtggcggtgcaggtgccgggaccagctctacatgccgtga

SEQ ID NO: 13749 - DNA, 393 bp, Zea mays
  Peptide Sequence Number=SeqID_55528
atgaaccactcactacccactgtccgtatagcggccgacgaccgtgccgccgggcggaaggagacggctctagctgctgagggcgtccaccacaggacgacctcggagccggagcccggagacctaatatcacggccagctttgcgtgcgctccgcagaacgtgggcgcactgcccgtacccgtacccgtattattacacctgtaacactaacagtaataccgcacttgctcacatttcacctgtaatacctgcgaccgtctgggattatatgccaaacacatctcacagttcacacagggtgtgcatgcatggagagccagcaataatggatgctgcagactgcagtaggtcctctgtcactttcctgcaggccatgctaatgctggtctag

SEQ ID NO: 13750 - DNA, 474 bp, Zea mays
  Peptide Sequence Number=SeqID_55529
atggccaaccgacggcccgctgacccaactagagcgaagcttaaccgtaaggagaatggaggagaagcagactggctagggcagccataccagtgctctggtgtgtgggcggatctaacgacgtgggggcgcgaccccacggtccaactcaatttcgacgagaaattgtcgtcgtggcgggcgactcaccctcgactacagcggttgtcctcacgcggcgacgcagtaggtccgcaagtcagtgtgatgaaccagtggagcacggacctgtcagcccgggaccaccagtcatgggaccaaacgtgcaaatggaggctggcgccagtggcccacaaggcagcagcagagcgatcaacacgaaggggcgcaggtgcagctgacaagctgaccccgcatggaagtggcacgacgcagaaggcgggctgccgcacattagggttgagtgggccgaacacggggaattggcccagttga

SEQ ID NO: 13751 - DNA, 162 bp, Zea mays
  Peptide Sequence Number=SeqID_55530
atggcgccgtcgtcgtggctgtcagcgccgacgcgcctgtgcatcgttttggatctagcagttggatcatgcccatgcgttctgatcacgggtcggttctcggtcgttggatctagatccaaggttccgcacgacataccggttcattcgggatcaatctaa

SEQ ID NO: 13752 - DNA, 294 bp, Zea mays
  Peptide Sequence Number=SeqID_55531
atgagcagagggagagggaagaagcaaaccactgtcaggagccatgaagacaaaggtagcagcggcgaagaagtcgtgcctgcaaagaagaggaggggaaggccccaaaaagcttcgccagtcaatgccgaccaagaagaagctgacgatgccaagctgatgaacagcgctgcaactggtggtaccaagagaggcagaccgctgaaagagcgctccaatattgtcatagaagatactaattctactgttcgattaagcagtgatgaatcaatgaggaccaatgggttcaagtag

SEQ ID NO: 13753 - DNA, 531 bp, Zea mays
  Peptide Sequence Number=SeqID_55532
atggaggttggatccatcgagatcctcggttcccttgtgacggaagatgatggcgggcgacatgataggcgagaggtagagtgggcagggaaacacgaagggcgggatgacgggtggggaaacacggagctcggcgcaagagggttggctcgcagagctcgaccgaccgagatcctcacatgtcggcgaggagagcgggctggaggttggcatggctcacgacgaggagatcgagctggtggttggtgcggggcttggccaaccgagatcgtcgcgacgaggagggttgaggttgccgagcgcatcggggaagggttggtgggcaacgcgggagagcgacgtggggatcgcgggcggtgtgcgtcgggggagggagcacgcacatcggacgggcagaggagctccatggtttatcgggcggttgagatctctggaaggcagaacgacagaacgacagaacaaagagaggcagactacccttacaggcttaaggaggtgtggtctgccctatacaaaaatgacaagggctag

SEQ ID NO: 13754 - DNA, 1800 bp, Zea mays
  Peptide Sequence Number=SeqID_55533
atgaagagcttgcaggaggagagggcggcgttggtgccgtcgccgtggccccagcaacagagaaaggacggcggcgagcatgatccggagcagctgatggatgaggatgacggtgacgatgaggaggatctgcaggatgagcagcacacaagaacaattaggacgtcgaccaagacggcggaagcatcgtcatcagcggagcggcgggtgccggcgtggtggaggctgcggcgggcgcagaagctgctggtgcccaccagaggtgttggcctggtcatcgccggtctcctcgtgctggtcttgctcctcgtcgtcggcggcggcggcggcgccaacaccagtcgtcgtcgctggatccacctcgactatgcatcgtcgtttctgcgcggcggcggcttgaggcagcatcaatggcctcctcaccacgtcccttcacccgcagccgacctcgtgcccatacccttcagctgcggcggcaacggctcggcatgtccccgtcgtcaaaccgcaacatcacccccctctccgtcgccatcatcgtcatcgccaccagcaggcaccaagtcatcatcgtccaagaataaacaaccccctcctcagtgcccggattacttccgcttcatccactccgacctgtcgccgtggcgcgagacggggatcacgcgcgaggcggtggagcgggggcgccaccgggcggcgttccggctggtggtcgtggacggccgcgcgtacgtggagacgtaccaccgcgtgttccagacgcgtgacaccttcacgcagtggggcatcgcgcagctgctggcgcgctaccccggacgcgtcccggacctggacctcatgttcaactgcgaggacatgcccgaggtcaaggtcaagccgtcggaggagtcgtccgcgccgccgctgttccgctactgcaaggacgactccacggtggacatcgtgttcccggactggtccttctggggctggcccgaggtcaacatccgtccctgggcgccgctgctggaggagatggccgccgagatgggtcgcctgccgtgggcggaccgggagccgtacgcgtactggaagggcaaccccaccgtgtccgccgagcgcgccgacctccgccgctgcaacgactcctcgtcgtccggcggcacgcgcgtgttctggcaggactggggcgccgccatccgggacggcttccgggactccaacctggccaagcagtgccgctaccgctacaagatctacgtgcgtggccggtcctggtcggtcagcctcaagtacatcctcgcctgcgactcgccggtgctgctcatcgccacgcccttcaaggacttcttctcccggggcctcgtcgccggcaggcactactggcccatcgaccccggagcccgcaagtgcgccgacatcaacttcgccgtccacgactggggcaacgcgcacccggagcaggcgcgccggatggcggatgaaggcagcggcttcgcgcgccaccagctcagcatggactacgtctacgactacatgctgcacctgctcacccagtacgccggcctgctccgctacaagcccaccgtgccggagaacgccgtagagctgtgcgccgagaccgtcgcctgccccgctgcgcaccacagcaacaggagggagttcgacttcatgatgcagtccagggagaggtacatcgccgactaccagccctgcacgctgccgccgccctttaccgaccgtcacatcagggagatgacgcgaagagaccaggaggtgcgcgccaacgtgcacaagatgatgaccaccgtcactccatga

SEQ ID NO: 13755 - DNA, 273 bp, Zea mays
  Peptide Sequence Number=SeqID_55534
atgaccaagtcgaagggtggttcggtggacgcgcgcacgctggtggcgcacgtcctggcagcgggcaccgtcgtgctggtgctcctgtggtgcatccacttccgcggcggtgctctctgtggaggcgctgacggtccgcgcagacctatatcttgcctcccgagagggatcccgctgaggaggagagatcctatgatgtgtcttgacgtcgacaggccactcaagacgtctctagtcgacgtagagccaaagagatatgaagattcaaggtag

SEQ ID NO: 13756 - DNA, 675 bp, Zea mays
  Peptide Sequence Number=SeqID_55535
atgaccaagtcgaagggtggttcggtggacgcgcgcacgctggtggcgcacgtcctggcagcgagcgccgtcgtgctggtgctcctgtggtgcatccacttccgcggcggcctcgccctccgctcccaggacaagccgctcatcttcaacgtccaccccgtgctcatggtcctcggccccatcgtcctcggcggagaagccatcctcagctaccgctctctcccgctcgcccgcgacgccaggaagaaggtgcacctggcgctgcacgccgcgggcctcgctgcgggcgtcctcggcgtctacgccgtcttcaagttccacgtcgagagcggcatcccaaacctctactcgctgcactcctgggtcggcatcgccgccatcaccctctacggcctccagtggaccgccgggttcctcgcctacttcttcccgggcgcctcccccgccaccaggcgcagaacgctgccgtggcacgccgtcttcggcctcctcgtcttcgtgctcgccgtcggcaccgcgcagctgggcttcctcgagaagctcaccttcatgcaggggcccgccactgcgcctgcccaaatctctgaggaggcatatgtatattttgccctaaataatttcaagttcaagggaggaatgacgtatggattctctcgtccatgggagccccaatag

SEQ ID NO: 13757 - DNA, 723 bp, Zea mays
  Peptide Sequence Number=SeqID_55536
atggccataaaaaactttcaagctcatcttcaaaggcttcagctgcaattgatcaatatactttcttcagaaagcaagctgggttatttggaggagaagaggttaaaagattcagcacttatggccgcgcaagtgcagttgcgcattcaacattacgaaactaatatggaaagtcttgaacaaatgaaaaactctaaagataggaacatagatccatgtagcatcatgatagatgttgctatgtatgatgaaggcaacccgattatggaatggttgtgtagttctaggagtgaatcattgctgacacttgatgaaaatgatgagccggaatcacctaacggaccaagtggattcgttttagaggagttaggaggattgaatgaagaagacattgttcttttaaattttaggattggttatcgtaggaaaaaagttaggaaaaggaaggttgcagaagaagatattggagatgatttcctattagatagtagtgagggagcgagtagcccaacctatgacgagtcaggtgacattgagtcaaatgatggtggtggtgatgatgaagatggtgaccctagtggtccaagttctgcagctaggccaccaactcataatggtcctggtcaagatgaacaaccagccgctctccgtccaagatcaaaaaggcagaagaagctctctatcaagggcttgtacatgcttgagaaggttaagtacatctaa

SEQ ID NO: 13758 - DNA, 504 bp, Zea mays
  Peptide Sequence Number=SeqID_55537
atgagggccagaaatggaccctatactggtcggagccacatacacagtgtgaggtgcacaagctatgcggaccgtatggtagctacaaccctgacgcaaatgctacgagcgcaaatgctgggagccctaaggattgtcagcgatctgcagcacgccattgacaacttctcggtgaagttgggagaaggcgtctttggctcaatgttcagaggtcaacttcctgcaggcccatgctcaactccaattgcagtgaaaaggctggatgggtttcaacatggggacaagcagttccgtgccgaggtgtccactgtcggaatgatcaatcatgtgatgaacttgctacgccttcttggcttctgtgctaaaaagaccagcaagctccttgactacgaaagtgatattggttccttgtttccatgttgggcagcaatccaacaagtttattcctggattctattggagggaacagaacaacaaagttcacggtttaacttcataccataa

SEQ ID NO: 13759 - DNA, 963 bp, Zea mays
  Peptide Sequence Number=SeqID_55538
atgggtggaggcgctagcactgttcctgcgatgttgtgggattcggacagcgaagataaagtgcacgtgaatgctattggtaatgtatttgctaaaatagtgtttggtaatgtagggaaaccagtgaagctaaatggaccaattgatgtgacttggaaccatggtcacatactagggagtgtggaggcatgtcgtaaagtgccaaatcatgtgaaggacctaatgtctcaaaaagtaacggatgggagaattaggagggcacgtggtaagaagcttcgtttgtttgttgaaaaggaggttagtgcaataagacatggttatcaaagtgcaagaattccttttgatgaagaagcacagattgatatggcaatgagaaattcattgagggattctttttccacattggaacatgatagttgttcaccttttgataagtcaactggtagtgcaagtggagctgcaagttgttctacagggaagcaaagtaggctgtcaaggtactacaagaatacacaagatacctctagaggtccttttgacattgacttggcacgcagtaggacacaagtgcagccacacatagatgttatgctagagaggggtcacaaagagaagctagggatagcattggcaaaaaagttccatgctaatgacattcctggaaggaaggcagactgcccatactttcgttcagcccttaagttagctcaacaacttggtgatggagtaccaattccacgtgggagagaaatagatggtccattattggatatgaattatgcaaacatggtggctcacatggctaaatttaaagaggattggaaggattatggagttacagtcatgtgtgattcatgtacaggtggtgatgaggatgatggttttggttatgactatggtaatggtgaagatgaagtcgtggaggaggacttccaggagttccaagagtacgatgagttctag

SEQ ID NO: 13760 - DNA, 147 bp, Zea mays
  Peptide Sequence Number=SeqID_55539
atggaggtgactagcaacaccaggttatccctcgggatcctggtggccgacagcgtggtccccgtcagcgagaaggtgacctccaagctcttccagatctcgcgctctgctgacaagtggaaagcttttgagaatgacatttcttaa

SEQ ID NO: 13761 - DNA, 303 bp, Zea mays
  Peptide Sequence Number=SeqID_55540
atggatgacccccgctgcggcggaccgagagggagcgtgccgaagctagccgatccggagctgggcgtggatgctggaggaagggcagctcgtgttggccaccgagatggagaggattacgagctcgacggcgaggatggcgggcgcggtccctcgggggagaggattgtgggctcggcggcgaggatgtcctgggcggcgatctcgggcggggttgtccgggtgcttatggaagtggtcgggggagattgggagaggcagaacatggtgcacggtgtggacgtctacacaccgtgcttatag

SEQ ID NO: 13762 - DNA, 384 bp, Zea mays
  Peptide Sequence Number=SeqID_55541
atgggcgcaggggctacgcgggtggcgttgctggtccttgcatggggcgtctgggcgcttggccctagcgggtcgcgcggcgtcgggctgtcggggacgtggcaggggcaccgaggcggctccacgagcgtggcacacttaatggtgcttgaagctcgcaaactaaaacatcaggcggtgctccaactcaacagcgggttctcggtaagctatgctagctgtggagaatcctcccatggtcatggttgtggtaactgtgatgacagccactcccgggatggtatgccaccacaccctagtgattatcatggagatcaccgcaaaaactcttcttggcctatgtgtcagatctatggtaaaaatggcgacagttctattcgttga

SEQ ID NO: 13763 - DNA, 564 bp, Zea mays
  Peptide Sequence Number=SeqID_55542
atggcggattcacatgcctgcaatggccaggagagatctttcgttttgatctggaacgaggagcgaattaattggcagcactccaaagatacctgtgctgcatcatcattatcatcaccatcttcttcttctgaagtcaagcgtctcttcatggcatccattatccagagcaacgaagggtcgtctgccccaacaagggcgttggtcgtggaggacatcaaagttgactgcgtgatcctcatgcacatgctgcacaagctccagtgcgaggccactgctgtcgagaacgggaaagaggccgttgacctcttcgttgaagggaagaccttcgacatcgtcttgtcagataaggacatgcccgtaatgtcgggccctgaggctgtggccaagatccgtgccatgggagccactgaggtgaggatcgttggggtgtcggcggatttcggtggccgggaggcgttcatgcgagctggcgctgatgtgttcgtgcccaaaccagtgaagcttgagactctccggtctatgctcgagctggtcactagcaagaagaacatgagcggctag

SEQ ID NO: 13764 - DNA, 357 bp, Zea mays
  Peptide Sequence Number=SeqID_55543
atgcgggcaggcggcctagctcggcccgccagcgggagcggcgcggggatggcaccgtgggcgcaggcccacatgctagcgaggggaggggtaacggtgttagggggtgatggggggttaagccgagaggaaaaccggtcgctggagcttgacgacggttccctgtcggtgatccggttccccgtcggtgatccgattccaggcggttggggaggtagcgaagcacgggtgtggatagggggtcaaggtggaggggtcaatttggccggtgggggcttagaatggtcggtctgtagtgaggtggcgggcgctcgcggcggtgaggtcgccgacgaggcctacgggtgtaataggtga

SEQ ID NO: 13765 - DNA, 258 bp, Zea mays
  Peptide Sequence Number=SeqID_55544
atgaatcgagtctgcacggacgacttcgccttgggagctgtcgtggttgctgccgaagatcgcagctccaataccacttgtgatgctcgtggtcgacgtcgcgtcgccgccgacgtgaggatcaccggtgattttcggaaatacagaagacgcaaggacatgagtgtttacgggttgtcgctagagagtattatgggtgtacttatgaaagcttcatttcaggaggctatgaagtacaatgcacctttagaattttga

SEQ ID NO: 13766 - DNA, 201 bp, Zea mays
  Peptide Sequence Number=SeqID_55545
atggagattggcagcagcggtggccggcccaagcgacgtgaatggggcgagcccgataaggaggcagggtacgcgagcacggatgaaaacgatgacacgtgggtcccccaggtcggccacagggcagaagacagcgcaggagaaatcgggtggaaatggaccgacatcgcagcccacagagcaagtggaggaggtggctag

SEQ ID NO: 13767 - DNA, 189 bp, Zea mays
  Peptide Sequence Number=SeqID_55546
atggccagcatcgtagagtgcctatctgccgacgaatccagtgtgttgatcggcccctggacgtgtaggattgcatcgggagattttaaatctggggccattgggccgaccaatggtggcacggatcaaagcaagtgtaaccctgtgcgcgatgtaatcgtggacgctcatttcgattcgacggtctga

SEQ ID NO: 13768 - DNA, 321 bp, Zea mays
  Peptide Sequence Number=SeqID_55547
atggaccaaatgtgtcggtcgaaggcccgacgcaacaagggtctcctccaacaatcgggatgccctagggtggtgcatggggcatctctggctgaggtgcaggggaaggtggcctctcagactccacctcccgctgaggcgagggggaagagtcctgctgctcctgctcctgctcttggcatcggcgctcctgctcctcgtgtaggcgacgatgtagtctctccagatgactggactgaccagacaccatgcgacgtagtggatgctccgtcaggcaagaaggcaaaaaggggatcacagacttacatgcggtgcacctga

SEQ ID NO: 13769 - DNA, 396 bp, Zea mays
  Peptide Sequence Number=SeqID_55548
atgatatcatcgacaaggtccttctttgttgatgacaatgacttggaagatggtaaggcctcaaaagaaagggagagttctgcacagtcactcaggctcccaaagattcagaatcaggctcccaaaagaaagggagagttctgcatgtttagtttgaagtacattaatgttgccatgctgactatattgaagaatgtcgccaatgtcctgactgcttctggggaaacttattttttcaagaagcagcatggtactcaagtttgggttgctcttatgttgatgataatctctgcagttgcgggaggaataacggatctatcattccatgttgtgggatatatctggcagaccttaaaatgtgttctgacggcagcatattcagtatttctttcctaa

SEQ ID NO: 13770 - DNA, 405 bp, Zea mays
  Peptide Sequence Number=SeqID_55549
atggggcaaaggcaagagaggtcgagggatcgcctcatcgtgccggaggtttcctccaagtttgatgggtcactggccctcgcctctcccccaacatcgtccgatgattcggatgactcccaggggctggtcgctgaggtgtggatgtacatccgctccatcgagcgcgtcgggcttgaggggtcggatgagtcggaggtctcctcggatgaagaggactccttcggctcgtccgaggagcggagcagcgacgatagcgatgatgagggtggtggcggtggcgacaacagcgatgacggcgatggcggcgagggcgacgacgatggcggcaagggcggtgaaggcagcaacggcggcagtggtagcggtggcggcaaggctagtggcaaagcgcaactagtttaa

SEQ ID NO: 13771 - DNA, 1104 bp, Zea mays
  Peptide Sequence Number=SeqID_55550
atggggtctggagcccatgcagccacccgaccagagattagggcgggtgcactccaccacccggccggagatttgctcttcgacacataccttcacggggcacctaaagtatcctccatcgcaggacataggaaccgatgtgggaaggtcgtgctgggggaacccgtgccgccgaacaaaggcaggacgagcgaaactatcaacgcggagttcttgggggagggtgacatcgaggtttccgatggggatgaaggtcgagaggacaagcggcgtcgacggaaggggtggaggggtgggaaaaaattatgtttggatcctaaaaaatttaatgtcatttttggaccctttgatcggcaccatagcctctacgccataggctatggcgccgaggtatctagtgcgctggcacaagccagacatcgtggtgccgacgtggcaccgagctcggcgccacaaaccttggcgctgagctcggttgtatctcgcagcaagagagcccaggttcactcgctggcgctgacagcactctcttttactgctgttcaagttaagtgcatgatccacccagggccgtccctgtgcgggtgcccaagccgcttctttcacccacacgcccgcgggttcggaaaactccgaagacagtcttcgaggcgaaccaagtgcgacggtcggcccgccggagaaggtacccgtcgcgccgccctctcccttgattcgatcttcttgctccgggccgcacgcaccgacacgctggagccgccgcagcaagaggcggtgaaaccatcgccgaccaacggtcgcatccgctaccgtacgccctcggcgaccgatctgctccccgctgacgatgtcgcggcggatgccacggcagccacagcggtggccgcgaggatccgccgctactcgagcgccggagcacggcagcagcagcaaacggaggcggtggtccgaccacgtgcacccgggggtgtgctcctcaccgttggtggtcggaggtggggaccccgggccgtcaaggacggactgaacaattatctcggcgccatagcttatgacgccgagctgtgttacctcggcaccgtaggctatggcgccgagcaaagg

SEQ ID NO: 13772 - DNA, 561 bp, Zea mays
  Peptide Sequence Number=SeqID_55551
atggcggaccaggcggtggcagcgacgaccgcgcacgaccagcaccagcaacagcagcggaggcggcgctcgcgggcgtcgagcgagtacctgggcgtgcggcggcggccgtggggcaggtacgccgcggagatccggaacccggtgaccaaggagcgccactggctcggcaccttcgacacagccgaggacgccgccgtcgcctacgacctctcagcgatctccatctccggccccgccgccgcgcgcaccaacttctgctacccgcgcggggccgcccgcgggctcccctcggcgcacgcgctcccgcggcaggggctgcagctgctgcctcactctccggcggtgccatccccggcggcgccgccatcggcgttgttgcccgcgggtggcggcggcggcggtggaacggtggatggctgtgattatgattgtgaatggcgccacctcaaggcggtggaggaggccgatgccgacgacgagtccatgacgatcgcggccattctgcagagcttccagcatctgaacgctccatcggcaccccctgcctcgctgtattag

SEQ ID NO: 13773 - DNA, 471 bp, Zea mays
  Peptide Sequence Number=SeqID_55552
atggagagcaaggtagaagcagaagcagtgcagctggcggggaagaagaagagcaccttcccgtcgtcggccgccgacgacgggagagtggaagccgccagcatgggcatcatggcgtcgtcgccttctgccgcctctccagcagccatcgtctccgccttccttgcgcccccgctgtcgctgctgcgtcacgtcgcttctctctgcgccggctacctgggcctcgacggcggcctgaaacctcctgctgctgctgctcctcctgcgtcgtcgtcgtcttcagcagctgccgccgccacttctcagcgaggcgaggtcgttgacgttgaggctgctgcatccgtcgaagattactgcgcggcggaggtggtgcttgcaattgaggtgcggtcgcgagggttcacgccaccacagcgtcgcagcgcaccccgggaatccaaaatagccgccgttgggggagtgattcattag

SEQ ID NO: 13774 - DNA, 363 bp, Zea mays
  Peptide Sequence Number=SeqID_55553
atggcggcgcagacgtcccacagcagacacaagcatggcgatctagagcctcggtgggggagatggggcagtggcgcgcgccctagcttgtccccgaccacaccccggcatgggttgcagatccacgcgcccatggcagggaagtcgggggaggtcatcgacactgtggaccaacctccagcgtggcaagaacgcagggaaggcacaaggaagcttcgcggcaccgcgacgctatgttggggatgcgggatggcgtgctgcgcggccctccgcgaggatggaaggggactcaggccgtttcctgagtacctcccctgctcaggaggtgatgctggcaacatggaggactttgaggagttctag

SEQ ID NO: 13775 - DNA, 519 bp, Zea mays
  Peptide Sequence Number=SeqID_55554
atgggtcggcgcgagacggagcacgaagggggaaaaaagggagacaggcaaaaggggaaacccgcggccttcgtgttgtcctgcgcccaggtcgggcgagacggaggctcctctgaggtcgaggtcgagtctgtcttccgaggtcgaggtcgagtccgtgccccgggtcgagcgaggcggagaccatcatctgaggccaaggctaagtccgagccctggggtcgggcgaggcggagttcgtcgtcttccggagccgaggctgagtccgagccctggggtcgagcgaagcggagttcgtcgtccgaggccaagacgggggctgagccctggggtcgggcgaggcaaagcttcctatggcgcccgaggccggacttggctgctgtcagcctcactctgtcgagtggcacagcagtcggagcgacgcaggtgacgctgtcttcttgtcaggccggtcagtggagcggcgaagtgactgcggtcacttcggctctgtcgactgaagggcgtgcgtcaggataa

SEQ ID NO: 13776 - DNA, 219 bp, Zea mays
  Peptide Sequence Number=SeqID_55555
atgctccgccgcggccaggcgggcggcgccgccgtcctgggatgcctggggcggatttttattgtgtattttattcacatgtttggtgcaatgttaatttttgctatatatgtatgtattgtgttgatgcgattagacgagcaagccactgtggattctgaggttcaacaagtagaagtagctgagcaggagctcattgaaggcaagttgtgcccttga

SEQ ID NO: 13777 - DNA, 482 bp, Zea mays
  Peptide Sequence Number=SeqID_55556
ggccaatacctcggcgccatgggctgttgcaccgactcatcgagctgtgttacttcggcgccacggcctatagcaccgagcaaagggtccaaaaacaggaatacttcctccaggggctaaatggtggtggactcgacaagctcattttggagagcctttatgatgatggggcctacaggcagaggcaacaacaacagctgtatggttcagcagctcctaatccattcatggcaaatgatcctttcgcgatgtcgaaccaagttgctcctccaccatcagttcaaatggctgccatgtctcagcagcatcagcaaatcccaacgatgatgcaaccaaatccctttggaccacctatgcatccacaggtgagcatggcccctgcaacaaacaatccctttctggatgctggcttcggggcattcccagcggcgaacaacggccatcagcaacacaacccatttggcagtgcccaacttctgtag

SEQ ID NO: 13778 - DNA, 324 bp, Zea mays
  Peptide Sequence Number=SeqID_55557
atgactgaagcgccatgcatccatcctctagctgcctccgatccgcggttctttcttgctgtccattggtttccggccatcatgtatccttgcaccttctgtgctgtgctgtgttgtgttgtccctgctaccgtacttcagttttttactcctaagtcctacaatggcaaggatgtaccgcgaggttttcttcacaagctgctgctccacgtaggcttcgataaatggcttgctgagcctgagcgtcaggtgacctcagtcaacggagctatttctgcaaatgctcccaagttacgtggagctactgtttctcttttcgaatag

SEQ ID NO: 13779 - DNA, 864 bp, Zea mays
  Peptide Sequence Number=SeqID_55558
atggcgtcgatgcagagctggcgcaaggcctacggcgccatcaaggacaccaccaccgttagcatcgccaatctcaactccgacttcaaggatctggatgtggcgatcgtgaaggcgactaaccacgtggagtgcccgcctaaggagcgacacctgcgcagggttgttgcagcgacgtccatcaccaggcctcgggcagatgtcgcctactgcatccacgcgcttgcccgccgtcttgccaagacccgcaactggatcgtgtttgtggttcttctagtgctatataaggcgtcccctgcttactctccggttgctctaaaagcacttgtagtgatccatagacttcttcgcgagggtgatcctacatttcgagaagagcttctcaactttacacagagaggacggatcctgcaactttcaaactttaaggatgactccagtccaattgcttgggattgttctgcctgggtgcgcacatatggtttgtatttggaggaaaggttggaatgcttcagagttctgaaatatgatgtcgaagctgagcgcttgtccaaacaaggtcaaggtcctgaaaagggtcacagtagaacgagagagttggattcacaggatctgttagagcagctgccagcattgcagcagttactgtaccgacttgttggatgtcggcctgaaggagctgcaaataataactacttggtgcaatatgctcttgctttggtgctaaaagaaagctttaaaatttattgtgcaataaatgatggaatcataaacctcgttgataagttttttgagatgccaagacatgatgcacttaaagctcttgaaatctacagaagggctggccaacagacgaatctctag

SEQ ID NO: 13780 - DNA, 381 bp, Zea mays
  Peptide Sequence Number=SeqID_55559
cgccttatgccgtggcgccgaggtaacacggctcggcgccacatcccatggcgccaaggtacagtacgccctctgcaggatctgtgttggtacgtcgtttgctaccccgtccggcctggcgaagcgtgcggtgccatcccatccatcaagcggcggccgcgctgtgcagtgcagcctgcgctcgcgcatggagttattgcatgttgtcgtcctcgccttcggcgcttactttgttcgatcttggctcgccaccgagggggagctcgccgccgaggggggtaggggggagctcgccaccgagggggtaggggggagcttgccgccgaggggggtgaggggggagctccccgccaaggtggagagaggccgagccttcaccag

SEQ ID NO: 13781 - DNA, 249 bp, Zea mays
  Peptide Sequence Number=SeqID_55560
atgatgtctgacaacaggcgcagaggtggaaggcatgctcagcaagagcagcaagcaccccaagatgaggcacctcagcagcaattgccaccaccacccccgatgaccattaagcagatgtttcttatgcaaactcaagcagtccaagtgattggccagactctagcagcaatgcagcaggtgcagctccagcaacccccacctcaacctcagatgcaagtgcagatgccacaaatgacgaatctctag

SEQ ID NO: 13782 - DNA, 545 bp, Zea mays
  Peptide Sequence Number=SeqID_55561
atggcgactcaccagtggccagccgaggatccggtaaaccgtggcgaatcgagcacggccgcgagccctcttctctcacccacgattttgtgttacacgtgctctggtcactacggcgaggcgagtagggaagaggtggtggtcacgagaacccctttaatcctctggagtccaagtcgggcagaggagaagaggttgtggcccgccattgtcgcgcgggtggttgcacgcgcccgcgcggagctcggcgaagctgttagcacacgacccggcgcgtcggtcccacgtgtaagcgacaccatgcggcgtgtggatgaggagtgggcccggcttgtcaatcatacacggtcagcgcgccatcgcactaccgttactggcagaggggccccgcggagcagtgaccaaggacgcgcgagcggagaaggctgggcgaggcgcggcgcaagggggactgacaggtggggtaggggtgtcggcgccaaggatagcttgggctgcgcggtgaggcttccctgggtgggccgaattggagtctgccggcccag

SEQ ID NO: 13783 - DNA, 291 bp, Zea mays
  Peptide Sequence Number=SeqID_55562
atggcgattttgatatctggcgtcacgagaatttttgggccttacacgcggtgctgggccacctctggggtggctgtgttcctgggcctgacggagctggagctagcgcgcgtcgaggccgagatggggttcatgttcccgcccgacgtcgcgggcctgccgtcagggcccgggttcccggactggcgatcgcgcgtggggctggtccaccttcgacctacccatcgcgacgtcgctgcagatcgcgcggggcgcgctgtggtcgcgctgctgggtcgcgcaccccgctga

SEQ ID NO: 13784 - DNA, 123 bp, Zea mays
  Peptide Sequence Number=SeqID_55563
atgtcctccgtccaacgcctcctcgatggcctcctggccgcccccatgagcgctggcccctccctggacgacattgtcccccatggctcccgcggcgagctcgctagtggaggtttgctctag

SEQ ID NO: 13785 - DNA, 228 bp, Zea mays
  Peptide Sequence Number=SeqID_55564
atgggcaccaccctaactgtccagatggccaccacgcagcgccccatcctcggccatcctctggtcgctcatgagcctcctctggatctgacaaccaggaaccctctcacccgttgtgtcagctcgaagccactctacatgctccggccttcctccaccggcgtgtctccaccatctcctccaccacttggcatcgtcgtctcggccatacaggacctggcgtcatga

SEQ ID NO: 13786 - DNA, 788 bp, Zea mays
  Peptide Sequence Number=SeqID_55565
atgacagagtgcctaaaatgcctggtcgacgcaacgaggagttgttccggcgtcatattcaacaccttccgagacctggaggactccgacctccagaggatcgccaatggcgtcgtcggagtgccgatctatcctgtcggccccctccacaagatctctccatgcaccgaggacagcttactggcgccggaccgggcgtgtctagagtggctggacaagcaagaggcggactccgttctgtacgtgagctttgggagcctggcacgcgtggacggaaaggagctgctggagatagcatggggcctggccgacagcaagatgccattcctgtgggttcttcgccacggcttgttggtcaactcatcatcatccgacgacgacgacgaccaggacaaagtgaggaggcttcttcttcccggcggcttcgaggaggcgacgcgcggaaggggggtggtggtgccctgggtcccgcagcaggaggttctacggcaccgtgcagttggcgggttctggactcatagcggatggaactccactctggagagcgtctgcgaaggtgtcccgatgatgtgccgaccccagttcgccgaccagatgataaatacgaggtacgtgcaagaagtgtggagggtagggtttgagctagatggcgaccagctggagaggcgcaagatcgcgggggctgttacaaagctgctttgtacggaggaaggaaggcgtatgagacagagggccagagatttaagagacaaagccatcgagtgcgtccaggaagaaggcgcctccaa

SEQ ID NO: 13787 - DNA, 204 bp, Zea mays
  Peptide Sequence Number=SeqID_55566
atggaaagcactttggatgcccctgatatggtcagatgctggatgaacttcaagtggttctcacttactgacatcaagattaatatcaaacgtgtcccaaagaacacaaccctgatcatggttctggaggaagctagcaatgatgaagcttattctgtggaccccttcagcaccattgcactttattcatcttctagattatag

SEQ ID NO: 13788 - DNA, 264 bp, Zea mays
  Peptide Sequence Number=SeqID_55567
atgaaccaagacatacccctcgatgtatcgcagaaggtcctggccacggtggagggcggaaccgcggcgcattttctgcgacgtgaagcccccaggcacgacaccaaggacgcggtggtgaagagcgctcgggtcgactatggcggctaccctttccgctcggtgctcacgacaatgtggtttacggggaagaggatggggtcccgatggcgcgtggcggtacagggtgagatggtcaagaaagcgaggaggttttacggttaa

SEQ ID NO: 13789 - DNA, 450 bp, Zea mays
  Peptide Sequence Number=SeqID_55568
atggcaaaatcggctgagggcacgacagcacgaccacgaaccggtgttgcgcgacacggaagggcacaaaaggctgcgccgggggcacgagagcgagtcgcgggcacgagccgcgttgagccggtctctggccacgcgctaaactgccacgcagccacgccagggctgctggccgcgctgggcagtcgtgccgggtcgcaggtcgcaccacgccaggccgccggggaccacactggccgccatgccgagccgcgctgggctacgcgttccacgccgggcaccgtgtgccgcgtcggccggctgcgaggccgcgcagggcacgggcagccgcaccgcgggccgagccaggctgcacgagcgtctttcgcgccagggaggaaggagaaaggggaaggggagaagggaggatggatgcgagctcaccacggtaacgaatggcgactccggtga

SEQ ID NO: 13790 - DNA, 225 bp, Zea mays
  Peptide Sequence Number=SeqID_55569
atggcgcagagacttacccggtccacgttcaccagtgagcgaaagaagtccgacgagggtgaattggggtctccgccgaagctcgggtggcttagcgggcggtggcacatcgtgctcaaggcaaagtccggcgaactctggcttgggcaggactgtgagcatgcggggagtacggccgaggccctggggctgctttataagcacgacgtgggcaagggcgcgtga

SEQ ID NO: 13791 - DNA, 525 bp, Zea mays
  Peptide Sequence Number=SeqID_55570
atgagaagctttttggaaaattcacctttgagcggaccattcgggcccttccagcggaccgtccgcgacaccaaggtgtgcctcagacagaaactatgcaaaactcatatttacactacggactatccgaaggagaagagatcaccgtcttggactaagctcggaccgtccggcctcaggcgcggaccgtccgctcgtagaaaacccagaagaacccgaaggttccgcatggggtgtgacgaggcgaggagtgatgcaaatcacctccgagcttcagaaaagttttccgaggcccgtgatgctatgaaggcagccgaggaggtgagtaaggcggcggaggatgaagtgcataagctctcgcttgcgtgcaatggcaccatcgccgagcaggcattgctcggtcaagtgcagcgtgtggtcctcgaaggggcgtatcacgggagcagcatggccttagggtacatggtctcccacttcgatgagattgatgctgccgtgatcatagagggctatgctgccggctga

SEQ ID NO: 13792 - DNA, 438 bp, Zea mays
  Peptide Sequence Number=SeqID_55571
atggcgcggtcggccgccggccaccctgcccctctcttggactcaccgacggtggcgaagactagcaaaaccgagcgtcatcccaccattgctgagccaagacgacgctaccccatgtactgcttaaacgatcacacaccagaaacccctctgagctcggtaatgacggaaccaagattccgacgagcctgttccgaacacgacaacacggtagagttcaaattgaaggcatggcgagcatcagtgactcaccaggacaccgtaacaaagggcaagaggacgaggggggtcagacagagcagcgggtcgacgcgtaggcggtctgcggcggtgctctgcaacgctatccactcttatccaggcgcgtatcttaactccggtgtgaatcacgatgaggagatcaccggcgtagagatcaccgacgtcaaggttccgtga

SEQ ID NO: 13793 - DNA, 249 bp, Zea mays
  Peptide Sequence Number=SeqID_55572
atgaagctgtggaaggagacttccaggagttccaagattacgacgagttctaggtgtgggttagcggcaacccccagtcggctgcctgtgaaggccgcggttatctacgtttcttttccgcactttgatttattacgaggtactcaatatactgcatcaaaattggagatcaatataaaaccattctccaatcccagacaaataggagacaagtctcttatctcggacaaaaccgaagattggcactag

SEQ ID NO: 13794 - DNA, 717 bp, Zea mays
  Peptide Sequence Number=SeqID_55573
atgtacctggagtgctggcacctcctcgacttccccacgctcaggctccgaccgttctactcccggcgcgctcgtctttgccagcgcagtggagccattctacctgctctccggcctattctatctcctgcctcgttccttgttgagctcacgcgcctctgcgcggccgccaccccggaagacgtcatcctctcaacgccagagacgaccacgggggagcaccaggtgcagctcggcttcttgtcctccatcgcagagcagttccttctgcgaccattcctcgtcgggatattcttcgacccggcgctcgacaagtcgtcccgcctcttcgagcttgtgttcaagcgcctcaccctaggtgacaacgtcctagtggagacaggagcgaagaaggcgacgaccatggtgttctcccccgtgggcaccctctccaacaaggtccttgttgggctcacgcgcctccgcgcaaccaccaccctggacgacgtcatcctctcgccgctggagacggccacaaggatgtggatgacggggcgccgaggatgcgaggaggatgggcgggggtggggatcacgccagggtgggggctgcgcgcgtggtggcatgggcaggcatcacggcgacgacgctggatttgcccatgccacgcggatctgttgcggtggcggtggggaggagaggtgggggatccgcgtgggggaggaccgcgggcattga

SEQ ID NO: 13795 - DNA, 1761 bp, Zea mays
  Peptide Sequence Number=SeqID_55574
atggaccacgcgccagcgccccctttcgccgtgcacctcgtcaccggcggcggatcctcgtcggggatcgccctcctactgcgctccctcgccgccgcccgtgtcgtcgctcttgacgcagagtggaagccgcgccgccgcggtagccctgccgctgccgaccctgcggccctgggcgacgacacgacgccggcgtccgagacatctccagcgccgccgaagttcccgacggtgacgctgctccaggtggcctgccgcttcagcgatggtggtggaggtgagggcgagcgcagcgaggtgtttgtcgtcgacctgctttccgtgccgctcgccgacctgtgggcaccgctgcgagagctgttcgagcggcctgagacgctcaagctggggttcaggtttaagcaggacctggtgtacctctcctccaccttctccgccgccctcgggtgcgattccggattcgatagggtggagcctttcttggatgtcaccaacatttattactatctcaagggccatgataggcagaagaagcttccaaaggagaccaagagtttggcaactatttgtgaggagctgcttggtatccttttgtccaaggaactccagtgtagtgattggtcatgccgccccttaagtgaagggcaaatacaatatgctgcgtcggatgcctactacttgctagacatatttgatttgttccaaaaaaggatcacaatggaagatttgaaagtcatcatagtaccaagaatgacttctatttctgacttcctttcttatttttttactgtcgattctattaaaggaaaatgttcatctacaacagaacttacttcagacaggcattgctcatcagtggtgatagaatgctcttcttctggatatggcatttgctcgggtagttgtttgatgtccatagtaaccaagtacagtgagaagataatattgacagaatctgatgcaaaaccgcgtacctccagacgaaaagaaaaactgaagattcctgccaatgccaaacgcaaagataatgtggattgcagtagtgaatggcagggtccccctccatgggatccttccattggtggggatgggtacccaaagttcttgtgtgatgtgatgattgagggcctagctaagcacttgcgatgtgttggaatagatgctgcaattccatcttcaaagaaacctgaaccaagggatctattaaatcaaacatacaaggaaggaagaatattattaacacgggatgccaagctcttgaaatatcaatatttagctggtaaccagataaaaaaagatgacatggtatttccacaactgtttcaaggatttttcaagaagttttggaacttattaatgatgaagaactgggattatatgagaattcgtcccattcaaatattgcaacacatcaagtcggtatttgtttctcctagcacctttgatgtggatgcacagcattctcataaaaaatgtggtgttaggccattttcaatggtcattaatatcttccaattaaagatttctgaggaccaacttatgtcgaggtgcacaaaatgcaatggtagctttattcagaaaccacttaccctagaggaagctgttgaagcctcaaaaggtttccagattattcccacgtgcttgttcaaccgaaatctggagttctggaagtgcaccgattgcaaccaactctactgggaggggactcagtaccacaatgcagtccaaaggttcttgtcagtgtgcaacattagtgactaa

SEQ ID NO: 13796 - DNA, 396 bp, Zea mays
  Peptide Sequence Number=SeqID_55575
atgccgtggcttgatcaggaggtagcgtggctcatcaagatcatcgcaacctacggctacggctacggctacgagtcggaggtatctctatcctatctgcctatccgaatcccgagcacggcgaaacctgagccgagaaccgtcggagaacacgatcgcaagtatgcccagctgttcgtcggccatggcgccggccgctacaaactccagacgccaaggaccgagccaaatcaacaagcaaacctacctcttcgcaacaaaacgacgcaatatatctgcgacaataaggcagtgctcatatatctgcttctctttccgtggcaacaatataacaagcggcacgcacagttcgtctcctcaatacacaaattacaagcagcagcacataggacgtga

SEQ ID NO: 13797 - DNA, 1209 bp, Zea mays
  Peptide Sequence Number=SeqID_55576
atgccgttccagctcaagaccggtcaccaccaccacggcgccgccatggaagggaagccgccgccgccgccgacgacgcagcagcctgcgccgacgccgagggtgtcgaggctccggaggctgctcgggcgggtgtcttcatcggagaagttcgccgcggatgggaaggacagggacaaggacgagaagctgccgccgccgccgccgccgttgccgcccgcgaccgacgatgcggacgccgcggggtcactggggctggaccgcatggtgctcagtttcatggaagaggcctccgccgtcgagcggccgccgcgggggcgttgcaactgcttcaacggcagtaaccacgaggaaagcgacgaggagtttgatttcctcccctccgcgcacgcctcggcgacggccgccgctggggcaggggacgccttggaggctctgaagggcctggtgcagagcgcgagcgtcgcggagcggaatctcctggcggacgcgtctaggctcgccgacaagtgcggcaagggctgcaagggcaaggcggagtgccggcgcgcggtggccgacggcctcaggtcgctgggctacgacgcctccgtgtgcacgtcgcggtgggagaaggccccctcccacccagcaggcgagcacgagtacatcgacgccgtggtggggaaggggaaggagcaggaggaggaggaggtgaggctgatcgtggaggtggacttccggtcgcagttcgagctggcgcggtcgaccaaggcgtaccgcgcggcgctccaggcgctgccgccgctgttcgtgggcaccccggaccggctcgggcagatcgtggcggtggtggcggaggcggcgcggcagagcctcaagaagaaggggctccacttcccgccgtggcggaagccggagtacatgcgcgccaagtggctgtccccgcacgtccgctgcggcggcgtcggaggcgacatggtcgccgtgccggccgccgccgccgccgcggcgacgcccgtccaggcggcgagtttttccggcgagttcgagctcgtgttcgacaggaagcgtagcagcgccggcgccggcgccgccgcggagggcggcgccgtcggcggcgagaagatcacggtggtggtgtcgccgtggcgcccgacggaggaggcgagcaagaagcagctgccgcccaaggcgaaggtcgtcacggggctcgccgccgtcctctga

SEQ ID NO: 13798 - DNA, 579 bp, Zea mays
  Peptide Sequence Number=SeqID_55577
atgggtcgcagggacgccggcacgcggcccgcgccgtggggtcacggcgttgccgttcgtgctggggaacgcgcaaagacggagtcgcccaccgcccaccggctttgggtgacgaaaatggacgcttacctcggcgccatcactattggcggaggcggtgggatatgttcaaaaacgaacacctcgtcggcacgacacaacctatgtcgcctctcctctttcgatcccccaaagatgttaggtgcggaagcgctgctcgcagatcctttgcccttgcctgaggggctaggggccatggctagggcatgctggaggctgcaccaccatgttgggaacccccaaccggtacaccagggatctggatcccgcggtgacggtcctggccaccagtttggtgaactgccatgctgctatcatttagggtcggcagcgtcctcaggatcgcgtcctcacgccctagtcgtcatagaacacggtgatgtgctgagggaggatcacgtactcagggacgaagatctccccagtaaccccccataccaaaaattccagttcctcctagacagattgaaagttgcctag

SEQ ID NO: 13799 - DNA, 1356 bp, Zea mays
  Peptide Sequence Number=SeqID_55578
atggccgccaccggcgaccaactcgccgcggtgcgcgtacgcggccgagcctccgtccgcgtcaacccctcctttttctctcccaataccgcctcatccacctcatctccctcttcggcgcatccaatgttcggcgtcttctgtaagggacagcaaatgttgatcgccgacgagatggtaggccttgccgacggagaccccggaacgccggtgctagcggtggccgtgtgcgggccgcagggagatgttgtggtcggggggcacaaacccgcgtcaggatttgtgagcgggcacgacggcggcggcggcgatgtcggacaggtgctgctggaggcgatggcgctcgtggagggcctccgtaccgcgatcaggatgggcatcaccagcgtcaaggccttcaccgatcacaggctgctgtacaactgtatggttgggctttctcgtccagcaggtgacgagcagcttgcagatatgatcagccaggctctgtcagcacaaaagcaattcgagcgatgcgagatatcacttgctgagcaaggccaagtcggcaacgctgtgaagctagcaaaggaggtggaactggaggcggagatcggcaggtacctctccacaacaaaggagagaacggagacatgcaggatctgcctggaggacgtggacagcaggaagatgcacgcggtggaaggctgcgcgcaccgcttttgcctcgtctgcatgaagacgcacatgaaaatgaggctactcggcgggctggccccgcgctgcccgcagcctggttgcgcgaccaagctcggcgcggagggcgcagcagcgttgctgtcgccacggcttgtggggatgatggcgcagcggcggctgaaggaggaggaggaggaggagcagatgagtatccacccgagcctgagggtgtactgcccgtacccgaggtgctcggcgctgatgcccctgagcgaggtgctgcgagggtcgctgagcccagagtaccctgcgacgttcagggagtgcgcggagtgcggagggcccatgtgcgtggagtgcaaggtgccgtggcacgggccgttgagctgccccgagtaccggaggcggtacccccacggtggcggccctgaggacgtggcgctccagaagcttgcgaggcagcggctgtggcagcggtgcgagagctgccaccacatgattgagctcgccgtgggttgcgcccacattatctgcgtgtgcggtagtcatctgtgctacagatgtgggaaggcactagcggatgatggaaggtgcggctgcagcggattggcagatggcaggagaccatggtatttccggctgccagcatgctggggaggcagaggcacgcgtcgttag

SEQ ID NO: 13800 - DNA, 1587 bp, Zea mays
  Peptide Sequence Number=SeqID_55579
atggccaccgctgcccgctccctccacctccctggtccgacgcctcctaaatcctctaccccctcctcccaccgcctccctgtcccttgccacctccgcccccaacgccgccgcctggccgcctcgtcctccgacctcacctccttccccgaaccgccccccgccccgaacggcgtctacgtgccgtgggcggcggcctcctccgtggccgcggccgcggcctccatcgtcgtggacgccgccaccgaggcggagctgcgggagaacgggttccggagcacgcgccgcaccaagctcgtctgcaccgtgggccccgccacctgcggcgccgccgagctcgaggcgctcgccgtcggcggcatgaacgtcgcgcgggtcaacatgtgccacggcgaccgcgagtggcaccgcgaagtcatccgcgctgtccggaggctcaacgacgagaaagggttcgcggtcgccgtgatgatggacaccgagggcagcgagatccacatgggcgaccttggcggagcgccctccgcgaaggccgaggatggagaagtttggacatttagcgttagatcttctgacacgtcgctcccagatcgaatcattcatgtgaactatgatggctttgctgaagatgtgaagtgccgctgcactgatcctggtctgttgctgccacgggctaatcttactatatggcgcgatggcagtgtagtgcgagagaggaacgctatgcttcctacaatttcgtcgaaggattggattgacatagattttggaattgctgaaggtgttgatttcatcgccgtgtcatttgtcaagtctgctgaagtaattaatcatttgaagagttacattgctgcgaggagccgtggaagtgatataggggtcattgcaaagattgagagcatcgatgctttgaagaacctggaggagattatccgtgcatcagatggagtaatggtagccagaggggacttgggggcacaaatccccctggaacaggtcccttccatacagcaaagaatagttagaatgtgcagacagctcaacaagccagtcattgttgcttctcagcttctggaatcaatgatcgagtatcctacacctactagggctgaggttgctgatgtttctgaggcagtccgccagcgtgcagatgctctcatgctttctggtgagtcggccatggggaggtacccagagaaggctctcagcgtccttaggagtgttagcctgaggatcgaaaggtggtggagagaggagaagcgccaagaggcactggagcttcaagccaacaacttaggagtcgacgccgttttcgtttacacgaaggatggctacatgggctccctgctctcacgatgccgccccgactgcccgatcttcgccttcacgtcttcgacgtctgtcaggagacggctgaacctccagtggggcctcatcccgttccggctgagcgagtccgacgacatggagagcaacctcaaccgcaccttctccctgctgaaggccaggggcatggtgcagtctggagacctggtgatcgcgctctccgacatgctgcagtccatccaagtggtgaatgtgccctag

SEQ ID NO: 13801 - DNA, 213 bp, Zea mays
  Peptide Sequence Number=SeqID_55580
atggcgtcgtctccgctcggggtcacctttcctccctctcacttcctcttcttcattcaggggttcaccaagtcgctggccatgacggtgctctccaagatcggggacaagaccttcttcgccaccgcggtgttcggcggtatgcctccatggcgtgcctctttgctcggctgttgggtgcgaccgtgggagattttcagttatactaaatga

SEQ ID NO: 13802 - DNA, 891 bp, Zea mays
  Peptide Sequence Number=SeqID_55581
atgcctgacataccgagggatgtcgccgagcacccacttgacattcaggccggcgcccgacccgtgaagcagcacctgcgccattttgacgaagaaaagcacagagccataggcgaggaggtccacaagctgatggctgcagggttcatcaaagaggtattccatcccgaatggttatctaaccctgtgcttgtgaaaaagaaaggtgggaagtggaggatgtgcgtagactacaccagtttaaataaggcatgtccgaaggttccctaccctccgcctcgcatcgaccaaattgtggactccactgctgggtgcgagacactgtcattcctcgacgcctattcaggtgcaacataccaaaggtgcatgaaccacgtgttcggagagcacatcggccgaacggtcgaggcttacgtcgatgacattgttgtcaagacaaagaaagcctctgaccacctctccgaccttgagatgacattcaagtgtctgaaactcaatcccgagaagtgtgtcttcggagtcccccgaggcatgctcctggggttcatcgtctccgagcggggcatcaaggccaatccagagaaaatcgcggccatcaccaacatgggaccgatcaaggatttgaaaggagtacaaagggtcatgggatgccttgcggctctgagccgcttcatctcgtgcctcggcgagaaaggcttacctctgtactgcctcttaaggaaggccgagcgcttcacttggacccccgaggccgaagaagccctcggaaaccttaaggcgctcctcaccaatgcgcccatcttggtgccccccgctgcaggagaagccctcttgatctacgtagccacaaccactcaggtggtcaacaccgcgatcgtagtcgagagatga

SEQ ID NO: 13803 - DNA, 342 bp, Zea mays
  Peptide Sequence Number=SeqID_55582
atggcagggatgtactgctgcgcctgcctcaactggaggatgcagccatcggcccgcaccgccatgcgaactcttctttcccccgtcatcgaggcaaaaagctccgcagagaagagggaccgggaaaggggatactctgaaagggatccttctccgcgaagggagcgggccccgagccctcctactgatcagaggttcgaaggctggcccctcggaagggttcaacagccgcctcagagcactcgggctccgcgcccactactgatcagaggttcaaagcctggcccctcggaagggttcgacagccgcctcaggccactcgggctccgcgcccactactga

SEQ ID NO: 13804 - DNA, 399 bp, Zea mays
  Peptide Sequence Number=SeqID_55583
atgtcccggttctcgctgtgccttgcggcggcgtgctgctgctgctgccttgcgctgctcctgccggcggcgcagggccgtcctgacaccggcggcgaccatcgtccactgttctccgagccacacccacactccgatgccgtagagaagaaggcgacgccgtcgtggtcaccgcgtccgccgacggcaggtggcgtcgtcgtcacgcctgagctgcggacggtgcctgaaggcgcgaacccgctgcaccaccgcggcagtaccaccaggcacaggcaggagcgcgccctaccggcggtggcggcggggagcgtgagcgtcgtcgtcaggccggagttgcggacggcaccttgtggggcgaacccgttgcacaaccacggaagcaccccgtccccgtga

SEQ ID NO: 13805 - DNA, 2448 bp, Zea mays
  Peptide Sequence Number=SeqID_55584
atggccatggcgtcctccccggcctgccacttccgccacccgccccgcctccgcctcctcctcccgctgtccacctcggccccccacccgtggctctactcctggtcgcacccgcgccagcgcggccgactccgcgcgccgcccgccgcgctcgacctccgtccggagccgtccccgtcgtccgactccgacgatgaggacgccgtcggtgccagccgctcctccggccgctccaccatgtccctcatcctcagccgcctccgccgcgccggctactccggcgaggacccgcgtgccgccgccccaccgcacccgccgcgggggtcggtcgaggacgtcttccgcgccgacgatggcgtgctccccaacgcgcgcggcgggttcgacgccgacgacgaggagcgggcgctcggggacgcccgcttcccgtgggagcgccccatgccgccgcccgaggccgcgccgcggtccgcgcggtcgcccacgtggatggcggagctgacgctccccgccgcggagctcaggcggctgcggcacgccgccatcaggatcaagtccaggaccaaggtgggcggggccggggtcacgcgcgagatcgtggagaagattaaggagaaatggaagacggaggaggtggtcagggtcaaggtctctggcacgccggcgctcaatatgcgcctcttccacgagatactcgagagaaaaacaggaggattagtaatatggagatcagggacttctgtttctctgtaccggggagtagattatgatgaaccagaacccactaagaaatcaaagaagaattcacagtctcttgctatggatttcccaattaaggggtcttctaatccttccttactaccaactgagacagcgaacagtgtacgagacagcaatgtagctttagtttctaatgctgcgaaagaggaactagttgtacaagcaccagaaatcaagtatgaagatgaaattgacaaactgttggatgaacttggcccaagatacactgactggcctggatctgacccgttaccagtagatgcagatttacttcctgcaaacatgccaggttacaagccccctttcagagttctgccatatggacgaagcagacaactccaaggcttagctaatgctatggtaaagttgtgggagaaaagttctattgctaaaattgctttgaagagaggagtacagcttaccaccagtgagaggatggctgaagatattaaaaaattaacaggtggtgtgatgctttcaaggaacaatgaatttatagtcttctacagagggaaggatttcttgtcctcagaacttgcagaggtgctactagagagggaaagattagcaaagtcacttcaagatgaagaagaagcacggcgaaaggcagcgtcttatttttcaagtgctgagacatatgcacagcccactgtagctggtactctaggagagactctggaggctaactctaaatatggaactaaacatgatgagaatcatgcagacaaaatggcaagaactattgaagctgcaagacatgctgacctcgtaagaaagctagagtggaagctttcacttgcacagaaaaagatggagaaagccgaaagggtactaggaaaggttgagacagccctgaggccaaccgaagattccagacctcctgaaacaataacagatgaagagagattcatgttccggaagcttggtctaaggatgaaggcatttctgctccttggaagaagaggagtttttgacggcacaattgagaacatgcacttgcactggaagtacagggagctggtgaagatactagtgaaagcgaagtcttttgcagacgtgaagaggatagcactgtcgctggaagccgagagcgggggaatcctagtttcagtcgacaaagtctccaaaggctatgccattgttgtgttccgagggaagaactacagacgcccttcctcgctcagacctagaaatctcctgtcaaagcggaaggctttggccagatccatcgagctccagagacatcaggccctgagtcgtcatttcgcaaagctaaacaggaaggtggagcggcttaaggcagaactggtccagatggaagacgtgaaggagcaaggagacgaggagctgtacgccaaactggatgccgcctattcgagcgacgacgaagacatggaggatgaggacgacgaggcctacctcaagcgctttgacaatgaggtcgccggtgctaccgccgacgacgatggcagcgacgactacacctccgccgccgacgaggccgattaccccgactcagacgacgaagctggtgattgctccgaagacgaaggcgaggacgacgaagatgaggcggctgccggagtctctgacgctggcttccacggcgaagtagtaggtttcagttccgacaccgacagacgaaaccacgacgtaaatgagtactag

SEQ ID NO: 13806 - DNA, 1875 bp, Zea mays
  Peptide Sequence Number=SeqID_55585
atggcggcgccgctcgcccctctcactgcggccgcggtgctccgcctcgggagccgaggcctgcgccaccgcatcctcctcgcttcgctccgcccctgctcctccgcaaccccgccccatcgttccgccctcccggccgctgcacgccgggccccgccgcctcctcgccgtttcgcccacactcttgccgcgtctgcggccacggccatctccgagggtcaggcggatttagtgcctggttcaacaacttcaaccaagggacgcatctaccacgagacgtatggttgccaaatgaatataaatgacatggagattgtgctttctatcatgaaaaatgaaggctatgatgaaattgtccctgatcctgagagtgcagagataatatttatcaacacctgtgccatccgggacaatgcagagcagaaagtctggcagcgtctcaactacttttggtttttgaaaagggaatggaaagctaatgttgctgaaggtagagcaaaatctatgcgtcctccaaagattgctgtcctggggtgcatggcagaacgactgaaggagaaaatactcgattctgataagatggttgatgttgtttgtggacctgatgcatatagggatttgcctaggttgcttcaggaagtcgattacggccacaagggcatgaacacacttctatcactcgaggaaacttatgctgatatcaccccagtaaggatctctgacaattcaattacggcatttgtgtcaatcatgagaggttgcaataatatgtgctcattctgcatagttcccttcactagaggtagggaaaggtctcgcccagtgtcttctattgtccgtgaggttggtgagctatggaaagttggtgtgaaggaggtaatgcttcttggtcagaatgtaaacagctataatgacacttctgaagtagaagagttggagcctggcaaaaattggcaactcagtgaaggattttccagcatgtgcaaggtgaagaatatggggctgcgttttgctgatctcctggatcgattatctttggaataccctgagatgcggttcaggtttacctcaccacacccaaaggatttcccagatgagctactgtatttgatgcgggataggtataacatctgcaatcttattcacttaccagcacaaacaggcagtacagcggcgctggaacgaatgcggaggggttacactcgagaagcatacttagaacttgtccacaaaattcgtgatgtcattcctgatgttgggctaagcagtgatttcataactgccaccgccggttggagactgcagcagtgcagcaggcgagcaggactgcaggagaaggggcagggtgctgtagctgccggtgtagccgccggcttttgtggagagacagaagacgagcacgccgagacccttagccttgtgagggctgttggatacgacatggcctacatgtttgcatacagcatgagagagaagacccacgctcaccggaactacgaggacgatgtacccgaaggtgtgaaacagaggcggctcatggaactgatcaacactttccgcgagaccacgaagaagaactacgactctcaagtcggcacagtgcagctcgttctcgtggaggggcccaacaagcgtgctcccaaaacggaagtgatagggaagactgatcggggccacaaggtgtcgtttgcccgcgtccctgtcccgcacacgttcgaaggcgaagaagcacgtgagccggcagtcggtgacttcgtcgaggtgagaattctcaggtcgtcgacagcaacgttgttcggggagccgattgcacgcacaagcctgagcgcgttccacagaaatgtttcacccggagcgcaggctgctgctgcgtga

SEQ ID NO: 13807 - DNA, 369 bp, Zea mays
  Peptide Sequence Number=SeqID_55586
atggccgggaagggaggagggaagtcgctggtcgccgcgaagatagcggctggcatggacaaggacaagaagtcgccgttccctgtgggacgcatccaccgccacctgaaggatagcgcacaggccggcgagcgggtgggggcgacggcggccgtgtacgcggcggccgtcctggagtacctgacggcggagatcatggagctggccgggaacgcgtgcagggacctcaaggtgaagcgcatcaccccgcggcacctccagctggcggtacgcggggacgaggagctggacaccctgatcaaggccaccatcgccggcggcggcgtcatcccccacatccacagggagctcatcgacaaggctgcctag

SEQ ID NO: 13808 - DNA, 252 bp, Zea mays
  Peptide Sequence Number=SeqID_55587
atgggcgccgcgtgcagggtgttggacggaatgccgcaccgggacggcgtggcgtgggacgccgttattggtgggtatgcgcgagcggggcgcctggccgaggctgtggagctgtttggcatgatgagcctcttcgtttccaatgctctcccagagatgtatgcagagttgggttgtttgagtgaggcattgttggtgttccagcagatggagatgaaggattctgtgacttggagttcgatgattggttag

SEQ ID NO: 13809 - DNA, 279 bp, Zea mays
  Peptide Sequence Number=SeqID_55588
atggaggctggggattggaggttcctgcctttatcgccccctcccaaactcggttggttagcgaggacctcggacgagcagcaacggccgcgcatagttcgcaattctgttgaagaggtggctaagcaggaggtgatagacccgacgagtggccccggtgccagtgttgcaacagaccccgcactggtattccagttgaatgcgacagtagaatatggcccagggaacacgatagaacacatacgtgctggtttctttgcttgcttgatgtcatcgtga

SEQ ID NO: 13810 - DNA, 543 bp, Zea mays
  Peptide Sequence Number=SeqID_55589
atgcggggcccccacgtcagcctctccaccgcgttcgctcctcactccctttctctggtccgtgagcccgccctgtcggactcgtcccctttccccaagtccgcggcgacgaaatcgccgtcgccatccgcgcaacagccgccgatgaacacgggttcggccttcctcgtgcctataaaaaccaagtgccgcgcatctccttttcaaccgcttcgtgccgccatcgcgattccactcacaagcactcgcgaacctcggacggaggcgaatccgcaccctgtcgaccacgccgccggcgactctcctttttgctcgcgctcgggttttgcgcgtggggtcggggagcttcgcctcgactcggcgggagtttccgcggcatcggcatcgggttgggggggcggtctacaccggcaaattggtcaccggagccgctgcgccgccgtgactccgcgccgcaccgtgggcagagctccggacgccacgattctcggaggtaagctcgccttctgtctcgcgatcgtctccacatcgtttttgcgctag

SEQ ID NO: 13811 - DNA, 264 bp, Zea mays
  Peptide Sequence Number=SeqID_55590
atggggattaaggccgagcgagccgagagggcgcactggcgagaaggaaaccgcgcgagcactggacagggaaaacgacgggctcgacggcacgcgaagctatcactagcgacaacactacgaacggagctgggacgacgcgcagaggagcaggaaggaggagcacgtggaggctcgactgggcaccatgggaaacagggacgcggcgaggaagaagacgtgcgcaggggagcaaacttcgcgcgcgccaaggagctgggctag

SEQ ID NO: 13812 - DNA, 183 bp, Zea mays
  Peptide Sequence Number=SeqID_55591
atgggagactccgtctcaggtccagtgaggagtaaagtctgcgggcaggtcaatcagtgggaggttcttcggcgacgagttcgggagctggttcccgagcttcttcttgctgtgcgtctggatcttggatcaagatttactctgcgtccacgagattgcaatctaatgaatgcaaatgtatga

SEQ ID NO: 13813 - DNA, 486 bp, Zea mays
  Peptide Sequence Number=SeqID_55592
atgggcagaagaacacctccacgtgttcgacgcaccctgaacgcgccagggcacgcccagcgcccgaacccgcgcgccccgcgccacgccaagccatgcctatgtcccctgcccgcgcccgtgcctataaagccagccgaggcttcagccgtacgccccctcgcgctctcgacctcaccggagcacgagatcaccggagttttccctgcaaacggcgtgctagcggccgcccgccacccgccactggaatacatcctcgtgccggagcaaggagtggctgaggaggtagcccaggatccagcaccagagcctgctatcgaggatctgcctgccccagctttggaagacaagccccggattcctttggagatgaatactagttctctggaggacatggttgctggagtgacttggccgtccatcctaccaccgggttggacagtcgagtgggaccctacctcggctgaggaggagcatgaggagtga

SEQ ID NO: 13814 - DNA, 288 bp, Zea mays
  Peptide Sequence Number=SeqID_55593
atggagccgatagagagaaagatagcagaagggggcgccaccgtggatcgcgcatgggagagagagagccgggggttggctgaggaagtctaccgggccgccgcaaccgtgctctgcaccacacgccgagccatgcgtggtggtctgggcgccgcgctgggaccttgggggcgattggaagaatggcgtgttgtcgccgccgccgacgagcaagccactgtggattctgaggttcagcaagtagaagtagctgagcagaagctcattgaaggcaagttgtgcccttga

SEQ ID NO: 13815 - DNA, 186 bp, Zea mays
  Peptide Sequence Number=SeqID_55594
atgggagactccgtctcaggtctagtgaggagtgaagtctgtgggcaggttcaatcagacaaggcatccaccctggatccatgtccatggaccatcatagatctcattatcaagatgaatactcaattcctaaccttgcacgagtgcaataaaaatcactcgacttctaccgagatccctaattag

SEQ ID NO: 13816 - DNA, 366 bp, Zea mays
  Peptide Sequence Number=SeqID_55595
atgtcgggcataccgagggatgtcgccgagcactcgctggatatccgagctggagcccgacctgtgaagcagcacctgcgccgcttttatgaagagaagcgcagggccataggcgaggagaagtgtagaaacttggatgacttgaatgagggggtggttagggtatttatagccccaaccaccaaacttgaccgttggtggaggctgctgtcgacgggcgcaccggacagtctggtgcgccaccgggacactgtcgggtgcgtcagccacgtcacctggcccattggggttccgaccgttgggagctctgacctgtggggcccgccctgggctgtccgggtggtgcaccgggacaggcccctgtag

SEQ ID NO: 13817 - DNA, 345 bp, Zea mays
  Peptide Sequence Number=SeqID_55596
atggggatccgtgggtttgggcgtgaggcgaacttccgtcgagaaattgcggccccacccatcaccaacgtgcaattagctgggctgttcaggtgcggtgcacacccgcgacaacccagggcgaggaatcggtgtctggcgatggcgtacaagcatgctcatggtggcggccggacagcacacgacgacgagcaagttctcaacgcaccgattagagcaggcgagaaggggggaaagagcacggttcgatttatacaccggcggcgaagtccgagcggatcgagacgcgacgaaggttatgaagggcgtaccttcataaacacagcatacaatgacgaagaatga

SEQ ID NO: 13818 - DNA, 498 bp, Zea mays
  Peptide Sequence Number=SeqID_55597
atggcaaaggggctttcttcctcccacggtggaggagagcggcagcgcgcccccaatgactacgaagccgtcgccggagcacgccgggtcagcgccccggtgcaccccgcaccaatccagaccgcgattcgcaacagggagggtaattcgagcgtggcagaaatactcatcgacgatagagagctacggagcgatctagccatggggatccatgggtttgggtgtgaggcgaacttccgtcgagaaattgcggccccacccatcaccaacgtgcaattagctgggctgttcaggtgcggtgcacacccgcgacaacccagggcgaggaatcggtgtctggcgatggcgtacgagcatgctcatggtggcggccggatatcacacgacgacgagcaagttctcgacgcaccgattagagcaggcgagaaggggggaaagagcacagttcgatttatacaccagcggcgaagtccgagcggatcgagacgcgatttctaa

SEQ ID NO: 13819 - DNA, 2049 bp, Zea mays
  Peptide Sequence Number=SeqID_55598
atgtcggaaccatcgaccaccgaagggcggcatatccagggagagctcaagaatctcctggaggatgccgcggtccgacgggccaaaagctctgcctcccgaaggcaggggtacccctcggagcatcgcgccgcgacttccggattcatgcgggaagcctcggtcgacaccgggtgcacgcgcaacacgacgcctgcggccccgggtcacctcggcaacgagcaccacaatcgcaaccgtcaagcccacctcgacgagagggtgcgccgaggctaccaccctaggcgtgggggacgctacgacagtggggaggatcagagcccctcgcccgaaccacacggtctgcaggctttcagccgggccatacgacgggcaccgttcccgacccggttccgaaccccgactaccatcacaaagtactcgggggagacgaggccagaactgtggctcgcggactaccgactggcctgccagctgggtggaacggacgatgacaacctcatcatccgcaacctccccctgttcctctccgacaccgctcgagcctggctggagcatatgcctccggggcagatctccaactgggacgacctgatccaagccttcgccggcaacttccagggcacgtacgtgcgccctgggaactcctgggatctccgaagctgccgccagcagccgggagagtctcttcgggactacatccggcgattctcgaagcagcgcactgagctgcccaacgtcaccgactcggacgtcatcggcgcgttcctcgccggcaccacctgccgcgacctggtgagcaagctgggtcgtaagacccccacgagggcgtgcgagctgatggacatcgccaccaagttcgcctctggccaggaggcggttgaggccatcttccgaaaggacaagcaaccccagggccgccagccggaagacgtccccgaggcgtccgctcaacgcggcaccaagaagaagaacaagaagaagtcgcaagcgaaacgcggtgccaccaacgcggaccttgtcgccgccgctgagtacaagaaccctcggaaacctcctggaggtgccaatcttttcgataagatgctcaaggagccatgcccctatcatcaggggcccgtcaagcacacccttgaggagtgcgtcatgcttcggcgccactttcacaaggccgggccaccggcggaaggtggcagggcccacaacaacgacaagaaggaggatcataaggcagaggagttccccgaggtccacgactgcttcatgatctacggtgggcaaatggcgaacgcctcggctcggcaccgcaagcaagagcgttgggaggtctgctcggtaaaggtggcggcgccagtctacctagactggtccgacaagcccatcaccttcgaccagggcgaccaccccgaccgcgtgccgagcccggggaaatatccgctcgttgtcgaccccgtcattggcaacgtcaagctcaccaaggtcctcatggatggaggcagcagcctcaacatcatctacgccgagaccctcgggctcctgcagatcgatctatcctcgatccgagccggcgcggcgccttttcacgggatcatccccgggaaacgcgtccaacccctcggacaactcgatctgcccgtctgcttcgggactccctttaacttccaaagggaaaccctcacgtttgaggtggtcgggttccgaggaacctaccacgcagtactggggaggccatgctacgccaagttcatggccgtccccaactacacctacctcaagctcaaaatgttgggccccaacggggtcatcaccgtcggccccacgtaccgacacgcgtacgaatgcgacgtggagtgcgtggagtacgccgaggccctcgccgaatccgaggccctcatcgccgacctggagagcctctccaaggaggcgccagacgtgaagcgccatgccggcaacttcgagccagcagagacggttaagttcgtccctctcgaccccagcaacgacgcctccaagcagatccgaatcggctccgagctcgaccccaaatag

SEQ ID NO: 13820 - DNA, 933 bp, Zea mays
  Peptide Sequence Number=SeqID_55599
atggaagagccacagaaggacagtgggcaaccatcaaaaagttctgattctgagctagaagctatggtattggatgataatggagcgggaaaatcccatagtatggaggaaaacagggattctcctatagatgtcgatggtgggcagtcatctatggatgtggatatcaagggaaaatcatccctcagtgatgatgttaatggaaagtcttcttccgagccatattccaatgctccaattgacatgagtgtcgaaagcctagagaagttttgcaaagaagcgtcaaggtccttctttgatgaagttggtctgattagccatcagataaattcctacaatgagtttgtctcgcatgggctccaggagctttttgattcgcttggggaagtgattgttgaacctggctatgatccttcgaagaaaggatcaggtggctggaagcatgccatcatcaagtttgggagagtgaagcttgaaaagcctgtgttttggactggcaaggatgaaggttctgttgattttaaaccttggcatgctcgtctccagaatatgacatatgcttcaagacttatagtagaagtgactattcaggtttattctttggagaaaagtgacaaatctaaaacagggaatgatggttttgttcaaaaaaggaacttcatgaatgaaactcattggatatttattggcctccttccggttatggtcaaatcaaacttatgtttgctgcatagcctcaacgaaagtgagtgcctgttcgacgcaggtggatactttttggtcaagggaatggagaagtataaaggctatgtaaagcaagatttaagacaaaatagcaaagagcagagcattgaaggctgggggaagcttaccaagtatggagaaggtattcattgctcaagagcaaagatgtctaaggaggctttggattag

SEQ ID NO: 13821 - DNA, 453 bp, Zea mays
  Peptide Sequence Number=SeqID_55600
atggccccggaatgcctcggcgaggcggtctgcgagcgtgacgaagtcgcgaaagtggcggtgcatggaatggcggcgctggtcggggtcgatgtggcggacgctggtgatgagacggcgacaagggcgtactcgaagggcgccacgcgcgcggatctcgacgacacagaggagggcgaggaggcagagcatggggaggagacggcaccgacggaggaggggtgggtcaacgaaggaggaaaaggtctaggacagggtgaaagaggcgccacacatggagtggtggcggtggcggtggcggaggagaagagggggtcaggtggaggcggcaggggcatagggggtgatgatctcggcgctggggggcgagcctgccaggcaccgctggccaagagacaagcaaaaacggcgacaccttcaccaatgccgcagggcgccgctgctgcggcctga

SEQ ID NO: 13822 - DNA, 405 bp, Zea mays
  Peptide Sequence Number=SeqID_55601
atgcagcggggcgagttcgtggcgcagcgccatgatgcgctcgagcagacgcggaggtcggcggcgagggcgtcatgcggggagtggaggacgagggagatcacacgcggtagccacggcaagttctatacaattccaaatcccatcttcgattcactcggcccccgagatgccgctgggtccttcgtgcaaacaatggcgggggctgccgttggcgctgccgacgggcagccgccacagtcaatcttcgcccgaggagattcgggcgcgtgccgccggctggcacagcaagtggaggtcggcgtcggcctactgtgggagctagagctcgccgcgccgtggagggcggtaccaccagagtgcgcgctgcacgtgcgggactaccgacgtcgcctactgctctga

SEQ ID NO: 13823 - DNA, 1275 bp, Zea mays
  Peptide Sequence Number=SeqID_55602
atggggtgcgcaacctccaccgaggcgcgccgcgacatggtgcggaccggcgccggcgcccccccgcgccggagcttctcgctaccctctgtcgaccgccagcggctgcggctgaagaccgtgtcgatgctcggcaacctcggcctcgccggcagcagcgcccgtcactccagctcgtgcaggcacgcgacgctgtcggtggaggatttgatgaagagcgacaacgaccatgccgcggacgcggtgctcctcggcgacgacgcggcgaagcggtccctgaagccccgcacgccgacgctgacgccgcccaacgagcccgaggtgatcaacgcatgggagctcatggcggggctcgaggacgacgcgccgacaccgcgcgccacgtacaggtgttcgctactcaatgagttgccgcaggagttgggcttggaggcgccgccgctgccggagtggatgcaggccgacatggacatgcccgtcgccttagacttcgaccctgaggtactgtccggattccgggatgctctagaggccacggcgccatcgccagagcatgttgtctcgtccgccgaagccgataccgagacgcccagggagcaggagcggaagggcgcggatgcatgtgacatgccaacgtcgccggccaccggcaacatgccggagctttccggccttgtccgtgcccgcatcatcgcgttccaagagaagatcgaacggaggggaagcaagggccgcgacgccaaggtgtcgtcccggtggccgccgggaggcgagcggaaggcggtggtgtactacacgagcctccgcggcgtgcgcaagacgttcgtggactgttgcgccgtgcgcagcatcctgcgcagctacggcgtgcgcctggacgagcgcgacgtctccatgcacgccgtcttcaaggccgagctcgcggagctcctcgggcccgggttcgcagccgccgcgctcccgcgcgtgttcgtcgacggccggtacctcggcggcgccgaagacgtgcacttcctgcacgaggcgggcgagctcgggcgagtgctggaggggtgcgaggccgcgccctcgcggaagctcgggtacatggaggcgtgcgccgcctgcggcgacgtccggttcgtgccgtgcgagacgtgctacggaagctgcaaggtcttcgtcgaggacgacgacgcggacgacatgtatcagtatcacgacgtcggcgagttccggcggtgtcccgattgtaatgaaaatggcctcgtaagatgccccgtttgttgctgctga

SEQ ID NO: 13824 - DNA, 831 bp, Zea mays
  Peptide Sequence Number=SeqID_55603
atgactgctggctgctgcacccccttcctcctcgtgaccacgctgcatgcatggctgatggctcccggccctcagctcggccaccactgcataattatgagtgaaacagggcacactgtacaagtcactaacctctcgagcagagtatctgaaagtgatcttcatgagttcttttcgttctctggtcctattgagcatatagaacttatcagatcagaaggatacggtgccactgcttatgtgacattcaaggaacgctttgccttggaaactgcagtattgctcagtggggctactattgtggatcagccagtatgcataacctattggggacaacctgagggaacttttaatttctgggacaggccaacttgggaggttgaagaggaaatcgaatacaggaactaccaaacatgccagtacaacactactccgcaggaagcttttacagtggctcaagatatcatgaagacgatgctagaaaaggggtacgtgctcagcaaggatgctttggctaaggctagagcctttgatgagtcctatggattaacagctgcagcagcagccagggctgcagagctgagcaagagaattggtttaactgatagggtcaatgctggtgttggtgcaatgcgatcagtcgatgagacatatcgcgtaagagagacaaccaagacggttgctactgccactggaagaacggcagcaaaggtggtaaatggcatcgtcaccagcagctacttctctgcaggagccatgatcttgtctgatgctcttactagggctgccaaggccgcggcagatctggccgctcatggtaggcagaattaa

SEQ ID NO: 13825 - DNA, 108 bp, Zea mays
  Peptide Sequence Number=SeqID_55604
atggcagaggtttcgcgcgagagcgttgctgtggagaagaaaacaccgacaccggggcccacagaattcaaagttgaatttgaatttggttatgagattcacctatga

SEQ ID NO: 13826 - DNA, 519 bp, Zea mays
  Peptide Sequence Number=SeqID_55605
atgagaaatctgaaagagctaaatgtgcttgaatgctcatcgcttcaaaggatgcccagcggccttagattactgactaagatcgaagcattgccaagaatctctaagaaggatgccgagaagatgcagcttcagaggatgcacaagctcgagcatctggcactgcgttgcaacacgaatgaagaacagaatgataaaaataaaattcctgagatcaacagtggcgattttgatctagatgccttagccgaagcactcgaacaatcggcaacattagcatctaattcaaagaagaagaataaatcgaagcatgctaatgctcctgtaaaacgtcctgtactgaaggcgcaagcatgtgatcttagcataccagttccccactctgcactattgcagttccccactctgcactattgcttaactctgtgtcaatttaccgtagagctgctgcccgtcctcgtgcggtggaaagcctcagagcggtcggggtgcagcggagacctagccagggccaactaa

SEQ ID NO: 13827 - DNA, 813 bp, Zea mays
  Peptide Sequence Number=SeqID_55606
atggcgaggctgagccacggcctcctgggcgccctgaacctggtgacgctcctgctgtccctgccggtgctgtgcgccggcgtgtacatcgtcacgcgcgccaccacggcgtgcgagcgcggcctccagatccccgtcgtcgcgttcggctgcggactgctcctgctctccctcgtcggcctcgccggcgcctgcggacgccgcggcgccgccaggccgttcctctgggtgtacgtggccttcatgtttctgctcgccgtcctcgtgttcgcgttcgccgtgttcgcgttcgtggtcacccaccggggcgcgggcggcgccgtgtccgggcgcgggtacagggagtaccgcctcggggactactccggctggctgcaggcgcggatcgccgagccggagacgtggcggcgcgtcgagagctgcctctctgaggcgcgcgtgtgcggcggccgggaattctacaggcaacacctctcgccaatccagtccggttgctgcaagccgccgacgtggtgcaggttccggtacgtgaacgccacgttctgggaggcaccgagatcggggctgtctgcggcggcggccagcgacggtgactgccgggcatggagcaacgaccagcaggtgctttgcttcgagtgcgacacgtgcaaggccggcgtgctggagaccgccaagaagaagtggaagacagtggctatcgtcaacgtttccctcctcgcgttcatcgttattgtctacacggtcgggtgcttcgccttgcgcagcaaaggtggtggtcggtacttcaatggcggtggtcctgaccaaacataa

SEQ ID NO: 13828 - DNA, 1410 bp, Zea mays
  Peptide Sequence Number=SeqID_55607
atggctgaggaggtcacgccccacaacatccacatcctcctcatctgctacccgagccagggccacatcaaccctatgctccgcctcgcgaagcgcatcgcagccaagggcatcctcgtcacctgctcctcgtcctccgtcgtccgcgacgatctcgccgctgcctcgggggtgtcggctggcggcgacggcgtgcccttcggcgccggccgcctccggttcgacttcctagacgacccattcgacgggacacttctggacctggaggacttcctgcggcaccttgagaccgccgggcggctggctttggcggacctgctgagacgccaggcggaagcagggcggccggtgtcgtgcgtcatcggcaacccattcctgccgtgggtgaccgacgtcgcggccgacgctggcatcccttcggcggtgctgtgggtgcagtcgtgcgcggtgttctcggtctactaccactttgtgcacgggctagcggagttcccgcgcgaggacgacctcgaggcgcggttcatgctcccgggcctcccgacgctgtccgtcgccgacgtgccgtcgttcctgcacgcgtcacacccgtacaaggtactcggcgacacgattcaggaccagttccgcaacatgggcaaggcgtcgtgggtgttcgttaactcattcgccgagctggagcgcgacgtgatcgccgcactccctagcgtcaggccgcgccctccgcagctgatccccgtgggcccgctggtcgagctcggggaccaggacgacgccccggtgcgcggcgacctgatcaaagcggcggacgactgcatcgggtggctggacgcgcaggcgccgcgctccgtcgtgtacgcgtcggttggcagcatcgtaacgctctccaccgaggtgattgccgagatggcgtacgggctcgcgtcgaccggccggccgttcctatgggtggtgcggccggacactcgccccctgctccccgaggggtttcttgacgccgccgtcgcgggtcgcggcatggtcgtgccgtggagcccgcaggaccgcgtgctcgcgcacgcctccacggcatgcttcctgacgcactgcgggtggaactccacgctcgagacggtcgccgccggcgtgcctgtgctggctttcccgcagtggggcgaccagtgcacagacgccaagttcctagtcgacgagctcaggatgggcgttctcctccgcgccccgctgcggcgggaaggtgtccgcgaggctgtcgatgcagcaacgacaggggcagaggctgacgccatgttcgccaacgccatgttttggagcgcggcggcgcgggctgcattgacgccaggaggatcgtcggaccggaacgtgcaggcgttcatcgacgaggtctctcggcaagcacgtcagaggacaagctaa

SEQ ID NO: 13829 - DNA, 216 bp, Zea mays
  Peptide Sequence Number=SeqID_55608
atggcggacttctgccctggccgcaccaatccgcctgcacaccctgcgatgtcttctctggaggtgagtgccttctccagcgaggatattgtctctgcttcgcgatgggccgctctggtacgcaaaaccggtgatggctcgtcgttgccggtggcacagccgccgtcaacctgggcgccgccgcggttgggcaaggcatcgcccagctcggactaa

SEQ ID NO: 13830 - DNA, 1734 bp, Zea mays
  Peptide Sequence Number=SeqID_55609
atggaggaggcgccaccatcttcttctcccccctcccctcctgtgatgctactcttgctgctgctgcttatcgtctcctccccttgtagctctagcgccctcctctcccccaagggcgtcaaccctgaagtgcaagctctgatgacgatcaagaacacgctcaaggacccccacggcgtgctcaagaactgggaccaggactccgtggatccctgcagctggaccacagtcagctgctcgctagagaacttcgtcaccggactggaggtcccaggtcagaacctctctggcctgctctccccaagcatagggaacctgacgaatcttgagactattctcctgcagaacaacaacatcaccggcctaatcccagcagagatcggcaagcttacaaagctcaggacacttgatctctctagcaaccacctgtatggcgcaatccccacttctgtgggcaaccttgagagcctgcagtacttgaggctcaacaacaacaccctgtctggcccattcccttcagcatcagctaatttgtcccagcttgttttcctagacttgtcatataataatctgagtggtccagtgccgggatctttggcaagaacattcaacatagttgggaatcctctcatctgcggcaccaacaacgccgagagagattgctatgggactgccccaatgccgccatacaacctcaacagctcactgcctccggcaataatgtctaaaagccataagtttgcaattgcatttggtaccgcaattggctgcatcggcctcctcgtcctcgctgccgggtttctgttctggtggaggcatcgtagaaaccggcaggtcctttttgatgtcgatgatcaacacatggagaacgttagcctcgggaacgtgaagaggttccagttcagggagcttcagtctgcgacaggcaacttcagcagcaagaacatactgggaaaaggtggctttggatacgtctacagagggcagttccctgacggaactcttgtggccgtgaagcgactcaaggacggcaacgccgcgggcggcgaggcccagtttcaaaccgaggtcgagatgatcagcctggcactgcacagaaaccttctcaggctctatgggttctgcatgaccgccacagagaggttgctgacgactgctgcgaggccattgtcggtgacttcgggctcgctaaactcctcgaccatcggggactcccatgtcaccactgcggtgcggggcactgtcggccacatcgcgcccgagtacctctccactggccagtcgtcggagaagaccgacgtcttcgggttcggcatcctgctgctggagctcgtcaccggtcagacggcgctggagtttgggaagacggcaaaccagaagggagccatgctggactgggtgaagaagacgcaccaggagaagaagctggacgtgctggtggaccaggggctgaggggcggctacgacaagatggagctagaggagatggtgcgagtagcgctgctgtgcacgcagtaccttcccggccaccggccgaagatgtcggaggtggtccggatgctggaagcaggggaagggctcgcagagcggtgggaagcctcgcactcgcagtcgcagagcgcggactcgcacgagttcaaggtgcctgacttcactttcagccgctgctactctgaccttaccgacgactcgtcgctgctggtgcaggccgtcgagctgtcgggcccgagatga

SEQ ID NO: 13831 - DNA, 402 bp, Zea mays
  Peptide Sequence Number=SeqID_55610
atggaggataaggctttagaaagtgatttttccaagcttcaagatgatgttttggtcaacgtactgaatgtccatcatgaggaccagaaaattggtggcttgaaggaggggacgacttttgttctagaaactttggcccatgttgaaccggcacccgtggagtcattgatttctgtttgtgcagatcagaaagtaatgccgtcctttggaaggcttgtgctggaaactgatgtcttaaataaggatgctcatgccgctactggtcatgttcaagcatcaggacatttggcgcgtgatggtggcttagtcggtgatgacggcctggatagggcagatgcttggaatctgtcgtttcaagagtcagaccttaccgtcggtgctcataacagcattcagttttag

SEQ ID NO: 13832 - DNA, 291 bp, Zea mays
  Peptide Sequence Number=SeqID_55611
atgggcgtgcctgccttctgcgcgctctggcgcgcattaattgttgttgcagccgtcgcagtttcccgaagctggcgagttcctgaggcgccgttccttggagcaccggacactgtccggtgtacaccggacagtccgactcttctcttgcatcacgctgctgctgaacttgatattgcccctgaggttgctaactgtgagatgaagttggagctgatgcaggtggctgaggccgacccggcacgaataagcgggctgggcttggacagaaaactaggcacggtgggctag

SEQ ID NO: 13833 - DNA, 1569 bp, Zea mays
  Peptide Sequence Number=SeqID_55612
atggagggcgaagtggtccacatcgcagtgggaaagaacacaagaaaggaggagccgaacatacggtgggctgctgcagcatttcctgaggccgctatagttcttgtgcacgttcactggccctccgaatggatgcccttcatgggtggcaatccgtcatacaagttcgccgacgagaaagagaaggagagacacggggacacagaagctacacatatgatgaagatgttttcagtgtacaaaagtcagtgcggcacaaggaaggaggatgacacaacagctgaagaatttattgagaaacccagcacctgcgagacggaggacttctctaatggtgaaaaggctgccaagattatgcatctctcccccatctccactatgtgcgtcctcatgctgaatcatggttcaaatgttgatgtcatgcaagggaagatcttttccaaagggtaccaccttgattcagatgatgagacaacccaacatgatgccccgacgtatgatgttgttgcaagtgcggaggaaattgacagactcgaaaagaagctgaaggagctgcaaggagaggtgcacaatcatgaagaatgcagctcgttaccagctcaaactgccgccgtttcgccaaagaagtgtttggctgaaccaagatatccagagctgaaaattccagagcacattgtccagttctcagcttcacaaattcagaaagcgaccagtgacttccgctcagaaaatatcattggagaaggcggatacgggccagtgtacaaaggagacttggagggcattcctgtggctatcaagtcattgaggcctgacggcaaacaaggtttctcagagtatcagcatgaggtaatggtactgagcaagttggagcacccgcacatcgtgaggctggtcggcgtctgccatgcgtcgtgcaccctcgtgtacgagtacctgcccaacggcacgctcctcgacaggctctccaaggggcgcctcctcccgtgggaggaccgcgtcaggatcctcgtggagctgcggtccgcgctggcgtacctccactcccaccgccccaacgccatcatccacgccgacttgaagctggccaacatcctcctcgacgccggcgacgcggcccggctgggcgacttcggcacggcaaggatggtgcacgtgaagccgctcgaggacgaggaggagaccatcgtccggcggacgaacccgatgggcaccatggggtacattgaccctgtgttcttcaccacaggcgagctcaccacggagtcggacgtgtacgcgttcggtgttgtcatcctgcagcttctcacgggcctgcatggcctcaacatcgccgagcaagtgcgaggggcgcggagtaagttgcacggcttgctggacgtgtctgccggaccctggccacaggtgcactccgcgcgacttctcaagctggcactgaggtgctgcagccttgagaggaagcagcggccattgatgacatgcgacgctcaatggaaatcgctcctcgtcctgaggaacaaggcagcgccgcctaagaaagctcggaaatggaactgcttcgtatgctga

SEQ ID NO: 13834 - DNA, 471 bp, Zea mays
  Peptide Sequence Number=SeqID_55613
atggcggtggcaggcgggcaggagcagcggccccgtcgtcagccaagctcacgtcccatccgggggcagcgagagaaccctctctcacggcgtgaagacaacgcgcccgtgttccgttcctcgaacggctcgcgcacgcgcaacggccgcccgccaaccactcgccccgtcgcattaactccgcagcgggacgggcggcgcctctggcaggagaagcgaacgacgcttcgccttcgccataatgaccgcgacaaaaaaggttcgaaggctggcccctcggaagggttcgacagccgcctcagatcacgtgggccctacacccattactggtcagatgttcgaaggccggcccctcggaaggtttcaacgaccgcctcaggctactcgggctccgcgcccactactgatcaggggttcgaaggctggcccccgaagggttcacagtcgcctcagacacagagcgagggatga

SEQ ID NO: 13835 - DNA, 213 bp, Zea mays
  Peptide Sequence Number=SeqID_55614
atggcgctccacgagctctatgacgacggcggcccccagctctcttacggcagcaggacaacggacccccctgtctcgaaacgccgacaaaaactaatatggacgaagggtggacgaagcatagctggtgacgaagctcgaagtcatcttaagccggatgacgaagctgaggagcaagttgacgaagctgaagagcgcgaagctgaagcttaa

SEQ ID NO: 13836 - DNA, 1893 bp, Zea mays
  Peptide Sequence Number=SeqID_55615
atgggggcggtgaacgacggggccggtgaaggagacggggccatcgtgaattctggtgtcgtcgttgatgagagggcgtatgatgaaattggtgatggtgatggtgacatggagatgagagagtcaaacaataaagtggccaatgacaacttggttttagtttcagctgggcgatggatttatgctgtatcaagcactgatggggcaattttatgggaaaaggagttttctcttgatggcttagaaattaagcggattctccaatcacctgaaaatggtattgtatatgctttaggacttgctggttcctcaaagctagctttgtatcacttgagtgctaaaactggagagatactaaaagatatccaagagtcactccctggtggattattgggtgaaacagtacttgtttctgataatgtgttggtagcattagataaggccagatcaagtctgttagttattgaattcaagggtgagagaattagctacaacaaggtgcatgtttcagatcttgttcaagacttatcaggatcacttgagcttcaatctttgtccaatggtgtcatatctttgcaaacatcatcttctatttccctcctaaagctcaaaggtactgatggattggaagtacttcagagatttgaccagccagctgctgtcagtgattccctgacaatcacagaaaaagaagcagcttttgctgtcgtgcaacatttgggttctgaaattgagtttatcgtaaaatctacaagtgatctaagcagtgaaattattaaagaaaagcttgttatagaccaaaataggggcaatgttgagaaggtcttcttgaatagttatattcgaaccgacagatctcatggttttcgagctttggttgtaatggaggatcattcactcttgttaattcaacaaggtgaggttgtttggagcagagaggatgggctggcttcaattgttgatgtaacaacatcagaattgcctgttgagaaggatggtgtatcagttgccgatgtggaacacaatctctttgagtggcttaagggacacatgctgaaactcaaaggaagtctaatgcttgctaatgctgatgaagttgctgcaatccaagcaatgagactaaaaagctctgagaaaaataagatgacaagagaccataatggatttcgcaaactccttgttgtattgacaaaagcgggcaaagtgatggctctgcacactggagatggacgtgttatctggtcgaaattggtgccatctcttcgtgcctccagatgtggtggagtcccttctgcattaaggatataccaatggcaggtcccgcatcacagtgtcatgcgtgaaaatccatctgtacttgttgttggcaaatttggagcagaaccttcaatccctgatattcaggcaaatgttattaaagggtattcattacagaagtcatgtaatctcaatgtgggtgatgagtactgctttagtacgaaggagttatggttcatcatctttccttctgattctgaaaggattactatctctgaaacacgaaagatgaatgaggttgttcatacccaagctaagataagcggtgaccatgatgtgatgtacaagtacttgtcaaagaatttagtttttgttgctactttgtctcctaaagctgctgttgatattggatctgcactacctgaagaagcttcacttgttgcatatcttattgatgcagtcactggacgcatactccatcgtgtgactcatcatggtgcacaaggccctgtacatgcagttttgagcgagaactgggttgtctatcattattttaatcttcgagctcacagatttgaaatggcggtgatcgagatatatgatcaatctagggcggtatggcttatgctgtcttaa

SEQ ID NO: 13837 - DNA, 1023 bp, Zea mays
  Peptide Sequence Number=SeqID_55616
atgagcagcggcttcaagcagtcttgccatgaggatcaacaagaggcctcccgcaacctgcagctgctgccctccctatcgtctccgtcgtcgctgctcttctccaatgcccagcagttcccgcacaccacctcttcgggccagcagttagcccacaccaacgccgggggggcaacagcttggttctctcccaagtctggacgacgacggcggcagcgaggggagttcgctggagagcgctacgccgccaccgcatgtctgctgtcaaagggcgtagaggactggggggatcacgctgcggcagctgcaagcgcgtgcatggtgggtggcggcggcggcgtggaggaggagggctcggccgccatgcctctgtacagcttatatggtggtggtagtcacagtcacagccacctcgctgcagctggtgaccatgagatgccgccggcgccagcagcagcagcagcaggggccaataagtctcagctgagccagatgctcctcgcctcgtcgcctaggtcctgcgtcaccaccagcctcggcagcaacatgctcgacttctccaacaacggcgtgcccccggcgcccgatcagctgaagagccaccaccaccatcaatccgataactcatccgagtgcaacagcaccgtaacaggttcggccatcaagaagcctagggttcaggcctcctcttcagcacaatctactctaaaggtgaggaaggagagactgggtgacagaataactgccctacaccagatcgtttctccgtttggcaagactgacacggcgtccgtcctgcaagagaccattggctatatcagattcctactgggacaaattgaggctctcagctacccctacatgggccacggcaatgggacctccattcaaaatggaccaacaactggagaaaggaaccatgcagggctcctaccagatcaataccccggccagcctgcagcagtcggccagcctgatgagcagcagcagcagcagggatattatagtgctatgggttattag

SEQ ID NO: 13838 - DNA, 153 bp, Zea mays
  Peptide Sequence Number=SeqID_55617
atgaagctcggaaactgctcaactcggatggtggcgccgaaggttgctaagccgaagcttgttctgaaggtcgctgagctaaagcttctttttgtatctacctgtagaaatcttaggatctctttgcattatttagcaaaagtttgcaattga

SEQ ID NO: 13839 - DNA, 156 bp, Zea mays
  Peptide Sequence Number=SeqID_55618
atggccgaagaaaccaccttgctggcaaattcgtatggaagaaatgaaggaaccaagggcatacatcgtggaagaaagctgatggacgccgatcgatcgccaggttctcagatcaagtcccttgtattgtatatgagtggaaacctatctaaataa

SEQ ID NO: 13840 - DNA, 522 bp, Zea mays
  Peptide Sequence Number=SeqID_55619
atgaagaaaaaattgatgaaggctatgcccaaggctacgaagttgctcgccattgcggaaactcccttggttagcctggcttcggaaacaaaggaagccactacttcggaatttctcccatgtagtccagagaatgaagaactcatagctccagtgatgagcttgttcttttgtgatgaagacgaagatgacaatgaagaggccgaggatgctactgcaacggccgtggcaaccaaggatgctactccgcctatcgtgactatagcggtgccagagaccccaaagatccccgcaatgcccctactggtgacaacttcgctagctgtgattcccgagaagaagagcgattctgcgaagcctgcagcagcagctaaaaaggggaaggggctcacagagactgatgaggctaagaaagttatcaaggaggacatgtctctgggagagggccccttcaacaaggaaattggtggccgaaggtatagagtccatcaatcgaccggaagggagatgggggcgaactag

SEQ ID NO: 13841 - DNA, 1440 bp, Zea mays
  Peptide Sequence Number=SeqID_55620
atggccgttggaagtgtgctatcgcatggcgcactggacattcaggtgcgccaccggacgcagtccgtcgaccgttgcgcgcgaagtagtcgttgctccgctggcacaccggacagtccggtgaattatagcggagcgccctctgaatttcccgaaggtgaagagttcagcctcgagtgccctggtgcaccggacactgtccgctcctgcgagaggggcgccgccgaccgaccgatcgggatgtgggaaggcggcggctttcacggcagccacgaggcgctcctgctgcaggccgccggatcaggagcggccgactacgggcacggcgccggcccggcgctcctgccgtggctcggcccggccgccggcgccgcgccggggttctcctacatggccccacaccacgcgcagccggggccgtcgggcgctgaggcggccgcgagccctttcggcttcggcggcggcgggtacagcgacggcggggtgggtggacaattcggggtgttcggcggcccagagaccgcgctgcctgcgccgcacggtctggctgccgcagccggtggtgggacgtcggcgatgcagcacgggtcgaggatggtgtccggccttctgggcaccctgcagatggagctggggcggatggcggccaaggagatcatggacgccaaggcgctggcggcctctcgcagccacagcgaggccgagcgccgccgccgccagcgcatcaacagccacctcgccaggctccgcagcctgctccccaacacctccaagacggacaaggcgtcgctgctggccgaggtgatcgagcacgtcaaggagctgaagcggcagacgtcggcggtgctcgatgtcgagggggaggaggccgcggcggcgcggcagcgcctgcagctcctgcccacggaggcggacgacctggcggtggacgccacggaggacggcgagggcaggctggtcgtgcgagcgtcgctgtgctgcgaggaccgcgccggcctcatccccgacatcgcccgcgcgctcgccgcgctccgcctccgggcgcaccgcgccgagatcgccacgctcggcggccgcgtccgcaacgtgctgctcatcaccgccgccgccgacgacgacgatggggaaggagaaggagacgacgacgacgacgacgtcgaaggcgatggcggccggaggcacgagctcgtcgcgtccatccaggaggcgctgcgcggcgtcatggactgcaagacggcgagcagcgacacttcctcctcgtctaacggcggcgggagcatgaagaggcagcgcatgagtgagtgccacatccactcagtaaacaatcaaatgcattcaacaaatcctttaccgagtgccacactcgacaaagattactcggtgaacctgatatcgataaaggtctctttgtcgaatgtcaaacgaaactcaacaaagtaa

SEQ ID NO: 13842 - DNA, 441 bp, Zea mays
  Peptide Sequence Number=SeqID_55621
atgtggataacatgcgcgcgagtgatgaatgatgatgagggcagcagcttcagcggagacgaaggcgaggaggctgcggggagctcgacgggggggggggggttcgaccgggcagggaagggacaggggttttgggtcgagcagggaagcggggcaggggtcctcgatgtcgggtggctctggcgggggggcgcgggtgcacggtggagctgggcgtgggcctcgggcgtggctggcgtgggcgccgaggtggccagggtcggtgctagtccttggcacagtcctgctggctcagggcgcgagggagagtttctggcggcgcgcgttgggagagagcaggggaggagagaacagaggggcggcagcggctgtgcaaggagagaagtgaggataagcagagggcggtggcggctgcccttgttgggcctaatgggcttttag

SEQ ID NO: 13843 - DNA, 210 bp, Zea mays
  Peptide Sequence Number=SeqID_55622
atggaggccaaatcccgcgattcgcaagccgtccgtgatcctatggccaaacaccggtgtgtcccacccgtcgggcgaaagctgttcttgcgaatagagggcgctgaagatcctatggtgccccgtaatttctcgtcgacgaaattcggcgccaccgtgaaaccaaccacgcggtggctggagcactcggatactccattaccggtatag

SEQ ID NO: 13844 - DNA, 294 bp, Zea mays
  Peptide Sequence Number=SeqID_55623
atggcttcaagacgccatcaatggagggagctaatgggaggagaaacgacgacattgaagtttctttatgccgagggaagaaacgttcgcggctgggcacggcgcgtcgcggactgcgtcgggggcacgggtgtagggtggagctgggcgtggggctcgggcgcggctggtgtgggcgccgaggcggccggggttggtgctggtccttggcgcggtcctgtcggctggaggcgcgagggagagttcctggcgggtggggataagacagagaatgaggcatcttcaatagcttga

SEQ ID NO: 13845 - DNA, 765 bp, Zea mays
  Peptide Sequence Number=SeqID_55624
atgcaggcggcatgcaaccgcaccaagggggcgcaccctttcgatttcaacgcatccagcgtggaggcccaggcccacatgtcatggaccgggaaaggggatactccgaaagggatccttctccgcgaaggaagcgggccccgagcccccctactgatcagaggttcgaaggctggcccctcgaaagggttcaacagccgcctcagagcactcgggctccgcgcccactactggtcaaaggttcgaaggctggcccctcggaagggttcaacggccgcctcaggccactcgggctccgcgcccactactgatcaggggttcgtaggctggcccccgaatggttcgacagccgcctcagagcacgcaaagcgagggatgaccctggctcgccagaagccgcgacaagcgacctcgagcttcgccctgagccccaccagtgagttcgccgagtcttcctcttcatttctggccagccctgacgaccccggaaccgccgtagcccgcacccgccccaactccggtgacctcaccgtcacgttgatctcagatccgatggctgagaaacctgataccgcttcgcgtggtaattttgttaaagagaccctcggtttgtttggaaccaacccgccgtccctggttttcacgcacaacgagcagcccttggttcctgagtgtgttgttgaagatcttcctgagcaacaacctggaggagatgctggcaacatggagaactttgaggagttccaggactacgatgagttctag

SEQ ID NO: 13846 - DNA, 495 bp, Zea mays
  Peptide Sequence Number=SeqID_55625
atgttgatggtggaggccttgtttctctgtctccagtgtctctgtctccagtgctgccaggagtttcgccaaggccttgtttctggtaatgatgccaaagttgatggtggaggcaagcaagattttctattaggagttagtcatgataaaatcataagcaaaaagccatctgatggacagaatgacatgttgatagatagtgtagttcctgagaagtttattgctgaattactggagaaagctgattcagcgctcaataatgaaatggaggtgaagatagaaggatcaaaatgtccctgcttcactgaatccggtgacatggatgatggtatatcatggaaatcatcttgcagggagaattcctgtgataactacatatattgcccaaccgctacaaatgtccaaaatggaagtttagaccatttccaggagcattggttgaagggtgaacctgtacacataggaagagaaattggtaatgggatcagattatga

SEQ ID NO: 13847 - DNA, 264 bp, Zea mays
  Peptide Sequence Number=SeqID_55626
atggcatgttgctccaccgccgcccaagcacagcccgtgcccggcgacctctcgtcccgtcccgacgcgcagcccacgcccgagcacgacgccaccgtagctgccccgacacagcccgacgccaccggagccgccccgacggagcccgcggccgccggagcctctgcccccgtccccgacaccaccggcgcccgccccgaccccgccggcgcttgcttcaccggctcatcgtccggcaaatggctatataatttaaacttctaa

SEQ ID NO: 13848 - DNA, 903 bp, Zea mays
  Peptide Sequence Number=SeqID_55627
atgaccatcttggcgctacacttcggtgagtcccaccctcccctctgcggtgtccaggtgctccctaggggggaatggcgcgtcaccaccgagcgtgttgagggtcgtgccctgatgtcgcgttggggaggtaacctgagtctgctagaatttcttattaaacccaccatccgccagggagaggatagaaccacggtcttcgttctccagaggctagaacgcagcctcctccatacctccaccgatggcggcctcctccagaccccaacggcggcggcctcctccaccggccggtggcctcctccgcctctccccctagccggcggcttccacaaccctatcccccgtccagcgacctccaccgtctctctccctagctggcggcttgcacggccttcactgcccatccaaccaccccgtgccgcagaaccagtcacaatcggagcaaccgctcacccacgtccgcatttcccctggtcagcggattccccccacttccgcgcaccacttccacgacacaatcagagcaaccgttcagttccactaaatctgcacgacttccacttcgcctgggacagcacacagtcgatgaagataaatagtgagcatgttcgaggcatcacgccttctcctctgtgtacgagctcgagcacgcgtgtgtgcgagagccggagtagttccctagagagcgtggacgaccgtgatgcatcggatatccctaccacgactccaaggaagacgaggactacgcgcgtgacggagagcgaggacgactgcaaagcctctcaacgtgctgccaggtccagtggagttcagttacagtcacttattgataaggcgattgaactgtggggttttagcagggagtttgaagttctatttggtgccaagctcctaaactga

SEQ ID NO: 13849 - DNA, 342 bp, Zea mays
  Peptide Sequence Number=SeqID_55628
atggacgtcggttccttaagtcgcagctgggtggaagagaggagcccagcacacggttttatccccagctcccaaccccaacctcccagcgtgcatgtggggaaggttgttccggttttcccccgcgggcgccacgtccatcgaaagcatggcggcaggcagtggtctggaccatgggtccatatgacagacggcggagcaggaacaccattgagcgcgagccagcaatctgatagtggggctcgcatggcggtgaagcggaggacccagggccccagctgtcggtgcaacacggttgggccgagcacgcagagaagagtgggagcagagctgcgcggataa

SEQ ID NO: 13850 - DNA, 402 bp, Zea mays
  Peptide Sequence Number=SeqID_55629
atggatgctatcggagtggacgaggcagggttcattggtggcagtggcaaggaagtcaagagagccaaacatcatgtggcttcctggagtgaagctctcgccgctgtgggttccacagatcaatctcatggtgtggttgtatgtggcatggcttctcttgtcgtcatgagcccttcgtcacctccttccgatgtacgggtcactgtagagaccccgtccgtctcgcagagttgtttggcggagttggtcatcattggagagttggacatcaaggagttggtcatcatcagagagttggtcatttggttcgtctcgcagagttggtcatcgattgttggtcatcatctgggatttggtcatcatccgagagttggtcatcactggagaggtgatcatcactag

SEQ ID NO: 13851 - DNA, 699 bp, Zea mays
  Peptide Sequence Number=SeqID_55630
atgtctgctgccgactccctcacctccggccggggccgccgcgcggagcctcccctgccccgcctgaagcgtgtccgcgtttacttcgtggacgccgacgctacggacaccgactcctctggcaacgaggacgagcgcggcaagcggcgcgtgcgggaggtcatccacatcgacgtggagtccgcctcggctctgacgcggtcggcgcagccgctggtgctcccgaagaagcggccgctgccgtcccaggcggcggcggcggcgctcgtgcggcgacgctcctccggggccgggttccggcggcgcttccccggcgtccggctccgaccgtggggcaagtacgccgcggagatccgcgacccgcaccagcggaagcgcctgtggctcggcaccttcgacacagcggaggaggccgccgcggcctacgacgacgccgcgctccgcctcaagggctcgcgccacgtcgtcaccggcttccccgctgaggcgcctcccccctggccgcgcctggggctccgtcctcgccgggaggtcccccaaggaagcggcggagggcgccgcggaagaggacggagaggccctcgcatcggccccggtcccggcggcagcgcccgcgtcactggattcgcaggcggtggacggcaccgccctggtctgcccgttctcgtctccaatctctgttctccgtcacgccgctga

SEQ ID NO: 13852 - DNA, 270 bp, Zea mays
  Peptide Sequence Number=SeqID_55631
atggaccctgcgcgcggcggcacggcctgccagcacagtggcacgaccagtcagtgcaggcagcccttgctctcccagggcggcgcccaggccgagctagcccccctgcagtccccatggcggctggaatcgaagtcaagcttcggcgaccatgtgatcaagttcttcgagttctacgaggttgaagaccctaagcaacagttggttggtgaagtcaaggattttggtacgggcatcgtcccatggctttccctgagggtagaggtatag

SEQ ID NO: 13853 - DNA, 756 bp, Zea mays
  Peptide Sequence Number=SeqID_55632
atgcgcgcggcacaggcaaaggagcacacggacagcgcacacgacaacatgaacaccatctgccatggggactgcaggggggctagctcggcctgggcaccgccctgggagagcaagggctcggcactaccgcacgcagggctccctgcactggctggccgcgccgacgcgcaggcaggccacgccgccgcgcgcaggggcccttgttgccagtcgagcacagggggaggggaaaccgcgcatgaggacatcgcacgctatggccatggcctgctcaaccaagccaagggagtcatgcgaaggtggggctacgcacgctggggaagctcatcggcgagcgagatctgcaggggctcgccacgggagggcagagggtcggacgcgcggtcgtggctggcgggccgcagcgctgaccaactgtcgcagtgcaccaggggaggagcgcggggatggggctgcagggacgaggacgagctaggcacgctgcgcgggtggccggggctgggtgccgcgcggagctgcgggggcgggcaaaggagaaacgcgcacacgcgctacgctaccgcggcactacgctgggcgggcgagcatccaccggagcacaagggatggacgacatcgaggatggcgaccgccacgacggctctatcgatctgggcgccggtggggtgtggcgaggcagctgcgcgcgcaacacgctgggcgctgcacgacgaggcgaggcaaaacgaggtggccgcaattgattctgaatag

SEQ ID NO: 13854 - DNA, 480 bp, Zea mays
  Peptide Sequence Number=SeqID_55633
atggcggccgcatgcctcgcgcccgccccgcctcctctctgcgcgtgcccccttcccccgcaaaccccgacctcaagccggcaatggcggccacatgccccgtgcccgccccgcataccccacgcccgccccgatcaattcgccgtcagcaacggcggccacgcatgccccgatcaattcaccatcgcaaccgcaactgcacccgcctaccacacgattctagtgctccaaaccactgctcaatccttcgcccccttcatttccccgccccttcattcccacgccagtgtgacgctggagaggaaggacgaaggagaaggagcttgccccgccaccggagaggaaggatatctgatattgctcaaccgtgcaggcctcgatcaagggtacaatggaatagcacgtttgttgctctctagaggagccaatgttgatctggtttcttctgaagggacaccaccacatgttgctaaaatctga

SEQ ID NO: 13855 - DNA, 381 bp, Zea mays
  Peptide Sequence Number=SeqID_55634
atgccaccgttatccacaaaccaggacggcactaagcagatcatcatgcatcatatctcgaaagctatcgaagttcacgttatcctggccgtgtccgctggaccccggcttgatcctatagagctgcgaattcatgtcctccacgaaagcgacaaggtgactcatgaagctgcactacacaacacgacaacacgtctacacttgcttatcaatctggataaacataagcacagttattctaagatcgacaagatcaccagaaacaccatagtctcgataggagacgtgaagaataacaagatagaaaggaaaaacacgatgatagatgtgttggaacttgctatcaatcgcaaggaggccaacaagggtgaacagtggtga

SEQ ID NO: 13856 - DNA, 396 bp, Zea mays
  Peptide Sequence Number=SeqID_55635
atgcatcggttgcctaaggccggagactcgctgttgtacgaggagatgggcgcgcacaggcacacccgcgtgaacgacgccgccacgttcagcgacgaagacctgcgcagcttcccggggcccctcgccagcgccgcgcccttgccggcggccgtcacccccgatgccgccgccgccttcgtcggcgatgccttggccccgcacgccgccggctgcttccagacgaggaggaggagaacgcgatggcgaaggccgtggcgagcctggtggcaacgaggggccccaggacgctccaccgaggacctggccctggccggtggagaccagcacggcgaggttgaatgcctcgggctgggcaagggcggtagcacggtgcctgccacggagaggaagtag

SEQ ID NO: 13857 - DNA, 345 bp, Zea mays
  Peptide Sequence Number=SeqID_55636
atgaacccagcatcagggacagatccggcaggcaacccaacatcctgccgcgacgctagagcggggccgaggcagagcacaaacaaaaggggtggcatcacatcagacagcgcgatctacgactacagggatcctgccgcgcatatgcgcctgcgatcaaggtggtgggctggtggcgaacgggtcgtgcgatgcgtacctgctcttcctgttcctggacgggacggggcgcggcggacgccggtacccaggcgaagcgcggggcggaggaggtggttggagatgaagggtatatttggttgggttgtggctgtagaaaaagctattgtgggctgtgagttgtga

SEQ ID NO: 13858 - DNA, 1833 bp, Zea mays
  Peptide Sequence Number=SeqID_55637
atgggcagggaaacagtggcaagtgggcccagcgtgtcagacactgaggctgttgcagccgtgattcccgagtcccgacgactcgcgcggtcgcgcccctcgccttctccgctggtcgactggtccggctggtcttccccctcggcatcgcactcgcacctcccaagcgtgcctgaatctcagacttgtccccccactgcctcggccatggctgtgcgagccacggtctcccgcttcccggccacgccggaggcgctggagtcgtgcgccgtccagtggggcgtcgccgtgacgcccttcgccgccgtcgacgagcgcggccagcccccgaccaccggcgccggcggggaccgcatcccacgctgcgagcactgctgggcgtacttgagcagccactgcgatctggagcgctggggctggacctgcgcgctctgcggcacgctcaacggattcgacgacgaggccgagcgacggttccagcgtcccgacgcctgccccgagctcaattcctctttcgttgacctcgagatcgcaggggctggaggagacggcgtgcaggcgctgcctgtttatgtggccgcagtggacctcgcatgctctgaagagttccttgaacttatcaagagtgcacttcttgcggccctagaagctcttattccgggctccttatttgggcttatgacattcagccacaagattgggttgtatgatgtccaaggtccgattccacttgtgaaaaatgtttttattcctccggacttggaagaagatggtctgcctgttgcccttgaagatgccatgcccctactttcttttttggctccagttgacacatgcaaggatcgaattgctgctgccctggagacactgcgacctacatcttcatgggagagaggggctgcttctgggcatgaagaggatgcggggttgcttggcggacgtggttttgggacagccatgtctgctttaattgagtacctaagttcaggatatggttctacttttgctttggctcgagtatttgcttttctgtctggtgctcctgattatggagctggtctgctagataccaggagatatggggagcaatatgctagtaaaggggtagacgctaaccttgcattgctccctgaacagatacctttctacagagacctagcagctgttgctgttcagtcaggagtttgcatagacatatttgctgtaactgatgaatacacggatttggcttcactgaagtttttaagtattgaaagtggtggatatctatttctttatgcaaatgcagatgattcaacacttcctcaagacatgcatacagatcctgctgttgtgcagatcgcttttcagtacagcgtgattgaacctgccaaggagacatcaggcgatggatcacaatcatctgcaagttataagttctctctaaagaggcggctgagaataagaacattgcagtaccgtccagctaggaatatcagtgaaatttatgacagtgtagatccagaggttgtactgcatatccttgttcataagacgactccccaggggattgccgcggaagtctggacgtacatccgggccgtcgagcgctccgggctcgagggctcggatgagtcggagtactcctcggatgaggaggactcggacggcgacgaggacgaggatgacgacgacgacgacggtgacgacgacgacggtggcgacggtgacggcagcggcagtggcgggggcagcggcggcggcgacgggagcaagggcagcaccagaggcggcagcagcaacggcagcaccaggggcggcggcggtggcagcagcagcaaggccagtggctaa

SEQ ID NO: 13859 - DNA, 801 bp, Zea mays
  Peptide Sequence Number=SeqID_55638
gaggagctcatctgcttctacctcaggaacaagctcagcggcacgcgccgcgccgacatcgagcgcgtcatccccgtcgccgacgtctgcacccttgatccatgggacctgatctcaggcacttactcaacgatgcctcgattgcatccatatgcagaggcgcaccgcggcgcgtgttccggcaacgaggagccgtggttctacttctgcccgcggcaggagcgcgaggcgcggggcgggcgccccagccggaccacgccgtccggctactggaaggcggcgggcaccccgggcttggtctacgccgccgacggccgccccatcgggaccaagaagaccatggtgttctaccgcggccgcgcgccggcgggggccaagaccaaatggaagctaaacgagtacaaggctttcgaggacgacgacgccaccgccgccgtcgctgctccggcgccgccgagccatgctctccagacgtggagccagtacagcctgtgtcggctctacaccaagtccgggtgcctgcggcagttcgatcgccgccggtccagcaccgccgccgcgacgggtggcggcaacgagaacaagccgccggcgccatctactgcgctgccagacggtgaccaaacgggacagaagaggaaaagggctgcgcccaccgacgacacatcttccagctacgaggacggcgacgaggacgtctccacgcagcagcggctgcggctggcacagagaggggccgatgatgagggagtcaaggacatgaccgactggtggtcagagttcttggacgactgcatttga

SEQ ID NO: 13860 - DNA, 446 bp, Zea mays
  Peptide Sequence Number=SeqID_55639
gtatgtcaacgatgtggactactatggcgggttcgagcaagatgagctggatgagctgtttgaggcgatgcaatcaaactacaaggcctgcctcctcccgcacgttagtgtcccatgccacattgttcagagcaccaaggttctcgcggtgccagttgtggtgtctgagtacctgcacaggcaccttggtggcgactccatcgtggaggtgatgccgtctgaaggccatcttccccagcttagctctccagacatcgagatagatcgggccgaatctctactaccctacaagggtccaaggagggcgtccaccctgactcaccatgcccccgctcctgtcatccccgccgagatgctagcccaaggatgcttgcgccccatcctccccgacatcctttgcgccgtcattctcgcccccgcgtccctccattctcgcctgtttccag

SEQ ID NO: 13861 - DNA, 222 bp, Zea mays
  Peptide Sequence Number=SeqID_55640
atggggtctgttctcacaaaaatcgatactaaaacatcgattaaggatcttactatcaggagcagtggcccatgtagagtgtgggatttgcagtcatctgaagttgtagccagtctgccaagagaaacaggggaaatatttggattctgcagattctctaacaaggctgacaacagtcatgtcttatttataactgtgatggaaggtgacattaaggtttaa

SEQ ID NO: 13862 - DNA, 729 bp, Zea mays
  Peptide Sequence Number=SeqID_55641
atggcggagggcttcgggcggtgggagtcggatctgctgttccccgccgccgagtgcgtgcaggactccgccgataggtacggcctccgctcgccctgcttcttccttgacctgcttgctgcctggcgctggagtcctacgctaggtagccgcgaacccatcggaggtgcactgaaatttcaggtcgagttgtttgggtttaaatatttcgggtatccaagagttgaacctgaactcgacccgaaatttcgagtacccaaaatatcgggtccagccctatctgcagccaagttctggcagcagcaagggaggatatcagtccatcaaagagcagagagtctttcccttggaacacagacgcaaccaggattttcttctgcatggtgcattggtgctggtgacatgggtccccatgaggaatgcgccagagaactgcagcactgctgcagtcagcagtcagcactgtatgctccatgcttattaaggcgtaagcgacgattaagcggtaaagcgtgctgccagggtgaggcggccacctcgccttgccccgacgtgcgtccgctaaggtgtggggcgtcctcgtggcgatgcttgggggaagctaagcgtgggcatggcagagcgtggacggtctcagcggcgcgcagactccctatctcaggcgacggcatgcagggagaaggagctgcggggagggagaagggaagagggaggactgctggtggctga

SEQ ID NO: 13863 - DNA, 327 bp, Zea mays
  Peptide Sequence Number=SeqID_55642
atggacggtgcagaagccatcttcttcatttgttctaggacgcatcagtcgagcacagtggtgccctggggctttgtgtcacgcttctgcctgcgcaagataccagaagccatggggggtggtcgttcttaccttcgatggagacaggagcgtaccacagcacagcgcatgacgcagagggagcgcccgaggagggggaagtgccggtcgctcccagaaacatcgcaacacacagattcaatttctgacgaacacgtgtactccatgactcctgaacaacagccgaggacaactcgagcaaaaagggcagtggacaccgagtactga

SEQ ID NO: 13864 - DNA, 288 bp, Zea mays
  Peptide Sequence Number=SeqID_55643
atgggggggggcctcgcctcgggtgccaccgcggagctcatgtctccaccaccgttgaacttgagccgagcctcctgggcgctccctgagttgcgcggaatgcgtccgagttgcctccaagtcagctcggtggtcgggtcctcgccgggccgagctagtagcttctgcgccccaaattcactcgccgggagcggggtgtgcgccgccgcgctctgcgcgcgactcacgccttcgcggtcgcacggagaagatggggtattagcccttggatgggaatggtgcggttag

SEQ ID NO: 13865 - DNA, 189 bp, Zea mays
  Peptide Sequence Number=SeqID_55644
atggataggctacctactatggtctattgcgacgtggtaacaccacagattacatggcgcacgagcggcaagcagccaacaccgacgaggatcattttggtcagccgtagagcaagtgggtacggcggccagcacccgacctcatccgtgtttggtccaaaagtgcctagaattcgaattcacccctag

SEQ ID NO: 13866 - DNA, 1038 bp, Zea mays
  Peptide Sequence Number=SeqID_55645
atggcgggcgagtgctcgtcttcgttcttgcaggctccaccgccgctggcggagcagttgccacaggacgcaagagtgggcgagcagccgccgccaggttcggaggccggaggtgacgagcaggccagggtgccggatctcggggaggacctggtgttcgaggtgctgatgcgagcggaggcccggacgctggcggccgcggcgtgcgtgagccgcgggtggcgactgctggcgcgggacgagcggctgtgggaggcggcgtgcgtgcgggagtgggcctacactggattctccgagcagatgcttcgcagcgtcgtgctttcgcttggcggcttccggcggctacacgagatgtacattcgtccggtccagcagcgtgctgctggagcgccgcccgggcagcagaggcggcagttgccggtgaggatgggccgtgaccaggtccaagtctcactctctctgctctcgacttcgttctttctgaagatgcctaatgctcctccacctcctcctaaggacaaggatagagatagagataagaatggaggtggccaatcatttaactcaaaaatttcccttgaaattcgagttgattctgagaagtatgaagagctgattgagttcatggagaaggtggctaagacagttgattctgaggagcactacgttctgtcaattgcttacaagattgtcatggaacccaatgtgcttcatggtgcatcatatcctccattgagtagggggaagaaggccgtgtcaacgtggactgtgtcactctcattgaggactaccataacaagattgaagttgaactcagcaagatctgtgatggaatcctcaagctccttgattcccaccgtttccgcctcattaacagctgcagagtccaaggtcttctacctcaagatgaagggtgattactacggtatctttttagttgaattcatgtgtattaggtaccttgcggagtttgaaactggatctaggagaaaagatgcagctagaataccatggtggcacacaaacctgctcagataa

SEQ ID NO: 13867 - DNA, 222 bp, Zea mays
  Peptide Sequence Number=SeqID_55646
atgggaggagaagagccggcggccaggaaggaagtgctctgcgcacgtataggaaaaacagggggaagagacgtgggggaaaatggaggggcgctggcttcttgctgctggaggaagaaggagcagggggcgccgcggagggaggagcagagggatgccatggctgctggaggcgccatggatagggaacgtggagctgccgtggggaagaagagacaatga

SEQ ID NO: 13868 - DNA, 264 bp, Zea mays
  Peptide Sequence Number=SeqID_55647
atggggatctcagcgcggcagggagaaggggcgaacaccacagagctctgcgcggcacttggagaagctgagccggtcgaccggacctgcgacaaggtggcttcggccatgagcgagcaggacggagggagctccacgagctggggctggggagagataggggaaggagagaggacggctggacgtcggggaagctggaggagcatcgcacgcttcgagcaagaagatgaggctgtgcgtgcgtgggatttaagaccagggtag

SEQ ID NO: 13869 - DNA, 273 bp, Zea mays
  Peptide Sequence Number=SeqID_55648
atggcccggggggtcgcgaagtctgccgcccctggcaccagcaagcctccgttgggtgcgaagtccaccgcccccgaccctagcaagccactccctgccgtgcccatgcaggagcgaaggcctctgtcaccgccgcgtgctgctgagacagaggtttttgacgagaatggtgcaggttcggaagctgggcaactggctgttgccccggcatctgtggtggctgggccggtcaccgtggcgactggtacgacggggtctgggcaggacccgtag

SEQ ID NO: 13870 - DNA, 270 bp, Zea mays
  Peptide Sequence Number=SeqID_55649
atggggcgcgacggcgagcagagccgcgcggttcaggagaagcccgcgcgcgcaggaagaaatccgagcagggaagctgggagggagatggacgccggcgatgggagctccagcagggcgcagcttgagagcagctcagcgtggacggctggcgcgccatggggatctcagcgcggcagggagaaggggcgaacaccacagagctctgcgcggcacttggagaagctgagccggtcgaccggacctgcgacaaggtggcttcggccatga

SEQ ID NO: 13871 - DNA, 351 bp, Zea mays
  Peptide Sequence Number=SeqID_55650
atggagaatgtggagatattggcactcacgtatggcgccatcgtgcagcaactattcacggatctagagggggtcgaagaggttaacaattacttagtgcaaagcttacagagttcaacacaagggaacaagtgtgatggtccaaatactggaatgtttatggatatggacgtcacaagtaagatgcacattactgaagtgagactcggtgtgcctaactcagagaaaactggtcaagccaaggatggaggcaagaagagctttgaggtaccaagtgcatgggaggatgttaaggagtccgaggaaccaaaagtcaagggtgaagaagaagacttaaaaagtcaaggttga

SEQ ID NO: 13872 - DNA, 1014 bp, Zea mays
  Peptide Sequence Number=SeqID_55651
atgggttcctctgagttgagatctcttgggccaggagaggctgcattcacctttattcttgatgatcctgcaagaaacatctttattgagaactcagagagggggaacctgtgcttcatgctcgtggagatggcacatgctcctattttgacattgcaaaccataagttctgggaggccggggactactacggaaagcagtgctcctgagctgtgtggatctttctttagtaagtattcaccggctatcgatatgtggagcatcggttgcatttttgcggagattttgattgggaagcctttattccctggtaaaaatgtggttcaccagttggatttgatgactgatctcctgggtacaccatcagcagatactatttcacagcatgaggaggaaacagccaataccctttcagagaagttccctaatgcagatcattcggcgctcaagctcttacaaaggcttcttgcatttgatcctaaggatcgaccaacggcagaagaggcattggctgatccctacttcaaaggcattgcaaaagagatactgcagtaccatcctcaacttctgaaggattacaagaacggctctgaaaagacaagttttctatatcccagcgccgttgacaggttccgtaggcaatttgctagcttagaagaaaatggagagaggaatgtcgcgcttgacaggaaacatgtttctctcccaagaacaacaaccgttcactccactccaattcctgcaaaggaaggtccagcagcaacctcccaggttgctcaaaggattccagcagaccaggagagtggtaggccggggactagatggtacagggctcctgagctgtgtggatctttctttagtaagtattcaccggctatcgatatgtggagcatcagttgcactttcgcggagattttgactgggaagcctttattccctggtaaaaatgtggttcaccagttggatttgatgactgatctcctgggtacaccatcagcagatactatttcacag

SEQ ID NO: 13873 - DNA, 324 bp, Zea mays
  Peptide Sequence Number=SeqID_55652
atgggcatgcccatgtaccccacccacccgaccttgcgcgctcatcgcctccaccacttctggtcctcctgcgctgacgaccgcaacaacagaagcagcgaccgtgctgcctcatcctcctccctcacggcggccatctcggcttcggccaccctctccgtctcccatgccagacgcctctcttgcgtgatgcgcgttgtctggcacaccgccgcggcacccgacaatgcgtcgggcagagagttggtcctattaattggtggaggcggggaggatgaccaggatgcgtcgtcgcggtcgacgtccccgacgccgtcaccgtag

SEQ ID NO: 13874 - DNA, 948 bp, Zea mays
  Peptide Sequence Number=SeqID_55653
atggccggcctgtccctgctgcatcccatggccttcgccttcggcctcctcggtattttttttacatttccttatttcacttataagtttggtatttggtttttaccgaaaaaccaaagcaacatcatctccttcatgacctacctggccccactgccgacgttctaccggatctacaagaacaagtcgacggaggggttccagtcggtgccgtacgtggtggccctcttcagcgccatgctgtggatctactacgcgctgctcaagtccaacgagctcctgctcatcaccatcaactccgccggctgcgtcatcgagaccctctacatcgccatgtacctcctctacgcgcccaagaaggcaaagctgttcacggccaagatcctcctcctcctcaacgtgggcgtgttcgggctcatcctcctcctcacgctgctgctctccgccggacagcgccgcgtcgtcgtcctcggctgggtctgcgtcgccttctccgttagcgtcttcgtcgcgccgctcagcatcatccgccaggtggtgaggacaaggagcgtcgagttcatgcccttctcgctctccctctccctcaccgtcagcgccgtcgtctggttcctctacggcctcctcatcaaggacaaatacgtcgctctgccaaacgtcatcggcttcagcttcggcgtggtccagatgggtctctacgcgctctaccgcaacgcgacgcccagggtgcctgccaaggacgtggccgacgacgccagcaaggacaaggcgcccggcgaacatgtggtggtcaccattgccaagctgaccgcggcgacgacggcacctgcagctgccgtggcggaggatcttgtcaaggtccacgacggccacccggaggaagcagccaagggcgccgccaagccggcggagaacggcgcgggacgcagcgacgccgagcaagtctag

SEQ ID NO: 13875 - DNA, 171 bp, Zea mays
  Peptide Sequence Number=SeqID_55654
atggcgcggctcgggcgagcgggctgccgctccggtccagcccgaggttctgccggcggggaaatgacggctccacggcggggtctgggctatgggagggcgcgctgctccaactaccgtcgggagctcgttaccaacatttgggcgcacagtgggaaagctcgcctgtag

SEQ ID NO: 13876 - DNA, 540 bp, Zea mays
  Peptide Sequence Number=SeqID_55655
atggccgatgtccaactgggtgttggccgatcgcgagtgcagccgcatgggatgaagagggagttatcgacgactgacctaggtgctagtgtcgggtcgtggtcggtatccggttggccgggcatgagcgcggtcgcgcaggagaatggagttggcagtgccgccatggctgttctgggcaccgagggcaaactaggcatgaaggaagagggcaccgactacaactggtctggcgcagacatggtgaacactccaaacaggaagaagatcgttctatccaacaagacaaggaaaaacgtaggcaaaaagcaactatacatagtgaatgtgcatgatctacttaccacgatgcaaatgaacctgaccttcttgttctcgctgcatcaggggcccttcctcatcgcccgtgcacagccatcaagcagcgcatcgcccctccagtacctcgcccccttcttgaaccctgggcatgacaccattcttgatgtcggggagggagggatccggtgccactccttgagtcgtccaagggggagatga

SEQ ID NO: 13877 - DNA, 372 bp, Zea mays
  Peptide Sequence Number=SeqID_55656
atggggaggtcaaccctgaatgctagcccttactatttgatcctaactatcataagttatataatcgtgaaaggtgtaattgtcctaaagattttttggagtttaataaggcgttcacaacagtacgttctgccgcccgcggcccccgccccacatcccgcccgcgtccttccttcaacggcgcaccaatcaacgcgtggaggccaccatgtagtagcggatgaggacgccaacggccgcccgtgccggggggacgacgctgaggacgccaacggcgacggcggcagccaccccaagccctccaccacgaccgccacaaagacgaaaaccccaacggtgcctgtaacatcccaaattctaacccaggtttga

SEQ ID NO: 13878 - DNA, 414 bp, Zea mays
  Peptide Sequence Number=SeqID_55657
atgtcgggagatcacaccaagaaggagatggtgaccggcgagaagcccgctacaagccacgagaaagctccatcgggagagtcctacaacaaagggaaggggaaggagaaggaatcctcttcccacaagtcgcgtcggagcggtgacaagaagaagaagatgaggaaagtggtctactacgagactgacacctcgccgccatccacctccggctccgacacgccgtccgtaacttctaagcgccatgagcgcaagaagtttagtaagatccccctacgctaccctcgcattcctaaacatacgccattacttttcgtcccattgggcaaaccaccaacgtttgatggtgaagattatgctaggtggagtgatatgatccgatatcacctaacctcactccacaaaagtatatga

SEQ ID NO: 13879 - DNA, 207 bp, Zea mays
  Peptide Sequence Number=SeqID_55658
atggctggggagcaccaggaggataaggagggggaatgttttgtccggtttggacatggcggtggcctgactccttcagagaaggtgatcgctgatcggagcagcgatgaggtcagttgcattccaggtgctggtggaggtgttggagccgctggaggaggcctggagcagagcgaaggcgacattggcctacggggaaggccctag

SEQ ID NO: 13880 - DNA, 621 bp, Zea mays
  Peptide Sequence Number=SeqID_55659
atgagctgcacacaagtcacagtgagacaactagacgagcagacgagatgccaagacgtgcggccaagcaggaaacagcgacaggcggcagccgtgcgtccgcgcgggtcgtcgcctcgacgggaccaagcggcaagcagaacagcggagcgccggaccgggcggctggagcgcggagcgacggagcgtgccgagtccgaggctccgagcggctggagcgtcggcaggagcgaccggcggccgagcgggcagctggcagccttcgggcagcgggcgacctccaggcgcttggaagcgtcgcagggttgcgagggaggccggcgtcagagcccgggaggaccacgtgcaccagcaccccagggagccgcgcctgtgcgtgcacgcctgcgtgtagacgacgagcagggcagcgctgctgcagggaggggaccgggcgcgggcggaccgtcgggggcgtggggcagcggcacaaacggccagagcgacacgacgggagcggcggctccgggagaggcgcaggacggggatccgccggtcgctcgccttcttcctcaacccgccgctggactgcgtcgcctgcccgccgggcgcgctcctccacgggaacaggcaggtgactag

SEQ ID NO: 13881 - DNA, 435 bp, Zea mays
  Peptide Sequence Number=SeqID_55660
atgggcaagagcaagaaaggtggcagctcttcacatcactcgggtgacaagcgcaagcgcgagtcgactcctcccttggaggacttcggcgactcggaatactcagaggaggagttctcctccgagtccgagggctctccggctcctgcctctcccccggcgtcgtctgatgactcagatgactcccaggggatcgcggcggacgtatggacctacatccgagccgtcgagcgttccgggctcgagggctcggatgagtcggagtactcctcggacgaggaggattcctccgactcgtccgaggagggcggcggcggcgacggcggtgacggcgacgacgacggaggcgacggtgatggtggcagcggcagcggcacgggcggcggcggtgacgacggcagcggcagcaagggcagcaacaaggctagtggctag

SEQ ID NO: 13882 - DNA, 276 bp, Zea mays
  Peptide Sequence Number=SeqID_55661
atgcgccgcgcggtgacggagaacggaaagatcgctagggatgccagggagtccatccaggagtgtgtctccgagttcatcagcttcatcaccagcgaggcgagtgataagtgcgtcaaggagaggcgaaagaccatcaacgacgacgacatcatttggtccttgggtacgctcggctttgaggaatacgttgagcccctcaagatctacctcaacaattaccaggagggtgacataaagggttcaaagtcttctgatcagaatggaaagaaatag

SEQ ID NO: 13883 - DNA, 495 bp, Zea mays
  Peptide Sequence Number=SeqID_55662
atggagcgtgaggacggcgcggaggccaagtgtgacctttttgtggtgagggcaatgtgtggctgtcgcgagcttgacgcttcgggcccgggggagttagggacatactctgctcagcaactcggatgtgatggacggcaactggatgcgcaacaccaaggaccacgcggcacccacatgctctccatcgccgtcggcagctttgccaagggcggcatgctgtgggcatgcgtcgtcgcctacaaggagcccgtcacgctcggctccctccacgtcgttatctatggcgtctccgtcgtatgctccaccggcaactccagttcctacgacgacaccgttaggagccatataatacttgtggattgtcgagtgcccattgatcttaggagtcgaaccccggccggcacagttgcggctgtcatacgatcagacgatcctattcaggcgtcggccgcccgccgcttggagtatgggacgaacggactggccggctga

SEQ ID NO: 13884 - DNA, 324 bp, Zea mays
  Peptide Sequence Number=SeqID_55663
atggcgaacgagggcgtcgcggccgagcgggcggtcaaggcccctccaccggagacggagagcatcgtgtggagggaggacaaggggaggttccagacgcccgacggcgaggccttccttcagtaccgcctcctcgacggccgcggggcccccgctgcggcagtgatggacctggtgcacacgtacgtgccgcggagcaagcgcgggcaggggctcgcggcgcggctctgcgacgctgccttcgcccacgcgcaggcccgcggcatgcgcgtcctccccacctgctcctacatctccttgctgaccttgtgtcatctaatctag

SEQ ID NO: 13885 - DNA, 363 bp, Zea mays
  Peptide Sequence Number=SeqID_55664
atggtgctcacgagaaccgacgtcagaccaacaaaattctggttggtcgacacaggcgccgtttgtgggttagcacgcggtgtcgagctcgcgttccaaccaagctatgccagtaatgaccaaacggccacttcggtgagcttcaccaacacccagggacactcaaacactaaatcaaaggcgcagaaccataccgggtccacctggccatggggacgcggaggtgagcacgcactgcggggtctgacgggagcgatggacgttgcggtgaacttcggcgtaaataggcagtcacgctggagctatacaaccgtaagggacaacaagttcaccgtgcactaccaatttggggcgaggaagtga

SEQ ID NO: 13886 - DNA, 252 bp, Zea mays
  Peptide Sequence Number=SeqID_55665
atggatagcgaaagttctgtgcggccagccgaggagaaaggacgaccgcggtctggcgagctgaccagagacggagctggggcgcggcggggaagggagacagcggaggggaggggtcggacgctgggggctgaggaaacgacgtcggagcaccacagcacacgaccatgggagataggtgcgcgcaccatggagctcagggaggcgcggctgggaggaagaaaaccatgcgtggcatccgcggtcttgtag

SEQ ID NO: 13887 - DNA, 1980 bp, Zea mays
  Peptide Sequence Number=SeqID_55666
atggcaacacaggcagagcgtttgggttatgagtttgcaagattgctcggagtccatacaccacaagctagagtagtatataattctagctcagagtggctggcgattaggcatgctgcagaaaatgcacgtacagtagcagtttcaaataatgatgaggttggtgagatgacgtgctcagagttgttagaagctcttgagctaagccgctgccttcttctaatgagttatattcatggctccccactgcttgagagttcaaaggctttccattcacgagaagctgcttgtgttactgcttcatcactgggaagggttttgatgcttgatctgatactgcggaatgaggacagactcccatgccgtcagcttggttggcgtggtaatcctgcaaacctgatgatttcagataaatcatccttacccaatttggacaggttggatgatttcaagagctctacagatagttccaaccaactaattacacattttttgcatagagagaagcggtcacactctttgaatggaaaatttggttcaccagggttggatcccatgtcaccaaaactagaaccattgataaatgaaaaggaaaatgctgaaagaacaaatggcgattttcgcattgtagcaatcgatactgataatgctggagtgattcatgaattccgaggatcattccgtgcagctcttagggacctggaggggttccatctatttcttctccagctttaccaaaaactggatggtgttttgcgagttttcttgtccataattactaaaacctctgaagaatctgacaataatgatgctgccctttccgattttccttcacctggagccagctatagtactcctcgccttcctagtaagcatctgaacaatgagcttcatagtgattctgaaatgctgaaatctgcaatgaagtcctcttctgtgggatcccgcggaagctcagattcagtttctcctctgcccagggagagttggaacaacaagtccttcaagggaagtgcagaggctccccgtagtttaagaatgacaatgaaacttcgtgatttttacaaaaccccaaaggttgatcctgaattgctcaaagagattgagcagtggaacgaagcacttaagaatgatgtgatcaaattttgccaagagaacaattttcattctggtttctttgatggaactgaaaacaacatggtagctgatgcctatgaattgaaggtgcgtcttgaacacatcattgaaaggatagccttgatttctgatgctgcaaatacagaacgaccttctcttgttgtcaacaacttgttcataggtggggctctggctgcaaggtctaagtacaccctacagcatttgggcattacccatgtactctgtttgtgttcaaatgagattggtcaatccgattcccaatttcccgatctttttgaatacaagaacttttcaattagcgatgatgatgatgcaaacatcagtgatctttttgaggaagcatcagacttcattgatcatgtggatcatgttgggggcaaggttctagttcattgctttgaagggaaaagtcggagtgccacagtcgtacttgcctatcttatgcttagagagggctttactcttgcaaaagcctggaacttactgaagaaagtacaccgtcgagcgcagccaaacgacggcttcgcaaaggctctcctggcccttgacaagaggctgcatggcaaggtatctatggactggcaacacaagcggccagaaatgaaggtgtgtccaatctgcagcaagaatgttggtctaagtacgagttcactcaagctgcacctgcagaaggcacacaagcgtctatctgcaggcagtgtcgacagcgccatgaccatggagatccaaaaatcgatcgagtcactccagatcagccgaggaggaagcctgagcccgtcccagaagctgaccaaggtgttcagcaatgagctgagcttctga

SEQ ID NO: 13888 - DNA, 420 bp, Zea mays
  Peptide Sequence Number=SeqID_55667
atggaacagcgggacgcgacgcagccagaggcggcggcggaggagcgcgaccaggagcggccctccattattcctcctcccaagctgctttttgctggccactggtcagatttaggtttggtaataatggttctcgatacgcttggtgtatccgttcgtcatatgccaaatcttgcaactatcttccttgtaagacaagggaagttaacagcacgtctcattccagttcaagttgagcatattatggatgtggtttctttattatttggtggtgatatatcgacgtcagcacaaacatttgagaaatggctctcattagtacatcttgattctagaattgtctcaaacaaagagatgactctagatagcagaatgatggcaacattatcaacaatccaaggaataacattttacatataa

SEQ ID NO: 13889 - DNA, 363 bp, Zea mays
  Peptide Sequence Number=SeqID_55668
atggtgctcacgagaaccagcgtcggaccaacagaattctggttggtcgacacaggcgccgtttatgggttagcacgcggcgtcgagctcgcgttccaaccaagctatccaagtaatgacaaaacgaccacttcaatgagcttcaccaactcccagggacactcaaacactaaatcaaaggtgcagaaccatatcgggttcgccaggccacggggacgcggaggtgagcatgcactacggggtccgacgggagcgatggacgtcgcggtgaactccgatgtaaataggcagtcatgctggagctatacggccgtaagggacaacaagttcaccgtgcactaccaatttggggcgaggaagtga

SEQ ID NO: 13890 - DNA, 141 bp, Zea mays
  Peptide Sequence Number=SeqID_55669
atggcgcaggctctggtgctggctcctggactacctcctgagcagctccttgctccggaacgaggatgtactctcagtcagcgagattacaatctatcgaatagggttcaacaaaattttcttgtgaactatgctacttaa

SEQ ID NO: 13891 - DNA, 480 bp, Zea mays
  Peptide Sequence Number=SeqID_55670
atggccacgtgtttgacgcgccctagcatgccagagcacgccctcggcgctccgcccacgcgcgcagccccgtgccgtgccaaccccacgtccacacccgcgcctactgctataaaagccacctcgacctcgatcgtacacccccgcgcgtccctgacccaactcgagctcgagttcgccgagccggggattgaactctacctcaccggagatgccggatcgacgtcgccggacttcaaccggccgccgtcgcacatagaccgagctccacggccggaacacacgccgccgacgagcccgactgcctgcgcacgcggtcagccctattccggccatcaccgtcgacgtgatcgccaggacctcccggacctcacccaacccttcaccggacctccctcgccgctggagccagcaccagagcatgccatcgaggatctgcgtgccccagttttggaaggcaagccccggttttatgcataa

SEQ ID NO: 13892 - DNA, 529 bp, Zea mays
  Peptide Sequence Number=SeqID_55671
agagactcacgcgcacagggaagaacggctgggaggagttggaggccgcgacgcgtgcgcggggaggacgacggagcgccagagacccgcgcgtaggaggccgagcgctggggctagccaggcgcgcgcgcgcgagaagcagggtgcgacggctgagggagagacagagcgcgcgcgtcggccgagccagcggagcacgcctgcacgcgagcgaacagggggagaaggcgagggcgcgcgcgcagcatgggagagagagctcaggggagccgcggcgctgggagaagacgaagcaccagcggcgcaaaccaatctgagggagagagataagcaggaatggagcgcgcgtccacgggaaggaaccgagcggccgaggagagagaacagcgcgtccacgggaaggaaccgagcggccgaggagagagaacaggaaatatcctgcgacgggataagaccgacggctggaacacggctgggggcttccgccggtgagcagggagagcagaggatgagctcggcggcgggataa

SEQ ID NO: 13893 - DNA, 186 bp, Zea mays
  Peptide Sequence Number=SeqID_55672
atggatttcgaccagatttccgaggttcacggccagctcccagaatcaatcgcgccagccccgtggttctctcggtctgttacaacgaaggggaaagtgctgacatgggtgacccacttggcagagagaacaggaaaggggtaccagcgcggcaggcgtggagatgagggtgggccgtattgttag

SEQ ID NO: 13894 - DNA, 1572 bp, Zea mays
  Peptide Sequence Number=SeqID_55673
agaggggcgcatggagacaacttcatcttccgcaacctccccctgtttctatccgactccgctcgcgcctggttggagcacctgcctccggggcagatctccaactgggaagacgtggtccaagccttcaccggcaatttccagggcacgtacgtgcgccctggaaactcctgggacctccgaggctgccggcagcagccgggagagtctttccgggactacatccggcgattctcgaagaagcgcaccgagctgcccaacatcaccgattcagatgtcattggcgcattcctcgccggcaccacttgccgcgacctggtcagcaagctaggtcgaaagacccccaccagggcgagcgagctgatagacatcgccaccaagttcgcctctggccaggaggtggttgaggctatcttccggaaggacaagcagccccagggccgcccaccggaagatgcccccgaggcatcaactcagcgcggcgccaagaagaagggcaagaagaagtcgcaagcgaaacgcgacgccgccgacgcggaccttgtcgccgccgccgagtacaagaaccctcggaaacccccaggaggtgccaacctcttcgacaagatgcttaaggagtcgtgcccctatcatcaggggcccgtcaagcacacccttgaggagtgcgctatgcttcggtgccacttccacagggccgggccacccgcggagggtggcagggctcgcgacgacgacaagaaggaagatcaccaagcaggagagttccccgaggtccgcgactgcttcatgatctacggtgggcaagcggcgaacgcctcggctcggcaccgcaagcaagagcgtcgggaggtctgttcggtgaaggtggcagcgccagtctacctagactggtccgacaagcccatcaccttcgaccaagccgaccaccccgaccacgtgccgagcccggggaaatacccgctcgttgttgaccccgtcaccggcgacgtcaggctcaccaaggtcctcatgaacggaggttgcagcctcaacatcatctacgccgagaccctcgggctcctgcgtgttgatctgtcctcggtccgggcaggcgctgcgcctttccacgggatcatccctgggaagcgcgtccagcccctcgggcaactcgaccttcccgtctgcttcggggcaccctccaacttccgaagggagaccctcacgttcgaggtggtcgggttccgaggaacctaccacgcagtactggggaggccatgctacgcgaagttcatggtcgtccccaacaacacctacctcaagctcaagatgccgggccccaacggggtcatcaccgtcggccccacgtaccgacacgcgttcgaatgcgacgtcgagtgcttggagtacgccgaggccctcgccgaatccgaggccctcatcgccgacctggagagcctctctaaggaggtgccagacgtgaagtgtcacgccggcaacttcgagccagcggagacggttaagtctgtccctctcggccccagcagcgatgcttccaagcagatccggatcggctccgagctcgatcccaaatag

SEQ ID NO: 13895 - DNA, 384 bp, Zea mays
  Peptide Sequence Number=SeqID_55674
atgagaggaacagagggaagactcggccaagctgaaaatgcagccaatgacgaccagggaggtcgagccgaggatgctgacggcctgcagcttgtgtccatggaggggcgagcacaggaagaggctggaccgagctccaaccgaaggggcttgctgctgctgtgttttggaacagagaggaggaagagaggagatggcgtgagggagaaagggggaggggctggtgctgccacctttaaaggggtgcttgctccagccattggtgggctgggcggctgctgcagagctcaggtcgcgtcagccagctgcagcaggtggcagagcgactttgggcactcatttttggcattttccttttggaatcgaaccttggtcgttgcataa

SEQ ID NO: 13896 - DNA, 606 bp, Zea mays
  Peptide Sequence Number=SeqID_55675
atggggctgtccaaacacccacgcgacgcccttgggtcgggactgcgcagctccgtgtcggcgtacagaaattcggagcttgttgctggggagagggagccgaggagagggtcgcttgcaggggaaatggaggctagggaggaagagctactgctcccctgcggccctggacacaggaagaaagctggcgtcgagctcctggacatgggggtcgctggctgctgttgcaagggcgccgcgccatggccgctggccggagctagagctgaagctcggtcagcaacagaggggactcggccatgggggagaagggggggaaaggaggaaggggagccggctgccctgcgtggaataggaatagggagggcgccgggcagaggagatgggagcggggagctcggtggccaccatggctgggctgtgaagcagagggagctcgcaggggtgaacgccgctggtgccctgcgcgcgacggggaaggaccctgctacatgggtactgagtgccatggctggccgaggggaggaagtggaggagctaagctccctgctggctgctcgccgtggacagcagagggagggaggaaggttcctgtgccaggaatag

SEQ ID NO: 13897 - DNA, 621 bp, Zea mays
  Peptide Sequence Number=SeqID_55676
atgacggcacgccggcgctgcgcagacccggcgaagcaagacgcggagacggtagaactgcgcagatcaacgacacagcatggggctgtccaaacacccacgcgacgtcttgggtcaggactgcgcagctccgtgtcggcgtacagaaattcggagcttgctgctggggagagggagccgaggagagggtcgcttgcaggggaaatggaggctagggaggaagagctactgctcccctgcggccctggacacaggaagaaagctggcgtcgagctcctggtgggtcgctggctgctgttggtcggagagcaggaggaggacggctgcgcatccgccgcgaggggttgggctagggaatcctgcgctggtgatgaagtggtggtcggacaccgcatgggggaggagatagcaagggcgccgcgccatggccgctggccggagctagagctgaagctcggggtgaacgccgctggtgccctgcgcgcgacggggaaggaccctactgcatggaaactgagtgccatggctggccgaggggaggaagtggaggagctaagctccctgctagctgctcgccgtggacagcagagggagggaggaaggttcctgtgccaggaatag

SEQ ID NO: 13898 - DNA, 246 bp, Zea mays
  Peptide Sequence Number=SeqID_55677
atgggagaggaaaaaccaaatcgtcagcagtctgtctgccagtctgactgccagactgactggcagactgacctgcaggcgggtcagacaggccaggaccggttgaaccgccccctagggcggttgaaccgcccccctaacacccctggtgacctgactgccagtctgactggcagactgcagatcagaagtcagagggtcagagaccagttgagctgccccccaggaccagttcagctggtctag

SEQ ID NO: 13899 - DNA, 900 bp, Zea mays
  Peptide Sequence Number=SeqID_55678
atggccaagaagggcctggccgccatcctctacaagttccgcgacgtgcactgcccgccctccgcctcgctgccgccgtcgaccccgtccgcgcactacgcccagcgctgctacccgccgccgctgtccgcgtggccctggccgtcgtgccggcacccgcgcaccagctcgttccgcgggcccaaagacgacgccgccgcggtgttccggaccgtgaacaccgtctacgactacgacacgatctcgggctcggagcaggtcctccggcgctcctccatcgatgaggcggcgtgcatcgaccggcgcccactgtcgttgctcggagaggccattgcggagcaggcggtggacgaggaggaggagaaggagacggagctgcgagagacggccgtcgtgcgcggcatgcgttcggagcgactgttcttcgaaccggccggcgcagagttcttgcccaatcagaggtttcagagcgtggcggtggcgccggcgagaggcaaggacgaggcggccacggcggacgtcaagagcgaggaacaagcgacgacagacgcgccgcacgacaaggacgagccgccggcggaggccgtcacggcgaagggcggcgcggtggtggtcacggtggagtccaaagacccgtacggcgacttcagggcgtccatggcggagatggtggcggcgcacgggctgcgcgactgggaggccctggaggagctcctggcgtggtacctcaagctcaacgctaagggtgtccacgctgccatagtcggtgcattcgtcgaccttctcctgcaattagctgttttctcaacgattttcatggcatttgagcagctcagcttggcccaagttaagcagaaagctgaatcaaacacttgtcctttagtattgcagaagcattaa

SEQ ID NO: 13900 - DNA, 504 bp, Zea mays
  Peptide Sequence Number=SeqID_55679
atggagatggcgccggcgggcgcgggcaaggcggcggctgcagctccggcctcgcgcatgccgatgatgcacatgtctttcttctggggcaaccgcgcggtggtgctgttcccgggatggcccggcgcgcgcggcgcgggggcgtacctgctctgcctcctcctcgtgctcgcgctcgccgcgctcaccgaggcgctcgccgcggcctcgcgctgcgtcgcgcgccgtggcgcgggtgcgggggcaggccgcgtgccggcgtcctcggccgcgctgctcacggcggcgcacgctgccaggatggggacggcttacctcgtcatgctggccgtcatgtcgttcaacggcggagtgctcctcgccgccgtggccggccacgcgctcgggttccttatcgcgcggagcagggtgcacaatcggggcgggagtgccgccgcggccgccgcccgtgatcgcgagctcggtggcatggacgtccaccctccggatgtctccaaggcataa

SEQ ID NO: 13901 - DNA, 594 bp, Zea mays
  Peptide Sequence Number=SeqID_55680
atggcgccccgcacgctctacgacgacggcggctctcagcccccttacggaagcaagaggacgtcagcaaggactcgacagccccgacagctgtccttccgccaggctccacaacaccagagaaacacctctgagcattctaaagctcatagccctctccttccagagcatttcacatcgctctcatctccacctgcttgcatccagcgcctcgtcactctgcaaaacaacagcacatacctccaaaggatgagccgcagcaacaggaagagctctaggggccttgacctgaaactgaacctctcacttcctgcaacaggggactcctccaggagggcgatggctgatgaggagtcatccccgagctcctgcctatcgtcagagaacgagcatggcctgcagtggtccaacagccctgaggccacatccatggttcttgctgcctgtcctcgctgcttcatctacgtcatgctcccacaagatgaccctcggtgcccccagtgcaagagccctgttctccttgactttctgcaggacaacaacaacagtaagaacaacagtaataatagcagcaggaggagcaggaggggatga

SEQ ID NO: 13902 - DNA, 522 bp, Zea mays
  Peptide Sequence Number=SeqID_55681
atggcggggctcgggcaaataacatcgtggggaggcgggcaggcggggcatggtgtggacgccctcacgggggggtgtgggagggggagggcggcgccatggatgtcgcggcgagatttgcggtggtgcgcgctgggagttgcgcgagatccacgcttggcgtgctggctgtcgcggatgtggctccccatcgtgggaggcagggtgggcgaggtcgcggatgtggcggtcgctgatggcgctccccatcgtgggaggcagggtgggcgaggtcggcgacaaacttatcttcatgtcgaaggtattaatgactttgcccatgcatggtgcagcaccaatactgctctctcaggccagattcttagtgggatgtgtgcctgcgagcactatgtcttcttgtgggcatgcacacgagtgtatgtgcatgtcttggggtcgtggcacatgtctaccattacgatgcacgtgctgattcctgtaatattcctctttgaaggagtcctcactcagtacttggcgtga

SEQ ID NO: 13903 - DNA, 1696 bp, Zea mays
  Peptide Sequence Number=SeqID_55682
ctcgctgcatcgtcagtctcggcctccacaaccaccaagtcctcctatcccgctttgccgccgccttcaatgccctcgcgtccccgtcccgcaacgccgccgccgccagccggccatccgttgcgctcgcccactctcctcgggcgctgctgcaccgtgcgctgcctcgcccagctccacgcccgcatcatcctactcggtctccacaaccaccacgccctcctcgcccgcttcaccaccgccctgcgatgccctcgaatgcccctccgtcgccgcctctttcatcgccgcgcttaccgactcccacgccgccccgctccgcctccgcaacgccgtgctcgcgtccctcgcccgccacgccccgctccacgccgcgctcacggagttcaacctcctccgacaggccgcgctcccggactctttttccttcccttgcctcctccgcgcgtgcgcccgcgtatcctgcctccccgctggacgagccctgcacgccgccgctatccgccttggcgtgcacgccgatctcttcatccgcactgcgctcatccagttctacggcaggtgcggcgtggccgacgcggcccgggcgctattttatcaaatcgacatccccagtgaggtttcctggaccgccattatcgttgcctacgtcaacaatggtggcatcatagacgctagagctctgtttgatacaatgcctcaaaggaacgtggtgcactggaatgtgatggtcgatggttacgtaaagtgtggggacttggagggcgcaaggaggctgtttgatgaaatgcctgagagaactgctacagcatgcacatctttgattggtgggtatgcaaaggcagggaacatggaagctgcgagattgttgtttgataagttagaggaccgtgatgtgttctcatggtcagcgatgatatcaggttatgcacagaatggttaccctggcgaggctttgaggacttttgatgagttccaagggcaaggcatacacccagacgaacttgttgtggttggcctgatgtctgcatgctcccaactaggtaacatcaggttggcaagttggattgaagattacatcacaaagtactctatagatatgaacaatgctcatgtgttggctggtcttgtgaacatgaatgcaaagtgtgggaacttggagagggctacttttttgtttgagtctatgccagttcgagatgtgttttcatattgttcactgatgcaaggttactgcctccatggttcagctgacaaggctgttaagcttttctctcggatgcttttggagggactcacccctgacaatgctgtgtttacaattgttttaacagcttgctgtcatgctggtctagtagaagaagggaagaagttctttgatataatgaagaatgtgtacttgatggtgccatctggtgagcattatgcttgccttgtcaatcttcttggacgttgtggtatgctagaagatgcatattggcttatcatgtcgatgcccgggaaacctcatcctggagcatggggtgcactgttgggtggatgcaagcttcactgtaatatagagcttggaaaaattgcagcaaaaaaactttttgaaattgaaccggataatgctggaaattatgtctccctgtcaaatatgtatgctaacattgacaggggagctgcgtaccattggattgagaagaacacctaa

SEQ ID NO: 13904 - DNA, 177 bp, Zea mays
  Peptide Sequence Number=SeqID_55683
atgagctttagcccagtcaagcttgttctcagccctaagctcaaaggccaaccagtggttcagagcctgtttggtggtacttcggctctgccggcagcgccagcattggagctggaggagctgaacgcctgcaccaaacagcaacacaaggagaagtgcttctgttaccgtgtttaa

SEQ ID NO: 13905 - DNA, 270 bp, Zea mays
  Peptide Sequence Number=SeqID_55684
atggatccagggagaccgaaaatgctcgccctgcgcgctcatggggtgggcgacgtccatggcagcttctaccactgcgcaagggaagccaaagagagggcgccatggaagaggagtcgagctccttgctgtagccatgggaagaaggtctccctgctgtcaaacgccgtggagaagggtacgaagaaagggactcggctagagcaggcctgcgcgagggagaaggagcagggagagcgctcggccgtggagggaagctcggctgcttga

SEQ ID NO: 13906 - DNA, 278 bp, Zea mays
  Peptide Sequence Number=SeqID_55685
atgaactggctgggcgaaccagtagccttcttgcctcttctcttccccttcggagctgtgagttggagagagaaattgggggaaagccgccactacggactcgtgcgtacaccatatgcagggttctggtgtcgggtctgggagctccagctcgtcaccgggatgatgctcatggcggcgatgctcagaattggccgggaattcgccgtcgtcggggaacttgcgcgtctagccattgcgaaccgtggccggctctccaaccttcgccttggtcttcg

SEQ ID NO: 13907 - DNA, 282 bp, Zea mays
  Peptide Sequence Number=SeqID_55686
atgaactggctgggcgaaccagtagccttcttgcctcttctcttccccttcggagctgtgagttggagagagaaattgggggaaagccgccactacggactcgtgcgtacaccatatgcagagttctggtgtcgggtctgggagctccagctcgtcaccgggatgatgctcatggcggcgaagctcagaattggccgggaattcgccgtcgtcggggaacttgcgcgtctagccattgcggaccgtggccggctctccaaccttcgccttggtcttcggtaa

SEQ ID NO: 13908 - DNA, 189 bp, Zea mays
  Peptide Sequence Number=SeqID_55687
atgccgcagcgcctcgaccactgccgcgcctcaaccaccgctgaccccacgccaccggcgccctcgcccgcgacccaccgtctcgcctgtgaaccaccgtcacgcccacgaccaaacctccaaggatttcgaaactttctcgtgcaggggaggtgctgccgaaattttctattgataggcttctattag

SEQ ID NO: 13909 - DNA, 1641 bp, Zea mays
  Peptide Sequence Number=SeqID_55688
atgttcttcgacgggacgctgatgaagacgggagccggcgcaggcctactcttcatctcgcccctcgggaagcacctacgctacgtgctacgcctccatttcccggcgtccaacaatgtggctaagtacgaggctctggtcaacgggttgcggatcgccatcgagctaggggttcgacgcctcgacgctcgcggtgactcgcagctcgtcatcgaccaagtcatgaagaactcccactgccgcgatccgaagatggaggcctactgtgatgaggttcggcgcctggaagacaagttctacgggctcgagctcaaccacatcgcccggcgctacaacgagactgtggacgagctggctaaaatagcctcggggcgaacaacggttcccccggacgtcttctcccgagacctgcatcaaccctctgtcaagatcgacgacacgcccgagctcgaggcaccctcagcccagcccgaggtaccctcggctcagtccgaggcaccctcggctcggcccgaggcaccctcggttcagcccgaggtaccctcggcccccgagggtgaggcactgcgcgtcgaggaggagcgaagcggggtcacgcctaatcgaaactggcagaccccgtaccagcaatatctccaccgaggagagctacccctcgaccgagccgaagctcggcggttggcgcgacgcgccaagtcgttcgtcttgctgggagatgggaaggagctctaccaccacagcccctcaggcatcctccagcgatgcatccccatcgccgaaggtcaggagctcctacgagagatacactcgggggcttgcggccatcacgcagcacctcgagcccttgttggaaacgccttccgacaaggtttctactggccgacggcggtggccgacgccactagaattgtcggtacctgcgaagggtgtcagttctacgcgaagcagacccatctgcccgctcaggctctgcggacgatacccatcacctggccttttgctgtgtggggtctggacctcgtcggtcccttgcagaaggcacccggaggctacacgcacctgttggtcgccatcgacaaattctccaagtggatcgaggtccgacccctaaacagcatcaggtccgaacaggcggtggcgttcttcaccaacatcatccatcgttttggggtcccgaactccatcatcaccgacaacggcacccagttcaccggtagaaagttcctggacttctgcgaggatcaccacatccgggtggactgggccgtcgtagctcaccccatgacgaatgggcaagtagagcgtgccaacggcatgattctacaaggactcaagcctcggatctacaacgacctcaacaagttcggcaagcgatggatgaaggaactcccctcggtggtctggagtctgaggacaacgccgagccgagccacgggcttcacgccgttctttctagtctatggggctgaggccatcttgcccacagacttagaatacggttccccgaggacaagggcctacgccgaccaaagcaaccaagctagtcgagaagactcgctggaccagctggaagaggctcgggacatggccttactacactcggcgcggtaccagcagtccctgcgacgctaccacgcctga

SEQ ID NO: 13910 - DNA, 207 bp, Zea mays
  Peptide Sequence Number=SeqID_55689
atggcccagttgacagccaactatgaaacctgggcaacccttagctcccctgaccctgagtccctgtctccttgtctagcactccggctgcggctctccctgtctagcggcgcctacgacgctccccaatccccatcgaccatcgccacctgcaacttcaaggctggtactctagcgcaaggagcaagtgtcacacccgggctttaa

SEQ ID NO: 13911 - DNA, 618 bp, Zea mays
  Peptide Sequence Number=SeqID_55690
atggcagcagcccacacggtgcagagagtcaaaggtcccgcctcgttaatggtgaggcgcgttatactccggaggtcggtatcggtttccccggtggttcacactatgtgtcgcatgatacgtggcagcgccgggcttcgcctgaacctcagcgccggacgcaagcttcgtaccgaggccctgctggtacctagcgtcagtagcttgttgcttcctgccccattcccggattcatgggaattgacccgagaagtgctgctgccaaaagatgggcaccaggaagtggctgaggtcgcgctgcagctggggaagtactgcatagatgaccccgtcaagtccccgccgggcggacggaggatggttattcgtactgccaaaagaatgggaggttgtgtactgctcggtgccaacctcgccgggcgggctctaccggacgcccttggccgcctggtattcaaaaccgacgagatggtccaggcggtggaagcgcctgacgtggtcaggaacaaggtgtcgttctccgtctttggcctagagggcgcagtgtcattgaaaggtaagctgaatgtgctggacagtaaatggattcaggtcgtgtttgaagcgccggaactgaag

SEQ ID NO: 13912 - DNA, 2676 bp, Zea mays
  Peptide Sequence Number=SeqID_55691
atgcgcgggcgctgggcgtggggcccacagttagttgacagtggcttggatggatgcattttggtgctccgagtatgtctgaatcaaatgttgctaaatgctggggaggtcaagaacctccagttgcaacaaaagcttctatctgatgttttcagatattgtttacataagacctgcttcacaactagtttttgtgaggcgctggcaacgatagccttgacggatgattttcttgaaagcttgacaaatctgctggagctctcagttgctgagaaaattggtgttggacttgcgctgtcagattctgaggactcagagatgaagcaaaaaggtagtcatttctgtatggtcattgatatcgcctcttctgttccagggcaatggttttcaattgctcaaattgaaaagctgtgtacgagtcatatccaatctctatcaaatggtcaaattcatgaaattgtcatgtttctgcatcagtctgatggcctgtcaaagcatatggacacttttaataatattatatctctactaaaagtcacggagaggccattttttgtacctgttacgaatggagattttgatagccaagcaaatccttcaagacatttggagatgtactttggtagcacaaatgatgattttgagtcacttctgtctgaaattgggaaagagataagcatggctgacattgtagccgagttaggttacggatttactgttgacagcactcactgtaaggaaatactttccattgtggagcctcttgatgatatcgccatatctaagttgcttggggctgttgtcggcactcatattggtcttggagaggcccataacacatatgcaacatttgtatctgctattcgtaatagccacacgaatgactcacctcaaccgactaaatggaacacagatgtccttgtggactcaatcaatgaacttgccccaagtacaaactgggtgcgtgtaattgaatatcttgatcatgagggtttcaatatacctgatgaagcgagcttttatctattgatgtctatatacgagtgtgcttgcaaggatccatttccacttcatgctgtttgtgggtcattgtgggaaaacacagaaggccagatatcgttcttaaagcatgcagtttgtgctccatctgataaatttacatttgcacattcttctagacacctggcatttcaggacttggcaggccctagtcaaggcaatcatgcttggttctgccttgaccttctagaagttttatgccaactagctgaagttgggtacactgcatctgtacgatcaatgcttgagtatccactgggacattgccctgagctcttacttgttggtgttagccatatcagtaccgtgtataatcttctccaaaatgaagtactgtcctgcgtatttcctgctttactgaaggatccaacaaagcgcaatgtagtgaattatctctggcatacaaactcatatctcacacttcaaggttttgttgatgctcataatgatccagattgtttgctaagaattgttgatgtttgtcatgacttgaaggaatgtgtgaattttctgaaagcaactatgagcaacacagattacgtcttagagggcacgacacaacctcaatctattgtcagaaacatatattgggagtcttcttatgccttcataaaggtctacatggttctccagtctcactcggggcagctcttgtcagatgcaatattggatgaaataaggaaactgtgtgtttcgtttgaatcgaggaatcctagctctgctgtaagagagcttgctaattcagacggagggtcagatgacattgaagtagaggctaatgcatattttcaacacatgttctctggacagataagtgttgattccatgatacaaatgcttgggcgcttcaaagaatctacagataagagggaggtatcaattttcaactgtatgatctcaaatctttttaaagaatatacattcttccccaagtatcctgataagcagcttaagatagcagctgttctgtttgcatgtggcggctcttcatttgaaggcacctcatcattaccactgtcattacaactggagagccgggcaacaactgaagggtcgtgcgaaactggagagatgtttatgtttggtacatcagcactggaacagtttatggaccgtgtcatagagtggccacgatactgtaattacatattgcagatctcacatcttcgtggaacacatttagaaatggtttctgttattgagagagccctagccaaaatctcctcaagtcaaaatgagccaaatgttggcaacctgctttctgcagagcagcatgtttctggttcatcatccatggaaggcatagaggcatctgaatcatcatggttgatgggtaccatcccaagtcaactaggaaggcctctttcttctcctttgcaacataggcagcagggtcttctctcggagaggtctgaggtttctatgaattcactgaataagagcaatttatccagtcagcctccccttgcttcatcgtctgctgatttgactattaattcaaagacaactgctccaccctctttactagcttcacctcatcagtctatcagtgtgtcaacgagtgtgcatgttggatttctgcgttctcgaagtaccccaggtggcttgctagcttaa

SEQ ID NO: 13913 - DNA, 570 bp, Zea mays
  Peptide Sequence Number=SeqID_55692
gaggatgtctccgcctcgcccgacccccagggctcggccccccgcctcggcctcgaaagatggtctccacctcgcccgaccccagggctcggcctcgacctcggcctcaggaggaggtctccacctcgcccgaccctagggctcggccccccgccttggcctcgaaaggtggtctccgcctcgcccgaccccagggcttggcctcaacctcgacctcaggaggaggtctccgccttgcccgaccccagggctcggcccccgcctcggcctcggaaggtggtctccgcctcgcccgaccccagggctcggcctcaacctcgaccctcgggaggaatcacgtcctcgcctgaccctggcctcgacctcaggaggagtctccgcctcgcccgaccttgggctcggaccgactgcgccacgggggatgcatcattaccctacccccttgctagcttaggctacgggggaacaagaccggcgtcccatccaggctcgccccgccccgacagttgtgcttctacagggctcaagcgctcctccgacggccacgataccgcgtacacagggctctag

SEQ ID NO: 13914 - DNA, 663 bp, Zea mays
  Peptide Sequence Number=SeqID_55693
atggcggaggatgctacgagcagccacccgtcacgctacgtcaagctcaccaaggaccaggacgcccccgccgaggacatccgccccggcgagctcaaccagccagttcacgtcccgcagcagctcgaaggccggaggtgtagcgagtgcggtcaggtcctgcccgagagctacgagccgcccgccgacgagccctggaccaccgggatcttcggatgcaccgatgacccagagacctgccgaactggattgttttgcccctgcgtgctgtttgggcgcaacgttgaggctgttagggaggacatcccttggacaactccttgcgtgtgccatgctgtattcgttgaaggagggatcacgctggcgattctgacggcgatatttcacggtgttgatccgaggacgtcattcctgattggagaaggtctggtgttcagctggtggttatgtgctacctacactggcatcttccgccaggggcttcagaggaaatatcatctcaaggagcatcgcgagaggacgggacggcttgcagagaacaacgcagtgcccatgacggttgtgaacccgcctccggtgcaagagatgagcatgctggaggaggtggaggagaagggagcagagaagagtgaacacgatgatgtggaggtcattcctctatag

SEQ ID NO: 13915 - DNA, 1755 bp, Zea mays
  Peptide Sequence Number=SeqID_55694
atgggtgatgaagctaataaagcaaaaggccaattcaagatcattaaacatgtactcaaggcatttatgctacgtaggacaaaatttttactaatcgagagtggaattctggcgctgcctccactaactgagctaacagtgtatggttctttgcttcaggatggtgccgttgacacagttacaaaagaagctttacatgttatacaactgaggaaagtttgcagtcacccatatctgttcagtggcattgaacctgagccttatgtggaaggggaacatttaattcaggctagtggaaagctcattgtcctagatcttatcctgaagaagctccatgaatgcggacatcgtgttttgctatttgctcagatgacccagacactggacattcttcaggattttctagagctacgcaattacacttatgagcgcctggatggttcagtacgtgctgaggaacggtttgcagcaataagaaatttcagttctcaatctacaaaaggtcttatcagagatgataatcgaagtgaagcatttgttttcatgatatcaactagagcaggtggtgtggggcttaatctcattggtgccgatactgttatattttatgaacaagattggaatcctcaagctgacaaacaggctctacagcgcgctcaccgcattggacagctgaatcatgtcttgtcaataaatttggtgtcacagcgcacaattgaagaggtcataatgcgaagagccgacagaaaacttaagcttagccataatattattggagaagaagacgggactgatgggaagggaggagatccaggaattgaagctagtgacatgagatcaattatctttggcttgcacctgtttgatccagcagatacagctacagaaacaatcgatgaggatataactgctgagacattcagtgtcgagaaactggcaaagttaaaaacaatgtctgaaaaggttgtcatgatgcgtagccatgagtcttctgaaaaggatgaacgagcatttgagatcaatccaaatatgactgatgacagtggaactgtgattagaagggcttctgattctatccgcattgatcctgggctaaatgaagctgcatacctatcctgggtcaagaagttcaaagaggcttccatttctagtgaagatgccacagttggatttggaaggcaaagagcagcgcctgaagaaaagctcctgaaacatgatgttaacaagcaaaaaatagaagaaaagagattggccaaatgggaaagtttgggttaccagacactagcagttaaggaacctgatatcacagcaagccagaatatttcagacgcgggatccatccaatttgtatatggagattgtactaatccttcaaaagtttgtcccgcaaagcctgccatcatattcagctgcatagataattctgggacttgggggcatggagggatgtttgatgctttgactagtctgtcgacatgcattccagatgcttatcaccgtgcttctgaatttgatgatctccacatgggcgatcttcacttgattcagcttgatgaaggcaactgtacccggagtttggatgcacctttatgggttgcactagctatcgttcagtcttacaatccgaggcgtaaagttccgagaagtgaaatctccatgtctgatttggagctctgtatatcaaaagcagccttctcagctgctcagcattctgatactactttcagcgacgacagacagattgccagattgtaa

SEQ ID NO: 13916 - DNA, 591 bp, Zea mays
  Peptide Sequence Number=SeqID_55695
atggagtttcccaagcgagggcgagcttttctccaaggttccctgcgaaggagccccaaggcgacgatacctggagccgccacgggggccgacgagaacgcaagctctaagcatctcgtgccggtgggggccgcgtcgccgaagaggaagaaggtgctcggggagaggaacgacagcggcgtcgggggcatggagggcgccgcgtcggcaccagtgcagcagccaaagctcgcgttgagccccccgacgcccgcgagccgcgacgcggggccgtacgacccgaagacgaactacaccacgccgcggccggcgttcctgcgctacgaccccgaacggcgccgcgagatcctcctccgggtgtcgcgtgcggcagaggtgatgtacgacgactgctccagcaccacatccggcactgcggcctcggaggaggacggtggctcgtccttggcctcggacgcggcggcagactcccttatctcgtcgccgccgctacgggggggggggggggcgtgcgcgggtttcgcggcgtgggctggtgagggcgggggcgggggcggtctacattttgctcttaatagttgtagagattag

SEQ ID NO: 13917 - DNA, 408 bp, Zea mays
  Peptide Sequence Number=SeqID_55696
atgccgcagatgacgacgctcctgccccaactctcgacgctgctcaacctccatgctcaagctgttgttgtgcccatcatccgagctcttgtatcgctcttcctcgacgtcaactccaccttctacgcccgatggaggggctcgtctcgaagaggagggactgagggagtcagcgcttcggcggaactcgtcggcacggccttctgcctggagccctggacaacgccgctcgtggagggggactggccggcttggagaggtcccatgcgccgccgccttgaagagctcgcggaggggctgggggaggtcgcctgcgtcgccgctgggagatccccaccgctagagcagcaaattgatctggtgcgtcgggatttcaatagcgtcggcgtcgaagctgtgtttgggtaa

SEQ ID NO: 13918 - DNA, 204 bp, Zea mays
  Peptide Sequence Number=SeqID_55697
atgcctttgtacaacccagatgaagaccccaagcctcattatcacattgggggtcagctgatgaagccagctgtttggactgctgcagctgcaatccatagagacagaaacactttagaagcagtagaagccggaatctcaacaggtgaccaacagacggccatggcgacaatttggggatttagcggcaatagagaggattag

SEQ ID NO: 13919 - DNA, 555 bp, Zea mays
  Peptide Sequence Number=SeqID_55698
atggcgacagtgagatcggcaagggccttcgtcatggtgtcgatctttttctctagcgctgcgttggcggaattggtcgcgacagcaaatgcgacatcgccggtgttgtcgtcgttgcctggcattgaacaggctgctaggctgtcggtcataacatcttcaatcaacacgttctggtttcctttagagatctatcctcatggagcttctttgatcctccttgtatactctaaagaggggtggcagattataagattttgtatccgggttggttacaagatgaaggtggatcacgaccatatctcccggtctgataagatctttgccatgtttattcttctagaattcctttgccgacaggccttccttctggtcgtgactgtcgagtccatgggctcagagcccatcttataccttcggaagttaagaaaatggttcgaaggcagaaatgcagtgtatcttcgaaggtggagtaattatgatcccaatcttagtaaccgggaacttggccacgttcctcgttccgggaacgtgggaacaatctcgttccagtag

SEQ ID NO: 13920 - DNA, 654 bp, Zea mays
  Peptide Sequence Number=SeqID_55699
atggctacttcttcagttttgccagccgtggttctggtcatagtcggctgggcgctggccgtggcagcggatggcatcgttgcagccaacgcaccgtcgccgaccggatggctgagggcgcacgcgacgttctacggcggagctgacgcctccgggaccatggcttcctgcggacagtgctacaagatcgcgtgtgaccgcaagacggccccgacgttgtgcaagcccggagtcaccgtgaccgtcaccgccaccaacttctgcccgcccaactcagcgctgcccgacggcggctggtgcaatcagcagcgcccgcacttcgacatggcgcagccggcatgggagaatattggcagcaccgttagcgccggcataatgcccgtcatctaccagagggttccatgcgttcggcgaggcggagtcaggttcatgatcaatggccacaactacttcaacctcgtgcttgtcaccaacgttggaggggctggctccatcaaatccatggctgtcaagagctccgattccacggactggatgcccatggaggtgttcaagaatctatcaaacgaagaacaagctccacatcgtcaaagaactagagaagccaagaaccaacaggagaatacattatatgtctttgaactttgccaataa

SEQ ID NO: 13921 - DNA, 312 bp, Zea mays
  Peptide Sequence Number=SeqID_55700
atgggaaggatgtttgatgagcgtcctcccacgataggggtcgaaggacacatcgttgggatcgagaagaattttaccgagaagaatatgaagatgagaattctggtttcagccatggattcaatcttttcggcgttggtcgtggaggatgtggtggaggtcgccacactgatttcaataatccgcatggaaggcatcgtgcaaccagtcgccgacgtcatcatcaccgacgtgctgatagggaacatcatcctgatcatcgtcatagaaatgacccagataatactaccaagtctagttggatattcctaa

SEQ ID NO: 13922 - DNA, 807 bp, Zea mays
  Peptide Sequence Number=SeqID_55701
atggaagggcagtttgctggttggggaagagaggagggagggtggaggaaagggccatggacggctcaggaagacaagctgctggtcgagtacgtccggcagcatggagaagggaggtggaattctgtcgccaagctcactgcgaagcggcaaagagctgccggcttcggtggggtgaactacctgaggccgggacctgaagagaggcaagatcacgccgcaggaggagagcgtcatactccacctccacgccatgtggggaaacaggtggtcgacgatcgcgcgcagcctgccgggacggacggacaacgagatcaagaactactggcggacgcacttcagcaaaagggcaagccgtccaagaacatcgagcgcgccagggcgcggttcctcaagcagcggcgcgagatgcagagccagcagctgctgctgcagggacaagcgcagcagcaggaggaggaggaagagaaacggcccgatcacgacgacgggccggaggcagcgccggccgtgtcactggcgcggcagctcgaggaggacctgcggcggatgctgcagcaggacatggacgacctcatgttccagttctgcccaatggcctcctcctgcctcctcccccgcggcagcggctgcacctccgtcagcgcgtcggcgagcgaggaagggtccagcggggatcatcatcagctcgacggcagcgccacgtgggactggggcagcctgtggaacctcgacgacgtggtcgatggcggcgcctgggacagcagctcccctttgctgcaggatcaagggctcgctttctactag

SEQ ID NO: 13923 - DNA, 258 bp, Zea mays
  Peptide Sequence Number=SeqID_55702
atgcaggtggaggagatctttgaatcagctccatcgaggagtgccctcgtcctcctgtggctggatatatcagagttgtgccacgtcttcaagatgcgcggtgacattggaggctcggactgcagcgtggcgacaaaactggtgagttgctcgatcatcttgcaaggtcggcattggatggttcggccatgggtgaattggaggatgcggctgagggtggggagggtggtgggctttgtggtggcgcggttgggttga

SEQ ID NO: 13924 - DNA, 234 bp, Zea mays
  Peptide Sequence Number=SeqID_55703
atgccgagaaatatggtaaatcgtggactttacccctcacgcgacctgagacgaggtctcccattccggttatggtgggtacaagtgcggtcactgcacgacggccagtcggggtcagtgaggcattgttctctggaggagatggttgctgggataacttggccgtccactttgccaccgggttggactgtcgagtgggaccctgcctcggctgaggaggagcatgaggagtga

SEQ ID NO: 13925 - DNA, 327 bp, Zea mays
  Peptide Sequence Number=SeqID_55704
atggcggcccaggaggcggttccgatcgtcgccatcggcagccaggtggagataagtctcgtcgggctggaggcctggagcacgcggtccttctcaccaacaacctcgacctcgccggacggaccttcgtcgtcgaaaaagtccaggatttccaatgagatcgaggtggtcgttgccgtcgtcatccctcaactgctccgcgacaacgttgaccccaccggcgcgcgactcctacgccgctacgcttggtccatctgtcatgcggcgagaaaggtggatggcgccctgttcgaaccggaattgagccggcggactgtccggccctga

SEQ ID NO: 13926 - DNA, 363 bp, Zea mays
  Peptide Sequence Number=SeqID_55705
gagtcgcgcgccggtggggtcaacgttgtcgcggagcagttgagggatgacgacggcaacgaccacctcgatctcattggaaatcctggcgatgtggcgcagcttcaaggtgctgggtatgcggaccacccacttcctcttgggatcgcagaaggccctctggatgacctcaagcaaggccggcgcctggcgcacctggactttttcgacgacgaaggtccgtccggcgaggtcgaggttgttggtgagaaggaccgcgtgctccaggcctccagcccgacgagacttatctccacctggctgccgatggcgacgatcggaaccgcctcctgggccgccatggcctcgcacctctatggatag

SEQ ID NO: 13927 - DNA, 396 bp, Zea mays
  Peptide Sequence Number=SeqID_55706
atgtatcatctcactcttgcattactcaatgcaggaggaggagaagagggaggagatcaatttttgctaacccgaaagagcagggaggggcttccggctgatgccgcagggcaggcagccagcgacggtgagcgacggagagccaaggccggtggggttgtagctctgccccgtggagagtggagagaggttcacggagtgttggcgtcggctgcgatcgcggagcccacctacgccgcccactaccacgtcgggtccggcccagggtgtccgcgtccaccactggccgcggagcctgggcggaagctccgcagacgtgattgcctcaacgtctatgtcagcggggtcagcggggcggttgcatgggcgaaggacgagccgcggagcagcgagtaa

SEQ ID NO: 13928 - DNA, 855 bp, Zea mays
  Peptide Sequence Number=SeqID_55707
atggtgcagggcttcggcggtttcaggcgcgagcgtgagagagagaagaagggaggagagagaataggggagaggaaggagttagcagggggcggcggcggcttgggagaagccagccagggggagggcgcggctgaacgcgaggtgacgacagtgcctgtggctagggattcacgccgcggacgtgcacagactgaggcaccagggcatgatgcaaaacgatcaagagcagcacaggcggacacgaatggccacccggatgcgggtacctgggccgcgggctacgcaccacaccatgagtgtcggggtcacgccaggctgccgcttggggaggggctaggctcggccggtccgggcgggctccgggcatgtcgagcgagcgccaaaccgagcacggcaagtggcgaggaggagagggatggagagaggaagggggcgagcttaccacgaataaacgaagggcgggtccaagggaacttcaggcaagctcaggacttcacatcatgcgacgaactcgacgagggagaatcgcgggcgcaacttactctgagcggacggcgaggctcgaccgcgtcgtttggtgtggcgagtgtgctgcgcacggttgcgagagaaggcgagaggagtgaggaaccacacggagtggccgaggggcgcgtccacgacgccgtggagcgcgcgggggtggaacgtggcatggagcgcgcgcactgggctgcgtggggcatggccgagccatgggcgcgcgctagggcaccggcaggccgaccaggcgaggctgggggcacggcggctgcgcctatgcgcatgcgcgcatgcagaggcacggtggcggctggggagggcgcggcctag

SEQ ID NO: 13929 - DNA, 297 bp, Zea mays
  Peptide Sequence Number=SeqID_55708
atgaatggccacccggacgcgggtacccgggccgcgggctacacaccacgctatgagtgccggggtcacgccaggctgtcgcttggggaggggctgggctcggtcggtccgaacgggctccgggcacgtcgagcgagcgctaaaccgagcacggcaagaggcgaggaggagagggatggagagaggaagggggcgagctcaccacgaataaatgaagggcgggtcctagggaacttcaggcaagctcaggacttcagaccatgcgacgaactcgacgagggagaatcacgggcgtag

SEQ ID NO: 13930 - DNA, 516 bp, Zea mays
  Peptide Sequence Number=SeqID_55709
atgaatgttgtggtaacttcacacctacctgtctgtttatatagtgctgcagcatttgagaacaagtccccaacactcagccttgcttgtggcatatttttacaggtgcataaaggttcaacacaaaccaataaaaagatcaagttagggttcaaaaagaaaggagcaaaagaaaccgaaggatgccctggtctggcgcaccggacccagacagtgtccgctgcaccagggccgtacaagtccaaactcttcaccttcgggtttcagaagcgccgctccgctataattcaccggactgtccggtgtgccaccggactgtccggtgcaccagcgaagcagcgactaaccagcgcaacgatcgcctgcaaagctacagtgcgcggacagttcacgcagaagtcagagcagctgccagaggcgcaccggacagtgaacagtacctgtccggtgcggcaccagactgtccggtgccaccagaagacaaagctccaacggtcgaaaccgtcaaaaccctaa

SEQ ID NO: 13931 - DNA, 672 bp, Zea mays
  Peptide Sequence Number=SeqID_55710
atgcggggcccactgctcggtctctgcggcgcgcgccgcgtgcagcagaatgggtcgccgactgtctgggtccactgcccagcgtccatcgcgctcgcgtctccactgatcagtgggtccctgccgtcatcgctttccccacgggcgactcgcaacaaaccatgcgcgcgccgtgcccaaactgcggatctcgcgcgcggattccgggtggtgggtcaatctcgcgccgagttcggaacagacaccgccgccgtgaactgcggactcgaccccgagcgtggagctctgggctatataagtgtagggcgccgcaaacaccagctcgtgcagggaggcaaacgaagcagagagagcagagcgcggaggacagagaacgtgtgtgcatcgccgccgcgggcatctgcttacagctccaaatggaccccaatctgggcactgggcgatcgtgcgggtcacggagaagccattcgtgggcacaatcggtcggtggtgaccggagaccgtgtgaatccctcgccggagttggcaatccgccgtgcatcgcgggcgacgtcattgggctcccctcttcgtgccgtagatcgctttatcaatggccaggatttgaagattggggtacctcgactaatgcctgtctccaccgtgggatcctcggccaacgtttgggattag

SEQ ID NO: 13932 - DNA, 666 bp, Zea mays
  Peptide Sequence Number=SeqID_55711
atgaaaggcattaagacctcgaaggagtcaaaccactcctccgaggcctcgggggctacaccccggcgggaaaacagcgccgcctgcgctgctccgactgttgtgccacccgtcagggtgaggctgacagccaccaagaccggcctcaggcgccataggaagctccgcctcgcccgaccctcggggctcggactcgacctcgacctcggacgacggtctccgcctcgcccgaccctagggctcgaactatacctcgacctcggaagacggtctccgcctcgcccgacccccagggctcagactcaacctcgacctcggacgacggactccgcctcgcccgaccccagggctcggactcaacctcgacctcggacgacggtctccgccttgcccgcccctagggctcggactctacctcgacctcggaagacggtctccgcctcgcccgacccccgaggctcggactcaacctcgacctcggacgacggtctccgcctcgcccgacccccggggctcggaatcaacctcgacctcggacgacggtctccgcctcgcccgacccccgggcccggactcatcctcgacctcggaggagcctccgccccgcccgacctcgggctcggaccgaccatgtcacagggggggccatcattaccctacccctag

SEQ ID NO: 13933 - DNA, 402 bp, Zea mays
  Peptide Sequence Number=SeqID_55712
atggagaagacgacacgacaaactcgatggcggggttgtggccacgagactgatgtcagagagggggaaacggcgggaaaaaagctccgggcgggccagggtaactccagtgaggaattccggccaccaggagaagcaatcgaccgcgatagggctcgggctagttccagtggaggtgggggagcattatgggccaataccggggcactggacggggtcaggctggctgaacaccgtgcgagcacggcgagaaagcgcgaccgcacgctggcgaggccaaattggctacagggttttcaattcaaattcaaatcaagtttccaaattcaaactaattcaaacatgtgcaacaattcaaagaatattcaaactcagcatgatgcaacatgtcaagacccatag

SEQ ID NO: 13934 - DNA, 588 bp, Zea mays
  Peptide Sequence Number=SeqID_55713
atggcggcttcgaagcccatcttgtatagcgcgtggatcagctcctgctccttccgagtccggatcgccctcaacctcaaaggtgtggattatgagtacagggctgtgacaaggaacgatctagattacgaaaagatcaatccaatcaagtatgttccagcattggttgatggggattttgttgtttctgactccctggcaatcatattgtatcttgaagataaatatcctcaacaccctcttttgcctcaagatctcaaaaagaaagctataaatctgcagggtctgcttgatggcaccttaggctctaaccagagccttcagattgttcggaattacaccgacaagggatttaaagcaatcgaaaaacttctggaaggttgtgacagtaaatatgctactggagacgaagtccaactggcagatgtgtttcttgcgccccagatgtatgcaggcgtgacgcgcttcggaattgatatgtcaaagtaccctcttctggagaggttctacaaagcctatatggagatcccagcatttcaagtcgcggttcctgaaaaacagccggatgcgcctgcgtccccatactga

SEQ ID NO: 13935 - DNA, 168 bp, Zea mays
  Peptide Sequence Number=SeqID_55714
atggagcgtacttctacggtcgaagttgtagccgaggttgttgacgtggctcgtgccgctgctgctgctgtggaggcgcgttgtgtggccattgccgcggataaggaggccagcgtggcggtgcgatcctcaatgggtgcagaagatgtattttgtgaagcatggtag

SEQ ID NO: 13936 - DNA, 660 bp, Zea mays
  Peptide Sequence Number=SeqID_55715
atggccaagaaccccaaggcgcccgacacccgcagtggccgttctcccaccagaaggccccgaccacgccgcgccaaggcggtgccagaagcctcctccgcagctgatatcgaagacctggctccctcagtgcctggggccgctgcccctggcgctgccgcacccacggccctgcgcgcacagctgctccggtggtatgacgcgcaccgtagggacctgccgtggcgatgcgtaagcggcagcgaggaagagagggcgtacgcggtgtgggtgtccgaggtgatgctgcagcagacgcgggtgcccgtggtcgtcgcttactacgagcggtggatggcgcggtggccgaccgtacgaagcctcgccgccgctacgcaggaggaggtgaacgagatgtgggcgggtcttggctactaccgtagggctcgatttctgctggaggaatggatgatctctatctgtggtttatggtccatcttctttatgatggagaaacagggagcaaagcagatcatcgaaaaggggttgtttccttgcacggcgttagcccttcgtgaggttgtcccagttgtggatggaaatgtgatacgagtcatcagcaggctttacaccattgctgacaacccaaaggaatcctcaacagtgaagagattctggtag

SEQ ID NO: 13937 - DNA, 705 bp, Zea mays
  Peptide Sequence Number=SeqID_55716
atgaccgttggtggaggctgtctgtcgtatggtgcaccggacagtccggtgcacaccggacatgtccgtcgacagagccgaagtgaccgcagtcacttcgccgctcctctgaccggcctgacagaaggacagcgccgcctgcgccgctccgactgctgtgccactcgacagagtgaggctgacaggcagtcaggcccggcctcaggcaccataggaaactccacttcgcccgacccagggctcggactcgggctcagccccggaagacggcgaactccgctccgcccgacccagggctcggactcgggctcagccccggaagacggcgaactccgctccgcccgacctagggctcggactcgggctcagccccggaagacggcgaactccgctccgcccaacccagggctcggactcgggctcagccccgaaagacggcaaactccgctccgcccgacccagggctcggactcgggctcagccccggaagacgacgaactccgctccgcccgacccagggctcggactcgggctcagccccggaagacgacgaactccgtttcgcccgaccctagggctcggactcagccctggcctcagccgacggtctccgcctctcccgacccaggggctcggactcgacctcggcctcggaagacagacttgacctcgacctcggaggagcctccacatcgcccaacctag

SEQ ID NO: 13938 - DNA, 273 bp, Zea mays
  Peptide Sequence Number=SeqID_55717
atggcgccccacacgctttatgacgacagcggctctcagtccccttacggaagcaagaggacatcagcaaggactcgacagccccgacagctgtccttccgccaggctccagcgctcctccgacggccacgacaccacacgaaccgggtgccaaaacctctccggctgccacgatggcatgaacaatatgcttctgtgagggagatacaatggggcactttcaggaagtattcaggggatcgtcgcaacagcgtgagctggaactacaagtaa

SEQ ID NO: 13939 - DNA, 2391 bp, Zea mays
  Peptide Sequence Number=SeqID_55718
atgcctcatgagtcaatgccatgtggggtccatgctcgcagcagctttggccgccccgcctctgcctctgccgctctgcgtgcctcccaccacctcctctgccactggctaaaagccgagggcggagctgtaggagaagagccgaagagaagggagcagagagaagcgcaggagaggggaccgccgaccaccgagggagccgggcaagatgttcgacagtctgctcaactccaagttctacaacaaatggtacaggaatcctccctgccggttcgcaagcacgcgatcaagtgcacccggacccggctggatctgctgcggcggaagaagcaagcgatggtcaagttcctcaagaaggacgtcgctgacctcctcaccagcggccttgaatcgcacgccttcgcacggtggcatcggaccggacggatctacgttggtttttcgaagctgaatcgcaccgaggaacctatgacgaaatgcaggagacatgtgatggtgtttgtaatgatggaagggctgatcattgagatgaaccaagcatcgtgctatgatacgatagaagagtactgcgaatatattgtgaagcagctcagccacatgcagaaagagagtgaatgcccgcaagaagccttggaagctgtgtctactctaatatttgctgccgctagatttcctgatttgcctgaactgtgtgatctgagacatatattcacagagagatatgggagttctgtcgagccttttgttaattctgagtttgttcagaacctccagaataaatcatttactgatgaagagaagttgcgagtaatgaaacgtgttgctgaagaattctcagttccatttgatagcagggcactgcaatggaagataacttgtggctctcaaaataaacatgatcttccaaagaagagttcacttaaacatgatatggaacgagatggacacaaggttgataggcatgctgttcatgaaagaaaatcaaaagctatgcctgaaggctatgaacagaagcaggaaatgaacgtaaaacccaaagatatccatgtcgttcctgatggcattggccagttaggtgaaaaaaacagaaagaactactctgataaacctagtgagagaaggcacgtggataatcctttgcctcctttggacatgaaagaaaagaatggtcagaaagaaatgaagaaatctggcaaaaaggatagtgaccgtcggagggaactgatggatgtggaggtgttagacatcaatggcttgaaaaaacaggatgttggtgcgatgaaaccttccggtggccccgatcgtagttggggtcatgctgacctggggcttaaaactctgggcatagaaaaacaagaaattgatccaatttccaccttgaatggtaaagcagtgaacaagcctcctccttattctaagccctacagagcaccaatgggcgagaaggttgctgaagacaggcagcctgtgccagagaaggcaaccaatatgcgtcctccttatgttaagccaaattttgaaaaacatgcaaatcaaggcgcaaatggccacaagcagagtggcaccgaagaaacaatttaccagaagcgtgaaccaatctatgatcctgtctccgtgagaagtagggttccaagaccacctgcacatgctgatgaatatgctggaatggaggaaaagatggcaaaccaagcacctgatggccgaagaagacactcaagcaagaggaatggtgcccatgacaatcatgaccagagagttgcccatgttgtaccacccttagaaggcatgggggtcgatgacgatatcaacaacgcgaggccttttcatcgagttcctagcgagcgaagaaagcacaaaagcaggcagaacggatcgacgagcggcagtgactacaattgggccagcgaaggccacgagtctgatggcgacgatgtgaacacatcgatcgatttcggcaacctcctgccccgagcccccagttcgcacaggaaacacaggagccggagcgctgatcctcgcaaggcaggaggccgcggcgacgacgaggagaggatgatggacaagcttctgatgcactacagcaagaaagggctggacagggaggagcgcaaggagagagccaacaagtcccggaccctgttcccacgagacgaccagcgcggcgacggagccggagaactgtctagcaaaggaggaggagcatctgcacaccgccctgaaagagccgcatccttgccttcagaatccgcaagccccaaggcaaaggcgaaggcgaagccccctgctcggtccatgtccatgcagccagagatgtcgagggggaacgtgcatccgagcatgccggatttcgacgaactcgccgcgcgcatcagtgctctgaggaacgcgtga

SEQ ID NO: 13940 - DNA, 2151 bp, Zea mays
  Peptide Sequence Number=SeqID_55719
atgcagccactccagtattcatacaacaatagaaaatcagaaatgctacacatacctttacttggtgttagtcttgtgctattgctcttcttggcctctcctgccagctcctgcaaagaagaggagaagacatccctcttcgagttcctcaatggtctctctcaagcctctggcctcaccagttcatggcagaatgacacaaactgctgtctatgggagggtgtcatttgcaatggagatagaactatcatagacatctcactagctgctatgggccttgaggggcacatatcaccctcacttggcaatctcaacggcctgttgaagctcaacctatctggcaacttgctctccggtggactcccatcgacactgttgctctccagcagcattactgtcctcgatgtcagctttaacaagctcagtggagaattccatgagctgcaatccacgcctaacagcgcgatgaaggtaatgaacatctcgagtaacttcctcacaggatattttccatccaccacattggagggcatgaagaatctggctgctctcaatatgagcaataatagctttgctggggaaattccgagcacaatttgtgttgacaaaccattctttgtggtccttgaccttagctacaaccagttcgttggtagaataccctcagagcttggtaattgctctggtttgaaagtgcttaaggctggccagaaccaactcaatgggacccttccatctgagatcttcaatgttacctcactagagcacctctctttccctaacaaccatttgcaaggaacacttgatcctgagtgtataggaaaactcagaaatttggtcatccttgatcttgggtggaatggactaaatggcaagatcccgaattctattgggcagctcaagaggctggaggagcttcacttagacaataacaacatgtctggagagctgccaccagcccttagcagttgctcaaatctcacaaccatcatccttaaagacaacaacttccaaggagatctcaaccatgtcaacttctccaccctgtctaatctaaaatttttagattgcaggtcaaacaaattcactggaacaattccagagagcctctactcctgcagcaaccttattgcgttgcgattatctttcaacaaccttcatggtcaattttcatcagggataaacaatctcaagtccctcagattcctagctctcgctcacaatagttttacaaatatcagaaatacacttcaaatcctcagtaagtccaggacactcactctcgtgctgattgggggcaacttcaagcatgagaccatgccagatgatgatgaatttcatggctttgagaatctcatgggtcttggcataaataaatgtccactgtatgggaagttacctaactggctggctaagctcaaaaacttgcgagctttactattagacgataacaaactcagtggaccaataccagcctggattaatagcttaaaccttcttttctatctagacatatccaataacaatctcactggtgacataccaacagcactgatggagatgccaacgcttgaggcagctcactctgccccaataatacttaagtttcctgtctacctggcaccgtttcttcaataccgtacaaccagtggcttccctaaaatgttgaatctaggaaacaacaaattcaacggtataattcctccagagattggccagctacaggcactccttacactcaacttgagcttcaacaacttacatggggagatcccacaatcagtcggcaacctcaccaatctgcaggtgctagacttatcctacaataatttgaccggtgaaatcccttctgtgctggagaggcttcacttcctttccaaattcaacatttccagcaacgatctagaagggcctgttccaactgggggccagtttagcacatttccagactctagcttttttggaaacccaaagctgtgcggcgctacgctgatgcgccactgtaattcagcagatgcagttccagtcaccgatgtctccacggaagagtacgccgataaggtcatctttgcggtggcctttggtatgttcttcggtgtcggagtgttgtacgaccagatgttcctgttcagatacatttattttggctga

SEQ ID NO: 13941 - DNA, 336 bp, Zea mays
  Peptide Sequence Number=SeqID_55720
atggcgcggctggcgtcggcttcctggtggcctggcgcggtcgggcagggcgcgctcggctgcgcggcgctgcagggtcctgggcgtgtggggtcgcgcggaaggaagaacaatgaacggactccgtcaaaggaggccggcgacaagtacaaagaggaatccccttcctccaccaagtatactacttcgaagcgccaagaacgcaagaagtatagtaagatacctctacgctatcctcgcattcctaaacatgctcctttacttccagtaccacaggtgggcgacgaggactatgactcggatgaggccgcccaaataaggcattttaattcctaa

SEQ ID NO: 13942 - DNA, 441 bp, Zea mays
  Peptide Sequence Number=SeqID_55721
atgtcgcctcccgctggtgtgccgcccctcctccagctcgcggcagcactaggcgagctccgccagcgcctgcccctacacgatcgccatacccagaggtggcgagggcgcgacatcgccaacaccgctgggggcggcgggctcggaagcccgtacaccgcgttggtcgcggcaagctccatcgagggccaatattctgttgtgagatctgatagcagcggctgcgctgagctgggtggatctggatctgggcggggttgtggtttggatcagggagtggccggctcggcggcggcggcgtgggtggaggcaaagccgatgaggcggtcggtgccagggtcgcccacatctgcatccatgctcacgtctcttgcaaccgctgccgctgaaaccctagttatctcgcacacagcagccgtcgggaaaggttggatagagtag

SEQ ID NO: 13943 - DNA, 537 bp, Zea mays
  Peptide Sequence Number=SeqID_55722
atggccacggatgagttccatgtgcacctgcgacgcccccagaccacaccacgtgaccgaacgtcggtgaatcaggacagcgccgcctgcgccgctccgactgctgtgccactggacagagtgaggctgacagcagccaagtccggccttgggcgccataggaagctccgcctcgcccgaccccagggctcggactcggcctcggcgccgaaagacgacgaactccgcctcgcccgacccctggactcggactcggtctcggccccggaagacgaagaactccgcctcgcccgaccccagggctcggactcggcctcggccccggaagacgacgaactccgcctcgcccgaccccagggctcggactcagccctggcctcagccgacggtctccgcctcgtccgacccaagggctcggactcgacctcgacctcggaagacagactcgacctcgacctcagaggagcctccgcctcgccctacccagggctcggaccgaccacgtcacaggaggggccatcattaccctacccctag

SEQ ID NO: 13944 - DNA, 315 bp, Zea mays
  Peptide Sequence Number=SeqID_55723
atggcggacctgcctccccatccacaccctaatcactcgctcctcatggcctccaccatccccttcgtgggagctgcatccatggtcgggccatcctcccttatcatcggcccctactcagtatcgttcctcctccccactctcgcctctgcctccttcagccgcgtcgtctccgaggacaaaaggatgcagctcctggataaacttaagtacatggagcgagaattggtagcaaccaaagggtgggagagtgcattacaggaacgactactaaaggagttgggtgactatcaggggcgtattgtggtcaagtaa

SEQ ID NO: 13945 - DNA, 177 bp, Zea mays
  Peptide Sequence Number=SeqID_55724
atggacgagatcatgaacaaggtgggtgtttactggatggggccaccggccaacaaggagatctcggcaggcgacgaccttgaagtcttcactctcgaccagtgtcggggatggagtggaatggctggtgaaaaagttgaagggcaagatgcagaagccactggtggacctgcttag

SEQ ID NO: 13946 - DNA, 396 bp, Zea mays
  Peptide Sequence Number=SeqID_55725
atgaccatcatctatagacaactgttgacggccctttgtcgagcatcgccgttcgctgagtgttcagtccttgccgagtgtctatctgtgtcgagagtcctgctctcggtaaaggtggtcattaccgagagtgtgacattgccgagtgtggcactcgacaaagtattttttaccgagtgcccgacaaaaagcacacggcaaagtgccaagcactcggtaaagagccagattccggtagtgcctggccggcccacacgggcagatgagcgtgtagatctcgacgcacatggagctggcgtcgatggagaaggagatggtgcacacccgctgttgcgccatcctacaagtactgaaggacgtcaacgcggtaaaccgacaccgctaccagggttgtag

SEQ ID NO: 13947 - DNA, 1413 bp, Zea mays
  Peptide Sequence Number=SeqID_55726
atggctttttatggtgttacacctagccgagctattgctcggcgcctccgcctcgtccacaccacacagccattgagtccacttcgctcactcaccgtcaaatccacacctcaaactccttcccttcaagaatgtcagattatccactgcggcctcttcctcctctttctccgcccctcccaccatgattgccacccatctctccccagccctcaagcagtacctcccttccttaagataccattagtgcctttgcggagcgacactgttgctgtttgctctctcagctgtagtaaaaggcgcagtttgggagcaagcgaagttgtcatcagacaggcagacagccgaggccaaagcgcagcgcaggctgtcacctttccccatcccctacgccccccttcctcctgctcccgcccctccttcgcccctcaatcaatcacaacgccacaaccgcaccccgcgaaccctagctcgcagtcacactacgcgccggagccccggacgctgagcaggtgcctgctctatctcatgcggtggctgccgcgctgccgccgccagacccgatccggccaaccgtgccaagcgccccccggcaatcgatgtgaggcaccgcgggaggcggctcaggcttgggcaggctgtggggagcctgtccgctcactgcgtcgtgcgcctgccttcctctcacggttcgcgcccgacgaccccgacctcttccgcaaccgccccgtcccggaccgcctgctcgtcgtctccgccggcgtcaccgccaacctcgccttcaccttcctcgtggtctacgcgcaagcgctcaccgtcggtgtccccatgcaggcgcagctccccggggttctcgtgcccgaggttcgcccgggctccaccatggatgccgtgcaggcagcagagagggcactgaccgaggcgaggccaacaagcccagcccgatcccgcggcatccacgtctcccagttctctatcggctttggcccggcgctcgcccgcttctgcctcggccctgtggagtacgcgctccgcgccatcccgctgggcggctacgtaggcttccccgacgacgacccggagtccgggttcgcgcccgatgaccccgacctcctccgcaaccgccctgtcccggaccgcctgcttgtcgtctccgtcggcgtcaccgccaacctcgcctttgccttcctcgtcgtctacgcgcaggcgctcaccgtcggcgtccccgtgcaggcgcagctccccggggttctcgtgcccgaggttcgcccgggctccgccatggatgtcgtgcaggcggcagagagggcactaaccgaggcgaggccaacaagcccagcccgatcccgcggcggtggcttggccatggatgcggacgacacggaggcaggcgggcgagtgatgaggatgtga

SEQ ID NO: 13948 - DNA, 933 bp, Zea mays
  Peptide Sequence Number=SeqID_55727
atggagggttctaacttgaaaggtttggtagatgatgaaattgtcgtgaagacaggcaaagctgcaggcatcggtttagcttttggcagtgtgtatggtgcactacattctatgttgtttgatggacctcaggttggcaataatgtcaagtatccccagctgatcagaactaccaaggctcttgcaaggtacaggatgaagaaggacatcattaatggtgctgttgcaggttttgctgctggtgcttctctgggtttcagtgctggaagcttccgggcagcattcttttcaggctctgcagtcgctttgacatctgtagtgctggataggttcttggatagccgtaaggatcaggcagggtggccaacgtgcagggatcagcttgtgtccatctccaaggagcaggaggagctgcgcggcagtggttcgggcggagggaccatcgtgaagcgccagctgcacaacaacttcgcggggctcttcttcgggctgcccttcaccaagctcaacccggacttcgccctgacagtcaaggacaagttctcgccggaaagcaagctgctggttgtctgccaggaaggtctcaggtcagcagctgctgcagatgcactggagaaagaaggcttccaaaatattgcatgcatcacatcaggtcttcaaacagtgaagccaggaacgtttgaatctgtggggaaaagtgagctgcagaacgcggggaaagctggccttgtgaccatccaagggaagatttctgtagtccttgggactgtattgattagtaagattattggattaccctctttcagagataatcaaatgtaccagctcatcaccctatcttatgggcgctcatgtgcaggtgcctacctgtttataacattcttcccagaccaggctgagaagctttttgacttggctggcatcagcttgtga

SEQ ID NO: 13949 - DNA, 942 bp, Zea mays
  Peptide Sequence Number=SeqID_55728
atggcgaccgccatttcctctctagtaactcctccgaccctccaccgccgctgcctgggccctgcctgcgtctccgtctccgtgtgcacccctatccgcatctccttccggcccgccgccgcgcctcaggtgtcgcgccggggctcggcgctgcgggtgtccgcctcctcggcggtgctcgaggcgccagaggcggtggcggcgcggaagctctacgtggggaatatccccaggaccgttacaaacgacgagctccgcgacatgttcgctgcgcacggcaccgtcgagcgggccgaggttatgtacgacaagtatacgaatcgcagccggcggtttgggtttgtcacgatgagcacagcggaagaggccaatgctgcagttgaggctctcaatgggactgaggttggtgatagaaaaattaaagtgaacgtcacagagagcttcttaccgaacattgaccgatcagcaccagaaccagaggctctgtttgtagatagtcagtacaaggtttatgttggtaatcttgcgaagactgtaacaaccgaagttcttaaaaacttcttctccgaaaaggggaatatcctcagtgcaacagtctcccacattccggggacctccaagtcaaaggggtatggctttgtcacattctcttctgaggaagaagttgaagctgctgttgctactttcaataacgcggtttataaggcattaaacatgtccggtgtaacaccggatacctcgcggaacatgtgtccggtgccatatcggtcattgcaccggataggtcattgcaccggatacctggagttcggtgccatatcggccattgcaccggatacctggagttcgacggtcggcaatggtaaatttcaacatctagctgatatggacacaccaggcgtgttcggtgggatcataaaagtgattgatgagtacacataa

SEQ ID NO: 13950 - DNA, 426 bp, Zea mays
  Peptide Sequence Number=SeqID_55729
atggggaacggtccttaccttgggatgctgttttgggggtttggcacaacgtctggggctccaagcagacggcacgacgggcgcggattaccagcgagctcaggcggcggtgactgtgcacgcgagaggctaggtgtgagtgaaatgaggcagggagagagagtgagtgcgctcagggctcaaaagggagctagggaacatggggcgcgacatggcctgctttctcggtgtgcgtgcgcgccgggggtcaacggcggttgtggggaggatagagctgacatggcaggtccacggtgcagagacgagggtgcgcaagggggaacaacgctgacaggccaggcctacgacgcagaaagtggggaagcgcacgcggctggggaaattggcgccgacagaacttcttacatggatcaagtgatgtgttga

SEQ ID NO: 13951 - DNA, 747 bp, Zea mays
  Peptide Sequence Number=SeqID_55730
atggaggcccaggcccacacgtcatgcaaccggctcgccggttgctacgtgcgagcaactgcaccgcccctcgcgccactaccgcgcctcctcgactacggaaccggcaggagaagcaagcgacgcttcgccttcgccataataaccgcgtcaaaaaagggaccgggaaagggggataccccgaaaaggatccttctccgtgaaggaaacaggccccgagcctccctactgatcagaggttcaaaggctggcccctcggaggggttcaacggccgcctcagagcgcttgggttctgcgcccactactggtcagaggttcgatggctggcccctcggaagggttcaacggccgcctcaggccactcgggctccacgcccactactgatcagggcgccgcctgcgccgctccgactgctgagccactcgacagagtgaggctgacagcagccaagtctggcctcaggcgtcataggaaactccgcttcgcccgaccccagggctcggactcgggctcagccccggaagacggcgaactctgctccgcccggcccagggctcggactcgggctcagccccggaagacgacggactccgcttcgcccgaccccagggctcggactcgggctcagccctggcctatgccgacggtctccgccttgtccgacccgggggctcggactcgacctcgaccttggaagacagactcgacctcgacctcggaggagcctccacctcgcccaacctag

SEQ ID NO: 13952 - DNA, 231 bp, Zea mays
  Peptide Sequence Number=SeqID_55731
atgcctgagtcagagtccgttcggctgcctcggaggttgctgccttgttcccttgccggattcgtagagcctgaaggcatggagagcgatagaggactgaatggaggcggccgcgccgctggcaacataggaaacgacagtcgcgcaggagaggaaaccgataaaattgatatcatgcagttcaaagttactaatcacgaggacattgtagaaccaacaccacaatattaa

SEQ ID NO: 13953 - DNA, 1450 bp, Zea mays
  Peptide Sequence Number=SeqID_55732
agaaccacagtctctcaccctcaggcgatcgctggtgtcgtctggtgtcagtgtcaacagcagctcacgaagccaagggaggagaagaggagagcagagcagagattcggaaatgctatgtcgccgtctggctgttgctgcagtagtggcctgcgtgactgggtgggagcggatcgagcagaggggaagaggaaggaatataatggctgagcgggaggtcgtcgaaggcgggacgacgacgggaggcgggctgtggcggaggtatgcgccgcacgtccagatggtgctggcgcagctgtgctacacgctcatgtacttcatcaccgaggccgccttcaaccagggtctcaacccctacgtctacatcacctaccgccatctgctcgtcgccgtcctcatctggcccttcgcatactacctggagaaggggctgaggcctaaaatgacgctcatgctgttcgtggagatattcgtgctctcccttctcggggtgagcttaactctgaacatgtacttcacgagcctgaagtacacgtccccaacgttcgtcacttccgtggtgaacaccatcgcctcgatgacgttcgtcatcgccatcatcctcaggatggagatcgtggacgtgaagagcctacgcggggtcgccaaggtcgcagggaccgtggtgtcgttcgccggggtgaccaccatgactctgtacaaaggagcggccatcacgagcctctggaagtcgcctgttcagatcgccggcagcggcagcggcggcggaggcgtcgcccacgacagctgggtgaaagggtcagtcctcgcagtggccagctgcgtgtgctggtccatctggtacatcatgcaggcgtcgtctctgaagaggtaccccgcccagctctcgctgacggcgtggatgtgcacggtcgggggcatccagtcgaccgtgttcacgctgttcatgcagcacgagccggaggaatggcgcatcggcttcggcgtcaagttctggagcatcgtctactctggcctcgcctgcaacggcttcacggtgttcgtgcagctctggtgcaccgagaagaaaggccccgtcttcgtcaccatgttcaaccccctctccaccatcatggtcgccatcctggcctacttcatcttcggcgaaaacctatacgtcgggagcatcgtcggaggcggggttgtgattctgggcctctacatgctgctgtgggggaaggagaaagaccaggagcggggcacgggcaaagagcgggaacagctcgagacggactgcgagaagcaggcgaagaaggtcagcgactgtgtctacgaagcgcccaagacgacgaaccggcgcgatgagggactgggcgccgtcaatcatcgccacggcgctggttcgcgcctcctgtgcccgggcggcgtgctgcaaaatgcccgggccggcaccgccccgtcgacctcatga

SEQ ID NO: 13954 - DNA, 852 bp, Zea mays
  Peptide Sequence Number=SeqID_55733
atgacccgcgtcctcctccccctgcttctgctgctggcgctgcctggtgcgtatgcacgcccggcgcggcagtatctgggacagtgtccggggctggagtacgggctgccgccgttcgccgccgcgctccgggcaacctgccccgtctcgacggaggggtactggcccccctacgagttatttaagcgtttgatgcacatgggtcctagttggaatgactcaaaaattcattcagtagttgttagtggggaggagcttctgaggatgttggatggcaaggaaaagcacacggctgtccttttctatgcatcatgcattttgtcaaggtaccatgtccgtgcactgccttccataataatagctcgcaactcacacgtgttctggcctcttggttccaaagatctcgactccctggtcagcctttacactgctgctacaggtgaagagccagtggcatacatcggtagccggaagtggagcgcagcgcaaagcacagacggctatgcaaaggcttggaacagctcaattattagtgaaacagtgaagcgagaaccctaccttgcattgagcatcctgtttatttgcatgagggtgttctttttcttcttcccaaagtcatttgccctcatccaagacttgtggaccggataccgcgagcagatcaacctcggaatcctcggcagattggcccagctgcttgaatgcgtgcctcacgccgtggatgtgaggaaggtgtggagcaagttgaggctcgtggttggagctaatgagaacggtagggtctgggcagccctaacttcgttgccccttggtgggcgaccttctccgatccacgggttgctgttggactga

SEQ ID NO: 13955 - DNA, 564 bp, Zea mays
  Peptide Sequence Number=SeqID_55734
atggcgtgtgaccattcacatactacagtctcgaggctaagcctagagatgaggaaggaagaactgctgcctgtggaggaaaagatctcggaattaagtgaatcacaatcagagcttctagggaggctccgtgggcttaaggaggatttgctgagttggaggagtaatttagactcccaagtgacgaaatacaaagtgggatcttttaggattgtaaaggaactctctgacatcaagagtgcactcaataatgaaatagagcagcttcgctcagatttccaagagctgaggaccacccttaagaagcagcaggaagatgtgtcacttagcttgaagaatttggggcttcaagatgctaccgaaaatgatgggaacaaaggaaatggagacggcacaaatgaggtcttgtcagctaacttggggaacttgaaactggatggttcttctgaaaactatgatgaaagcagagagtcaaaggaggacaaggtgctggatggttcaaagcagtctcttcgttgcgagggaccaaacatgctctggcatatagaacatctgcaatgctag

SEQ ID NO: 13956 - DNA, 327 bp, Zea mays
  Peptide Sequence Number=SeqID_55735
atggtgctcaccttgggacggcgctcgggcgagctcggcagcgtgaacagtggtgacaggcgaggcaacgacgacgcagagcagttgacggggtggggtggtgggcccgggacgacgtgggcgaacgcgccgcgtgggagaaacgatttgggtcgattgaggggggagggaatgacaggtgggggctgggcgctaggcgagcgcgccgccgacggacgggctcgtccgatagaggagggggcgccggatgggccgcaggacgaggactgggccacacgctcgtggagggggatgccggtgggccgtgggacggggcctggtcgatag

SEQ ID NO: 13957 - DNA, 1320 bp, Zea mays
  Peptide Sequence Number=SeqID_55736
atgggatctgctatcctcaacagcattgcccccgaggagcctaaagtggtcgtgccagagtacggtgagacggctgatatccaggacaaggaagttagtatggaacagctctgctccataagcacctatgatcagtggacgccactctctgtttctggccagcttcccaaaccacgctataagcatggagctgtggtgattcagcagaagatgtatgtctttggtggaaaccacaatggccgttaccttggcgacattcaggttttggacttcaaaactttgtcatggtcaaagctggaagctaaatcacaagcagaaccatcagaatcagctggagcagttccgttttctgcatgtgctggccattcagtgtgtcttagttcttatttcttatgcgcatttatgacagttaaggagtttgatccacaaacctgcacttggtctaccttgcgtacttatggaaggtcacctagttcacgtggtggtcagtcagtgacccttgttggagacactctagtggtctttggcggtgaaggtcatgggagatctcttctgaatgatctgcacattcttgatcttgagaccatgacttgggatgaatttgagaccacaggcactcccccttccccaaggtcagagcatgctgctgcttgctttgcagagcggtatcttctgatatttggcgggggttctcattctacatgtttcagtgacctacacctccttgacactcagacaatggaatggtcaagaccaaagcaacaaggtgttactccagaatcaagagcaggacatgcaggtgtaactattggagaatattggtttattactggtggtggaaatagtaggaaaggtgtctcagatactcttgtactcaacctgtctacgtatgaatggtcagttctcactaatcttgaggcccgtgcaccccctgcttatgctctcaaggcaagtctcaaaccaagtgtcccatctcaacaaataaatgaatcagatacaaatggcttttctcccttatctgtggcagaaaattctagcaggaaagtcatatttgaaattgaggaacttaaagatgaaaagcctggcaatagggcagataacagcaaaaccttgggacaagtagttatggttgaacaaaacgaaatagaaaacagacttaatcaagagcacttgcagagtctccgcctgaagcaggaactaactggtcttgagaacagaaatgcagaacttactgaggcaagctatatctcacttaccaaattgtgcaaaactgcagagaatgtagataatatttacttacaggctactactaatgcttaa

SEQ ID NO: 13958 - DNA, 273 bp, Zea mays
  Peptide Sequence Number=SeqID_55737
atggtcggtcacaaagatcacaacaatgttgccccagatatcatcacaaggctgactaactcgccagccgctgagtatgagaaattagaagaccacatgaagatgatggacgagacgtttcaacgacaaaaggctcagatagaaaagatgacggagaagtggtacctctcaaaattcaggatagatcgccaccagaaggtcgtcaaagagagggaaataaagcacgattccctattagccttgctgcggcagctccccactgcactaaaataa

SEQ ID NO: 13959 - DNA, 1530 bp, Zea mays
  Peptide Sequence Number=SeqID_55738
atggttcgcaggcagctgagagtgctgtccgctctggatgtggccaggacgcagctctaccatttcatggcgatcgtaatcgccggcatgggtttcttcaccgacgcgtacgacttcttctccatctcccttgtcatcgacctgatctcgttccagtactacgatggacacatgcggagcgctgtcaaagccgccatcaacggcatcgccctgtgcggcgccttgccggggcagctcgtcttcggctggctcggagacaagatgggccgcaagcgcatctacggcgtcacgctggtgctcatggtggtcacctccctcgcgtccggcctctccttcagcaagcgccgtgggaagaacgtggtcaccgtgctctgcttcttccgtttctggctcggcgtcagcatcggcggcgattacccgctctcggccaccatcatgtccgagtacgccaacaagaggaggcgcggcgccttcatcgccgctgtgttcgccatgcagggttttggcaacctcgcagcagggatcgtaggcatggtggtgtcggccgcttttacgaacagtgctccatccaacgccgacttcgtctggcgaatagttctcatgttcggcgccgtaccggctaccctcacctactactggcgcatgaaaatgcccgagacggcgcggtacactgccctagtcgccaaggacgccaagaaggtagcctccgacatgtccgccgtcctcaacatgcacatcgtcccggaggacgaagcagtgtacgagctcgcccggcacgatcagtacggtctgttctcggcggagttcctacgacgccatggcgcccacctcgtcggcaccagcatgtgctggcttgctctggacatcaccttctactcgctcaacctgttcatgaaggacttcttcaccaaggttcggttgcttggagctccgcaccagggcgacgagccgttcaagagaatggttcatacaactgcaatgcatacgatcctcgtgctctccttctcgctaccggggtatttcttctccgttgcgttcgtcgaccgcattggccgtgtcaggatccagctgctagggtttgccatgatgtctgccttcatactctgcctcgctatcccttatgatcactggactgatgataaaaacaataagtacggattcgctgtaatgtacggcctcaccagcttcttcgccaatttcggtcccaacaccacgacattcataatcccagcggagatcttcccggcacggctacgttcgacatgccacggcatatctggggcattcggtaagctcggcgccataattggcgtgtttgccttcgtttacgccgaaaaacataacaacaaccgaagcatgctgttcgccttggttgggtgcaaccttgttggccttgtgtttacgctcctcttgccggagtccaaggggaaggcactggaggagatcagcggagagatggaggaacagcacccggaacaggacgcggcagctgttgctgcggcggagtatgtaaatgtggtgcctgtttag

SEQ ID NO: 13960 - DNA, 348 bp, Zea mays
  Peptide Sequence Number=SeqID_55739
atgtctgctcaagcagaagctcacaaagccgaagtgcaagagctgaaaaggaaaattgccgaagcaactgaaaattttgaagttgaagtagtaaagcatgagatatgcgaaattgaaagatcaagagcacaaaagaatgttgatgagcttcacgtgggcaaagaaaaatgctatgaacaaaaattcattcgtgttgaactttcacctccaccggagcaatacaaccctgaagtcgacccggccttgaaggaagcgctagagatgattaaaattgctaatgaagatgttgacgaagctgtgaacagactgttaaacgaagccgccgagaaagtcttgaatgaagactaa

SEQ ID NO: 13961 - DNA, 1876 bp, Zea mays
  Peptide Sequence Number=SeqID_55740
atggccgtccgattgcggatcaatgtctttgagtttaagacgctgcaagccaatctggggaaacaatctgcacggtcagcgaagaccacggccatgcgcaacaacccgagctgggcgccgtgcccacaactcagtgtaccgagcggcgcgatcgaaggtggagccgtccagccggtgaaactgaccccgcgggcccatgagtcggagtttggccagacatggctgagactggcgggtggggaccgcctgtcagtgggcgtgaggcgtgagcggggcgcgctgggcagccccttgcgctgttgcttcttcggcggcatgacgaaggagactaaagggcaggaaatggttaggaagtatggagaagactatgattggcgaggagcacctaccatcgacgctgaagttgtgcattctattggaggaaaagcccatgaacggagtggcttgcaacaacagctcgcgagaggaagaagaccaatggctcttaggcggcagttgagagtactgtacgctctggatgttgccaggacacagctctaccactttaaggcaaccgtaatcgcaggcatgggtttcttcacggatgcctatgatttcttcgccgtctccctcgtcatggacctcataagttacctgtacttcgaggaacagattcgtcgaggcgtcaaagccatcatctacggcatcgctctgtgcggcgccgtgccggggcaactggtgtttggctggctgggcgacaagatgggtcgcaagcgcgtgtacggcgtcacgctggttctcatggtggtcacgtcgctcgcgtcgggcctttccctttccttcggcaccaacgacaacgaggcggcgaacgtggtggccgttctctgtttcttccgcttctggcttggcttcagcatcggcggcgactatccgctctcggcaaccatcatgtccgagtacgccaacaagaggagacgcggcgccttcattgcggctgttttcgccatgcaactgaagaccaatccaagaaggaacgctaacttcgtctggcggatcgttctcatgttgggcgcggttccggcgatcttcacctactactggcgcatgaagatgcccgagacggcgcggtacaccgcgctggtggccaaggatgcgaggaaggcagcatcagagatgtcctccgtcctcaacatggaaatcggccaagaggacgaagcggtcagggagctcgtccggcaggacgagtacggtctcttttcggtgcagttcctgcgctgccatggaacacacctgctcgccaccagcgtgtgctggctcgccgtcgacatcaccttctattcgcttaacctctacatgaaggacatcttcgtcgacgtcggtctgattgaccctccggaaaaaagcgacttgttcaagaggatgaccgtcagtacgttgctgcacatggccatcgcgttcggtggtacacttccgggatacttcttcaccgtcgcattcgtggaccgcatcggccgtgtcaggattcagctactcggattcaccatgatggccgctttgacagccagcctcgctgccacttatgatccatactggaaacaacagaaaacaaaacggcgcaagatagggttcgcagtcttgtatggcttgaccaacttcttcaccaattttggtcccaacaccaccactttcatagttccggcggagattttcccaacacggatgcgcgcaacgtgccatggcatagccggcgcatttgggaagataggcgctatcatcggcgtgtttggcttcatgttcacgatggaagaacaccacgtcgccccaagagcgctgtgggcactatttgcctctaacctagtcggccttgtgtttaccttccttctaccagattccaaag

SEQ ID NO: 13962 - DNA, 324 bp, Zea mays
  Peptide Sequence Number=SeqID_55741
atggaagagggggaaggaagccgcggcggtccctggcccaacggtggcggctacggtgcttgtgctcggatgtgggcacaggtggatgagatgagggggtcacgacggtcgtcatttatggcccaaggagcagcggccccaaccggataccacgcgccagagcgcggagtccgccctgcaatcgccccgcacgaagcggagtccgttcggggagcgcgcgaggaagacgggaaggaggaagaagctgacgaggcgggcccacgcgacagcagcacgcgggtgacgaccagggttgtgcggaacaaggaaatgggccggatttag

SEQ ID NO: 13963 - DNA, 183 bp, Zea mays
  Peptide Sequence Number=SeqID_55742
atgaccacgtaccttcaagccatgtcaactagagatagaaatggaaacaatattaaattacaaatgtaccttcggcttgacagaagcccgagttttgaaggtacctgttcatacgtcacacttggaaagatattgttaaatcacatttttgaggacccttcggaggacgaaggcccccaatag

SEQ ID NO: 13964 - DNA, 408 bp, Zea mays
  Peptide Sequence Number=SeqID_55743
atggtgcccatcgagactaacatgttctcaaaagcgcaaattgcagcgcctaagagcaaaagaaagcagggaaaagctaccgcgaacagtctggctccagcagccagaccgtccgaaccaggcgcgaactatttaacccgtgagtctggaccatcagcacctcaccgagaagcctccaacggcacgccaatacctgttgatgaggatgacttactaggagaggacctggtcgactacagagcctcgcccgagcacctacgtattgatgttaatgtgattacatttttagctgattacacgattaatggtgacgatgaacttgcagttgctcaatttgattttagtcctaaagacgttgtcttcaccaaaccaaaaggatcagtcaatcattgtcacacccggatttaa

SEQ ID NO: 13965 - DNA, 99 bp, Zea mays
  Peptide Sequence Number=SeqID_55744
atggcgaaggatccgggagttcttcaacggccgagcgtgagggaaaggagagagctgaccgcgcgggacccgcatggtggtgtctggggtttcctttaa

SEQ ID NO: 13966 - DNA, 264 bp, Zea mays
  Peptide Sequence Number=SeqID_55745
atgacgaagctctcctacgcacagcttcgggatcaactcgtccttcgtcccaatcacccttcatctcgatcaggcttcgtcccgaccatgctctctatatcgcatatgcttgtgatccgagtccgaaggaccttcggaggacgaaggcccccaacaggtacgttaattaatcacgtgatgcggaagacaacccaagtcgaccccaagcacgggctaatctgcatggtgatgttgatggacgaacctgaagataggatgatctga

SEQ ID NO: 13967 - DNA, 1698 bp, Zea mays
  Peptide Sequence Number=SeqID_55746
atgggggacgtgctccatctcggccgcgcggtgcacgcgcacctcgtcaagacggcgctcaccagccatacgctcctatcaaatcgtctcgtcgcgctctactcctcgctcccgtcgccggccgctgccgtcaaggccttctacgaccttccacacaagaacgcgcactcctacaacacgcttctcgctgcgctcttgcgcaggccggacaccctccccgacgccttccgcctgttcgacacaatgccggccgactcacgcaacctcgtctcctacaacaccctcatgtcgtcccttgcgcaccacggccggcaggtggaggcgctccgcgtcgttgcccggctggccagggacaggttcttggggccaggtttagccatggatcggttcacggtggtcagcgtggcgactgcatgtgcgggaatcggagctgcgaggccgctgcgggaaatgcacggtgcggtagtggtatcagggatggagttcaccgtcatcatggccaatgccatgttgaacgcctacagcaaggctcggagggtggaagatgcgaggcatttgttcgatcaggtcagcatccgagacaatgtcacttggacgtcgatgatttctgggtactgccaagtgaagaagctccatgaggcagtgcaggtgttcgatatgatgccagataaggataggattgcatggacagcgctgatatctgggcatgagcagaatggagaggaggacaccgctcttgagcttttcgaacagatgctggccaagggagtatcaccaacgccttttgtcttggtgtcagctttgggtgcatgtgccaaacttggacttgtcacacgtgggaaggaattgcactgcttcatcttacgccggaacattggctctgtccctttcaacattttcatccacaatgcactcgttgacatgtactctaagtgtggagacatgatggctgcgatggcagtatttgactggatgcctgagagggactttatctcttggaactcaatggtcacggggttctcacataatggcctcggaaagcagtcacttgctatttttgaggagatgctggtagctggagttcgtccaactcatgtcactttcctcgctgtcctcacggcctgcagccattctggtctagtatctaatggacgactcgttcttgaatcaatggaggaccatggtgttgaaccaagggctgaacactatgctgccttcattgatgctcttggtcggaatcaccagctggaagaagcgactgagttcatcaaagatttgccatccaggattggtcctggtacagctggatcctggggagctctcctaggtgcatgtcgccttcatggaaatatcgagcttgcagaagaagtggcagagtttctcttcaggttagagcctgggaacagtggtcggtatgtcatgatgtcaaacatctatgcagctgcaggacagtgggatgatgcacgtcgagtcagggggctcatgaaggagaagggccttaagaaggatcaggcttacagttggattgaggtgcggagtgcaaagcatgtattcgttgctgatgacatctctcattgcgaggcagacaagatatatgagatgttggggaagcttctcgaccatatgagcgtagcagaggatcctactgaacaccagcttaatttttgtttagacttgagtggaactgcccatgtataa

SEQ ID NO: 13968 - DNA, 744 bp, Zea mays
  Peptide Sequence Number=SeqID_55747
atgggaggaggagccaccaacctacctccgggcttccatttcttcccttcagacgaagacctcgtcgtccatttcctccgccgcaaagccgccaacctcccgtgccgccccgacatcgtcccgacgatcctccttcaccgctacgacccgtgggagctgaacggtttgcgttctcacccatatatcgctatagctcacagcgtgcgcacggcgctgcaggctgggaaccagtggtacttcttcagtagccacgcccacgcccacgcccactccgcggcggggcagaccagaacctctccgtccgggtactggaaccccgccggcgccgatgaaacagtagtactagcgagcagcggccgtgtcgttggcctcaagaagacgctcgtcttctgcaccggagagcctttcagagggttcagaacgaactgggtcatgcatgagtaccaccttcaggacgggccggccgggtgcaatgtcggcgggagcagcggcgccaccaccccaagtagctccagcagctccggcagcagcaggagatcgcagaggaagagagttcactcgagcacggagtcaataaacagctgggtgatatgtagagtgttcgaatcaagctgcggttcgcaagtgagcttccatgacgagggcacagagctttcgtgcttggatgaggtgttcttgtctctagacgactacgacgaattgcaggagagtcactacacagtaataaaaagtcataagttctaa

SEQ ID NO: 13969 - DNA, 267 bp, Zea mays
  Peptide Sequence Number=SeqID_55748
atgacattgacacagttcaatctcatatctgtcaagatcgctgatcttacagctaagttactccgcaaaactattcgaacttggaacggggcaaagacaattagttcgcttaagatcggagaaggtgggtttgggtgtgtgtacaaatgtaccctccagaacatgacgttggcaataaaggcgttagaatttgatggtttacaggggcaatcacagtttgaggaagaggctgctatcctgattaaagtccatcctaagaaaaactaa

SEQ ID NO: 13970 - DNA, 390 bp, Zea mays
  Peptide Sequence Number=SeqID_55749
atggaggtctttcctcatggtcttccctctttctttttaactgggaacacaattactcatggtgcaccaggtatcaaaatgggtcaaatagatagaattgaaaaaggattgctggtgcaggatgcggaggtccaaaaaccgttgctttcagttttcccaatgatgaatggattaaaaatgaacgaggaacttccatggttatgcttaaaaacatttcagaagccaaggtgggatgaacagaaggaatatgttgatttcgagccatattatacacatatattctgtcatcaatggtgccatggaattggagttctatcacccttccaagtggttaaaaatcaacagttagaatggtacattccgcccttgaccttgtccattgaatcatag

SEQ ID NO: 13971 - DNA, 315 bp, Zea mays
  Peptide Sequence Number=SeqID_55750
atgccgatgagcacagatctaaggaggaggcatcagtcatgtctgcctgcaccgccgacgtcgagtggaagcggagcgaggacgaggaagagttggagaaggatctggggcatgggcatgggagggagaagaatagaatacggcttcccgaccgccccggaccccatcgcgctcccctgcgatgaggaccgcttcttcaccgcttttcaccatgcatcctcctcggccttggaggggaggcgatgtggctgtagaggaggcggcctcggcggcttagccgccaagccaccgcagggacgacgcggcgaccggtag

SEQ ID NO: 13972 - DNA, 918 bp, Zea mays
  Peptide Sequence Number=SeqID_55751
atggaagacgacgacttcaccttccccaccgttgccgccgcgcggggcccgacggcgccgctcggccgccccgatgacgaagacccggtgccgcacctgctccagcttcccccgcctcccagtcccaccctcgcggggacgacctcccctctgtggccgttcgcgggctccactcccaagacgacgacgacgacggccgcgccgccgtcgtccccgcccgtgacagaggaggacgacgaggacaggatggacctgctgtgggagagcacgctcaccaccaggcccgtcgcgacagcgccggcgccggcgccggagtcagctgggagcgccgtcgtcagcccccacgcggggccgccgccagagcggcgcgcggccgcggccgacgacaagcagcgcgccgcggcgctggccgccgcggagaggatggacaggctgtgggagagcttcaacgaggacctcgtcgtcctgcgacggcacgtccgagaccgatgccgccgctccaaagtccgccgccgagcaccccggcggcaccaaacaccaacaccaaaggcgccgcggggccctggccgacgactacgacgaacgaccacttggtacctctgcaaactactcggcgtcgtcgggcgccgacgacgacgagtccgatgcccaggagacgtcggcgtcgtcgcccgcggagcggcgcgggtacgggtgcgcgcccaccatgctgcgcgcgtcgtcgcgcgcgggcggggcgggccagttctgcggcgccggcgccagccaccgcggccgacggcgcggccgcggcggcggggcggcggctgggtgggcgctcctgctgaggctcttccgcaggctcttcgccgtcgacaggacggcgcagccgtcccgcagcgtctgcgtgccatgaccatcacgcgctcacttccctag

SEQ ID NO: 13973 - DNA, 351 bp, Zea mays
  Peptide Sequence Number=SeqID_55752
atggcctctgctggagttggtcttagcaccgcctcctccgcttgggtgctccaggccgacaccacgacacaagcagaagcagcaccgcgaggaaggggtaaggaagtcgcaaggaggccgctattgctgcgactgctcatccgctatcagtacggcatcagccgcagtggcgtgcgctctggagtctggactggatctacgaccgggaagcaagggcaaatatgcatgcttagctcaggccttctcgtgagtaaatggggggtgtcatatgcgctcctcctcttagcatcatttctggacaagaaccacatggtggcgcgtgtggcccagacgcgccattatttggtctaa

SEQ ID NO: 13974 - DNA, 1014 bp, Zea mays
  Peptide Sequence Number=SeqID_55753
cccctttggtttgccctgtccacgctcaccggagtcttccccgtgcagctgaagtctgccaccgtcgacccgaggcttccccgcgtctccgccgtcgcccaagcgctccagacccgctcatccgtcgaggtgatcatcctccccgtcgggttcttccctcccctcccctcccttcggcgaccttcttcctcgcgcagcccatggcagacgtggccagggagccgttttcccctgcacacgtcacttgcttcgcgtcccgcgtgcctcgcctaccatgtgagctgccatggcccgcagctaccgtaccgcgcccgccctgctccaccgtccgacgggatgctgctgcgttggcctcaccacgcacggcgccctgccccggcagacccttccagggcgcgacggtatgggcagtgcccggcgtggctagatcccagcgcagcagtgtgtccgagccagaaccgcctcaccgcgccggcatccgccctgcgccagggaccaccgttcgtcggtgtcgcgcaacccttccgcgccatgcgcaatgccctcgccttaccaagcgacgccgtgagcctgcgcagccccctcgccgtgtgtccacgtctcaccatcgccgtcgtcgagcatcgcccatggccgtgcccgggcctgctgtgcgcatcccggcgtggcacgcggctcgtgcagcttgcctgcggcgcgtggccaacggcctgcccggctgttcccaagcaccgacgaagaaggaccgacgacacgccgtccatgtccgcacgagcatcgcccatggctgccgtcgagcatcgcccatggccgtgcccgggcctactctgcgcatcccggcgtggcgcgcggctcgcgcggcttgcctgcagcgcgtggccaacggcctgcccggctgttcccaagcaccgacgaagaaggaccgacgacacgccgtccatgtccgcacgtaaagaagaaggcgacgaggtggatctccaggagttccaggacttcgacgagttcgtggtttag

SEQ ID NO: 13975 - DNA, 438 bp, Zea mays
  Peptide Sequence Number=SeqID_55754
atgggcgcaataccggtgcgggggcaccaaagggcgcggaacacggcaaggcgatctaacggcggccagatcaactccggcgagaaattatgtggacgctggggcagaactaggagcgcttgggcgacggcggggacgtggggaagcctcgggtcaacggtggtagacttcggctgcacggggaagactccggggagtgggcgagaggttagggaagcggagggggctgatgggtggggtccacggggcagcgaggggaaatccgcgaacgggcggtcaacactgacggaaagggtccaccgtgtagcgggagagaatgggcgcgagcgcgagggaatcggcgccgacaggccgaccccacagagcagcgagagggagagagagagaaggggcgcgggggctggcgccgacaggcggggtccgcgtgtcaggggctaa

SEQ ID NO: 13976 - DNA, 993 bp, Zea mays
  Peptide Sequence Number=SeqID_55755
atggccgtgcaggggcggcacctgtcgcacgacctagcagcccaggcggcgggcggctacctgttcctggacgagtacgccgggtgcgcgccagccgcggccccggccccggcccggatcggggacgccacgacggcgctcagcgacttcccgcgcgtcgaggttgcctggtgcaactacgacggcttcctgccgaggaagcggccgcgcctggagacggcggcgccagcagcgggcggtggtctctcagaagaccagcgcgcgggtttgcctccggcgggcacggagcgcctgctgccactgcctgtggctgtggcaccgttcgtcaacgcgcggagccgccgggcggtggcggcctccggcacggcgtccaccagtgggagggtggcaagtggcgcgaccgtggcggcctcgcggggactgctgtcgtcgtggacgcaccgccacggcgtggagatcgacgcgctcgttagacttgaggcagagaggatgcgcgcggcgctggaggaggcgcggcggcggcacgcccgcgcgctgctggccgccgtggggcgcgccgcgtcggggcggctgcgcgcgtcggagacggacctcgagcgcgcgctccggcgcggcgcggagctggaggagaaggcccggcaggcgggcgccgagtgccaggcgtggatggccgtcgccaggaggcacgaggccgccgccgctggcctccgcgccacgctggaccagctcctgcagtcaccctatggcgccggcggcggccgcgaggaaggcggtgaggccgaggacgccgagtcgtgttgcttcgaggacggcggcgcgtcgtgcgcgtccaggtccaagctggcgtgcaggtcgtgcggcgccggcgaggcgtccgtgctgctgctcccgtgccggcacctgtgcctgtgccgcgcgtgcgaggccggcgtggacgcctgccccgtctgcgcggccgccaagaacggctcgctccacgtcctcgtctcctga

SEQ ID NO: 13977 - DNA, 3138 bp, Zea mays
  Peptide Sequence Number=SeqID_55756
atggccggcagggcgcccgagatcgatgaggacctccacagccgccagctcgccgtctacgggcgcgagactatgaagcgccttttcggctctaacgtcctcgtctctggactccagggactaggcgctgagatcgcaaaaaaccttgtcctcgcgggtgtcaagtctgtaaccttgcatgatgatggcaaagtcgagctatgggacttgtcaagcaatttcttcctctcagagaaggatattgggcaaaaccgtgctcaagcttgtgttccaaagctacaggagcttaacaatgctgtcatcatctctaccataactggtgatttaaccaaggagcagctttctaactttcaggcctggtgcagtggtgagatctcacagagtcaccaggccacagcttgcacactccataacctgagaattctggagctggcgctctctcaggctgtggtcttcactgatatcagcatagaaaaagcagttgagtttgatgattactgtcatagccaccagccaccaattgctttcattaagtcagaagtttgtggcctttttggcagtgttttctgtgattttggtcctgcgtttactgttttggatgttgatggtgaggaaccacatacaggaattgtggcatcaatcagcaatgacaatccagcacttatttcttgtgtggatgatgagcgtctggagttccaggatggtgatctagttgttttctctgaagtgcatggaatgaccgaacttaatgatggaaaaccaagaaagattaagaatgcaagaccttattcttttactctagaagaagacaccacctcatatggcacttatattagaggtggtattgtcactcaggtgaagccaccgaaggttcttaaattcaaaaccttgaaggaggcaatcaaggagccaggagaatttctcatgagtgatttctccaagttcgaccgcccacctcttttgcatttggccttccaagctttggacaagtttaggactgaattgacacgattccctattgctgggtcagctgatgatgcacagaagctgatagatcttgctattggtattaatgaaactctgggtgagagtaagcttgaagaaattgacaagaagctcttgcagcatttcgcaagtggttccagggctgttttgaatcctatgtctgcaatgtttggtggtattgtaggtcaggaggttgttaaagcatgctcagggaaattccatccactttaccagttcttctacttcgattctgtggaatctctgccagttgaaccgttggagcctagtgatctgaagccagagaacagtagatatgatgcacaaattagtgtctttggggctcagcttcaaaagaaactggagcagtcaaaaatcttcatggttggttctggggctcttggatgtgaattcttgaagaaccttgcgttaatgggtatttcttgcagtcaaaacgggaagctgactgtgacagatgatgatgttatagagaaaagcaatctcagtcgccagtttctcttccgtgactggaacattggacagcccaagtccacagttgctgcaactgctgctatgacaattaatcccgagcttcatgtggaggcccttcagaacagagcaagccctgatactgaaaatgtgtttaatgatgccttttgggagagcttagatgctgttgttaatgcattggacaatgtcacggcaaggatgtacattgactccagatgtgtatatttccagaagccacttcttgaatcaggtactctgggtgccaagtgcaacacacagatggtcattcctcacctaacagagaactatggggcatccagagatccaccagaaaagcaggcacctatgtgcactgtacattcgtttcctcacaacattgatcactgcctgacatgggctagatctgagtttgaaggtctacttgagaagactcccactgaagtaaacgctttcctgtcgaaccctggtggatatgcaacggcagcaagaactgctggtgatgcacaggctagggaccaacttgagcgagttattgaatgccttgagacagacaagtgtgagacattccaagattgcattacctgggcccggctgaagtttgaggattatttctccaaccgtgtaaagcagctgacattcacttttcctgaagatgcaatgactagctctggtgctcctttctggtccgctcctaagcggttcccgcgacctctggagttctcatcttctgactcaagtcatcttagcttcttgttggctgcttctatattaagggcagaaacatttggaatacccatacctgattgggcgaaaaacccaaagaaactagctgaagctgtggacaaggtcattgttccggatttccatccaaagcagggtgttaagatagagatagatgagaaggctactagcctatcctctgcatctgttgatgatgctgctgtcattgaagagcttattgcaaagctggaagcaatttctaaaacattgccaccaggattccatatgaaccctatacagtttgagaaggatgatgataccaatttccacatggacttgatcgctggctttgccaacatgcgggctaggaattacagcattcctgaagttgacaaattgaaggcaaagttcatagctggaagaatcatcccagccatcgccacctcaactgcaatggccaccggccttgtctgcctggagctttacaaagtccttgctggtgggcacaaggttgaagactaccggaacacatttgcgaacctggcgatccccctcttctccatggcggagcctgtgccacccaagaccatcaagcaccaagacatgtcctggaccgtgtgggaccgctggacggtaactggcaacatgacgctgagggagctcctggagtggctgaaggagaagggcttgaatgcgtacagcatatcatgcgggacctcgatgctgtacaactccatgttcccgagacacaaggagcggctggacaagaaggtggttgatgtggccagggaggtggccaagttggaggtgccttcctaccgccgccatctggacgttgttgtggcctgtgaggacgacgacgacaatgacgtcgacatcccgctcgtgtcaatttacttccggtaa

SEQ ID NO: 13978 - DNA, 2382 bp, Zea mays
  Peptide Sequence Number=SeqID_55757
atgaatcagaacggggactcagtggacactatgatcgggaggatattcaacaacatatcctctttaaaatctgcatacattcagctgcaggaagcccacaccccatatgaccctgacaagatccaggaagctgataaacttgtcatagaggagcttacaaatctttcagagctcaagcatgcttacagagaaaaacatcctaagccaatagctgcatcccctcaagattcacgcttgctctctgaaatacaagagcagcagaatttgttgaagacctacgaggtcatggtaaagaagttccagtcccagatccagactagagacactgagataacccatttacagcagcaaattgatgaagctaaacttcggaaatcaaagctagagaagaaactgaaacagaggggcctacttaacagggagtcagaggaatctgacgaagaagagaactacttttccattgaattgacgccaagtttgtttacatctgctgtcgataatgcataccagtccatacatgaattttcaaagcctttgatcaacatgatgaaggctgcaggttgggatcttgatggggctgccaatgcgatcgaacctggtgtggtttacacaagaagggctcacaagaagtttgcttttgaatcctatatttgccaaagaatgttcagtgggttccaagaggagagcttttctatcaaggattctaacatcagtgtttccaatgaggctttcttccaccaattccttgcagtgcgagccatggatcctctggatgtcctgagccagaaccctgattcagtattcggaaagttctgtagaagtaagtaccttttgcttgtgcatcaaaaaatggaaggttctttcttcggcaacatggatcagaggaactacgtcatgagcggtggccatccaaggacacctttctaccaggcattcctaaagctagcaaagtccatatggttgctgcacaggttggcgtactccttcgacccaaaggcaaaggtgtttcaagtgaaaaaggggagtgaattttcggatatccacatggagagcgtcgtgaagaacatcatcctagaagaaggtgcggagaggccaaaagtcggcctgatggtgatgcctggtttcctgatcgggaccagcgtcatacagtcccgtgtgtacctttcagatgccaacaagcatttgcccattccactctccagtaaagagaagcagcaaagcaaagtatcacaccacaccacgctccagttcagcagccacggccagtctctgctctcaactgctgccatggcagccgcatccgacagcacccacctccctccctcagtcaaccacgacctcgacgaaatggcagccgcatccgacagcacccacctccctccctccgtcaaccacgacctcgacgaagatgatgacgatgaggaattcgacgaggacgacgacgacctcgttgacggaaccgccgacgacgacggcgaaccctccgcgtccccatccgaggcggctcgcctcgaggccgtgctccggcggctcaccgcggacgaggtccggatccgggtgcaccaggtcacgatccggggctgcgcccgcacgcgccgcgccgcggtcgaggcggcggtcggcccggacgtcggccgcgccgccactgtgcgggacctcgtgcgcgccgccgccgccgccggcgaccggctccgtcgcctcggcgccttcgacacagtctcgatcaccctcgacgcggcgccgcctgggatcccaggcagcgccgtcgtcgtcctcgttgacgtcgcggaggcccgcggccgcgcctccggtgatttcggcgtcttcgccaacacacagacgagatcatgctcacttgaaggttcagtgaagttgaagaacctgtttggttactgtgagacctgggatgcatcaggtgctcttgaattagataagacagcagaactaagtgctggagttcaaatgcctaggatcggagcaataccaactcccctgatggctagaatatcgtttctgtctggcgactggttaaagtcctcactcaaagaacacctgatgggcgtttctgttggcttgctctctaccatgaaccacaacattgcttacaatttgacatggagaaaatttactgatccaacacgcatgacatccaattccgtacaagaggaattaggacatagccttttgtcctctattaagtacgcgtacaaggttgaccaaagggactcaagtataagacctacacgagggtacgcttttatgtcgacttctcaagttggaggccttgcaccagagagcaaatattcacgatttcttaggcagcctctgtccacgtcaaggttggtcgacctctacctctcttcacattctcgggacgcctaa

SEQ ID NO: 13979 - DNA, 393 bp, Zea mays
  Peptide Sequence Number=SeqID_55758
atgtgtgcacgtggggtccaacatgcgggcgaccggtttgaccgagagtcaggagaacagaataggtcgcagggtgggcccggtgcaataacgaacggtggcaatggaccggcgtactcgaacttcctcgactccatggaggacgtcgtctgggatcaccgggcacagcatatgcccatgaccactgcgaggcttcggcgaggagggcttccggcgcagcgcgagcgcggtccgatgagtgcgaccctggcgaggctccgtgcgaggcgtgcttccggcgcgacacgagtgcaaccccagcgttggcacaccgttgctgaccttccactcttgtcttcctacgctgccttctcaacgaggaacaagagtgcctcggccagcgccagatcatag

SEQ ID NO: 13980 - DNA, 213 bp, Zea mays
  Peptide Sequence Number=SeqID_55759
atggagaagcggaggaaagtccagcacgcaggggagatccacggtagaggaggacgccggctgggagctggaggagagagagagacgtgtacggggaggaagaagaacgcagaaagcgagttcggctggggagataaagaaaatcatagatattcttatatccagatttttagcgataactacagggtcaacaatattggtgacatggtttga

SEQ ID NO: 13981 - DNA, 699 bp, Zea mays
  Peptide Sequence Number=SeqID_55760
atggagactcatctaccacaacctaaaacttcttctacaggtgattctattcttgcttttccatcttacgatggtatagatgctgaaaaatatattgagtgcgagactaagatagattgtctttttccaaaatattttatgtgtcaatggaaaaagatgaagaaggcaactagtgttttgacccattttgctttatcttggtgggagtccttaactccatctaataaaccacatacttggaaatatctgaaaattcttatgcgagaaacttttattaatacagctcctatattaaattcatctgatgaggatcgtatacaaaagcgagaggatgatgttaaagaaaatgaggtgctcatagcagcattagaaagtttagacccatcatttcataattcatcaagtattccttttgctagtgagagtaaagagggttctgttaaagctaactataccatttccagttccacttatccttctttgtatgttttgcaacaaaagggtcaacttcaagaaggggagcaaagctggacgatgtcaagacctataagaacaccttgtgcaggcaccaactactttgagtcgaggacgactcaaaaccaaaaagggcagaatgataagtacatggacgtcaactatatggtcaagtcccaatcaatgatagagtctcaagttcaaggggagtcgaagtcaagttaa

SEQ ID NO: 13982 - DNA, 219 bp, Zea mays
  Peptide Sequence Number=SeqID_55761
atggatgatgtcctacaactcgaccatgacgactccaaggatctaggagaggaccatattgtccatctgacatcaggccgatggggacactgtatcttgaaggaagtggacatcaagggtgtagcgctgcaaggtgaggaggatgaggttgcgctagcagatggggtgaccacccgatactctagggatggatcaagagatgtcactcaaactctatga

SEQ ID NO: 13983 - DNA, 1749 bp, Zea mays
  Peptide Sequence Number=SeqID_55762
gcgcttgctgaggaggcgaaggcaagatatgacaaggcgatcttcaaagtcgtggacttggatgattatgcagcagaggatgaggaatatgaggagaagttgaagaaggagaagctagcgttgttcttcgtcgcaacgtatggagatggtgagccgactgacaatgctgttaggttctacaaatggttcactgagggaaatgagaggggtgtctggttacatgattttgagtatgctgtgttcggtctgggcaatcgacagtacgagcatttcaacaaggttgccaaggtggtcgatgagatcctaacagaacaagcgaagcgcctgttcagtttgtctgaaaacgatgacaatgcattgaggatgacttcaacacatgttgaactctgttgtgttcttatatttaggaaagaaactctctggccagagttggatcgattacttggggatggaaatgatatctctacaggcactacatacacagctgctattcctgaataccgggttgaattcatgggtcctgaggaggcagctcatctggagagaaactccagccttgcaaatggccatgcagtccatgatgcccagcatccttgccaggctgatgtggcggtgcggcgggagctccacacccctgcttctgatcgttcgtgcactcatctggagttcgacattgctggaactggtctcacgtatgaaacaggcgaccatgtgggtgtgtgcaccgagaactgccctgaggttgtagaggaggcagagaggttgctgggctactcgccagacacatctttcaccatccacgcagacagagacgacggcagtcctcctccattcccgtccccaaccacactgaggaatgcgctcgctagatacgccgaccttctgaattccccgaagaaggcttctctggttgcgttagctacgtatgcttcagatcctgccgaggctgaccgcctgacgttcttggcctccgccgctgggaaggatgagtacgctcaatgggttgtggcgagccagaggagcctgctggaagtcatggcagagttcccttcggcaaagcctccactaggagtcttctttgcggctgttgcccctcgccttcaaccaagatactattctatttcatcttcaccaagtatggcaccaaccaggattcatgtcacgtgtgcgctcgtgcacgaaacgacacccgctggaaggaacgctgttccatcggaagggagcgaggattgcagcagctgggctccgatatttgtgaggcaatcaaacttcaaactgcccgctgatccttcagtgccgattatcatgattggccctgggaccggtcttgcacccttccgtggcttcttgcaggagagactggctcggaaagaatctggagctgagctcggtcgctctgtgttcttctttggatgcaggaacagcaacatggacttcatctacgaggatgagctgagcaatttcctcgagcagggagcgctgtttgagctggttctcgccttctcgcgtcagggccctacaaaggaatatgtgcagcacaaaatggcacagaaagcatctgaaatctgggacatgatctcccaaggtgcttacatctatgtctgtggtgatgccaaaggcatggccagagatgtacatagagttctccacaccattgttcaggagcagggctccctcgacagttctaaggccgagagctttgtgaagaatctccaaatggagggcagatatctgagggacgtgtggtaa

SEQ ID NO: 13984 - DNA, 510 bp, Zea mays
  Peptide Sequence Number=SeqID_55763
atgcaggccgggaagacggcagtggaggcgacgaaggaggccgcggccaacgtcggggcctcggcgaacgccggcatgcagaagacccgtgccgccgtgcaaggccaggtggagaaggccacggcgcgcaacgcgtcggacaaggtcgcggccgaggagcgccagcgggagcgcgtgcgcgccgcggagctggagaagcaggacgccggcgcgcccgggatcggcgcccagcaggagtatggcggcggaagagtcgcccccgcgggcgggcacgtcgaggccggcgtcggcgagacccgtcccgtcgctaggggcaccggcacggcgcggcccagcgccgcgcacaacccgctcgtcggcagcgacttctcgcaggcgcgcggcaccggcggacagtaccatttcgacggtcttttgagcatcaaaagtgggagacggtttcgccctagtggcggacggttcgccttaaggaataggtctagaccttcttccttaaatataaagggttaa

SEQ ID NO: 13985 - DNA, 264 bp, Zea mays
  Peptide Sequence Number=SeqID_55764
atgcctgcctttgggggcttcccaaggggggtgggatgtcaggggctggtagtcagcgccccggctttagtcccacatcggctagccaagggggccgtaggcagcttaaaagggagagtccccctcctcccatcaacctggcttttgggatgttggcattcattgtcctttaacataatagcggttgatgctactactgccgctagtggaaaagcttaccattggtacattatcttcttgtaccaattgaacattgaaaaatga

SEQ ID NO: 13986 - DNA, 597 bp, Zea mays
  Peptide Sequence Number=SeqID_55765
atgggaaggagctctaccaccgcagccccttcggcatcctctagcgatgcatttccatcgccgaagtcccggagctcttacaagagatacactcgggggcttgcggccatcacgcaacgcctcgggccctcgttggaaatgccttccgacaagaaggcacccgggggctacacgcacctgctggtcgccatcgacaaattctccaagtggatcgaggtccgacccctaaacagcatcgggtccaaacaggcggtggcattcttcaccaacatcatccatcgttttggggtcccgaactccatcatcaccgacaatggcacccagttcaccggcagaaagttcctggacttctgtgaggatcaccacatccgggtggactgggccaccgtggctcaccccatgacgaatgagcaagtagagcgtgccaatggcatgattctgcaagggctcaagcctcggatctacaacgacctcaacaagttcgccgaaccctacggacgagtaagagtacacgtaaacggcaaggccgaccgatccgagggactcctacgcctccgggatacggatacctcactcatcaccttccgtgaaaagtaa

SEQ ID NO: 13987 - DNA, 569 bp, Zea mays
  Peptide Sequence Number=SeqID_55766
ttcaacccgaaatccctccagaatcaccgtcgccgagttttgaggcccaaactcttcaaaaacccgtcctccagaatcaccagcccaacgtctccgcggccgccgccggctgcgtcggcattgcgcacaacgggaaaggtgcgcacgggctgtcgacgcacgccttttctggccctgccgccgccaagttcggcagcgcgcctccgttcggcctggttccggcgcagcccttcaacttcaccagccccatcgagatgcctcacttctcgctcggccaggacactctggcggcgtcctcggctgccgccggggactacagcctcggtttctccatgtcctcaggtttcttgggtgccagtagggggacccttcagtccaattcgcagtcgaacttctcaggccatcatcaccaccagctccagaggctggatggcccgctcttgtttggtcacgttcacggtgcggcggtggcgcatcccgcatccgagaaccagctcacatcatccgcggcgttacagctgtgggacggtctccggcactccggcatgaaggagaagagcaaaaactga

SEQ ID NO: 13988 - DNA, 213 bp, Zea mays
  Peptide Sequence Number=SeqID_55767
atggagaaccctccaccgtcctccgccggtccgtactcggcgcccgcgccggcagcgcagcatcaggacgcggcgaaggaggatcaggacgtggcgcagctcgtgctcaacctctgcatcccggagctccgcgagaaggccatcatcatcctttccaaggcatttcctcgaacatgtgcatttcgtatcttctgttgcctctctcccacctag

SEQ ID NO: 13989 - DNA, 753 bp, Zea mays
  Peptide Sequence Number=SeqID_55768
atggggaggcacgacgcgacgaagctgtgcaggagctgcgccgaggacgaagctgcgagtcaaaggcttggactggcagcgttaatagttgtctacgacgaccgctgggtcaccgctttcctccgtcgcttctccgccgccttcgtcgagtccgtggggcagcacaacatcccctggttccggctctctgatgccgccacccaactcctacaagaggagtggattgtaatttcaggagatggtgaccatggaagggaattggagctaattgacgatggcaagaatgaagaaatgcctctgtcagttctccacgtgaatgctatgagaaagttgggatcggtggaagaggtgtctgtcccgctcttcccgtccaaccacatcaatccgggtagtgatgtttcagagaagcaggcagtcggggtgctccatgagctgcttagtctgtttgtgacatgctctggtgagaggcgacggttacgctacctccgacagcacctagggttaccacagaagtttcatcttgtgttcgagcggcaccctcgtgtgttctacttattgttaaaggagaagacatgctttgttgtcctcaaagaggcctacatagccggagaagacaatgcaattgaggcgcaccccatgttggaagtgttcaagaagtatgttgagttgatggagcagtcacgggaaatcataagatgtcgacggggcgggaagcctattgaactggagtccaagtcacgcggggataactga

SEQ ID NO: 13990 - DNA, 321 bp, Zea mays
  Peptide Sequence Number=SeqID_55769
atggctctttccaggtgtggtgaatcttgttttgggccgagcacccactgcctggactcaaggaagtacgacgccgacacgtatcgcggagggaatagggatatgatggatagatttatcgccaaaaaacagacaaaaatgattctaacggttttagggtttagggttgttcgcttcggattaaagacaactattttgactgctgcaacccccgcaacattttttggtggccagaagccgcaaaaagttgaacagagcattggcatgcggatgaccgctgcaaacagagtggttcgtgatgaggcagcgactgattggaag

SEQ ID NO: 13991 - DNA, 423 bp, Zea mays
  Peptide Sequence Number=SeqID_55770
atggagctccaggcaggcgcgtgggctttggcgcctggcggtgtagctgctggaatgaggcaacggctggtgctccccggcgtgcttggcggtcgagcgcgccggccgcgtccgtccgtcggggccccggctgctgtgctgctgctcgagctcttcgcacggtcttatccctacgctgccctgccacgcctgcctaatcgcccgcccgtgctcctacccccgtgcaacattttcccggctcccgcgcgcgctgccacactgggcgcgcggcgggcgctcgttgcctccgtcggtctctctctctctctctcctcgcgcccggggcgctgcggaagtgcggagcggcagaagctgcttcgtggtgcccggtgcagcggtactgctgtgctgctgcgggcaggggcagagccgcagcgcgggtag

SEQ ID NO: 13992 - DNA, 435 bp, Zea mays
  Peptide Sequence Number=SeqID_55771
atggccgtctgtccgttccctgtccccgtcccccggccacctgtccccgtccccgcccgtaccacgccaactcggatggcgagcctcggatggagtacggtggccgagccacagcccacagcagaagcaccacaccatccgccatcgcctgttgggtcgctctgggactcaaggtcaatgccaggccggcacgtccccgtccgtcggtcgcagctcagggcatcggcgcgcgggcgcgtcgcggcagcgacacactggccggccgtgcaatggtggtggaacggcggcgagaaaggccgcatgccgtcgacgctcgaccgccctgccaagccgcccgccgcccccacgccataccatccaagtcgggagacgctctgcccggcagctgttcgagttcgaccctctcccgccgtcccgttacttcctatcgggtga

SEQ ID NO: 13993 - DNA, 1366 bp, Zea mays
  Peptide Sequence Number=SeqID_55772
cacagctagctctcctccccagaatctcgccggattccgccccccgccgcgccctcgcttccgccgcaggttcgcgtctgtgcccgcgcgtgttgtactaccggcggacggcggtgttggtggtggttggtggagttgccgacgacggtgcaccttcaggtgctagtgctaccagtggtaatagaaggaagggagactgggagataatcagagaagggagaccaggaactgatgatgatcttccacaatttccacataagagtatcagaggcagcggacgtgtcagtggtaatgggcgagctgttgttcctgctggttcatatgctagggcaccaactgatatgcatttgaaacctatgatgcctttttgtttaagggaatggagatcaacaggagggcttcaggcaagcttgtctaataacccacaactgattcatgactctgttcccagtcctaccacctctggccgtaagaggcaaaagacatctcaatctgttcctgctttacctgcaccgcctcctgcgatgcattcacaacagctggctacaccaacacagccatcatcttcaactgctaggaaagcaaagttcatgcactttcagggtcagaaggtaccaggtggctctgcagccaagcctataccatcttcagcaggtcctagtggaagaggaccgcacatgaataggggtggttctgctcctgaagctcaagctcagaatgtcgatccattgattggtcgtaaagtgatgagtcggtggcctgaagacaatagtttctatgaagcagtcatatacgaatatgatgctgaaacgggccttcatgcactggtttatgacatcgatacggcagatgaaacctgggagtgggttgatcttaaagagatgggacctgaagacataagatggcaagaggatgactctgggatagaccctgttacatatctgcgcagccggggtggcccaactagtggcgttaggaagccagcaggtcgcggtgggcccatgccaggttctgtaagaggaagaggattacagaaaaacatgcctaagaaagattttccacctccacaaaatggtgttggcaagagaagttccgatgacattgatatccttcataccgagagcctaataaaagaggtggggaaagtttttagcgttagcaatcctgatccacaggaagtagaaaaggcaaagaaagcactgaaggagcaagaacagtcgttgattgacgccatagcaaggcttgctgaggcatcagatggtgaaagtgacgggcacaatcgtgggcgaaggaacttgtatgctgctaaccagcatcaagcaagctacgttggtgccatgcccgtcggtgacagagctggtgccat

SEQ ID NO: 13994 - DNA, 315 bp, Zea mays
  Peptide Sequence Number=SeqID_55773
atggaggtggagccaagcaggttgggtaaaactgagtcacgatctcccacgagttcggcctcgggcgcaacagggagctccgcctcgcccaacctcagccttggcctcgggagaaggtctccgcctcgcccgaccccaggcctcggcctcagcctcggcctcgggaggagtcacatcctcgcccaaccccaggcctcgggaggagtcacatcctcgctcgacctcggcctcggcctcaggagaagtctccgcctcgcccgacctcagcctcggaccgactacgctacaggggatacatcattatcctactcctag

SEQ ID NO: 13995 - DNA, 255 bp, Zea mays
  Peptide Sequence Number=SeqID_55774
atggaagacttcaagctacactacccagatttcaagctcgaggacgagctttttgtcgggaaggagggaaatgttgtggactctttcctagggcgccagtatactaggcgcaacaagaagtgtggcaatattgctgcaatcctagagctggatgagaacctgaataagcagttccgcgtatttgaagctgctccacatgtttgtgttcctccaccctttgcgatatgttatgcttctactgacctgacccgttag

SEQ ID NO: 13996 - DNA, 1203 bp, Zea mays
  Peptide Sequence Number=SeqID_55775
atggctattgatcttccttcttgggccctggctgctattgataagatccgaaaagggttcctttggcggggtcgcaaggaggtaaggggcgggcactgccttgtggcctggggcagagtgtgccggcctcttgagctgggaggtttggtcatttctagtctaaatgagatgtgttgggcacttcttatgagatggctttggttgcacaaaactgatcctgagcgcccttgggcaaatttacctatccaagttccgtatcaggcttgggctctcttctccactgtcctaatttctgaagttggaaatggggctcacactttgttctggactgatatgtggctatttgcccggagaattattgacactgcccctagattatttgacaccatcccaaagaggattgtaaacaaaaaactgttcaggagtctcttgcgatttcttgagggtgttctggttccagcttctacaacttttcggtctgcaaaatttaaccctgcagcccgattcttgatatcaggtgtcattgaagttctggtgaaaagtggaagaactattgatgcaattaatttagcttacgtgtttgagcttactgaacagtttgaaccagtgcaactgcttaaagcatatctgagggatgttaagaaactgtcacatgccaggaatgtcaaaatttctcctggagcacaggaagcccccttcctatctgggaagtctaataaggagttctacctggcacatattaatacagaagaagtcataaagggaggtgcctgtcggcccctgagctctaatgagatgaatgagcgtgagttgtgtgcactgaaatctgtcattaagtgcattgaagatcataaacttgaggagcagtaccctgtggacccacttcagaaaagggttttgcagctagagaaagcaaaggcagacaagaggagggctgttgaagcagccaagccacagtccaagaggcctcgtgccaatggatcgacctttgcaccccgtgctacaggctttgctgacaagagcttctacccagcaaccccagagaggcatccctccaacccttacgagaggcagtttgtgtatggtgctgaggctcatcttcctccaatgatgagttcagcgtcttacccgatgcaacctgcccatggaccttattacggcaatggctacccagtacagtaccaggtcccgtatatccactaa

SEQ ID NO: 13997 - DNA, 396 bp, Zea mays
  Peptide Sequence Number=SeqID_55776
atggcgaatcctcctgcaggaatgaagacagcacatccggaagaggagagcaaaatcgggcactcacccaataacgagacgggcaggcgtggcaggcgctggaggctgctgctcgcctccgggtccgaggggaaggatatcgagggcccgacggccacccccaccatcgtcgtcgctgcgacagtcattcccgccctcgtagcacatggtgttgccccttctctgccctcagaagtggagccctatgcacaacaaggtcgttcaaaggccgagcagtgggcaaactcttctcgtcatcaagagaagttgaaggatacgaagctagaagatcttaaagtatctggtggagaagctgaggggaagcgcggggaggttgttcgatctcgttgtcattga

SEQ ID NO: 13998 - DNA, 243 bp, Zea mays
  Peptide Sequence Number=SeqID_55777
atggatcagcggcccagagagggagggagagaggataggcgcagggagactgccaggcagagtccaccggtcaggctcgccgtcaacctcagtcgcgcgcacggtgcgagcgctgtgaccggagccgacgactttgagcgggcagagaaggacatggggcagtggcggttggtcggagaggccaagcacgacggcgcagtgctgttgccggtgatcaccgccggctactcaacgaagaagtga

SEQ ID NO: 13999 - DNA, 299 bp, Zea mays
  Peptide Sequence Number=SeqID_55778
gatttctgttagtctatcatggcaagaatctaagcatatctgatctatcattgatcaggtcacagagccaaatgcaagcagtatttttgcgacatgaagggtatttgggagcacttggtgccctgatgagttatggggatccaagtggtgaaaatcttaccctcgaggagaagggggagtgcaccaggaagaatgcacgagtagagatgattgggaggatgaacgcaagtggtagggagaccggggatgaacacagccgctgtgggcaccagggcgaggggaagaactcgccaggatga

SEQ ID NO: 14000 - DNA, 594 bp, Zea mays
  Peptide Sequence Number=SeqID_55779
atggcgctccacaagctctatgacgacggcggccccccagctctcttacggaagcaggacgacgtcagcagggactcgaccgctccaacagctgtccctccgccaggctccgccgcacctccgacagccacgacatcacgccagcagggtgcccagatctctccggctgccacattggcatttcctcactcatgcgcacccgagaagacttctcggacggtcacccatcccaagattgctctaggccaagcacgcttaaccccaagttcctcactcatgcgcacccgagaagacttctcggacggtcacccagcccaagattgctctaggccaagcacgcttaaccccaaggttcttttgagtgaaacttctttcgcttctacttcctctattatctgtgaaactaacatgttaggtgaagaagaagagcacaaccgatggaggccaaacgatgaatcctcctcgccaacgggttcgtctttcactattcataaatgttttgtcactaatgatgataatagtggaagcaaaagcgacgatgaggaggaatatgaagatgatagcaaggatgacgacgagaatattatcatctaa

SEQ ID NO: 14001 - DNA, 669 bp, Zea mays
  Peptide Sequence Number=SeqID_55780
atgtatcaagattacttagcagacaattctacgtttagcttaactgatttcagacgaaggtatagaatgagtcgcaatctatttaaacgtataatggctgcagtagaagatcatgatgactacttcaagttcaagttcaatgcagccagtacaccaggattaagttgtttccagaaagtcaccgcggtatttcgtatgataacatatggagtagctgcggatgctacagatgagtatgttcgtatcggagaaagtacggttatagagagcctgaaaaagttcgtgaaggcaattattaaagtgtttgggaatgaatatttgagagcacctaatgaaatggatacatctcggttacttgcaattggacaagaaagaggatttcctggaatgcttggttctatagattgtacgcactggaggtggaagaattgtccttcatcatggcacggcatgtattcaggccatttacatgagcctacaattatattagaggttgttgcttcacaaaatctatggatatggcatgcattttttggtttgcctgggtcgcacaatgatatcaatgttcttcaccggtcgccactattttcaaaacttgctgaagggcaagctccacaagtttactacaacatcaacggacatgactataccatggtgaaagtcgcctag

SEQ ID NO: 14002 - DNA, 1587 bp, Zea mays
  Peptide Sequence Number=SeqID_55781
atgaagtacacacaagacttgatcaaacggttcgggatgaaggacgccaaacccacgaagacaccaatgggcaccgacggacatgtcgacctcaacaaaggagatgatgatgagtatgacttggagcaagctgaatctcctgaacataagagatggatggagagacagaatgcaatgccacaggagaaggccaaaaaggtagaatatgcgcgggtacgcactcttgtggacaatgtttataagaaagacccaaaaatccagatgaggaaagaggagcagaaagctgagaaacagaggagaaaggaggcaaagtatctgacaaagaaattgcaagaagaggaagcaaccagagctgctgaagaagaaagggtaaggaaagaagaagagtccaagaaagttgcagaagccgctctacatcagaagaaggtaaaggagaaagagaagaagctgctccgcaaagagaaaactcgtttgtgcactcttgcagcacctgtggttgcagatagccactttggtatgtcaaaagaagatgttgaatcaacatgtgcttcacttgatatggaacagctgaagaagctatgtgatggaatggatggcaaggatgcagctgaaaatgccaggatgatgagcaatgcacttcgcaatgaaagttcatcaaaggaagagaagaaaattgaagcaaatagtgtggaatgtcctggtggcgccgtggtggtccttcgggctgtgccgggcttcttccgtggcgatggtggtgatgcccttgtggcgtcgctctacctgctggggcaccattgggaggcatcatgttccctactgcatggggctctggagggtgtgaaccctgtccatccgtggacgtgcgacggcggcgccattggcgtcgtgccctccttggaggctccacatctgaggctcgtcttagtcagaggagccatgggtgatggaggtcttgagctgatgcgcttggtgcggtggtgcccacagtgccggtgggcggcttgcagaagcctgcggcttttggcgtggcacagcgttgacgacggcagcgcagttcgcggcggcttctttcgattcctctcccagtttgtggtgaagccagactcatcgaaagctttcgactccttccttgagaagtgcaaacaggcccaatctattgcttcacctctttggacccgagatgaaattagttcctcaactgagggagctaggactgcatcgtcaaaggccccacaacctgcgagtagccagacagccaatgggaaagctgtcgttgatcctgtcccagatgaagcaccatctgtggctgatccagatgcctggacagaggcgcaggttctggctctactccaagctttgaaggcttttcccaaggatgcaagccaaagatgggaacgcgtggctgctgctgtcccaggccaccagagttgttgtactgtggctagccgtaggatgatgcctgttgacgctttttcggagcgccaaacactcaacaagaaccgtggcggtggaggggcggcggaagatcgtcggcggcgcctggatctcgctcccgggagggaccccgtcggtgaggagagattctag

SEQ ID NO: 14003 - DNA, 564 bp, Zea mays
  Peptide Sequence Number=SeqID_55782
atggaccctagcgttcgcgcatactgcgcctgcacagcacccgacccgcccacagatacagaggaggcaaagcaagcaaaaaaggatgagatagagaatcatttcaaggcccatctaggagaggcctatgaagtcctcatagaccctgcaaagaggaggatttatgattctacaaatgagtttgatgataatgtcccaacagactgttccccacaagacttcttcaaggtttttggcccagccttcatgagaaatagacgttggtccgttatgcagcctattccttctctaggagatcatactactcctatagaggatgttgataagttctacaatttctggtacaacttcaagagttggagggaattttcagatgatgatgattatgacttggagcaagctgaatctcctgaacataagagatggatggagagacagaatgcaaagctacacgagaaggccaaaaaggtagaatatgcgcgggtacacactcttgtggacacctttgtggtgtggccgaacctcggattaaatcttgtgtcttgtgttcttgcttgtctttaa

SEQ ID NO: 14004 - DNA, 978 bp, Zea mays
  Peptide Sequence Number=SeqID_55783
atgaagaagaagaaactgatgatcccagcgtctcataggatgataaaagccaagattttaatacttcttctgatacctttagcagcaaagggaagaagtcatctggttgtcgacaacaggatcactatgcattacttgtgttggggcacgagagactgttccccacaagccttcttcaaggtttttggcccagccttcatgagaaatagacgttggtcagttatgcagcctattccttctctaggagatcatactactcctatagaggatgttgataagttctacaatttctggtacaacttcaagagttggagggaattttcagatgatgatgagtatgacttggagcaagctgaatctcctgaacataagagatggatggagagacagaatgcaaagctacacgagaaggccaaaaaggtagaatatgcgcgggtacacactcttgtggacaatgtttataagaaagacccaaggatccagatgaggaaagaggagcataaagctgagaaacagaggagaaaggaggcaaagtatctgacaaagaaattgcaagaagaggaagcaaccagagctgctgaagaagaaaggataaggaaagaagaagagtccaagaaagctgcagaagccgctcaacatcagaagaagctaaaggagaaagagaggaagttgcttcgcaaagagaaaactcgtttgcgcactattgccgcacctgtggttgcagatagccactttggtatgtcaaaagaagatgttgaatcaacatgtgcttcacttgatatggaacagctgaagaagctatgtgttggaatggatggcaaggatgcagctgaaaaggctaggttgatgagcaatgcacttcgcaatgaaagttcctcaaaggaagagaagaaaattgaagcaatggtgtggaatgtcctgctccaaattctgactctacatgaggtagagcgacagaaggcagtggcagcatactaa

SEQ ID NO: 14005 - DNA, 357 bp, Zea mays
  Peptide Sequence Number=SeqID_55784
atgaccgccctcggattgaggatctacggcccagatctacctactcataccacgaaccgcaattctgatgccgagaccccaagcaacgacggggcacggctccgtggcggaagtactgctccggtgagcaattgccagaagcacggttcggcccaggcgtacgcaacaaacggctccgaattccacggcgaagctccgccatgcgcggcgggatggttgaaggcgagcgcttacaatccgggcccacgcgtcagaggtacaagcgagaacgagcggctggggcgcggggtcccgcaggcagagaccgtgagggtgagcgcgcacgcgacgagactgacagacgggccccgggtgtaa

SEQ ID NO: 14006 - DNA, 804 bp, Zea mays
  Peptide Sequence Number=SeqID_55785
atgcagctcatccgcgcgtggaagaaggaaactgcccactccctctccccatttctctccaactccctctttgcctcgcaccacgcccgaaccgccggagctcgcgcggccagcgcggcccgcggcgtcaacccctgcgtgcagcctcgtcgccctgtcctgctcgacatcgccgtcgtgcgcgcgcgcccggtgcacttcgtcgtccacgcagagccgctccccatcgtcgtcgtccacgtcctgccgagcgacgccctcgctatctttgtctacgttaaggaattcgccatggcgcaaatcagcgagcggcgcccggcgcggccagctgtgcccccggcgcggctgcgtgtgcccgcggcgcatgaccgacgtggattgccacctatgcagcaccgtctcggcctgcacgtggccggcgtgctcacggcttgcccgcgactcgctcgcacgcccccttggcgcagcccacgcgctcgccatcaccgccgttcgccagagcagcatctggccgcgagtgtcgtcgtcgcgctattgtcatcgctgcgcagcggggtctacgtcgctcttgtcgtcgtcgaggtgagcttcgtctaccccgatttactctccgtctacttcatgcgcaagtcgccgaacctagtcccaaaccacatcgtcgtagctccgcgcttgtcgtcgtgctcgtgccgcgaacgtggtgacaaggatgatgtttatgactatggtaatggatcacctattcacctccctctaggtgctctcaattggtatcggagccgttctcttcccgcaagggactaa

SEQ ID NO: 14007 - DNA, 246 bp, Zea mays
  Peptide Sequence Number=SeqID_55786
atggcgcacggttatcgccccaactgggcagatgtgcatggcggcgccgctcaggccgacggcggcgttctcaccggagatcggccatccggcacggcggaggtccatctcttaccccaactggtgctacgcgaagtatatgacacgacgaactacatgggtagccaaacttaccagattcaggaaccggacgtgccacccgcggcgtacggcggatcggggctgagattcaagaatttcttttag

SEQ ID NO: 14008 - DNA, 1776 bp, Zea mays
  Peptide Sequence Number=SeqID_55787
atggatcaagttcctccatttccttctgagacagctgtaaaaattgttgaagaagagctgggggcatctgtaaatgagatatttgatcgatttgattttgaaccaatagctgctgctagcctcggccaggttcatcgggcacgtctgaatggccaagaggttgtgatcaaagtgcaacggcctggtctgaaggagctgttcgatattgatctgaagaatttaagggtaatagctgaataccttcagaaagtggacccaaaatcagatggcgccaagagagactgggttgctatttatgatgagtgtgcatctgttttatatcaggaaatagactatatgaaggaagcatttaacgctgaaaaatttgctgaaaacttcaaaaaattggattatgtgaaggttcctgaaatttactgggcacacactactcctcaggttttaacaatggagtatgtcccaggaattaaaattaacagaataaagcagttagataagttaggagtcgatagaaaaagattaggtcgttatgctgttgagtcctaccttgagcagatcttatcccatgggtttttccatgctgacccgactgaaaacataagattaactgtactagatcttttatggaaaatacctccacaatatactattctttcaatgaagatgatatattccatagaaattgctagtcaaagtatcagagtggagactggagaccatgtcaatgccataacggacttgtatttgtgtgcggaggaacatccaggaaacattgctgttgatgatgtcaatggagggagacttatcttctatgacttcgggatgatgggaagtatcagtcaaaatattcgggaaggattgcttgaagtattctatggagtttatgaaaaggatcctgacaaagtgcttcaagcaatggttcaaatgggtgtccttgttcctactggagatatgactgctgtcagaagaaccgctcaatttttccttaatagctttcaagagcgcctagcagcacaaaggaaggagagagaaatggcaaccgcagaactgggattcaaaaagcaattaactaaggaggagaagtttgaaaagaggaagcagagacttgctgcaatcggagaggatcttttggcgattgctgctgatcaaccatttcgcttccctgccacatttacatttgtggtcagagcattctcagttctagatggtattgggaaaggccttgatcctaggtttgatattacagagattgctaagccatatgccaaggaattgctaagatttaatgacgctggtgttgaaatagttgtgaaggcaagtttcaacatttggtcaaagctgttaacctatctctatgatagcacatctcctaaggctttgtttgggtactctagtattagcacctatccagatgatgcaaagaagagatgggaaaggcagtcccgtgccttttacaatttgttccgccaacccgatagagttgaaaagctcgcacaaattattgaacgtttggagcaaggtgaactcaagcttcgtgtcagaacgctggaatcagaaagagcatttcaaagagttgccgctgtacagaaaacaattggatatggagttgctgcaggtagtttgatgaaccttgcaacaatgttgtacttcaattcaatccggggaccagcaaccattgcatactccctctgcgcatttttcgggctgcaagttctgatcgggcttgtcaaggttaagaagttggatcggcaggagagactgataaccggtactgcatga

SEQ ID NO: 14009 - DNA, 825 bp, Zea mays
  Peptide Sequence Number=SeqID_55788
atgtccgtcgcgtctgcggcggcggcggcctccctcatcgcctctacctcgctctccgtcccagaccgcatccgcctccatccccgccccgcgcttcctccactaccgtgcttccgccggcgatcgcgggtctgcctcgtacgcgccatcctcgaggaccgcccgtccccgcctgccgaggaggacgctaagcgctacgggctcaacgggaacgggagcgggctcggatacgacgatgccgccgtccaagcgtacctcggaagcaacggtaacgggagcgccagcggtaacggcggggcggtgaagcagaaccccgaggttgccgggagcagcgcggccatagtcccggccccggtcccgccggcggagggtgagaggagaaggaaggagagagtggaggagatcgggagggaggatgcctggttcaagcagagcagcgcagaggtttctgttgctcctggtggtcgctggaatcggtttaaaacctattcaacaattcaaagaacattggaaatatggggattcgtttttacatttatattcaaggcttggctcaacaatcaaaagttcacatacagaggggggatgactgaggagaaaaagataatgaggaggaaagttcttgccaagtggctaaaggagagtcttttgagattaggccccacattcatcaaaatagggcaacaattctcaaccagggtggatattctcccacaggaatatgtggatcaactatcggagttacagggcctaaggaggcccacggaggggctgcgacagcagcagccatgggccctccaagggggattagataaggacagttag

SEQ ID NO: 14010 - DNA, 465 bp, Zea mays
  Peptide Sequence Number=SeqID_55789
atggggttttggcgggacgcgccgaggtgtggcgtggcttggaggaatggaggaaggagtggtggtgctaggaagcgagtccccgagacgcccccgggcaagcaggagttgggaacgagagaggtggtggggaagccacgtgagaggcatggaggattaggctatctgacctggcattccgtgattgggcggggcaaaatagatacttcaaaaaaaaatcctgtagatgcatattatatgcttcgccctgctgacatagcggcgcgtgctcctgagcaaagaagtggtggaagtcctcgagctgctgacaaacctccaaggttcctccaaccgaagtccttgacgacatctctgtgggctgcggccttcaataggctctacgtgctcaaggtagatgacgaagtcataagggcatgtacagtggagagacaccaaaacggttctccaagcacaggagataactaa

SEQ ID NO: 14011 - DNA, 288 bp, Zea mays
  Peptide Sequence Number=SeqID_55790
atggccatcaccgtgtccaacaactacttcacccaccacaataaggcaggagctcatatcatagttgcacatatgggtctgacaactgcagggtctatcggggcaatgacagctgccactttagatgatagtgttttatgtgttcaggccattgcggatgcggcatttggggttaaactgatatcattgttctctatcacggaggggagacgctcggcaccgaagctgaagcaaagcaagcgctacataaacatcctttataacagcgatgaagctagagaaacttag

SEQ ID NO: 14012 - DNA, 2370 bp, Zea mays
  Peptide Sequence Number=SeqID_55791
atgaacccagatctgagggacaggggcttgcctggagatgagaggaggggcgacgtgtgccggaacgcgaccaccgccgtgtacagggcgcggcgtgggcggaggccggggacgacgatgcggcggcatggggcttgcctggagatgagaggtggggccgactccgcggatgcatccgaggagcaagacgcgctgagcggcaagcgcggatgcgacagcggcgcgtcgttcctcctcgacggcggcccaggaggtgtgcgccgcggcgacggcaccggggatgcaaagttaggtggtggagagctgtacgaatcgacaccatcactcgagaatgacgagaccgggcgtaccgaggaccgcgtccacgagatccccagcggccagcgcccgcacgccgccatgtcagcagatgcccgccgcggcggggccagcacgtcccccctgctcccctccctcctcctccccactacactacttccatcaagtcacccaccccactccccccgagaccgagagcacgccgcctgcgcccgcaaccgggtagcactctcacttccacgtgggccggagagatcactggtcccgcacgtcggtgacgtcctgcggtggggcgccccttcttccgcgagcgcgcaccagcggtggggggatccgcgcgcccatgcgccggtgaggtggtggggcccgcttggcgctcgagttggaatggcggcgtcggcgtcggctgggaggtggtgggcggtggtccttgcggtcgcggtgctgctcgggccgggacgggtcgtcgccaacaccgagggtgatgccctgtacagcctgcgtcagagcttgaaagatgctaacaatgtcttgcagagttgggatcccactcttgttaatccatgtacatggttccatgttacgtgtaacaacgataacagtgttatcagagtggagctttacagcaacaacataagtgggacaataccccctgaactggggaacctgactaacctggtcagtttggatctgtatatgaacaacttctctggcaatatccctgacagcctggggaatctagtgaagctgcgtttcctttttgccaacaatccaaatctttgtggccctggtacttcgaagccctgccctggggctcctcccttttccccacctcctccattcaatcctccatctcccccaactcaatctactggtgcttctagcactggagcaatagctggaggtgttgctgctggtgcagcattggtgtttgctgttcctgcaattgcatttgcaatgtggcgccgtcgtaaacctgaagagcatttcttcgatgttcctgccgaggaggatccagaagtccatcttggtcagctcaaaaagttttcattgcgggagcttcaagttgcaactgataatttcagtaacaagaacattttaggaagaggcggttttggaaaagtgtacaaaggaaggcttgctgatggctcattggtagcagtgaaaagactaaaagaggagcgtacacctggtggtgagcttcagttccaaacagaggttgagatgattagcatggcggtgcacaagaaccttctccgacttcgtggtttctgcatgacacctactgaaaggttgttagtctacccatacatggctaacgggagtgtggcatcacgtttacgagagcggcagccatctgagccacctcttagctgggaaccaagaagacggattgcactgggatctgcaagaggactttcttacttgcatgatcactgcgatcccaaaatcatccatcgggatgtcaaagctgcaaatattcttttggatgaggacttcgaggcagttgtgggtgatttcgggcttgccaagcttatggactacaaggatacccatgtcacaacagctgttcgtggaacaattgggcacattgctcccgagtacctatctaccggcaagtcttctgagaagactgatgtttttggctatgggatcatgcttctggagcttattactggccagagggcatttgatctagctcgtcttgcaaatgatgacgatgttatgcttcttgactgggtgaaaggactgttgaaggagaagaaggtggagatgctggtggacccagatctgcagaaagcctacgaggaggtcgaggtggagagccttattcaggtggcactcctctgcacgcagggctcccccctggaccgtccaaagatgtcggaggtggtgaggatgctcgaaggtgacgggctggcagagcgttgggacgaatggcagaaagtagaggtggtgaggcaggaggctgagtcggcaccgctccgcaatgactggatcgtcgattccacgtacaaccttcgtgccgtggagctgtccggcccaaggtag

SEQ ID NO: 14013 - DNA, 384 bp, Zea mays
  Peptide Sequence Number=SeqID_55792
atggaccacccgcacaacgctgtcctgctggtctgctcgtcgcacgagaagggctgccgccccttcatgtgcgacaccagctcgcggcactccaattgctatgaccagtaccggaaggcctccaaggactcctccaaggattcagggacagagtgcagcgagtgccagcagcaggtccagctctcgtgcccgctgtgccgtgggccagtcagcgactgcatcaaggactacgacgcacggaggtacatgaacaccaaggtccggtcctgcaccatggagtcgtgcgagttcaggggtgcctaccaggagctgaggaagcatgctagggtggagcacccagcggcgaggccgatggagttgaacacgtgggccaatccattataa

SEQ ID NO: 14014 - DNA, 372 bp, Zea mays
  Peptide Sequence Number=SeqID_55793
atggctctcccgatgcaaaccctagccgcgatcctggctctccccatgcgggcgaatcggccgtttctccggatgcaggctggcggcgtgcagcgcggggacgcgggggcgagcgcgcgcgagcgcgcgcgtgagcgcgggagatggcgcgaaagctgtggttacctccctccttcccgctgtgaccgctgttatataccgccacctccttccccttcctccgcgcgccctgctctgctgtcgccgccggtgactggtgccgagttcctcccatcctccccctatttcttcttctttgttcagatccgtggtggattcgtgctttacttgtccagtgtcaaatggcacgacctaggatcacttatgccctaa

SEQ ID NO: 14015 - DNA, 186 bp, Zea mays
  Peptide Sequence Number=SeqID_55794
atggagttcttcgcgcgcgtcgacagatgtgaagaagttcttactgttgggatcttcgttcgtccccaggggttgaggaattttaaactctcccggccaccggtcccggagaacgcggtgggccggaccgcgcgtaggctcgccgcggagaaggacaaggagaagaaggacgcggaaaaggcctga

SEQ ID NO: 14016 - DNA, 3165 bp, Zea mays
  Peptide Sequence Number=SeqID_55795
gttacactgttagttgcaactagtgttgcagaggaaggacttgatattaggcagtgcaatgttgtcattcgctttgaccttgcaaagactgttttggcctacattcagtctcggggtcgtgctagaaagcctggatctgactacatattgatgcttgaaagaggaaatatgtctcatgaagctttcttgagaaatgctcggaatagtgaagagacattgagaaaagaagctattgagagaactgatctcagtcatctcgatggcacttctatgctaagccctgttgatatatcacctgattctatgtatcaggttgaatcaacaggtgccgttgtcagtctgaactctgcagttggactcgctgtttgtttagctgcttgtaagaagctacatgagatgggtgccttcacagatatgcttttacctgacagaggaagtggggaaggagaaaagactgaacaaaatgatgaaggtgatccactgcctggaacagcacgccatagagagttctttcctgaaggggttgctgaaattctacatggagaatggattttatctggaagagatggttaccaaagttcacagtttattaagttatatttgtattctgtgaactgtgtaaacattgggacttcaaaggaccctttcgttacacaactttcaaattttgctcttatttttggcaatgagctggatgcagagctgatcctgcttaagagctttcatgttaggctcatgagcattgtacttgatgttgatgttgatccctcaacaactccttgggatccagcaaaagcatacctctttgttcctgtgggagctgagaaatgtatggatcttttaagagagatagattggactctagttaatagcattgtgaattctgatgcctggaacaaccctcttcagagggcacgcccagatgtctatctaggcacgaacgaaaggacacttggaggggataggagggaatatgggttcgggaagttgcgccatggaactgcatttggacagaaagcccaccctacgtatggtatcagaggagccatcgctgaattcgatgttgtcaaagcgtctggattagttcctggtcgtggatggggacattttaatgattatcaaaataaaggcaagttgttcatggcagattcatgttgggatgccaaagatcttgctggaatggttgtaactgccgcccactcaggaaaaaggttctatgtggacagtatttgctataatatgaatgcagaaaattctttccctaggaaagagggctatctgggtcccttggaatacagctcgtttgctgattactacaagcagaagtatggtgtggagttagtttataagaaacaacctcttatacgggcacgcggtgtttcatactgcaaaaatctactttctcctagatttgagcattctgaagctagcaatggagagttctcagagaatcttgacaagacatactataggttaccctcaataatgagaagggtggagagcatgcttcttgcaattcaactgaaggacataattgggtatccagttcctgcaaataagatattagaagccttgactgctgcgtcatgccaggagacattctgctatgaaagagcagagctgctgggtgatgcatacttgaaatgggttgtgagtagattccttttcctaaaatatcctcaaaagcatgagggacagctcacaaggatgcggcagcagatggttagcaacatgatcctgtatcaatacgccctgaataaaaacctccaatcttatatccaagcagatcgatttgctccatcaagatgggcagctccaggagtgttacctgtatttgatgaagaaacgagagattctgaaccatccatctttgatgaggaatttactcctagcagtgagttacaaaagaacttgtatgatgactatgatggcgatagcatgcaagaagacggtgaaattgagggagattctagctgctatcgtgttctatcaagcaaaacattagcagatgttgtggaagcacttattggtgtctattatgtagctggagggaaaattgctacaaaccatctgatgaaatggatcggtattaatgcagagttggatcctcaagagatcccatcttcgaagccatataacatacctgagagcataattaaaagcatcaattttgacacattagagggtgcattgggtatcaagtttcagaataaaggcttacttgttgaagctataacacatgcatcaagaccatcatcaggtgtttcctgttaccagcgcctggaatttgttggtgatgctgtattggaccatctcattacgaagcacttattttttacttatacggacctacctccaggccgcttgactgacttgagagctgcagctgttaataatgagaactttgcaagggttgcagttaaacataagctacatgtacatcttcgccatggatcatctgcattggagacacaggaggagctttcgaaaccaggtttcaattcttttggccttggggattgtaaggctccaaaggttctcggagacatttttgagtctattgctggcgcaatattccttgatagtgggtgtgctacctccgtagtctggaagcctctgcttgatccaatggtgacgccggacacccttccgatgcaccctgtaagggagctccaagagcgctgccagcagcaagccgaaggattagaatacaaagcatcccgtacaggcaatgtagctacagttgaagtcttggttgatggcatacagattggtgtagctcagaacccacagaagaagatggcacaaaagttggcggctagaaatgcacttgttgtcttgaaagagaaggaaaccgcagcaaagaaagacactgaaaaggatggcgagaagaaaaacggttctcagttcactaggcagactctgaacgacatctgcttgagaaggcaatggccgatgccacagtacaggtgtataaacgagggtggccctgcccatgccaaaagatttgtttatgcggtaagggtaaatacatctgacagtggatggactgacgagtgcattggagagccaatgccgagtgtgaaaaaggccaaggactctgcagctgttcttctgctcgagctgctgaatcgaaattaccgtggcaagcctgatggaaaataa

SEQ ID NO: 14017 - DNA, 664 bp, Zea mays
  Peptide Sequence Number=SeqID_55796
ggaatacctatgcggcagccccgccatcctcgcccccacccgcccccaccatccacaagggcggtaccatgccccccgctcctctcccctccgcgccatccttgccccgcgcgcgcccgcacatctcgcaagggcgccccttcccctgcccccgtcgtctccgcgcaagggcctgtcgtctcgcaagggcgccccttcccctgcccccgtcgtctccgcgccatccttggatccggggttcgctcaggttgcctcgcctcgcaaggtccccaccacgcgcggtcagggagcatggtgggtggggaagacagggaggagcagaggagtaggtgaagctcaacatcgacaacatgttcacggcgctcgagtccctcaagaagaagggcaacaagaacagggcggatgggccgtcctccaggaagaatcatggcgcagggcccgcactacagcagagcaggaactgcctcaaaggaggcgcatggcgccatggtattgggcgagggcgtcggtgccgcgcatgcttgagttcgccgagagggcgccaagctcgagcgacgcgagtcgcttccacaagcgcgagatctcccaggcccgcctccagaagtaccatggagtcaccaacttggacatgacctctggtggctcgttcatcgccaccggctaa

SEQ ID NO: 14018 - DNA, 321 bp, Zea mays
  Peptide Sequence Number=SeqID_55797
atgcggccaccgagagggcgcggcggcggcggccggttcggcggaggtggaggccgaggcggcggcggtggccggttcggcggcggaggccgtggtggccggttcggcggcgggttccgcgacgagggcccgcccgcagaggtcgtcgaggtgtcgacgttcgtgcacgcgtgcgagggagacgcggtgacgaaactcaccaacgagaaggtgccctacttcaacgcgcccatatacctgcagaacaagactcaggtcggcaaggtcgacgagatcttcggccccatcaacgaatccgtgagcatctcctcgcctccctaa

SEQ ID NO: 14019 - DNA, 417 bp, Zea mays
  Peptide Sequence Number=SeqID_55798
atgggctggagaccacacgttgtctctgtgtcatcttctgcactactagtgctgcttcagctcctcgtgctactgatgctgcccgctgatgcgtcgtcatcaagccaactgttccttgaaagaactcagacgacgacgacgacgatctacgtcgtgtacatgggcgagaagaagcacgacgacccttccctcgtcgtggcgtcgcaccacgccacgctggcctccgttcttgggagaataccctggagttgtgagcgtgaaccaaacacgtaccaccacgtccacacgactcggagctgggattttcttggcatgagctacgggcaacagcggtggtcgtcctggtcgtcgtcgtcgcggctcctaagaaacgccaagtacggcacatatgtcatcgtgggcgtcagacactcatga

SEQ ID NO: 14020 - DNA, 534 bp, Zea mays
  Peptide Sequence Number=SeqID_55799
atggcgtcgtcgtccccgcagcagcacaccgaggtcggctcgtcctcgaacctcgctcaatttaggaatagcggcatcatatccatgaacatgggcgacatcatctgtaacatctacgaccacgagaccgtcaacgctgccgccgccagcgtcagccccggcccggtggatccttcccaggcatgcatcgtagagacggattcgcaggttatgcaggtcgaggaggagcatatagaaccattaagggagcaggtatggtggcagcaaattttgatagacaaccttgttggatatgatactatacctacaaacagcttggtgatttctcctggtcatggttatttatacaactttgagatgaaggagctttatggtcttagttataggcatgaaacaccagaaggtcctacaagatttggagaaggcatgttaaccccgctggaccccaaccctctattcacgccaaacctcagccatttggaacatcttctcttcctccggttcatctctaatcttcatcgcttcaagtgttag

SEQ ID NO: 14021 - DNA, 1473 bp, Zea mays
  Peptide Sequence Number=SeqID_55800
atgacacacctgtgcgaggagacgccggtgaccgtggtgaacgggcagctccctgggccggcgatagaggtcaccgagggagactcggtggccgtccatgtcatcaacaagtcaccttacaacatgacaatccattggcatggcgtgaagcagaggatgaactgctgggccgacggggtgccgatggtcacccagtgccccatccgcccaaaccacagcttcacctaccggttcagcgtcgccgggcaggaaggcacgctgtggtggcatgcccatgtctcctgcctccggggaagcgtccatggcgccctcatcatccggcccaggcacggggctagctcgtacccgtttccgaaaccccacaaggaggtgcccctcgtcataggggagtggtggcagacggaccttggacagattgacaagagtttggcggtcggtttctttggcttcaaccccagctcagccacacttaacggcaagcttggagatcttaacaactgctcctccggtggcgttaccgaagaggggtacgtcttggaggtggaggccggcaagacctacctgctacgccttatcaacgccgcgctgatctcagagtactacctgaagatcgccgggcacaggttcacggtggtcgccgccgacgcgaactacgtgaagccgtacgccacggacgtgatcgcgatcgcgccgggcgagacggtggacgcgctgctggtcgcggacgcggcgcccgggcggagctactacgtggtcgcgctggccaaccagccgtcggtcgccaacccgcccgccgagtcctgcgagcgcggcgggagcctcgagtccatcatcgtggccaccatgaacaacgcatccttccagctccccgcggcggccgcaaagactatcctggaggcgcactacgaccacacccacaaccacacggcggcgggggagctgtacacgccgctgccggagcgcccgccgtggccgttcaacttcaccgaccgcgccttcatccccatcggccccgtggaggcgccgctggagccgacgcggaaggccacgacggggcggcggttccgctacggcgacgctgtggaggtggtgttccagaacactgcggtgatgcagagcgactacaaccccatgcacctgcacggccacgacatgttcgtgctcgcgcagggccgcggcaacttcgacgcggccagggacgcggcgcgcttcaacctggtcgacccgccggtgcggaacacggtgctcgtgcccagcctcggctgggccgtcgtccgattcgtcgcggataatccaggagtgtggtacgtgcattgccattacgagttccatgtggcggtgggcatggcgacggtgttcgttacggaggagggaggacgggccgacggccaactcaactcttcctccaccgccggcagatctccccagttttgcaccgagggcacattcaggcctatggccactagggcctga

SEQ ID NO: 14022 - DNA, 816 bp, Zea mays
  Peptide Sequence Number=SeqID_55801
atggcggacatggtccgcttcctcaaccgcagcggcgcgccgctcaccgtcaacatctacccgttcctcagcctgtacgggaacgacgactttcccgctggactacgcctttcttcgaacggcggccgccgggtgcgcccggtggtcgacggcccgggcccgtctacaaccaacgtggttcgacgccaacttcgacaacgctgggtgtcggcggcttcaagaagggtcgggctcggccacctgccggtcatgtatcggcggaggtcgggctggccgacggacggccgacaggcacgccacggcgggccctcggggagccgctttctacgcggggctcctccagcggctcgcggcaggagaaggcacgccgctccggccggggcgcggggcatcggggcctacctgttcgggctcgtggacgaggacgccaaagagcgtggcgccgggcaacttcgagcgccactggggcatcttcaccttcgacgggcggccccaagttcccgctggacctgcgcggcgacgggcggccggcgatgcccgtcccggcccggggcgtggagtacctgccccggcggtgctgcggcgcgctggaccccgcgcgggaacgcgtcgtacgccttcaacgcctattaccaggcacaggggcaggtggagtcggcgtgcgacttccaggggctcgccgtcgtcgtcgacgaggacgcctctcagggcgcctgcaacttcagcgtgcagctcgttgggtcaggggctccggtggccaccgcggtcaccacgatggcggccgtactggtgcctctgtttcttgtgttgctttga

SEQ ID NO: 14023 - DNA, 207 bp, Zea mays
  Peptide Sequence Number=SeqID_55802
atggcatgcaatctcaatgaactcatgcatgatcctaagttgctgcatatcattcttgatcggtatgggaactttgtgatccagacagcatttaaacagtgccagagcaaacagtatgctgcttttgttgaaactatcaggctgcacactgctgcaatgctaaataacatgtatgggaagatggttctctcgagtatacatgcttga

SEQ ID NO: 14024 - DNA, 918 bp, Zea mays
  Peptide Sequence Number=SeqID_55803
atggcgcccagctctgcgtccttctgcagcagtgctgttaccaacatgctcgccgaggcacctgccagggaggacgcatcggccatgctgagcgacagcgggagcagcgggttggcagtggtgtcatcggacatggtgaggagcatccccagctatgggctcttggtgggcggggcagtggacctgatccttctcgtcctctgcctgggaggagatggatgcggcgacggaggcgccggccgagcgcacgctggacgcgacgggagccgggcgttggaggtcaccgtcttgaggcaggacgatatgatccgcagcgaactcggcagcaacccattccttgcccccttcccccgcctcatccctccccgccgctccctcacctcctctccctgccccagcccggagaccagcacaagcacccgctccgagtccaacttccccgccgccaccgctcctacaacccccgccccgcaatcccgccgctgcccatccacgatcgccgcctccggggctggcgaaagccagtaccatccgagtgccgccgcccctcactgcctccgatccccgctgccgccgcaatccgcagactcagctggccaccatatccctcctcccctcgcacacctcttcctcgccgctcgtcgtcccttcccctccgacgccgaccagaaccgaaattcaacaactccctgggccctggcttccttcacccttttcccttctctctcctcgctgttgctttcgtgtgcctatctccctccctcgcccttaaataatcccaagaaatcccacccggtttgcctctccccacccggcttcgcgtccccggagcaaactctcttccacccagggcccactgcctatccgcgagtgcacgaggctttcctcgggtgcccgtggcgagggcacggggagtga

SEQ ID NO: 14025 - DNA, 654 bp, Zea mays
  Peptide Sequence Number=SeqID_55804
atggtgggggaggacaacgcggcggcgccgacccaagactttgggctccccgctgagctgatagccgtgctgccatcggacccgttcgctcagctggacgtagcgcgcaagatcacctccatcgcgctctcgcaccgcctcggcctcctcgaggccgaagcagcgcgcctgcgctcgcagctcgccgaacgcgacgccgaggccgaggacctccgggagcacgtcgagcagctcgacgccgcgctcgccgtcgccaccggccgcctccgccacgccgaggaggaaaaggacgcactgcagcgggacaactctgagctgtccaacaccgttaggaagttgaacagagatgtcgccaagttggaagttttcaagaagacacttgtgcagtcactccaggaagatgacagcagtgatgtccacattattctagttcccataggacgaacaagagttgatggaaaggagttctttcgtcaggtcagaaatagattatcttatgagcagtttggtgcattcctggctaatgtgaaggagctgaacgcacataggcagaccagagaggataccttaagacaagcttatgagatcttcggtcctgaaaacaaggacctgttcaccatttttgagggcctaataagtcgcaatattcgctag

SEQ ID NO: 14026 - DNA, 999 bp, Zea mays
  Peptide Sequence Number=SeqID_55805
atgcagcttccgcgcgtcgtcgccgccctggcatctcgcacaaaaccctccagaggggcatcgacatgccggctaccgcagcagccgctgagctgcgtcggccgccacgctctctggctggatacacggaaccaggcacacatcgtgcggcgtgtaacacactcccgcacaccagagctgatgttggctgatgctgtcggccctggcacccgcgaccaccaaccagcgctttcccgagccactggtcgtcgccgccataccaccaaacgagaggagggcctcgccgacgccaaaccggccggctgcacagccttgccggtgcacctcaccgagcgactggacgccttactccatccgtgcagctttccaacacccaagcaggccccacccctcgaggaccaccacctccatggcgcagatccgacacgaggaaaacagctaaacacaaatggtctagctaggcaaacattctcagctgttaatcttcagcaagtggggaagtgcaattctattgaatctcttaacactgcaattgtgtctggcaaaacagagaatgggaacaatggctatatatccacgccacctgaaacaaaagcgtctatcagatcattgagcagctattctctcttggatggacatgtggacggaatgctgtctccaaatagcgcatcacacaagccagaaacaacaaataattctgtgctcagcaatgctgcaagcactgatgtacaaaatgggtgtctcaccactgtcgattctggacagcaggaggcgtctcattctcacagctcagtggagtttacccagtatttccaagagggctattgtaaaatatcagaactcgatgactgccgtgagttaactgaagctgttactgatgctgacagcagcagcagccactgcgagagagagaagcccgaggaagatggggataacgatgatttgctcggaggagtttttgccttcagcgaagaaggttctagccatctattcatataa

SEQ ID NO: 14027 - DNA, 1983 bp, Zea mays
  Peptide Sequence Number=SeqID_55806
atgtcgttcggcttgaggaatgcgggtgcgacgtaccagcggtgcatgaaccatgtgttcggcgaacacattggtcggacgatcgaggcctatgtcgatgacatcgtagtcaagacaaggaaagcctccgacctcctttccgaccttgaagtgacattccgatgtctcaaggcgaaaggcgtgaagctcaatcccgaaaagtgtgtcttcggggtaccccgaggcatgctcttggggttcatcgtctccgagcggggcatcgaagccaacccggagaagatcgcggccatcaccagcatggggcccatcaaggacttgaaaggcgtacagagagtcacgggatgtcttgcggctcagagccgcttcatctcgcgccttggcgaaagaggtctgcctctgtaccgcctcttaaggaaggttgagtgcttcacttggacccctgaggctgaggaagccctcgggaacctgaaggcgctcctcacaaacgcgcccatcttggcgccccccgctgccggagaagccctcttgatctacgtcaccgcgaccactcaggtggttagcgccgcgattgtggttgagagacgagaagaggggcatgcattgccagtccagaggccagtctacttcatcagcgaggtactgtccgagaccaagatccgctacccacaagttcagaagctgctatacgcggtgatcctgacgcggcggaagttgcgacactacttcgagtctcatccggtcttggcggacttcgtggctgaatgggtcgacacccagctcccaacagttccgatccagccgaaactctggaccatgttcttcgacgggtcgctgatgaagacaggagccggcgcaggcctactcttcatctcacccctcgggaagcacctacgctacgtgctacgcctccgtttcccggcgtccaacaatgtggctgagtacgaggctctggtcaacgggttgcggatcgccatcgagctaggggtccgacgcctcgacgctcgcggtgactcgcagctcgtcatcgaccaagtcatgaagaactcccactgccgcgacccgaagatggaggcctactgcgatgaggttcggcgcctggaagacaagttctacgggctcgagctcaaccacatcgcccggcgctacaacgagactgcggacgagctggctaaaatagcctcggggcgaacaacggttcccccggacgtcttctcccgagacctgcatcaaccctccgtcaagatcgacgacacgcccgagcccgaggcaccctcggcccagcccgagaaggcacccgggggctacacgcacctgttggtcgccatcgacaaattctccaagtggatcgaggtccgacccctaaacagcatcaggtccgaacaggcggtggcgttcttcaccaacatcatccaccgctttggggttccgaactccatcatcaccgacaatggcacccagttcaccggcagaaagttcctggacttctgcgaggatcaccacatccgggtggactgggccgccgtggctcaccccatgacgaatgggcaagtagagcgtgccaacggcatgattctacaaggactcaagcctcggatctacaacgacctcaacaagttcggcaagcgatggatgaaggaactcccctcggtgatctggagtctgaggacaacgccgagccgagccacgggcttcacgccgttctttctagtctatggggccgaggccgtcttgcccacagacttagaatacggttccccgaggacgagggcctacgccgaccaaagcaaccaagctaatcgagaagactcgctggaccagctggaagaggctcaggacatggccttactacactcggcgcggtaccagcagtccctgcgacgctaccacgcccgaggggtccggtcccgagacctccaggtgggcgacctggtgcttcggctgcgacaggacgcccgagggcggcacaagctcacgcctccctag

SEQ ID NO: 14028 - DNA, 504 bp, Zea mays
  Peptide Sequence Number=SeqID_55807
atgccggatcgcctccgatcaccggttgggaatagcgggaaagcagaactgaaggtcactgattctttgattgatttgggtatagttacaggcaatgagcagtactccctcccggagcttctatcgcactgccgcatgatgacgctgtttgcatctgatgatggatggtgttctttcaatcatttggggttcaggaacttccgtttaatggattatggttctcagccacctgcccactactgtgctgcctgtgcactcgaggccgagcatttccctaggatcgcccttccgcagttcagtgactacaatttcagtccacctttctctgatttttaccacctgagcgttgtcatcgggaaggctagagataatcctagaggctcgaaaccatcgacagacgacagtagtagtacaaacacactacctctcgagccgtacagtacgattctgtgtgattcatggcttccaaatcacagccctaattcgaccccaattcccacgtaa

SEQ ID NO: 14029 - DNA, 261 bp, Zea mays
  Peptide Sequence Number=SeqID_55808
atgggggccgatcgcttcccgagcgtggcggagggcggcctcggcggcgaggcgctctactgcgcggtcatcctgtggctgtccgtgacgtcgtggatcatcttcacctgggccggcgacggcggggaaggcgggaggaggcggcggggcggcggtcgcagccgcgggagcccagcgttcgtcggcgcgtcggggctctgcgacggcaccgggcccgaatgcagcggcggctacggcatctgcggcacctgcctcgactag

SEQ ID NO: 14030 - DNA, 1023 bp, Zea mays
  Peptide Sequence Number=SeqID_55809
atgacgtcgattgctctcaaactccctacgaaggcaaagaaacgtcagcaggaccccgagccgcaccgtcagctacgcttctacagggctcaagcacttctccgacggccactcgtcctcgtcctcgtcctccgcacccattttgcctcctcgtctcaccactggccagcagcccccgaatccatggaccccagccaatccggcaccccttcgttgtttccagtcatggacatccccgttgcctaccctccggcggcgtaccctccctgcgaggtcgccgtcgccgccgccgcctacccgcggcttctctacgcgccgccggatgctgccgcggcccagcaggcggcggccgcgcagcagcagcagcagctactgggcgcccccgttgtctgccctccggcggcgtaccctcccggcgaggtcgccgtcgccgccgccgcctacccgccgcagctctacgcgccgccggatgctgccgcggcccagcaggcgacggccgcgcagcagcagctactgggcgcccccgtccgcgttgcctatgcgccgccggatgctgccgcggtccagcaggcggcggcagcgcagaagcacaagcatcagctgcagatgttgtggttggagctgcgccgagagatcgaggccaccaccgacttcaagaaacacaacatcccgctcagccgcatcaagaagatcatgagggccgacccggacgtctgcgcaatcaccgccgaggtcttggtcgtgttcccctgggcctgcgagatgttcatcctcgagctcacccgccacggctgggcacacgcggaggcgaacaagcgccgcatgctccagaagtccgacattgtcgctgccatcgcccgcaccgatgtgttcgacttctttcgcgacaccgttctgcacgacgacgccaaagaaggcgctgacgcggcgcccgccgcagctgcggctgccgagaaagcgcatcctgccgcgggagcaccggccaccgaccccctcgccaactaccccatgcctcaacagtaa

SEQ ID NO: 14031 - DNA, 360 bp, Zea mays
  Peptide Sequence Number=SeqID_55810
atggggcctactgcggactattgtgatgagcaaagtggacctccaatgggctttacagaatggccccctgagcaattgcagctcgtccgcatgagccacgaagatgattttgcttggccggtttggcagattctggccgcaagcctagattacctcagttgcccaagatccggagccggaggtgcacaaaggggaagggcgactgccaggactgcaacctcgacaaagttcttgctccagttctgtgagcaggcgcacaaagaccctgcatccaagaagaagtcggcgacatgttgggagaaatttgatcctatgtttgtcagtttgagtggaagtatccaaatatttttgtttgtttga

SEQ ID NO: 14032 - DNA, 1584 bp, Zea mays
  Peptide Sequence Number=SeqID_55811
atgtcagtgagccatgccgacgagcacgagatatctctgtgcgaccccagctccgaggacgaccggcggcgccggaagatcgggtccctgccgctcaaggctatccacgcgctacggaagaagcgcgcccggcgtcgcgtcactgacttccggttccccgcggccatctccatcgaggacgtccgcgacgccgaagaggagcgcgccgtcgccgccttccgcgaccgtctcgccgcgcaccgcctcctccccgacaagcacgacgactaccacatgatgctgaggtttcttaaagcaaggaagttcgattccgacaaggcaatgcaaatgtggtcagagatgctgaggtggaggaaagagtttggtaccgacacaatcttggaggactttgagttcgacgagctcaacgatgtactccactactatcctcagggctaccatggcgtcgaccgtgaaggccggcccgtgtacattgagaggctcggcaaagttgatccgaacaagctcatgcagatcacctcggtggatcgctacatcaagtaccatgtgcaggagttcgagagggccttcagggagaggttccctgcctgcacactgtcagccaagaggcacattgactccactaccactatactggacgtccatggtgtggggttcaagaatttctcaaagaccgcaagggagcttgtccaacgtatgcagagaatagacagtgactactaccctgagacgctacatcagatgtatgttgtgaatgcaggcagtgggtttaagttgatctggaacagtgttaagggattcctagacccaaaaacttcttccaagatccatgttcttggttccaactaccagagcagacttatcgaagttattgactcaagtgaattgccaaaatttcttggcggatcatgcacatgcagtgagaagggtggttgcctcaggtctaacaggggtccatggaatgaccctgtcatcatgaagggcatgcttagtgacatatcaaatgctgaatctgagtcggatgttgatgacgttggtttaacagttgtccaaaagagtacggaccacagtttactaaccccagttcatgaagaagtcaaggggtcagatacttcgatattttgtagttctagcaggaatgcttacattagtttgcatggtacatccgctggaaggactctggaaaaccttgctaccggactgatcacactcttgatcaggatatcatctttcttccacctttccgtctaccggcaagaaagatttatagaaaccgtccaaccctgtgccgcggcacaggaaccagaacctcaaagggaagaggacatgagtgcttgtttacgacgcctcaagaagctcgagtcactgtgtgatcacctcatgagcaaacctccggatatgccgaaggagaaagaacttgtattgatgcagtccttcgatcggataaaatccctcgaggctgaactggaggcgacgaaaaacgcgctgcaggctgcggtggaaaagcagatggaactggtggagacggtagaagctctgcagcaccaatcgaccagcgttaggaggagattttgctgttcatag

SEQ ID NO: 14033 - DNA, 1716 bp, Zea mays
  Peptide Sequence Number=SeqID_55812
atgcctccatggggcgaccaagcagctgctcctaggggtagcacaacaaggggatcagcccaacagcccaatgcccccatgcatggtggaaccctagagcttcacccctttttagcaccagcattccgccgcacgacctcactcaccacaggtcgcattgtagctgctgctgttttcccagtaatttcagctctaattccaggtgtcaacattcaaggtatcaaggaacgcaaacctccagattttgttacctcaaggagaagatacatgaatagaagcatttgccaccacctccttgcccactgcaaaaagctaagagagctccagagaatccacgctctggctgttacccatggtctccaccccaaccatcagtctgtttcctgcaaaatcttccgctgctacgctgattttggccatgtagctgatgctcgcaagctgttcgatgagatcccacaccctgaccttatcttctttactagcctcatgtccctccatctcaagttagatcaccaacgcgaagctatatccttgtttgctcgtgttgttgccgctggccaccaccttgatggctttgcggttgttggtgccctgtctgcctctagtggtgctggtgatctagtggttggtagggcagtccatggccttatttttcggcttggattggatcacgaggtcgtcgttggcaatgcattaatagatatgtatagccagtgtggggagtttgagtctgcggtaaaggtgtttgataggatgtttctgaaagatgaggtcacatggggtagcatgctgcatggtcatatcaaatgtgctggtctggattctgcactgtcgttctttgatctggttcctgtgaggagtgcagttgcttggacaacactgataactggtcatgtgcaaggcaggcagcctgtacgggctctagagctttttggtaggatggtactggagggccatcgccctacccatgttacaatcgtaggtgtactctcagcttgtgctgacattggtgctctggatctagggagtgtcattcatgggtatggaagcaaatgcaatgccagctcgaatataattgttagcaatgctctgatggatatgtatgcaaagagtgggcgcattgagatgtcattttctgtgttccaagaaatccagtcaaaggatttttttacatggacgactatgatctcatgctgtacagtccagggagatgggaggaaagctcttgagctctttcaggacatgcttagagctggaatagttccaaacagtgtaacctttgtttctgttttgtcagcatgcagccatgctggcttgatagaagaaggtagagaattgttcaacagaatgcgtcaagtatacaaaattgatccccgacttgagcactatggttgcatgattgatctgttaggacggggaggattactagaggaagcagaagatctaatagctgatatgaatctggtgcctgatattgttatatggaggtcacttcttagtgcatgtctggttcatggcaataataggctggctgagattgctggaaaggaaattataaagatagagcctggagatgatggagtttatgtgctactttggaacatgatgaacttgataaatcagaaatatacaactcagatggggaaaagattgttcatgagcaggaacataggtgccaagagtgtggccgttgtttccagaaaccagctcatctga

SEQ ID NO: 14034 - DNA, 1872 bp, Zea mays
  Peptide Sequence Number=SeqID_55813
atggactacacatcagatggagattctgaggttgaagcttatggatccagcacttttgagcttctggaatcaggagatttaaaaatgatgagtgatgaaggcttgtaccgatgccccttttgttcagatgacgagaaggaccacagtctaaatgatctgctgcagcatgcctctattgtaggagctgcacatgatcggcaagccaaagagaaggcggaccaccgtgctcttgcaaggcatttgaagggtaagccggttgaatcacctggcgcacttttgcagccaatgcttatggatgtgcaggatcctgagcatactcaagatgagcaatttgtttggccctggatggctatcctagtcaatatgccaaatgaattcttcggtaaaagtgcgaaccgactgaaggagcattactcatcttttcgtccagtgaaagtgcatcctgtatatagcaaaggtcgtcccacgcgtgatgctgtcattgagttcgggaatgactggagaggttttaggaacgcacgggcctttgatggtcactttgcgatgaaagggtacagtaaaaattgctggaaggagatgaagtgtggaggtacagagactgttgggtggatggcaagggctgatgactacaattctctaggggcaataggtgaactactgagaaaaaatggtgacctgaaaacattaaaagatattgggagtgaaggggcaaataaaaccgaaagacttctgtccaatttggcctgcaaagttaaagaaaaggaaatttatttagagaaacttgagtctgagtacaacaagcgttctgcttcacttaacataatgatgcagaagagggagcaacgactccagtcatacaatcaagaaatcctgaagatgagaaagcttggtcaacaaaacacacaaagagttgttgaggagaactggaagctacagtccaatatccaggacatggtggatgagcttgatgcaagaaacaaacaaatcgaggagtcagaacatgacaaacggaatcttgagcaggagaagctaaagaatgcaatgaggaccagtcatcttaggttggctgcattggagcaagagaaagctggtgaaaatgttcaaaagcttgtggataaacaaacgagagaaacaaaaactattctagacgattttttgaggttgaacactcagttggagatgaggcagaaacttgaactggaaataaagcacttgagcgggaaactgcacctgatggagctcaagccaggtgatgaagacccgatatcgagagagaaaatggctaaactaaaggaggagctcaaagagaagatcgaagaactgaacgatgcggaaaactacaaccaagatataatcagtagggaaagcaagatcagtgatgagctgcgagaagctcgagaattgatgataaatgctctgcagagtttgtctggatcctcagactgccctacacagataggcgtcaagaaagttggtgaacttgacctcagtgtgtttctaaacctgtgcaagcggaagtttccagcagtggatgcagaagttgaaagtgctagactttgttcaaagtggcagaatgacattgaaaatcctgaatggcatcctttcaaggttattattgttgatggaaaagtgtcggaagcactcaatgagggtgacaagaagctccaagaagtaaaggagctcggtgaggaaccctatgctgcagtaacaaaggcgctgacggagctgaaggacggcaatggcggcaggagggatcctttccctgagctgtggaactaccacttggatcggaaagcaaagacggtggaagcagttcggcatgctttggcgctttggaaagcaagcaagacgaagggcaagcgaagccgctga

SEQ ID NO: 14035 - DNA, 315 bp, Zea mays
  Peptide Sequence Number=SeqID_55814
atgtcgacgtcggagaagaagggcgatgaacgatggaataaggtgaagcatatactggattgcctcgataacaaggttggatgcgatggaggcaggacatcattgacttcaggctcaggcgggaaagacagaggaggagcgagagattttggttgtcaagtggagatagggaaaacagtggcacacctacaactagagttgatggccacatacatggaaggtatggagtcaggatctaggagggagaatcaaatttattctggtccagagcatggtagaagagagtgggcgttcgagaacgcggggaagagatag

SEQ ID NO: 14036 - DNA, 705 bp, Zea mays
  Peptide Sequence Number=SeqID_55815
atgaaccaccatccacaggagggggttgtctatggctacaccgaggtcacctacttggccagcaccggtcctcccccgccgtaccatcctcctcctcctcttcctcctccgccgccgccaccaccacgccgcccgagcccgttccgcatcatcgtaagagtcttcatcggcgtgtgcgtcttcatcggggtcctcgctctcctcatctggctcatctaccggccccggacgatccaggtggccgtggccaccgcgacgctcgcccgcttcgacctcaacaccacgtcgatcttcaccccgccggtgctgtcctacaacctcaccgtgatgttgtccgtctcgaaccccaacaggcgcgtgtccgtctattacgaccagctccaggcggcggggctctaccaggaggagcgcttcgggcgcgccgcgctgcccgtgtcgttccagggcacgaggcgcgccgacgcggtgccggccctgctcgtgggcgacacgcccatggggttcggggactccggcgtcgccgcgttcggtgaggacagacgcgccggggtgttccccgtggacctttgggtggaaggggtcgtgcggtacaagttcggtgagctgatgaccaccacggcgagcacgctgacgatcaagtgccatctggcgctgaagctcatgcaggcgtcgggttgggtcgaatgtactgtgagcgactcatga

SEQ ID NO: 14037 - DNA, 2595 bp, Zea mays
  Peptide Sequence Number=SeqID_55816
atggagtcacggatggatcagtacgaggttttggagcagattggtcgcggcgcctttggtgctgccatcctcgtcaaccacaagacagagaaaaagaagtatgtgttgaagaaaatacgtcttgcaaggcagacagagcgatgccgcaagtctgctcaccaggagatggctcttattgctcgcttgcaacatccttacatcgttgagttcaaggaggcatgggttgagaagaaactactgagatggtttgcgcaattggcattagctgttgactacttgcattcaaactttgttttgcatcgagatctcaaggatatggctggactgataagtaagataaatcgctcctccattggccctttgcctactttctattcttcatctatgaaaacacttatcaaaagcatgttgaggaagagtcctgaacatcgacctactgcatccgagattataaaaaatccatacctccaaccttatgtgaatcaataccgtccatttgctaatatattacatcctggtcgatcaccagagaaacctggcaccgattcacggagcagtcagaaaagtatgtctgggagtcagtgtagtagcatttctggaactggcagtgatatggatagcatacaatcaaatgaaagaaacacgtcaggactagcttcaagttccagcaacaccattgataccgagggtgctgaaactactgaacttcagagacataaagatactgcttgtcctggactcaagagacaagattcatcaaaatccgtacaagataatcaacatcctggacatgagaataagcaaccaaagataattaagaagatactaacaactctaagagaggagagcaaatttagggaaagcaattctcctgttagagctagccgtgtaaagctaaattcacctagcaatagagaacgctcatctgacgactcaaagcaaagtgatatttcctccagttcaaggtctagtgaagttatgtcacatgaatcagcaaatgcaagctgtgaacctgtcaaacgaggacatgcatctcctcccttgaagcatttgtcaccaattgttgagcattctccgaaggttaaaattaaagtagatgagctattacatccacaccttgccaagcaggttggagaagttgttgatgcagctgcagggaaggttaagaacagaacaccgcccatttttattaaatgcaccagtattcctactcggaggcaaggagtagcaagtccaagccgtcaacacactggggtaaagcgagctcacaataaggtcatggcagagcatgcaaggaatccttgtcagcatctccatagtccaagcaacgctcttgtgaaacttccaagtgttccaatggttcctccaagtcatctagaagatcttaagagaaaaccagacaatacacgagcaaaatctgctcctcctagggctttagcaaccaaggaagacaacagtgcttgctccagttctacgattggtaatgctgaaaacaccaaccagtctgaaccgtctgaacctgactcaccaacttatttggtctcatcctgcaaatgtttgatacctgacactatcatacaaaagcacggcataacaagtaaaaaaagttcagaaatcatcacaaccaattgtgagaagaaaatgactagtaatggtgatcttagtctaagcgcagccatggtgcaatcttctgatattcctgaacaagagtttatttgcaaggatggaatgctctccagtcaggtgggtcagtgcagtgaaacagttactgtaccaagcgatgaagacaagttcacagtgcgggaactgctttcatcagtaccagatctttgttccttggtcccaacaacaatgatgaacactgagccaggaagaggacccactctcacccagtcatcagagaaaccatcgggtcctcatttaaatcctcctccagttgaggacattatacatgtcataagccacagcagtttccatgtgaatggtgagcaggcagtaaaagaaactggatcagagagcattgatgttgacaaacgtcttaacatggtaagagaagagataggtgtaagaagcaccgagccaaacctcataccttctggacctatagattctgatacggtgaagccaaatgtagtagaagctaatattacctttcagaaaccatccagtacagatgccataaaactgccaaccataccggaaggaaattttagtactctggagaccaacaatgggtttaagcaggaagcagctccggctaaggaaatactagatgtgacatctttcaggcagcgagctgaggctctggaaggtctcttagaactttctgcagaattactggaacacagtaggctggaggagcttgcgattgttctaaagccatttgggaaggccaaggtgtcccctcgagaaacagcaatatggttggctaaaagtttcaaaggcttgatgaatgacgaagcaagccgcagttcaacttggagctccatttgttcccaagcagcttcgccactttctatttcagctgtggctgcctgcgtccctgcgctgctactgctaccaagcccaaatgctccatctcttggtgctgagtaa

SEQ ID NO: 14038 - DNA, 720 bp, Zea mays
  Peptide Sequence Number=SeqID_55817
atggcagcctacgagaagcagcagcggccggagacgccgctgaacgccgcgtactacggccagccgatccctccgccgcagccgcccgcgtactacccgccaccgccgccgccgccacccgtcccacgccgcggcggccgctcacgctgcctgctcggctccgtcgtggccctcgtcgtcgcgctcggcgtcgccaccctggtgctctggctcatcttccgcccggacaacctcagggcctacgccgactccgccgcgctctcccgcttcgacctcggcagcggcggggacctcctccagtacaacctcaccgtggacatccgcgtgcgcaaccccaaccgcttcgggatccgctacgactacgccgaggcgcaggcgttctacgacggcgaccgcttcgggttcgacccgctgcagcccttctacctgggccgcaggagcgacgcccgggtcacgggccacgttcagcggctcggcggcgatggacgacggcggcgaccgcgctgcgcacgtaccggaggggagagcggggagggcttctactacgtcacggtgaaggtgtactcggaccttagcttcagggttagggtcgtccgccgccatgacttcaagagcaagatcacctgcgtgctgcggctgcccgtgcccgctgccggcggcaacgccaactccaccacggcgatgacgacgctcgggacgaggtgcgacgtggacttctga

SEQ ID NO: 14039 - DNA, 642 bp, Zea mays
  Peptide Sequence Number=SeqID_55818
atgtcgtcgggcacgggcacgggcaggtcgtccaccaggaggggaaggggcggcagcttcacgctgaggcatcagccgccggtggtggacatcggctgtaactgccgccgccccaagctgttctccgtcttctcgtcgtcgctgttccgcggcgggggcaagcccaagtcccccaacgcgtcgtccacctccaccaccacggcgttcacggccaccaccgcgggcgggcgcagccgcagcggcacgacgacggccacctccaccgactcctcctcctggggcccccgcgtccagcagcagcgccggcgccgcagcaggcgggcgccggcgcccgcgcgccacggcgcggtggcggaggaggaggtggatggggaggagcaggagcaggagtacgggcggcgggtggcccgggagagcgtggcggtggcggtggattcggcggagccgtacgaggacttccgcgagtccatggtgcagatggtggtggagaaggagatctacgcgtgggacgacctcaacgacctcctccaccagttcctctccctcaactcgccgcgccaccacccgctcatcctccacgccttcgccgacctctggacccgcaacggcctcttctgcccgccatctccctgccagttctag

SEQ ID NO: 14040 - DNA, 375 bp, Zea mays
  Peptide Sequence Number=SeqID_55819
atgagcaggaacaacggcaaggcgtcgaagctggagctcctaaggatgggcctgtcgagggcgaggggcgggccctcggcgacggcgcggcccggcgggggacagcggcagcaacggccgcgcgacgacgtcgccgcgccgggtgtcctcctcgtcctcgtccaccgcgtcgccgccgagctcgtgcgtgtcgtccgagggcagccccgacgcggccgccgccgcgccggcgcccatggtcctggccgggtgcccccggtgcatgattctgaaaggaatggggaacttagatatgttcagagaggccccgtccagtatgatcaccgatgcagaaatgtctcctggggccagacccaaataacggaaaatccatga

SEQ ID NO: 14041 - DNA, 777 bp, Zea mays
  Peptide Sequence Number=SeqID_55820
gcgaatcgttcggcgagtcaagcggagtcgagccctggtcgggcgaagcgggtttcgtcgtcttccggttcttaggccgagtcgagcctgggtcgggcgaagcggaggttcgtcgtctccgggtcttagcccgagtccgagcctggggtcggcgaagcggagttcgtcatcttccgggtctagcccgagtccgagccctggggtcgggcggagcggagttcgccgtcttccgggtcttagcccgagtccgagccctggggtcgggcggagcggagttcgccgtcttccgggtcttagcccgagtccgagccctggggtcgggcggagcggagttcgccgtcttccgggtcttagcccgagtccgagccctggggtcgggcggagcggagttcgccgtcttccgggtcttagcccgagtccgagccctggggtcgggcggagcggagttcgccgtcttccgggtcttagcccgagtccgagccctggggtcgggcggagcggagttcgccgtcttccgggtcttagcccgagtccgagccctggggtcgggcggagcggagttcaccgtggtgcctttggcaaggcctgactgcctgtcagactcactctgtcgagtggcactgcagtcggagtggcacaggcggcgctgtccttctgtcagactggccagtgggagcggtggagtgacggcggtcacttcggctctgccgggggcgcgtgtcaggatgaagctttatgctgatgggggttaccagctgagaattaggcgtcttgagg

SEQ ID NO: 14042 - DNA, 351 bp, Zea mays
  Peptide Sequence Number=SeqID_55821
atggagtccctaatccctaattccctatccagcactccgtcgcatcagcggcggcgcccccagcgacgtcctcccaggcggcaagagcagccggctaggccgctgcaggcgcaccgtgcgcaccacctacagctagtcagcagggcagcaggcgcagggcggcagcagggcacagggcggcagccgccagtcggccaggcggccagccagtcccaggcggccagccgtgcggcactacagccacacgcccatgcgtcgtcaagcctccacgacttggttttttccttgtttgttgttgttgtcgtcctccacgacttgctgcttggagccttgcagccttggagatgctag

SEQ ID NO: 14043 - DNA, 273 bp, Zea mays
  Peptide Sequence Number=SeqID_55822
atggtggggttgggcgctgtttgccgtgcgactaaagatagtcgcatggacaccgtgccttcatactgtagccatgcacggggtgcctcgataccgctgcattggttttggaaattcaccttctttgtcctctgcggtggccccgaggaggcgcgatactggcgcgagcagcggttcgacttctctacacccaggaactggcgcccaaggaggatgactcgtgggcctgggccctcgtgtcatatactgggctgttggtttcggtggaggtga

SEQ ID NO: 14044 - DNA, 189 bp, Zea mays
  Peptide Sequence Number=SeqID_55823
atggagtcctcatccttacgctgtggccactcctgcacagacttatcaaaaagactggacccgtggggagtccaaaagggtttccgggggaaggcagacttcggggcttgccctccggggccccgggaagaggaagaaggagatagagcaaagggtctcctctttctgtccgctcttcctggcatgtag

SEQ ID NO: 14045 - DNA, 1146 bp, Zea mays
  Peptide Sequence Number=SeqID_55824
atgtcgtcgagagacttatacttccacgacgagctggcgtcgctgttcgcgcagcggccggcgccggccggagaggcgatgatgacgcaccagcaccagcagcagcaacaggcgccggcgtcgtggttcgcggactacctgcacgcgggcgccccaggcatggggatggactacgacctgctgtgccgcgcgctggacctgccgctgccgggggacgacgtcgtcaagagggaggaggagctgctgctggtggacacaggcggggacggaggaggcttcgccgcgcccacgcccacgcccagcgggggcggcacggcgccggtcacgcccaacaccacgtcgtccatgtcctcctcgtccagcgaggcggcgggcggcgccgccggaggaggaggaggaagggaggaggactcgccgcaggggaggtgcaagaaggaggaaggggatggggaggagagcaaggcgctcgacaagggggaggaagacgctgacaagggcaagaaagggtcagcggcggcaggcaagggcaagggcaagggcgagaagcggcagcggcagccgcggttcgcgttcttgaccaagagcgaggtcgaccaccttgaggacggctaccggtggcgcaagtacggccagaaggccgtcaagaacagcccataccccaggagctactaccggtgcacgacgcagaagtgccccgtgaagaagcgggtggagcggtcgtcccaggacccggcggtggtgatcaccacgtacgagggcaagcacacgcaccccatcccggtcacgctccgcggcagcacccacatcctcgccgcgcagctgcaccaccaccacaaccaccacctcggcgccttcccgacgccgctgccgcagacgggcgcggcgccgttcgggcgggctgcaggcggaggcgtcatcgacatgctggggctcctgcccccgcgcaaccacggcatgagcggcggcccgatgagcgccgtggctggcgccgcgacgacgacggccgccaccattactactacctccaccacaccgtcgtatcccccctcgctccagatgcagcacttcatggcgcaggacttcgggctcctgcaggacatcatgctgccgtccttcggcggcggcggcggtaacatccagccctga

SEQ ID NO: 14046 - DNA, 426 bp, Zea mays
  Peptide Sequence Number=SeqID_55825
atggcggacgggcgggccgcgagatcgcggcggttttgcggcgagcgggcggatcgcgcggttgcggcatgcacgggcgggcaggcaaggcgtcttcccagcagcgccttcatcagccaccgccgtcgcgtcttcttcagctacaccttccgcaccgcggctgaaaatgcgccgctgccccagatcgtcgtcgtgggctccgccgacatctacgtcgaggtccaccgatccccgctcatcggcgagacggccgcgcgggcggcaagggcgccaacctggccgcctgcggtgcgccctacctacctcgtggcgcgcgtcggggatgacgccaatggccgactactcgaggacgccctagccgacgccggcggcgttgcaccgaccgcgtcgcgcgcgcggccgatgcgccatcgggacacgccatag

SEQ ID NO: 14047 - DNA, 216 bp, Zea mays
  Peptide Sequence Number=SeqID_55826
atgcctcgacctattggtgcttccttctctggtggccgtggtgccaccagtggtcgtggtgccaatatttcagcgccaaatgccgctcacagtcaagaggacaatgacgacgatcgctttgcacagaggagagctggagagggcacggagaaatggaccgagacatggaccgtttttcttcagcacggcagcccccagccagtttttcatttgtga

SEQ ID NO: 14048 - DNA, 294 bp, Zea mays
  Peptide Sequence Number=SeqID_55827
atggcgatggagtggactagcggagacgagctgccggcggaagacgccgccccgtcctaccggctcagcatcggcgtgcgctaccggctaagcatcggcgtgcgtggcgcctgggctctcgcggtcgcggctgtcagacagcaagaaagaaacgtagaccagccgccatacaagcagaaacccattgtcagcttcttcagttttctagaggaacctgttggttcagccataaaaagtggcaagcaacagagaaaccaacgaagaatttctggaaacaaagacatcagccaataa

SEQ ID NO: 14049 - DNA, 300 bp, Zea mays
  Peptide Sequence Number=SeqID_55828
atgattgcatcgaccaccttccgtcgacggagcgaagcggggcatggggaggagggcgttgatagcggcaggtcacaggagcttttgactgaggagacaggatttgcgagatgcgtcctcggcccttcagtggatcacggcgggcgacggctgacgagatctaagcgcgaggggaggagggcgcgaggatgtcggcggggaaggtggccgttgatggcggcgggtcacgggagcgacggggaggatgtcgggggaggcggcagaaccgtgcaccgtggtctacactgcactcttaagtag

SEQ ID NO: 14050 - DNA, 492 bp, Zea mays
  Peptide Sequence Number=SeqID_55829
atggcggtcaggcgagggattcctgcactggagcttcctataaacttgtcggggaccataattaggggtaccctcaaggctcctaattctcagctggtaacccccatcagcataaagctgcaaaggcctgatggggctcggactcgggctaagccccggaagacggcgaactccgctccgcccgacccagggctcggactcgggctaagccccggaagacggcgaactccgctccgcccgacccagggctcggacttgggctcagccctggcttcagccgacggtctccgcctcgcccgacccaggggctcggactcgaccacggccacggaagacagactcgacctcgacctcggaggagcctccacatcacccaaccctagggcgcgggccagccacgtcaacaggaggcgccatcattaccctaccccgagccgagtcaggctacggggaacaagacaggcgtcccatctggctcgctccgccagatag

SEQ ID NO: 14051 - DNA, 714 bp, Zea mays
  Peptide Sequence Number=SeqID_55830
atgggggagaatatgggttcacgtggggctggaatggggctttcagatgctactaaattcgtgtgggattgcctcaatcaagatgacgatgagctaatgggattgcttggaaatcaaaccccgttgagagactgccgtgatttctttgctgaccttggtgatttcacatgcaaggagaccttggacctggaggaatctcgggaatcaaagcggcggcgcacattagagtacccttcagagtctagtcagtcagaagttgggactcatgatgctgcttcaccttttgtcacatctgaggcagcagaaatttcattgctctgcactgataaaccacagagcttaaattgggatatgcaccacacttcaaataatttaggaacaagtgagactggaccaatgacagaaagtttcataatgcaggaaactagaaagctttgtacactcaaagtgtccaaaggatcaagctcaacactagttaaggtgaaggaaaacttaactacctcagtagcatatccttttactcttatcaaaccatcttgggaggaaggcgatgttaccttgcaggatataaatcagcgaattcgtgctcctcctaagaaggcccccgagatccttggaacttcagcattctctggcaagccagtgattggcaagacaagaatcagaacagaaggggggaaaggaagcatcacaatactaagaacaaagggctga

SEQ ID NO: 14052 - DNA, 324 bp, Zea mays
  Peptide Sequence Number=SeqID_55831
atgacgcccgagcagaagcaagacgagctgaagaagctgcagagcgcgaaaagcggaaccttcgtcgtcgagcgcgcctttggtcgccaccacgagcctctagccgctcatagctccctagaccgcagctggcgctcgtgccgctggggtcgtcgttgccgcttgctcctcgaggaacctccgctgccgcatgaaggggggcaaagtcgctcactcgcatctctagggccgcgcctcccagaccgctgtcgtcgctcgtgcctcagacacctcgatatggtgcaactgaaccagatggcaccattggaccatggcttcctctag

SEQ ID NO: 14053 - DNA, 1137 bp, Zea mays
  Peptide Sequence Number=SeqID_55832
atggagtttttactgggtgttaagttgggcagcagtttaagctcaattgggttgtttgtattcttgcatattgcggcgctgcagctggataggaaggtggtggatctggcagagctccggaggctcgcatgccagggcgtgcccgacgccgctgttagcagcttctcttgggatatgtgccaactgatcgtgctctatggccgtatgaactggagaaaaagaggtcccaatactgtgatttcaaagatgaacttctggttaatcctattcattaatttgtttattttgaggaagccttttgttcctttatccaactctgtagtaatacatttatgctctggtcagtcagaagttactcgaagaatggaggaaatgacagcttctgaaagagaggaacataatgctgaaggcaccggtgtgctaccaagggcggaaatcgttcgtgatgagcatcctctaagccttgggaaaactagtgtttggaaccaatacttccaggagtctgagattgtagagcagattgatagagatgttaagcgcactcatccggagatggaatttttcaatggggactcttcagattcgctgtctaatcaggagtcactaaagcgtatacttacaatatttgcaaaattgaatccgggtataagatatgtacaaggaatgaatgaggttttggcacctctctattatgttttcaagaatgaccctgaccaaagtcaagctgctttagcagagccagatgccttcttctgttttgtcgagctgcttagcgggttccgagacaacttttgcaagcaacttgacaacagcgtggttggcatacgctccacaattactacactatcacagcttctgagaagacacgacgaggaactctggcggcatttagaagttgtaaccaaggagttccagttccgtgactgcctcagcctgtgggacacactgttgggcgacccagaggggcctcaggctacgttgttgcgggtctgctgcgcgatgctaattcttgtccggagaaggctcttggctggcgatttcactgcgaatctcaagcttctccagaactacccacccacaaacatcgaccacatcctacacattgctaacaagctgcgaggaccgcttcctttctga

SEQ ID NO: 14054 - DNA, 174 bp, Zea mays
  Peptide Sequence Number=SeqID_55833
atggcctcggtactcgagaaagccagctgtgaccatgtcgaggttgttggagaagcttgcttcgacatggccattgatgatatcaaaactccttcaaagaatgtactaaatgctgcaaagagatttttctttgagaacaaggagttgaaaaagacaaagaagacaaagaagtga

SEQ ID NO: 14055 - DNA, 273 bp, Zea mays
  Peptide Sequence Number=SeqID_55834
atggcggacgaagctgaccttcaaccgaggcagtgtacaaagaagcttcgtctatgcgcgcaagtggcgaagatgacatccaaagtcgataacttcggacacaagccaaaggcgaagctaccaaacagcgcaggtcgaaacccgcgcagttggggatggagaaaatacgttattgtcctaatatcatttgtaaacagtattggttctcgaaggcctattgaagctctagattctccaagttatgttggtcatgtgggctttgatgggccttaa

SEQ ID NO: 14056 - DNA, 255 bp, Zea mays
  Peptide Sequence Number=SeqID_55835
atggctccagtgccaagtgttaagctcgactcaggatcaaacttcgttgggtcattgctctacatcgataacaagtccacgcttgccctcaccaagaatttggtgcttcatgatcgaagagtcatagcattggacgtaacgtcttggctcagtatcctcaccgaggctgctggactgggtggtctccagcccccgtccgtctatgatgctatggactctccggacgtcactgttgggccgcaagctgacccctgg

SEQ ID NO: 14057 - DNA, 213 bp, Zea mays
  Peptide Sequence Number=SeqID_55836
atggactccaaaggcaaggggaaagtgtctgacgagaaggagaagatccccatcgacgatgagcctaaaagagaaaagactgtcgactcaggatcgagcaagaaggagggcaagaagaagcgcatcaaaaagatcatctactatgatagtgtacttcttcttctatgcaaaaggacaatgactcctcttgtagaagatgaaaatggcctatga

SEQ ID NO: 14058 - DNA, 288 bp, Zea mays
  Peptide Sequence Number=SeqID_55837
atgggggacgagacgggcgtcgcgaatgagggcagccttcggcgaaagacgagcgcggtggctagagatgtgatggggaggagagctgcggcggcgagttgcgacagggacgagatcgttgcgggtggcttctcgtcgaagcgcggcgcgcaaaagcgggacgagaagctacacgtttgggaggcgtttcggcttctggcggccagaatccgcccagaagctgaaccaaacaggggctataagctctcaaaggcgctttatgggctcaaacaagccccaagagcatga

SEQ ID NO: 14059 - DNA, 540 bp, Zea mays
  Peptide Sequence Number=SeqID_55838
atggatcttgagagtggcttgccgaagagactgttgttatgggttgttggttgcccacatactcgggaatgtatggggaataacacgaagcggcgcctgagctctcagtcgcaagaaccttcggatgtacgcttgcagcgtaattttccctggctgaagagaagaatactgtcggggaccataattaggggtacccccaagactcctaatctcagctggaagctccgcctcgcccgaccccagggttcggcccccgtctcagcctcggaagatggacttcgcctcgcccgaccccagggctcggactcagcctcggctccggaagacgacaaactccgcctcgcccgaccccagggctcggactcagcctcggctccggaagacgacgaactccgcctcgcccgagcccagggctcggactcagcctcggcctcggaagatggactcaacctcggcctcggaggagcctccgcctcgcctgacctagggctcggaccaaccacgtcacaggggggccatcattaccctacccctagctag

SEQ ID NO: 14060 - DNA, 993 bp, Zea mays
  Peptide Sequence Number=SeqID_55839
atggcggttgtggaggcgtgcgaccccgcaaggatcgacatctcgtccaagacagcagcctcctcagagcggacgacgcagcttatctctggtggaaggcacgcagccacgcccccactcccctcctcgtgctccccgccgacgcctgcctcgcgctcctcgtcgaccgtctctccctctcctccgtcgttgcatctcgcctctcgcgcacgcacaaaggtctctgattcttctcgtcggcgagcaaggacggaggagctggcggagtcctcaagctcgacccgcgaccagaggatcttcatcgccgccgttggcgtctccaccgtcgtcatcctcctcctgaggacgttcctgctcaagccgttcaagctcatcaccgtcttcctccacgagaccagccacgcgctcgcctgcaagctcacctgcgtgtgggcgcttggcgtggccatgcccccgcctcgcctctccctcgtcctcccctccaacaatgtcactgccatagtggacccgtcctacgctcccctcacgttgcccgcccccaccccagccaccgtcgcgccgccccgttctccccatcctcagcactccgctacacgcccgccgcagcccgacgccccgtgctcggcgactccccctccgtcctctcgccgaggctgccctcgtcctcccccacacccgctgcgtcgcccgaatctgtgctcgcgatgccttcacttcccctcgcgctgccatttcctctgcatcaccagccatgccgccgacttgcctaggacggagcccgcccgaccaaccatgccaggcgccacgccgtcccctcagcgtcgtcctctccacggtgtggtcggccgtctcgaagccctcgcgtcccctagcccatgcacccgcctcggatgccccaactgcccgaacgccatgcccccgcctcaccgtcccctctgcgcagccgcgcagtcgcggtgcgatcggccgtggaggagccctcgcgtcccctaa

SEQ ID NO: 14061 - DNA, 5412 bp, Zea mays
  Peptide Sequence Number=SeqID_55840
atgttgcaggagcagggcgtggtaggtgacaaaatgatgactacccaggaggatcagcagatgagccaaatcaacccgccgtcccatgcttcattggagcagtttgaatcagctaatctccaggtggatggtatggttcttccacatgcttccgctggcattcctaataggcctcatgatggaacagagtcttctagaaatggtacaattgaggatatatgtgctgatgaatcagccaatcatagtggtcacaatttagaaatgcgaaaggatacggacagtaaatcccatgaaaaggagtcacataagcgagaacaagtcaagaagatattatcagtatgttctggtgatgagaccaatataatgaaagatgatcaagtagtcagagaaaatgtttcagcttccaaaaaaggtgaagatgagacatctgatttgccagcagaaaaggatgataccatacttccagtcaccagagcttgtacaatgatcaggaccaatcaagatcatacagatgaaagtaaacagcatgggaaaatagaacaaataacaaataaggactacaatgatgctggatatgagttcttgatcaaatgggttggaaaatcaaatattcacaacagttgggtttctgaatccgaggtaaaaatattagcaaaaaggaaactagaaaactacaaagcgaagtatggaatgagtttgataaacatttgcaaggaacagtggtgccagccacagcgagttattggtcttcgtgcttctgtagatgaagtggaagaggttttaatcaaatggtgtggtcttccttatgatgaatgcacttgggaaagatcagatgaacctaccctgatgaaatatagccatttggtcactcagttcaagaattttgaatgccaggctttggataaagatgtggtaaaagattatgcaaatgcaaggaaccgacatgagcttaatgtgttagttgatcagccaaaagaacttcagggcggcatgctcttccctcatcaattggaagcgttgaactggctgcggaaatgctggtacaagtcaaaaaatgttatccttgctgatgagatgggtcttggaaagacagtgtcagcttgtgcttttctatcatccctatattgtgaatttaagattaatttgccatgtcttgtcttggttcctctttctacaatgcccaattggatggctgaattttcatcttgggctcctcatttaaatgttgtggagtatcatggttctgcaaggtcaagatctatcattcgccagtatgagtggcatgcgggcgatgcaagccagattggcaaaacaaagagatcgtacaaattcaatgttttgcttaccacttatgaaatggtgcttgttgatgctgcatatcttcgttctgtctcatgggaagttcttatagttgatgagggacatcgcctgaagaattctagcagcaaactctttagtttacttaattcattctcatttcagcacagagttttgttgactggaactcccttacagaacaacattggtgaaatgtataacttattgaacttcttacagcctacttcttttccttctctatcatcatttgaggagaagtttaatgaccttacaacagcagaaaaagtagaggagctgaagaaacttgtagctcctcatatgcttcggagattgaaaaaagatgcaatgcaaaatatccccccaaagatagagcgaatggtacctgttgaattgacatcaatccaggctgaatactaccgtgctatgcttacaaagaactatcaagtactgcgcaacattggaaaaggtggtgcacaccagtctttattgaacatagtaatgcagcttcggaaagtctgcaaccatccctatcttattcctggaactgaacctgaatctggttcacctgagtttctgcatgaaatgcgcataaaagcctcagcaaagctaactttgttgcatttgatgctaaaaatattacacaaggaaggccatcgtgttcttattttctctcagatgacaaaacttcttgacatccttgaagattatctgactttagaatttggccctaaaacatttgaaagagttgatggctcagtatctgtggcggagcgccaggcagcgattgttcgctttaatcaggataagacacgttttgttttcttgctgtctacacggtcatgtggacttggtattaatttggcaactgcagatactgttatcatatatgattcggatttcaacccacatgctgatatacaggcgatgaacagggcacacagaattggacaatcgaacagacttctggtttacaggcttgtagtacgtgctagtgttgaagagcgtatcttgcaattagccaagaagaaattgatgcttgatcaacttttcgttaacaaatcagaatcacagaaagaagtggaagatatcattcgctggggtacagaggaactctttggaaatagtgacagtgtggatggtaaagataacagtgaagtcccaggtcctgttgctgatgttgaatttaagcatagaagaaaaactggtggcctaggtgatgtttatgaggacaaatgtattggtggttctaccaaacttgtttgggatgaaaatgctattttgaagcttcttgatagatcaaaccttccatcatcaatggctgaaagcactgacggggatttggacaatgatatgcttggtactgtgaagtcaatagattggaacgatgagctcaatgacgaccctggtaccaatgaggatactgcacctattgacaatgatggtagcgagcaggcatctgaatcaaagcaaggtgctaccaatcgttcagaagaaaatgaatgggataaacttttgcgtgtcagtggaaagcttcgagctagacaaaaggaaaggattgctcagcgacacattatcaagaactatgctgatgataatcttgaagagttcatgactccatacgactctattgctaatgaacctgctgaaaatcctttggtaatcgtagaagatctaaattcttcacagctatctggcgcgaaacgtttcagtgactcaactggagaaatgaggcaatcctccaagaaatcaaagagatattctgaaatccctcaagatctttatgccaaaattcctggtaacacagcttcattcaagcaccactcaaaggccactgatgtattcaatccagggaccccaaatcacttgctacctgtacttggcctttgtgctcctaatgctgatcaggtgaactcatacaaaaactcaatttgtgcaccaagcataaaggagcgtaaaagggccagtggtgacattgtcaaacaactgtcaactcctgctgaccattctaatgtgcatagaaacgaagctcaatcagcttctgataaggccatctttcctggtgcatctgaggaggctttgcgaagaataagtaacatgattccagatagttattttcccttcagtcatattcctcctatatcagggaagggggttgatcctgttgaaaatcctggaccctccattgcatcatttcaagggaatctgggtcttccaaacttcagtctggaagacaacgctccacttaagcatattaagcctatacctgatatatttcctagcctgtcactgggtgctcataaggattatattcgtagttctgtcccagagttgccagatggttcattgctgccaaacttcatggcagatattactggtacttcgaagcaaaagtcatttatgtctggtctacttcctgggctgggtcttagcccagggcaaccaatacattcggctatgcctgataatcacaagaaagtcttggacaatataatgatgcgtgctcagtatgcgtcaaacaaattcttgaagaagagatcaaaactagattattggtcagaggatgaacttgatgctctgtggataggagttcgtaggcatggaaggggaaattgggatgctatgcttagagatccaaagctgaagtttttgaacaaccgaactagtgaggagctggccttgaggtggattttggaggagcaaaaaattatagatgaacctatgtctacatccaccaggcgttctaactcagcagcatttcctggaatatctgatgcaatgatgtctcgggcactgaatgaaagtaatttctctaaaatgaggatggagcagcctaaattgcagtcccacttaactgatattcagttaggttcgagtgatatcctatccacatttcctcatgttgacgctgctagttacattaactcaggggagggtggcccatctcaaataccatggcaggattttaagcatagatcaagttatgctggagattttcctgccggtgcatttgacaagttggagaaacctgatgttggaccgatcccgccatttatgccaaatcctttcatgactgacagcattggttcacttcccataaacagaaaaaacaatagttccatcccgcatagtgaaatcaggtcaagttctcgtgagaacattctttctggtgtttcggatggacagatcaacttgcttcatgagatgcagcgtcgtcgtcgtgtgaggtcaggcaaagaacccattgagatgaatctcaaccacatagaccactcaaatctccagcttgataatactagtgaccttggaggtttaaaaccaaacaagttacctcattggcttcaggaggctgtacgtgctccttcatctaagccacctgaacgtgagctaccagcaacagtttcggcaattgctcagtcggtctgccttcttcttggagaacaagaaccatcaatacctccattcttgatcccgggaacacctctttctcgcccaaaagatccaaggattaattcaaagaagaaactccgcaaggctcagcaatctaactctcatgtagagcattcaaaaattggatctggtgagggtgattgtgtcactaccccagcacccccatccattgaagcttcacctgcacttcctgtcgattgcgatgatggtgagccttcactcaacttgaaatctgcatcgttgtcatcttcagctggcagcaaggggctagatgaattacctcccacatttaaagaagcaaaccaaaccgtggatggctcagaagctgttgcggccaagtcagatgctcctgaaattggttgtcaggtacctggttcctctccattacatgacaaaggtagtgaatcctcggggtcgccagtgaaggacactcctgacgctggaatcagattgccaggatcagataactcagttatggcattttctgcactcccacttgttgatgaagcacctgggacaagcagcagagcagctgacacgcctgtgccatgtgatggcaatgagtcgaaagaggatgttccactagacaacgctgaaagcaccaggaaactggagccgaacggatga

SEQ ID NO: 14062 - DNA, 378 bp, Zea mays
  Peptide Sequence Number=SeqID_55841
atgacacctcttttatatgggcatgcattcaactctgtggtgaatacaaagaagggaaatacaagaacaaaaccactccctctttctaaaagacttcgcctagaagcacagagggtcctgaaggagcgtgttcaggacattgcagataagaaaggcatcaagctgagattttgtaatctcagagaatgtgaaagccacatctggtcgttggatagtccgtgtgagaagactagagctgaaattggatggccacaaggggttccatttgtccatccacatgacctcccaaacaaggcaaagcttgggtttttcgaagcttacgaacctggatggacggcctcccaacaagaaatggagttaagttttactgaaccttga

SEQ ID NO: 14063 - DNA, 1284 bp, Zea mays
  Peptide Sequence Number=SeqID_55842
atggagaatgggcagcagatcgctgtgaagaggctgtctctggggtcacggcaaggcgtgcgcgagttcctgaacgaggtccggctcctgctcaaggtgcagcaccggaacctggtgtccctgcttggctgctgtgcttcctccggccacaagatgctcgtctatccctacttccccaatagcagcctcgaccacactctcttcgacaggaataagtgtgcggcgctagattggccaaaacggtaccatataatcgtgggactggcaagagggctcctctacctgcacgaagagtctccggtaaagatcatccaccgagacatcaaggcgagcaacgtgctcctggacgaccagctgaacccgaagatctcggacttcggcatggcgaggctcttcctggaggacgccacgcacgtgccgtacgtgactagtcgcagtggttacatggctccagagtacgcgatgaacggctacctgtccgccaagaccgacgtcttcagcttcgggatcctggtgctggagatcgtgagcgggcggaagaacatcgtccggcatctggacgacgagaaggtcgacctgttgagctatacatggaagctattcggagaaggacggtccctggagatcgtggacccgtcgctgtccagccccgacagcgatcaggcgctgctgtgcatccagctcggcctgctgtgctgccaggccgcggtgtcggaccggcccgacatgcacagcgtgcacctgatgctgtcgagcgactcgttcacgctgcccaggcccgggaagccggccgtacacggcaggaccggccggtggacggcagcgacgacgacggcctcagggtccgcgtcggcgtcgagcgccaccaacaccaccagcacgttcgggttcggcaccgacacgaacacgaccagggcctctgcgctgctggccagtgtcgccgaggacgagtcccggaactccatctccatatccttcaccactgatggccgtttacttggcgagcaggcaacagcacctttgcgtgctattatctcagagatcattctcgcgcttagtttgcgccagctgctctccctagctaacgctagagacatcgcacgcgatggattgtcttgtgaagttgtgaagctttatgatccaagccccatccgcatccgcatccgcatccgcatcgtcttgcagttggtcagtatacaatcgctgtcaacatgtcaactggtaccaattggttttcgtagtctcctgagtcatgaccttgcacgcagatcaatggcactctga

SEQ ID NO: 14064 - DNA, 396 bp, Zea mays
  Peptide Sequence Number=SeqID_55843
atggccagtcacccaaacgacagtatgagtgcacaccgagtggccactatcgacatgaccgcacctccccaagagtgcgttctcactcgcgagaacgcacttcggcggcagcaagaaggcctcgacgctctcgtccgtaagctcggtcgaatttacggtgacattgagaaaaaacgcctcgaggccgaacgatcccaagcgaaaaggttttatggccagcttgccgaaagcagtgacggggcgcaatacttcctcaacattggacagaacatggcagcggcagccatgatgctccagtccatccccaagcccgacgggccagaggcagaacgtctctacatccaatcttcgacgactcgcgttatcggcacctttgttactcgatgctcgcagtag

SEQ ID NO: 14065 - DNA, 447 bp, Zea mays
  Peptide Sequence Number=SeqID_55844
atggccaatcgttcactggagttccctccatactacagagtcgtgcctcgccatcgatacacccttgcccatgcatcggggtttgagggcctggtgggggttacggtgaccgctttagttggggatttcaatcttgtgatcaccaagattgggggcgccccggcggggctccgccgctgcattgggtggcgccatcacggaccgctgctcctccagccatcggtccgagatctgacggtcgatgctagataccggttcaggcgtataattgatttaatcgtggcagccagatcttcatcggacggtcctaacagtcccgtgccccttcgacaacgtaaaaattgtaaaagagccccttgggttatggggaatcaacccgccatcctgtgcggagttctctgtgtctgggggatttcacgtgttagcccccaagttttcgagaaataa

SEQ ID NO: 14066 - DNA, 666 bp, Zea mays
  Peptide Sequence Number=SeqID_55845
atgccagatctagcaattgtcccatcacatcttttgaagcctcttctaaagctggggtggtgccagtggattggtgctattattttcatctggggctcactccatcagatccactgccatgcaattcttgtatgtattcgcttctgtcattctactagttatttatttgttgcaaatgcgaacaacatacaacagcaattgggatcattgcgtgaacacaaagattctgatgaatatgtaattccttgcggcgactggtttagtcgtgtgtcgtgccctcattaccttgctgaactaggtctgggagcatgggatattggggttggtttactattggtggatgaggttatgattggtactctgttctctgctaagaaaggccttccattttacatcttgtttgaaatcctactatacttcagttggatcatccgttgtcagggtcacgctttgttcccacacaagtcctttctgcaccttgcattattagtcgctggcacctctgcaaagagaggcctaaacccatcgcctatagcaaaactccagagaaactatgatgtcagaagaccctcaagtgcaataagtccgatgatgtcaccaagctactttgtgctgcccccgtttcaacctctcatgagccaccgtaagcaggcctttatccactaa

SEQ ID NO: 14067 - DNA, 792 bp, Zea mays
  Peptide Sequence Number=SeqID_55846
atgcctgccctcgccaagcccgcctcccgcaccgccaagcccgccgcggctccgaagccgaagcctgccgccgccaagccgaaggcggccaccgctggtgcctcccacccgccttacttcgagatgatcaaggaggctatcacggcgctcaaggagaggaccggctccagctcgcaagcgatcgccaagtatgtgggggacaagcacggcgcgtctctgccggccaacttcaagaagatgctttccatccagctccgtgggtccgcagccaagggcaagctcgtgaaggtcaaggcttcgtacaagctctcggacgccgccaagaaggcatcccccaagaccaaggctaagccggcaaaggccgccgctgccaagaccaccgcccccaagccgggccaaggccgccgccgccaagtcaaagaaggcagcggctgccaagccaaagaaggccgctgctgctgggaccaagcgcaaagtgcccgagaagaaggtcgtggcgaagccgaagaagtcccccgccgccaaggccaaggccaagccgaagaccgtgaagtcccctgcctccaagaaggcacggaaggcctccgcatgagatgggttgctttaggtctaagctctgattgtggttggtgtcagttaggaatcatattttctgcgattaggatccgggcggaagaaaaccgacgaagacgacgaaactgggggacatgccgtagcttcttccctgcactcatccgatatttgcttgtggataatgtcgagcccgtggattatcttcgctgttgcaaataa

SEQ ID NO: 14068 - DNA, 378 bp, Zea mays
  Peptide Sequence Number=SeqID_55847
atgggggcaagcaacaacttgttgcaagccagcaccaatcttactgccttggacgaggacgaggacgaaggcctgactgtcttcccgcgggatgaaaaggcgcagagcaggccatggatgaaacggccgccggcggccctggggatcggcagcgcggcagcggcgatggggagggtggccgcgacccaggcgaggcacagaagagcaatggcaaggattagtgcgcgcgaggtggcgacgcggcgcggcggaggcagggaaccggcacggccgtcgggcgttctggttggtggttggagtgaaaggaggcaagccgatgtggaggaagagatgtcaacgggtatccgatacccgctaacacatggggaattcccctaa

SEQ ID NO: 14069 - DNA, 536 bp, Zea mays
  Peptide Sequence Number=SeqID_55848
atgactgtgttgaggatccaagagaggacgacattgtccatctggcgtcaggatgggacaattgggcacacgttgtcgggaccggatgttctaaacactggtcgcctgagcatagaggttgacgatggcagcagtctcatacatcgaaggggtctccatctactggtatcccgagggaggatctgtggtagtacgaccttcgaggtggtgagcgagtgcgtcgacggcggcacgctcttgctcctagacgagagcagttgtccgctcccgctcccgctcccgggcaacagtgactgtgagggccgcgacaagtatggagtgggctgcaaccacctcatgggggaggcctatagtgccaaacccggaggggaggggagtagggatggcattggagaggtggggagggatcgagatggtgccgacaacagtgatgacgggttcatgtctaggccaaatccaggggaccaggcactcgacacgcctgtgcccaggtgcgatgttcctgccccgactggcggtgggatgacgactgtgag

SEQ ID NO: 14070 - DNA, 807 bp, Zea mays
  Peptide Sequence Number=SeqID_55849
atggagcggagggcgcacctcggaggtgccgttgacagcgaagcgtgcgacgccggatgcgccggcggctcgtataagggcaggggcgacggccgcgatgcgggggtcttgcaggtggcagtgcgcgtcgaagagacgtacggcggaagcggcgcgcgccggagcctgggccattaccggcgtttagcagtggagcctggggctgtagaggcggtgacgcggtggccagcttgccgctgtccgcctgtccgggagaggagagggtttttcgatgggcgccgagcgtggtcgcgtggattcggtgttggcccagcaagcggcaaaggatgtaatgcgttcggcctttgggctctatccgaaggcccgaaagccacaataaagaccgctactcttttactctggggctcggactcgggctcagccccggaagacgacggactccgcttcgcccgaccccagggctcggactcgggctcagccccggaagacgacgaactccgcttcgcccgaccccagggctcggactcgggctccgccccggaagacgacgaactccgcttcgcccgaccccagggctcggactcagccctggcctcagccgacggtctccgcctcgcccgacctaggggctcggactcgacctcggccttgaaagacagactcgacctcgacctcggaggagcctccgcctcgcccaactcagggctcggaccgaccacgtcacaggaggcaccatcattaccctaccccaagctgactcaggctatgggggacaagaccggcgtcacatctggctcgctccgctaa

SEQ ID NO: 14071 - DNA, 327 bp, Zea mays
  Peptide Sequence Number=SeqID_55850
atggaggccgcggggcctgcgaagccggaccaccaccccgcagccgcagccaaggagggggccggctgcccgcggcggtctgcgccgtggtcgtcgtggctgtccgccgcggccgcggggctcgtcgcggtggggctcggtggcgcggcgctgctggtgtggtgggcgctggcgttccacccggcgaacgcgcggctctggatggtgcccgcggggctcgtcctcctcggcacgcccgtcctggcctggctctccctcctcggctccggcccgtgcggccgccaggccgcgccaccgcccgatgctggcgtgtacgcgtcagcttag

SEQ ID NO: 14072 - DNA, 1602 bp, Zea mays
  Peptide Sequence Number=SeqID_55851
atggcgccgttccagatgcgtttcgggctccagatctctcccgcgcgctccgacgacgacgaggaggaggacgacgacgacgacaacgaggaggagtatgacgagatggcgagcgaggggacggcctcgccgccgatgatgctccggccagggaggggagggggagggctggtgagcgccgtcgtgggcgcgctgcggaggtcgctggtgatgtgcagcgctggcgccgtggatatcgacgacgacgacgacgaggaggagggcgggatcgagatcgggcggcccacggacgtgcaccacgtctcgcacgtcaccttcgaccgctttggtggcttcctcggcctccccgcggacctcgaacccgaagtgccgcggcgcacgccgagtgccaggtcaaattctacatgcagtgtaagcgtatttggggtttcacctacctctctgcaatgttcatatgatccaagaggaaacagtgtgcccacaatattgctaatgatgcagaggaagttatatgatcgcggaggacttaaggttgaagggatctttaggattaatgcagaaaatagccaggaagtctatgtgagggaccaattaaacagtggagtggttccaaatgaagttgacttgcactgccttgccgggttgataaaggcatggtttcgggagcttccttcaggtgtattggatgcactgacaccagaacaagtgatgcactgcaacacggaaggggggtgcgctctccttgcttctatgctaccaccagtggaagcagcattacttgactgggcaattaatctgatggccgatgttgtagagcaagaaaactacaacaagatgaacgcccggaacatcgcgatggtttttgcgcccaatatgactcagattatacaaggttcatattatacctacacatacgctaatcctggtgcatttctcttccagatggccgatccgttaactgccctgatacatgcggttcaggtgatgaatttcctcaagaccttaatcttgaagactctaaaggaacgaaacaaaaaggatgaggcacttgaggcgttgcaaccatgctccagctctccaaatgaccaagacgaacatcaggtgtccgagcatttggagaaaccttcagttctgccaaatcaaaaaggcttcggtttccacatgaatgatagtgccactcctgttcaagtccttggagctgagaaaactctccatcatcactcacaaatccgttctcacgagccaaaaaagtttggaaccgatatggaccacaagaaaagacagagtgatgcctcctctctcctcggcagcgattcgagcaaccgattcaacagttctgggagagaattcggtagcagaaatggcgcgtccgacagatttagttttaggaaaggggtggagaggctttgcaggcatcccgtgtttcagttgaataggtccatgaagaagtctacagatgccgtggtcttcgatgccccccgagaaacaagacaggcttggatgcctgagactgctaggcgtggtcctcggtacccagctgcatctgaagtccgaaccgttgtgatgcttttgtctcctttgctgaagcagtcaggccagtga

SEQ ID NO: 14073 - DNA, 372 bp, Zea mays
  Peptide Sequence Number=SeqID_55852
atgcatgttttcttcttcttctctggcctaccacaggtcatgcgaagatctggtaagggcagagatgccagtaaagcagtggggtcaagcgacgtctctagctcagagatagggcttgctatgtcgccaagcttgttcgtcgcgaagacgggtcacatcattgcgacgagcgagacctggctttgtcaggcgggccgatgtcgcgacgacgacggggcgggggtggaggcgccaggaagggtcggggtcgggcagcgttgcgtcaagaggaggcgacagtcgaaacgggcatcgaggcaaactggtttaggtggcatcgaaaacattagggtcgaagtgatagatgcgaggactgggttggagaggatctga

SEQ ID NO: 14074 - DNA, 264 bp, Zea mays
  Peptide Sequence Number=SeqID_55853
atgccatgggttgcaatctccccagatcctgaccgcgtcgctctcccagtcccagtcccagtcccaggaagcaggagtgtacgagtgcagactgcagagtgctctggtgacgttcacagtctggggaaacgctgtgtcatggacagtcagtggacgattgatgaccacagatgcgctcggcagtatttagtggctcccggggactggggctcacgcttaccccatgtacagtaccaggggtatcaagatcggcaggaatcctga

SEQ ID NO: 14075 - DNA, 3288 bp, Zea mays
  Peptide Sequence Number=SeqID_55854
atgccgccgtcgcggtcgttgttcctgctgctcatgctggcgctggcgccgctcgcgtcgctgaccgcgccggcgccggcgccggtggcgaggacagccggggtgcaggcggagatcgacgcgctgctcgcgttccgccgcggcctgcgcgacccctacggcgccatgtccgggtgggacgcggcgtccccctccgcgccctgctcctggcgcggcgtcgcgtgcgcgcagggcggccgcgtcgtcgagctgcagctcccgcggctccgtctctcgggccccatctcgccagcgctcggctcgctgccgtacctcgagcggctcagcctccggtccaacgacctctccggcgccatcccgccgtcgctggcccgcgtcacctccctgcgcgccgtcttcctccagtccaactcgctctccggccccattccccagtccttcctcgccaacctcaccagcctcgacacctttcgacgtgacctgcactacctctggctggacgggaaccttctcgaggggaccatcccggccgcgctggcaaactgctcggcgctgctccacctgagccttcaggggaactcgctccgcggcatcttgccgtctgcggtcgccgcgatacccacgctgcagattctctccgtgtcgcggaaccagctcaccggcgccatcccggcggcggcgtttggtcgtcaggggaactcgtccctgcgcattgtgcagctcggcggcaacgagttctctcaggtggacgtgccgggaggtctcgccgcggatcttcaggtggtggacctgggaggcaacaagctagctggtccattcccggcttggcttgctggggcggggggactgacgctgctcgacctctcgggcaatgcgttcaccggagagttgccgccagcgctcgggcagctcactgcgctgctggagctgcgcctcggcggtaatgctttcgctggcgccgtgcctgcggagattggcagatgcggcgcactccaggtacttgatctcgaggacaatcacttcaccggcgaggtgccgtcagctcttggcggtctcccgaggctcagggaggtctatcttggtgggaacactttctccggcgagattccggcgagcttggggaatctgtcgtggctagaggcattgtccataccgaggaacagactcactggtggcctttctggtgagctcttccagctggggaacctgacgttcctggacctatcagagaacaacctcgccggtgagatacctctggccatcggtaacctgttggctctccagagcttaaatttgagcggcaatgccttttctggtcacattcctacgaccattagcaacctccagaacctgcgagttcttgatctctctggtcagaagaacctctctggcaatgtcccggcggaactttttggcctaccgcagctgcagtatgtgtcattcgcagacaactccttctctggtgatgttcctgaaggattcagcagtctttggagtctgcgcgacctcaatctctccggcaattcattcactgggtcaataccggcgacatatgggtacttgccgtcacttcaagtgctctcggcctcacacaaccacatttctggggagctgccaccggagcttgccaattgttccaaccttactgtgcttgagctcagtggcaaccagctgaccggctccatcccgagtgacctctcgcgccttggtgaattggaagagctggacctcagttacaatcagttttcaggcaagataccaccagagatatccaattgctcatcactcacccttctcaagcttgatgacaatcgtattggcggagacataccagcctctattgccaacctctcaaagctgcagacgcttgacctgtcgtccaacaatcttaccggcagcatccctgcatcgttggctcagattcctggccttgtgtcattcaatgtgtcacacaacgagctttctggtgagataccggcaatgctcggctcccgctttggttctgcttcagcgtatgcttcaaacccagatttgtgtgggccgccattggagagtgagtgcggagagcagcggcggcggcagagacggcagaaggtgcagcgcctggctctgctaattggtgtggtggctgctgccgtgctgctccttgcgctgttgtgctgttgctgcgtgtttagcttgctgcgatggaggcgtcggttcattgagagccgtgatggtgtgaagaagaggagacgcagcccgggacgcggcagtgggtcgagtggcacaagcacggagaacggtgtcagccagccgaagctgattatgttcaactcaaggatcacttatgccgacactgttgaggcaacccgccagtttgacgaggagaacgtgctcagccgaggccgccatggcctcgtgttcaaggcttgttacagtgacggcaccgtgctggcgattctgcggctcccgtccacgtctgcggatggtgccgtggtgattgatgaagggtcgttcaggaaagaggccgagtctctcgggaaggtgaagcacaggaacctgactgtgctccgtggctactacgccggtcctccgccggatgtccggctgctggtctacgactacatgcccaacggcaacctcgccacgttgctgcaggaagcgtcgcaccaggacgggcacatcctcaactggccaatgaggcacctcatcgcgctgggcgtctcgcgcggccttgcgttcctgcatcagtccggcgtcgtgcacggcgacgtgaagccgcagaacatcctcttcgacgccgacttcgagccgcacctgtcggacttcggcctggagccgatggtggtgaccgcgggtgccgccgcggcagccgccgccgcgtcgacatcagctgcgacacccgtgggctcgctcgggtacgtcgcccccgacgcggccgcggccgggcaggccacgagggaaggcgacgtgtacagcttcggcatcgtgctgctggagctcctgacgggccggcgccccggcatcttcgccggggaggaggaggacatcgtgaagtgggtgaagcggcagctgcagcgcggcgccgtggcggagctgctggagccgggcctgctggagctggacccggagtcctccgagtgggaggagttcctgctgggcatcaaggtcgggctgctctgcaccgcgtcggacccgctggaccgcccggccatgggcgacgtggtgttcatgctggagggctgccgcgtcggcccggacatcccgtcctccgccgaccccacctcccagccgtcgccggcctga

SEQ ID NO: 14076 - DNA, 345 bp, Zea mays
  Peptide Sequence Number=SeqID_55855
atgacacaccatccctctttcaccatcgcgccttgtggcctcaccggcgacctcaccgccacgggagcccgccacctcaccgtggaccgaccgtcccgagcccccactggccaaattgaccccaccaccgtgaccccctacccctgcctgtgctatgccaccaccctgaaccggatcaacggcgaagaaccgttgtcgagttcgtcggtggccggcaaagaggggtccgaccctccagaaatcgtagctccggaagaagggcatgagctcgacctcctggaaatagagctttcttgccaagagagcttcaacgaagggcaagtccattctacccttgatgcataa

SEQ ID NO: 14077 - DNA, 1383 bp, Zea mays
  Peptide Sequence Number=SeqID_55856
atgcggtccacgctcgtgccgtacgatcccaccgtccaaccgattaaccaaatacaatcaacggctaatagaccatactgtgcggctccccgtgtccgatgcggctccacctggactcgcggccacgcgcagccatcatctgtttcttctttctttgacgcctcagttcaactcgacgtccccgaaatgcccctgccggccgcgccccaccggtgtcggcctcaccgcaccaagtcggacgccgactgggccagggcccaggggcgtttacgtaaccccgcgccccgccccgtcgcttccgccgtcccgtcaccgcatcgcgcggcgcctcggacagctggaccctgccccgtcacggccccgcgtggatggtcggttctgcccctggccccctcgcggcgcacgcacccgtctggtggccggcctatctggtgcgcgcaggcgacgcccacaacgaatccgtccccccgcgccggcttcgcccagccccgcggcgacgcaccagtctcctactcccgctgggtggagaatgccgtgcgcttataccctgccgctcgcgaagaatcgcacctgggcgacattgggggttcacctaggaagcatttcgtgctcttggttcgagctttacaagtgatgatggtgttggtggtaaagcagcaccgctgcacacactctgcgagctgcgtttgcatcaagggccacctcagtgaggatgctctgttcctcgtcttccgccacatgaactggaacccgaggctgattgctatcttgtcgtgtgtgtgcaagtggtttgacgaggttgccaagcaggtgctgtggaaggagttctgtcatgcaagggctccaaagatgatgctggatttgcattcaggtggcagccacattgttgatgggaactggaaggcactggggaagctgctcatctattgcaatggctgcacaaaaggggggctgtttaataacattcacgttccaggccattttgtgttcaggacacgcttttctaggactgcgggcaggagtttcctgcctctgccatgtaagtcggatgtcctgtatgtgtcagatccatgcgagcatcttgatcagggggaagaaggcgacataggtttcttccgaggcatctttatgtcatttgccacttcaagggtaaagaagatgttgattgagaagcgggcgaggtttcatccaagggagttgtgcccttattgtaaggccaagctatggaacatgtttcaggaaaatatgatcccaaggagtgcttccgcaaggctgggtgcctatgatgactctgtggagtattttgtatgcctgaatggacatgttattggactcggtaccctactaccactctcagactcagaggaggcagcagatgagtga

SEQ ID NO: 14078 - DNA, 120 bp, Zea mays
  Peptide Sequence Number=SeqID_55857
atggggtcgctgcccattccatcccaacacttttacagtccaacacttttacagcccaaggagctacagcggctacgcacggcacaacaaacagcatttaagaagtatgttgacatatga

SEQ ID NO: 14079 - DNA, 2903 bp, Zea mays
  Peptide Sequence Number=SeqID_55858
agggacacaagtttggatctaccggtcaggaggacacgaaaggtgtaattgcacaaactttagtcacgacagtcgatctaagtggcagtgatggaattcactgccagactgatgaacaaacaaaaatgtcagaataccctgatttggactacactgcttttggctctcctagaagtttgtcacgtacagatggggatgcccacatgagaactaagaaaaatgaagggttgcagaatggtgatattaagattatcactgagaacacaataagtgtggacaacgagctagtgatctatgaagagaaaactatagttgtcaatggtaatgcaatacaggtagtaaaaaacgttgtcaatgaagagagcatcgcggctaagataggcaaaccaattactgagagtaggacctcattggacaatgacaatggcaagattcaaactgctaaaccttctgatatagccaatggcaaattggatgggtgtagattagaatcttgccttgaaaccgtgcctaccaagaaaaccactgtccatgacagaattgttgtcttaccagccactggagtagcaactgagataaaagccaagcaagaggtgcttgttgacaaacaggattttggtatagttcttcctcaaagtcgaacagtagccagggctagggagtccgaggcttggaaaccatctcaccctccatctagatactacagttcaccagctgcactaggtattcgatccatatctacagatggtaaaatcagcgttgtgaatgatgcacctttattatcactaaaacaaccatatggcagcaacttgacacgagaagcaacatctgcacagtctgctccatcgcctccacaaaaatccttgttactaggtgcacaaagtgcatcaagaagccaggtttctccaccgccaccgcctccacctccacctgcaaccaactattcttcaagttctacgcctatgcacatggggttagcttcaacaggtttgtcaaacttacctcaaggtgcttctccacctaggtcaccggtagcacaaaaacatgcatttgcccctcccgctcctcccccgcccccacctccacccccgaggtcaggtgtaggtggaaatactccacctccgcctcctccaaggctaaataacagtgcaatcgctccaccgcccacccccatccaccataacacgatcaagtgctcctcctccaccaccaccaccacaatcaatgtcacgttctgctcctccgccacctccgccgccaccaccatcattcagcaccatctcccccgccacctcctcctagccgaggagcacccccaccccttccccttggtcgaggagcacctccacccccacccccaccaccaccacctggccgaggagcacccccacccccacctcctcctggccggggagcatccctgcccccacctcctccccctagccgaggagcacccccgcccccacctcctcctgtttcacgtgcaggacctccaccacctccgcctcctccaggtgctcgctgtggacctccacctcctccaccccctccaggtgcaagtgctccacctccacctcctcctccaggagcgcggccaggagctccacctcccccacccccacctggaggtggtggaagaggacctctaccacctcgtgcaccagaggacgtggggctgtacgccctatgggatcagctattggggctgctgcctcacgcaagtcaactttgaagccattgcactgggtcaaagtgacaagggcccttcaagcgtttcagagttcgatgtatcagaacttgagagcctttttcctgcagctgttccaaagtctgatgacagctcaaaatctgaacgtagaaaatcacttggatcaaaaccagaaaaagtgcatctaagtgcagctctcacgctagatcaatctaccttggatgttgatcaagtggagaatctcataaagttctgtcctacgaaagaagaaatggaacttctcaagaattacactggagacaaacagattcttgggaaatgtgaacagttcttcttagaattgatgaaagtgcctagaatggagtcgaaactgcgagtattctccttcaagatccagtttggttcacaagttgctgatctgagaagaaacttggatatcatagactcttcttgtaatgagatgggaacagacgacgtggatgttggggtgagcaacgctgaagggtcgacggggaacaggtgcgatggttctgggacaatcacgtcacagaccactggagtcgggcttaaggaggtggtacttgctgcaagatctccacagcttttaaacttctatgcggatcttgttagcttagacgccgcatcaaagatacaactaaaaatgttggccgaggaaatgcaagcagttagtaaagggctggaaaaggttcagcttgagtatgatgcttcagaaagggatggtccaaaactgaaagagttcaccgacaatgctggatctgatgtgcagtcgttatcttcattgttttctgaagtgggtaaaaaggctgacgcgttgatcaagtattttggcgaggatcctgtccgttgccccttcgaacaagtgatctccaccctcttaacttttgtaacaacatttcgaaaagcacatgaggagaacctgaagcaagctgaacttgagaagaaaaaagctgaaaaagaggcagaagcagagaaggccaaaaacgcacaattaactggcaaaaatggtaaaaaggctgacgcgatgatcaagcattttggcgaggatcctatccgttgccccttcaaacaagtagacgaagatgaggctgcagttgagcgctcagacgcggtggaagatgttcttgaggagtcgaggacatcccagagcttcttcaccccatcgccaccgctgtag

SEQ ID NO: 14080 - DNA, 279 bp, Zea mays
  Peptide Sequence Number=SeqID_55859
atgaggcggcatgggtggcagctcccgtaccatcctctccaggtggtggccgtgtccgtcttcttggcgctggccttcgcgttctacgtcttcttcgcacccttcgttgggaggaatgtgttccagtacgtggtcatagggctctacactcccctggctaggtgctgcctgatgggcctagcaatggttgctggaggcctggagctaaggaaggcgccgaataagtgtggcctaatcatgaaacgtgttgcttggcagtcttgcgtttttttttggtag

SEQ ID NO: 14081 - DNA, 306 bp, Zea mays
  Peptide Sequence Number=SeqID_55860
atgaagaaggtggtctactacgagaccgactcttcgtcgccctccacgtccggcaccgagtcgtcgactacttctaagcgccatgagcgcaagaagtatagcgaccgttggcgttgtagtagccgttactccgctggcacaccggacagtccggtaaattatatcggagtggctcccagaattcccgaaggtgagcggttcggagtcgggttctctggtgcaccggacattgtccggtggcacaccggacagtttggtgcgccagaccagggcacacttcggttgtcttttgctctctttgtttga

SEQ ID NO: 14082 - DNA, 1701 bp, Zea mays
  Peptide Sequence Number=SeqID_55861
atggagttggactggaccgcttttctagagtggaacatgcacatcgctggatcagttgatcagatgtctagtagctccaacggccattatcctgctaatggtgcaaagattcttcatagaaaagaaaagaataaagagaaagtacagctcgacaaaaattcagccacttgggtgtgccagaaggacaggcattatgttgaaaaattagaaacagaattgatgaactgctatcaggaaattgactatttgcaggatcagttaaatatacggagcgttgaagcaaacttcatgggagagcacattcacagtcttgaactgaagctgactgaacttgaaaagttcccagaaagagtgagagcgatggacaatgagctgatacgatctgattcccagtgctggcttctgatggaagaagtcagatgtaaagaagaggagttgcagaaggcagcctcacagatagagaagcttgaaagtacagctttagattcacaatgcgaaattgagagcttgaaacttgatttgactaatcttgagcagagactatttgacgctgagagattttcccaacatgctggtgagcacaaagctcaatttgacaaactactgggagaacatgagctccagctacatgaagcacagaaaactattcatcaacttgtatgggagaataagcaactgaaggagttgttgcctgtaagagctcctaaacaatctcctcctggatctggatggaaagttaacaaaacattggagaacggtgtgcatgcagaatgcgaaagtggcgatgtaattcttgaaaatatggcaaaacgaaatgaagaatctgaacttctaattgagcagctcaaggaagagcttcgagaacaaaagttaaaggcaaaagaggatgcggaagatctcacccaagaaatggctgaactaagataccagataacaggcatgcttgaggaagaatacaagcgtcgatcttgcattgagcaggcagctattaaacatattcaggagctggaaactcaggtttccaaagagaagacaaaactgagtggggcacttaagcgattgcaggaatcacatgaactagctcgcacacaagctatggagattaagaagttgaaggctgctttagagagattgaattcggtgacgaacctgggtacagtttgcaaatcttgctcttgcgggttctctgcaatgttggtagagctgtctaattgctcgatcgaaggaccttcaggcagcgccagatctctcaattccaaccacattgatgagaagtcacagaatcaggctctaatagagtggcgtccccgtgaagcctcagatgatgacggtggttggtcgattcgcgcctttgcagagaaaatcaacagaaaatcccgcctcctccctccatctgcacgccaagaaagggaactgccactacagccgaacgacctcctgcgcgtcggcgtcgcagggcccgccgtcgccgagcagcccacaaatttgccggcctcgaggaggcaatccacgccgcctacgccgctgcctagacgctgttggaccacctcccgtggtacctggcagctagctcagtgcagggtgctgccgtcgacgagcgtcaccgtcgccgagcaggccacaaattcgccttacgtcgtcgcctatacgccgtcggaacacctcctacggtacctggcggctagctcagtgcgagagtag

SEQ ID NO: 14083 - DNA, 825 bp, Zea mays
  Peptide Sequence Number=SeqID_55862
atggaaggaaacagatacttttctagcttgatggatgaggcgaataataacttgtctttggatgacatcagtttcctgccagaggaaaatccaataagtaatgagcaggaattgtccattgttcagagtactccgttatcaagacccaatcagaaaaggacaaagaattttagtgaacaagaagatgcattacttgtgtcagcttggttaaatatcagtatcgatcctgttcatggcactaatcagactcgtggtactttttggaagcgagtttatgatttcttccacaagaacaagactttcgaatcgtctcgaactgagagttcactattgcatcgatggggactcattcaggagaatgtgaacaagttttgtggatgtgtatcaaatattgaggatagaaggcaaagtggggttacttttcaagataagaatgtattgcggaatcaacccaaatggaatgagaagcgcaagcatatagaggctattaaacaagtaccgaataaaaaaatgaagtcgagctttaactcaagtctaggaaatgcaatcaccattgttgctgatagtacgaacaaagatgtagatgtgaatgcatctccgaaagctaatgcccccaagagaccaaatggtacaaagaaggccaaagaagcagtgcgacatggtgacgcttacatcgaggcttcagattatttttgggcaaaaaagaaggaggctgatgcagagaaagaaaggaataaacaggaaagattcaatcaatcatatgaactagaaaaagagaggctttttgtagaacaagtacgggctgcaaatgagacaaaaaattag

SEQ ID NO: 14084 - DNA, 3357 bp, Zea mays
  Peptide Sequence Number=SeqID_55863
atggcgatgtggatgacctgggttcagggtggtggttccagccataaaattccaaacttactatcacggtcaggtgctaacagtgacagttcaaggtggcatgacaaactgcaacacccatctccgagcataaatgctaatgttggtgttgatgggtctggtagtggagagacaacaaatgttcatggtgaagggtgcaatgatgtaagcaccagccccagtggcctgaatagtggcttaaatgcttcagcctcagaggatagagtagaaagacttgaagaactggcggtggctgaaaaaacaagtgaatctcccgaaaatgatctggctgatcatgcagatccttcactgcctcatgaaccatccacctgttcaggcagtcctgcaaaatgcgcagatctttctcagcatgtaaaatgttctccaaaaacagagtctgtaggtgttttgtccattactcctgtcaagtttggagactttgatgaagttccaggtctatcattaccttcagattcatacagagacaataatacttctagaggccacagacatactgaagatgttgcacatttaaaaaatgtgcaaaaagatgcaagtgaactcaaaccggagacagacacttgtactacaattgatgaggcatctccaattatggtacaaggaacagagacacccaatcatgatagtggtttgatagcctcagttgattctgttaccctatcctgctccaaaaatgatcatgaagttccagttacatcttcatctgttcctgttgcttccatggaaggtagaacgttacttcatgacgaagcaccagcttctgcagattttggatctgaaactgctgagagcaaagaaagattcaggcagaggctatggtgttttctttttgagaatctgaatagggctgttgatgaactttacctcctctgtgaactagaatgtgacatggaacagattaatgaatccatacttgtccttgaagaagctatttctgattttcaagaacttaaatccagagcagagcattttgataataccaaaaaatctcctggtgtaccaaaggagggcatgccaatggctgtgaaagctgaccataggagacctcatgccttgtcttgggaggcaagaaatactgtcttcatctctagaggccttccagagaatccaattggaactggcatgcaagcaggctgggagttgctagaaaacaaatttgacaggctcaagtcaaccgatgttgttaaaaagactacagctcatcttgaaaaggaaaagcaaattacagcaccttggaagtccatggatgcctggaaggagaaaagaaactgggaagatatactgaaatctcctgtacggagttctcgtgtttctcactctccaggtgttggaagaaaagttacagaccgcgctcgtgttctacatgacaagttgatgtctcctgaaaagaaaaaaagaagtgctttggatatgaaaaaagaagcagaagaaaagcatgcgcgtgcactgcgaattaggagtcaactagagagcgagagggttcagaggctacaacgtacctctgaaaagttgcatcgtgtcaatgagtggcaggctgtacgcagctcaaaactgagagaagtaatgaatgcacgtcatcaacgtggtgaatctcgtcacgaagcatatcttgctcaggttgcaaaaagagctggtgatgagagtactaaggtcaatgaggtccgttttataacatcactgaatgaagaaaacaagaaattcttgctgaggcagaaacttcatgattctgagatgcggagagctgaaaagctacaggtgatcaaaacaaagcaaaaggaggacactgcaagggaagaagctgttttggagcgaaggaagttccttgaagctgagaagatgcaacgccttgctgaaatacagcgcaagaaagaagaagctattttcagaagagaagaggagcgcaaagcatctagtgctgcacgggaagcaagggctgcagaacaacaacgtcgaaaagagataagagcaaaagcgcaacaagaggaagctgaacttttagcccaaaagttagctgaaaaacttcgtgaaagtgagcagcggcgcaagtattacctagaacaaatacgagagcgagcctcaatggatcttagggatcagccttcaccttttcagcgtcgctttccaagtaaagattgccaaaaccgttctagttctgctaacagcggagaagattcacagacaactggcaattccagtgctgcagattctatggttaagtcatcgaataatgcacagataaaacgaaggattaaaaagattcgccagagattaatggctctaaagcatgaatttattgaaccatccataggtgaaagtacaggaatcacgcacaggtctggtcttggagctgccaaagctaagctaagtagatggcttcaagaccttcagagacttcgtcaagctagaaaagaaggtgctgccagtattggattgattgtcagtgacatagcgaagtatttagaagggaaggatcttgagctgcatgcatcaagacaagttggaaaaggcaatgagatgaaccttaagcagcctgcaatgctcttactttctgcactggctgagactggccttgttactctaccatcacttttgactgctgtgttgctccaggcaaacaacaacaggtcatcatcagagcagacattggcgattcttccatcaaattttgaagaagtagccactggtgtattgaaagttttgaataatatggcacgtttggatataacccttttgcagcacatgctgagtctctgctacttcttggctacttttctttgttccatgctgggaaccaagctgttcttcggtggggaaagagtcccactatacttcacaagcgaccccgagttgatgcccatcttggctgctgctctgatcgctgtttgctacggttgcgatcagaacctaagcgttgtacagcaggaaataagcacggatatgctgcgctgcttgctcaagtcctgccaaacttcaggatcaaattctccagattccattgctgtggatggttctggaaacaattccactgaaagcattctggatatcaggaactcacagggtgacatcccaacaaggtcaagccgcaaaattggacggccagttattgggaagggtgtttcagggggtatcagattcaacagaaataaggttcagaaggatggtaggggaacaagagcaattgacgatgggcctctgaagcaaagagctcaagaagctgcatcgaacttcatgttgcatagaaagatcccagcttcttttttggacagagccgaggagttcttctgcagtgagacatga

SEQ ID NO: 14085 - DNA, 333 bp, Zea mays
  Peptide Sequence Number=SeqID_55864
atggcgtggctatcatccatccaccgaccacccataagcggcggcgcagacgccgtggcgccatggccgacgcacgaccgatccccgctcccgagtcccaaacttgagcctagctggtggtatagggagagaagggtctgggcggagatgatccagtcaatgcgacacagcggctccatgattcatggtggcccgacggcgatgcccaagcaccggtgtggaatccctgggcctggctactcccgcggcgtcaaagcccgaccacgcaccaatctgcggggacacgacgagtgcttgctctcccgtggctcatctcaagtccaacggtggtga

SEQ ID NO: 14086 - DNA, 1311 bp, Zea mays
  Peptide Sequence Number=SeqID_55865
atggagcgtccacaccatgcagatcggtcttccagggagatattgggagcggcagatcgggggagggggagtaaatcgcgcatacgtacagagactccatggaaggcgtccacgcgatgcagagattgggagcgacaaatcgggcatcgaacacaaagtagctggcggctcggcgcacctacagcgccgtataccgagtccgagaccacgactccacgagacgacacaaaccccagtttaggaacagttggaaaagagggagaaatggagaacggcggcggcaaaggcgacgttcccaacgatgcgaacgaacattgccctggaacgcagtcggaggaggcggggaaggcggatgcctgcgctgggtgccccaaccagcagatttgcgccaccgcccccaagggccccgatcccgatgtggttgctattgttgagaggttggctactgtgaaacacaaattattagttttgtctggaaagggaggtgttggaaagagcacattctcagcccaactctcctttgccttagctgaaatggaccatcaggttggccttcttgacatagatatatgtggccctagcatcccaaaaatgttaggcctcgagggacaagatattcatcagagcaaccttggttggtcacctgtgtatgtcgagtccaaccttggcgtgatgtcgattggtttcatgctgcctaatccagatgacgctgtcatatggaggggtccccgcaagaatggactgatcaagcagttcttaaaggatgttgactggggggagattgactatcttgtagtggatgctcctccaggaacatctgatgagcacatctcgattgtgcaataccttcaagccacaggaattgatggcgctataatcgtcacaactccgcagcaggtctctcttattgacgtgaggaaggagataaacttctgcaagaaggtcggcgttcctgtcctaggtgttgtggagaacatgagtggcctgaggcagccactttcagatctcagtttcgtcaagcctggtgaggcgggcgagacagacgcgacagagtgggccctgaactacatcaaggagaaagcccctgagcttctgtcagtcatggcctgcagcgaggtatttgatagcagcaagggaggcgccgagaagatgtgccgtgaaatgggggttcctttccttggcaaggtgcccatggatccgcagctgtgcaaggcggctgaggaagggaggtcatgcttcagtgatcagaaatgcggtgccagtgcgccggctcttcagagcattgtaaagaagctgatcaagactgggtga

SEQ ID NO: 14087 - DNA, 639 bp, Zea mays
  Peptide Sequence Number=SeqID_55866
atgatgagcgcaggcgatgacgctcggcacgagtacgacggcgacacaagagtctccggcttcgacggcggcatgacgacattgcgcgagccgagagcaaacaagtttataacactagcacaggaggccgagaggcactcgccgcgtggcagagaacagccggggaacgtccaaatcgatgcacgacgcaagctagcgccgcggcgcaacggtgagtttgcgcagcaagcaagcaaaactcggcgacgagtggtggtggacaaggcgtgcagaagggtgaacgcaacgcggaagcaggaacggagctggcggcgtccagaacgtggggaagaggagaagaacgacgcgagctttataggcgagggaggagagtggtttgtggccagattcaatactccattgacgcagattgaagaacagtgttacctaatcgaagaaacagccgcagccattaatggagatggagcacggtggatgaaacggtcggcacaaggtgttacagcccttcaccgtcggctgggcagagccgaaaaaggaatcgttgacggcgacaacaatgggggtgatgaagtagggctccatgtttttcgtgaaccacatcttcgtgtacctaccgcgagagtaggagtagatcagtag

SEQ ID NO: 14088 - DNA, 321 bp, Zea mays
  Peptide Sequence Number=SeqID_55867
atgttgggagaagaatcccaaaagatgaaggagaaggaggtggataacaacaaaaagaatgaagtggagaagccacaaggaaataatgagaaatccatcgactcaagccataagaagaacgatgggaaaaataaaaggatgaagaaggtcgtctactatgagacagactcatctacatcaacatcaacatcaacatcaagtacaagaaaatgcctcccgggggaagtgcttgagaagttcctttaccatgagatgatggtgaggaactccaagtacattaaagacttggctcaagggaacatctcctccaatgaaccataa

SEQ ID NO: 14089 - DNA, 978 bp, Zea mays
  Peptide Sequence Number=SeqID_55868
atggcggacaagagatccaggacatacaaaccccagagtgaacttcgatacggacactctagaaaccttattggagttagcttcggtagtttagtacgtactcaaccagaggggcagaggatctccacgatcgtcctcaaggttgaccttgaatgcgagagatgctacaggaagatcagaaaagtcctctgcaagatccaagacaagatgaacatcaagacgatctcgttcgacgagaagagcaatgccgtgaccatctccgggccgttcgacgccgacacggtctgcaacaagctctgctgcaaggccggccgggtcatcaaggcgatggacgtcaagggcaaggacaaggacggcggcaaggccgggaaggagggcggcggcgacaagcccaaggacgccggcaaaccggcggcggccgagaaggacgcaggcaaggccgggaaggagggcggcgccaaggcggagaagaaggaggagaaggccgagaagaagaaggaggagaaggccgataagaaggaggggggcaagggcgacaaggaggcgaagccggcggagaagggcaacaaggacgggaaggcggaggccaagaaggtgaagttcgccgaggtccccgcggcggacgcgaagcccggcaaggccatgccgcccggcatgaccaaggccgacctgggcccgctcctggagaagatgatggcggccaaggccgggtccgagccgcagccgatcgcgccgccgccgggcgccgcgcagggcgtggccgtgccgtccgtctggcccgcgcccgccgggtccgtgtccggctacggctacggctacaacccaggctacgaggcgccgccgccgccgtcctactacgccgctggcgccgggggcggctacggctgcggctgcgggcggctacaacggctactgccggtgcggcaagccggccgcgcccgggcccggcgggtactacggcgtgccggtgtacgatag

SEQ ID NO: 14090 - DNA, 1326 bp, Zea mays
  Peptide Sequence Number=SeqID_55869
atgcgctgcgaggtgacacaacaggagtctggcgacagccctcaggcaagaaggaacggctcgctctcgcggcccgcatctccgatgcgtgggagtctgggagacaagcgctgcgacggtggatccggcggcccacgggcgtgggagacgaagacgagcgattataaacgcccctcaatgacaaggactcgtcatctgctccactgccactgcccttatcatcattcatcagcggcctgcctgcacgagataccgagggacaggacagggagatccatggccgcgtcagaccaaccgccgaggccagagaagcccccgctgccgtggcgcgcgaggctgcttgtgggcgccgcgtccgcgctgcacgccgcctcgctccgccgcgacggcaccgttaaccgcttcctgctctccctcttcgaccgcgccgcaccgcccaccccgacggcccccctcggcggcgtggcatctacggaccacgccgtctccgaccacctgcgcgcccgccttttcgtcccggagacccccggcggcggcaacgagctcccggtggtcgtgtacttccacggcggcggtttcgtcttccactccgcggcgtcggccatcccggccgtcatcgcctccgtcgactaccgcctcgcccccgagcaccgcttcccggctccctacgacgacggcgaggcagccctccggtgggccctcgccggcgcggcaggcgcgctgccgtatccccccgacgccgtcgcgggcctcctcgccgtgcagcctttcttcagcggcgaggcgccgacggggtcggagatgcggctccgcgacgccccgttcgggagccccgagcggctggcgtggctgtggcgcgcgttcctgccgcccggcgccacgcgggaccacgaggccgccaacgtgcccgccgcgatcaggcgcgacgcgggcgcgggcgcggaccggtggcgggcgttcccgcccacgctggtgtgcgtcggcgggtgggacgtgcatcaggacaggcagagggcgtacgcggatgcgctccgcgcccgtgtgctccgaggagggtccaccagcggcggtgcgtccctaactgctgagcccgacctcgtcgacggcggtgtggggctacgacttcgaacgaggtcgtcctccgccagccgtgagcgtcagaaaggatgtacaggaaataaaggagtcacaaccactattgagaaatcaaataggaagtttcaaggacaaagaaaacgcataagcgaaaccctagaagagactccatgcgacgaacatataaaattatatgtatatcttgagtcgcaggatctaattcttccttag

SEQ ID NO: 14091 - DNA, 231 bp, Zea mays
  Peptide Sequence Number=SeqID_55870
atgtccaaaagttggatggtggggtgcgtgaagaatcggatagtatctgccaagcgctcgacaaattgcctggatcggaaaatcattaccgatctcgtggattcgagtcagttattgaaacggtgctcgataacgtgcgtgagtcacggaactctcgtcgacttcgcggttcttgcgattatcgagccagattcagttatagcgagttatgtcgctattccggtcaattag

SEQ ID NO: 14092 - DNA, 342 bp, Zea mays
  Peptide Sequence Number=SeqID_55871
atggccatgtggggaatcggggtgagcagagcggagatgggctgttgcgtggtgtccttccatagatggagcgaggaggaggaggaggtggcggaatcggcggatgcagacgcagtgagggggagaggaggaggtggtggcggcggaatcggcggatgcgagatctcggggcgtgggggggtttcgcggcggctgggcgtgctgtgcgggaggcagttgcgtgtgcagcggctcgacttgctttctcgagaaaaagagaaaaagaacctaagcgaatttccttatcttatttggaggattagccatggccttcctcagattatggggctcctagtttcctga

SEQ ID NO: 14093 - DNA, 207 bp, Zea mays
  Peptide Sequence Number=SeqID_55872
atggagctggagcttgagggagaagacccgggcgtgcagaagctcgcgcgcaggaagcacgcggatgcgtgggcgtgtaacataggggaaatcaagcagggcgcacggcggttgggggctggggcgagttcggaagaacggctgcggttccctctatattttctttctatacccacttgtcggcgtttcgagaccgggggtccctaa

SEQ ID NO: 14094 - DNA, 1521 bp, Zea mays
  Peptide Sequence Number=SeqID_55873
atggcggcctcgtcgtcgcgccaccagcagcagcagcagcaacacggcggcggccgcacgacgtcctccggcggcggcgccgacgacgacctctcggcctccaacgccaccatgacgtcgtcgtccttcaccaacacctccgccaccaaccgatccggcctcagcatggacgacgactccggcggtggcggacctgctgaggcggccgccgccgccgccgcagagagccaccacctctggaaccaagtcctcatcatgggcggcggcggcggcgaggttgggaggagcatgcacgacgcccacgacgacagcgagaacttcctcgagctgctcaactcgaggacgctcgtgccggagctcttcgccgaccctccggcctgcgactacctcaagaagatggagtacggcagcagccacggcggcggcgggtggccggaccaccaccagttcacgacagcagccgcgctggagaagcacctgagctccggctacggcggcggcgcgctcgcgcaccagcaccagcacgcggcggccggaggcgcgccggagcggctcacggcgaacctgtccgacctcgtgagcaactggtccatcgcgccgccgaacccgtgcctcggcgacgcgcaccaccaccaccgcaccggcgtcgtcgccgcggcatgcgataacgacaacgccaaggccggcatgttcctgggctccggcggcggcgtctgcaatcacgagataggcggacacggcgcgatgctggagggagcggcgacgggcggcggcggcggcggcggccaggagtttctccggcccgccgcaggcgcagggtacagctccatgctcgggctcagcaggaacaacaggacgatgtatatggaggcgccgtggggaagcaatgccgccggcgcgacgaggagcctgtcggacctgatatctttcggcggagctccgctgggaaaagcagaggaaccggcgccgcccacgtcaacgaaggcgctggcggagtacaagaagcaagggcacgacatcccttcgccggcgaagacgagtagcggaggtggaagcaaggggagctcggaggggaagaagaagagatcagagcagcaagggtcgtcggaagggaacaccaagaagtccaagagtgaggtctcctcgcccacgtcgtctctcaaggcatcatcgcaggtgcctaaagtgaagttaggagacaagatcactgcactgcaacagatcgtttcaccatttggaaagaccgatacggcatcagttctgtatgaggcgataaattacatcaagtggttgcacgaacaagttcagttgctgagtgatccatacatgaagactagtagcaaggactacaactacaacgcatggggaaggttagaagataaggagggcgccgagatggtggacctgcgaagtagaggcctgtgcttggtgcccgtctcatgcacgcctcaggcgtacagggacagcaacgacggcccagactactggacgcccccatataggagctgcttgtaccgatga

SEQ ID NO: 14095 - DNA, 1980 bp, Zea mays
  Peptide Sequence Number=SeqID_55874
atggcaccgctgaggtccacaggcagattctttcaacgccatccttcagctatctgcttactgattttcctacttgtgttgtacaagtacttcttcggctggttcaccctcatcgtcaccacatcacctatcttcctaatcgctggcatctttcttggaatcgtcctggtgtacggtgaaccgaacaaccctgaaaaagatcatgtctacaaaaaaaatgataatactcggagtttgaatatccatgatagcagcaaatctattaggggtgtacctcttcctagaattccgtctggtgaagagagagcgccgaagcacaaaaacagtgttaagaaaattaggaagcagtctcgtggtgtagcctcttcttctgaaccaggatcaagtgaatcaggtggttcagatactgatattgctccaatgctccatgcatttcatcatcttaggtcgggcagcaattcgtcaaattcctctcaagatggtgactctgacagtagcaccgaagatacaacagagaatcaacagggcaacgacggcaggatatcccgcgaggggaaacaacatgttaaagttgttgcatggactgctgatgaccagaagaacataataaaaatcgggtgcttggagattgagcgtaaccaaaggttggagaccctaattgctaggcgtcgggcaaggaaatacgcagacaggaacttggcagagtttggcagcactgattccttacccactattgaagagctatcaaagttcaatgttcaaattcctgctgtttttgctcctaggaaaaatccttttgatcttccttacaatgaagataacttcccagattctgctccatctgcagtgttggaaacgagatacccatttgatctaccaagtgagcaagcaaacgagagcagctcttatggagccaactcaagccatgatgaacctattcccgtagcatgtcatttacagagtgcactgttgaggaggcatgagagcttcactgaaggagcaccattccttagtgactttttgcaagatacacagccttcccgattcagaccatacttcatgacggaaaaaatggctaacgaggaaatgacagatccagttcttgaaggagaaactagtgaaaagagcaactctaaggccagctctgctcaagactcggatagtacttcttcagttgctgaccaagaaagccagaaggatgttctagaggattgctcaaaccaaggacaacaatcttctttcagtcaaacagaggaacatgcacatatagctcggcatgcaagggaggtttctctttcccttgacatggaaccacctgtcttaattagtgattcctctgatgatgacatatcactgtctggtgaacatataaatgattgggaggaagcacaacagagtgaaaattttagtttgtcccagaatacatggcaagaggatcctaatgtcatgcaacaccatcaagaaatagatatcacaagcaatggattgaatcaaatgtcaccacattcgaatgatcttgagttgacgtcgtcatcaactgaaactactgatgatccttttgaagtgaatgacattgaaccaccagctaaggaagtggtggtcgttgatgatacccacgttgtggatcctgtatatgattcaagtccttcgggaagcgagaggcctgcacctactggtttagtaattgacggacctgtcctaaaagatggtcatgcttgtactcttgttgttgaagcaaccatcgaagaagggggttcatcatcaagaatggaggtttcttccagtgaggtagctggacctagtttgagttctgtggagcaaagcgaatccccagagaaagaagcctctgagataagagagcagtccatggttggccatgtcgaagcacatggaggttctgtcagccatgctgatccttcagtatctgatataagttctcagccgagtactgaaagttcaacaaatggtaaatctcactga

SEQ ID NO: 14096 - DNA, 2094 bp, Zea mays
  Peptide Sequence Number=SeqID_55875
atggggacgtcggggtccaagggcatcgacggcgtcggcgcagtttctggcgtcggcgctggcgcggcgggccttggcggcgtcggcgccggcggggacgggggcgagggcgccgccgcggaggcgtggcatggcggggcgcagctgtacgtgtcgctcaagatggagaacgcgttgatcagcggcgacctcgtcccgcacgtgtatggctccgagcccatcatcggcacctgggacccctcccgcgccctcgccatggaaagggagctcgcgtccatgtgggtgctcagcttcgtcgtgccgccggaccatgaaacactggacttcaagttcttgctgaagcccaaagacgctgaaaccccgtgcatcatcgaggaaggacccacacggctcctcaccggaggcatgctagagggtgatgtgagggttgcactgttcaagctcaatggagatgatgaggtgctcgagtttggggtggtcaacaaggcggaccttgtatcaccgcttgaacttgctgcaagctggagggtgtacaaggagaactttcagccttccaaagttcgggggatccctgatatcagtatcaatgtcacacccactaatggagctgaggtaattgcatttgtgcttgatattgtatgtttccccgtggtgatgcatatggttgcaaagttctgtgcgaatgaccgcgaccgtgccaaaccgatgcatatggttgcaaagttctgtgagaacgatcgctacccgtgtcgggcccttgacatgtgttttgggatggtcgcggaaagagtccaccatgccctgcatctagcgacagtacttccccatggtgaggtccccctgagagaacaggtggaattgggcgtcgaggtggagcacccaagcgtcccggttctcgaggaactggtcctcgagagcgagccacgcttggcgtgcggtgtccgcctggtcacggacgatgtcctattgctcgacggtgatggacgccgggtcgagcacaacggacatgggggattgaatgttgtggaccccagcggcctgagcgtggagggcggcgatggtggcggcgtcgaggtcggaggcgtggagagccttaggggccaccggtggggggggggggggggtagggctgcgatcgaggaggaggcgctgtgccgcaaccatttgagtggtcaggaggcgcgctcgcgctcaagggtgagagtcgcggcatgctcgcgttcctgggaggcatcgacgaccgcctggatggttgcgatcgcctcgaccaacacggatgaagcgagcgggggaaccgacgatgtcggtccatgtggaggcgggccccccgcccatggcgaggtcgctgtgagtagaggggaagaggccatggccgacggagaaccacccggcggcggcggcctctgcgctcaggcccgcggcgttggtgcccaggcctgcggtggtggctgccccttgggccgcgccggtgagaactccagtgagggagagatcggccatggaggaggtggggctgggggcaccacggctggaggtcccgtggctagggcagtggctggggactccgcggctggaggtgaaccggtggccaggggtggcggttggagcgctattacagtggacgacggctggagcgccgccgcagtcataacagtcgatgcgacgcagatgctgtggctggagtggaagccgttgaggttgcccaagcaaggcggtagtcctttgtgccaatgtcgaggtagccaaggacgaggacgtggatccgttgtcgaagtgtcatggcgtagggtagccgtggtcgaggaagctgttgaggacgtcacgaaggcgcgatgcatcgaggcagatgagggtgtcgatgccggggcgatgtgtcaagcagccatggacgatgcgtgctccagagtagacgaagtagtcgaggacgagatgatgaggctggcgacgaggatgtgctggaagaagcgaagaggcgcaacaccagcacaaggtgttgacattgcatgctggaggacccacaacgcagaacaacgggccgacgacgtgcgagtcagagatgacgacgatgatgtcgatggtggagtctcccgatag

SEQ ID NO: 14097 - DNA, 318 bp, Zea mays
  Peptide Sequence Number=SeqID_55876
atggacgccaaatgctcgcgcgtggaagatgtcaaggagccccaccaaggaggccaacagcagcgcacgggtctgcgcaggtcatggtgtccgcgcccgcggcaaaatagaaggggaacgacggatctggtcgagaaggccacggcaacgacggatccagccgggaagacacaatccgtccaaagggacgacggatcaggccgagaaggccgcaacaacgtggatccagccgggaaggccgcgacagcgacggatccggcgaaggcgatgaaggggtgggcggcgaggcgtgtccagccgggtaagggcctgcgctga

SEQ ID NO: 14098 - DNA, 360 bp, Zea mays
  Peptide Sequence Number=SeqID_55877
atgcgctcttggttctgctctccgcttgggaaggggtccggtgctgccatgtggctcatgggcttgcagcacaagccttcagaagggagcaagcttgccacttgcattcaatgcgagcggatgacgcatgcccctactgcacatagggtatggtcaggctttttattaggctacacaggcatgaatgatcgctttggttgttaccgatgcaggcagttgtgtgtcagctttgagcgaatgacttgcacagtgcgccacatgatatcgaggcaagcgattgtgtctctgcgtcgcgcatgtgggtggtgccatcatgagcagttgttgcctcaagtagtacactcaaggcattcgcattaa

SEQ ID NO: 14099 - DNA, 462 bp, Zea mays
  Peptide Sequence Number=SeqID_55878
atgcacgccgctgagtgcaagactgggatggtggctggccgggtgagggtgaccatctcggaggccatcaggcttcgatggaaggggatggcggggagcgtggcgaggatggcatgggcagcctctgcccagatcaatggagaaccaggtcgatcccctcgggcgctgatggaagggatggcagggcatgagcatggcacaaggggcgatgatggcggtgagctccgacacagacgcgcacacactattggctttgccggtggggaccacgatcggggcgcggtcatctcgaggggtctggggaggcgggctgggtcggggaggcgacaaggggaagagagggggtgtgggcgtgctggtgtggtggaggatggaaggggtgtggatgacgagctcggggcggcggctgtgtcggagctcggggtgaggggcgactttcatggcgaggactcgcttgattga

SEQ ID NO: 14100 - DNA, 1191 bp, Zea mays
  Peptide Sequence Number=SeqID_55879
atggacgggaaagctggtcttcatgttcatgaggtcgacggggcggtgccggccgggcatctgcagcacgccgcccgggcacaggagcgcgaacagcgccgtggcgatgatcgacggcgcccagtccctcatcgcgtcggctgtgcagagccgtattccgtatattccgttctgttgcaaactttgacgaaaggtggtccgcttcgccgatgtccgaacgcccgtgatgtccgactgcccctacctataaaaccagggcaccacgcccacgttccaagatcaaaacgtctcgacaaggcacaaccacctgaagcaatgccgatgtactccaagtcagaactcatccacgtgccgccaccgccatgcagccgtccccgttacgtcatggcgccacccctggtcttcacgtccatcggcgcgtcgatgaacgccgccgtgcgcgacgtttgggccagcaacttcgacgaagagctctccaacctatcggcggtgctgccgcgctacccctgcgtgtgcgtggacaccgagttccccggcgcggtacacgactcgaacttgccgcggtacatgcgcggtccgcgcgagagctacgagctggtgaagcggaacgtagacgacctcaacctgctgcaggtcgggatcgcgctgtcgggccccgccggccggttccccatcgcgtggcagttcaacatccggggcttcgaccccgcgcttcacccgcacgcgccggcctccatcgccatgctccgcgagcaggggatggacttcgccatgctgaacgagttcggcatcgaccccgaagacttcgccgccgggttccgccgcagcggcctcgcctgcgggtggctcacctggaccgccttctcgggctcctacgacttcgggtacctcgccaaggcgctcaccggcggccagccactgccggacacgctggacggcttcctcgccctggtccgtcggctgttcggacacagtgtgttcgacgtgaagcacctcgccagatgctgcgccatgcgcggggggcttgagcaggtggccaccgcgctcggcgtcaagcgcgccgccggccgcgcgcactgcgccggctccgacagcctgctcaccaccgacgtcctcctgctaatgatgcatcgcttcttcaggaacgtcgatgtgctcgcgcacgccggaaccatcgtagacctcacctag

SEQ ID NO: 14101 - DNA, 219 bp, Zea mays
  Peptide Sequence Number=SeqID_55880
atggcccgcctgtcagcacccaagtcccctggcgttgggcccgctcgatcagtgcgctctccccctctgtcgctgacgcccctggcccgcctgtcagcgctcgcccgcccgcgcgtcacaataaataaattgatatatgattatgtacttgagtgctcaggaggtgatgctggaaacatggaggagttcgaggagtttcaggactacgacgagttctag

SEQ ID NO: 14102 - DNA, 451 bp, Zea mays
  Peptide Sequence Number=SeqID_55881
atgacctatgcttttgacggccctttcatactcactgttggtagcagcaatcaatcggaatttatgcagggggtgcaggaacaacacaacattctcagaaactccattgaacaactcaaattgtcagaatcactcagggccactctgatttctcatttgaaggaagcgctgaatgagcaggagctcaaagtggaacaagtcagaagcctgcttcaggcagctcagcctcgattcaagagagctgctgagctctgcgtggggcttggaagcaacatggaaatgcatgagccatcaaatcaagggcataagaggtctagcctctctgatccacttagtactgttgctccaggagctgagaagtctcttcaaaagggacagtcaagtgcagtgttgtattcacaggagggaaatggttttgagcacatcatgacagagacaaagcttgctgcag

SEQ ID NO: 14103 - DNA, 486 bp, Zea mays
  Peptide Sequence Number=SeqID_55882
atgcaatgggagtggagagatggtgagagtagcgtgtaccctccgtggcagaggaatttggcaaaatgggtcactctaacttgccgctctgcaaaacacaccgcgtctatctgtattcgtaaaaatgggtcgctcaagtctgctcgctcgccagaagaggtcacggacacatttggggcacctagcaagtgggcccgcgaaggcttgtccctattatgcccttacgaagtctgggatagaagtttcaagctgcatagaagtctgggattttctgagtgtggattcacagacatatattttcacagacactctctcagttatccaaacattgtcaggcgtcaagcattttgggtagcaaagaaaatactgcaattgggaatgggagacacgtttgatgactggcttgttgacaaaatccaattacttaggaaagggaggataattgcttttgctattaagcgcattgaacaagatcaccccccataa

SEQ ID NO: 14104 - DNA, 294 bp, Zea mays
  Peptide Sequence Number=SeqID_55883
atgaggggagggaggctcatgtgtgggctgtgcgtgcagggagttgggctcacggctggacgaggcgcgccgccgaacctggggtctgtgcgcaacaaccccacctcgaaccttcgcaacctctatgtgctcagcagaaggtcgggcaggccgacaggggctgttcagcaccacacctacctcttcaccgagctcgccacgaggatcgactacgcctacaagtccatctccaagcgcgggctcatcaccagggacgacagcgacgacgtgcaccacgagatccagatcatgtga

SEQ ID NO: 14105 - DNA, 738 bp, Zea mays
  Peptide Sequence Number=SeqID_55884
atggccttagctctcaggattagggatgcggggcttgcgcttatatactccgaagcatcggcaaggtctgtcaagcggggccgaccagtccgccagaggacggaagcgcgcgcagagtacatgagtggggaggctgcaagtgggttccacctgtcttcatcttatgctttagaattcagcactcggcttcaaagttttgtgagtccattgggtgcaccgaagattagacttgtgcttggtgactgcatctggacttcctcccatttcagccaatcttcccctttgtcgtggtatattcattgcatatatgttgcaggtctcactgctttagaaaatctcgagaatccgggtgtgagccatggttggagggaagaaaggcaagaaagggcaccaccctaccgatgggaagcgcaagcgcccccaagtcatccctcagaggactttggggactcagagtactcggaggaagtctcctccgagtatgattgctcgtctgttccagcgtccctcatggtgtcgtccgatgaatcggacgactccatgggactgtccgccatagagcgagcgtacatccggtccgtcgagcgcgcggggctcagcgggtcggatgactcaaaggaggcctccttggaggaggtggaggattcctcggactctgaggagggcagcgatagcgagggcggcgacaacagcagaggtggcggcaacgactatagcaggggcggtgacggcagctga

SEQ ID NO: 14106 - DNA, 705 bp, Zea mays
  Peptide Sequence Number=SeqID_55885
atggggaaacaccaggcgctggtgaactgggagacggccatggacgagcagagaaggctgatggttggaccagcgagaacagggagtcgcgaacaaggaagctccatgcccgggcgcggagaacggcggcgcagaggagtcgcgcggtcagccatggcgagcagagggagcagacgctggggcagggaggagcgtggacgggcggaactccggctgggcgcgcgccggcgagggagaagctcggctggggaggcgcagcggccatggagcttgggacagtcgaccgagctggtagagggaggagctaggggaaaagctctgcgcgctggaggaatagaagccgagctcggcgagcatccagggagcagggaggaaggagccgagcagggagccaacgcgccatggttgggagcttgggggaaagagaaaccgcgacgcgcaggagctctggccaggcgcgcgttggaacctgggcaccgagcgccatgggaggacgcgcgcgcagcaccagagctggagcaggggaagcgcggccaggaaatccacccagaaattgagcgcaagaggaaagcagtcgggcgccatggatggtgctggaactcgaccagggagatgcgtggaggggctcgacagccatggaatcgagcagaggaaggagcgcgctgcaagggagagagaggagtggctgggcggcagaatttgtga

SEQ ID NO: 14107 - DNA, 228 bp, Zea mays
  Peptide Sequence Number=SeqID_55886
atggagttgggaacccgcgtcgaagaccctagtcaccgcagcaaagacgctgatgaggaagacacgacccgctccccgagacgccgaggatcggaagctttgataccacttgtcatgcccctggccaccggcgtgatcgccaggacagtttcagactacctccagctctccactccaatcttcagacctgacaaccggatgttacagcgccgcggtgggggaagatga

SEQ ID NO: 14108 - DNA, 333 bp, Zea mays
  Peptide Sequence Number=SeqID_55887
atgacaggcaggctctcgaaaaaactccggggtcaaccactcccagacaaggaccctcacagcatgccgagtcgcctgcaaactatctccttctgggaaattgtaggacctgtgaccaagcgctttgcagcaaaaacacctcgtcccctgcttgcaaaatcttacaaagtgacctctcgccaaccatttcaagcatcgcccattcaactccaccaagcaacatatgaaaactttagataccattatgacaaggacaatccctaccagaaaagcattgcagaaaagttctcagaagtgttctttaccaagataccacctctgaggctccgatga

SEQ ID NO: 14109 - DNA, 186 bp, Zea mays
  Peptide Sequence Number=SeqID_55888
atgggttctcgcttgcgcagggaaatggagatggctcaacaaggaggtcggtcgagcaagagaagcgggcaggggtcctcgacgtcgggcgggctccggcgaactccagcgaactccggcgacgatggcaaactctggcaacaacggttgataatgctggatctttcaactcttgagttcatgtga

SEQ ID NO: 14110 - DNA, 288 bp, Zea mays
  Peptide Sequence Number=SeqID_55889
atgaattcccgagagtggctagttcgccagagctggtctggcgcaccggacactgtccggtgccccaccggacagtctgagcggtggggacgagaatggctggccgaggtcctacgcgccgctgcggcgctcgagcacggctccgacgatgagatcgatggcgcggccgaggccctccgcgccgccacatccccaatcctctgcatccacttttcgctcctctccggcgagcgaatcgccgtggatctcggtgagaaggatgctggagcatggcacgaacgcggatag

SEQ ID NO: 14111 - DNA, 1380 bp, Zea mays
  Peptide Sequence Number=SeqID_55890
atggcgtccgcggcggcgggcgcaccgaagcgctgctactacgaggtcctcggcctatctcgcgactgctccccgacggacatcaagcttgctttccgccgcctcgcgctctcgctccaccccgacaagcagccccccggctccgacctcgccctcgccaccgccgccttccaggagctccagcatgcccactctgtcctctctgacccgcaggagcgcgcctactacgactcccaccgctcccagatcatcttctctcacccagcctccgccggcgccaaatccgcttccaccgtccccgatctcttcgccttcttctcctcgtccgctttctccggcttctccgacacgggccgcggctttctacaaggtctacggggacgtcttcgacagggtcttcgcgcaggagcttgcctatgctcgccggatgggggttcccgagcccgctgcgccgccggtcattggggaacccttgattccccctatgcgcaggtcactgctttctacagttattggcttgggtttggctcgggcatggatttcggatgggcggctgcgtgggacgctgcgcgtggggaaagtcgccgtgttcggaggctcatggaggaggacaacaagaaggcgatgcgtaaggcacggcgggagtacaatgacgctgtcaggggccttgctgccttctgcaagaagagggataagagggttgtggacatggttttaaagaagaagctggaggaggagaagagaaaggcagaggagaaggagaggaggaaggaggaggacaagaggaagaaggagcgagccatggcatatcaagaacatgagtgggcgagggcagaggagggactgtatgatgaagacgaagaagaggagatgagggccaagaaggagctgttgtactgcgcggcgtgcaataaaaagttcaaatcggacaaacagtggaagaaccacgagcagtcgaagaagcataggaataagattgctgaactgaggaaggcctttagggaggaggagtctttgaaaaaggcagaggagggggaaggtgattggaatgaagttgatatggggttcgattttaagcctacacaggagtcagatgatgcgagtgcattttcagatgctgcagaagagttagctgaagaatttgaaagtaattatgctggcaatgggcatcatggtaaatatgaggttcagcctgagggttcggtccatgttaatgatgttgatgatatcatggaagggccatcctcttctaatgtcaacaatggtgcagtaataatgtgttacaatggctgctccatctcaggtgtaattttaagagctggacagccttctcttgaacagaattgccccgatcttgtttggaaacagtgggagcactga

SEQ ID NO: 14112 - DNA, 570 bp, Zea mays
  Peptide Sequence Number=SeqID_55891
atggctctgattcaagttgagctatggaccatgtacttcgatgggtcgctgatgaaaataggagcgggcacaggctttctctttagctcacccctcggagtacacctatgttatgtgatacacctccactttgatgcgtccaacaacgtagttgagtacgaagccttggttaatggcctacgcattgccattgagctgggagttaggcgcctcaacgttcgaggggactcccaactcgtcatcgaccaagtcatgaagaacttaagctttcacgatgcaaggatggaggcctactgtagagaggtccaatgcctagaggacaagttctttgggctagagctcaaccatatcgcgtgtcattacaacgaggttgccgacgaactaacaaagatagctttagggcaaaccacggttcccccaaacatcttttccagggatgtatacaaaccctctattgtgatgaaggaagcgctcaaaccggctcccaacaccagcacgcctctagccgatgtgctcgaagccatgcagatcgatggagaaaaggatcaggccattccagtccctaaatag

SEQ ID NO: 14113 - DNA, 237 bp, Zea mays
  Peptide Sequence Number=SeqID_55892
atgggcgattgcgattggacgcgtggggatttacggcttggtgaccgacgctgctccctcatcggcggcgaagtcactggagacgaggcaaacgtggccaccgggggcctggggtcgccggcgagggctggaactggtgaagaaggtctggcgaactcgttggcaggactccgaccgcgagaatgggacccgaggcgggagaacggtagagggaggtgctctgggcaggtcgggtaa

SEQ ID NO: 14114 - DNA, 1665 bp, Zea mays
  Peptide Sequence Number=SeqID_55893
atggacaatattgaggtgaggaggaggaagaagaaagggagaagcagcggacgccgccaggggggacgggtacaggcggtcctgcgcgccggcctcgtcgccatggccttcgccctcctctgcctctgctcctccacgccctccgccattgccctcaccccagacggcgaggcgttgctggagctcaagctggccttcaacgccaccgtgcagcggctcaccagctggcgtcccagcgaccccaacccctgcggctgggagggcatctcctgctccgtccctgacctcagggtccaatccataaacctcccattcatgcagctcgggggcatcatttcgcccagcatcgggaggctcgacaagctgcagagactagctctgcaccagaacagcttgcacggcccaatccctgcagagatcaagaactgcaccgagctcagggcaatttacctgagagccaactacctgcaaggaggcatcccttcagagattggcgagctcgtgcacctcaccatcttggacctgtcaagcaatctgctgaggggcacaataccggcctcgatcggaagcctcactcacctgcgctttctgaacctgtctactaacttcttctccggagagatcccaaatgctggtgtcctcggaaccttcaaaagcagctcgaagaagagcattggtggaaactatgtaaagatggacaaacagactgttcctgatggtgcaaagcttgtgacataccagtggaaccttccatattcatcaagcgagattattagaaggttggagctgcttgatgaagaggacgtggtcggttgtgggggctttggcacggtgtacaggatggtgatggatgatggcacgtcgtttgccgtcaagaggattgacctcagccgcgaaagtcgcgacaggaccttcgagaaggagcttgagattctgggcagcatcaggcacataaaccttgtcaatctgcgaggctactgccggctccccacagcgaagctactcgtatatgatttcgttgagctgggcagcttggaatgctaccttcatggagatgaacaagaggagcagccattgaactggaacgcgcggatgaaaatcgcgcttggctcggctcgaggcctggcatatctgcaccacgattgctcgcccgggatcgtgcatagggacatcaaagccagtaacatcctgctggatagaagcttggagcctcgtgtctccgattttggcctcgcgaggctgcttgtagacagtgctgcccacgttaccaccgtcgtcgcgggcacctttggatacctagcaccagagtacttgcaaaacgggcatgctactgagaaatcagacgtgtatagctttggagtgcttatgctggagctagtgaccggaaagaggccgaccgattcttgcttcatcaagaagggactgaacattgttggctggctgaacaccctaactggggagcaccggctggaggatatcatcgatgagcgatgcggcgatgtggaggtggaagccgtggaagccatccttgacatcgcagccatgtgcaccgacgcagacccggggcagcggccatcgatgagcgctgtcctcaagatgctggaggaggagatcttgtccccctgcatgagcgagctgtgctacgagcagcacctggagctctga

SEQ ID NO: 14115 - DNA, 429 bp, Zea mays
  Peptide Sequence Number=SeqID_55894
atggcttataacccttctctgaacaatgaactcaggaaggggtacccaaaagctgccagacaattcatcgctttgaagaaacttctggatgagatgagccaagctcactgcaaaccaactttggtgacatacaacagaataatacatgcatattgccgtgcaaattatcttaaggaggatgttaaagttaaagcaagaaattatgaaaaaattgttaaattgtacaaagacatgcaggttgctgggttccatcctgacaaaataacttacatcattgttatggaagttcttggtcattgtggtcatcaggatgaggctgaggctgttttcattgaaatgaggtgtgattgggatcctgatgagctagtatatggacttttggtcgatctctggggcaaagctgtcaatgtttacaaagcacaaggatga

SEQ ID NO: 14116 - DNA, 282 bp, Zea mays
  Peptide Sequence Number=SeqID_55895
atggcaacaaggaaaccaagggatgcagcaaacaaggctggagccgcagtggaggagaacgatagcagccaggcagatgaattgccagcagctatgtctgagccttccactgatgttgagagcaaatgccaggatgctcatgagcacgggattcatcagatcaggaaatggtactcaaccatggctcagtgtcattcggtagatttgctgcagaatcattatcatgggaaagaagcgaacatggacatccatccacaggaagatgaccgggggtatcactag

SEQ ID NO: 14117 - DNA, 1533 bp, Zea mays
  Peptide Sequence Number=SeqID_55896
atggaagcctactgcgatgaggttcggcgcctggaagacaagttctacgggctcgagctcaaccacatcgcccgacgctacaacgatactgcggacgagctggctaaaatagcctcggggcgaacaacggttcccccggacgtcttctctcgagacctgcatcaaccctccgtcaagatcgacgacacgttcgagcccgaggcaccctcggcccagcccgaggtaccctcggctcagtccgaggtgccctcggctcggcccgaggcaccctcagctcggtccgaggcaccctcggttcagcccgaggtaccctcggcccccgagggagagctacccctcgaccgagccaaagctcggcggttggcgcggcgcgccaagtcgtttgtcttggtgggggacgggaaggagctctaccaccgcagcccctcaggcatcctccagcggtgcatttccatcgctgaaggccaggagctcctacgagagatacactcgggggcttgcggccatcacgcagcacctcgagccctcgtcggaaacgccttccgacaaggtttctactggccgacggcggtggccgatgccactagaattgtccgcacctgcgaagggtgtcagttctacgcgaggcagacccgcctgcccgctcaggctctgcagacgatacccatcacctggccttttgctgtgtggggtctggacctcgtcggccccttgcagaaggcacccgggggctacacgcacctgttggtcgccatcgacaaattctccaagtggatcgaggtccgacccctaaacagcatcaggtccgaacaggcggtggcgttcttcaccaacatcatccatcgctttggggtcccgaactccatcatcaccgacaacggcacccagttcaccggcagaaagttcctggacctctgcgaggatcaccacatccgggtggactgggcagccgtggctcaccccatgacgaatgggcaagtagagcgtgccaacagcatgattctacaagggctcaagcctcggatctacaacgacctcaacaagttcggcaagcgatggatgaaggaactcccctcggtggtctggagcctgaggacaacgccgagccgagccacgggcttcacgccgttctttctagtatatggggccaaggccatcttgcccacagacttagaatacggttccccgaggacgagggcctacgctgaccaaagcaaccaagctagtcgagaagactcgctggaccagctggaagaggctcgggacatggccttactacactcggcgcggtaccagcagtccctacgacgctaccacgcccgaggggtccagttccgagacctccaggtgggcgacctggtgcttcggctgcgacaggacgcccgagggcggcacaagctcacacctccctgggaaggatcgttcgtcatcaccaaagttctgaagcccagaacgtacaagctggccaacagtcaaggcgaggtctacagcaacgcttggaacatccaacagctacgtcgcttctacccttaa

SEQ ID NO: 14118 - DNA, 402 bp, Zea mays
  Peptide Sequence Number=SeqID_55897
atgccgcgccgtcgcctcatcctcctccgccacggggagagcaccgccgggggccgctccactagagatcatgacagacctctaagcaaggctgggagagctgacgcaatcagcgtttctaataaactccaacaaatgggatggataccggagcttatcctctgcagcacaactaacacactcaacacagtgctgggcatcacaaacaaccagtcagagcactaccatggctggcggtgtcaaaggcgagggagtttatggacgccattaaagaagagattaagagaggactaccctgtgccaccgaccgtcaccgagacgcttggccagccacatctgaccaacatccgaccgcaccagccgctcatgctcgatgagtgcacaggcttgattccgggctga

SEQ ID NO: 14119 - DNA, 1227 bp, Zea mays
  Peptide Sequence Number=SeqID_55898
atgggcgagacaatctcgttcgcgcctcggaaggccatcaagtcccaagtcttggcggactttgtggctgaatgggtcgatacccagctcccaacagctccgatccaaccggaactctggaccatgttttttgacgagtcgctgatgaagacaggggcaagcgcgggcctgctcttcatctcacccctcgggaagcacctacgctacgtgctacgcctccacttcccggtgtccaacaatgtggctgagtacgaggctctggtcaatgggttgcgcatcgccatcgagctaggggaccgacgcctcgacgctcgcgatgactcgctgctcgtcatcgaccaagtcatgaagaactcccactgccgtgacccgaagatggaagcctactgcgatgaggttcggcgcctggaggacaagttctacgggctcgaactcaaccacatcgcccgacgatacaacgagactgtggacgagctagctaagatagcctcgaggcggacaacggttcccccggacgtcttctcccgagacctgcatcaaccctccgtcaagaccaacgatgcgcccgagcccgagaaggccttggctcagcccgaggcaccctcggcccagcccgaggcgccctcggcccagcccgaggcacccttggctcccgaagggcagacacacttgcccgctcaggctctgcaaacgatacccatcacctggccgtttgctgtgtggggtctggacctcgtcggccccttgcagaaggcacccgggggctacacgcacctgctggtcgccatcgacaaattctccaagtggattgaggtccgacccctaaacaacatcagatccgagcaggcggtggcgttcttcaccaacatcattcatcgctttggggtcccgaactccatcatcaccgacaacggcacccagttcaccggcagaaagttcctggacttctgcgaggatcaccacatctgggtggactgggccgccgtggctcaccccatgacgaatgggcaagtagagcgtgccaacggcatgatcctgcaaggactcaagccgcggatctacaacgacctcaacaagttcggcaagcgatggatgaaggagctcccctcggtgcaggaccccaagaagcgaatgagggtgcatgtaagtggcaaggccgaccgagccgagggactcctacacctctgggatacggatacctcactcgtcacctaccatgaaacatga

SEQ ID NO: 14120 - DNA, 114 bp, Zea mays
  Peptide Sequence Number=SeqID_55899
atggcgaggatgcgcgactcgaatttgtccactcgagaccagaggagaagcgggatggcgatgacaacgccgataatgtcgacgcgggagaccgatgccggagagaagggtgag

SEQ ID NO: 14121 - DNA, 423 bp, Zea mays
  Peptide Sequence Number=SeqID_55900
aagaggaaaaaggcctggtgtgatatcaaggctctgtcggtcttcattgtgcacaacatcggcaatacatggcatccaatcgtcgtcgttgacggtgaagatggggtgtggcagggcgaggaccctctcgacattgtcgttccttgtcgttcagattgtcgtcatactcactttaacacagggcttgctttcccgctcaggccgctgcgccaacctaaagttgcagtcgagattctgtgccgaactgataagattgtcttcaagcttttcgataaagttcccaggaaggtgcgatattgcctcaatataagtgaagatgagtacaggaagaccattaaaattattggtgctgagggaggattatatccaggtgctacaacatatggtaacagcttgggagccaccaaacctgtatacacttag

SEQ ID NO: 14122 - DNA, 249 bp, Zea mays
  Peptide Sequence Number=SeqID_55901
atggggcggttgcgactgcgagatacggggatggggcaggcgcggatcggtcgcgagattagcggggggcggggggagggcgagggcagaggcgtggatcacgcggctccgatgtccccgctggtgacggttgctgcggggatgcggagacggggcgggcgcggatcggcgggggcgcgactgcgagccgcggggacggggcgggcgcggatcggcagcgagattagcgaaacctatctttctcattaa

SEQ ID NO: 14123 - DNA, 234 bp, Zea mays
  Peptide Sequence Number=SeqID_55902
atgctacggcggaacatacgtcagcgtcgggagtacctgtactccaagagcctcgagggcccccagcgggcgctgttcgagaagaagcgccggatccgggcggcgctcgaggagggcaagcccatccccaccgagctccgcaacgaggagcacgacctgcggaggcagatcgacctcgaggaccaggagcgtcaaggtcatatcagaaattgtggaggcctgccgctcacatga

SEQ ID NO: 14124 - DNA, 564 bp, Zea mays
  Peptide Sequence Number=SeqID_55903
atggcaccgggccacgctaccgccacgtcggttcgagcactggggctgagaccgcaccggtgctccgcctggttggaggcgccgtgccgaggccacgtgcccgcgctgtggtcatgtgccgcatccgcgccgggccacgcggggggttgccgcaccgccgggaccacgcccccgcgcgcgccgctaggggcatgctcgtctgagccgccggggccgggggcacgcccgcgcgtgccgcggggtgccacgctccgcgcgcgtcggggccgggtgccgcgcccccgaactgctcgcgcgcgccgccgggggggggggggtcctcgcccgtgtgcgctgaggaacgcgcgccggagccgcgagggccgcgcaccgcgcgactacgcgctggggggccgtgccacgtgccaccgtgggggccgcaccccccgacccgccgggggcccgcgtgctgccgtgcgtcgaggacggggctgccacgcgctagtgggcctcaccctgaccggcggggcgccacaacgccttggcccgggggagaccgcgccgccaggggccaccagcgcctag

SEQ ID NO: 14125 - DNA, 223 bp, Zea mays
  Peptide Sequence Number=SeqID_55904
atgctcaactctagcatcacctcccccatctaccgggacctccacacgctcgtcaacccacgcctgctctccgttgtcgcctcactccacgcgctccccaccaccattgactttttatctcaaacactgctacgagtcattgttgaacttgcaaaggatatgcactggagagttcgacttgcgatatttgagtacatcccattgctggcgctccgagtatctg

SEQ ID NO: 14126 - DNA, 413 bp, Zea mays
  Peptide Sequence Number=SeqID_55905
atgtacagcactcgtgaggaagagggcgtcgggaagtcatggcttgggctggggataggcggcggcagcggcggctgcgatctgatgcagcggaataaccgaccaccggtgcagttcgacctgctgttcccgccgcagggcgtcgtggaaggagttgccgcgagcaagaaggcggagaaaggcggtggtggacggaagaggctcaaggtcgttacgggcacggccgacgaggatggccagcagcccccaggcgcgaggaagaagctccggctcaccaaggcgcagtcgacgctgctcgaggacaccttccgcgcccacagcatactctccaacgcgcagaagcaggagctcgcacgacaagtggatctcagcgccaggcaggtggaagtatggttccagaacaggagggcaag

SEQ ID NO: 14127 - DNA, 465 bp, Zea mays
  Peptide Sequence Number=SeqID_55906
atgaagcatttgagagcaagcccccaacaggctcattgtcttgaacttgatcttcttcttcttgagcttgatcctcatcttgtgttgatggagatgctcgaatggaagatgaatgtttattttgtgttggtgtatgctcttcggatggtgcgtgctatccagaccacccatgtgaacaccaactatatacctctgccacgacaggctcttgtctacccagttgtagtagaggaagtccctgtggatattcaccactttcgtgtggagaatggagttattctagaggacaacttagaggagattttggtgacacccaacctgttgttagagtcacaagcctttgcagttggagcttcatctttgacaccaccaacaccagtagcccaagcccctactcccggaggcgacgatccggatgattctagtgatggtggagaggatgatgatgaagaagaagaaaaatag

SEQ ID NO: 14128 - DNA, 711 bp, Zea mays
  Peptide Sequence Number=SeqID_55907
atggaaggattggcgaagaagcttcgtgttctgtcggggaccataattaggggtaccctcaagacgcctaattctcagctgggccgaagtgaccgctgtcactccaccgctccactggccagtctgacagaaggacagcgccgcctgcgccactccgactgcagtgccactcgacagagtgagtctgacaggcagtcaggccttgccacggcgaactacgctccgcccgaccccagggctcggactcgggctaagacccggaagacggcgaactccgctccgcccgaccccagggctcggactcgggctaagacccggaagacggcgaacttcgctccgcccgaccccagggctcggactcgggctaagactcggaagacggcgaactacgctccgcccgaccccagggctcggactcgggctaagacccggaagacggcgaactccgctccgcccgaccccagggctcggactcgggctaagacccggaagacggcgaactccgctccgcccgaccccagggctcggactcgggctaagacccggaagacggcgaactccgctccgcccgaccccagggctcggactcgggctaagacccggaagacggcgaactccgctccgcccgaccccagggctcggactcgggctaagaccccggaagacggcgaactccgctccgcccgaccccagggctcggactcgggctaa

SEQ ID NO: 14129 - DNA, 927 bp, Zea mays
  Peptide Sequence Number=SeqID_55908
atggggcaaaatatgttacagccacaagtgctctgcctgtgctccattatcctcacgttattttttacccttttgcaaccgaccgctgcacagatcactgcaccatgggaagttgatgccctcaaggctattaggggcagcttgatagatccacacggaaatcttagcagctggaaccgaggagatccatgcatgggaaattggtcccatgttatctgttacaatgcaacaggcagtgatggatacttccatgtaaaagaattacagctcctaagtttgaatctatctggaattttggctcctgagcttggtcagctttctcaaatgaaaattatggattttatgtggaattcgattggcgggaccatacctaaggaggtcggaaatatcacttctctggagttaatgctcctgaatggaaaccaattgaatggctctttaccagaggagattggcttccttcctaatctgaatcggattcagattgatcagaaccatatatctggacttatacctaaatcatttgctaacctgaataaaaccaagcactttcacatgaacaacaactcattgagcggtcaaatcccacctgagttatccagattaccttcacttgttcacctattattggataacaataacttgtcaggctacattcctccagaactatcaaagttgccaaatgtgctcatcatgtatcctagtggttacatgtgccttggtagcacctcaggtcctagatttgactccttgtgggagcaaaaacaaccctcgtcggctctgtccctgagctatgcatgtgaaccacctgcagcgagatgcccatggccacatgcatgtgtcttgggcgttcgcctttggggtgtttctcggcctaagtttcttcttaatgcaatgctgtggggtggtttctctcctcgcaggtag

SEQ ID NO: 14130 - DNA, 633 bp, Zea mays
  Peptide Sequence Number=SeqID_55909
atggcagatagggcttacgacaagggcatgattgttgacatttcaccctccctcagagctcatgtcatgagatggagtagacttttgaattcctctgcagcagccttgcaatatcaagttgaagttgaattaagaggtatcccaattcatgcctgggatctggcatctatggaaactcttctgaatgaatggtgttggatcactgagatccatccagtctctgcccatcagcgtgaggtattcagggtgatcgcctggtgctccagcccgtcttccattccaaagaaacttcatcttgagattattgagcccctggagagcatgctcccccccttcgccaccctcacaatgaaggatgatcgtgatcgaagcaagttgcagaggcgtaggagatccaggcggtcgtcccttgatgacagctattctgatcaagggacgttggcgccctccctgccttgggtttcggccatgcgcggttgggcccacatcagcgaaacgtcggactggaggcacccgaggcgcctcgtctgtcggtccatgcgcggctcagccccactgggaaatccagctgttggattgttgtttgctctcctcggcttgaggtggcgaagtaatccccccaagcgcatttaa

SEQ ID NO: 14131 - DNA, 534 bp, Zea mays
  Peptide Sequence Number=SeqID_55910
atggcgctcctcccccttcccccctccggctcccctcctcccgccggctcccctccccccgccgactcccctcctgccttgccctgcgccacccttccccagccatcgtcggaggcagagccccagcaggcttctgccttccccaccagccccatgtcgtttcttagtccaagacgccgcaaggctcttagatggagagaatctagtcctacctcaagttcttgcgaggaagaagatcccacgtctttcaaagaagtccttcttgcgggtatggtctcgatctcagatccggaagcgcttgatggtgttgctcaccaaggcgcaccagatgagacttggcaggccttcgcgctgcagagggtttcagcaaagttccagttccagaaggccgctgatggcgcgaatccgaagagtcagaagttcttgaaggaccatgaaggcttcactatcgtggaaagtcgccgcgtgcagaagatgagaagacgtctcgagtgccaaccaatcaggcaatcaggcacgttccggaagctctga

SEQ ID NO: 14132 - DNA, 447 bp, Zea mays
  Peptide Sequence Number=SeqID_55911
atgggcaagagcaagaaaggtagcggttcttcacaccattctagcgacaaacgcaagcgcgagccgactcctccctcggaggacttcggcgactcggagtactcggaggaggagttctcttccgggtccgagggatctccggctcccgtctctcccccggcgtcgtctgatgattcagacgactcccagaggattaccgcggaggtctggacctacatccgggtcgtcgagcgcgccgggctcgaaggctcggatgagtcggagtactcctcggacgaggaggattcctcggactcgtccgaggagggcagcaacggcaatggtggtgatgacggcgatgacggcggcgacggcaatggcggcggcgacagcggcaggggtggtgacgatggcagcaagggcggcgacggcggcggcagcaagggcagcaacaaggccagtggctag

SEQ ID NO: 14133 - DNA, 225 bp, Zea mays
  Peptide Sequence Number=SeqID_55912
atgaccatatactcctggaaagatgaaaaagatcaagttgcatctgcatctcctgcgctactaggaggcaagaacggaacacaagctgcagtgacgaaacaagcaaaagtaaataaactagtcaataaattaatagctgaaggctgcagttgtggttgctggaatgcagagagaaaagaacaaccagaaaagcacgagcttgatctgagggagttagagaaatga

SEQ ID NO: 14134 - DNA, 348 bp, Zea mays
  Peptide Sequence Number=SeqID_55913
atggcggatcggcgttggggaagcctgcgcactccgatcggccgcacgcccgatgagactccaccgcacaggatcagggcagcggtgcaggtccctgcggcgatggcctggcggagcgaccgcagatcacgacacagaggtggccgaggagcgtttggccgtgggaatcaccgggcggaagagcgctgggtctgcggggacgatgaggagaccgcggcgcccaatcttatacccgcgagggcaccgcaacggtccgagaaagggggaatgaggaccgggttcggagctgctccgatgaactcgcgcaggctgcggtcgaatttgttgcacggagcggacttgggatag

SEQ ID NO: 14135 - DNA, 249 bp, Zea mays
  Peptide Sequence Number=SeqID_55914
atgaccgtgagaggagaggccagcagggaccgctgggccagcgcggtgaaggggagggaaatgaggagttgggccaaaatgttatctttcacaaattataatttgggtattacacagtggctcggactcagcctcggccatggaagacagactcgacctcggcttcggaggagcctccacgtcgcccaacctagggcgcaggccagccacgtcaacaggaagcgccatcatcaccctaccccgagctga

SEQ ID NO: 14136 - DNA, 193 bp, Zea mays
  Peptide Sequence Number=SeqID_55915
atgtggcgaaagccgccccccggcgggaaaatcaacgacttcttccccgcgtggcggaagaacaacattcgagttggcccggctctcctcgcaaaggaggaaagagctgggcaaccaagccagcaggaggtcgcttcgtcgctgtccagcgagtcacatcctatgaaccaatggggcgcgatgggtcactcgg

SEQ ID NO: 14137 - DNA, 429 bp, Zea mays
  Peptide Sequence Number=SeqID_55916
atgcatcaaagggtttcaagcaactcctatgaacttaatgcacatttcactagacttaaagtctggcgagctaacgtggtcaaaataactgtggctaacgagcttgcgatagaagtgatgatagtgcgggagctcgacacgctgtggcaagcagataaaattcgtgcgcgcggcaaacaaagaaagagtgagctgagcatgcgcagagagctcgacaacccgcagcaggggctagcagggcgtgagctgcgcgcagagaagaaatgccggcgagctgaaggggaaaaagggccgagcagaggaacgctgtgtagaggcgagttgagcagggccaagctggagcaccgcggcgcgcagggaagagccagggagaggggcgcgctggggaagaagctccacggcttggagaagataaagacagggagatga

SEQ ID NO: 14138 - DNA, 171 bp, Zea mays
  Peptide Sequence Number=SeqID_55917
atggccatgcgggatctgagctccacgctcgccgagcattcacgtgtacaccgtacatgtccgttgaattatgcggagcagtcgatgcgaactgccagagactggcgtgttcggagccgcgcgtccatggagcacgggacactgtacggtgtacaccggacagtccagtga

SEQ ID NO: 14139 - DNA, 1742 bp, Zea mays
  Peptide Sequence Number=SeqID_55918
actcaaatacaaaggcgtatagagtcttcaacaaatcatcgggtttggttgatgtctctagcgacgttgtatttgatgagactaatggctctccaagggagcaagttgttgatcttgatgatatagatgaagaagacgttccaacggccgcaatgcgcaccatggtgattggcgatgtgcgaccacaggaacaattggagcaagatcaaccttcttcctcaacaatggtgcatcccccaactcaagacgatgaacaggttcatcaggaggaggcgtgtgatcaagggggagcacaagatgatcatgtgagggaggaagaagcacaaccggcacctccaacccaagttcgagcgacgattcaaaggaatcaccccgtcgaccaaattttgggtgatattagcaagggagtaactactcattctagattggtgaatttttgtgagcattactcttttgtctcttctattgagcctttcagggtagaagaggccttgctagatccggactgggtgttggccatgcaggaagagctcaacaacttcaagcgtaatgaagtttggacactggtgccttgtcccaagcaaaacgttgtgggaaccaagtgggtgttccgcaacaaacaggacgagcacggggtggtgacgaggaacaaggctcgacttgtggcaaaaggttatgcccaagtcgcaggtttggactttgaggagactttcgctcctgtggctaggctagaatcaattcgtattttgctagcatataccgctcaccattctttcaggttgttccaaatggatgtgaagagcgctttcctcaacgggccaatcaaggaggaggtgtacgtggagcaaccccctggcttcgaggatgaacggtaccccgaccacgtgtgtaagctctctaaggcgctctatggacttaagcaagccccaagagcatggtatgaatgccttagagactttttaattgctaatgctttcaaggttgggaaagccgatccaactcttttcactaagacttgcgatggtgatctttttgtgtgccaaatttatagtgatgacataatatttggttctactaatcaaaagtcttgtgaagagtttagcagggtgatgacgcagaaattcgagatgtcgatgatgggcgagttgaactacttccttgggttccaagtgaagcaactcaaggacgacaccttcatctcccaaacgaagtacacgcaagacttgctaaagcggtttgggatgaaggacgccaagcccgcaaagacgccgatgggaactgacggacacaccaacctcaacaaaggagtcgctacgccttgcttcgggatctggtatccaaaggggtctaactttgacttgattggatattcagactctgactatgctggatgtaaggtcgataggaagagtacatcagggacgtgccaattcttaggaaggtccctggtgtcatggaattctaagaaacaaacttccgttgccctatccaccgctgaggccgagtacgttgccgcaggacagtgttgcgcgcaactactttggatgaggcaaaccctccgggactttggctacaatctgagcaaagtcccactcctatgtgacaatgagggtgctatccgaatagcggaaaatcctgttgagcacagccgcacaaagcacattgacatccgacatcactttttgagagaccaccagcaaaagggagatatcgaagtgttttatgttagcaccgagaactag

SEQ ID NO: 14140 - DNA, 264 bp, Zea mays
  Peptide Sequence Number=SeqID_55919
atggcaatccggtgcctccgacgaagtagcgctcagtttgagggctcggggaagctctacagggctcgagggaagctagccaaggagctggattggatggaggtgggccggagtggccagtccacggtgggcgggctcgagcggccgatggcacgccggctatctgacttgtgtgagttccaagtgaagatatggtcgggtgtgggagatatggtggcgccaagtcaggggtgtatctgtaaggtcacagggacttcgatgtaa

SEQ ID NO: 14141 - DNA, 402 bp, Zea mays
  Peptide Sequence Number=SeqID_55920
atgactctagtttgctattttactcttgctctactttcatcaactaacactacatcgttcgcaaaaagcatttaccaagagatatccccttgtgatcttatccatcaccaaggcaaagagattggtatcaatatgctctccactcgtcaggacaaatttttccacaggacatattacttctatgaattcagtctggacaagcaacacgtagctctgatggctaccgtgaatagtgggaaggataaagctcctagcactgctcagcaggataaccagatctcttgcactgagaggacagtttggacgtacattgccggcgctaccgctccagagatgaaatgggattcagcggtacgcatagagggttctattactgttctagtcattgaaagaaggtgctga

SEQ ID NO: 14142 - DNA, 609 bp, Zea mays
  Peptide Sequence Number=SeqID_55921
atgacgtggcaggggcaccgggactgtccggtgtgcaccggactgtccggcgactatcagggagaaggcgagcgggcggaggatgagggcggggaggattcgccgccgttctcctgctactgcggtggcggcctgacaatgagactgctgagaggggcacgcgcgggatgtggtgaggcgggggcaagagcgggcgagggcgagggtgagggcgagcggatggggtcggtctcaggttctggcgttcttcgagggggcgtgatgtcctcgtactcatcctcgtcgtcttcgatgtcgtcgcccctgctgcgcggcctcatcttgctacgtgtgggagcgctacggcggtggcgctgcgtcctagggtttggggtatggcgagatggggaagggacagagaggcttgaccaaacaacgctacaggaccaagtgaaatcaagccgcagagcgaggacaggcattgaacgatcagaagggagcgtggagaggcggaccgagcgagggagcgagaggagacatcaacctttgattggcgattggacatctgtaatgccaactactgacgtggctgaacctgagggcagatttccttcccgctttaatatatag

SEQ ID NO: 14143 - DNA, 420 bp, Zea mays
  Peptide Sequence Number=SeqID_55922
atggcccctgccgcgcttctcccgctcgcccctttgccgcatcacccgaacccaccacggcgacccctatgccgctgcggggcctcacgccgcggcttcactgtccacaccgtcatcgccattgcctcggtctcggactccgcctccgaccccaccgcggccgcggaggcgacgtccccatctccgcccccctcgctgccaacgcaaacgccttcctctaaaccaggacccccggctttgggcggcatcgcgaacacgaggtcttggtcgcagtactacggcagcggcttctccatccgcgtgcctccgtccttcgacgacatcctcgagcccgatgactacaacgccgggatgacatactacggtgacaaggccaagccccgggcgtacgcggcccgctttgcatctccagataggtag

SEQ ID NO: 14144 - DNA, 672 bp, Zea mays
  Peptide Sequence Number=SeqID_55923
atggcgcctcattggtttttatgggacaccaaattaagcttgcacatgcattgttccgggaagaccaccttgcttcttgctcttgctggacggctcggtcctggactaaagatgtctgggaacattacttacaatggccaccatttgaacgaattcgtgcctcagcgaacatctgcttatgtcagtcagcaagactggcatgcttcagaaatgacggtcagagaaacgctggagtttgccgggcgctgtcagggtgttggaataaagtatgacatgcttgttgaactgttgaggagagaaaagaatgcggggataaaacctgacgaggacctagatgtgttcatgaaggcgttggctcttgagggtaagcagacaagcctcgtagcagagtatataatgaagattttaggactggacgtctgtgctgatactattgttggagatgaaatgatcaaagggatctccggagggcaaaagaagcgcctgacaacaggtgaattgctagttggttctgcccgcgtgctgttcatggatgagatatcgacaggccttgacagtgcaactacatatcagattatcaaatacctaaggaattcaacacatgctcttgacggaactacaatcatatccttgcttcagccagctccggaaacatatgagctatttgatgat

SEQ ID NO: 14145 - DNA, 324 bp, Zea mays
  Peptide Sequence Number=SeqID_55924
atggcccaagggcacatttccctttcaagtgagcacactctgttccccatggatggctttggtgatgatgggtttggtgatgatggcttgagggatctgttcccatggttggatcggactgtccacctcggtggatacgacttcttctcccaaagcgagtcaagcgtcccccatggtgatccccatggctttcaggcactggatctcaattcacaggtatcatcgaaggcagtggcactcgagtcactggaggagggcgagcctttagtgctgccggattgcgcgctccatgctagggcacccgtggaggagggcggaccgtga

SEQ ID NO: 14146 - DNA, 1350 bp, Zea mays
  Peptide Sequence Number=SeqID_55925
atggaacttgttgagttgaatcccttaagcggtgctcttgttggtctgcctggggtaaatggtttatcgactgaacaacgtaaaaggttgacaatcgctgtggaacttgttgcaaatccttctattgtgttcatggatgaacccacgtcaggattggatgctagatctgcagccattgtaatgaggacagtgcgtaatattgttaatacaggacggaccattgtctgcacaatccatcagccaagtattgacatatttgaatcttttgatgagcttttattcatgaagcgtggaggacagcttatatacgctggtcccttaggtgccaaatcgcgtaatctggttgacttttttgagaccagagaaatcgtcgaggccctaagcagaccgagcagtgaatcaaaagaacttactttcgccacgaagtatgctcaaccattttgtgctcagtatatggcttgcctatggaagcacaacctatcgtactggaggaaccctcagtacaccgcagttagattcttctacacagttattatttccttgatgtttgggacaatttgctggaaattcggttctagaagggggacccaacatgatatattcaatgcgatgggtgccatgtatgcagcggtgctgttcataggaattaccaacgccacttctgttcagcctgtgatctccatcgaaagatttgtatcttatagagagcgagctgctgggatgtattcagcgttgccttttgcattttctctggtcactgtggagttcccttacatccttgtgcagtcactcatatacggttcaatcttctacagtttgggatcatttgagtggacagcagccaagtttctgtggtacctgttcttcatgtacttcacgttgctgtacttcactttctatggcatgatgacgacggcgatcactccaaaccataccattgcgcctattattgcggctccattctacacgctgtggaatctcttctgtggattcatgatcccaagaaagctagagggtgctcttgcagcactgttgactgaccgtctgttttctctggtgaacgcattgcatgtgcagcgcatcccagtttggtggaggtggtactactgggccaacccggtgtcgtggacgctctacgggctcctgacctctcagttcggcgacctggaccagcccctgcttatggccgacggcgtcacctccaccaccgtggtggctttcctggaggagcacttcgggtttcgccacgacttcctcggcgccgttgcggccatggtggccggcttctgcgtcctcttcgccgtcgtcttcgccctggccatcaagtacctcaacttccagcggcgatga

SEQ ID NO: 14147 - DNA, 585 bp, Zea mays
  Peptide Sequence Number=SeqID_55926
atgccctttcccaccttccatgacgtgcagaacgaggttctcctcgatgagctcaccatggtgactgaggcacccgctccggccccaaccctctacagcactcctctcaacggtcaggcaccttcgggcgggggaggctcttgccctcatcgatcggggttcctgtccaccctccttttgtggtccctgcgactcctcgtccggtttccaccgccgatagaggtcgtcgctctcgcatgggagaccgcgggggtagcagcttcacctagggtggtgcctccaaccagggtggcgaccaggcgtggtcatcattctacaacccctggaccgggaccatttccatgtggccgggctaggccccgagtgcccccgtccttcggcgccggccctcctgacagcacctccctacgtcgtgcctccgacgcctccctatggcgtgccaccaacgactctagatccatcctagctctcgccccagggacccccacctcgactcctttgtccccgttggctggaggatggaactctgcctccctcaccactgcctttagcaccatggcgatgaccccaccctcctctgactag

SEQ ID NO: 14148 - DNA, 894 bp, Zea mays
  Peptide Sequence Number=SeqID_55927
atgcagagcctaaccgtagcaagagcgcttcctcccgccgtggccacagctcggcggcggccgcgcgcgtcctcttctagcagggaagcggttttacaatgttggaagtacgaattaagtcaagaccaatatctgggaggatccctaaggataggttcgtctcaaggaagtttggacatacatcgctcaacaaatttgctcagaccagctgctgcatctgtttcagttgaacaagatgaagtcaatacttatcttccaaaaggtgatatgtggtctgtgcacaagtttggtggaacctgtatgggaacatcccaaagaatccagagtgttgcaaatatagttcttggtgattcttctgagaggaagctgatcattgtttctgcaatgtctaaagtaaccgacatgatgtacaaccttgtacagaaggctcagtcaagggatgattcatatacaatagcattggaagaagtttttgagaagcatatggttgctgcaaaggatcttattgatggagaagatcttgcaagattcttgtctcagttgcactcagacgtcagcaacttgcgagccatgctccgtgctatttatatagctgggcatgcgacagagtctttctctgactttgttgttggacatggagagttgtggtctgcgcaaatgctatcttatgcaataaagaagcgtggttgggatgctgagaacccgaacgtcaccggcggcgatacgctcgcgggcgaagtgcagacgagggtggcgtgctggggggggggggctgtggagctcctggagatgctggcgcagccagaaagcctcggccacactgttggctacaacgcggtactcggcctcagcgctggagagagtgacaatgagctgtctcttggcggcccatga

SEQ ID NO: 14149 - DNA, 1326 bp, Zea mays
  Peptide Sequence Number=SeqID_55928
atggggatagatttgggagaaatcctttccccatcggggtatggctggttggggtttgggaggtacaaactcaaacccgattacccatggggaaggttctttccaggcttccacattccactccaccacttctttccagttgccaccactccacttctaggttctagccgcgccgccgcttgctctatgccgcgcgcctgcgccgctgcttgcttgctcgtaactcagaaggtgacgtcaccgcttgcccaatgcgagcgtgcctccacttgcactgcggccctaccaaatctggaaggtgccgaggttcatggatatgggtctagggagttaatccccgatggggaattccccattgacatctctagtccgaccatgggtcgcagaccgtctgacactaacagaaatgtagccttggttaatttggctaacgatgcagccgatgcagttgattggaggacgccttttgttacatacatgcgtaatctaagtgttaggacaaataggaacattcaacggatagctttcaagtatgttttaatcgacaatgaactttatcgtcggactcctattgatgtcttgcttaagtgcttgggccctgttgatgctatattagttgtggccgaaattcgcgaggcaaatgatctagctattggtgacaatcctgatttgatgatgaacgatattgatgaggtgaccgacaagagactgatagctctaaaggagaacgagaaagacaagattatggttgccaaggcctacaacaagaaggccaattcgctaagcgagatcgtggcccaggcgttgttgcatgttgtgagcgtgcaggtgccgtccagtccaagcgtcgccatagcaactactgatatattgacatggttttcatgtcttgatccaaagaataatttctctagatttgatgctaataagattcgacttgctaaaatttatgatgctgatttctccaatattgatcatgcaatgctttcacaacaacttgaggcttatattcttcatgttagaaggcatacatcttttgctacttgtaaagatgttgcaagtttagctacaaagatagttgaaacagaaaagcacttggtttttccattggtgtacaaaataattgagttagctttgttattgcctgtttcaactgcatctgttgaaagatctttctcagcaatgaagattaccaagactaaattgcgcaccaagatcaatgatgattggttcaatcacttaatggtatgctacatcgaaagagagatatttaagggtcttgataatgttacaaccacgagaagattccaaaggcataaagactag

SEQ ID NO: 14150 - DNA, 582 bp, Zea mays
  Peptide Sequence Number=SeqID_55929
atggaccctaagcgccacagccttattgctggcatcgctggtcactgcgcactctttgatgccccgccgatgtttaacatgtcgagcagccaaccaacgggcgcagacaagaccctgtcgcgattggtggagtgggcagacatggaacaccttgtactagagcggtcccagtgtcacgggcagtacggtgccacggggcagcgacagcagctcccgcacatggtgcatttacaccacggcctcgccgtcccacccaccaccgtcaccggcgacgtgcacggtgccatgtccgaccgcatacccggggatacccttatggtgcttttgggtaggacggtgttgctgattgtagctcgatggttcgtgctgggagcacgagagagtaagagagagacaagctattttctgcaggttcaggccgctttgagaggcgtaataccctacttcctgggatggctctatatgtgtggtatgttacaagtggtgtctccagaatggagaggggctaatgagatgaaaatgatggggttccccctaggccttatatacacgaccgtggggcactccctacatacacggtga

SEQ ID NO: 14151 - DNA, 138 bp, Zea mays
  Peptide Sequence Number=SeqID_55930
atggaggatgaagattctggtggagctagagatggacctgcaaggctgcaacaaacattgatggaggaggcttccaagtggatgttcaactgttgtggagaaaggaagaggacaagaggcaaggaattattgttgtaa

SEQ ID NO: 14152 - DNA, 939 bp, Zea mays
  Peptide Sequence Number=SeqID_55931
atgaggctttcgcgttgcgcgaaggtgctggtgcgacactgtcacggtgtcacggacctgcaggcggatccccccctacaggaccgtatagctctcactcgtcctgagattgacaccgagaaggagatccaaacagccaagtcccatattctctccaccatgctcaccgccacgtgcctattggagtaccgccgcctcctcaaccatcgcatcgccgacctcacaacccacaccgccgacctcacaacccacgtccttctcctcgtggcccacgcggcccctccactcgcactgcagcaaacacgacaacaatgctgcgcacaggtggatgtgggcctcagcgacagcagctatgagagggggtggcacatccactgcaatctgaaatacaatttcccttgccgaaacattttagttgagcaatctgcgggaaatatgatattttcattcatccaagatgaagctgttcaaaaggtgatagagtttatggatacatactctttaagccaggaagactttgacacgattgtggaagtatccaaatttaagcccgccccttccatacttctcctcgcatcccttccatcctcgtccgtactcctccccacgtccacagtggataccgtgagctcgcccccgcctccatggctccatcctccgctcgcgattccccgtgcccgttggaagggggtcacggatcctcacgcggttcctgctgcactacctccgcgccgccacgcgctcgccggcctcgcagacacggccgtccacggcgtggcgctcgtcgggggcacgacgttctcgtgccggggcctcttctgggtgctccggatcgggtcggcggtgtgcctgagcagggagtggcagcacaagctagagcggctcatggggctgatgctggaccaggccacactcgacgacctcctcgtaagaccctaa

SEQ ID NO: 14153 - DNA, 648 bp, Zea mays
  Peptide Sequence Number=SeqID_55932
atggacctggacccagaggggatcttccgcgacgacagcgatgaagacgaagacagtgtccaggagagggaggcgaacaaggagatggttgtctaccttgtcgacgcctcgcccaaaatgttcacccctgccaccacccaggacaatgaaaagcaggagacacatttccataccattgttaactgcatcacagagtctctgaagacacaaattattggtagatcttatgatgaagtcgcaatatgtttctttaacactaaagagaagaagaatttacaggactcagccggtgtttatgtttataatgtcggagacagagagcaacttgatagacctactgcaaaactcatcaaggatttttctttgatagaagattcttttatgagcaccattggaagtcgatatggaataacagctggatctcgggagaataccctgtataatgctctttgggttgctcaggcgctgttgcgcaagggatctgtgaagaccgatgcacaagatcttggcctgtctattgaacttcttccactgagcccgcctgatgaccagttcaacatgtccctgttttatgcagatttgattggtctggatggagatgagatgaccgaatatttgccatctgctggtgataagtactattcttga

SEQ ID NO: 14154 - DNA, 168 bp, Zea mays
  Peptide Sequence Number=SeqID_55933
atgccaccgctgaatctcctgctgcacctgccaatcagcttcgtggatctcatgcagctggtcaaacaattgctgatgctatgtcgccaccgcctccatgccatagctgtcgccgcctcgcgcaccacgagcgcgctcgtggaatggtttgaacaatgttgtgattag

SEQ ID NO: 14155 - DNA, 198 bp, Zea mays
  Peptide Sequence Number=SeqID_55934
atggagcaagagcatctccacctggcaatggtccactcattgtattcatcactaagtcatctcgattccacaaatgggtgttcatgctgttggatggcaaatgacaacccatctttgcatcatgcagtgtttggcctttctaatatttctgtttgctcccagcggcttgaacccctacaagtgcacctgattatttga

SEQ ID NO: 14156 - DNA, 255 bp, Zea mays
  Peptide Sequence Number=SeqID_55935
atgtcctcctcttcagtcgcctcctccgtgctgccggccaccgagaagcctacggtggcaccgttcaggccctggaggttgcccatcactgcggacgttgtgtccggagcggataggcgcctcaacggggggagcagcgccgatggggccatgggggagggttgccgaggcgaggggagcagcgctgaggggagcggtgccgacgcatgggctggggttgggaacgcgtgcacgggaactgggttgagggtctaa

SEQ ID NO: 14157 - DNA, 1854 bp, Zea mays
  Peptide Sequence Number=SeqID_55936
atgcaagaatgcgttcttaacatccaattgatgtacatgccaccgtcaagatttttatgtcccaaaggaaatgtccagacgtgcagggtaggcaaggataggcaatggcctagaattgttgttccggcctccttcacagcgcttgtcttcccggctgcctcccctcgccgcatattgagcgtgtgctcgtcattttgcttccaacaggtactcgctttcgcttccaaccagcgcgtcctcagccagcgctggaggccgcccagccgcgcctgcgaccgcagaccgcgcgtcctcactcagccagcgctggagatctcctgtccgcccagccgcgcctgcgacagtgcgaccgccctcctgcccccaggaaagcactgcaagatgatactgctccagtccccatcgaggttcctgctccagatcctgcaagaccgtgttctcagtggcgagaagggcatggacattgactgtcacacggtagagttcgatgatgtccggtatcatatccagttttctatgaggaatccaaaggtaatggtgttgtcagttgctttgcctctgccacctcctgaagcgattctgtatgatgggctaccactaggtgccattgaagctataaaagcagcatatgggccagttgtgcagattcttgatcctccaaaggacgggtttgatctcacaatgaagataaatttgacaaaacttccgctagatgaagagcaaaggaatactatcttgacacaaattgcatctattagagaggttgtgttgggtgcaccactgaagctcctgctgaaacatttagcctcaaagacagttgcacctaatgttaacaaccttgttgctcttgttcaccgccctaatgaatcatttttccttgctccccaggcagataaagttactattgtgtatccaatgagattccaggactccattgatattgttttagcaacttccttcctgcagcttgagaaacagagggagcgttgggttcctacggcactgacgcgccatggtcatgatgtcacggtgctccccaagcacgtccgcgtgagtgagcaggatcgagggagcaacatcctctctgggctccggcggcaatgcaaaggtgaggctgcattgcagagagtacggtgtgaaggtgacacgagttggacaaaacagagaagtgtgaaatgtgtggacagtgttgttccagatgtgtggacgagaaggaggcctgaagagctggttggagatgttgccgctaagcatgatctccggcgatttagaacactggttctatcagatttgtgccttggaaaagcatttgcaaatattgggctcttcaccattaggaactatgggaacattgcaatgattatgtgttcagtgttcagcaatagtacttctgtagatgtggtggtcactggtcaggatgcatctagaagaggagagctatcaggaatattgatctgggatttctggctgcagcacaatgccttcaaccatatcacaaatgcggaggaatttgtggaggcaagacgaacagctgcacttaataatgttccttcttgtatgtggtctccggtaccacctcttgagttaaaaggagtatctgctgatgcactaaatgcaaatgctggctttgttactttcgttgtttaccctcggcatgttgagggtaaaaagctagatagaacagtttggaatttgttgacatttcatgcttattgttctgaaggattcatgcataccaggatgaggcgcagggttgagtcgctgatccaggtggatctccgacgccagagtggggctgtcttcgtgggaggcgacctggtgtcattggcggataggggtgacaatgggctctaa

SEQ ID NO: 14158 - DNA, 744 bp, Zea mays
  Peptide Sequence Number=SeqID_55937
atggcaaggtttgcacttgcattttatgggaatccaactcgaccacaactcatagcccttgttgctcaagaagaggttacttcgtctggtcgtcagtttgaaccgcctggcatgcacatgatctatcttccatactccgatgatattagatatcctgaagaagttcatgtgacttctgatgatgcaccgcgtgcaacagatgaacaaatcaagaaagcttcgaacatattcaaacgtattgatctgataaatttctctgcatgccaatttgctaacccagaaatttacctacagagtcagggtcaactgccaggggtagccaatgctattgaggaattcaagacttcagtctatggtgaaaattatgaccaagaggaggcagaagcggcagcagggaaagcttcccgtggtaatgcttcaaaaaagcggaaggaggtcactgatgcagctgcgcagataagtgctgcttatgattgggcagaacttgcagacaatggaaaactgaaggaaatgaccacggtggaattgagatcctacctgaccgcgcatgatctcccggtttctggtaagaaagatgtacttatcagcaggatcttgactcacctgggttttatgctcagggtactgttgcatgctgcgaaatggctttggcttcaaatgagcttggagacaggagaagctgatgaagtcatgtgttgggcaatccttgtcatctatagggtagccagccttgtccgtatctga

SEQ ID NO: 14159 - DNA, 252 bp, Zea mays
  Peptide Sequence Number=SeqID_55938
atgcggcacaaggccgagaggcggcggttcaccgaggaagctatccgcaccagccgcaaagcagaagggggagatgacgtttttgcacataggcccctagggtttggatttagggttttccagggttccaatgggggtttttggtatcttagggatataaatgtgattcaagtttcttcatgggaacattttatgactattcccctaaagcttttaggttttctcaatttgggttatgttttacccctttaa

SEQ ID NO: 14160 - DNA, 375 bp, Zea mays
  Peptide Sequence Number=SeqID_55939
atgaggggagtaacagcggcattcaagctccattacataggagagaaacggtcgtggaatgaagctttggttggctccgggtctggcgtcgcggcactcgacgtcgggtggcttcagctcctggcgcggcgcggcttggtgcacggggcgcgagttgctggcgcggtcctgcgggcgtcgcgtggcctaggctttgcttgggcgcgcgggtcgaggcagtcgcgggcacaggggctttcgggttggctccgcggggtcgcggcgctggtgggcagggcgcgctcgggtcgcgtcctggccggggcgcggtcgctgcttggtcgcgcgacttcggtcggcctggcgcgatgcgtcggggtgtggggccgggtatag

SEQ ID NO: 14161 - DNA, 171 bp, Zea mays
  Peptide Sequence Number=SeqID_55940
atggtggaggccccctgggtgaggtaccttagccaagaatacgtccccatgttaacgtgggctgccaacacctaccgctccccctcttgcccatatttcagagtatgcagagggagaagtccacttgccttgcttattgaaaacttgaggttcttccacggatctgaatag

SEQ ID NO: 14162 - DNA, 447 bp, Zea mays
  Peptide Sequence Number=SeqID_55941
atgggcaagaacaacaagcgcaagcgtgagccgactcctccatcagaggacttcggtgattcggagtactcagaggaggagttctcctctgagtccgaggggtctccggctcccatccctctgcgtgagtcgtctgacgatttagatgactcccaggggcttgcggcggatgtctggacttacatccgggccgtcgagcgctccgggctcgagggctcggatgagtcggagtactcctcggacgaggaggactcgtccgagggcggtggcggcgatggcgacgacgacgacgaggacgacgacgatgacgatggaggcagtggcggcaatgacggtgacggcggcgatgacagtgacggcggcggcagcaaggatggcgacgacggcagcagcaggggcagcaacaggggcggcagcggcagaggcagcaacagggccagtggctag

SEQ ID NO: 14163 - DNA, 735 bp, Zea mays
  Peptide Sequence Number=SeqID_55942
atggcggcgcacgacccagctagcacgcggggattcaacccggccacaaccgtcaccacgacggcgtgtggaggtgttggatccagccggtgcaggtcgacaggggccgatccgagcaacgccgacgagggaccgtccgcgcatcctacaagggcgctgcccccggcggaggacgatcttcccgagggcggcacagcgacggcagcgcggcggtggcagcggaagacacctgttgctcttgctaaggaacttgtaagatcaagacgtgctgttaatcgtctttatgagaacaaggctcaactaaattcagtatcaatgcaccttggagaaattgtcgcaactgcaagaacagtgggtcatctgtccaaaagcactgaagtgatgaaaattgttaacaatctaatgaaagctccagagttggctaccacgatgcaagaatttagcaaagaaatgaccaaggcaggtgtgatggaagagatggtgaacgaggcagttgattcagctttggactctgaggacatggaggaggaaatcgaagaggaggttgacaaggttcttgcttcagtagctggggagactgcctcccagctaccagatgctgccagaacacagaagatacatgaggcttcaacaagcagggttccagaagaacgacaagctgttgcagagggtgctgatgacgacgaggaagacctagaagagatcagggcacggcttgctaaagtgaggtcgtaa

SEQ ID NO: 14164 - DNA, 1893 bp, Zea mays
  Peptide Sequence Number=SeqID_55943
atggccgcgctccttcagtcgtctttcctcttccctcacgccaccttccccaaccccaagccccaccacctcgccgccgccgccgccacgagacccgagtcacccaacgtggcccccaatcccgccagcgcccgcctccgccgcctcattgcccgcgaggacctcgccggtgccgcgcgcctcgtcgagctctccgcctcccgcgacggggaggcccccgacgtctacctctgcaccaagctcatccggaacctctgccgccggggccgcacctccgacgccgcccgcgtgctccgcgccgccgagggctccggctcccccgtcgacgtcttcgcctacaacaccctcgtagcgggggtcgccgacgcgctcagcctgctcgacgatatgctccgccgcgggtgccaaccaaacgtcgtcacctacactgtgctcctggaggccatgtgcaagaacagtgggttcgagcaggccatggcagtcctcgacgagatgcgcgccaagggatgcacacccaacattgtcacgtacaatgtcatcatcaatggcatgtgcagggaaggccgtgttgatgacgcaagggatctcttgaacaggttgttctcttacgggtgccagcctgacactgtcagctataccaccctcctcaagggtttgtgcgcttccaagcggtgggatgacgttgaggaactatttgctgagatgatggagaagaactgcatgccaaacgaggtgacgtttgacatgctaatcagattcttttgccgaggaggtatggtggagcgggctattcaagttcttcaacaaatgacggagcatgagtgcgccaccaacaccaccttgtgcaatattgtcataaactcaatttgcaaacaaggccgggttgacgatgcctttaagttcttaaacaacatgggttcctacgggtgcaatccagataccattagctataccacagtcctaaagggcttgtgtcgtgccgaacgatggaatgatgccaaggaacttttgaaagagatggtccggaataattgccccccaaacgaggtaacattcaatacatttatctgcatcttgtgccaaaaggggttgatcgagcaagctattatgcttattgaacaaatgcaagagcatgggtgtacagtgggtgttgtcacatacaatgctcttgtcaatggattctgtgtgcagggccatattgacagtgccttagaattgtttcgcagcatgccctgcaaaccaaataccatcacatacactactttgctgacaggcttgtgcaacgctgaacggttagatgctgctgcagagctcgtagctgaaatgcttcatagggattgccctccaaatgtagtgactttcaatgtacttgtgaatttcttttgccaaaaaggatttctggacgaagcaattgaactcgttgagcaaatgatggaacatggttgcacacccaacctgatcacatataatacattatttgatgggattaccaaggattgcagttcagaagatgccctggagttgttgcatggcttggtcagcaagggagtatcgccagatgtcattacattttcttcaatcattggtatcctctcaaaggaagatagagttgaagaggccattcaaatgtttcacttagcgcaagatatcggaatgagacccaaagctttggtgtacaacaagatactgcttgggctatgtaaaagacatgaaatagataatgctatcgactttcttgcctatatggtatccaacggatgcatgcccaatgagtcaacctacattatacttatcgaaggccttgctcgtgaaggtttgttgaaggaggcccaagatctactgagcatgttgtgctcaagaggagttgtaagcaagaacttaatagaagagtag

SEQ ID NO: 14165 - DNA, 267 bp, Zea mays
  Peptide Sequence Number=SeqID_55944
atggcgcttcacccagcggtctcgacgcgatgcacaggggtcgttaggaacgacaatgcgtcctccgctgcactaggtggatgtctgaccggcgacaaccgagggatgatcgtgcgtgcggcgaagggcacacagatgctaggcattacaaagaaagacgagaaaggtgagatcatgaaggctgcaattgagatgaaaattgctaggataaaagatggatacatggctgaggtgtccactttcaaacagagacgattgaagttctga

SEQ ID NO: 14166 - DNA, 378 bp, Zea mays
  Peptide Sequence Number=SeqID_55945
atgcaggaatcccttgcaggaccgccatcgcagcaaaatcctcccgagggcctccctacactgaccactcccctactgcccttgcccctttcgggtaaggggtatttatgcaatttccagggacctatctgtaactgctttaaactgtgcgaggatggcgggtttattactaagaagttcagggactctttcgagatattgccaagcgaaggggtatcgcggcatgtgagccgttggatcagcggtcaagggcccggattagatcggcggaatactgaaccggcagggtacggcgaccgtaggatcctgattctacggttcagatttaaaataccccgcgatcgcctcagacccgcacgatcgcgatccaacgcctag

SEQ ID NO: 14167 - DNA, 210 bp, Zea mays
  Peptide Sequence Number=SeqID_55946
atggagcggatgctgctaccgactaccgactcgagtagtgccgacggctacgcgtggcctgaccaggtgactagggaatcgggaaagttcacaagtcaacaagatggatcaaatcagcgaatcacccggcggccatggaatggagccttggagaccggtccctgttctgcccgcgctgcagctctggagtttccatcagagggtgattag

SEQ ID NO: 14168 - DNA, 1332 bp, Zea mays
  Peptide Sequence Number=SeqID_55947
atggagtggcgcgaagactggtggaccgagagaaatggtgcattccgattttgggaggcggagtgcttcaagattgatccaacaaacaaaaaagtccactgcagatcagatgttgggacaaacattaatggaaacggtgaatttgtggtggattatgattacctgattgtcagtgttggggctagacctaatactttcaacacgcctggtgttactgagaattgccatttcctaaaggaagtagaggatgctcaaaagatcaggaagagtgtcatgaaatgttttgaaagagctgcccttccaaatctttctgaggaagaacgaaagaagaaccttcattttgttattattggtggtggcccaacaggggtagaatttgctgcagagttgcacgactttgtgaatgaagacttggcaaagttgtatcctgatgttaagaagcacgtaaacatttcagtaattgaagcaggaggtcatatccttacaatgtttgacaaaagaatcacccaatttgctgaagagaagttcaagagggatggcatagatttgaagacaaattttaaagtcgtgaaggtgtctaataaggatattctcatgaccaatcctgctacaggagaggtcgccgttccttatgggatggcagtttggtcaactggaattggaacccgtcccatcattatggattttatgaagcaagttggtcaggagaaccggcgtgtgctagctactgatgagtggcttagggttcaagggtgtgaggatgtatatgctcttggtgattgcgcaacgattgctcaaagaaaagttatggaagatgttgctgccatattccgagtagcagacaaggataactctggcactttaactgtgaagaaaataaaagatgttcttggagacatctatgagagatacccacaagtggaattgtatcttaaatccaaccaaatgaagggcttccatgatctacttaaagactcagatggtagctccaaggagttcaaagaactggacatcgaacagttcaaaagggcccttgctcaagtggactctcaagtcaagatgctcccagcaacagctcaggttgctgcacaagagggaagttacctagcggattgcttcaacagaatgaagatgtgtgaagaatatcctgaggggcctataaggatcagaggtgcagggcgccatcggttcaaacctttcaggtacaagcatcttgggcaattcgctccactgggtggagagcaaactgcttaccaattgccaggtgactgggtacatgttggacacagcacccaatggctgtggtattctgtctatgcaagggcactgtga

SEQ ID NO: 14169 - DNA, 798 bp, Zea mays
  Peptide Sequence Number=SeqID_55948
atggccgcggcgaacggagctgccgctgtcggtgccggtgcggggctgttcagcgaggaggagctgcgggaggtgagcggggtgcgctggggggaggacttcgtcgaggtgacgtgcggatgcaccagccaccgctacggcgacgccgtaggccgccttcgcgtctgcgcgtctggcgacctggagatcaactgcgagtgtacgcccggctgccgcgaaggatttgccccctctgcgttcagtcgttgtgtccatcacaacagcacaacaaattgtaacgtctctgcagacaagctgacaccggctgcctttgagaagcactctggaaaggagacagccggaaagtggaggaactccgtctgggtgatggttgagggagaaaaggtacccctgtccaagacggttctgctcaaatactactacctggcgcgcaaatccggcagcggcggcggcggcggctgcggtcgtcgtaacggacggccgtctcaccgcgacgagttcgtctgctgcacgagatgtggcaagggtaggaggtttcggctccggtcaaaagaagagtgccgtgcttaccatgacgcccttgccaaagctcactggacatgcacggatttgacaaatgatggggtcagctgtgccgacgaagaggagcgcgcaagccgcaaggtcctgcggggctgctcccgctcaccgtcgtgcaccggctgcatgaagtgcgtctgcttcgggtgcgagacctgccgcttcgtggactgcgactgccagacctgcgtcgacttctaccgcaactcaaaggaatag

SEQ ID NO: 14170 - DNA, 375 bp, Zea mays
  Peptide Sequence Number=SeqID_55949
atgacagcaaccccgttttgctatacgtttcaattgtgttccttctggacaccatccatccagccgacgcggggacttcgccaaggtgatccactttcaccttacctctttttatctgttgctggtgcctggtgccgtggtctttttaaattgttgcctaaagagtctgaggaaggtgcagtcagacaaatgttgcagcagtatactaaaggacgtgcaggcattggagtcatcatacgagcatacagtacgagactggaccagaaaagtggagctagcagtttggatggccatcttccatgcgcgggatcgcatcgcatgccgaggaggtcgaggctacggtgtgccattccagctggggacggcgtggtatag

SEQ ID NO: 14171 - DNA, 459 bp, Zea mays
  Peptide Sequence Number=SeqID_55950
atggcgagcaacggctcgtcgctggtgcgccgagccgccgcagcggtgcgccgcatgcctcgttggaagaagcggcttgtcttcttcgccgtcggagctagcaccttaacttatgcttgtcaagataatcgtgttcttcaaatttgtgatgttactggaaacaagaagaaggtggttatccttggaactggatgggctggtgcaagtttcttgagaaatattgacacatctttgtatgatgtccatgtggtatcacctcgcaattacttcaccttcactcctttgttgccaagtgtgacatgtggcacagtcgaagcacgtagtatcgtggagccaattcgcaatatcgtgagaaagcatttgaagttcgcttcgcaagttgcacaagctcatggttatgggccacgccattctgctctcttgtcgaatgtttcacagcaagttttggaaagtcagtaa

SEQ ID NO: 14172 - DNA, 270 bp, Zea mays
  Peptide Sequence Number=SeqID_55951
atgggccgcaccgagacccagtctacgatggccagggttcggtgcgacatagagacgtcaatgatggcgccgatgctcttcggcacccacgccgccacccataaagagcgactagggaagcctagacgaccaaggcacatacggacaaacacaactttaccaaggtcgaacactccagtgtaccacaacagagtagctccttccttgggaagctaccggtattcgacccccaccttgtccaataaaaaggaggaggtcgccaaaacatag

SEQ ID NO: 14173 - DNA, 120 bp, Zea mays
  Peptide Sequence Number=SeqID_55952
atgacgcgagacttgaccccttacgaccagcatctcttttcacggtcgatggctcagggaggtgctgttggccgcacgacaggaggtggagcagttgcgtgcggaggtcgcctactctga

SEQ ID NO: 14174 - DNA, 102 bp, Zea mays
  Peptide Sequence Number=SeqID_55953
atggaggataagtctcatgttgctggcaagaacgggaaggaccttctatctatggctaaactgcaaggtgagattagaaaagctggcagcattcgaacttag

SEQ ID NO: 14175 - DNA, 294 bp, Zea mays
  Peptide Sequence Number=SeqID_55954
atggcgccaccagcgactgaacgcgccgccgcggtgggtgtgggcgctgtcgtgcccagtctgctaaagcaatgctcagctctaaccatcctctttggtaagccttacacttcaccatttgagaacaagtccccaacattggcgcccacctccggtgaactcacttccactgttgagacgatggcttcgttcaacaaccaagctgtagcaccttcggtcacgaagctggtgctcccaatcacgggcggttcaagttcagagccagccaacaagaagaagaagaaggaagcttag

SEQ ID NO: 14176 - DNA, 981 bp, Zea mays
  Peptide Sequence Number=SeqID_55955
atggagaagctgctccactcgaccacgtcccgcacgtcccttccggactgcttcgtcttcccggccgaccaggtcccgccggcaacctccgctgccgtctctctacccgtcatcgacatgtcgtgcagccgagacgaggtggtcaaccatggcatctctgagcaggcgttgctggagatggcggcggtgggcgaggagttcttccggctgccggcggaggagaagttgcctttttactcagaggacgcaaacaaggccacccggcttttctccggcaccacctacgagaccggcggcgagaagtactggcgagactgcctccgcttcgcctacgacttcggcgccggtgatcgcatcaaggactggcccgacaagccccgcaggctccgggaggttgctgagaacttcaccgttctgacgagaggcttggcaatggacctgctgcggctactgtgcgagggcctgggcctccagcacgactacttcgaaggggacctcaccggcggcgacgtgaccctcgacatcaaccactacccgccatgccctaacccgagcgtcaccctcggcctgccgccgcactgcgaccgggacctcatcgcagtgctcctccctggcccggtccctggcctcgaggtcgtctacaagggcgagtgggtcaaggtcgtcgccgacccgaccgtgccgcacgccctggtcgtcaacctgggccaacagctcgaggttgtgacgaatggagttctcaggagcatcgagcaccgagtgatgaccaactcagccatggcgcggacgtctgtggcgttgttcgtcgcgccgaccgaagattgtctcgtcgggcctgcggagaagttccttagtcaggagaatccgccgtgctaccgaaccctcaagtttcacgaattcaagcgcacttacaatgtcgtcaaattgggatcatccattaatcaaagaactaatcttaggaacacgcaaaaggagatataa

SEQ ID NO: 14177 - DNA, 171 bp, Zea mays
  Peptide Sequence Number=SeqID_55956
atgaggatgagggatggtgatgcacgccagggttggggggaaacgacggcgagcccactgctgatgcttgagaagggcgccgtgaggaggagaggggcattggcctctggcctgagagcgacgtctgagcagggaaacatattaattatgaatactcaaaattggctctaa

SEQ ID NO: 14178 - DNA, 300 bp, Zea mays
  Peptide Sequence Number=SeqID_55957
atgtcgtggtcggagcctcggcgaggtggccatggccggacgaacggagggtgctggcgagctagagtcaagggtgtgaaggggacgctggaagacgatcccagggcgtggcttgagggagtgtactttcgcaagtcttacccgacaaaagaaaaacactctcaaggatatgctggcttgagggagtcaaggttaagtaaagttacctgcacctggagttctttctaccctagttcaagcacttggcctaaactagccatcttttatgaacccttcatttcactggattgctacgtgtag

SEQ ID NO: 14179 - DNA, 768 bp, Zea mays
  Peptide Sequence Number=SeqID_55958
atgtcgtcctcttcctcgtcgttgtcctctgcaaacgtgtcgtcgaccacgccgtcgtccgagaagacgattagcgattctgcagcagtggacctagagcctaggaatacggttgaatttgggacctcgaggatttactcgagccgcgtgctggagatgcagcggctgggttactttggaagcggagttgggcgggctcaggggctaaagatgtccctgagacggagggggagttggttgtgtttgaggctttctttgctgctggattttgcttgccagcacatcgttgacaccgaatgctatggcgacgctggtgaatttaaggtggtagagaggggtcaagacgaggaggcccttcgctacatagcccacctaggtagtggatgtgacttggttgaagagttcatcacttgcgaggtgtggtccttggtgcatgggtgggatttgggcgagattatacctcgccggatgctaaccctgggagataaattggtgcgaagcccagccttcaccgtggatctgtgcgggcggaatgcggccactttcgtgccggaagtggagtcagaggccgttaagattgtcagaaaatatgcgttgaagactgaaatgttaaggagctgggatattcgtggttctaacattaggttgaaatgtgtcttcgaattgaataaattgccttatggtccctacccggagggggactccgctgatgccggcgatgatcgaggcaagcaagtgaaaccccaggccgacgaaggatccttatag

SEQ ID NO: 14180 - DNA, 279 bp, Zea mays
  Peptide Sequence Number=SeqID_55959
atggctctggtctctagaggaggcctttgcaccttggcccttggtgatgatgcggtgggcggcgatggccaagacaacgacgacgactctgtgtctgaggtatcacatttcaccgataatcttgcctctaagatagaagagctgacgatgcaagtggtgctatgcttctggctcctctcggatgctccccaccatctccactatcgagattccggccaaaatgatgcgggcctcattccctccggtacacagtggtggttgggtcacaaacgtggttga

SEQ ID NO: 14181 - DNA, 525 bp, Zea mays
  Peptide Sequence Number=SeqID_55960
atgccccttcaaacgccagcacacccgctcgaccctcctccaaaccagccccgctcttctctcccacagcccatgcagcacatcgccttcgccaccccgctcgtgtcgatgaccgcactgcatcggaacccgcccctcccggtctctggtgagatacccaccctgagccacagcaccgccggcgaacagcctagcccatgcccgctctgcgtcgtcgcgtttgctgagcgtctagccccgttcgagctcgcccggtcgagtttccctctggccgagccttgtgcccctgcatatgccacggtgaagtcgcgactgtgtagccctgctatgatctctatggtaatggtggcatctattatggctcctatatcctcgctcagggatctaggtatgggcatcgtcccacagctttttcctgagggcagaggtgatgatgaggatgatggttttgattatgattatggaatggtttctggtattctttccgtttggaaagggtacttttgggttaacaacttgggttaa

SEQ ID NO: 14182 - DNA, 204 bp, Zea mays
  Peptide Sequence Number=SeqID_55961
atgcccctgctcttctcatggccgcctctcctccatcccctatccatcttctcccatggttttcgtacaatcgcagcagcagcagatatggaatcacctctatgtcgtgcccacggcatgctcgatgaaatgtcgcagccagttacacctagatctatgcagccccatcccacgatgtcgtcgacccttgatttatgtgaatag

SEQ ID NO: 14183 - DNA, 489 bp, Zea mays
  Peptide Sequence Number=SeqID_55962
atggcggaggcgcaggggttcgacggggcgactatggcggactccagctgcgcaagaaaacgctccggtgagtgcggaccggatgcaacagggagggagagggcacaccgaagggtgtcccgagcagctgatagtaaggccaagctcaccgtggcactggacggggcacgggcgcaacggcggccacggaacaggcggtgggcgtcagcggacggtggcggagctccctgttcgcgtgcgcagagcgagagagagggcgagagagctgggcagagggcgcaaatgagagaagggaggtgggcgagcagggcgcggggctcaaaaggggcgccggggctcggacgtgaccggagaacgcacggtcgtgggcgcgtcaacggcggggagatcgtgggcggaagggttttcaattcaaattcaaatcaagtttcaaattcagaccaattcaaatgtatgcaacaattcaaagaatatttaggctcaatatga

SEQ ID NO: 14184 - DNA, 462 bp, Zea mays
  Peptide Sequence Number=SeqID_55963
atgggaaagaaaatatcaaagctcgaagcttcaaatgctgaaaaggacaggcggatcacaacactcgaagttgagctgaagctagaaaaggaagaatataaggctcaaacttctaagataaggcgagcatccgtcgaagcagctgttgaccttagtgttgctcaaattggtccaaaaatgttatcagatatatggaacaaaggaagaaaggaattcagtattgaagaatcaatgaagaatggagaaaaggctctaaaggcggctaaaaagttgcaagcattagaaagaatctatagaggaagaaagacgaagacaataattgaagtagaacatactgaagccgaagccgaagatggtgttattgaggccgaagcgatagctgcaagggttgtgaagaaagtagcagatgatgttgttcttaaaatttgcgagcaagtttacaatgagatgatgcgaggataa

SEQ ID NO: 14185 - DNA, 348 bp, Zea mays
  Peptide Sequence Number=SeqID_55964
atggaccctatgctcgacgccattatcattggcgccgagcctgtgtgtgtcggcgccaccatttttggcgtgcatacgtcagatggaggtatgacttggaatctatgtggcacgtacctcggcgccatagatcttggcgccgaggtaggcgcccggtcaaataggaccctacgtctgactggttggggcggcgaccgtgggggcgccgggctcagaggaaggcgcactaggcttggggaaggaggcggcgagcttgggggcgggcgcgccgccgggcgcggcaagctcgggggcggcgggcgcgggggcgccgggagtggcggcggcgagctcgggaagaggacttag

SEQ ID NO: 14186 - DNA, 306 bp, Zea mays
  Peptide Sequence Number=SeqID_55965
atggacgaagtgtgtcagtcgaaggcccgacacagcaaagtgacacccgcgagcgacatcgcaagtgatgggtcaagtgatccatccctccggctactgctcctccgagacctctgtgttgtggctcgaactgccaccgacgtcgtcgtcatcaagggggcatctctggctgaggtgcaggagaaggctgcctcccagactccacctcctgctgaggcaagggggaagagtcctgctgctcctgcttctagcatcggtgctcctgctcctcgtgcaggcgacgatgcagtctctccaggtggctag

SEQ ID NO: 14187 - DNA, 3291 bp, Zea mays
  Peptide Sequence Number=SeqID_55966
atgcctgcggtgcccgttcccggaggcggtggctcctccgacgccgaggagctgttccgcaccaagcgcatcccggagattcgcgcggttgagggcgccacccgacgcgagatctccgccaaggaggaggagctccggcagctcgtcgggcgcagctaccgcgacctgctcgactcagcggactccatactcctcatcaagcagtcctccgatgcaatattctacaacctcgcccgcatctccgactccttgtcgtcgctctcgcctccccctgaaccctctctcgccgtaagcgccgtatcgccgtctccgtcagctggagggcgcgcgaggctctacgcgctggccgcgcgcgccaagtacctggttgacacaccggagcacatctggggccggctcgacgagggcctgctcctggaggcggcggggcggtacctgcgggctcaggtcgtgtacgggcgactctcccgcgacgccgctgccgccgcgcggttcccactcctcgcgcaccaggcgcagctcgtggaggcgttccggccgcagatcgcccagcgagcgcgcgagcgcctcgctgaccgccgcctccctgtagcggcccacgctgacgcgcttgcggccgtggccgcgatcgacgcgccatcgcttgcccctgctccggcgctccttctcttcctcacctcgcgccgcgcttggatctcccaagacctagctggtctcgcctcggatctgtcatcctacacctctgtgctgtgcgatatagcgaggatcgtgcggatcacgcttggccacgttggacagttgtttgtgcctgcactcagtgatatgccgttgttcttcaagacggtgactgagaagacgccgcctgagcagttgttcggtggcattccggaccctgatgatgaagcacggttgtggaaggagcacatgaaccagcttgaagctataatggtgctgcttaagccagatgttgttgcagcggcctgtacggattggctcaaggaatgttgcagtgaaatttttggtgtgattgctggtgagcaaaagttggttgatgccattgggagtggggagctgcttggatcagtgcaaagacttgtacgtgatgccctagatgggagagatggattggagagaagtttggagcagtggctgaaaagtgtctttgggtcagatactgagtcgccatgggatcagatccgtgggttgatcttgaaggacgacaaggatattttcgaggattggatggaggaagcatttgtgcgacggatgaaggacatcgtgcattcagagtttgatatattgggttctagtgttaacgtgaaggaatcaattcatgctatcggtgccaatgctgatccaaaggatgctggagatttccttgcatacctgcggaaatcttcaaagggtggtggtttctggttctcagagtctaagatcaagaaaggtggagttttggcacacttgaaaccaattgctgatgaaaatgatttccgtagctgcctaacatcgtattttgggccagaagttagtcggatcaggagtgcaattgacagtaaatgcaagaatatcctggaggatctgctaagctttgtggagtcacataattcaaccacaaggctgaaggaattggtgccataccttcaggagaaatgctacaagaccatctcgggagtactgaaagaattagaagctgagctcagaaagctctctgctttgttgggaaccaaaaaggagggtaacgacatacctgcagcttctattatagcggagaggtctctcttcattggtcgtctcttgtttgcgctgagataccattcaagtcatgtacccctgatactaggttccccaagggagtgggtaaaggaggttggtggtgcagcatttgccaggttatcatcacctacagcaagacatttaagggcatcttttacacccagaaggcacacatttgacagtcccaagagtcctggaaggcaattctccgatagccccagaagacaaactattgctgctgcagtatctttgtttggagctaatgatagatctaatcctagacttgatgaactcaataagaccctgcagtcactttgcatcatggctcataatgtatggatagcatgggtgtccactgaattatctcacattctttcatatgatctcaataaagacgattcactatcctctgcaactcctttgaggggctgggaagtcacagtaattaaacaagaggaaacaactgagggtcccttggaaatgcaaatagctcttccatcgatgccttcattgtacatcatatcctttctttatcaagcatgtttggagattcataaggttggagggcacatcctggacaggattattttgcataattttgcttgggagctactgcagaaggtcatcaatatttatgaaaattttctttcatctgttgaatctgggaattctccggtttcagagaaaggaattctgcaaatactgctagacttgcgttttattggtgatgtcctatcaggaggtacaagttcttccacaaacactactgaaatgcagacaaaacaggattctttgccaagcaccatctccaagacttccttcaggagaaaacagtcacaattacatgcagactcagctgtcatagagcctataaacaagttagtcaacaggctctcgcaaatactggatcctatagactgggccacgtatgaaccttacctgtgggagaatgagaagcaatcttacaagcgtcatgttgttctttttggttttttggtccaactgaatcacatgtacactggtactatgcaaaaattaccaacaaaatcaaatacagattcaaatatcatgagatgctctcaggttccaagattcaagtacctaccaatcagtgctccagctatatcatcaagatcacacaaaccatcactacagtctctgtctagcgagtccacatctaaaaatccttggaaatcctattcaaatggagatagatctactacaccagagtttgatgataatgcaagtcttgttggtgctgctccattgcttaagtcatttgttactcaggtggggaccaaatttggggagaacacatcgagatggggttccatgctctctgatggacaggatgaatatagagagtctcttggatttgctctaattagagcagaaattataggaaaacaagcatctaagcaagacagtggaaaatttggctggcatgaggtttttgattggttctccgtatctccgttatgcatatggatgacctatctgggtggcaaaaggctttga

SEQ ID NO: 14188 - DNA, 219 bp, Zea mays
  Peptide Sequence Number=SeqID_55967
atggcggccaccctgaggctcagaatcctcgccgcggccgccgcggccgccgtcgtggcctcgtcgctcgtcggcgtggccaccgcggccgaggcgccggctccctcccccgccggccccaccggggccgccgcccaagtttatattaactgtgcgctggccggcgtggtgcccacatcgctgacacatgaagctcttggcctgctgctgcaaggctga

SEQ ID NO: 14189 - DNA, 1701 bp, Zea mays
  Peptide Sequence Number=SeqID_55968
atgaggccgccggaggtagcggtggcggcgcttcttctcgtggcggccgccgccgtggccgcggccgcggccgcggcggagtcggcagcgccgttaccggcggcgctgcggttgcagcgcgcggttccgcaccagggggtgcccctggaggaactcaggcggcgggacgccgcgcggcaccgggtttcgaggaggaggctgctcgggggcgtagccggcgtggtggacttccccgtcgagggctccgccaatccgtacatggtcgggctttattttacccgggtgaaattaggaaacccggcaaaggaattcttcgtccagattgacactgggagtgatatattgtgggtcacttgcagtccttgcactggttgcccgacatcaagtggactcaatatccagctagagtccttcaaccctgactcttcatcaacagcatccagaataacatgctctgatgacagatgtacagctggcttccaaacaggggaagcaatctgtcaaacctcaaattcccaaagcagcccttgtgggtacactttcacctatggtgatgggagtggcacatcagggtactatgtgtctgacacgatgtttttcgaaactgtcatgggaaacgagcagaccgccaattcgtctgcctctattgttttcggatgtagcaactcacagtcaggagacctgacaaaggcagatagggcagttgatggaatttttgggttcggacagcatcaactgtctgtaatttcgcaacttaactctcttggggtgtcccctaaggtgttctctcattgcctgaaaggttcggataatggtggtggcattcttgtgcttggtgaaattgtggagccaggattagtgtatactccacttgttccatcacagcctcattacaacttaaatctggaaagcattgctgtcaatggtcaaaagctgcccattgattcctccttgtttacaacatcaaatacacaaggaacaatcgtggattcaggaacaacattggcataccttgcagatggagcctacgatccatttgttagtgcgatagctgctgcagtctctccatctgtgcgttctctagtcagcaaaggaagccaatgctttatcacttccagcagcgttgactcatcgtttccaaccgtaaccctttattttatgggtggtgttgcgatgtcggtgaagccagagaactatcttttacagcaggcttctgttgacaacagtgtattgtggtgcattggttggcaaaggaaccagggccaagaaataactatactcggagatcttgttttaaaggataagatattcgtgtatgacttggcaaacatgcgcatgggctgggcggactacgattgttcaatgtcggtgaacgtgacgacgtcatcagggaagaaccagtacgtgaacactgggcagttcgacgtgaacggctccgcacggcgcgcatcttacaagagcttgataccagccgggatcgtcaccatgcttgtgcatatgctcattttcggcactggctcaccgaaaaaccttgttggcgtgaacataagactctccagcaacggacgctttagcgttcgaccaagtgtggcaactagtggagacgatgctagagacgacgtgcagaaggtgttcgacgatatgctcaaaccagcttgcagcaaccctgttgtggatgtcctgcttaaacaacaagagtag

SEQ ID NO: 14190 - DNA, 318 bp, Zea mays
  Peptide Sequence Number=SeqID_55969
atgagcgaccgcaggtacgggtactcgtacccgccgccccagggtaagctatatgcagaagcagaagacaacggattatactactaccgcgttcattcagttacatacatgcattgcttgactgtatatgctcctgggaacgcagggtactacaacaacggaccaccggtgatggcgccgccgccgtaccagtacgcagctcctccaccgccgaggagggagccgagcttccttgaaggatgttcgatgtttctcatttcactcgatcttggacacatgaatgcagtctcgccgctctgtgctgctgctgcctcatag

SEQ ID NO: 14191 - DNA, 330 bp, Zea mays
  Peptide Sequence Number=SeqID_55970
atggcacggtgggctagggccgaggccgtgatgacggtggacgaggccgtggccccagcggacagggctagggcggcgacgaatgagagcgtgctcgggaacggggtgcccaaagaaagcctaggaaaatccctaagaacggcccattcgaccaagttccccgacgagcaagtctgcgaggcggagcggacgacaatgtcttgctcgacggagcggatgaccaagtcctccgtcgagcaagtcagcgaggcggagcggacgaccaagtcccccaccgagcaagtctacgaggcggagcggacgaccaagtcccccaccgagcaagtctaa

SEQ ID NO: 14192 - DNA, 363 bp, Zea mays
  Peptide Sequence Number=SeqID_55971
atggcggtgaaggaggaggcagtcgccatgcgtcctggtctcgccgcgcggcggccgctcgtggtggtggggtttggtaggggatacgaagaatccagctctttgctggctggagccctggaatggacaagacacagaggcagccaagggaagggactcacagtcacagccgtcttctactcttctatactaataacgagcgaaaaatctcacgagagtagagatggcaatgggtacccgcgacccgatacccgatgggtatttactccattaggaaatcttcacccaatgggtaaacgggtattagaacgttccacctacacctatacccgtgaacccgtgggtataaaatacccaatataa

SEQ ID NO: 14193 - DNA, 750 bp, Zea mays
  Peptide Sequence Number=SeqID_55972
atggcgtccctcaccaccaccacgtcctcaccggccgccctcccggcggctaccaccgccacagcggcatcgtccatatccccccacgccggttcgaagcggccgctcctcgcgggggacgacgcgccctggcgcgccaccgctgccaccgccgcggggcaggggatccgacccgtcccgcgcatccaccatgcccccgtcctcagcgttgctacgcaggaagactacgccgcctacgccctcgacatcatgaagcatccgaatccgataggggaggggctggccatggaggcgttcgcggaagccgccgggccggagtgcatcgtgcccggacagcaagcgcctctaaggctcatggggctcaaggtttggccccttgatatagatatgaagttcctagagccatttggacgggagttacattcaatgaaaaaagattcacaacatgtagccgttggtggacttgtttgcaatcaatgttcttgcaggctctggagactttcaggccacacaatcctcctgccagttcacgcatggtatcgaggcgcggatggcgatggtgacaagcataattgtgcaaagatggcaacacggatagatgagcgacatctgaacgggagcgttgaaatcggtgcactaatccacgggaattggcaaccctcagcttctggatttcaagttccggttgtcattcaacggtgcctgccccctgttgggataaaaaggccgatgatgttttttctgcattga

SEQ ID NO: 14194 - DNA, 1575 bp, Zea mays
  Peptide Sequence Number=SeqID_55973
atggcgggtgcggaggggagagggccgagacggagccgcgtggcgttcgtgctggtggacgggatcggggacgtgagcgttccgtcgctgggcgggcgcacgccgctggacgcggcgtgcgcgccgcggctggacgcggtggcggcggccggggtgaccgggctcatggaccccgtggagccggggcttgcatgcggcagcgacacggcgcacctatccctcctcgggtacgacccacgggagtactaccgcggccgcggcgcgttcgaatccatgggtgccgggctcgccatggcgcctggcgacatcgccttcaagtcgaacttcgctacactggatgagaacactggagttatcatcagcaggagggcagatcggcactttgaagaggaaggccctatactctgtgctgcgttggatgggatgaaacttcggtcgtttcctgagtatgaagtcagagtaagatatgctaccgagcatagatgtggtgtggttgtcaaaggaccaaagctgagtgggaacatttctggaactgatcccttgaaggacaaccgcttgcatctgaaggctgaaccgttggatggctcaaaagaagctaaaaacactgcagctgtggtcaatgagctttctatggagattacgcgcatactggtttctcaccccatcaacgcaaagcgtgcagctgaggggaagaacatcgcaaatgttgtgttgctgcgaggttgtggtattcggattgaggtgcctgcctttgaaaccaaacatggacttgcaccttgcatggttgctcctaccaagatcatagctggcctgggactgtcactggggattgatatccttgaagcacctggagcaactggagattatcgtactctcttaacttctaaagctaaagccatagccaaggcactctctgcccctatggatacaccacctcgtgtttttgtgcctggagaggatggatacaaggctggaaaagaaaatggatatgactttgggttcctgcacataaaggcaaaatgcatattcagattctttttactagtactgactatatatgtgattgtgatagctcttgtaataatgtcaatgcaggccattgatgatgctggtcatgacaaggctgtcaagttgaaagtacggggtctagaagctgttgatcgagctattggtcagcttgcgaggcttctttgggaagctgaaaaggccggacactatcagtactttctttgcgtcactggagaccattctactcctgttgaatatggtgatcatagcttcgaacccgtcccgtttgcaatatgcagactgagagattatgcaggagccattggggaggataatattatgaatacacagctcgacgattttcccctcccttcggtaaaatccggagaagatttgctcgacagtatagaatcactggagcacaagcctggtcaacttaaagctttcagtggcgacagtgtgtgtgagttcaacgagatcgccgctgcgaggggctgccttggacgattcccaggaagcgagatgatgggcatcattaagaagtttatcaaggccaagaatgattaa

SEQ ID NO: 14195 - DNA, 2877 bp, Zea mays
  Peptide Sequence Number=SeqID_55974
atgccccataaagaaactgcacttaggtgctgtgacgatgtcgaccctatcgccagggacatcggagctattaatacaatcattagaagacctgatggaaaacttgtaggctacaatacagattattctggtgctatttctgctattgaggatggaataagagcatcacaaccaacagattcgatcacttcaccactggctggaagactttttgttgttattggggctggtggtgcaggaaaagcactagcatatggtgcaaaagagaagggagcaagagttgtgattgcaaaccgtacatttgagttggaaagctaccatccggagaaagggatgattcttgcaaacgcgacatctgtggggatgcatccaaacgtcgatgaaacccctttatctaagcacgcgctaaaatcctatgccgttgtcttcgacgcggtcttcgtgccgagagagaccagacttctccgagaagctgcagtgtgtggagccacagtcatcgacggtttggagatgctaatcaggctagtgatggttcagtttaagcttttcacggggggcatgacaggctgcgtgcggcctgcggggcacatgtatatagcagaccagaccaacaatgccctcacggcccaccccgatctcataatcgtcgtcttcttccacttcgacgcggctagggccggcgcaaccatctcctcttctcttctggcggcttctccgtcccgtcgatcaaccgcgccgccttcgcccagtataccccgcattgagccgtcatcgttacctgcgccgaccggcacctctgtagcctcttctccaggtgcgtgtcctattcatcctcctcggagctgctgcgagctgtggttcctcccacagatccaggatggaccgacggttcctgttttatctaggttttcggaggtgtggaaggatcttttgtcatggggttgttttggttgtgtagggattgcacgaggaggaggaggttcgggcttcgccatgtcgaagtcgaacctagatgatctgcttctgcaggcagccggccggacggggaagaaccactcccggccgagcaacccgcggtggaactctgggggaagcggctccgacggcttcgacgacgacgactcggacgccgcgccgacctactcgaggaagaagccttcgtcgcaggttccgctcaagaagcggcaccagccagagcagggcggccggcgtggcagtggcgggtggaaggacgaggacgacgaggacgaagacgggcgtcgcagtggcggggaggactcggacagcgccccttcggtggggagtgacctatacaaggatgaggacgacaaggagcgtctggagaacatgtctgagctgcaaagggagatgatcctggctgatcggggcacccgcctcgatgattacaagctcaagcagcgggcacgagcgtcctcgtccaagacggacaaggtgggcgcacggaaggatagcagtccacccccgccgcccagccggatgcggtcttcaacccgagctgacaagtctgggtccgcagctaagagcgcgttggacgagctgcgggcaaagcagcggatgcggcaacaggctccggaggcacgcaggttcacggacctgctcccacgtagtggctcaccaactaggcgcagggctgggagccctccaagtgatgggagcaacgatggggatggcagggggaggcctaatgaccatgggaggatcgctgacgatagcagggatgacgaatttgatgagtcgccgagtaggcttgatccactcaagtttgatgacgtgaagagtattaccctcaggaggtcaaaagctggtattggccagacaaagaatgggaccccgaggtacaggctgtgcatagtgaggaacgtggatgcaagcgatccagaccggaattacaaactggaaagctactcgacatgcaaatatctcaatgttgtgtgggatagtgaggctaatgctgcgcggtggcagatgactcaagtatcggattccccacccaacgaagaagagttcaaggaatggctgcaagaggcagagaagcatggtgcacgtataccgacccggcaggaagtgctggacaagaaagaagccatccaggaggcctataattttgtgtattcagctgcaactgtacagcagatgctgcgagagaaatcagctgtgagacgccctatcaatattgctgctgagaaggatcggttgaggagtgagttggagatggccctgagccgtaggaatgaagctgaagcagagaggattcgtgtgaagctgaaaaatctgcaaagcaggccacaaccggtgtcaaaggataataaggctgcaaagttggaggctatgaaccggaagaatcgtgctgataacttcaagaacgcttcggaactgaaacctgtaaatacatctttgaaggctggagaggctggttatgaccctttctcgaggaggtggacaagatcaagaaactattatgcatcaaagccaggaggagataatgctgaagaaactgccaacaagtccagtagtattgtagagcctagcaatggagatataaagagcaaggctcagactggtacatcagccacaactgcagctcaagtggcagcagctgacgccgggaagctcactgatactaatgcaccagtggatctgggaacagaatcgaatgtgatgcatacatttgaacttcctatatcattgtctgctttgcaagaatttggtggagccaagggcctgtttgatggttacatggcaaggaggcagaagatagaagctacaatggggtacaaggtgcctgacaacgatggaaggaggcatgctttaaccttgagtgtgagtgattacaaaaggcggcggggtctcctctga

SEQ ID NO: 14196 - DNA, 165 bp, Zea mays
  Peptide Sequence Number=SeqID_55975
atgggttcgggccggttcgagtctcgaacgggccggctcggtcgctacaagggcgagcccgaggcccggcccccaaaatctgcaacatttggcgctctctcggcctctgggataaagatgatcataaaacaacaaagaaatggaattatgatacacatgctctaa

SEQ ID NO: 14197 - DNA, 336 bp, Zea mays
  Peptide Sequence Number=SeqID_55976
atggcgtccatcgtcctctggtcccagcccgacctatccgtgcgctcgctcttcgtccatcgggtttcgcacgtgctcgcgtttgccgtcgagtcgtcgaacccgtcatccccctgctcaaccccacctcgccagctcgctctagacacgatctcgtcgtcgtttcgtgcatcctcaagaaatacaaagcgtcgggtgaagacgaagctagcagcgtggtgttcaccaagttctctggaggacatggttgctggagtgacttggccgtacatcttgccaccgggttggactgtcgagtgggaccccgcctcggctgaggaggagcacgaggagtga

SEQ ID NO: 14198 - DNA, 291 bp, Zea mays
  Peptide Sequence Number=SeqID_55977
atggcgtggacgaactccagcgacggcgtggacgagcaagagagtgaggagcacggcgcggtgctgcgcggggtcgcggcgggcggctcctggcgcgtctgggcaggggtgctgacgcagcgcgggcgtcggcatcttggcgggagtagggtcagcggcttggccggggcgctcgacggtcctcctggcgctgcacatggagcagagagcaggagagaggagagagctgggtggggtgaccaggggtggcggctaggtcagcagggaaggcagggggtaggtggcggctag

SEQ ID NO: 14199 - DNA, 424 bp, Zea mays
  Peptide Sequence Number=SeqID_55978
tgatgagtcactactgcaggacaattcactgtcagctgaactaagtagcaacctccactttggagatgcaactggccaagggagtggatctatcaggtcagcaaatttccaaggccacgtcttcgctacatctaaccctgtaccaacaaaccaaagagcagatcaattatttcatgtgtcttctcaaggattgagtgcccattccagtgttcccgtcaactacggtggttacaaccctccaaattatcctccgcaaaatctccgtcctcgtcgtggacaaccaattcttcatcagcgatataaccaggcaacttccagtccgatgcggccaatgggaagccatcacagtgggcagcctgcgtggcctagttttggcatgggcgatggagtgccctggggtaacctacccactcctttatcttaa

SEQ ID NO: 14200 - DNA, 705 bp, Zea mays
  Peptide Sequence Number=SeqID_55979
atggggggtgtagcaggtaatgatggcgcctcctgtgatgtggtcggtctgagccctgggttgggcgaggtggaggctcctccgaggtcgaggtcgagtctgtcttccaaggccgaggtcgagtccgagcccctgggtcgggcgaggcggagaccgtcggctgaggccagggctgagtccgagccctggggtcgagcgaagcggagttcgtcgtcttccggggctgagcccgagtccgagccctggggtcgggcgaagcggagttcgtcgtcttgcggggctgagcccgagtccgagccctggggtcaggcgaagcggagttcgtcgtcttgcggggctgagcccgagtccgagccctggggtcgggcgaagcggagttcgtcgtcttccggggctgagctcgagtccgagccctggggtcgggcgaagcggagttcgtcgtcttccggggctgagcccgagtccgagccctggggtcgggcgaagcggagttcgtcgtcttccggtgctgagccgagtccgagccctagggctacctttgcattaaatgcccctgcgatttggtcggttggcgtggcggtttggccaaggttgcttcttggtgaagactggacctcgggcgagccgaagctttgtgctgatgggggttaccagctgagatttaggagtcttaagggtacccctaattatggtccccgacagtag

SEQ ID NO: 14201 - DNA, 981 bp, Zea mays
  Peptide Sequence Number=SeqID_55980
atgaggcaatgggcggaagctgcaagttgctatgccactgcgagaggaagaggagtcaccgccacgcgccagcgccaccgtctcatgtttcctgctccccgctgcgccgtttcgctctctcaggcccataccaatgcctccggtaccagcacctgcggcggggtcgggggcgggggcgggatgaaggcgctgcggcacccgacggcgtcgcaggtgaggcggctgtgcaaacagggtcgcctggacggcgcgcggctgctgctcctcgacgcgctcccgagcccgccgccgccgccgctctacaacgcgctcctcatcgcttacgtggcccgcgccctcccggaacacgcgctgcggctctacgctctcctcaaccacgccgcgcgccccacgccgcgctccgaccactacacgtactcctgcgcgctcaccgcatgtgcccgcacccgccgcctccgcctcggaaaatccgtccacgcgcacctcctccgccgcgcgcgctcgctgcccgacaccgcggtgctccgcaactcgctcctcaacgtctacgcctcctgcgtgcggtaccgtggcgacggcagcgtcgacgtcgtccggaggctgttcgacgcgatgcccaagcggaacgcggtttcctggaacacactgttcggttggtacgtcaaaaccggacgtccccaggaagctctggagatgtttgtgcgtatgctggaggatggcatcaagcctacgccagtcagcttcgtcaatgtcttccccgcagtggccaaggaagaccccagctggtccttcgtgctctacggcctccttgtgaagcatgggatggaatatgtcaatgatctcttcgttgtcagctcggccatcgtgatgttctctgaactcggggatgtgcagtcagcttggagggtgtttgagtatgctgccaagaagaacaccgaggtttggaacacgatgatcactgggagaccttcatattggtaa

SEQ ID NO: 14202 - DNA, 1095 bp, Zea mays
  Peptide Sequence Number=SeqID_55981
atgggagcctgcaactcgtgcgaggccacggcggtggcggcggcgccggggccggcgacggcggaggcgagggtggtgctcgcggacggcgcgctgcggcggttcccgggcggcacgcgggcgtcgcaggccgtgaaggcggccgccgccggggcggcctcgtggttcctgtgcagcgcggacgggctggagctcggcggcgccgtggtgcccgtgcggcccgaggaggcgctgcagcccgggcagctgtacttcgtgctccccgccgcgatgcggcgccgcccgctgcaggcggaggagatggccgcgctcgccatccgcgccagcgccgcgctggccggcgaccacgacggcccgctcgtgttcccggaggccgtcgctgccgccggcgccggggcgcggtgcggcaaggggccagctcgcttcacccctttcggtctcggcggccgtcgggcccacgccgcagaagccccgacggcgctagccgcgctacgctacgctacgctacgcaccgcgtttctccgcttcagcggttcgcctctgcgccgcaagctcctagagatggcggcgaagtctggatacacacgccggctcccgctcaccggggagaccgctcctccacctcccagcgccgtcctctatgtggccaactgcgggcccgcggtgggagtgaccgacgccgacgtccgctcgacattcggcgccttcggggaggtcgcaggagtccaggctgccgacgacagcggcgcccgcatcatcgtccggttccacgagcccgccgccgcggaggccgccatggctgcgctccacgggcgcccctgcgacctccttgcgggtcgcgtgctgcacataaagacaaggaatgttgattcgaagcagttcttgggtgaactgcctacttttgtttcaactgtccttgagaagattgcttcttttcctggtgtgaaggactgcgccaccagattagttgatcaattgaccgagaaggtcgttatgcctggcatcactatataccacatcataaaatcgatgccgtgggtggtcaagtcatcaaaaggaattcaaggcgagtttctttcactttccgaaaggtga

SEQ ID NO: 14203 - DNA, 1143 bp, Zea mays
  Peptide Sequence Number=SeqID_55982
atggaggagagtggcggcagctgcggaaagcgggaggacgcggcgccgccgtggaggccgagcgactccacggcgttcggccgttttgcggcggccgcttctccgccggaggcgtccccgtcggcctccgccaatggggctgctgcccgcgtcagcagccttcatggggtcaggcggaaaaccggaaacccttctttctatcaatcagcaattgcctgtgacatattgttatgggtttcttccttgtgttctgttgcgagattaacagcaggcatcattcagacatatctacaatgtgatcccgagtttaagtactcagaggttctaaatccaaaacgtttcctcacgaatccctctaccccagcccacaacgatgggcttgacaatgcaaattgggatctcatattgtatgtcaacttggagttggttaataagatgtcgaacagaaggtttattgtcaaggaaatgcttgggcagggaacttttggtcaagtagttaaatgctgggacacagaaactaacgactatgttgctgtgaaggtgataaaaaaccagcctgcattttaccatcaagctatcatggaggtttcactattaagaacgttaaatcagaaatttgatcctgatgatcagcataacattgtccgtatgcttgattatctgtcatttcaaaaccatttgtgtatagcttttgagatgcttggccaaaacctatatgaactgctcaaaaggaatcacttaagaggtctgaaattgaaatatgttcaagccttctcaaaacagatattggatgccatggttgtgatgagagaagctggaatcatccattgtgatttgaagccagaaaatatcctgttagctcccaggggccaaccaccagatgaactgctaagggaagctaaaaacactgcaaggttttttaaacatgttggaagtatctatcctggcaatgaggcacctactggtctttgtagtgcgtacaaaagtttaagtgaagaagatgttgaagtgagagactccaagaagccacagatgggaaagtggtacttcccacacctaaagcttgacaaactcatatgtacctatccttggaacaattccgaactgacagttcctcgtgttaagcatcatctttttgtttga

SEQ ID NO: 14204 - DNA, 531 bp, Zea mays
  Peptide Sequence Number=SeqID_55983
atgtggtcgttccctgctgcaaagcgaatgtctaatgtcgcggtggtcgttcccaagtctggcagcagcctatgggctgatctgtgggtatgttatggttttcctcatccgcaatgcattgtcgtttcgaactgtccttttgattgttatggttttattcgtcgtaggcaacaccgcgcgccacaggattccagaccgaccaaatcggtagccgaaccagaggcccatcttctccactcatccaccagtggttcgacttctgcctgcagagtgctaggagcctacccttctgccaagacgtcatccccggagcatctccgcactccgctgtacctcgagagccccgtgcctccagaggcccctcgagatagtaacaagcggaggacgaagctggacacgaaccttgtcaggggagtgccgccgcccgagatcctggaaagatgcgagtttttggaacccctgtcagtggtgcgagtggtcgaggcagagaaatgggcaagcaaaatgacgagccagctgtcctgcttctga

SEQ ID NO: 14205 - DNA, 447 bp, Zea mays
  Peptide Sequence Number=SeqID_55984
gcgacgcataaggactgccggagaagagggggtgggacttgggaggctgcgctgcagaacttcaagaccaagacttacgcgctctcggtgcccctccggaaaggcgcgctacgcggctccttccctccatcttggattaaggatttcgttgaagttcaggggaagaagctcaaattcagtgccgagctccgtgctaatcttgatgggatcttctctgagatgtcacggtgtatggacaagggtcaagttcagccaaagtccgcaatggcagctgatgtcgtgtcccttggtgactcctggcttggctatgctatctgtaaggaattgctagagcctgtcaagaatgctgaagaacaggattggttccgtagactgagtgacagatggaaggactgggaggatttatggaggcccgaacttgctgggaggatttcaatggtctactag

SEQ ID NO: 14206 - DNA, 498 bp, Zea mays
  Peptide Sequence Number=SeqID_55985
atggccaccgcagcacgcgccctcgtcgccgcacgcccggcacggccgctgctgccgtctcggcgcctcccgtcctcctcttccatccgtcccgcgcggcaacgtgctggcgtcgggtgcgtccgctgcatggctcggcggccggattccacctattccccgctgcgttcgggccagggcggtgaccgtgcaccgactgaaatggcgcctctgttccctggctgcgactacgagcactggctcatcgtcatggacaagcccgggggcgagggcgccaccaagcagcaaatgatagattgttacatccagacccttgcccaggtggtagggagtgaagaggaggcgaagaagaggatatataatgtgtcctgcgagcgctattttggattcggatgcgaaattgacgaggagacctccaacaaactcgaaggtgacttgtttggttccttgttcaagagtaaatacgtgcaatgtgatttcatcttctgtttcagttaa

SEQ ID NO: 14207 - DNA, 213 bp, Zea mays
  Peptide Sequence Number=SeqID_55986
atggccgaagctctggctgcaatggcgggcggaaaggagctcgccggagctaaggaggggtgtctggccggcgatggatttgagttagggatcaaggtgaacacgcttgatctttggctcaagggctcaattagggtttttattggggttgcacattttgcctttttgaaaaactcatttgttttgaacatgatacttttaagtataagctaa

SEQ ID NO: 14208 - DNA, 441 bp, Zea mays
  Peptide Sequence Number=SeqID_55987
atgcgcgacctggtcgtcccgggcgtgtcgctcttcctccgcccctccgcggccgcgctgccgcccgtgctgccgtacgcggccgcggccgccaggaagaagggcctgccagaggactgccccatctgcctcgacgccttcggcgaagacgacggcgtcagggtcgtccccgcgtgcggccacctctaccacgcgccctgcatcgaccgctggctcgacgtccgcaactcctgccccgtgtgccgctgcgccgtggccagcctctacgccgccgaccgcgacaggggcgccgatgcgttgaccgccttcgacgacgacaacgacgatcaggaggccgtcctgcagcgcgtggtcgcgatgatcgaggccataagagacgagcagcagagagaagacgcggtggcgcggcgcgcgccggccggtggaggcggagggtcatga

SEQ ID NO: 14209 - DNA, 261 bp, Zea mays
  Peptide Sequence Number=SeqID_55988
atggggagtagctctctccgggcagagtgggaatcacggcttgtgggtggctatgagatcgatggttctggttatgactatggtgctgctagtccactacagccaaacaggatacttgctgagtatgttgatgtgtactcacccttgctctacacaccaaaccccccatccccaggttgtcagcattgcaaccactgctcaggagaagatgaagccgtgaaaggagacttccaggagtttcaagactacgacgagttctag

SEQ ID NO: 14210 - DNA, 1023 bp, Zea mays
  Peptide Sequence Number=SeqID_55989
atggcccgatggcgtgtcgcgccaccactcgccgtcctgctcctcgtgctcctgtccaccgcggcgcgaccgtctgtggctcagccgagcaacaacaacagcacgagcagccaacaccactcccgaaccaccgccggcggcgggttcaccccaaccacagtgatcgtgctggtggccggagggagcgccgccccacccggacccccgcgggtgggcggcgcgcgcgccggcctcgacaaggaggtcgtcgagtcgttccccaccgcggtgtacggcgacgtgaaggcgcgcgtggcggccagatcggggtccgggtcgggcccgctcgagtgcgccgtgtgcctcgccgcgttcgaggaccaggacgagctccgggtgctccccgcctgctgccacgtcttccacccggactgcatcgacccttggctcgccggcgccgtcacgtgcccgctctgccgcgccgacctcacggccgccgccgcgccttactaccctcccgcgtcctctgacggctccgggtccgggtccaacctggcggcgcgcccgcacgaagcggtgcgggaggagacggacgacgaggaggagcggggcgaggcgcgcctcgtcgccgcttgcacgcccgagtccgtcgtcgccagcctcggcgcagcgcccccctaccacgagttccactaccggcggacgcagtccgccatggacgtgcccgaccggcacacgctgcggctgccggagcacgtgatgaaggagctcaccgcggtgcgcgggcaccggcgggccgcgagcctcgccgcataccccggcgccgcggagcggacgcccgggtggctggcgtcgatctggcggtccgtgtcgtggcagcggccgagccggacggatccggacgccgtcgacgacagcggcggcagcaagcgcgtcgtcccgatcaacggggcaccggcggaaaggcccagcggcgggtcaggggatgatgctacggacgacatggagaagcctgaccatgacgccttgttaaaccaggtctga

SEQ ID NO: 14211 - DNA, 2243 bp, Zea mays
  Peptide Sequence Number=SeqID_55990
atgaagaaatcagaacacttgaattcactgtcagaacgatgcatgggtgattcagacagaaaaccatacccagctcagctgtgccctgcgaacgcgtggcaccttcgatgcgctcgagtcgcaaatgataagctgctgaggcagaatatgccgtgcaggaggaagtccggtccactgagaaaggcggcgacctttggcgccagttcccgttccgccgtgcgtgcaactgcaattgcaatattcgggtccgcgctgctctgctctcgcgacaccgtcgccgatcctgcccttttgaatctcgtgctaataaacaaggagcaggagcagccgccgccgctctcactggacagaaaggaagacggggccttgagacgatctgagatagcgagagatgactgcaggcaccgaatgctcattcagctcggcctgcctcagcccgcgccgcgcgatgtcagaggaggacgaggaccagccgccgcccaagcggccgtgcgcgtcgccgcccgcggaccaggtgctcgacaacgtgctcgagacggtgctccagttcctggacgccccgcgggaccggagcgccgcctcgctggtctgccgctcctggcaccgcgccgagtccgccacccgcgactccgtcgccgtccgcaacctcctggccgcctcggccacccgcgccgcgcgccgcttccccaacgcgcggagcctcctcctcaagggccgcccgcgctttcgccgacttcaacctcctcccgcacggctgggacgcctccgccttcccgcccctgggccgccgccgtcgccgccgggtccttccccgcgctcacctcgctctacctcaagcgcatccccgtcaccgacgctgacctcgacctcctctcccgcccgctcccggcgtcattccgcgacctcacactgcacctctgcgacggcttcacctcgcgcgggctcgcctccatcgcctcccattgcaggggcctgcgagtgctcgacgtggtggagtgcgacatggccgaggagcaggaggtcgtggactgggtggccgcgttcccgccggagcccaccaacctggagtcgctctcgttcgagtgctacgagccgcccgtggccttcgccacgctcgaggcgctcgtggcgcggtccccgcgcctcagccgcctgggggtcaacctgcacgtctcgctcggccagctgcgccgcctcatggcgcacgccccgcgcttgtcgcacctgggcaccgggtcgttccgcccggcggaaggcggcgagggggaggcagagttcggggaggttgtctctgcattcgtgtccgctgggcgagcgcgcacgcttgtttctctctccggcttccgtgacctcgcgcaagagtacctgccaatcatcgacgtggtgtgctcccacttgaagagccttgacttaagctacgccgcggtcaccccgaatcagatcctgatgttcatcgggcaatgctacaaccttgagacgctatgggtacttgactcggtgcgcgacgaagggctcgacgccgtggggatttactgcaagaagctccagactcttcgcgtgctcccattggatgcgcatgaggatgccgacgagttggtatcggaggttggccttactgccatcgcacggggctgccctgctctccgttcaatactatatttttgccagacaatgaccaacgctgctgttgtcgacatgtcgcgccactgcccggagctcaaggtattccggttatgtataatgggacgacaccagccggaccatgcgactgaggagcccatggatgaaggattcggtgccattgttaagaactgtaggaagcttaccaggctatccacgtcggggcaacttactgaccgggcgtttgagtacattggcaggcatggcaagtccctgcggacgctctctgtagcgtttgctggaaacagcgacgtggcgctgcaatacatcctccggggctgctcaaagctcgagaagctggagataagggactgccctttcggtgatgccggcctcctctctgggatgcaccagttctataacatgcggttcgtctggatgtcaggctgcaacctgaccctgcgggggtgcaaggaggtggctcgggggctaccacgaatggtggtggagttgataaatggccagcctgatgagagcgagaggaaggaaagtgtggacatcttatacatgtatcggtcactcgatggtccaagggaagatgtaccaccatttgtgaagatcct

SEQ ID NO: 14212 - DNA, 168 bp, Zea mays
  Peptide Sequence Number=SeqID_55991
atggggaggctagaaccccgggcagaatgggaatcacagcttgtgggtaaaatgtgcgacctctgcagagtgttagaaactggttgtctccactgtactcagtgctcaggaggtgaagctggcaacatggatgactttgaggagttccaggactacgacgagttctag

SEQ ID NO: 14213 - DNA, 243 bp, Zea mays
  Peptide Sequence Number=SeqID_55992
atggcgtaccaaatgctgctgttgtgggttcatatttatatgcctagcgctttgcaacttggcgggccccgtctgtcattgactgttgctattctagcgaagggaaggaaccttcggacatggaataaagttgtacatgatatgaagagcgtggtccgagagaaggatgaaccagtgccgaagctactcgaggaaaagcttcggcttgacaatggaaagtcaaactgtcacacccgtttctaa

SEQ ID NO: 14214 - DNA, 351 bp, Zea mays
  Peptide Sequence Number=SeqID_55993
atgccgcgccttctcgactacggaaccggtgccgcgacccgaggtagccctgcgcgtgacccaacagtgccaactgggtgcaatgatcacgggccagttagccgcgggaggaagcgtgacggttgggaccgggaaaggggatattttgaaagggatccttctccgcaaaggaagcaggccccgagcccacctactgatcaggggttcgaaggctggcccctcggaagggttcgaccgccgccccagagcactcgggctccaagctcattactgatcaggggttcgaatgttggcccctcggaagggttcgacagtcaccccagagcactcgggctcctcgccccctactga

SEQ ID NO: 14215 - DNA, 315 bp, Zea mays
  Peptide Sequence Number=SeqID_55994
atggcgaggccgagcctcgagcgatggggctcagggagctccatgcgcgccatggacagggacctggctgaggtcggcccagggagggacgctgagttggggaggctgggcgcagggaggaaggagctgctgctgggaccgcctgctctagtggagctcggccatggaggcttctgcccctgcgcaagggaggccagggaggagggcgccatgggaggctcagcgcacagacaaagcgagctggtgctcggtcgaacagaacgaaggattatccggactaggaatttgatttgtttagcgtcgctcgaaaattaa

SEQ ID NO: 14216 - DNA, 366 bp, Zea mays
  Peptide Sequence Number=SeqID_55995
atgggatcgtggcaagtgccctcgctccagaatgtccttaccatggtcggtccaagagttgcccaccttgggaaagtcaaggcgatgatgagcggctcagatgctcggatgctggcgaaagcttcaagtgcggcgagacggggctccgcggcgacgctcacgtgggagtcacgcgagggcgtggttttaggcgagggttgggcaaggaatggggaaagggtcaactccgagtctttgtggcgtcatgggccgaggcttgtggcggcagttgcacgcacgccaaaggagcggttgcgcgtgcaccggggcggcggctgggcacgaccagcatgcggcgcgctgagggagttgggacatggctgctag

SEQ ID NO: 14217 - DNA, 984 bp, Zea mays
  Peptide Sequence Number=SeqID_55996
atgaaggacataccttcatcattcataagaataatagtacatagagataatgaatgtgttgatgcgagagcgattacaattcagcgtgaacagtatgaggcttccaaaaaggcaaagcagagcccgcaagcggagaggctacagaagggtatgggtcacctccgcggcctcaccgccgcgcggctcctcgcggcggccttcctgctctccgttgccgtcccggccgccagagcccaggaagaaaccgagcacgaggaggagttcagctacgtcgtcggcgacgagaacgggccggagcactggggcagcatcaaggcggagtggggcaactgcagcgccgggcggatgcagtcccccatcgacctctcccacgagcgcgtctcgctggtgcggtccctcggctacctcacccactcctaccgccccgccgaggccgccatcgccaaccgcggccacgacatcatggtgaggttcaagggcgacgccggcttcctggtgatcaacggcacggcgtactacctgaagcagatgcactggcactcgcccaccgagcacaccgtcgacggccgcaggtacgacatggagctgcacctggtgcacgagagctcggcgaacaaggcggcggtgatcggcatgctctacgagatcggcgccgaggacccgttcctgcaagcgctggagccgtccatccaccggatcgccgacaggcaggaccgggaggaggccatcggcgtggtggacccccggcgcgcgcgcggcagggccagcgtctactaccgctacgtgggctccctcaccacgccgccctgcaccgagggggtcatctggaccgtcgtcaagagggtccgcaccgtgtccaggcaccagctggagctgctcagggaagccgtgcacgacggcatggagaagaacgcgaggccggttcaggacgtcaacgacagggacatcagcatcttccgcccaaagccacacaagcactactag

SEQ ID NO: 14218 - DNA, 447 bp, Zea mays
  Peptide Sequence Number=SeqID_55997
atggataatgtgaagggttgggagagtgctcaccatctgcggcacatcaacgagctcttcccgccgcatggtgcggctccactgcggacctccgccttcaacgagcaatcgccgatggaccagactctcctgagcccatggttcatgctactcaccttcatcgagcctcgcactaccctctggttcaattcccccttggacggatcgacgacaagggtgaggtccaacaacggtggctccacattcttccaccgcgtgctctctctctctctccgctcggcgatggtgctcaaatcccaagctagatggtcatatggaaggggcctggtgcctgcttatatacgtgatgggaattcagctgggagagattgtggtgagatcatggatgaagtacctgtcgaactaggcggagtttgttgtgatcatactgggagaagagggatctga

SEQ ID NO: 14219 - DNA, 234 bp, Zea mays
  Peptide Sequence Number=SeqID_55998
atgatgtgcggcggctgcgcggcgtgggtgcggtccatcctggcgtggacgctcgtcgcgctctgctgtggctcgctcggtatccatatcggccacggaacgtttttggatctgttgcataatccttatgtgaaatgtggcattgctacaactgctttgtttgggcctggaagagggagtaacagacttatcctgaagggcatcgagcaaactggctcatcagtatgcaagtaa

SEQ ID NO: 14220 - DNA, 270 bp, Zea mays
  Peptide Sequence Number=SeqID_55999
atggcggaggggtttggtgagcttaacccgggaccttcggccgttgcatggcaagcgggtcttgttactgaggctcacgacgcgggggagaggagtctgacactagggccccacccgctggtgacacagggcgacatcacgggcacacagaggctgcggcgctgggcccatgaggcagtgagcattgtagattggctgggccgctggggagagaaactgggctgcacggtgggcgaggtactgggctcgtgggtgtggattccgacctag

SEQ ID NO: 14221 - DNA, 423 bp, Zea mays
  Peptide Sequence Number=SeqID_56000
atggtcgtgatgggttcaacatcagaaaagatgtacctctgccagcccttcttcctaacgggcgagatatgcatgtgcaagtacatccccacggtgggggcgcacatcctgcacacgaaccgggagctgctagaggcgctgtgtgtgaacctccgtggcatggccatcagcaatgggctcacgcacccggtggcgaaggtggccacgcacgcagacttggcctacttcctgagcaacttgaacgcgcggcagaagcaggagctagaggcactgcaatcggagttggtgtcactgacacatgcccagcggtgggtcgcgtcgtcggacatgcgggggcaggtgttgtcgcggttgcagaacatgacggggcaagccacgctgtacgactatgcgaagcggtgggactacggatgcccccgttga

SEQ ID NO: 14222 - DNA, 648 bp, Zea mays
  Peptide Sequence Number=SeqID_56001
atgcaggaatcccttgcaggaccgccatcgcagcaaaatcctcccgagggcctccctacactgaccactcccctactgcccttgcccctttcgggctctggactgggcgcaataaaccagggaactacaggggcctctgcgcaagttgtttcaagactcagaatactatttgtagtactgcgggttgattctagaaaagcacagggactcttaagcaagtttccagggctgaaggggtatcggatgcgcacagccgttcagattacattcaacggcctggattttatagcaagctacacattacacatgcgctcggatcacgatcctgtgatccacagagcgccacgtttcacaccatatcccaatcgttcccctacggatctacggtcacgatcaaatcgcccagggcagtacgcaacgcacgatctgagccgtccatcacgtatcaacggtctatggtctgtcttctttcccagcttcccagccgacccgaactacggcggcgcgcgcacgcccacggcggaccatggccagcggaagcctgattcgcacaccagtgttccaattaccaaactaacagacgctacaccatgcaggggaagaggcgagtcgatcgggagtaacctcacctgcgctaacacggagtaa

SEQ ID NO: 14223 - DNA, 369 bp, Zea mays
  Peptide Sequence Number=SeqID_56002
atgccatgtgcaagtgcaaaatgtgcacttctgcgttctccatcggtggacagcggtcgtaccactgctggtggtggagtgcggcctccctaccacatccccgcgccaccggcgctggtgggtgacgcgggatcgtcttcgtccgcccccatggatgctgatttggcgacaccaccgctacctctgcccactgcagcggtagttgctcgtcgttcaccatctccaccgatgcccgtggtcgtcggaaccattgctgcccgtcgtgggcagcccccacgcgccgtcgatgttccacgtggacgcatcatcttcactggctatggcccaaatggggtggccccatcttcctcctccaatgggagggcctaa

SEQ ID NO: 14224 - DNA, 408 bp, Zea mays
  Peptide Sequence Number=SeqID_56003
atggcggtggcaggcgggagcagtggtcacgtcgtcagccaagcttacgtcccatcctggggcagcggcgcctctggcaagggaagcgagcgacgcttcgccttcgccagaatgaccgcgtcaaaaaaggggccgggaaagggggataccccgaaaaggacccttctccgtgaaggaaacaggctccgagcctccctactgatcagaggttcgaaggctggcccctcggaggggttcaacagccgcctcaaagtgcgtgggctccacacccactactggtcagaggttcgaaggccggcccctcggaagggttcaacggctgcctcaggccactcgggctccgcgcccactactgatcaggggttcgaaggctggccctcgaagggttcacagtcgcctcagacatag

SEQ ID NO: 14225 - DNA, 408 bp, Zea mays
  Peptide Sequence Number=SeqID_56004
atgggggctcgatgtatgtggctcgctctgccaagggtggtttgccccttggggaggagtgcggtggtgatgaggatgatggttatgattatgcttatggtaatggttgtccacgttgcaaccactgctcaggagaagatgaagtcgtggaggaggacttctaggagttccaagagtacgatgagttctaagcgtgggttagcgacaaacccccagtcggctgcctgtgaaggccgtgtgtatgaaatcaagctaaaggagctaagcaaaggctattgcgacgcttggagcgattcagacttcgccagcatggtgaagactgccaagcctatcgcctgggagctcggcgcagcccttcacgacacttctcaatctagggggagccaaggtgggcctgcgctttcatga

SEQ ID NO: 14226 - DNA, 400 bp, Zea mays
  Peptide Sequence Number=SeqID_56005
ggaactatgggcgcgacaagcatgtggtgtggctattgttggtcaggcttgcgaggcatcaggatcacacatgcgacctaggaagaaaagatcggatcggctgtcggcgtgccgctgcctggctgcctccctgctatgctggatgctcgtgccgtccgccgtcgtgcgtcctgcgtgcgtccctgctctggtggaatgctggacgctgtggagtgcggagaggcggagagcggacgccggcagagggcagaccgtcgtccacgtcctctccactgtccagtctcctccgcagccgcggggcatggagccggcgggcgatttggtgccgttgctgtactaccgtgactgttgtccgcccgtccgctgttggcgctcggcgactgggccgcatacactgtaa

SEQ ID NO: 14227 - DNA, 321 bp, Zea mays
  Peptide Sequence Number=SeqID_56006
atggcgcgagcgaggacgaggagagaggaggaaatcggcgatgcagttgcgcgagcgacggacttggtccacgcgtgggatccgcggcgttcggagaagcggttatgccagcgcgtggccggcgaagatcgcggggtggaggcggtcgcgccctgtccgaatttcatggcgccctcggtcaacctcgcctggattcccgcagcgcgatccagccttcgtgtgaggaagatgaccccgaccggtagggcccacatgtcaaagagaatgcgcgactcaactgagagatacgcgcgggtgaagctgggccgacgagtgggataa

SEQ ID NO: 14228 - DNA, 309 bp, Zea mays
  Peptide Sequence Number=SeqID_56007
atgaagggtttgaaaggagaagaaggctcacctcatggagatccagagaaggatgagatgattgacaagaaggtcgtgactctccgccagtccctgctgaagcagacctctcgactagccctagagaggagatcaagctcaagttcatcgacacctcgtctcatggtcggatctaaggagtgggcaaggtccgctactgcctcgtccaagtttgggcatgggcgcttccagacaaacagaggttctttggcaagctcaaggcctaagctttctgctgctgcttctgctggagatatcaggagaacatga

SEQ ID NO: 14229 - DNA, 141 bp, Zea mays
  Peptide Sequence Number=SeqID_56008
atgaagtccgctggttacggcttcgggttggtctgggtcgagccttcccgtcagtttcgtacctttggaattggggagtacgggccaggccgtccaccatggccatgggttctagtggcattatggattgagttcgcctag

SEQ ID NO: 14230 - DNA, 1044 bp, Zea mays
  Peptide Sequence Number=SeqID_56009
atgtatcttattggtactacaggaaactcaattgatatcaacaagctgggaacactgccgctgaatttagaggctggccaaaatggttccataaaaaaggttacaagtattcctgtgatgccacattctgggcacaaagggcaagacaggataggatgttgttgttgcacttcatcgagtacttggcattctaaaagaggctgggcaaaatggttccataaaaaaggatacaagtattcctgtgatgccacattttgggtcacaaagggcaagataactcccaagtatttatctaacagaacaggcagggtagctgggcaaaaagaagagacacaaaatagtcaaggtcatgatgataagcaaatgaatacgaaggatgctaaattagttggataccctcatagtgatgaagaggaacatcttgatttcacatctctttcatcctttgaaagagtagaaggtcatcttaattttgttcccctggccagctactgcaatttacttgaaccagggaagcatactctatattcaggacgctttgctccagttggatgtttaagggaagttccagtgagggggatcgaagggcacgaaggatacattagattaattgaggccaaaaagaaaggaaagggatatttattagtccacaaaataatatgtacgaggagatttattagtccacagaataatatgtaccaggactgcaagatcgttgaaggccagttatacacaaagaggttgaatgaaaaacagatcacatcgctgctaaaggttcaagtaggtaatactctagagtacataactgacaggaagttaggtaaaggtggttttggtcaggtctatgttggtcgaagggtttctggtggagctgcccgcactggtcctgatgcatatgaggacgcattgaaattagagcatcgaaacagtaaaggatgcaattatggccctccatatgagtggcaggtttataacactctcaatggttgctatggcataccatcggtccactacaagggtcgtcagggcgactactatatactt

SEQ ID NO: 14231 - DNA, 165 bp, Zea mays
  Peptide Sequence Number=SeqID_56010
atgctcccaaggaggttcccaataatctggtcgcccctccttttagctcagagccgcgcatccccaatccgctactccggcaagcccgctcctcgactgttcatctactccgtcgtcacctcgcgtccgccatcgtcacattggttttcgccgagaaaaatgtaa

SEQ ID NO: 14232 - DNA, 1362 bp, Zea mays
  Peptide Sequence Number=SeqID_56011
atgctgaagaagcggtcgtcgagacaagtgctcccgtcgcggagccggaagctgtggtggcagctgttcctctggagccaccgcaacgtgcaccgtcgtcggggcgcgagcgcgcccacgcccacgacgctgctgtggccatcgccggggagagaaggcggcggcgccgcgcaccggcgcgacgggtacgcgtccgacacgctgggcacggccactgcggacgacgccaaggagaagggcgtcgccgtggaggaggagggcccccgcgtcccgacccagtgggtggcgttctccgccgaggcctcgccgctggaccgggtcagcgcgtgggtgaacagcctcgggaacggctcgttccacgccgtcgacgaggacggtggcgccacggggcacggcggcgacggcgcctcgcgcctgcgcccgcgaccgcgtcgctctgagattgtggagctgccaacgtcggcggccggcggcaggaggcatccgcagccgcaggcgaggcggcgcgcggcggcggcggcggccgaggctggccaggcgagcggcatcatcgtgcagacgctcaacaccttctcctccgtcgcgcacatcgccggcatggggctccaggccgtcccggcgatcgcggccttctcgaccctccgggccgtcaatctgtctggaaacgtgatcgttcgaatcaccgctggatcgttgcctaagggcctgcactcgctggacctgtcgaggaacaagatcgcaatcatcgaggggctgcgggacctgacgaggctgcgggtgctcaacctcagctacaaccggatctcacggatcgggcacggcctgtccagctgcacggcgatcagggagctgtacctggccgggaacaagatcggcgacgtggaggggctgcaccgcctgctcaagctggccgtcctggacgtgagcttcaacaagatcggcacggccaagtccctgggccagctcgtggccaactacggctcgctgcgggcgatcaacctgctgggcaacccggtgcaggccaacgccggcgacgacacgctgcgcagggccgtgtcgggcctgctcccgcggatcgagtacctcaacaagcaggccgtcaagccgcagcgcgcgcgggaggtggccaaggacagcgtcgcgcaggcggcgctcgggaacgccgccggcgccaactcgcgcaggcggccggcgcggcgcctcggccagagccccgccgggtcgtcggccgccaagggccgcaggggcagcaggggcagttgtagattgcagcctagtggagtagtgggcctgcagtccgcagctatgggtaataataataatacggaggtgacaagatccactgcaagcagagaagtttga

SEQ ID NO: 14233 - DNA, 783 bp, Zea mays
  Peptide Sequence Number=SeqID_56012
atggagccgaggtcggcatcgtatcacggctacaatgataaatcccccaccgctctccacaatgcaccgccggagccggacacttcacagttcacacttctcatctcccatcccatcggctctgcttgccagttccgcggtgagagcccaccacttctgcgtctcaaggggcagaggttgtacggatcgctctggccttcgccgccggttggctcatcaaccaccgcgcgggcacgggcgcacgacgcaggtgccattccggcatcaaagaattgcctgcctgcgccgtgcgacggcgcggccgggatgggcaagatgagctgcttctccggtctgctcagctgcaagaagaaggcattggagggtaagaacaagggcgcttacgccaagaaggctagcggcaatgattgccccaaggtgaagccggtggaattcatggacatggtggtggcggacgctgttgtcgacgacgtcagcaggtgccgagacagcgttccagcgtctgcatgcagcagtaggcttgtcgctcacgcagccgccgagctggcacgccatgccactggcgagaacggcgacaaggccgcagctaagagggactcgtcctccgccgctggctcctcctcctccggttacagcagcgacggaacaggcgacgatgccaagagcgccgagccggacgacggcgaaccctgcagcctcgggccgcatgtcgacgacggcggcatcgccaaagctgatgcgctcctgctccaacatcgaagaacgacgaagatctgtccctga

SEQ ID NO: 14234 - DNA, 491 bp, Zea mays
  Peptide Sequence Number=SeqID_56013
atggatcgacggggttcggccggacggagagcggggctcgactacgacggcgagtgtgtcgctccggctaactccggcgacgaacggtacactccggcgaactacgggctccgtgaactccgggtggtagatgaagggtcggccaggggagagggagaggcgccggcgtccttcactggccatcaatggagacgttaccggagagaaatcagggagagggaaaaggaaactggggagagcgactctgaactcgccagcttcgggaatccgctccgctataattcaccggactgtccggtgagccagcggagcaacggctacttcgcgccaacggtcgtctgcaacgcattaaatgcgcgccagcgcgcgcagaggagcggagcacgcgcgggtggcacaccggacagcctacaggacttgtctggtgcaccaccggacagccaggcgagcccacaagccagagctccaaacggtcggaacccaacggcctg

SEQ ID NO: 14235 - DNA, 258 bp, Zea mays
  Peptide Sequence Number=SeqID_56014
atgggttcaacatcggaaaagatgtacctctgtcaggtaccaaacattgggatcgtaaatgataaagatgagaccgggcagggaccctttaactggtcagatgcctcatcatgggtaagctttgcctcgggcagaccaatacaagaaaggccaacacgcaatgggagtggagagatggcgggagtagcgtgtaccctctgtggcaagaggttggacggtggtgtatctgtgctctcggttggcgtgaacccggtctag

SEQ ID NO: 14236 - DNA, 217 bp, Zea mays
  Peptide Sequence Number=SeqID_56015
atggccgggacacctcgcgccagggagccacgccgcatggggccgggacaccccgcgcatgggagccggggccgccgcggggggagaaggggcgggccgcgccgccggggccaggaccgcgccgacgtgcgcgccgccggggggccggggccgccacgaggggagaaggggcgggctgcgtctatcggggtcaaggccgtcaccggggaaggagcag

SEQ ID NO: 14237 - DNA, 135 bp, Zea mays
  Peptide Sequence Number=SeqID_56016
atggccgtgatgggttcaacatcgaaaaagatgtatctctgtcaggtaccaaactttgggatgaacgggattcgggcattgattgggccatcaactcgcattctttcgcttgagattgcaaagcaaaagctctag

SEQ ID NO: 14238 - DNA, 297 bp, Zea mays
  Peptide Sequence Number=SeqID_56017
atggcgctgccgctggtttgggcagattggggaagcaccctggggccgtcatatttcagacatgcggcccaaattagatgggatgtaccgattcgggtggacggatcatgcgtcgtccgattccgatcgctttacacttcacatgagctcacatcttcggtgagttcatgcacattattccccacaacttgtttagctatgatcttttatgagctcacccttgtgatatataaaccccccacaggagaacaggtggtccagaaggaggcgtacaacgaggagtatgagctaatctag

SEQ ID NO: 14239 - DNA, 936 bp, Zea mays
  Peptide Sequence Number=SeqID_56018
atgccctatatttctaaactggaagatcttaagaagattggtgacccaattgaggcacggtacaaggagtcaacagaaaggggttcctctgtagatcaactggtctactgcatcaacagtttcagagaagctgctttgtccagtgaccaaaagtttggccatatcgacatatctgagaaacagaagatatttgataagtttgatgtcatcataatatcgtattctctgaagttttatgggctaagtgagataaggaagaatgatgaaggcggagacgggcgcgctcaggtgaggctgaggccgagggcgcgacggctgtgcgttctcggcgaaactaaacctgcaactttcatgggaccattgatcagacgcgcatttctgcaggggatgcgcctcgctgccatcgaagccgctgggagcggcccagccgtgccggagcaggggggcgccgtcgtgtgtcactcgtcggcgcacctcagcgtgcgcaccatccagtggatctccgccggaaccatcgcagtgctattagttgctaaaggcactgccatacacaaatctttccttgtgccattttttgctcttcagacaccttgctgcataatctcatggatcaagggtgactatggtcagtggactgcttttctttctctgttggtgcgtctattcttcttcattccaggtgaactggagcttccactgtcaacaatgctgcttgtgagtgttgctccttaccaattcatggatctgaggggaactcaaggtggtgtcgtaatgtcactggtcatagctgcgtatctcgccttccagcacttcactagggtgggcggcccaggcaaagcctttcgagcaaggatccattgttgcgaccttggccatcatttgcatcatgattgtgcccttgatgttgctattctgatttgcaatgagttggaatga

SEQ ID NO: 14240 - DNA, 264 bp, Zea mays
  Peptide Sequence Number=SeqID_56019
atgcggcttcatacctttagagaggtattgttgacgcagggaagtgttatacaaactattgtggttattcaaggaaatgagatgatgtgtagtttagtagcattctggggtatttgtggatcccggggtgttacagaagtcctcaaggatgtggcaccccatatccattatctgggtgtcatcgcccaactgtttggctccgctcacgaagacccacgagacctcggagccactataggcggaaaaggactcgaggtgtcttaa

SEQ ID NO: 14241 - DNA, 351 bp, Zea mays
  Peptide Sequence Number=SeqID_56020
atgggcaactgcctcaacacggcctccaagcggagtcaccggggcatgcttttgccggaggaggaagagagcctctcggagataagaaggataagccagctgcttcgggaggaggaggaggacggctacgaggtgagggccctcaaggtgaagatcgtgctgacgcgcggcgagctggagtggctcatggcgcagctcaagagcggcgagcagcgcctcgaggacgtgctccagcacatgcaggctgctaagggagctggcggcggcggtggctccttcgctggcgacaacaaggccggctggcggccgcgcctcgagagcatcctcgagagctcggagacccaaagctga

SEQ ID NO: 14242 - DNA, 382 bp, Zea mays
  Peptide Sequence Number=SeqID_56021
atggacctggcgactgggcccacaaagcggcgagcaggcaagcaatgcgcgtggaagtggcgctgggccagaccgcattcggcccaggtcgaggacgctacgagagctggtagttatacacccccgagggcggagtccgtgtgggtgccaggatcccagatcctatcaagatccgcccgaatcgcgcgctctgttcaccagagcctgggttgtttgcagggagcgcacgcgctccgtttcctggacgtggcatcatcggcggtctggtttgcttgcggcgtggaagaagatggacctggcgactgggcccacaaggcggcgagcaggcaagcaatgcgcgtgaaagtggcgctgggccagaccgcattcggcccaggtcgag

SEQ ID NO: 14243 - DNA, 234 bp, Zea mays
  Peptide Sequence Number=SeqID_56022
atggctttcttctaccttgagctcatgctcgtgtgtagagaagagctcggcaaggggggtcagccgagcaagggagcgggacaggggggtctcggcgtcgcgccgggcttcggcgtgggcgctggcgacgagacacggacgatgaggctccggcgcagtggcgaggcacgacacggtggtagttacccaacgagctcgacgtggcaggggagggagaggagagggagatcttga

SEQ ID NO: 14244 - DNA, 234 bp, Zea mays
  Peptide Sequence Number=SeqID_56023
atggctttcttctaccttgagctcatgctcgtgtgtagagaagagctcggcaagggggtcggccgagcaagggagcgggaacaagggagtcttggcgtcgcgccgggcttcggcgtgggcgctggtgacgagacacggacgacgaggctccggcgcagtggcgaggcacgacgcggtggtagttacccagcgagctcgacgtggcaggggagggagaggagagggagatcttga

SEQ ID NO: 14245 - DNA, 618 bp, Zea mays
  Peptide Sequence Number=SeqID_56024
atgactttcttctaccttgagctcgtgctcgtgtgcatggaagagctcggcagggggggtcggccgagtaagggagcgggacaggggggtctcggcgtctggcggggctccagcatggacgcgggcgacgtgacgtggacgacgaggctctggcacggtgagaagagctcggcaaggggggtcggccgagcaagggagcgggacaggggggtctcggtgtcgcgccgggcttcggcgtgggcgctggcgacgagacgcggacgacgaggctccggcgcagtggcgaggcacgacgcggtggggaagagaggagtgggagagggcgccgaggagggaaaacgattggccatcaccacgccatttatggccatcaatggtggtctccattatggggaggaaatggggagggagaaggaggaggtgacgacggttttgggtgcaggggaagccgaggggacgcgggccagtacggccagaggcacggggtcagcgtctgggcgggcaaggcgttgcatccagtgcggcggcacggccagagcgcgcgggcgcacgcctgggcggtgtcggcgcgaggaagacggggccgcggcgggcgggccccacctgcaagagagatag

SEQ ID NO: 14246 - DNA, 462 bp, Zea mays
  Peptide Sequence Number=SeqID_56025
atggcgaggtcactatgcgtggtgtttcggaccgatttgggggaactcccaaattggggctctatggtgattaattggaggcacgagcgggtggattggatgctgaactatcttgcggaaccgatggcaggctcaatttataggatccatgagcggtggcgactaattcggggaaagacacgcgatggccggagagaaggggtgctctggcgcaagcgattggtggcatttaccgtggcgggctcaccgacgactatcgggtgggctaagatgactcactgcggcatggttaaagaaccaaggcacgtggcgcaaggtcgcaaagtggctaactccggcgagcctatccaaagcagccgtgacacaagcgggtacggcggccgcagtagaatagtggctggagtttatccacagtgcggtatttcttacctccttgccgttatccatctgcgcggggcatga

SEQ ID NO: 14247 - DNA, 1704 bp, Zea mays
  Peptide Sequence Number=SeqID_56026
atggccagacaaatgctgttcttggtcctgtggctatcttttgggacattgagaactgtcctgttccatgtgatgtacggccagaagatgttgctggcaatgttaggatggctttgcgcatgcatccctgttgttaggggtgcggtgacaatgctgtctgcttatggagatttcaatgctttcccaaggagactccgggagggatgccagagaactggagtcaaacttgttgatgttcctaatggacggaaagatgctgctgataaggctatactggttgatatgttcctttttgcacttgacaatcacccaccatcatccattatgctcatatctggtgatgtggacttcgctccggcattgcatatacttggccagcgtggatacaccattgtcattgctattccgtcttcagttaccgtctcatcagctctgagcagtgctgggagtttcgtgtgggactggcctagccttgcccgtggtgaaggtgttgtgatccctaggtccttggtgcgccgtctggctgattatccatgttatgtcaacagtgggaatatgggacagttccctgataatcagaatgaagaggaggccattgtatataccggaacatcaaggaatgaatatggtggcagacctcccgtcaatcaaatgtattgttataacacttcccagacaactagagaaccaagcaaagctttgtatactgttgaagatgtgaactgtggtacatcatcaaggcctcataatttatcatgtcgtcagagtgaaagtcctgagacagaccaaggtttgacagatgagcagtcatggtgggttcgtcctggtgatcttcaaggattgaagggtcaactaatacgtctgtttgaattatctggaggatgtgtcccacttgttcgtattccctcagagtatctaaaactctttggcagacatttatatgtatcagaatatggagctgttaagcttgttcatcttttcgagaagctggccgactcttttgttgtcgttggtaagggtcataaaaagatgatctgtctctgcaattctggtgataggaacctgaagaattatccaagtacgccaatcattctgacgaagaaaaacagaggaaattctgctcttgaagaaagcacgataggagcatgtcagcaattaggcagctcatcagatgaattatcagaggatgaaccaattatcaacccagatataaatgttgcatgtgtgttcaatgagcatctagacagcttcagaagggagattcaggagctccttgtttgctactcctgccctgttcccgcttgggtaattttgagagtttatatgagcaacgggtataagaagatcattgactatgagagcttaggagtcaccggtctggaggagctagttgagaagggggactccactaatgttggtgatgatcgaggcaagcaagtgaaggcccgggccaacgagggcacctcaaaagggaaggctccagttgtggccacccggaagaggaaattaggtatgggggacgatgagactgggccgagggcatctgggatttttgttgaggagttaatggggacaagaaatattggtgctattgtgtcagtagtgatggagaaatatcgccaggatgctcaatggaagaagcgtaaggccccctttggctggtggacccacaccaagaagctaagctggcacgagccggcgtga

SEQ ID NO: 14248 - DNA, 726 bp, Zea mays
  Peptide Sequence Number=SeqID_56027
atggctgagccgactggaattcgcagagggcggggcaagggcacgcgggcctggggaccggctcggtctcactggcctgaccgcgaccatgtacagtggaggacgctcggtggcggtgactcggtcctcggtgggcacggccgacaggctacgggcgcacggggcggccgcgcgggcgtggctgggccacacccgcggccggggagaaaggggagaggggtggctgggctggctcgtccaagccccggccatggcaagtggtcgtcacaccaagcgcaaatgaggggggaggaagaggggatggagagaggaaggggaggggctcacatgggcgggtggagacgaacggcatgggcgacgtggcctccgacggatggcgggctaagcgcgacaaggcgccaatggcaagaggagggcgtggaggggaggcgcgaggtggtggctctgcgggtgcgcgacgtgggcgccgaagggggcggcctggcggttgttcccgtggggaagaggaacagtgggctgggcgccactgacaggagagcccggtggctagggggcggctgggcacagcggctatggtttgagggaggggtgtgcctacgtcgggtgggccaggtgggccgcgcacggcaatgggctggggggaaaggggcttgctgggccagccagggggaaaggagggggaaatggcctggtgggctgggcccaaggggaagggaggggggctga

SEQ ID NO: 14249 - DNA, 171 bp, Zea mays
  Peptide Sequence Number=SeqID_56028
atgcaagtttgggagttcaccggttcgcacaggatcttggcaagtcttgccggtactcagaatggtgtgggtccagcgctctggtgcgtcttgcgtcgtggtggttccggctggtcagtgcgccatggtggcttcggtcgccctgggctggctggcgaggagcaagaatag

SEQ ID NO: 14250 - DNA, 985 bp, Zea mays
  Peptide Sequence Number=SeqID_56029
atgtgcaccaatctttcatgtgcaccaaatatattctccatacaaaaaaccaagctgccgtcgcaacgccaacagcaacaagaactgccaccagaagatggcgtcatcgtgcaagctctcacgtcgcaagacgagcagcaacaggcggcgcaaggtcgccatggcaccgtgcaaggcgatcagcaccaccggagcagcagcaagctgacggtcctcccgctcatcttcctcatctacttcgaggtggctggcggcggtccgtgcggcgggccctctcttcacgctcctcggcttcctcgtctttccccttcgcgtggggcgtcccggagtcgcttgtcacggctgagctctccgctgcgatccccgggcaacggcggcttcgtccggtgggccgacctcgccttcggcccgctcgccggctcgctgctcggcacgtggaagtacctcagctgcgtcatcaacatcgccgcgtacccggccctcgtcgccgactacctgggccgcgtcatccccgccgtggccggcacgggcaggacgcgcacgtgcacggtggttggcatgaccgtgttcctgtccttcgtcaactacaccggcctgagcatcgtcgggtggggcgccgtggctctggggctggtgtccctggcgccgttcgtgctgatgaccgggatagcggtgcccaagatgcggccgcggcggtggacggttccggtggaggggaggaaggactggcggctcttcttcaacacgctgttctggaacctcaactactgggacagcgccagcaccatggccggcgaggtggagcggccggagccgaccggcgccacggacgcgccgccggacacgtgggcgaacggctacctggtcgatgctgccggcgtcattggaggcccatggctcaagttctggatcgaggccggcgtggtgctgtcgtccatcggcatgttcgaggcccagctgagcagcggcgcgttccagctgctgg

SEQ ID NO: 14251 - DNA, 1799 bp, Zea mays
  Peptide Sequence Number=SeqID_56030
atgaagcagggaatccatggaagcgacaacatctcaccactccactccaaggcgtctcctgaagccctgcccggcggcgacgcgacccagttcccaatcacgggcgtggctggcactggcagcggcaccggccatgcaaggggtcggaacaagctgacgcttttccccctcattttcctcatcttcttcgaggtcgccggcgggccatacggcgccgagccggcggtgcaggccggcgggcccctcctggcactcatcggattcaccgtgttcccattcgtctgggccgtcccggagtctctcgtgaccgccgagctgtcgacggcgatgcctggcaacggcgggtacgtggtgtgggtggaccgcgcgttcgggccgttcgcggggtccctgatgggcacgtggaagtacgtctgcagcgccatcggcgccgcggccttcccggcgctgtgctccgactacctgacgcgcgtggcccccgccgtgtcccgcggcggcgccagggtcgcgacggtcgtcacgttcaacgtcgccctgacgctgctgaactgcacgggactgagcgtcgtcggctggacggccgtggcgctgggcctcgcggcgctgtcgccgttcgtgctgatggtcggcgccgcgctgccgaaggtccgcccgcggcggtggggcgcgaccaccgccgcaggcggcaaggactggaagctgttgcttaacacactgttctggaacctgaacggctgggacagcgtgagcacgatggccggcgaggtggagcggcccggaaggacgttcccggcggccctggtgtcggcagtctgcatagggtctctcggctacgtgctgcctctcttggcggccaccggcgccgtcgatgcaccgccggaggcctggggagacggctacttcgccgacgctgcaggtctgatcggcgggaagtggctcaagtactggacggaggtgggcgccgtgctctcctccatcggcctctactcctcgtcgatgagcagcgcggcgtacctcctggcgggcatggcggatctggggcacctcccgtccctgttcgccgcgcgcgcccccgcgttcggcaccccctgggccagcatcagcgtgacgggcgccatcgcgctgggcatgtccttcctgagcttcgacagcatcgtggcggtcaccaacttcctgtacagcctcgggatgctgctcgagttcgcggccttcgtctggctccgcgccaggcgcccggacctgccgcggccctaccgcgtgcccctgggcaccgcgggcgtggtggccatgtgcgccgtgccgtcgtcgttcctggtgctcgtcatggccgtcgccgggtggaaggtgtgcgtggccagcgccgccttcacggccgccggcgtcgtggtgtactatgtcatggcgttctgcaaggatcggggatgtttaaagtttggcgcccgtgcagagggagagtacgaagacacaccagcagtcttcaacaggcactaccggaatccggctctttgccgagtgctcggcgctttgccgaatgtcgcacttggcaaagtcctgctcttggcaacgaccacatttaccgagagcagagctctcggcacagaaatacactcggcaaagaaatcttcggtagagaagcaatacctgtgcaccggtaaaacttttttgccgagtgttgtggccctgacactgggcaaagaagcaagctttgccgagtgcctcctagagcacttggcaaagaagctaacaaagggccccgctggtggaccctttgtcgagtgcaggctggtagactttgtcga

SEQ ID NO: 14252 - DNA, 222 bp, Zea mays
  Peptide Sequence Number=SeqID_56031
atgccggtcgacttctgcgccactgagtgtgtgcccttcgatggcgaaggagctagctcccagtacggtgggtggctgggaagctgtaagcagtcgccgaaaggtcttggtctagcagatatcatcatgttccctcggtcactacactatggaatgctcaagagtgatccggcacaggccatgttccaagtgatgccattcctcctcttgctgatccactag

SEQ ID NO: 14253 - DNA, 774 bp, Zea mays
  Peptide Sequence Number=SeqID_56032
atgcaggcggcttgcaactgcaccaagggggcgcacccgttcgacttcgacgcgttcagcatgagggcccaggcccacacgctagcccctcggaagggttcaacagccgcctcagagcactcgggctccgcgcccactattggtcagaggctggcccccgaagggttcgacagccgcctcagacgcagagcgagggatgaccctgggtacgttcgatacataaccaaggctcaggctacgctcctgagggctcggcccccgtctcggctccggaagacgacgaactccgcctcgcccgaccctagggctcggcccccgtctcggctccggaagacgacgaactccgcctcgcccgaccccagggctcggactcggcctcggctccggaagacgacaaactccgcctcgcccgaccccagggctcggactcggcctcggctctggaagacgacgaactccgccttgcccgaccctagggctcggactcggccttggctccggaagacgacgaactccgcctcgcccgaccccagggctcgaactcagccttggcctcagacgatggtctccgcctcgcccgacccagggctcggactcgacctcgacctcggaagacagactcgacctcgacctcagaggagcctccgcctcgcccgacccagggctcggaccaaccacgtcacaggggggggcatcattaccctacccctagctagctcaggctacggggaacaagaccgacgtcacatctggctcgccccagtatacaaataa

SEQ ID NO: 14254 - DNA, 1359 bp, Zea mays
  Peptide Sequence Number=SeqID_56033
atggccaccgtgtcgctcactccgcaggcggtcttctccaccgagtccggcggcgccctggcctctgccaccatcctccgcttcccgccaaacttcgtccgccagctcagcaccaaggcacgacgcaactgcagcaacatcggcgtcgcgcagatcgtcgccgccgcgtggtccgactgcctcgctgctcgcccccaatcagggggcggcccccgcggggagaggctgggaagaaggatagccacggatgctatcaccacgccggtagtgaacacgtcggcctactggttcaacaactcgcaagagctaatcgactttaaggaggggaggcatgctagcttcgagtatgggaggtatgggaacccgaccacggaggcattagagaagaagatgagcgcactggagaaagcagagtccaccgtgtttgtggcgtcagggatgtatgcagctgtggctatgctcagcgcacttgtccctgctggtgggcacattgtgaccaccacggattgctaccgcaagacaaggatttacatggaaaatgagctccctaagaggggaatttcgatgactgtcattaggcctgctgacatggatgctctccaaaatgcgttggacaacaataatgtatctcttttcttcacggagactcctacaaatccatttctcagatgcattgatattgaacatgtatcaaatatgtgccatagcaagggagcgttgctttgtattgacagtactttcgcgtcacctatcaatcagaaggcattaactttaggtgctgacctagttattcattctgcaacgaagtacattgctggacacaatgatgttattggaggatgcgtcagtggcagagatgagttagtttccaaagttcgtatttaccaccatgtagttggtggtgttctaaacccgaatgctgcgtaccttatccttcgaggtatgaagacactgcatctccgtgtgcaatgtcagaacgacactgctcttcggatggcccagtttttagaggagcatccaaagattgctcgtgtctactatcctggcttgccaagtcaccctgaacatcacattgccaagagtcaaatgactggctttggcggtgttgttagttttgaggttgctggagactttgatgctacgaggaaattcattgattctgttaaaataccctatcatgcgccttcttttggaggctgtgagagcataattgatcagcctgccatcatgtcctactgggattcaaaggagcagcgggacatctacgggatcaaggacaacctgatcaggttcagcattggtgtggaggatttcgaggatcttaagaacgatctcgtgcaggccctcgagaagatctaa

SEQ ID NO: 14255 - DNA, 612 bp, Zea mays
  Peptide Sequence Number=SeqID_56034
atggtgcgcggtggtgatcggcccgctgtgaagcgcggatccgcgaccacgcctgtctccggcgagcaattcccgagttccacgcggctcgcagctcgacttgagggctccagcagcttcactgcttcccggcgaacgtcctcgcccacacgcgcggacccgtgcgcgagcacagaggagaatcaccggcggcgatggagttcttccgccaaggcagctttcggtgggaaatttgtggacgacgcgaacgagtacgggacgcgaggtgcggctgtcgaggtggacccgcctgccagtgaagtgagcgcgggagggaaaaggagctggtgtctgggccgcgcgcgcgctgaatgggccgcaccagaaaacagaggccaagagttgcaccagccttcggtgcaccggactgtccagtgtgaaccggatagtgtccggtgcccaggctggctcagcgatgaactcgcagctctcgggaatcgccgatggcactacggcaaaaattcatcggactgtccggtgtgcaccaaacagtccgatgagccaatagtgcccgcaccaacggtcgacagcatgatcaacgggcgatgcatggctagagccaacggtcactag

SEQ ID NO: 14256 - DNA, 738 bp, Zea mays
  Peptide Sequence Number=SeqID_56035
atggcgagccccttcttctcgtacggcagtggggccagaggcttcatcgttgatatgaaatcaagtctttgggtgttgcaggcccagtgtccaaacatggttaattctgctcggagggatacccaggaagggctagatgccgccgacaagatagtatccctgattgtattcatttccattaaccttgaagttcattacagaatcgagggctttgccgagtgcctgaagcactcggcaaagcctgaaaaacactcagcaaagtctttgccgagtgtgacactcggcaaagaaagctcgacgaatagtacatcggcaacgacttctttgccaagtactttttatcgggcactcagcaaagactttgccgagtgccagtcggtactcggcaaagaaaagcggctgtcacggcgccgggtaacagagacggcgcctttgccgagtgttctaggtgacactcgacaaagaagttacctctttgccgagtgtctccagcctgcactcggaaacgggtccaccagcggggcccgacgtcaggttctttgccaagtgccagggccacaacactcggcaaagaagctttaccggtgcccaggtgttgcttctctaccgagtgctatggccttgacactcggcaaagcatgttctgccaagtgtcagtcatttgacactcggcaaagaagcttctttgccgagtgccaacgctcggcgctcggcaaagataacggtcgtcagctatag

SEQ ID NO: 14257 - DNA, 303 bp, Zea mays
  Peptide Sequence Number=SeqID_56036
atgcgagagcaagtattgtgcctgaaccccattgatggcacgacggggaagccgactacacctcaagttcctctaattaatcagctaagggcgtctcatatcaccctcatggttgtactattttcccaggtcatcatccaacgaacaggtccttacggagagtttccacggtttgaacttcacttcctattttatggaaaaataaggtataacataatgattgctgaaggttaccttcattcgggaacgacggacaaccgacctttggctccacggtgcaagcttgtagtggaggatcgataa

SEQ ID NO: 14258 - DNA, 279 bp, Zea mays
  Peptide Sequence Number=SeqID_56037
atgtggggcccatgggtcagccgcccctcacgcgatgacacatcatctggcaggtggacctcgtctgggtgtcaaactcgtctcaccggcggttgggcccagcagctcaagtgcgtcaaccacctcgcagatggggcgcgacctggtgtggatctgccggagctcgcagaccggtcgttggtcgagctctaccgtgacgggcaagcaactaaggacccaggtgctcagcagttggaaaatactgagcaggagcttgttgaaggcaagttatgcccttga

SEQ ID NO: 14259 - DNA, 435 bp, Zea mays
  Peptide Sequence Number=SeqID_56038
atggaggtaaaaaagtttattgccattgcgaagaaccatcaagagagtctgggtcagacgacaacatctaccagtgtggtcactgcaagagacacgaaaggccatgaagacgccacgttgctatctgatttgattaggtttggttttttcaaggactacacagtttggactttccgtgtcgagggaggagatactagtgtaggtggttcatcatcttgtggaggaaactcgtcaacgacgcatgtaggtgggccaccagcttgcaccacctttgttggcgacatcaatgatgctgatcatcgtgattatatcatagtgaacgatttgttcggtgacaatgctggcaacattggcgcctatgaggatgttggtgctacattgctagagcctgaagatgcggagcttttcaagaacatagctaaccgcctccattaa

SEQ ID NO: 14260 - DNA, 330 bp, Zea mays
  Peptide Sequence Number=SeqID_56039
atgaccatcaatgacgagcatgacgccgatttggacgagacatatgagacatttgattttacatttggcctagtgatctactacaatgcacccccgagtctagtagccatgattcaaatggacactgagatgatgggcgcatcgatgtatgcacaactccaatgtgatttggttgagcatatgaacagtacccccatactattcacgctggattggaattgtattcacgcttttaccttcgagcaagccgaagacttgttcttcatgaccttcgtccgaggctcattatacccgaaaggagataatgtttcgaaggacgaaggtccttaa

SEQ ID NO: 14261 - DNA, 804 bp, Zea mays
  Peptide Sequence Number=SeqID_56040
atggggtccccgcaggccatagcgtcgttggcattttcctcccagttgtgctcaggcgggtcctccgacgtgcacaccgccctcaccgactacgtcgtcgcctcaggtagggccttgaaggatttcccctttgtgaacctcttcaccaattcgctctcatcggcgcggtactcgcgctcttcatcgacctcgacggtagatggcgggatctgcgaacacgcccccaccaaccccgccaacaagctcgccgcagaatcccctgtccgctcgcccgcgcggaattggagccacgacctcgaccacccacgcgttcttctccgagccgacctcgaagtcgaaggggggcagggtcacagtcttggcggcaccgagtacggggacggggtccttgcccgctcctgcccttcgtcgatgaatccatcttcgaatgccccccacccccatgccctgagccctaagcttcaagcccccggagacatcatcgtctacctctcgcccgcctacctcctatcctcgcgtctagacatccaagcgccatcgccaaggacaccgagctgcgcacactccatggctcgctcctccagagcggcagtgccaccgcatacaatgttggggcctacgccagcgctagccggagcccccgtcgtcatctgcctaccgtcgaccgtgttgtcgacgtcagcgctcgccaggccgggcctcctggccacgacgaccaaggagtaccccgtgtttgcccccgaatttgtcaccagtagcctcatggtgccttcacctaaatggaactcatttgagaatttttaa

SEQ ID NO: 14262 - DNA, 336 bp, Zea mays
  Peptide Sequence Number=SeqID_56041
atgggcaacctccttgtcaaggggctcgggtacgtgaccgagccctcgtctctcagcggaaatcgagcgtctccaccaaacaaaagtcaacaacaagtacaagccccatgctccaagccataccgtctacataggctcggcttcgcctcctcatcgtacgcggccaactctgaactggaactggagttctggtcaggcttcgggctcggtattggcaccatgttagagaatgcaaccgctagcgccctggaggactttgaggatgacttcggcatggccgccaaggccatggttgacatcctcccgttgaaggacgtaatccatgaatcttcctag

SEQ ID NO: 14263 - DNA, 603 bp, Zea mays
  Peptide Sequence Number=SeqID_56042
atggataaaggaaaggggtgtattatgatttggagaagtcctcagaaacatgttgttggtgtttcaaacctcgctccaacaagccaggcacgggatccactcgagtggtttcccttcggcacgcctagcccccctatccagttctgccacacccaacctcgagctcggtaccgcgggggaccagagatcgtatcctcgacagtagcccccgacccccggtgggagggtggctccgctcgaggtctagtctcggatcaggtgccaagtgatctcaatgggtccaaggaaatactttggaatgtctttttgtccgagcaggatcctgatcctctcgtcgtagacctcctcggaccttcgggagtttttgtctgctacccacagcctgtcctcggacaaggtatgttctcagaagaatcctcgtcccagtcgaggtcccctctccccagaaccgttgtctccgcctcgtacgagcccgtcttcgagttgaaggtgaataggagcaacaagatcgcggttctgtcaaacttcaacaactacgatgacgcatgcgaccactgttcccgcacgtcgcctgccaactcccgcgggatgcacatacgataa

SEQ ID NO: 14264 - DNA, 315 bp, Zea mays
  Peptide Sequence Number=SeqID_56043
atggatcggatagttggtcgccggaggacgatcctaaggccgctagatcaaaggacgccgcccaagccaccagatcggaggagttggtcgtcgaagaacccgctcttccactttgggagcgtcattgtcgcttggacgcctgcctcgggagcgtcgtcgtcgctcgatcctggtggagcgccgtcgttagttgcctgcctcagggcgacaccaccgctggccctcgggatcgccaccgctcgcacggccgagggaaccaccgccgccgatcacacatctgagggaaccgccgtcgccgctaaaactaatccctag

SEQ ID NO: 14265 - DNA, 120 bp, Zea mays
  Peptide Sequence Number=SeqID_56044
atgaggcagtttggagaggttcagactataatgtgtgctttgactgataattctgcttctgttaatgtgaaatgtgttatagtgatggttacacaatatggtttacctgaccctggctga

SEQ ID NO: 14266 - DNA, 1320 bp, Zea mays
  Peptide Sequence Number=SeqID_56045
atgcccggcataccgagggatgtcgccgagcactcgctggatatccgagctggagcccgacccgtgaagcagcctctgcgccaattcgacgaagaaaagcgcagagccataggcgaggagatccacaagctaatggcggcagggttcatcaaagaggtattccatcccgaatggcttgccaaccctgtgcttgtgagaaagaaaggagggaaatggcggatgtgtgtagactacactggtctaaacaaagcatgtccgaaagttccctaccctctgcctcgcatcgaccaaatcatggattctactgctgggtgcgaaaccctgtctttcctcgatgcctactcggggtatcaccagatcaggatgaaagagtctgaccagctcgcgacctctttcatcacacccttcggcatgtactgctatgtcaccatgccgtttggtttgaggaatgcgggtgcgacgtaccaacggtgcatgaaccatgtgttcagcgaacacattggccgaacggtcgaggcctacgttgatgacatcgtagtcaagacgaggaaagcctccgacctcctttctgaccttgaagtgacattccgatgtctcaaggcgaaaggcgtgaagctcaatcccgagaagtgtgtcttcggggttcctcgaggcatgctcttggggttcatcgtctccgagcggggcatcgaggccaacccggagaagatcgcagccatcaccagcatggggcccatcgaggacttgaaaggcgtacagagagtcatgggatgccttgcggctctgagccgcttcatctcgcgcctcggcgaaagaggcctgcctctgtaccgcctcttaaggaaggccgagtgcttcacttggacccctgaggccaaggaagccctcgggaacctgaaggcgctcctcacgaacgcgcccatcttggtgccccccgctgccggagaagccctcttaatctacgtcgccgcgaccactcaggtggttagcgccgcgatcgtagttgagagacgagaagaggggcatgcattgcccgtccaaaggccagtctacttcatcagcgaggtactgtccgagaccaagatctgctacccacaaattcagaagctactatatgcggtgatcctgacgcggcggaagttgcgacactacttcgagtctcatccggtaactgtggtgtcatcccttccccctggggggaaatcatccagtgccgagaggcctcgggtagaatttgcaaagtgggcggtggaaatcatgggcgaaacgatctcgttcgccctcgagcatcagtcccagtcttggcgaacttcgtgctga

SEQ ID NO: 14267 - DNA, 1479 bp, Zea mays
  Peptide Sequence Number=SeqID_56046
atggggcctctgcctctccgccgccgcgtgggcgtcctcctgttcctggccctcgtgctcctgggcggcggcggcggcgcggacgccggcacgacgagctcgtacaggcggaagctggaggcgacggtggagatgccgctggacgccgacgtgttccgcgtcccgccggggtacaatgcgccgcagcaggtgcacatcacgctgggcgaccaggagggcacggccatgatcgtgtcgtgggtgacggccagcgagccgggcaacagcaccgtcgcgtacggcgaggacccggcgaggatggagcgccgcgccgacggcgcccacacgcgctacgactacttcaactacacctccggcttcatccaccactgcaccctcagaaacctcaaggttcacttgtttgtttgtccacagccattcttccatctcttgtgtattttactgatggccgccgtggatggcttgctgcagcacgccaccaagtactactacgccatggggtttggccacacggtcaggaccttctggttcaccacgccgcccaagccgggccctgatgtgcccttcaagttcggcctcatcggcgaccttgggcagacgttcgactccaacatcacgctgtcgcactacgagtccaacggcggcgacgccgtgctgtacgtgggcgacctctcgtacgccgacaaccacccgctccacgacaacaaccggtgggacacgtgggcgcggttcgtggagcgcagcgtggcgtaccagccgtgggtctggacggcgggcaaccacgagctggacttcgcgccggagctgggcgagaccacgccgttcaagcccttcgcgcaccggtacccgacgccgtaccgcgccgccgggagcacggagcccttctggtactcggtcaaggtcgcctccgcgcacgtggtcgtgctggcctcctactccgcctacggcaagtacacgccgcagtgggcgtggctgcaggcggagctggcgcgcgtggaccggaagaccacgccgtggctcgtcgtgctcacgcactcgccctggtacaacagcaacaactaccactacatggagggggagacgatgcgggtgcagttcgagcgctggctcgtcgacgccaaggtcgacctcgtgctcgccggccacgtccactcgtacgagcgcagccaccgcgtgtccaacgtcgcctacgacatcgtcaacggcaagtccacgcccgtccggagcgccgacgcgccggtctacgtcaccatcggcgacggcggcaacatcgagggcatcgccgacaacttcacgcgcccgcagccgggctactccgccttccgggaggccagcttcggccacgccacgctagacatcaagaaccggacgcacgcctactactcgtggcaccgcaaccatgacggcgccaaggtcgtcgctgacggcgtctggttcaccaacaggtactggatgcccaccgacgacgacacaaactga

SEQ ID NO: 14268 - DNA, 2796 bp, Zea mays
  Peptide Sequence Number=SeqID_56047
atgtccggcaccactccgacccctacacctacaccgccgcctctcccgccgccgccggccgctcgccccgtgcggtacgacttcctcaactcgaagccgccggccaactacgtcgcggggctcggccgtggcgcaaccggcttcaccacccgctcggatatcgggccggcccgggccgcgcccgacctacccgaccgctcggccgccgccgccggccctgccgtcggccgcggccgcgggaagcctcccggcgaggatgacggcgacgacgacggcggcgacgaggagaagggatacgacgagaaccagaagttcgacgagttcgagggcaacgacgccggtctcttctccaacgccgattacgacgacgacgaccgcgaggcggatgctgtgtgggagagcatcgaccagaggatggactcgcgccgcaaggatcgccgcgaggcgcgcctcaagcaggagattgagaagtaccgcgcgtcaaaccctaaaatcaccgagcagtttgctgatctcaagaggaagctggctgatctcttcgtgcccgtgccggacaccctgcttgagaaggctcggcaggagcaggagcatgtcacagctcttgaccctaagagccgtgcggctggtggcacagagacgccatgggcacagactcctgttactgatctgacggctgttggcgagggtcgtggcactgtgctctcgctcaagttagataggctgtcagattcagtttctgggctcactgtagttgatccgaaagggtatttgacagacctgaaaagcatgaagattactagtgatgctgagatttctgacatcaagaaggcgcgtctattgctcaagtcagtgacgcagacaaatcctaagcatccccccggttggattgccgcttctaggctcgaagagattgctggcaagcttcagattgctcgacagcttatccagcgtggctgtgaagagtgccccaagaacgaagatgtgtggcttgaagcatgccgtttggccagtccagatgaggcaaaggctgtaattgcccgtggtgtgatgtcaattccaaattctgtgaagctatggttgcaggcagcaaaattggagagcagtgatctgaataagagcagggttttgaggaaagggctggagcacattcctgattcagtccggctatggaaggctgtagttgagcttgcaaatgaagaggatgcaaggttgttgcttcacagggctgtggagtgttgcccgttgcatgtggaactttggcttgcccttgcaaggctggagacctatgaccaagcaaggaaagtacttaacaaggccagggagaagctccccaaggagcctgccatttggattacagctgcaaagctagaggaggctaatgggaacacacaatcagttaacaaggtgattgagagaggtatcagatctctacagagagaaggaatggatattgatagggaagcatggttgaaggaagcagaagccgcggagcgtgctggatctgttttgacttgccaggctattgtgaagaacactataggcattggtgttgatgatgaggatcggaagcgcacgtgggttgctgatgctgaggaatgcaagaagcgtggttcaattgaaacagcacgcgccatctatgcacatgcgcttactgtgttccttactaagaagagtatttggctgaaagcagcacaacttgagaagagccatgggactagggagtcacttgatgcgctcctcaagaaggctgttaactacaatccacgagctgaagtattgtggcttatggctgcaaaggagaaatggttggctggagatgtgcctgctgctcgtgcaattcttcaggaagcttatgctgctatccccaattcagaagagatctggctggctgcattcaagctcgagtttgagaacaatgagccggagagagcaagaatgctcttggccaaggccagggaaagaggagggacagagagggtttggatgaaatctgccattgttgagagggaattggggaatgttggtgaggaaaggagattgttggaggaaggtttgaagctattccctgcattcttcaaattgtggttaatgcatggacagatggaagaccggcttggtaatggagcgaaggccaaggaggtttttgagaatggcctgaagcagtgccctagttgcatccctctttggctctctctagctaccctagaggagaagattagtggcttgagtaaatcacgtgctgttctcacaatggctagaaagaagaaccctgctacacctgaactctggctagcggcaattcgagctgaattgaggaatgggaacaaaaaggaagccgatgctctactggccaaggcattgcaagagtgtccaacaagtggtattttgtgggctgcagctattgagatggcaccacgcccacagcgtaaaggaaagagcacagatgctattaagcgaagtgatcatgatccacatgtcattgcaactgtggccaaacttttctggcttgacaggaaggttgataaggctaggagttggttaaacagggctgttactcttgctcctgatattggtgatttttgggcattgtactacaaatttgaacttcagcatggaaatgtggacacacaaaaggatgttctgaaaagatgtgttgcagcagaaccaaagcatggcgaaaaatggcaagcaataaccaaggctgttgaaaactcacacctgcctgttgaggctcttctgaagaaagctgttgtcgtgcttgatgtagaagaaaacgccaatccgggaggagcctag

SEQ ID NO: 14269 - DNA, 390 bp, Zea mays
  Peptide Sequence Number=SeqID_56048
atgggggctttgctggaccatctagcatgctcaattgctcatcgactcacccatgttttcaaagggaatttcaggaaggcgaatgcggtgaggacaaaggcaattcagcatcatcatccaacacctacggcggctgggagagctcgccgctgcctcgtgctcgtgcaggtgtcccctatctgtgttcgtcaactcgtatggcactgccgcaccgggaagaggaagaaggtcccgacaaggagatcctcgagatctcgtatagtcgtatcacgtatggcacagggaagagcaagatgccgacagggcgacaaggagattctcaagatcgtggagaagaacaagttgaggcccggaatggtcatcgacaagctagcctatgttaggcattag

SEQ ID NO: 14270 - DNA, 768 bp, Zea mays
  Peptide Sequence Number=SeqID_56049
atggccggttccaaggatcacaccaaggtctccaccaccaacatcatcaagccggccatggaggcactcccggctgatgactaccatcatatgacaatgctgatgcacacgttcgtgtcatcatcacagccgccgccaccaggcatgcaacaggctctaggcacagtcggactgtcggagagcctcctcggacagtccggctatgttgcagaccgttcgacgtatttcgtcgaccgtccgaccgtacacaggcccgcacacggatcactcaggtcgcgtcatacatggccggatcatccgggtacaaccccggacaattcatccctgtcgcggaccgtctggtacaaccatggaccattcgacccgatcgcggaccatctggccccttacgacggacggtccaggtacgaaacttcccaggcagcaccatatacggtcgggcagtctggatataccctcggaccgttcgacccggtcgcagaccgtctagcccttacgcacggaccatccgggcacgattggccgtcgtcggtgaagccctcatacacatccggagtgcactgtgtggtgtccaggagggtctccgttgtcacgtcgtggggaattatcgatggtggtgtgaagaatccgtcgctggagtattactgccccgctgctccgttgtccgtcgtggaccacatgcccgcatgcgccatttctggtatggaccccgttcccgagttcgcgcttgttaccgcaataagtagaacccatctaattggtgtttag

SEQ ID NO: 14271 - DNA, 540 bp, Zea mays
  Peptide Sequence Number=SeqID_56050
atggcagcaatcataacaattccatgtccatctcataaccaggacccaacatttctaggcatggctacaatacatcactgtggcaagatgagcggtgtactccacgtctgcccatgtaccctgcagtggcatgcacaactacataacaccataccacattctctagacttccaagacatacgcccaatgtatacaaccctggtcattcgagacatgcacacgacttctcaagtatcatgtagcagcatggagggtgaacatctccatcgaccatatctccaagtatcatcacgggttgtgcctattggccccatcctctttgaaacaggcgtaccaggtaggggcactttcatgagcagttccgactacctccatggtaggatggggcttggatcctccaaaaacaaccacaacacagaccttggtgctaacggtcgcagcgtcatcaacgacgctgccacccatgggtctggcgaaccactccactcgacatatcatcctgtgctggttgggacaaccctggctatctcgatcccttga

SEQ ID NO: 14272 - DNA, 447 bp, Zea mays
  Peptide Sequence Number=SeqID_56051
atggggaaaagcttggcgacgacggcggagtggttgcacgaggagggcttggccacggctggtcgacggaagcttagaacgacggcggacgacggtggcggcccggggcggcacgggcggccggcgctgggcgggggcgggcgggcgacgctgggggtgttgggcggcgcgggggcgaccggggagcagcggcgtgggtgctccatgcggctggcggcgcgggagctgggcggcctagggagcggcggcgcgggtgctgcgggcggcggtcggtcgcgtgagacagagaaaaagagaaagaaggattcagtcggccgttttaaaagcttaattttctgcggccagggcttggccgccgaaaataagaggttattttcggcggctgtgtcagtggccgccgaaaataaccttattttcggcggctgtgtcagtgaccgccgaaaataa

SEQ ID NO: 14273 - DNA, 675 bp, Zea mays
  Peptide Sequence Number=SeqID_56052
atgggtacggatgatgatgatggttctattaattatgtttctaaccgtggattttggtatttcctctatgaggaggatgcccttggtgcaacctatgctcaggccgaagttggcgctgtaaatccatctgatgataatgacgacattgatattgaagaagaagatagcaccaccattcaacctacaaagccaagtcacatgaacttcggcaaatcaaaaatcaaaggaggacacattgaggtacttgaccgctttggctatgttgacaatgtcaattgggtgcggctaggaggtgatgatttagtgttgaatacaaaagaggacgaggaaccgaagggggtaaagattgaggatgctatcgatctcatagctcaaaaggtcgttaccttgaagctgctttcgaaaagtaaggaggaggaggaggaagagcggatagatccagtaatgagatcgttctttgatattgacgaaggggagtctgaggaaaaagatagtgctggtacaatccttgcaacggaggatattacactgcttcctgtggttgcgaccatacaaagtccaaaggttgatttggcggctatagtcgtgacaccttcagcaattgtggtggtcgaagagaaaattggttcttcaaatcccgccatagcagaagacaagggaaagggcctacaatga

SEQ ID NO: 14274 - DNA, 423 bp, Zea mays
  Peptide Sequence Number=SeqID_56053
atggacaagagcaagaagagtggtagttcttcgcatcactccagcgataagcggaagcgtgagctgactcctccctcggaggacttcggcgactcggagtactcggaggaggagttctcctccgagtcagagggctcaccggtgtggacctacatccgggtcgtcgagcgcgccgggctcgagggctcggatgagtcggagtactcctcagacaaggagaactcctcgaactcgtccgaggagggcggcggcgatggcgatggcggtgacgacgacgacgacggcggcggcgatggtgatggcggcggtgacgacggcgaaggcgacggcaagggcggtgatggcggcggcaagggtggcagcggcgacggcggcgatggcagtaagggcagcagcaggggcagcaacaaggccagtggctag

SEQ ID NO: 14275 - DNA, 1476 bp, Zea mays
  Peptide Sequence Number=SeqID_56054
atgggcgaaacgatctcgttcgcccctcggaaggccatcaagtcccaggtcttggcggacttcgtggctgaatgggtcgacacccagctcccaacaactctgatccaactggagctctggaccatgttcttcgacgggtcgctgatgaagacaggagccggcgcaggcctactcttcatctcgcccctcgggaagcacctacgctatgtgctacgcatccatttcccggcgtccaacaatgtggccgagtatgaggctctggtcaacgggttgcggatcgccatcgagctaggggtccgacgcctcgacgctcgcggtgactcacagctcgtcatcgaccaagtcatgaagaactcccactgccgcgaccctaagatggaggcctattgcgatgaggttcggcgcctggaagacaagttctacgggctcgagctcaaccacatcgcccggcgctacaacgagactgcggacgagctggctaaaatagcctcggggcgaacagcggttccgccggacgtcttctcccgagacctgcatcaaccctccgtcaagatcgacgacacgcccgagcccgaggcaccctcggcccagcccgaggtaccctcggctcagtccgaggcaccctcggctcggcccgaggcgccctcggttcagcccgagaaggcacccgggggctacacgcacctgttggtcgccatcgacaaattctccaagtggatcgaggtccgacccctaaacagcatcaggtccgagcaggcggtggcgttcttcaccaccatcgtccatcgtttcggggtcccgaactccatcatcaccgacaacggcacccagttcaccggcagaaagttcctggacttctgcgaggatcaccacatccggatggactgggccgccgtggctcatcccatgacgaatgggcaagtagagcgtgccaacggcatgattctacaaggactcaagcctcggatttacaacgacctcaacaagttcggcaagcgatggatgaaggaactcccctcggcggtctggagcctgaggacaacgccgagccgagccacgggcttcacgccgttctttctagtctatggggccgaggccatcttgcccacagacgtggaacacggttccccgaggacgagggcctatgccgaccaaagcaaccaagctagtcgagaagactcgctggaccagctggaagaggctcgggacaaggccttactacactcggcgcggtaccagcagtccatgcgacgctaccacgcccgaggggtccggtcccgagacctccaggtgggcgacctggtgcttcggctgcgacaagacgcccgaggtcgacacaagctcacgcccccctgggaggggccgttcgtcatcgccaaagttctgaagcccggaacgtacaagctggccaacagtcaaggcgaggtctacagcaacgcttggaacatccaacagctacgtcgcttctacccttaa

SEQ ID NO: 14276 - DNA, 222 bp, Zea mays
  Peptide Sequence Number=SeqID_56055
atgagcgagaggaggcaccttgacaagggaggcagcgaggcgactctagtgaggtgcgggaaggcaacgggcaagcttcgggatgtcacaggccagcagtggggcgacatggtcgacgtgatggtgatgagtgactctagggtggtggtggctcaggccagaggcgatggcgtcgattccgggcggttgggggccgctggggtggtggcagcacaaacttga

SEQ ID NO: 14277 - DNA, 207 bp, Zea mays
  Peptide Sequence Number=SeqID_56056
atggcgcccgaggctggacttagctactgtcagcctcactttgtcgagtggcacaacagtcggagcggcacagatgatgctacttttcctgtcagccgttatgcgtacggcggaccgttcggccctaggacgctgaccgtccgcgtgtgcgcagaactgatgctttttgctcataacggttggaatttggtgggggactataaatag

SEQ ID NO: 14278 - DNA, 744 bp, Zea mays
  Peptide Sequence Number=SeqID_56057
atggagaaggaggcggcggcggagctggagatccccggtgagtgccagtacgcgggggatccagtgttggtgcgaccgagccagccgacgccgcgccacaccctgcacctctccaacctcgacgaccagcggttcctccgtttctccatcaagtacctgtacgtgttcggcgccgacgccgccgtgcccgccgacgcgctgcgggcggcgctcggcagggtgctcgccgactactacccgctcgccggccggctccggccgagcgccgaggaggatgggaagctcgtcgtggactgcaatgccgagggcgccctcttcgccgagggccgcctcccgggcctcgccgccgccgacttcctcagcggcagcgaccggccgcacaagtcctggaggaagctgcactacagggtggaggcgcagagcttcgtcgccgtgccacctctcgtcgtccaggacgaagcttttgttccctgcagcgccgcagctttgggcaagagtgacggcctgagcctggcatttgcaattcttaaagtcacttggctcgcgtgcggcggcatggtcctctgcaccgccatcaaccactgcatctgcgacggcatcggcaccgcgcagttcctccacgcctgggcgcgcgccgtgcgcggcggcggcggccgcgacgcactggacgccggcggcgacgacactgccctgccgttccacgaccgccgcgccctgcgccccgcgctgcccaccgcgcgtcgc

SEQ ID NO: 14279 - DNA, 165 bp, Zea mays
  Peptide Sequence Number=SeqID_56058
atggtgataactacttggttacttcaggggcttgaacaacccaccacaatccacgcgagtacaagctctagcgtatccggcgtcaatgcttgtgcggccattagggccatgacaacacaacaagccttcacaacaagcgtgacaggcacaattatgtctcgttag

SEQ ID NO: 14280 - DNA, 330 bp, Zea mays
  Peptide Sequence Number=SeqID_56059
atggaacgccaccgggagtacctgtgcatgggcgaagatgttccaggcaagaagatcctcggtggcatgtcaattgctcaccggagttgggcgggtgggtcgcgcgggccactgcggttaggtgcggaggtggaagacgatttcgtgaccattgattttgagattgatggcctggattatatcatggataccccttttatggattggtacggatccgttgatcttggatccatcagctgtggctctcatgccggtgctttaaaggaggacctttggatcgggatccgaccactggcgttggataccgattcaggtattagaataatctaa

SEQ ID NO: 14281 - DNA, 357 bp, Zea mays
  Peptide Sequence Number=SeqID_56060
atggtgtaccgccgtggtgtagttcggcgacgggaaccgaacccacctcacccaaatcaccgttcccgtactgccctcgctccgttagagacttgccgccgtcttcctcttttaccgtcgtccgtgaagctcccgtattctattctctctgtctcctcttctcctcttgctcgcccgatctctgctcgccctagccgtcgtcttcctcgagctgctctgttcgtctccgcgcactgggccatgtccttctccggatctcgcccttccctgcgtcgccggttcctgcacccgtggtccattgcgcggagacccattccattcgcggttgcagtcccccaacgccgtcggctctggtaa

SEQ ID NO: 14282 - DNA, 834 bp, Zea mays
  Peptide Sequence Number=SeqID_56061
atggagactagactgatcaacattgctcgatcatcacatgaggttgctacatcaatcttaacaacaagccccgcctcccagggatcctctcgcctctgcatctcgccattgttgccgtcattctcgcacccgcgcccctccattctcgcctccgcccccggatctctcgcccccacgaccttcgatggaagcccgcaatctgcgcccttccatcgccgcaacgtaccgatcccattccattttgcgagaagggcgagcgcatgcagggcttcgcagcggctgacggttcaattggaagatcaaccacagggggcaggactcctaaatgagccgccaactgttcttctccttcccaatcatcggcaatcccacacgctctggtggctagggctgcaggattcgcaggtgcggcgtgctggggtcgcccaggcgcggagtcggccaccaggcagcagctgtcgcccctccaccgtacctcgttgtcgtccgtccacgcaactgatgaactacttcacgtacaaggctgtgaggaccgtgctgacccagctgtacgagctgaatccgccgagctaccgctggtcctacaacttcgtcgctgtcaacaagcctaccgacggcaagcatttcctccgtgctctcggtaaggagaggcaggagcttgctgagcgagtgatggtcaccaggcttcacctgtacgggaaatggatgaagaaatgcgaccatgcgaagacgtacgagaagatctccgacgagaacctggcgctgatgcaggagcggctgatggagacggtcatctggcctaccgacgatagcagcacggagaagatcggctga

SEQ ID NO: 14283 - DNA, 255 bp, Zea mays
  Peptide Sequence Number=SeqID_56062
atgaaggtcttcgtattccaagtgtcgaaggagttgtgggcacttgtgcattgcaagcccacaaagcctagtgaagaagaagatgatgaaaaggtcgccgccatcgacagggatttctcttcaccaccatcatcaccttcatctgcttcacaattatgcctcatggctaaaggtgaatggaaggtacaacatgaaaatgatattgttgaagattgtgatagtgatagtgatgatgaatatgcttctcctacttga

SEQ ID NO: 14284 - DNA, 264 bp, Zea mays
  Peptide Sequence Number=SeqID_56063
atgatggaaaagctaaacgaaatcgtgtttgacatcttggaaaaggtagcagatactaaacaaaaatggaagaagggtatttttactaagcaaggtggtgataaggagataaccttctgcagtcagcttatgatcaaggggacaaatgagatcatgccaactctactccatgtaatgctggtgtcacagcaaaaaatgattctcaccaattgtcagcacgcctgcttccagcaaagtttcagagaaggaaaagatggaatgtaa

SEQ ID NO: 14285 - DNA, 195 bp, Zea mays
  Peptide Sequence Number=SeqID_56064
ctgcgcaggggcttcgacacccattttggggtgttctgcgtgtcacgtgatttggcggaatcacgggcgattctggtccgaattgctcgtcagaggtgccgcgccgcctcggatccacgcttcaccgtgaacaaggcatccacgccaccgccactgaagagccagtggctgaggatcccggtgttcaacagatag

SEQ ID NO: 14286 - DNA, 328 bp, Zea mays
  Peptide Sequence Number=SeqID_56065
gggaaaatgggagagaaaagaaaaagaaaaggatttctcggttaagcggtccgggtgggatttcagcccggctaagcgtgcgcctgcgcaggcagccgacccagctaggctcgccaacagggcatgtcgcgaggacggcgccgtgggcgcgggcccacgagccagcgagggggagagggaaacgacgtcaggggggacggcggtccacccacggggaggaggaaccggccgccggtggttcaacggcgtctccgccggtggcccagttctaggtggtcggggtggtggcatagcacaggcaggggtagggggtcaccgtggtgggtag

SEQ ID NO: 14287 - DNA, 237 bp, Zea mays
  Peptide Sequence Number=SeqID_56066
atgaggcaaccgatggcacctctggctgaaggcaccagactgtccggtgtgcaccggacagtgtccggtgcgcccagaggacaccaacccaaactcttcgccctcgggatttctcggaagccggcgcgctataattcaccggactgtccggtgtgcaccggacatgtccggtgctccaaggaagcgcggtctacggaacttgtcagcctcggattcgcgcggcagccgctccgctaa

SEQ ID NO: 14288 - DNA, 1059 bp, Zea mays
  Peptide Sequence Number=SeqID_56067
atggggcgcgcgccgtgctgcgagaggagcgggctgaagaaggggccgtggacgccagaggaggacgagaagctcgtcgcctacatcaagaagcacggccagggaaactggcgcaccctccccaagaatgccgggctcgcacggtgcgggaagagctgccggctgcggtggactaactacctgaggccggacatcaagcgcggccgcttctccttcgaggaggaggaggctatcatccagctccacagcatcctcggcaacaagtggtcagcgatcgcggcgcggctgcccgggcggacggacaacgagatcaagaactactggaacacgcacatccgcaagcgcctgctccgcatgggcatcgaccccgtcacccacgcgccgcgcctcgacctctccgcgctcctcaagcccgccgccgcgtactaccccacgcaggccgacctcgacacgctccgcgccttggagccgccgctcgccagctacccggacctcctccgcctcgcctccgccctgctctccggccgcccggccgcgcccgcgatcggcgagcaccggcagcagcagcttctgccgtggattctgcagcaggcggtcgccagcatcagcatggcgcagcatgctgttgccgccggagcagcgtgccaaatgccgccgccggacctggtccacaacacgaacccgccgacggtgcagcagcatcagctcgcggccgcgcagcaccagccccaagacgtggtctgccacagcatgcagccgcctacggcgggctacgtcgacagccctctggacgtcccggcgctgatgcaggcagcgcagcccgacgcgacgaacctgcagcagtggaacagcacggtgacgagcagcggtaacaaccacaacagcgtcggctccggcgtgtccacaccaacgtcttccagcccggtgccgcggttggatcactccaccacctgcgtcgccacgacgttcggcggcggtggcgccagcaccgacgacgtcgccgcgctgttcgacatgcagctgtctgagctgcttgatgtgagcgactacatgctgtaa

SEQ ID NO: 14289 - DNA, 1566 bp, Zea mays
  Peptide Sequence Number=SeqID_56068
atgccgccgcgacgcggtaggggaaagggtaagggtagggcaaagccaagagcgaagcccaccgagcccgagcccgagtccgatcccgaactagacgaagccgccaagtccgaaatcgaggcgggggacgcggaggctggggaggagtccagcgccgagagcgaggactcgaaggaagacgaatcggagagcgacaccgagtccatggatgcagaggccagcgaagaagctggcgagaacggaacggaggagatggatgcagagcctgaagccaaagccgtcgaggccaaggctgaaacggtggccacggaggcggaggcgaagcctgacgcctcggatgaagaagctggtgagactggctcagaccgcgaagcagatggcaagggtgctgatccgaaggcgaaagcggaggagtccgacggcgaggatgaggagggagccaccgccgtgaccgacggcgatagtgaagaggaagccgctgagacgggcggcgagagcgaagaggatggtggcgactccgacaccgaaggtgatgccgaggaatctcctccatcccctcctcgccgcagtcgccgccgtaagcgagcggccactcccgatgacgaagcagaggagacccctacgccgtcgcgtcgccggcgccgtcggaagtcaggggagcgtggtgactccccgccgccacttcctgaccacctccgctgccgtcgcagcgacgggaagaagtggcgctgctcgggccgtgcactcccaaccgttagcttttgcgagtaccactacgcgagggctaacaagggtaagaagttaccagcggatgaggaggtccttgctgttgttcttcagaggcagaagaacaagaggaagggcaggaggagcatcaatcctccgacgtcccctcaggcagccacgagtgacccccagaccagggatctcccaaatggactgatgacgatctcgccaggtagcagtggacctgcggcattgtcaactcctgtgaagattggtgtagaaattcctgcacccatacagcggtgctatcgttccaagaatgctgagccattgcctgttggtcctgtgaaggttgttcctcgtgcgatgagtgtgacaaaaacagcaagaacatgtcactgctgtggaatgaagaaggctgcacgtgtggccaattgcaagaactgtgataagaacttctgtaacagctgcattaataaatgggtgtatattggagatgacttattggtgctctgctgcagcagtgtccccgatattgctgataatgttattggggctcccccaataagtagttgcggcggtctgttggatgcttgtgtgagagttggaagtgtcaagttgcacttcaataaagaaccgccaaaagttgaaaggaagatacttagcataaaaatttccaaccatcaattttacaagcttttacctgtaagacttgaccaggaacagctagatgagttggaactggaagctaaaatacaaggaacaaaaatatctaatgtctgcgtccaggttgctgaaactggtcagagtgagtcactctactggtccataaactcctaa

SEQ ID NO: 14290 - DNA, 372 bp, Zea mays
  Peptide Sequence Number=SeqID_56069
atggagttcttgaagaacggcagtgggagggtgagcagtgaatggataaacgatagggatagttcagattcatatcgctatgttcgtgcttcatttcatttgaaacgtaagttctcgttgcttccgattggctacatcgcacatttagaggctgtttggttcgtggctaaatgtgccacactttgtctaagtagtgaagtcaaagcccgtggaagtcttggcaaagaggctctacgttttcaatttactgccgtcatccgcacaccccttggagccagcagccagccatctgcaagcaacaccacgatcgcattcacagccacgccgtcaatccgccatagtatttgccaaatccccggctatgcaaaataa

SEQ ID NO: 14291 - DNA, 681 bp, Zea mays
  Peptide Sequence Number=SeqID_56070
atgaagccctgccgcagaaacgcgcaggctctggtgccggccgggcacgccacggccaggaaggaccacgacatgcacgcgcgtgcaggcgcagaggcagagcgctatctaccatccagccagcgagcgagccgcaacggcacgctaggactgtctgcagcgccgcactctagccctcctctcccctattcctattcattgcttaggggctacagatcgagaggagcgctgttcaccccctcgcggcattgttttctccctttcgcgcgcgcatcggaagaagcagaagcattttcgttgctgatgacgatggcgcgcaagacggctgcgctcgagttcaccacgcgcacgctccgcaccgtcatgttcggatgggtctcccgctccatccacgcccgcctgctgcccatcctcgccgacgcgcacgtcatcgacttgcaggacctcctgctccgcctcacctttgacaacatctgcggcctcgcctgcgggaaggaccccgagacgctcgcccggtgcctccccgacaacgccttcgcctccgcgttcgaccgcgccacggaggccaccctcaaccgcttcatcttccccgagtgcgtctggcgctgcaagaagtggctgggcctcggcatggaggaacggttaataattatagttgttatatattatatgtgcaagtaa

SEQ ID NO: 14292 - DNA, 708 bp, Zea mays
  Peptide Sequence Number=SeqID_56071
atgaccgcgtcaaaaaaggtgcgccacatcactcgatttcgtatccttttcctcttcctctttctctctcttacaacagggaccgggaaaggggataccccgaaagggatccttctccgcgaaggaaacgggccccgagcccccctactgatcagaggttcgaaggctggcccctcggaggggttcaacagccgcctcagagcgctcaggctccacgcccactactggtcagaggttcgaaggctggcccctcgaaagggttcaacggccgcctcaggccactcgggcttcacgcccactactgatcaggagttcgtaggctggccctcgaaagggttcgacagccgcctcagacgcagagcgagggatgaccctggagtgaggctgacagcagccaagtacggcctcgggcgccataggaaactctgcctcgcccgaccccagggctcggactcggccttggccccggaagacgacgaattccgccttgcccgaccccagggctcggactcggcctcggccccggaagacgacgaactccgcctcgtccgaccccagggctcggactcggcctcggccccagaagacgacgaactccgcctcgcccgtccccagggcttggactcggaggagcctccgcctcgccctacccagggctcggaccgaccacgtcacaggaggggccatcattaccctacccctagctag

SEQ ID NO: 14293 - DNA, 186 bp, Zea mays
  Peptide Sequence Number=SeqID_56072
atggacaaggcaaatggagagcagaatggttccaaatcacgtgaggcaggtgcgttcctgcggaaccaggctggcgcaagccagactgaaacgagacctgtaaccaatcacgcgatacgtgattggatgtctgctgctcggcagccaggctgtatggacggacctggatgtgcggatgcgggatag

SEQ ID NO: 14294 - DNA, 1017 bp, Zea mays
  Peptide Sequence Number=SeqID_56073
atggggtttgagaaatgtgatggaggaacatgggattggtacaaccttgagaaatcaaaacgtgttaaagcattcaggtgtggggagtttgatgcctgtattgagaaggcagaggctactcaagggactcttgtgaagaaaagagagaaatatgcaaggagagaagatgctattcttcatgcgcttgaattggagaggaagcagcttgcatcaaagtaccagactcaaggtttcagacctggaccacctggtaatatttctgcttgcacaaaacatcacaaagaccttggaagtactcgctacaagagtaagaagggcaagaagcgcaaagatgcatctgttcctcctgatgtaaaaaaagaagtgggacaatgttttctgcctgctggttcaaagagaaacttttcaggatcacttactcaaggaaatcttgtcagtaatcacatgggtgacttctcccctttgggacattctcatggaggtgccactttagaaaacaaggagagtacagttgtgaagaaaaatagatcagatggaagtgattttgaagactctcttgtttcaaaatcagacagacgcagaccactttctcaagtattgcagagcagtgaaaacttgcttcctcacttaaagcaaaatgatgattttggggctttgttaatcgcggagagtaataatccttcacttgccgcctcctggtccagaagaaataaatatacgtacatggctagtgattctggcgaaactgagagtcatagtgatttaccttctataaagatgtcttctactagaactgattttgagaatgaaagctatcttcagcatcctgtttatttttctgaggagcagacttctgacttcattgagaagcaaataaccgagtcttccgagagggaatgttcagaaagcgagactgaagatgatgctgaacttctgcagagtatgtgtatacacctttctgaattctgtttatttgggttcatgttacattgtcatagaatgctggctatagcatag

SEQ ID NO: 14295 - DNA, 246 bp, Zea mays
  Peptide Sequence Number=SeqID_56074
atgggggcgtcggctgccggccgtcagggccaacaggataagcaaggggtagaagggcaaggatatatagaaagggagtggaggaccaggccgtacgcatgctaccacgaccccgtggccatggcccatgtccacgagtacaccctcaagccgctctcggagccggcggtggcgcctgtatgcaccaggtaccactctgtccctggcttcctcttctccaacggtggcttctccggcaacctgtag

SEQ ID NO: 14296 - DNA, 312 bp, Zea mays
  Peptide Sequence Number=SeqID_56075
atggagatttgcctggctgctcaattgggactgccgctggtgcctccagacttaattagctgtgaagaacaaggtgaaggaattaatggaattaggaggcagagtgacgtaacatgcaaaagcggtaccataggttttgcgtatgcatatacggactgttcgacacaggaggttgtacggtccgacgcaatgccggactgtccgatggtaaatctgaactatcaggttgtgtttgccattatcgatgcgccatgtggtggacctagtgaagccccagactgttcggcaggaaaagccggatggtccgcataa

SEQ ID NO: 14297 - DNA, 1428 bp, Zea mays
  Peptide Sequence Number=SeqID_56076
atgcagcaccgctcgccggaggcggcttcggcatccgcctccccgacggccgcggcggtggaggccatggcgccgggcgtcggcggggttgagccggccgtgacgctcgaccaggttccgcgctggagcgacccggaccagcgcatctccctgctgtcccccaccgccgccggatccgagaccccggcctcgtccttcctctccttctccgacccgctcaccggcgacgacgcggccgcgggggccgggggccgtggcgcgtcgcggttccccgtcgattacgagatcaactcgaagatctacctctggcgaggccatccgtggaacctcgaggtcgacgccgtcgtcaactccaccaacgagaacttggacgaagctcatagcagtcctgggctccacgctgctgcaggttcggggctcgccgaggagtgcgccaccctgggtggctgccgcactgggatggctaagatgacaaatgcttatgatttgcctgccaggaaggtcatccatactgtgggcccaaaatatgctgtaaagtatcacacagctgcagagaatgcgcttagccactgctacaggtcttgtctagaactgctcattgagaatggccttgaaaggttgcttccactatatttccctcgggacaagcaagaagaagagatagccgcattgaaacttccagctgatgttggggatgagaatggtgagacagtaatagatgaaaggaaaataagaataaagcccttgcctgctggggaagcaaatagcaaaacaccaattcctacacttgcagatatcccgcttcctgattcgagtttgacacgtagaaggaattctttcaagttggactcatatttggatcctgcttttatgtctataattaaggatcctgatctccgacgcaaggagcaatgggaaaaatctcaggcaaacaagggacttaacttggctaacatgcttgggtttggtgatcttggcagtccaccattatctgctgctgaagaatattcacttcattcacgataccttgctaaagcgaattctatgaatctgtcagatgttgctgaaatgaaaataatcagtttaatcaaatggtgggaatgggatggacctagaaaggaatttgaatctctgattcagaagccttacacaattgtctatttccactctgtggcatcattacaaccacagcctgatttaggattcatgaaacggttacaacagatactaggtcggaagcataaaaaaaatcttcatactatatacatactccacccgacactgggactgagaacagccgttatggcgatgcaactttttgttgacggggaggtctggaagaaagttgtatatgtcgacagacttgtgcagctattcagatatgtaccacgtgaacagctcaccattcctgattttgtgttccagtaa

SEQ ID NO: 14298 - DNA, 214 bp, Zea mays
  Peptide Sequence Number=SeqID_56077
agatcatggtggattctatggcatgctccttaccttgagggctaggtctcggcgtttcggggattggccggtgaggcaccccggcaatcatgcgatagtggttgagcgagcgccagtgcccagcgacgaggactgcgcagagaggttgacccatgggcccaaggtgtcagcgctggtacagatgggttgggctgagtgggcgaagaaagagtag

SEQ ID NO: 14299 - DNA, 456 bp, Zea mays
  Peptide Sequence Number=SeqID_56078
atggtcaaatctttcgtcatcgcgctcgaaggtaaaggtctggtcatgaggaagggttttaaaggatcatttcctgatgctgcttcgtctgctaagatatttgctgtccttgctggcgtacaaagtttggtagcctgctctttgcgaaaactacgtggaaaagatgatggtatcaatgcaggagtggcaggctgttgcactggccttgcgctgagctttccaggtgcaccgcaaactctgattcagagctgcctgacctttgggactttctcgtacatcatagagacgctaaacaagcagcagcccgcactggcgctaccactggctacagagattaaggatcaaaaggctggacaaagtgttcttcctcccttcacgctccctcttccgcaggatgcgatggatggattttctaagttccagaactttttgtcgtcgaaatttcagggaaaatga

SEQ ID NO: 14300 - DNA, 1251 bp, Zea mays
  Peptide Sequence Number=SeqID_56079
atggcgcagccggaaaatggcgtccggccgccgctgctgcggacggacatggaggagccgccgcgggtgagcgacggaagcgccaccaaggagcgtgtgcggctcctggagcgggaggtggcgtcggcgaagcagagggagatgaagatgctggagtcgctggtccagcagaccaaggagctggagcaggccaagatcgcgctcgaggaggcctcgctcgaggtcgccacgctgcgtcagcagcagcagcagcagggcgagggcggcgccgctgctgagccggccgtgcaggcgcagcagtggagcgtcatggacctcatgttcggcggcgtcgacgaggagatcaacgggctgagggccaagctccgcgcggcgcagcaggccgaggagcggagccggaaggcggccgacgagctcgccgcggcgctgtccgcggtcaccgtggaggcgaagcaggtcaaggcgtggctctccggcgcgcaggccgaggtggaggccagcaacgccgaggccgacaggctccggggcctgctccagggcgccgaggcggagctgtggtctgccaccgagcaggtcggcgcgctcacgtccaactggaaggacgccgcggccgggtggcgcgccagggagaaggcacttgtggcgcgcgcgcgcgccgccgaggaggacgccgccgccgcgcggagggacaacgccggcctgcgccgcgcgctggagcaggcggtcgaggaggccaacgcggccgccgaggcgctcgaggccgccggcgccgacaacgccggcctgcaggaggccgtcgcggagaaagagcgcgccctggaggccctgcgacgggacaacgagggcctcagggccagcgaggccgcggccagggcgcgcgccgaggagctccagggccagctcgcggcgaaagagcgggagattccgcttgtggagaagtggagacgcgaagacgcgcagggcaagctggtgagctccggaatgttcctgggatccgggcggctggtcccgggacggaaggaccggatgttcgcgtcgctgagcaacatcgcggagctcaagtcggcggcggcggccgcggcggccatggacgactacggctacgagttcgaccacctggacgtggggcagccctgcgacgacgccacggagcacaagatcaagaggcggtcgatcctgcgcaaggtcggagatctcttcaggaggaggaggagcccgaacctcgcgccggtgctgcatgaccactactag

SEQ ID NO: 14301 - DNA, 222 bp, Zea mays
  Peptide Sequence Number=SeqID_56080
atggcggctggcctgggggagctcgccatggaagaaacccctgcgcgtagatcagaggggggcgagctggagctgggcgacgccatggagaggggcagggagctgggaacaggaagcagggggacagatccgaccatggccaggagagtacaccggcgaggcttggtggaggagcaccgagcacggctcaaggaggaagaggcggggcgagtagggagatag

SEQ ID NO: 14302 - DNA, 474 bp, Zea mays
  Peptide Sequence Number=SeqID_56081
atggacaaaggcaagagaggtcacggctcgtcccgccatgccggcgacaagcggaagcaggatccgagccctccctcggaggcctttggtgactcggagtactcggaggaggaggtttcctccgagtccgaggggtcgctcgccctcgcctctcccccgacatcgtccgatgattcggacgactcccaagggatagctgcggaggtgtggacgtacatccactccgtcgagcgcaccggacttgaggagtcagatgagtcggaggtctcctctaatgaggaggactcctttggcttgtccgtggagcagagcggcgacgacagtgacgacgagggtggtgacggtggcggcgacggcggcgacggtggtgaaggcgaagacggcggcggcaagggcgacgaaggcgacggcggtggcaacggcggcagtggcagcggcggcggcaaggccagtggcaaggcgccactagtttaa

SEQ ID NO: 14303 - DNA, 339 bp, Zea mays
  Peptide Sequence Number=SeqID_56082
atggacgagatgtgtcgtagctcggtcaacctcaaaggtagacgaacctggagggcaagcaccgcggggcatggcgaacatcaccgcatcctcgcgaattggggaatggccaggcttcgatgccgcgatcggattggcatcgtgggggcacgcgtaccactgtgtttgggcatcgtcggggacaccgtctggttcccatcactcgtgtggtcatcgagtttccgtccaaccgtgactgcccccgccatgaccggtcattatgttaattggaacatggagcgaccacccgggaaaacagtgctaccacaagggtttaatgggacacccttggctgattaa

SEQ ID NO: 14304 - DNA, 303 bp, Zea mays
  Peptide Sequence Number=SeqID_56083
atgacgacggcggttctcagccccttacggaagcaaggagacgtcagcaaggacccaacagccccgacagctgtgcttctacagggctcaagcgctcctccgacgaccacgacatcacatgaacaaggctctagcacctctccgactgccacgatggcatggccctcatacgagatggtggccgcgcgggaggacgggctgacggactggctctctctctccctcgcgaacgcttggaccccccggggtcgaaacgccgacaagagaacaaaattatccaagtggagaacttatcagatatag

SEQ ID NO: 14305 - DNA, 1467 bp, Zea mays
  Peptide Sequence Number=SeqID_56084
atggacccgtacaagcaccgcccgtcgagcgccttcaacgccccgtactggaccaccaactccggcgcccccgtgtggaacaacgacagctccctcaccgtcggcgcacgaggtcccatcctgctggaggactaccacctggtggagaagctagccaacttcgaccgcgagcgcatcccggagcgcgtggtgcacgcgcgtggcgccagcgccaagggcttcttcgaggtgacccacgacatcacccacctgacgtgcgccgacttcctgcgcgcgcccggggtgcagacgcccgtcatcgtccgcttctccacggtgatccacgagcgcgggagccccgagacgctgcgcgacccgcgcgggttcgccgtcaagttctacacccgggagggcaactgggacctggtgggcaacaacttccccgtcttcttcatccgcgacggcatcaagttcccggacatggtgcacgcgctcaagcccaacccgcggacgcacatccaggacaactggcgcatcctcgacttcttctcgcaccacccggagagcctgcacatgttctccttcctcttcgacgacgtcggcatcccgccgactaccgccacatggacggatccgggccacgccaccaaggacctcacggacgccatcgcggcggggaacttccccgagtggacgctctacatccagaccatggaccccgagatggaagaccgcctcgacgacctggacccgctggacgtgaccaagacgtggcccgaggacgcgttcccgctgcagcccgtgggccgcctggtgctcaaccgcaacatcgacaacttcttcgcggagaacgagcagctggccttctgcccgggcctcatcgtccctggtatctactactccgacgacaagctgctgcagaccaggatcttctcctactccgacacgcagcgccaccgcctcggccccaactacctgctgctaccggccaacgcgcccaagtgcgcacaccacaacaaccactacgacggatccatgaacttcatgcaccgccacgaggaggtcgactacttcccctccaggtacgacgccgtcaggaacgcgccgaggtacccgatcccgaccgcccacatcgccggccgccgagagaagactgtgattagcaaggagaacaacttcaagcagcccggggagaggtaccgcgcgatggacccagcaaggcaagagcggttcataaccagatgggtcgacgcgctctccgacccccgcctcacccacgagatcaggaccatctggctctccaactggtctcaggccgacaggtctctgggccagaagctcgcgagccgcctcagcgccaagccgagcataactcttgtagaagacagaactcgtccaaaacaacatcgacactgcattcatggttattgtgcagaagcagaactcttggtttcagttgaatgtttggctgggtttccatccgaataa

SEQ ID NO: 14306 - DNA, 531 bp, Zea mays
  Peptide Sequence Number=SeqID_56085
atggaggcgatcgcgagacagaaggtgggcttacctccaaggattgtggcgttcggagccctgcccacggtgtggcgtggaatcacggcggcgcagcggctccggcacaaggtcaccgatgtcggatacgagtttctctacctatggcggtgcacagtggtcacaaggcatggcccttcctttatacgcatcggggagggcgatatccagccgaggagtccgtggcgggcggcgcgagtcgtcgcaacagatttcccaaagaagcggaggtggatttggtgcgtggatttgctcgaggagtcgcggacacgccgcaaggtccgcggtttgtttgaaggggacgaaactgacgatccgggcccactggcaagtgacaccatgaaaaagaaaaagaaaagggggcgcaagtgggccggcggggaggaagctgggccgagggcgtcagaatcggcccagggtagaagacgcattaagagattcagattgggtgttggcaatgcaagtggaactcaacaacttcacaagaaataa

SEQ ID NO: 14307 - DNA, 438 bp, Zea mays
  Peptide Sequence Number=SeqID_56086
atggaggcgatcgcgagacagaaggtgggcttacctccaaggattgtggcgttcggagccctgcccacggtgtggcgcggaatcacggcggcgcagcggctccggttagcattcaccgttgccctgatggtcgaaccctgccgccgagtccacgaacgacctcaccaaccactcgtgatgcaccctgacccaagaggagattcccaggcacaaggtcaccggtgtcggatacgagtttctctacctatggcggtgcacagtggtcacgaggcatggcccttcctttatacgcatcggggagggcgatttccagccgaggagtccgtggcgggcggcgcgcgtcgtcgcaacagatttcccaaagaagcggaggtggatttggtgcgtggatttgctcgaggagtcgcggacacgccgcagggtccgcggtttgtttga

SEQ ID NO: 14308 - DNA, 657 bp, Zea mays
  Peptide Sequence Number=SeqID_56087
atggaggaagcggaggcggaggaggagaacaagagtaccaaggctgcgggaatgggatgcaagaagaatgtgacgaggctccagaggtcattcctccacctgtccagagcgctcgggaagctccacggccgccggggccacgggaacgcgaacggcgaggcgtcgctgtcctcgtcgtcctccgctgccacttcgtcgttcctctccgggtcgacgacgagggcggctcgtcgtcagcgcagcactgttatcacggcgaccgcggggagcgaggcggacgagcccaaggcggtggtccgtggcgccggcgtcgcggtggccacgctctccgcggcgccgtacgaagacttccggcggtccatgcgggagatggtggaagccgccgcggggacggggagcggcggcgccgccgcggcggccgtggactgggacttcatggaggagcttctgttctgctacctccgcctcaacgaccgcgccgtgcacaaggacatcctccgcgcgttcaccgacacggtcgccgcgatccggcgccggcgcagggcggcgaagagcagccgcacgcgtcgtaggcggcgcaggcagccgaggcccggaggagacggccccggccgtggcgacgactgtgacggcgcggaggcggtgacctcgtcgtga

SEQ ID NO: 14309 - DNA, 279 bp, Zea mays
  Peptide Sequence Number=SeqID_56088
atggcacaaaaaattgaacaactgggagctgatttggagactagggataagaaccactttgggatcaatggtgtcgcaaccaggttcgccctcgactcgattggagaaccaaggttaaacacatgcactggtacagggttggagataaagtttcaacctgtgagttttgatgtagtagggctcgattaccacctatcagcaaaggtagctgcttgggcagacaagttttggatcttggcatgggcacctttgggaattgggatggactggaaccagtag

SEQ ID NO: 14310 - DNA, 817 bp, Zea mays
  Peptide Sequence Number=SeqID_56089
atggccaaattccccggtgctatgcctacagaagcgcaaggtggacacgatggaggtgtacttaccagctgcggctcgacacagggcactgcccacgcgcacataggtctgcggcacggggatgtcttccgcgacaccccgccgcgagtacgacggcggcagtacaagctcccctccccacgcccaggtctcagtcggaatggtgcacgcgagttcggtcaggagcgcgccatgcgcgagatctacgacccgcatcgcccggagctagaagaatcggtccacccgatgggaaggaagagggccgcggatccggtgatatttatcccggagctcggagcatatcctcgcggatcaacaacagccgggccagctaccgttcggggtccggccatggcggtcaaagtggctgttatcagagcggatttcggcggccggcgcgcggggacagccagagtagcgaccccatatgttagtgggaatggggcgcacgaccatgcaggtgagagggatgggataactgggccgcgcagaggaagtgaaggccgtggtgggtgtgatccttgccctcaagtttggaaaaggctaggaactgagcaagggcgtgagcacagtgctggtggtggccatctgcctcttcgtggtggcctacaaatgatgtcgcgctgtgccacctccgtggccgtctttgtgctcttcacctcgttcattatcgccatgtccatcttcatcatcctcttgctgacggagaccaaacatgggacacaaattaaggcaacctccaccagcagcagggagaacgtccaggagcatgaacatg

SEQ ID NO: 14311 - DNA, 126 bp, Zea mays
  Peptide Sequence Number=SeqID_56090
atggagggccacgggaagttggagctgggcactcctccagctgccaatggtgagcgtccggtgaggcacggcaggataagcgagcacgagggaaagagacgacgacttcaaaagggtaatctatag

SEQ ID NO: 14312 - DNA, 549 bp, Zea mays
  Peptide Sequence Number=SeqID_56091
atgggcagaggcaagagaggccgaggcttgcctcgtcgtgctggcgacaagcggaaacataccccaagtcctccctcagaggacttcggcaattcagagtattcggaggaagtttcatccgggtatgagggatcaccggctctcgcttctccctcgacgtcgtacgatgacttgaacgattcacaagggttgtccgctgcagtctggatgtacatgcgtgtcatcgagcgcgccgggctcgaaggctcggatgagtcggaggtctccacggatgaggagaactcctccagctcgtttgaggagcggagcggcgaagacagtgatgatgagggcgacggcagcggcaacgacagcgatggaggtgacggcggcgaaggcgacgacgacgacggcaagggcggcggtggaggcgacggcagcagcggcggtggaggcagcgatggcgatggtggcgacaagggtgacggtggctatggcggcagcaagggcgacagtggcgacagcggcagtggcgacaacaaggccagtggcatagcgccactggtctaa

SEQ ID NO: 14313 - DNA, 1689 bp, Zea mays
  Peptide Sequence Number=SeqID_56092
atggcggcgccggcttccgcggcggccgggcgcggcggggccatgtcgtcggacaacgccaagggcctggtcctcgcggtgtcgtcgagcgccttcattggcgccagcttcatcgtcaagaagatggggctcaggagggccgccgactccggcgtccgcgcgggtgaaattgctaattttgctgcttatgcattcgctcctgctattcttgtcactcctcttggtgcactcagtataatcatcagcgctgcacttgcacatgccattctacaggagaaactgcacacatttggtatacttggttgtgttctctgtgttgttggatctatcacaattgtgctccatgccccacaagagcgtgacattgattctgtaaaggaagtttgggatcttgcaactgaaccagcagcccgcgacgaccgtgcagaggtcgatacagcccgcccgttccggtcagtcaagctggaggtggccgtgttcagcgcccgcatagttgttggcagcaccaacagccattccaggcacagcagcggcgccaagggcgaggcggaggtaatgcctgccattgtgcccatgtactcggcgccttcgtccccggcatcgtcgctcgcgtcgtcacctcctccggtcaacaagccgtgcagcgggcgcggcggcgacggccggggcgacgaggcggcgccggcaggcggtctggcgatcgcgcgctccatccagaagctggaggccgacgtgtcggagacgcggcatgaggtgtcgcggttcaggaagcggtgcgccgagacggaggtggcgctggccagcctccgcgcgcagctccaccggggtctctcgacgctcgccgggacggaggccgacagggcggccgcggcagcgcggcgcagcgtcgggggcgacacagacgactcggcgtcgtcgtcgtcgctcacgctccggagcgggcggtggggcggcgggctcgccgcgagcgagtgcctgagcctcggcgaggtggactacggcgtcgagctcgtggggagccggaggcggaatgtgaagctcgtcgtaccgctcatcggcgacatcctcttttccaggaggcggagcaccaatgagaagggcgacggcggcttctacaaaattcgctccgtgcctctccctccgttcatggccacaccgccgccgccctgcgacgcgaatctccattgctaccttctcgtcctccaagacccacaaaaggcgaacaacaaaaacagatcagaactttttcggcacgttttctttgcttcatttcgttccattccacccccacgaagaagagcagcagcggatgaccccgttgatgtcatcgccacgcacgtcgcctcgcccttcttgacgacgcgcgccggccggccggataccatgccgggcaagcaggaggagggcggccaaggcccgccgggcagcagcgtgtgcttgtggctggtgacggtgctgctcctcctctccctgctcgccggcggcgcgtgcctcgcggcctacgtcctgctgccgccgcaggagacgccggcctggctccccgccgtcggcctggcgctcgtcgcgctcccgtgggcgttctggatcctcacttgcgcgtaccggtgcgccgccgcgcgggccgccgagcgcaggacgatggccgtggcgccgtctcctggtagcatgtgctcgcgctccggctcgtga

SEQ ID NO: 14314 - DNA, 729 bp, Zea mays
  Peptide Sequence Number=SeqID_56093
atgcagtcttgtgcggagaggagagagaaaccgtggaaaaggggagtgcagaagggtgcaaaagtggacatggacttagacaaaggggtaagatgtgaatcaaggcaagaaaaaagggatagaagaagtgatggttacttagcatttaaaggtttatctgacgacaagctttatttagtagattttactaaagaaaatgtcgatctagacgcatgtttacttgctaagaccaacatgggctggctttggcatcaccgtctagcacacattggaatgaaaaaacttcataaacttataaagggagaatatgtgctaggactaaacgatatatattttgagaaagacataccttgtgcaacatgtcaagcaggtaaacaggtgggaacaagccatccaagcaagaatgtgatgacaacatcaagaccactggagcttctccacatggatctcttcggtctcgttgcttaccttagcatcggtgaaagtaagtatggtctaataattgttgatgactattcccgcttcacttgggtattctttttacaggataaatctgaaacccaagaaactctcaagcgcttaaggagacatactcaaaatgagtttgagctaaaagagaagaagataaggagcgataatggatctgagtacaagaatcttcaagtggaggaatatcttgaggaggaaggcatcaagcatgagtttgcgctccctacacaccacaactaa

SEQ ID NO: 14315 - DNA, 303 bp, Zea mays
  Peptide Sequence Number=SeqID_56094
atggtgcttgcgcatttagccccaaagtggcctcctcgagacctcgatgtcccttcctccagcggtacagaaggtgctcagggatacgaggaggggaaggaacaagatgagttccaagaaagcaacaaaccggggtttggagaaagagagttgccagatgaaaaggatcacaagggccattccactgttgcttctggaaaggggggaacggcttcaggagatatggtgaagacgaatgactatgggcgctacgatccaactccggcgttctccaagcctcgctccaagcttatacccaactaa

SEQ ID NO: 14316 - DNA, 558 bp, Zea mays
  Peptide Sequence Number=SeqID_56095
atggctgcattgggttgtgtcaagccagaaaaatttgttaagcttgttgggtactgtggtattgacaaacgtgccattgatatgtatacagctacaggaaaggtcactacaaaagtagatgtgtatgcatacggtgtgatactaatggagatgattacgggaaggaaagtactcgatgactcattacccgaggatgaaacacatcttgtaacgatcttccggaaaaatatgcttgacagagagaagttcaggaagtttttggaccccgccctggagctcagtgctgaatcttggaacagcttgctggaggtggctgatcttgctcgccattgcacggcgcgggaaccacaccagcggccagacatgtgccactgtgtgaacaggctttctagcctagtggatcagtggaagccaacgaatgttattgatgacgacgaggagggtgggacaagcgagatgggtcttcaccaacagctagagagatggagatgcggtgatttcactatatcagattcggagtcattcagcacatacaacacatcaaggaagtaccattga

SEQ ID NO: 14317 - DNA, 834 bp, Zea mays
  Peptide Sequence Number=SeqID_56096
atggaggaacatcagcaatctaatcatgcagtgggaaggaaaggtgtgggaaggaaaggtgccaatgaagtatctgaacggatcgtgagcgcatctgtcggcgcgaaccttataatttacctcacaacgaagtatcaccttggcgctgcaagcagcgccatcatcatcttcgtgtacctagccgccgcgaatttcctgccggtgtgcggagccatcgtgtccgacgcattgctaggtcgctgccgcatggttacactgacgcttttctcctgcactattggaaccacacttctgtgcctgacatcggtgatcgcgcgcctgacaccgccagattgcgtgcagccaaacgaaggctgcgcgccgcctactccgatgcagctgctcgtgctgtgcgcctctcttggcttcatggcgctcggcgcgagcggcgtccgcccctgctgcctggcgttcgccgaggaccagatcgcgcactgggacaccgcgaagaaggaccgtgcgctccgggctctgttcagctggtactacgcgtccgtggggttctcgcagatcgtggccgtcaccgtgctcgtgtacttccaggacaagatgggctggaaggtcgggttcatggtgtcggccgccatcatggcgtccgtcacgctcgtgaactgcgcggcggcgtcgttctacgtgaaggtgaagccgcagaagagcatgtgggttggcttactgaaggtggtggttgttgctgtcaagaaccgtgaccttgtgctgccagaggcagatcatggcgctcagttccattgtttaccgggttcgacacagacggttccatcaaacaaaatcaggtga

SEQ ID NO: 14318 - DNA, 648 bp, Zea mays
  Peptide Sequence Number=SeqID_56097
atggccaagagacgcaagctctcgacagacgccgcccgcgacgaggctgggtcgcacgggaacggcaaggggaaggaggtggcgccggcggcagagccagagccacagccacccaaggactacatccacgtgcgagcgcggaggggccaggccaccgacagccacagcctcgccgagcgggtgaggagggaaaagatcagcgaacgcatgaagctgctgcaggacctcgtgccaggctgcagcaaggttaccgggaaggccgtgatgctggacgagatcataaactacgtacagtcgctgcagtgccaggtggagttcctgtcgatgaagctgtcgacggtcgacccgcgccgggagctcgacgtgggctgcttcgtcgtccccaaagacgacgtaacgatgcaggccaacaggctgtgcgcgcccgcgacgtcgtcgtcgagctcagccttctgctacgccgcgcggagtgttgttacgaacgccaaaggattcgagacgccgctgcccttggcgaaccatggcgtcgcggcggacgacaggccacttgagcggcggactcgagacgcaggtccccagtctacgtgtgagctggacgtgtcaaccactctctatttgtaccaaacagagtggagactaatcatttag

SEQ ID NO: 14319 - DNA, 2337 bp, Zea mays
  Peptide Sequence Number=SeqID_56098
atgaggagggcgaggattctcctcctccccctcctgctcctcctcgccgtcgccggccccgccgccgcggcgacggccatgaccgcggacgcgggcatcatcttggacctcgccaagtcgctgactaacccgccgccgtcctggaccggcaccgacgtctgcggcggcgtctccttcagcggcatcacctgcgacggcgccggccgcgtcaccggcatcaacctcgtcaagctgcatttatccggcaccctttcctcgtccctcgccaacctcacctccctccagtcgctgcagctccaaggtaatgtgctggagggcgacgtgccctcactggcccgaatgggttccctcgagaccctcgttctcgacggcaacgccttctccgccctgccgccggacttcctcgagggtctcccctcgctgctcaaaatcagcatggacaacctccctctcaatccatggagtatccccgacgccatcgcggggtgcgccatgctgcagaccttttcggcttccaacgcctctgtctctggttccttaccggcggttcttgccaacctgacatcgctacagacgctgcggctgtcgtacaataacctcaccggggtcctgccggtggggttagaggcgttgggtgcgctggagacactgcagctaaacaaccagaagtcggatggcaagctgtcagggccaattgacgtcgtggcgaagttgccgagcttgaagacactgtggcttcagtccaacttgttcaccggcccgatcccagagtttgacccaaactcacagctggagatcttcaatgtcagggacaacaagctcaccggaccggtgccaccctctctttcagggatcgcaagccttcaggatgtgtcgctgtccaataattttcttcaagggcccaaaccaaactttacagctaagactgtggatttgaaatcagggaacgggttctgtcgagaagactctgggccatgcgatccgctggtgaccactctgcttgaggtggctttaggttttggatacccattgcagcttgcgaagtgggcaggaaacaacccgtgcgatccatggcctggtatttcctgcatcaaaatggatgtgactcaaatcaaattgcctcgccagaacttgtcgggaattatttcaccggcttttgcaagcctgaataggcttcaacggttggatctgtctaacaatcaactcaccggggtgataccagatgctttgacgacactggaaaccctcaaatatcttgatgtctcaaataatcgccttactggacaagtgcctgagtttaagcagccgaatataaagttgatgactgcaggcaaccggtttggggaatcaggtggtgatagtggagggggtggctccaatgatgggtcctcatcttcaaatcctacaggttcacataactcaaagtcaaatgtgggaatgatcattggaattcttctatctgtcattcttcttgtcatttgcattgggcttttcctacatcatcgaaggaaaaagaatgtggacaagttcagtcctgtcccaacaaagagcccttctggtgaatcggagatgatgaagattcagatagttgggacaaatgggcatagcagcataagtggttctgtcccaaccgagctttacagtcattcaagtgttgacagcacaaacattgctgacctcttcgagtcccatgggatgcagttaccgatgagtgtgctactaaaggccacaaacaactttgatgaggactacatcttaggtagagggggctttggggtggtttataaggggacactcaatggcaagctcgttgctgtgaagaggtgcgacagtggcactatgggaactaaagggctgcaagaattcatggctgagattgacgttcttaggaaggtgagacatcgacacttggttgcattgcttgggtactgcacccatggcaatgagaggctcttggtctatgaatatatgtcgggaggaacactgcgcgagcacttgtgtgatcttcagcagagtggttatactcctcttacatggacacaaaggatgacaatagctttggatgttgcccgggggatagaatatttgcatggtttggcgcaggagactttcatccatagggatctgaagccttccaacatattgttggatcaagacttaagagccaaggtttcggactttggattggtcaagcttgcgaaagatacagataagtccatgatgacaagagtagcaggaacatttgggtaccttgcacctgaatatgccagtatgttcacttctcatttctataaatattttgttctcaagtacaatcagcttttgtctcgcatataa

SEQ ID NO: 14320 - DNA, 183 bp, Zea mays
  Peptide Sequence Number=SeqID_56099
atggaggagcgaaatgtgcatatgagcgagagaagtgacaacgtcaatgacgagtgctcaaaccctataccacgtcggcaaaagatgaggaaggcagcgaagggctcggtcgcgactggggatgactgcggcggcgtagtggacagcaatggagcgtatggtgatccaccatctatggtttag

SEQ ID NO: 14321 - DNA, 156 bp, Zea mays
  Peptide Sequence Number=SeqID_56100
atggaggcaagaagagcttcgaggtaccgagtgcatgggagaagggtgttggacctcataaatggcaatctagagcaagtcttggagacattgagttttggagtccaacatcgaccgcaaataggccaaaaggagcaaaacgatgaagaaggttaa

SEQ ID NO: 14322 - DNA, 237 bp, Zea mays
  Peptide Sequence Number=SeqID_56101
atggaggcaagaagagctttgaggtaccgagtacactggagaaggtcaaaaaggccgaggaacccaaagccagaggtgaagaagaagacttgcaaagttaaggttgatcgagttgagaagagctatgatgcattagggatcactaccttaggacgtgacttacaaccaatgagggtgttggagctcatagatgacaatctagatcaagtattggagacttggagttttggagtctaa

SEQ ID NO: 14323 - DNA, 249 bp, Zea mays
  Peptide Sequence Number=SeqID_56102
atggacagcggtagaatctggtactgcttgtggcctgtgggacaggatccggcctctggcaatggttgcacccagcagaggcatgcaggcaccaggcagcaacgggagccaatggaaatcagtggaagggatcaggatccggcctctggcaatggttgcacccaacagaggcatgcaggcaccaggcagcaacgggagccaatggaaatcagtggaagggatcaggttctgggcagggcagggatgtga

SEQ ID NO: 14324 - DNA, 189 bp, Zea mays
  Peptide Sequence Number=SeqID_56103
atggagcgatcacctgagacaacagtgcaaccacaaggactatatggctctgtttcaagaatcttcggctttggtatggagaacttctcttatgacagaacgaagggaaataaagaatgggcgatgaagatagaagccaaaggacttcggctggacatgttgacaaagctcaagtacgataacgactga

SEQ ID NO: 14325 - DNA, 216 bp, Zea mays
  Peptide Sequence Number=SeqID_56104
atgacgacggtggtgcggtcgatagcaaggagacgtcagcaggatcccagcagcaccgacagctgtgcttctacagggctcaagcacttctccaacggccacgttatcgcctacgcagggctcaagcacttctccgacagccatgttggcatggaggtccagggccttcatgcgggaaaggtcgagcgggagaacgagctaactgagagcacctaa

SEQ ID NO: 14326 - DNA, 702 bp, Zea mays
  Peptide Sequence Number=SeqID_56105
atgggactgctgccgaaggcccccacacccctgctgaagaagaaactagcccgattggggcaggacttggagaaagggaaagggcctgctgaaattgaggaagcgaaaaaggctatcgagttgacacaccactcggcgaagggcccttcgaccaaatccttggtggctgaaggtaccgagttcaccacgctgtggggaaggcttcagttcggctgtgctaaaaaggagaaatctttcaagatactagagaaggactttattgagagtcggaccgaagtccagaggctcgaaacttcaaatgttgaacagaaaaatcgcatcgcatcgcttgaagctgaaatggagcggatgaagaaggattataaatttgaaatgacgaagctgaggcaatcgtctgctaaagtggctgtcaacctttgcagtgctcaagtgaagatagatgacatgaaagccgaaataaaccatactggtcaaagaaatttctatctgagatttggaaaagggttaatcattgatgaatccataaagaatagagaaaaggttatgattgaagtaaaacataccgaagctgaagccatggagtttgctatcgaagccgaagctatcaccgctagagctatagagaaggctaaagatgatgagatcttgaagatctctaaacaaatttatgaagaggccatgcgaagcgacctaggaaactaa

SEQ ID NO: 14327 - DNA, 714 bp, Zea mays
  Peptide Sequence Number=SeqID_56106
atggcaccccgcggccgcaccctcctcctcccgctcgccgcggccactgtcctcgtcgcctccaccatcttcctcttcgccgccgtcggcgcgcgctggcggccggccgacaccggcctccccgtcccgcccgacgccttccccacgggccacgtcacggacggctccctgccgccgccgcgctaccctggggggctcaaccagcagcacagcgatgagtactggctcacgctcgacctcctctcctcctcctccttctccttatcgcccccctgcggccgccactccgcagtgcgtgtcaccgacccccgcgacgccgacctcgtcttcgtccccttcttcgcgtccctcagctacaaccgccactcccggcccttgccgcccgagaaggtcggcagggacaaggcactccaggagaagctggtggggtacctcacggcgcggccggaatggaggaggttcggcggagccgaccacgtcatcgtggcgcaccaccccaacagcttgctgcacgcccgggcggcgttgtcccccgcagtgttcgtgctgtcagacttcgggaggtacccaccgagggtggccagcttggagaaggatgtcattgcgccatacaagcacatggccaagacgttcgtcaatgactcggccgggttcgatgaccggccgaccctgttatacttccggggagcaatttacaggaaggagattatataa

SEQ ID NO: 14328 - DNA, 1161 bp, Zea mays
  Peptide Sequence Number=SeqID_56107
atggcgtttcccgtcgacacctacctcaccaggttcgtgtgggatgagggcaagtaccccacaatgtcgtcgctcaaggagatcgtcggcagcatccagtcgcaggtcgccaagatcgaggatgacatgaaggtcttccttggtgcactcaccatttggatggctgtggagaacttgttgtcgaagattttgcggttgcgttccttccacaaattccatatggtcttttggctggcagactgtcggtcagttgaccaagcagtgactgccattcgccttgtcgtctcctttccagagaaaggaatgctggttttgatcaatttgctttcttgcccagactgcgatggggatgatggtcaaatgcgctcatgtgtggagctgcagtccaaggtagcgacaggggaagcctttgctggtgcctgggaagggttccagaacattttggaggtccgagcagcggaatataacaatgtaaggagccagcttactgcaatcaacagaaagcaaagtgggagcttagcagttcgtgatctttccaatctggtaaaaccagaggatatggtctgctcagagcatctagtaacacttcttgctattgttccaaagtactcccaaaaagactggttgtcaagctatgaatcactcgacacatttgtggtacccaggtcatctaaacagctctatgaagacaatgagtacgcactctacaccataacactttttgctaaggttgttgacaactttaaggtccgtgctcgcgagaagggtttccaggttcgtgattttgagtatagtcctgaagcacaagaaagtagaaagcaggagatggagaagttactgctagagcaggaagttatgaggacctcgcttctgcaatggtgctatgccagctacagtgaggttttcagttcctggatgcacttctgcgccgtgcgcatatttgtagagagcattcttagatacggtctgccaccatcgttcctgtctgccgttcttgctccgtctacaaagggcgagaagaaagtgaggagcatcttagaggacctttgcggcaatgtccatagtatttattggaaaggcgaagatgacgtggcagttgctggtctgggaggtgaatcagaggtccatccttacgtctcattcaccataaactttgtttga

SEQ ID NO: 14329 - DNA, 624 bp, Zea mays
  Peptide Sequence Number=SeqID_56108
atggctgccacgtcctccctactccttgcctccggctccaggaggtggccagcaaccttgcctccttccccctcgccccagcagcagcgtctggttattttctgcctcgctgcaagaacgaggccgctggacagcaagaggggtagctggaggcgctcttccagtgccactggcggccggtcgaccgccgtctcgtcgtcgtcggaaagatgggttctcgaccctgcaggagacggtgactggcgccacatcggctacaaagtcgcgcgccctggggcgatcgagatagtctcggaggacacggcggtgaccgtgggccgggtcgccgacaaggcggacatcgtgctccccgtcgccacaggtcagctagctgctgttgctattatgctatcctccacgcacggtcgccgacaaggtggtcatgcagtttcaggcgctcacgcccggctggagaagaagggcggcagcctgctggtgacggacctggacagcaccaacggcacctacatcaacgagcgccggctcaacccgggcttccccgcgtccgtcgaccccggcagcctactcatcttcggtgacatcccacttggccatgttccgtgtaaggaagacggtggtggttga

SEQ ID NO: 14330 - DNA, 342 bp, Zea mays
  Peptide Sequence Number=SeqID_56109
atgtggccgaggggacatcaagaggtggaagagcgcggcaccgacaccgtcgttgcgggagagcgcgacgagcacgtccttagagcccacaacatcgcaaaggacggcggcgcgggcgagattctcaggcgcagactcgaggcgaaggcggagctcgtgcaacgagtgggggaacgccaggtcggcggagagaagggcacgatattatgtggtttccggagtccgcacctggcagccagctggtggaccggtggttgcaacggaacccgattccccgggagaccgatacggcgctcacaaccatccgagaagatctacagcaaccacggtgtaggagaatga

SEQ ID NO: 14331 - DNA, 474 bp, Zea mays
  Peptide Sequence Number=SeqID_56110
atgtccctcggcagctcggcgcagatggaccggagcagcaaaagatcgccgggacggcaccgcaggccgcagcgcaggctgcctaagctaagagtggaccagaacacgacgacgacccgccgtgattggagccgagacgcacggccggagccagctgtggtcaaagagccgggagggaggccctacgatggcggcgaacatggcgcgtgcccgctttgcgcacgttaccaggttgctcgtgaacatgtgcgcgtgctgtgctgtgtgaaaggatcacctacccccgggccccggtttgcaacagcgaagggagaccggagagcggagacgtcggtccactcccaactctccaaggtgctgtttggttcaagaaatgtaacttacccattacgttacaaatatgtgaaccaaacggcacccaagttgctggagcggaacgcagtttgctgcaccgacgccgagaggaacgcgtag

SEQ ID NO: 14332 - DNA, 459 bp, Zea mays
  Peptide Sequence Number=SeqID_56111
atgagggacctggtgtcgtcgatggagcgtcggtatgatccgacctccattaacaatgaactggtgttgattgttcaagtcccagacgatgtgtacgacgtgcacgatggtctggatgatcacttttgtgctactgcccctacccctaccatcaaccttggcgatgacagtgtcgtcgtcgagggcgcgactcccctatatggcagtagtgctgctactgcgactgcctccactatagcaagcataggtaggaagagaaaatgcacatccgatgtctgggaggacatggataagattttttccactaaaaatgatgtggaggtaagagtaggagctagatgtcatttccgcaagaaagaacttcatgcacgttctaccattggcattggccatttggctcggcacatgaaaaaatgcaaaacggctccatggtcgcactgggaaccagtctatgattag

SEQ ID NO: 14333 - DNA, 387 bp, Zea mays
  Peptide Sequence Number=SeqID_56112
atggcccagaggctttcgggccaacccggcacgtttttggcctctctgggccgtgcttggacacatgtcctggcccgtgacccgaaccggcacggcccgagtcaacagcgtgccgggccaggcacgaccctgttcgtgccgtgcctaaccgggctcgagccggctggaaactgggctagaataagattacatggtccaagttttacagctagtcgatacagtgggggacaggcaaccaaacaagagctatttacaaggtatacattcatctccatagaatcacagatcagagtacttggtgatttcgccttcatgttacgggactacgagcttgccttgtcaaactacagactacttgctactgattataagtttgataaggcttag

SEQ ID NO: 14334 - DNA, 459 bp, Zea mays
  Peptide Sequence Number=SeqID_56113
atggccgacccggcggagcaccgtccagcggaggaggacgaggaagccgcggcggccggcgaggatgaggacaccggcgctcaggtcgcgcccatcgtgaagctggaggaggtcgccgttaccaccggagaggaggacgaggacgtacttgtcgacatgaaggcgaagctctaccggttcgacaaggaggcgaaccagtggaaagaacgtggcacaggcactgtgaagctgcttaagcacaaggagaccgccaaggtccgcctcgtcatgcgtcaggcgaagacgcttaagatctgtgctaaccatcttggttttgacactggactgtattgcttatccccttcctccgaacgcacagtggtggcgacgactaagatgcaggagcacgcagggagcgacaagtcgtgcgtgtggcacgcgctggacttcgccgacgtggcggacccagaaattgactaa

SEQ ID NO: 14335 - DNA, 1116 bp, Zea mays
  Peptide Sequence Number=SeqID_56114
atggagtggcagcgcgggaaatgcatcggcaagggcgccttcggcacggtgcacctcgccgtgtacacggccacaggccgcgccttcgcggtgaagtcggtggacgcggagagcgcggcggccatggcgtgcctggagagcgagataaggatcctgaagcggctgagctcgccccacgtggtggcgtacctcggcgacgacggcgcggcggggccgacgaggaacctgcacatggagctcgtgcccggcggcagcgccgcggaggcggcggcggcactggggggcctcggggagcgcggggcgcgcggcgtcctgcggagggtggccgccgcgctgcggtacctgcacgaggacgccggcgtcgtgcacggggacgtcaagggccggaacgtgctcctgggctgccggggctgcggcgcgaagctcgctgacttcggcgcggcgaggctggtctcggacgccgcgacggcgacggccccccgcgggccgcgcgggacgcccgcgtggatggccccggaggtcgcgcgcggcggcgcggcgacgccggcgtcggacgtctgggccctgggatgcacggcgctcgagctgctcacggggaggcggccgtggtcggagctcggcggcgccaccgaggtcggcgagctgctgctcctcgtcgggttcggcgggacgcgccccgcgatccccgcgtgcctgtcggacgcgtgcctggacttcctcgacaggtgcctccgccgcgacgcggcccagcggtggagctgcgagcagctgctgcgccacccgttcctctccacggacgctgccgacgacgccaccgacccgtggccgtctccgtctccgtctccatttccgtcgcctcgcgcggtcctcgattgggccccgtcggattcggactctgaggcgctggacgacgcggaggccgagagcaagcacgaggtcatggcgcgcgccaaggggcgggtcgccgaattggcctcaaacgggccgccgactagctgggactgggaggaagaagtggggtgggggaccggggccaccttggcatctgacacctgggccccacctcccagttccgaggcgccaagaaacggcagcgcaaacagcgacgcctgctga

SEQ ID NO: 14336 - DNA, 131 bp, Zea mays
  Peptide Sequence Number=SeqID_56115
atggccgcgcagggtgacagccgctgggctacctcgaggaggagcacagccatcagctcgccccacacgcgggacaggcgtcgaggcagcagcggacgcctggccgttgcccaaggcgagagcacacccag

SEQ ID NO: 14337 - DNA, 255 bp, Zea mays
  Peptide Sequence Number=SeqID_56116
atgatcgtgatagagtccttgccttgcttcctcctgttgctgctggctccagcctctactttggcttttccaatggatggcaatgcatcgttgatgtatctacttaattgcctcctgtttccgtcactgtgtggacagattgtaaaggttctggtagcagctaatgttgtggtcgactggtcggcaaatgttcttgtcaagtcctgtatgctacaggttcaggaacagacgttcgccaaactgaattggttctag

SEQ ID NO: 14338 - DNA, 633 bp, Zea mays
  Peptide Sequence Number=SeqID_56117
atggagatttctggaagggctgcggcggcggaggcggaggcgctgattgcgggcgggatgcgggacggggtgcggctgcggcagcggcagaacaatgaggtatcgataggggcctacattcgaatcactggaaatcaacgacaattgttcagttacttgcccaaacaacgaacgacttattgccacagagctaaggatgacagtgtgagtatcccctgctgtgtcgataggtcaagtaggcgctgcagcctgcactttgtcattaggagtgcaagtgcaagtgtacgctccttggaagataccctggtgttcgctttctacttccaacaagcttgcacccatcatatactggtgaatgcttctctgccaggacatgcagaaaaactgttcatatcaacagaaaacccattatttactgctgatgatgttgtgcaagatactgtggatagcagttactcgtctccgacggacatggactggactgtctcaagcttcgaagcccacgaaccctatgactatgagcacagaacaggaaccacaggatcgagggaaccattcaaagctgtcctttgtgcacatctgggaatcaaatctccccactcttccacaaaggttgctgcggcattccgttag

SEQ ID NO: 14339 - DNA, 1447 bp, Zea mays
  Peptide Sequence Number=SeqID_56118
ctggagtcaaatcaatacaagtgacaaaaatattgacgtacagtcgaaggctatccctgaagaagttttagcagagctcccaaaagagaaaagaagccctggtgttgaagctgcaaaggattttaatgcttctgcaaatgctggaacaagatcaagtgtagacactcatattagctggaacaacagcccaaaaattgcttctgcatgtagaggctattataaatctcctcgtttgtctgaaataatctcagcccgggacaccaattcaaaaacaaatgaagaagtcaagacatttctatcacaattgtctactgcacggggatttgatagctctttgaatgagatgacacctagaagtagcacacatattgatgactaccgacaacatgatgctactggtatgacaccatttcttgataggaacaactcaaatctagattcatttgatgccaacacaactagtgaagatgaaggtgaaagttctttggaacacttgaagaagcaggctaagtttaacaagaaaaaaatgggtatgctttataaggagctcgaggcagaacgaagtgcttcagcggtggcagtaagtgaagcaatggctatgatcaacaggttgcaagaggaaaaggcttcaatgcacatggaagcactgcagtatcttcggatgatggaagagcaggctgatcatgaccaggaagcaattgaaaagctaaatgacttgctaacagaaagggagaaagaattacttgacctagaagctgaacttgagggttaccggagcaagcttcatgatcaaccatttgatgttggaaaatttggtgctactgatggagctatggcattcagagtcttggaaggctcagatttcatgaggcataccatatttgattttgaagatgaaaaggcaaagattttggagtccttgcacagattggaggaaatcctaggcatgcccagcattgacatgggtgatgcaaatgattctctacagaacagtctactgagtgatcagtcaatgcacattagccaggatatagaaaattcagagttggaaagtttatcgttgcctcgagaggacatgattagtgaatcaatttcttcacagtgctatgatgagcaggaatctgttaaatacatgcataagcacatgcacaatcacgaacaagatgataatgaatccgttgataagcaacaaaagaatgtaacttcatgttcccactcagatgatggaaatattcatactatgaaaagtgttaaacatgaaatttctctccttaatgcaagattcaaggcacttgaagcagatcaggattttctcaagcaaatcctaagatctcttaatgttagcagtgatggagtagaatgtatccaggagataacaagccatttgcgagagctgcgaagaatcatggcagaccaaagggacatgacagtttttatgaggtcatga

SEQ ID NO: 14340 - DNA, 549 bp, Zea mays
  Peptide Sequence Number=SeqID_56119
atggtgtccagcagcggtgcgacagcagagcatgtgcgcagagcagttcgggcgggagagcgtagagtcgagcacggaaggagagaagagcttggggagggagagggtgagggctcggcatcggattttataggggagaagggggagagtaagagatgcccggggaggtggccggccatggcttcaaggctgccattgatggtgtccatcaatagggacaggggcgcggtcggtccttgcgcgcatgacgcggtcctgctcggtgttcggtccttggcgctgcacgggctcggatggcgcggtcggagtgcagggcgcgggtggctgcgcgtcgagcagcttctggcagtcggggtcgctcggccgtcgggttcggggcacgaggctggctgcaggcgcttctggcgtctcctggcggcgctccagagagagaagggagagtggaaagagagtggggccgggtgggtggtggaggctgccagggagagtggcggcacaggagcgactagggttagggtgcagggggcggcgcggcttacatgggcctaa

SEQ ID NO: 14341 - DNA, 1056 bp, Zea mays
  Peptide Sequence Number=SeqID_56120
atggagctgttcgagcgcgcgaggacggtgcggctgcggagccaccacgacaagtacctgtacgccgacgaggacgaggtgcacgtgatccaggaccggaacgcggcgtccccgaacgcgcggtgggtggtggagcccgtgccgcactcccccggcgtgctccgcctccgcggccgctacggccgctacctctcggcctccaacgagcccttcctcctgggcggcacggggcgcaaggtgctgcagacgctgccccaccgcctcgactcctccgtcgagtgggtgcccgtgcgcgacgacgccggcagcaacgcgcacgcccgcgccgtgcgcctccggacgcgatacggcaacttcctccgcgccaacgcggggctcccgccgtggcggaactccgtcacccacgacgtcccgcaccggcacacagggtgggtggtctgggacgtcgagatcttccaggcgctcccgccgccaacggggcccgattcctcatcgtcctccgccgccgcggaaaccgacgccgacgccttcgcgtcctctccggctccgtcgtcgtcgtataacaacaaagcgccgcactcttcggctccgttaccaacgtcggcgctgaggccgccgccccctcccgcgcaccaccgcgaagagaacttggttccgttcaaggggcagcccgcgccgccgccgccgggctacatcgcaccacccgctccgggattttacaggctcgagtcgacggattccttctccgtgccgctgcacaaggtggaggggcgagcggtccactaccacatcggggacagcgacggggaggtgaggccggacgaggagccgcactacttaacgttcaacggaactagcctggaggagctgctggagaggctcaaggaggagacggggctgcacgacgtcatcatgtgctcgcgcagccccatcaacgggaagctcctgccgctccgtctgcagctgccgcccaacaacgccgccgtgcatatcgtgcttgtgcaggagtcatcaaatggtgcgctttcttctcttcgacattatatttatgagtaa

SEQ ID NO: 14342 - DNA, 339 bp, Zea mays
  Peptide Sequence Number=SeqID_56121
atgagtccgtgcggggagcttgcgggggccggcgcggtggtgggagtgtggcggctgcagtggtgggcagtgtcggtggctgtggggaggtgggcgccggcgggtggggcagaccggcggtggggaggaccgacggtggccctcggcggtggggctggcgcggtggggcggaccggcggtggggaggatgaacgggggccctcgatggcggtggcggaccggtggtgggccagcgtggtggtccagcgtggtggggcactggcggacagcggcgtggcggtgagcggatcaacggagtgggtggacgacgcgtttgaaaaggagtccgtgtggggatag

SEQ ID NO: 14343 - DNA, 1380 bp, Zea mays
  Peptide Sequence Number=SeqID_56122
atgccttgcacactctccacacagaagagggctcaccttgctcaccagacggcgccgacggctgcgatgtcctactggtcgtcctcgcttccaaaggacatcaccatcaagctggccgaacgcatggtggacgacaacgacatcgactgctacatggctttccgccgcgtgtgccgcaactggcgcgcggagaccagcgaccacccagggaaggcggacgaccgcaccgaccccacccgcttcgagcccaccaagtgggcgctgctcgacaggcaggaggagcgcgtcacgttcgtggacgtcgacgccggccggttcctccgcatgagcgtcccggtcctccgcgactacctcttcgtcggcgccacgagcggcggcctcatcgtgctcggcgagaaacaagagccccaccgcacccgcctcctcaaccccttcacgggcgccgtcgctggcttcaaggtgagagcgccggcggaaggggtgaaggcggccgcggtgaccaccaagccgctgatgctcttcgtctccctagaggacggcgacatcatatgggcggaccagagtagcgaccacttcaagcgctttaaccgcttggactctgacaagcccacacccatagctgccctcgacggcgacgtgtacgccagcgacccgcacggtgccatcttcacgtcgatcgttgacgatgttcctgacgggcaaaagtgccggtctgcggcgacgatatggatgggaacctccattcctagtcctaaccataacgctagtcccgatgcgagtcctgctgcagctgcagcactggcagggagtggcggcaggtattatctggtgcagtctgggggagatctgctgctcgtgaccaggccactgggtggtggtgttcctgaccagccgttagtgcgtagggtggacaccaagcagaatgtgcttgagccagtcagtagcatcggtagtcgcgccatcttcgtcagtcatgtcaggtgcatctccatcgacgccggcaagttccccttcgagggcatcaaagctggctgcatctacttcgtggaaccggtcctagcagctcgaggcggctatgagccttcaagaatcaccacttgtcaagttgccgccgggctgcaagctagagagatcatgtttgaggaagggatccttgaaggctgctaccgtccgttcacaatcacccaagcctttgcagaatactgcaggtccgtccactatcatgaactgtaccaaatgatctgcagctactgggactgggacttctctgactccgaatctgacggaacatcatcctatggatctgcatctgactacgaagcagcattatcagagcttgaagaggcagctgaattcttgggaattaattttgaagcgtag

SEQ ID NO: 14344 - DNA, 306 bp, Zea mays
  Peptide Sequence Number=SeqID_56123
atggataaagggcactctttggtagcaagatctgttctagacccccggagtgctcccagacccatgtccttaattagagctggcctagaggtgccccatcgccacacgttctcgggcctgttccttgcccatacagagtatgcaatgtatgggatacactattacccgcacgtttccaagagacttgcggaggagacaggacgataccgtccacacaaccttatgcacgacagtgtattagactatgccgcaacctacaccaagctcgttcggctcgttaagaaccaaactaaaatgttggcttag

SEQ ID NO: 14345 - DNA, 912 bp, Zea mays
  Peptide Sequence Number=SeqID_56124
atgcctcgtcccagaacagtgccgccgctgcttctcctcctcctcctcctcctcgtcgctgtcttcgccacctctgaagtacccaccagcgatggcggccaggtctacatcgtgtacctggggcacctacccagcacggatgccgatgcgtcagaacctggaggcttctctgctgtagaatttgctcaccacggcctgctgaaccaggtcctcgacgacggcagtaaaatcatcggagctcgctcctacgacctaacaggatccagctctgagtcgtcgccgctggacgacgcgggccacggcagccacacggcgtccaccgtggctggcatggcagtggccaacgtgagcttctacggcctggccgccggcacggcccgcggtgcggtgccgggtgctaggctcgccatctacaaggtgtgccagggggagggctgcagcgacgccgacatcctcgcggggttcgatgacgccatcgccgacggcgtggacgtgatctccttctccatcggcagctcgtccccgtccgactacttcagcgacgcgcaggccatcggctccttccacgccatgaggcgtggcgtgctcacatcggcggctgcggggaactcggggctcgacgggggctatgtttgcaacgtcgcgccgtggatgctgtctgtggcggcgagcagcatcgatcgccagttcatcgacaagattgtccttgggaatggccagaccatagcgggatcctccattaacaccttcgcaacgataacaaatgccacacttgcattccctgccaacggtaatcctgtgggtaccatcgaccgcacggagacgacgacgaacacgcaagctccggtgcctgcctccttctcttctccaggtcccaacttgatcaccactggtatcttgaaggtgcgctag

SEQ ID NO: 14346 - DNA, 1086 bp, Zea mays
  Peptide Sequence Number=SeqID_56125
atggacccgtcgcgcaacccaggcggcggcgagctcgtctacggcgctgggcagctgaacccgtcgcgggcgcgtgaccccggcctcgtctacgacacgcgtgaggatgactacatccgcatgctgtgtgcggaagggtacaactccacgcagctccgggtagtcaccggctccaacgccacggcttgcccggcttccgccagcggaggaaggagtggcgccgccgccggcctcaactacccgacgatggcgcaccacgccaagccgggcaagaacttcaccgtccgcttcctgcgcgccgtcaccaacgtcggagcgccacgctccgtgtacaccgccaaggtcgccggctcggggtcgttcgtgagagtcaccgtcgcgcccaagaggctggagttcagcaggctcctccagaggctgtcgttcaccgtgacagtctctggcgccctgccggcggcgaacgagttcgtgtcggccgctgtcgtgtggtctgatggggctacaaagctcaaggagttgctggatgtggtcaacggagggaacaatctgctcgcacaaggcgcccagtcatcgtcgagcgagagagcgagcacacgagggactgacaccaagaagcagcagtcgccgccctacgtgtccaacatggcattgacgttcgagagcgccataaccttggggtggatgcccgcagacggcggacaaggctgtgggggcgagggcgctgtggcggcgcactgttggacaatcaccggaggggagaactgggcctatgaaggttcgggcctctaccacgcacgggtcagccaggtcgaaagaacaggcatagcagcaaccattcgttttccctcaatttcagtcgtcgatgtctcagtggggattacatgctccgacacttcctccaactcagagatcaggggttatgggccacaacacaacacgccaccaccggtgataccagcactaggaggaccttctgaaggagagggagctactacaaaggagactccaaaccagatagacgacttcgttaacaacttgttcgcttctggaggtagtggtcacaactcaaacaacccctatatgtga

SEQ ID NO: 14347 - DNA, 249 bp, Zea mays
  Peptide Sequence Number=SeqID_56126
atgggcaccgcgctcaaggcgctcacccttcgcgtcgtcctcgccgcctgcttcttcctcggcagcttgatccatgcatcagaggtcatcggcgatggcgacgaaaagcagcaggtgtatatcgtgtacatggggcaccagcatgagccgtcgtcggaggaactagcggcgggtggtttctctgcggcaaaagctgctcatcaccggctgctcaaccaggtcctcggtcatggcaggtcaagctcttga

SEQ ID NO: 14348 - DNA, 2076 bp, Zea mays
  Peptide Sequence Number=SeqID_56127
atgcctcgtctgctgcttctgctcctcgtcaccgccatcgccgcaaaagacctcagcgcctctgaaaccgtcggcgatggagaccaggtctacatcgtgtacttggggcatctacccagcagcgcggatgcgtcagaacatactgaaggcttctctgctgtagaacttgctcatcacgacatgctggatcaggtcctcgacggcggcagctctgcttcagacaggattctgcgtagttacaagagaagcttaaatggctttgccgccaagttgagcaaagaagaggcacataaactgtctggcatgaatggtgttgtctcagtcttcccaagtaggaccctcgatcttttgaccacgagatcctgggacttcctgggcttccctcaaacgcccattcaagagctgccactggagggtgatgtcatcgtcggtatgctcgacaccggtgtgtggcctgactcgccatctttctccgatgaaggctttggcccaccgccgagcagtaaaatcatcggagcacgcgcctacaacggaggatccagcagctctggccagtcgccactggacgatgacggccacggcagccacacggcatccaccgcggccgggcgcgcggtgggcaacgtgagcatgtacggcttggccggcggcacagctcgcggcggggtgcccggcgccaggctcgccatctacaaggtttgctgcggcgaggccgacatcctcgcggggttcgacgacgccatcgccgacggcgtggacgtgatctccatctccatcggtagccccttcccgtttgactacttcggcgacgtgatagccatcggctccttccacgccatgaggcgtggggtggtcacgtccgcggcggccgggaactcggggctggatttggggaacgtctgcaacgtcgcgccgtggatgctgtctgtggcggcgagcagcatcgatcgccgattcgtcgacaggattgtccttgggaatggcaagaccatcgtgggagcctccattaacaccttcccaacgctatcaaatgccacgcttgcattccccgtcaacgggtcctgtgatccagagaacctcgccggaggctcatacaaaggcaagatcgtcctctgccagaatgccgctgcaaacgacggttcaggtcctctgttggccggtgcagcaggcgtcgtcatagtcagccgaatacccgatgtggccttcgctctgcctctccccggtctgacggtatctcaggatcagttcgaccaaaccatggcctatgtcaacagcacaagtcatcctgtgggcaccatagaccgcaccgagacaactgtggatccacattccacaagctccggtagccgcctccttctcttctccaggccccaacctgatcacccctcaagtcttgaaggcattcccaacgacacgaggaaggttcagtacaacatcatctccggcacatccatggcgtgcccgcacgcgagcggagccgcggcgtacgtcaggtcgttccaccgtgactggtcgccagcgatgatcatgtcggctctcatcaccaccgccactccgatggacacggcggccaactccaacgccagcgcgctcaagtacggcgccgggcagctcaacccggtgagcgcgcacgacccagggctcgtgtacgacgcatcggagagcgactacgtggccatgctgtgcgcgcaggggtacaacgccacgcagctcgcgctcgtcaccggctccaacgccaccgccgcctgctccaacggctcgacgacgcctggctctcccggcgacctcaactacccgaccatggcggcccccgtggagccggggaagaacttcaccgcggtgttcccgcggaccgtcaccaacgtcggggccgccaccgccgtgtacgacgtcagggtcggggttcctgccgaggcggccagtgtcgtctcggttcaggtttcgccggccaggctagtgttcagcgagcagaaccagaaggtctcgttcaccgtgactgtgtccggcgcggcgctggaggagggcacggtctactctttcaccgtggtatggtacaacgacgagcatacggaataa

SEQ ID NO: 14349 - DNA, 190 bp, Zea mays
  Peptide Sequence Number=SeqID_56128
atggaggcgaggagccgcttgacggttgcgccctacagcacgagctttagcggtggggcatctgccactggtccgacgttgggtctagtgctggagccgctgccgtggaggtggatggaagtgtggccgtctattggtggggagggagtgggagatgaagaggcagaacgaatcaagctgatcatcagaa

SEQ ID NO: 14350 - DNA, 717 bp, Zea mays
  Peptide Sequence Number=SeqID_56129
atgacgacggtggcggtaatggaacagtgggcagacaagcagcagcaggcggccagcaccaacgccgcagcggcggcggcgcagatgcccttcctggcgctgctccagggcgcgggcgttgtggtggaggcggagcagcaggaggagcagcaccacgacgggcgcaagcggcaggccttcgcgcgcgccgtctccgaccttgatctgctcgagagctgcgtcacgcaggcggtagctcccgcagcggcggcgtctgcgcccgtggccggcaggaccgagaggcggaggaagcggcagaggccccgcgcgcgcgccgcgccgccgccggagaagcgcaagaagcccgaggaggccgagagccagcgtatgacgcacattgctgtggagcgcaaccggcggcgcctcatgaacgaccacctcgcctcgctccgctccctcatcccttccagctacaccccgcgcggcgaccaggccacggtggtgggtggcgcgatcgactacgtgaagcagctggagcagcagctggtggcgctgcaggcggccgcggccgcgcggcgtggcgtggccgggagcggcgccgccgcggtggtgaacggtcgcgtcggacggcgtgttcgcgcccccgcaatggaggaaggatgcgaggtggcgacggcggacgaggtggcgacggtggtgcaccagatcttcgcctacgccgcgggcgcatgctgctga

SEQ ID NO: 14351 - DNA, 355 bp, Zea mays
  Peptide Sequence Number=SeqID_56130
atgaattcgtttcatcgcggacgaccggacgtgtccgtcaagtcttcctgcgccgtcctccgcgccggagcccgtcggcgtgccaggcgtcgacgtttcgctgagctggcggaggcgtgcgacgccatcccccacgtgctccaaggtactgctatcccactcggcatcgtccggtgcacgcggctgcggactctcaattcggcgccggcctttggttttcgcagggaaggacctgatcgcgctggcgcagacgggtccgggaacacgggcgcgttcgtgctgcccatcgtgcagaagctgctaagcaaccgtcaggctgatcagcctttcttcgcttgcgtgctcaggccaaccg

SEQ ID NO: 14352 - DNA, 471 bp, Zea mays
  Peptide Sequence Number=SeqID_56131
atgggaaagggttttttaatgggcatagatatttttcacgggtacgagtttgggacgacaaaacccagcgggtttatacccattgccatctctactatgaaggttgagagtgagacggtaccatcgcagccactaccacaaccacaaccacaatcacagacagggctgccatggcatctgtacgaacaggccaccctcaaaaaattccgtacgaacagtccaaacgcgcagggacagggccagggcctcagtgtcagggagtcaggggccacagccgcagcgggcacggtcctcggcgaaactggcagcgcctcgtcacggcctctctgggcggcgcgggtgatcgaggggtcgactgctggcagcctgtgcctgactgcgcccggcctttcgcttttcatctgccggtgccaggccattaatggcgggcacacgaggaagcaggcgctgccgctgccgctgcacacatag

SEQ ID NO: 14353 - DNA, 1083 bp, Zea mays
  Peptide Sequence Number=SeqID_56132
atggcagagcatctcatctctacggctgaccacgacaggctgccggacagctacgtccggccggagacgcagcggccgcgcctgcgcgaggtcgtccccgacgcggagatccccgtggtggacctcgccgaccccgaccgcgaagccgtcgtcgccagggtcgccgaggcgtgccgcacccacggcttcttccagctgacggcggcgatgatgtcggtggcgtacgaattcttccggctccccgcggaggagaaggccaagctgtactccgacgacccggccaagaagatgcggctgtccaccagcttcaacgtgcgcaaggagacggtgcacaactggcgggactacctccgcctgcactgccacccgctggagcagtacgtccccgactggccggacaacccaccatccttcaggaggaccgtgagcgcgtactgcagtgcggtccgggagctggggttcaggctgtacgtcgccatctccgagggcctgggcctggacggagcgtacatcaaggaggcgctgggcgagcaggagcagcacatggcggtgaacttctacccgaggtgcccggcgccggagctcacgtacgggctgcccgcgcacacggaccccaacgcgctcaccatcctgctcatggaccagcaggtggccggcctgcaggtgctcaaggacggccgctggatcgccgtgaacccgcggcccggcgcgctcgtcgtcaacatcggggaccagctgcaggtgacgtgctcttgtctcgctctcccattattcccaccctctcacctcctctctgcccctggcctccactactgcactgcacctgcacaggcgctgagcaacggcaggtacaggagcgtgtggcaccgcgccgtcgtcaacgccgacaggccgaggatgtcggtggcgtcgttcctctgcccctgcaacgacgcgcgcatcggccccgccgccaggctcctcaccgacggcacgcccgccgtctacagggactacacctacgccgagtactacgccaagttctggagcaggaacctggaccaggagcactgcctcgagctcttcaggaccccgacctcctag

SEQ ID NO: 14354 - DNA, 111 bp, Zea mays
  Peptide Sequence Number=SeqID_56133
atgggtaaaacaaagcggtcgtcatgtcaacaagataaccataatgattctctagccagcaaaataatgagaagtagaatcccagatcttcccgaggtattttttggttga

SEQ ID NO: 14355 - DNA, 192 bp, Zea mays
  Peptide Sequence Number=SeqID_56134
atggccgctaggcgtgggatgcacgtgggaatgagaatgggatttgcggggagagggaatgggaatgggctttgcggggagggtggcagccgggaatgggaatgggctttgcggggaggggagaatgagaaagacaatgcaggaatgggaatggcagaacacggaatgagagcctaccccttaccgccttaa

SEQ ID NO: 14356 - DNA, 1302 bp, Zea mays
  Peptide Sequence Number=SeqID_56135
atggacctcctcatcgcgcagatcaccactgacctccgctcctcggacgcgctccggcagtcgtcggcgctgctgcaggccctgcagcagtgcgccgcggggcgggacgtctccgcgctcgcccgcaccgcggccaccgagatcctgtcggcgccctcctccgccgtctgcaagcgcctggcgctcgacctcctccgcgcgctcccgctgccgccggacctcctcgacccgctccttctctcctccctccgctccgatctctcctttccagaccccgacgtcgccgcctcctccatcgcctcgttcccatccctgccctcccaccttctcccctcgcttctctcctccgcccacgctgaaatcgctaatgcactctcctcgcccgctgagtcgctgcgcctcgcagctgtcacatctctgtcctcgctcctcccgcgcgatgacctaacgctcatgtgctccacaaacccctccctcatggcgcatgctaccacgtggtggggccgcctggccgagcttgcgctggactctgcagacgctgtttccgccggtgcgtttgaggctcttgcacggctgttccaggagctagaggggcgccgcatgagccggctagctggagacaagcttgttgatggagaaggtgcgcttgcagtgcgtgcccagtgggcggctgatgccattgatttcatttggtcaaggcgcaacatgctgattgcgcgctctatggtgatgcctgtggagagcttccgagttactgtgtaccctctagtgcatgcagcaaaaatggttgcttctggtgtggtaaacactctgcggcgagttgctaagccaggagacactacaattgctgatagcgtggagtcgagtgcggagaaattggtaggagtgtcagacatcgtctcacacttgctgccatttcttagttcacttgacccaccactggtgttcgaggttgggatcaatatgctggcgcttgcagatgtccctggaggcaagccagagtgggcatcagctgcaattattgcaatcctgacactatgggaccggcaagagttctcttcgatgagggagacaattgtaagggctgttgtaaccaatcttcatttgctggatcttggaatgcaggaacgatatagatccggcaagctgacagagcagggaggcagggaccggcgattgacgagctggaggagcagggaggcgaggaccgacgagctgacagagcaggcagtggtagcgccgagcgcgagtaggtcagcagggaggcagcgtcgcgcgaccgttggggagaagggaacttga

SEQ ID NO: 14357 - DNA, 152 bp, Zea mays
  Peptide Sequence Number=SeqID_56136
atgggtcttgagcttgcgcccaactcccataccacgtgtcttcctgtgatagggctggctcaagatcccaactacgccgtagctagggctgcatcaagagccattaatgaactcaagaagcagtgggaacttgaagaaggtgacagtctgag

SEQ ID NO: 14358 - DNA, 132 bp, Zea mays
  Peptide Sequence Number=SeqID_56137
atggaggaggggccgagcgggacgatgtcgcccgcaccggagatggaggaggcgccagagatggaggaggcttctactcacgtggtgggaattgggaaaaaggaagctgggctgggccactgggcaaagtga

SEQ ID NO: 14359 - DNA, 426 bp, Zea mays
  Peptide Sequence Number=SeqID_56138
atgagacatgacaagtggcaatttttgcggaatgctagtttgtttggttctaatcctgctttaccaatgcaggatgttgtcaataatatttgtgacgatgaggatattaaggctgtatcttttgtcggttccaatacagctggtatgcatatttattctagagcatctgctgcaggcaagcgtgttcagtgcaatatgggagcaaagaatcatgcaattatccttcccgatgctgatagagatgctacattgaatgcccttattgctgctggatttggtgcagcagggcaaagggaggatgaattagtcaaacgtgcaagtggccttgttgttagttcaggaatggttaatgatgcagaccttggtccagtgatcagccgacagagctgttttcctccatatgatctgactactgaaagagattaa

SEQ ID NO: 14360 - DNA, 3094 bp, Zea mays
  Peptide Sequence Number=SeqID_56139
atggcttccgcctcccgcccctcgccaagtcgccacggcggcttcggccgagatccccggcgccggcgccatggaactggaagccccgggccctgggctcacgtgtccgccccgccgcgcggccctggctccacgtgtcagctcccgctcgtcgccgatggacaccgcgtcaccggctcaccgcctgccgtgaccgagaggccacgtcgtctcgtccgtctactgtctggggcagccgggcatgcacgcagaattgcaggtgcagtaaaggaagcaggagcaggacgagccccgagatctcgcctcaggattgatgcatcattggcgactgcactgcacttcttcgccatcgatcctgtgggtcccctgattctccactccactatggcgccactaatccactccactccatctaatcaatttccagtggcctcggctgcggcggcctgctgcctactcgtgctcgtgactttcctggtggtggccgcctgctggtgggaccccaggacgcgagaagcttccagctggttcctgtcgccgccgcggtctgccccctcttccttctcgtccttgacgagtgccggtggagttggcggtggtggcgagcacctattggccaccgccagctcgtactactccgccgccgccggcttcaggaacagcactggcaaagaggtgcaccaggaggtccggggtcatggtggtgatgatcgtggcttcctctccttcgtcaactccagcttcggctatgacgaagcgccgccgccatccgcaccggctccggcgtctccagtgacgggaggctcagatgaggtgataatccagtccacgccgccacaggttgagaggagaagagacgacgtgaaactggagcgactagagcttggcctcgcgagagctcggtccgcgataatggaagccatcaggaagaaggacaaggtatctccgttgcctgacaaggactacgtgccgatgggaccggtgtacaggaacgcccacgtgttccacaggagctacctggagatggagaggcagctgaaggtgtacgtgtacgaggaaggcgagccgccggtgttccacgacgggccgtgccgcagcatatactcgacggagggcaggttcatccactccatggagacggagacggaggcggaggagggccggcggctgcggacccgggacccggcccgcgcccacgtcttcttcctcccgttcagcgtcgtcaagatggtgcagacgatctacgagcccggatcgcgcgacatggccccgctcaagcgcaccgtcgccgactacgtccgcgtgctctcctccaagtacccctactggaaccgcagcctcggcgcggaccacttcatgctctcctgccatgactggggcccgtacgtgtcgtcggcgaacgcgcagctgttcggcaactccatccgcgtgctgtgcaacgccaacacgtcggaggggttcgacccggccagggacgtgtcgctgccgcaggtcaacctgcggagcgacgcggtggagcggcaggtgggcgggccgtcggcgtcgcggcgcccggtcctggccttcttcgcgggcggcaaccacgggccggtccggccggcgctgctggcgcactggggccccggcgggcggcggggaggcgacccggacgtgcgggtcagcgagtacctgccccgcggcggcggcgcgccgtcgtacgcggacatgatgcggcgcagccgcttctgcctctgccccggcggctacgaggtggcgtccccgcgcctggcggaggccctgtacctgggctgcgtccccgtcgtggtggacgacggcgagtacgcgctgcccttcgccgacgtgctcgactgggacgccttcgcgctgcgcctgcgcgtcgccgacattccccgcctcaaggagatcctggcggccgtgtcgccgcggcagtacatccggatgcagcgccgggtgaggatggtgcgccgccacttcatgctgcacggcgggccgccccgccggtacgacgcgttccacatgatcctccactccgtctggctcaggaggctcaacgtgggtcccagagacgccggcgccgccgctatacaaaattacaggcacgacgacatccatcgcagtcacccacgagcccaacaaaccactcccacccggtggctcgtcctcggacgccaagccactccgcgccccaatccggaagcgccgccgccgccgatcgaccggccgtcgacccatgctccgctcggcgctcttccgctcaggtacgcgcgcggcccagctgcaccccgtcgcgccggggcattcctttccctgactgaccgagcgactgaccccaccctcccgcacgcgcgcagcccccgggctccgccggtctccggcgacggcccacttatccaccgccgccgccgccgccgcagcgtggctctccaacggccctgcctccgccccggtacgtgcccgcggctcctccccgtcccccagtcggttctctgcttctgtctgattgcgcgtgctgcgctcggcacctcgtcccgcttgacttctcgcattcctcctccccagtctagggtgcgcctcctcatcggcggggagttcgtcgagtcgcgcgccgacgagcacgtcgacgtcaccaaccccgcgacgcaggaggtggtgtcccggatcccgctcaccacggccgatgagttcaaagctgccgtcgatgccgccaggacggccttccccggctggcggaacacgcccgtcacgacgcggcagcgcgtcatgttcaagttccaggagctcatccgggctaacatggacaagcttgcagagaacatcactacggagcaggggaagacgctaaaagatgcttggggcgacgtgttccgcggcctagaggtggtggagcatgcttgtggaatgggaacactgcaaatgggcgaatatgtatcaaatgtttctaatgggattgacaccttcagcattcgggagccacttggtgtttgcgctgggatatgcccatttaattttcctgctatgattcccctatggatgtttcccatagcagttacgtgtggcaatacttttgttcttaagccatcggaaaaggacccag

SEQ ID NO: 14361 - DNA, 267 bp, Zea mays
  Peptide Sequence Number=SeqID_56140
atgtcggtccttctgttcctgctgctgaggaagtgccagtgcctgaatttgctgaagctgaccccaatgtgtgtgacccgactgctgtggatcccaatgggtgtgacctggatgacattgaacccgataggtgtgatctggccaaaattgaccccaatgggtgtactgtccacgttgttgatgaagatatggctcggcggtattctgatcttgaagaaaaatattctcaaggtcagactgaactggcctgggtttctgcttctctga

SEQ ID NO: 14362 - DNA, 288 bp, Zea mays
  Peptide Sequence Number=SeqID_56141
atgtccgccttgcccgagcccacctcgggcaagaaggacaagcacaggacaagacccatccgaagtcctccaggagactgccgcattcaatgcgcatacctaccctgctcaggcctgcaggttttacaaatttataatatgagaatttgtgggggccttcgtcttctaaagatgaacagtgacaccgtactgttcatgctgacttgtattcactcgcacgtcatactcggattatcattgtctgccaagacgaagattatgaagaccgttttgaggggaacatattga

SEQ ID NO: 14363 - DNA, 216 bp, Zea mays
  Peptide Sequence Number=SeqID_56142
atggccgttggtgaaggctgctgtcgatgggcgcaccggacagtccggtgcgccaccggacactgttcgatgaccgttggcgctgttagccgttgctccgcatggcacaccggacagtccggtgctacaccggacagtccgattgtgaagtgcattgtgtcatattataagtgtgatgctcatgacaatttatgcacttatgaaagcatgttgtaa

SEQ ID NO: 14364 - DNA, 435 bp, Zea mays
  Peptide Sequence Number=SeqID_56143
atggaatcgctgacgcttcgcgcttcgacggccgcctcaaagctgcagcgacgccggctgctccccgggcggcagcgcgcgacgtacgtccgcgccacggcctccgccggcgagccggacctctccgtgcgcgtgaacgggctgcagatgcagtggggccgtggggggaccgatttcaggtcgttgagaacttgtagctcttatgctgatgtccagcaagcggttgttgcggtgtcattggatgctgaaaaagttatcaacgttactcctcgttatgcaaagcttcgggcagaaccaaatggggctgccatggggcgcatcattggctggcagaacattgaactcatcagtgccaggcctctggagaccatgctgaatgagttcaagcagttgaatacttatcggttcaattatgtaggagtacaacaaagctaa

SEQ ID NO: 14365 - DNA, 603 bp, Zea mays
  Peptide Sequence Number=SeqID_56144
atggaagaagatgttggggaggaggggacactgcaagagatttgtgatgagatacccattgcggtgtttcaccccacaaaaggattcttttcgcccggtctaaaaaaggctaaagaccacacttatacggtgaacacaactaaagtcttgatgcttaataaggaaatagaacaaaaaatcatctctgatagtcaactctctgaagtgttggataatgaaggttcggtggatgatcgggccaaggtggcttcggagaaatcccagattgaaatgatgaagcagagagtggaaggtcagacattctgctcaaataaagagattaatacaactacaaacagtcgggtcaacaaaaacaatattgggctagatggtatgaatcattttggggaaaggattaaccttcagctttcaaaccaggaggaagggaaacaagatttgaaacacatgctggatgacttcccaacagagggcaatgaggaagattggcatgtgaacataatggagcaggctgagctttatcacacagaagaagatggtgaacaagaatgggagaagacattaagcaagaaagggaagaaaaaaatagaaggaactttccagtga

SEQ ID NO: 14366 - DNA, 351 bp, Zea mays
  Peptide Sequence Number=SeqID_56145
atggagtgcacagtttctcaaatacagaagaggacttcatctgtaaaatgtgaagatgatgatgccaaagtgaagagggcattccaaacactgcttacttacattggaaacgttgctaaaaatcctgacgaggagaaatttagaaagatcaggctgacgaatgcaacatttcaggagagggttggaaatctgcatgggggcatagagttcctggagctctgcggatttgagaaacttgaaggcgacgaattcttgtttttggcaagggaaaaagtcgacagtgctatcctgaacacagctggagccgagctgaattctgccatcaccaatcctttcttcggagtcctttga

SEQ ID NO: 14367 - DNA, 701 bp, Zea mays
  Peptide Sequence Number=SeqID_56146
gtcgccgacgagctgcgcgaggagcgggtccggatgaagctggcggaggcgaggctacacttcgaggagaagaacgccgccgtcgaccgcctgcgccaggagctcgaggccttcttgggcaacgaacgtcgagaacaaacgcctgcccaccatgaaatggccaaggaggaggaggaggaggatcaccagctgcagatcgtccttgcctccgaattcggtgtccacggcatcgatcctctggtcacagagaagagcggacaggaagaaaatgccgaagctggtgacgacgacgacgactcggaaggcagcgacatcgagctgaacatggacggcaacagctggagctacaccaccacctccaggtccagggacacgacggccaagaacgcaacgtcggcgcacggctcactttcggacagagcaacggaatgtggcgccgacgccggcgccttcgatcgtagatctgaagcgacgagagatgcgccggagcaggactgggcggctgacggatgcagcgacggcgggaccaccggcagggacgaggacgaggacgccgagaggtacgaggcgatcaagaacctcagggagcagatgctgaccggccacgccttcctcttcctgtccaagggcgaggcagacgatgacagcgatcggcgtcgccgtggtttcgcttctcattttgaagaagatggggacctctg

SEQ ID NO: 14368 - DNA, 255 bp, Zea mays
  Peptide Sequence Number=SeqID_56147
atgtcgcctttaccatccctcgtcgacaagcgcttcgaaccgctgccgcaaatctccatcgccctgggcctcttcaaacggtggggcaagaacaaccgaggggaggagaaggcgtcgtcgctggcgatgcatggtctaaagctcagccccagtcatggtcgttgtcacatgggctttcgatgccgctgtgtatgggtgaggcaggggttcagtggttttctcgacatgtgtgagaaggtcttcttcttaatataa

SEQ ID NO: 14369 - DNA, 534 bp, Zea mays
  Peptide Sequence Number=SeqID_56148
atgacgtgggagccgtcctggaataaccggcgccaccaccgccacgccgacttcgacgccgacgtcgacgcgcggtccgcggcgtcggccaggaatctcgccagcgccttcgaggaggacctggaggaggaaggggacgttgggtgggacgcggccgccaagcgccggagctgctcggatcaccggtgcagcgcgtcggtcgaggtgttgtccaagctgtcgaggagaaagaccagggctttcaaggacggtgatgggggcaggagctggcacaacggccgtgcgcatggccactgcttctcagatgcgagtgcgatcaccagtggcggtggtggctctgtgggtggtcgcactccagcacgccagggtgacaacagaacggagcagatgcaggagctgtacaacagcctgaccgcttccaacgagctggtcagggtcctggccaacgtcctgggccccgcgggcgcgctcaacccgacggcggcgtccgtgctcgcggcgctgcgctccgagctggacgccgcgcgccagctc

SEQ ID NO: 14370 - DNA, 1038 bp, Zea mays
  Peptide Sequence Number=SeqID_56149
atggcggggctgtcgctgcggtgcggcgactgcggcgcgcagctgcggagtgtggaggaggcgcaggcgcacgctgagtccaccaaccacgccaacttcgtcgagtccactgaggccgtcctcaaccttgtctgctccaactgcggcaagccatgccgctcccataccgaggtggacctgcacacgaagcgcacgggccatacggagttcgcggacaagaccgcggaggcggccaaacccatcgacctcgaggcgccgcttaagccggcctccgatgatgccacggacgtcgatgcgtcggcctcggcgactgaggagacacaagagacggttgtgccagaggtgaacaaggaggtgctcacggaccttgagggcatgggtttctcgacagcacgtgccactagggcgcttcacttctctggtaatagcaccattgaatgtgctattaactggctttctgagcaccaagaggacgcagatattgatgagatgcctctggtaccagctaactcaaaaacggaggttaacaagccaagcctgactcctgaagaaatgaagattaaagcacaggagctaagggagcgtgctcgtaagaagaaagaggaagaagagagaagaatggaaagagaaagggagaaggaaagagtacgaatcggaaaagaacttcttgaagccaaaagaattgaggaacaaaatgaaaggaaacgcatgatagaattgcgaagacttgagaaagaggaggagaaaagagctagagaaaaaatccgccagaaattagaagaagataaggctgaaaggagaaggaaactaggattgccaccagaagacccagcagctgccaaaccaagtgcaccacctcctgttgaagagaagaagattagctgtcatatagactgcactgacgttgtcacaatagacaatgattgtcgaaggaatcgagacgtgaagctctttaagcaactgtcgcaaccaacaacactctgcaactgcatgtgcaacaacctgatactcgaccactacactagaatgggactttga

SEQ ID NO: 14371 - DNA, 372 bp, Zea mays
  Peptide Sequence Number=SeqID_56150
atggatcctaagagaaggaaaaggagaaggagaccctatatgttgatgagcaaaaaggtgacaagcccactgactcaggatcaaacaaaaagaggaaggataggaagaagaagaggcgcatcaagaagatcatctactacaacagcaacacctcctcttcttcaccaagggacgacgacgacgaagactcgtccacgaaaattaaaacgatatgggataccctcaaaatctctcatgaggggtaccgacgccaccatgatcacaaaggatgaagctagtggaaaggagaactgggaaggtttgccaagaaaacggggagaggagccaaccaaaacctacaacaggctcaagaccctggtgaacaagatctga

SEQ ID NO: 14372 - DNA, 715 bp, Zea mays
  Peptide Sequence Number=SeqID_56151
atggccgctgccacagccgccgccgccgcgctcgcctccccggcgggcctctccacatcgctggcgcgccgcggcctcgtcagcttcgcacccgcgctccgccccggccctgaccgcagctctcgcgccgtcgccctcctcggtgtacgaactcatgtcacggctgttgatcaagccattgtaaaaggtgatacaaagttggaaggtcctgtggttgttgttactggtgcttccagggggattggaaaagccactgcattggctcttggaaaagcaggctgcaaggtcttggtgaattatgctcgatcttcaaaggaggctgaagaagtctccaaggagattgaagcatctggaggccaggccattacctttggaggagatgtttccaaagaggctgatgttgaatctatgataaaagtggctgttgatacatggggaacgattgatgtactagtaaataatgcaggcgttttcctttgcacgcagggaagaattatcaatatagcatcggttgttggtcttactggtaatgctggacaagctaattatgctgctgccaaggctggggttattgggttcacaaaaacagttgctagggagtatgccagcagaaatattaatgcaaacgttatcgctcctggatttattgcttcagatatgactgctgaacttggtgaagagttagagaagaaaattctgtcaactattcctttag

SEQ ID NO: 14373 - DNA, 1626 bp, Zea mays
  Peptide Sequence Number=SeqID_56152
atgggtgacgccgctactgccgccgccgccactctcggcctgacctggcccaacgccgccgtcgaactgcctcagctagcacaagccatccgcgacagtgttagtgctaccgtcgaccgcacgccgctcaacccgcgcgcgcgctgttgtctgttgtctcagatcagctttgcagctaaggacagcgaattctcggactgggacggcgacatactcgcggtcgccgtgacggacaaggacgtgcaggtgcagccccacgtctcgggctccgagttcgagaacgccgtcctgaggaggctcgacgtccagctcggcggcctcctgcgggccgcggcggcagaggaggagttcgccggcaggcccgggcagtcggtggttctccgcgtgcgggggcagcggttcaagcgggtggctctcgtcggtttcgccgcccgcgaccgcgaccgcgacgccgggtgcctgcatggcctaggcgaatccgtcgcgtcagttgccagggctgctcgggccaccagcgccgccatccttgtcgccgaccccgctgtggtccgaccggagtccaggctgaatgctgccgcggcaattgcttctggaactgtgcttggactgtacgaggacaacagatacaagtccgagtgggaaaaggtgcatctgaaacaggtagacctgattgggctgggatctgggccggagctggaccagaaacttcgccatgctaaccgtctttcgtcaggggtcatgcttgcgagagatcttgtgaactctcctgccaatgtccttacccctggtgctctcgcggaggcggcggcgaagatcgcttcgacgtacagcgacgtgttcacagccacgatactagatgcggcgaaatgcagggaactgaagatgggctcgtacctggcagtcgcagcggcctctgagacaaacccgccttactttatccacctgtgttacaaaccccgcggtggtgacgtcaggaggaagctggctcttgttgggaaaggcataacatttgacagcggcggctacaacatcaaggccgtaccggtcgccaccatcgagctcatgaaaaaggacatgggaggcgcggcggcggtgtttggtgcagcagaggttttgggacagatcaagccgcctggagtcgaggtccacttcatatctgccgcgtctgaaaatatgatcagtggctcaggcatgagacccggcgacatcgtgactgcttccaatggaaagaccatcgagattattgatctggcgacgttaacgggtgctattcgtgtcgcgcttgggcccagcatcgctgggattctaacgccaagcgacgagctagcggaggaattcgcggccgcctacgaggtctccggggagaagttctggaggctgccgatggaggagagctactgggagtccatggagtccagcatcgccgatatgctctgcgccggccctttgcagccccaggccggcgctatcactgccgcactgttcctcaaacactttgtcgatgacaaggttcagtggatgcacatcgacatcgccggcacggtctggagcaacaagaagcgggcgggtactggcttcggagtcaccaccctggtggagtgggttctcagcaactcgtcgtcctga

SEQ ID NO: 14374 - DNA, 486 bp, Zea mays
  Peptide Sequence Number=SeqID_56153
atgaagattgtgagggttggtgaggtctccagtctctgcaactcttccacaaattggatccagattattcctcacgtgaggtgtcttgtggagttttcccgaggtctaaaagcatttgctagaactagagaacatgcagtagatggctatgtgactttcaggacgttaagattagtcaattattcaatttttaagtccgataatggaacccagtcacatcttcttgctactgccctgatcataagctggatcatcaggtactctttctttgcaatgaaggaggcatttggatctgcaccttcctggttatcatggctttgcagctttatgctgttctatcctacttgtatctctagtgaagttggtctgatctacatggctttgccttacatgaaggtaagcctttccctcctcgaccgccctcctttttttttcctgtttgcttcagtgccttataagaagaagggcacatacaaccttatttaa

SEQ ID NO: 14375 - DNA, 1596 bp, Zea mays
  Peptide Sequence Number=SeqID_56154
atggcggatccgccgcccgtggctgcctccgccttgccggcgcagcccgaccaggtcgccgcctccgtgtccaccccgcagaaccccaaccctaaccccctcctctccccccaaatccccccgtccccgaccgtctccgacctctccgcgcacatctcgtcccctcagcagctcgacccggtggctgcggcagctgccgcttcgggcggcgggggatccatggattaccccccgcgcccgccgcagctgcaggcgccttcgcccacgcaggcggggcccggcgccgccgggtttggccagatcccccgctcggggtcggcctcacgcctctccacggccagccagctccagcagtacgcggctaggatgtacggcgggcagatgagcttctcgggtggcggaggtctcgtgggccaacagcagcagctggcggggcgcacccccgtgcttgggcagggccagctggggatgctgcaaggccagggtaacgcgggatctgcggcacattttgggcttcagtcgcagatgatggcgcaggctaggcaaaagggcatggcacaaggcacccaattgaataatgctaatacagctcaagcgctacaagggatgcagcacatgggtgtcatgggtactatggggatgaaccagatgagaccaaatggaactattccctatggtgctcaacaaaggttcgcccatgcgcaaatgagaccacaagcgtctcaacaacctgcactgtctccacagaaggtgcctggtcaaggtctgtcgaggacagcatcaattgcagcattaaattcacaactgtctggatcatcacaaaatggacagatggtggcaatgtctatgcctcagcaacagcagtggttgaagcaaatacaatcatccatgggctcaccagtttccccacagcaacaatatcagcagcagaggctcctgtttatgcagcaactgcagcagaagacaggattgagccaacaacaacttctccaaatccaacaacagcatccacatctcactgcccaacagctgattcagcagcaacaaattttgcagcagtttcagcagcagcaactgctacaatctccgcgtgtttcagcatctggttcacagaagtctgcgaaccttacaggctcgcagccgggtacaccattgtcaggtggaaccatgactggtggaagtgcaagtcagggagccgaaggaactagccaacttcttgggaaaagaaaaatacaagatctggttgcacaggtagaccccctaggcaaggttgaccctgaagtggaggatttacttctagaaatcgccgatgacttcattgactcgaaagaaattggcatttatctgttcctggtttctcaagggaggataagaatccccaaagaaattctacagcaggttgatggaattgtaatctgcaacagaaacttcggctgtgccaacagtgggctctctatcgaaagcccctcgcttctaagggctatgctgctcttccctattgaaggaaaaattcctatgcttgtgtcttacaggaaagcagttgctgacttaccaatcgtctctggcagatcctctctacctggggtcgacttctaa

SEQ ID NO: 14376 - DNA, 333 bp, Zea mays
  Peptide Sequence Number=SeqID_56155
atgaagcctgggtacacgcgggtgctgatggacgacggcgcgtttgtgacagggcgcccatactcccaacctgagagatgcagcaaagtggtgacggccccggagtccacggacgacgtcgggcagaccggccggccgtcgtcgttcctctcgtcgcggtggcgccggtcggagtcactaggcaggagcacgtacgacgacgacaccggcggggaggattcgacagaaccgtcggaggccatgccaccgaaggaggcagcctgtccttcttctttgtactgcgctatgaccttgaagatgaacgggatgatgccttccatgggtacaacttag

SEQ ID NO: 14377 - DNA, 429 bp, Zea mays
  Peptide Sequence Number=SeqID_56156
atggttaggcgatgtggaggctcttccgaggtcgaggtcgagtccgagcccctggatcgggcgaggcggagaccgtcggctgaggccagggctgagtccgagccctggggttgggcgaaagcggagtttgtcgtcttcaggggcctgagcccgagtccgagctcccgagtcgggcggagcggagttcgccgtcttccggagcctagcccgagtccaagccctaggtcgggcggagcggagttcgccgtcttccggggcttagcccgagttcgagccctggataatgttccgtgcgcggaggtcgaagaagttgcagaagaagcccttgagcaacaacagtttggtgcagggggctcgagcgtttcccgagtgcctttcagtaaggatctgttcgttgacagaccacctgggatagcagtacaaccatga

SEQ ID NO: 14378 - DNA, 1212 bp, Zea mays
  Peptide Sequence Number=SeqID_56157
atggggcagagaatcgatatcaattggactgaggtgtttggcaagtcatcctcccccgaccgcgaggccgacgtctgcttcgcctccccctcgtcggcgtcggcagcaccgcggacgcgggcgcgggcgttgggcgccgcgaaggtgttaccgggcgacgagcggcggcgggggtccccagacagacaccaacggaagaggctcgggaagctgcgcatcgacgatgactggtccgtcggcgggcagcgccacaccgccgtgcatggggatgacggggcgcgccgaccacggacccgcggggccgccaaggtccagaagatgagcaggcggaacgtgtgggcaacagattctgttcgagcttttaagactttgatagatttcaataatgaacttgtgtttgttacacagtttaatcggagttggttcaaacctgaagaagcatctggtctaaggcggagaataagagagcttctgctggaagaatttgaaagtgccaagctggatgatgctttaccaggagcggatgcatctgagcgtgatgacagcataaatgatggagaattgaaaccagatgcatcttctgacagttcagaaatggtcgtagaggtggtaggagggttgggaggcactgacaagagcaatgaaggcatcaaggttgtagcatcagaagaggcaagtggagagtcaggagatgctggtaagagtaccgaaggtactgttgcagcatcagaagaaaagagtattgaaggcatcaatgttgcagaaccagaagatgcttgtgagagtataggaggcatctatgttgcagaatcagatgaagcaagtggggagtttggagagattggtaagaccaacaaaggcaccaaagttgcagtgtcagaaggagcaagtgtgtctggatacactgataagaatatggaagacatctctgactctgaggttgcagtattagacaaagctcccactagcagctacagacgtggagagaagaccacagcctgtgttctatcagaagcagcttcactttccgatagcgtcaaagatgaacaaggtatggtgaaaccagattctggcagctcaaaagctgagagagaaggagatttgattgtaattgcatcgccggaaagatcggaagggaatgatgagatcattggtagcatgccaattacagatgtagtttgtgacagctgcgacagcgacaccgagaccaag

SEQ ID NO: 14379 - DNA, 486 bp, Zea mays
  Peptide Sequence Number=SeqID_56158
atgtcctgggcggcgcgggtgggagacttgtacgtctactacgactgggaggtctcctacgtctcgacgcccgcttttgcctgtgaatcagcctcagtgccacaccccgtcctcggtgccttccaacctccccttcgcgctcgacctgcccatcggcggaggttcggcgctcgggtccccatcctcgaggtatccaccagtgcctcgctcctccacgccttcgccactctcaccgtctccgacgggcgccacccgtttcacgatcgcgacggccacatgcaacacttccgctcgcgcctcatggggcggcacatatctatcacctttggcctggagggctactactccactagtccaccgtcgtccggagacctctgcatggtgggcaccgagtccaggagcacatctccgaccacctccgcccgtggagccgctacgcatagttctgggtctgcgtcgcggacatctacatcagctacgaggtag

SEQ ID NO: 14380 - DNA, 204 bp, Zea mays
  Peptide Sequence Number=SeqID_56159
atggggaagcgcaagatgcttaggaaatctcttcagcacatatgctcttcttctgagattgaggctgctcttgacaacattggccttccagttacagaattgcttgttggcatggtgttcaacagttggagtaacttacgcctgaccgctgagagttgctatgcagatagtgagggtttattgtattttgatcgtagacgctaa

SEQ ID NO: 14381 - DNA, 291 bp, Zea mays
  Peptide Sequence Number=SeqID_56160
atggcgcacgccgacgcggccgccatggtgcgcgagggcgacgccgacggcgacggcgcgctcagcgaggccgagttctgcgtcctcatggtgcgcctcagccccggcatcatggcccacgccgaggcctggctcgccgacgccatcgccgccgacgagatgcagctggttgatgatgccatgcccatggatgctgctgccgctgatgattacggtggcgccggcagccgaggccacgccgccgccgctcctgatagtgatactgctcccgcccgccggtcgtcggtttga

SEQ ID NO: 14382 - DNA, 258 bp, Zea mays
  Peptide Sequence Number=SeqID_56161
atggcgctgctgcttcttcccttggcgtgtggtcggcacaggaagcagccagcgtgtgctctgctcgctctctccgtctctatctctggaggcgcggagaagagccaagagcgtggggctggggctggaacacgcgcggcgacgccgcgaggcacgagggacgtggcgttccgctttttggttgccgccggtgcggaggaagccgacaacgtgggccggtccatcaaccatctaacgaccgtggtggtgtcaggctga

SEQ ID NO: 14383 - DNA, 1125 bp, Zea mays
  Peptide Sequence Number=SeqID_56162
atggtcttcgacggttctgcgcctgcctctaggctagcggctagcactaccgcgagcgggatcaagatgattggttcattcattaccggaatgctaacgcttgttctcggatacgcgtaccctgcatacgactgctacaagacagtggagctgaacaggcctgaggtcgagcagctgcggttctggtgtcagtactggattttactcgcgtttctcaccgtactggagagagttggggaaagtttcgtatcatggttgccaatgtatagtgaagcaaagctcgcatttatcgtgtacttgtggtatccaaagacacgggggactgcctatgtatacgagtcattcttcaagccatacattgcaaaacatgaaactgagattgatcgaaatctgcttgagttgaggacaagggccggtgacatggcagttctttatttccagagggttacaaactatgctcagacaaggtcttatgaaatcttgcagtatattgcctcacagtcaccgactcaaagacagatgttattatcattttcactggccagtctaaacatttatgcaatcaaactgcctaaaattttcaagatattagccactaatctattaagagtttctgctgtggatgatgtaattcactcatttcatttgcacgagatatctctagcagtcatattgttgcatgggcatccagaattgccgcatgtggttatgcttattggtgtcttcgccatctcttcctttttgcaggcacatcagcagcagcaacgcccaccaccgccacggactcggcaggtcaaccctgcacctccacctattcccgcaccctccgcgcctccgatgccaccacagcctgcccaagcccaagttcctcccactccaccaaggcccctagttccagtggttcctcctggcgcagtgcctcctgccccgccaccaactgctcctgaagccaccgccaccaacggtcttcaggacaccgaaaccatgcaggtcgacccacctcgtgcttcactgagcggcccaccactaccacctgaggagacgctcatcgaggaggcgatccggctgacccggggccggctcaggaggcgcttggctgggggatctggaccaccgcaaaattag

SEQ ID NO: 14384 - DNA, 540 bp, Zea mays
  Peptide Sequence Number=SeqID_56163
atgtcctcccaccgctccgccgcacacgtcctcagcggcgtccgccccaaatccggcctcgcgcaccgcctgcaactcccttccaggagttgcctcaccggcatcgggtgccgcacgagggagcagctggagtatgtgattcttcctctgtgttgggcccctgcatttcctacaccacctactatcgctccttcaaatttggctccatccactactgatcttaattgccgctgttggtggcctacaaaagcagtaggatggtggggagaaggctcaatgaagatacttggcgacggggatgtgcttggtggaggaacatggatggggtgcaccaaggatggaaggcttgccttcctgaccaatgtgcttgaaccagatgccatgtccggtgcacgaactaggggagatctgcctctcagatttctggaggaacaccatatgcaaacgaatcatggacctgtatctattgcagtgtatggtgaccatgaccagcctgcccttgttaattaccccaatattgctttaaactggaagtactaa

SEQ ID NO: 14385 - DNA, 234 bp, Zea mays
  Peptide Sequence Number=SeqID_56164
atggcaaagtccttcatcatggcaaagtccttcgtcaaagcctctgttgcttcggcaagccattcacaggcttcttggcctcagcttccaccgccaccaccactacagcccacttattcccaaagccagcagccagaagggtgtcaacactcccagcaacaacgtgacttcagggaggagtccgaagcccgtacagttaatagtactgtactagaatcgaagcacatatactga

SEQ ID NO: 14386 - DNA, 213 bp, Zea mays
  Peptide Sequence Number=SeqID_56165
atgttgtctgaggtggggtgtggcggaagtacctatgcaggaatgcagaggatctcgtttcggggcctcgagggggagattgagctcctctgggcggatctaggctgtgcggtggcgaggggctccgccggggaggcggatgcggagtcggaggctggaagagtcaagcctgtgagttgcgatgcggaggctctagaagagtccagtctatga

SEQ ID NO: 14387 - DNA, 102 bp, Zea mays
  Peptide Sequence Number=SeqID_56166
atggcgcggagctccacgtcagccgcaccagtcgcgagcgcgtccgagacgatcaccaggggtcgggctgacaagtgggaccgcggcgcagcgaggatttaa

SEQ ID NO: 14388 - DNA, 240 bp, Zea mays
  Peptide Sequence Number=SeqID_56167
atgggtgaggagttcgtactgcccttctcggacttccccacctctgattctggcaccctcatgctcacgccactctccctctacctgaccagcaccggctttgaggtcgcctcaccgggccaccgcgacgtcgtcggcttctcagccatcgcgaacgcccacgccggacgctgcaagatcttcgatgctgctgcttcaccaaacaatgaaatgctcatgacacatgatggaagaggataa

SEQ ID NO: 14389 - DNA, 156 bp, Zea mays
  Peptide Sequence Number=SeqID_56168
atgagggatctaggaccgatggcatcggtatttgatttcaactcgaaatacctattacgagttcagtgcatcttcctcctgcgtcccgggcacgcgcatactgcgtcaccctccactatggggcgtcaccgtacctcaccatcatcgccgaaataa

SEQ ID NO: 14390 - DNA, 459 bp, Zea mays
  Peptide Sequence Number=SeqID_56169
atggcgtcgacctggagagccaagacggtgggtccagcggtcccgtcggcgtacctcgacaaccggctgccggacgacacatcctacggcttccacctctacacgcctatgacggagacgacgaaggcctggctggacgctaggcccgcgcgctcggtcgtgtacgcctctttaggcagcatcgccaagccagacgcggctcagacggcggagatggcggaggggctgtacggcagcggcaaggccttcctgtgggtcgtcagggcctcggagagcgcgaagctacctgaaaacttcgccggcaggaccaccgaggagaggggcctcgtcgtgacatggagccctcagctcgaggtgctggcgcacccggctgtggggtgcttcgtgacgcactgcggctggaactcgacgatggaggcgctgggtgccggcgtgccgatggtggccatgccgcagtga

SEQ ID NO: 14391 - DNA, 1395 bp, Zea mays
  Peptide Sequence Number=SeqID_56170
atggcagagcgagtttcacagcacatcgtccacgttctcttgctcccgaacccgacccaaggccacatcaacccgatcctcgagttcggcaagcgcctcgccgcgcaccgcggcgtccagtgcactctcgccgtgacccggttcgtgctcagcaagagcggccaatcgtccgccggtggcgccgtccacatcgcccccatctccgacggctgcgaccgcggcggctacggcgaggccggcgggatcgaggcgtgcacggcccggctggagtcggccgggtcggcgaccgtgggcgagctcctccggtccaaggcggagcgggggcggccggtgcgcgcgctggtgtacgacgcgttcctgccgtgggcgcagcgggtggggcggcggcacggcgccgcgtgcgcggccttctttacgcagccgtgcgcggtggacgtggcgtatgggcacgcctgggccgggcgggtggagccgccgctcccgctcggcgaggagcagctcgagccgctgcccgggctcccgggcgggctcaggccgtgcgatctgccgacgttcctgaccgataaggacgatcgcgcctacctggacctgctggtgagccagttcgtcgatctggacacggccgaccatgtcttggtcaactcgttctacgagttgcagcctcaggaatcggactacatggcgtcgacctggagagccaagacggtgggtccagcggtcccgtcggcgtacctcgacaaccggctgccggacgacacatcctacggcttccacctctacacgcctatgacggagacgacgaaggcctggctggacgctaggcccgcgcgctcggtcgtgtacgcctctttaggcagcatcgccaagccagacgcggctcagacggcggagatggcggaggggctgtacggcagcggcaaggccttcctgtgggtcgtcagggcctcggagagcgcgaagctacctgaaaacttcgccggcaggaccaccgaggagaggggcctcgtcgtgacatggagccctcagctcgaggtgctggcgcacccggctgtggggtgcttcgtgacgcactgcgggtggaactcgacgatggaggcgctgggtgccggcgtgccgatggtggccatgccgcagtggtcggaccagaccatgaacgccaagtacatcgaggacgtgtggcgcgtaggcgtgcgagtgcgcccggacgggagaggcgtggtgaggaaggaggagctcgagaggtgcgtgagggaggtgatggaaggagagaggagcttggactacatccggaacgctgccggctggaaggagaaggccaggagtgccatgagcgaaggcggcagctccgacaagaacgtcctagatttccttggcgcgcttggactgaaaaaataa

SEQ ID NO: 14392 - DNA, 219 bp, Zea mays
  Peptide Sequence Number=SeqID_56171
atggtagaaggaggtaaagcaggtggtgtggagtgtggacaagcaaatattatttcaaagcacggtcataggtccctgactgttgtggcgccgacggaggcgcacatcgatggcgtcgggccgtcggctggctccttctccttccaagttgtcgtgggtctgcaggagtctcgcttcacgcctggcggcctccgccctccggagtccggagtcgtttga

SEQ ID NO: 14393 - DNA, 483 bp, Zea mays
  Peptide Sequence Number=SeqID_56172
atggccgacacacacgcgtcggagcgcagcatcctcgtcatcttgctcccgtatccgagccaaggccacgtcaacccaatcctccagttcggcaagcgcctctcgccgcgcaccgcggccaggttcgtgctcagcaatatcgccaccatattggacagctgcgaccgtggactagctcgcacggtccgagtcggagcagggcgcggtggacgtgctggtgcacgacgcgttcctggcgcgtgctgcctgcgtgcgtgcatgcctttcttcacgcagccgtgcgcgccggtggacgtggtgtacgcgcacgcgtgggccgggcggacagagcggccgctggtgagcgaggaggcggtggagctgccccgatttcccggtcgcggctaccgtaccccgcccgcgtacgtggacctgttcgtaaaccagttcaacggcatgcacaagataaccgaccatgcacgtccttgtcaactcgttctatga

SEQ ID NO: 14394 - DNA, 738 bp, Zea mays
  Peptide Sequence Number=SeqID_56173
atggcgtcggcgtggcgcggcaagacgatcgggccgacagtgccggcctcttacatcggcgacgaccggctcccgtccgacaccaagtacggacttgacctctacgagccgaccgccgcgccgtgcatcgcgtggctggacgcgcacccgccgcgctccgtggtgtacgcctccttcggcagcctgtccgacctcgacccgctgcagatgcgggaggtcgcgcacggcctcctggacgccggccggccgttcctctgggtcgtgcgcgcgtccgaggcccacaagctgcccgcgggcttcgagggcgcgtgcggcgggcgcgggctggtggtgtcgtggtgcccgcagctggaggtgctggcgcaccgcgccgtggggtgcttcctgacccactgcggctggaactccacagcggaggcgctggtgacgggcgtgcccatggtggccgtgccgcagtggacggaccagccgatgaacgccaggtacgtcgaggccgtgtggcgggtgggcgtgcgggcgcggccggccccgcccgacgacagcctcggcctcgtgcggaggggcgaggtggtcatgcgcgtcgaggaggtgatggacggcgacaagagcgccgagttcaggaggagcgccgacgtgtggatggctaaggccagggcggcgagcagggaaggcggcagctcggacaggaacatcgccgagttcgtggccaaatatgcacatcggacgccaagtgaatga

SEQ ID NO: 14395 - DNA, 741 bp, Zea mays
  Peptide Sequence Number=SeqID_56174
atgggcatggattcctacgccggcgagaacgagccgaaagtcggcagcggcgttggaagccacgtgctgctcctgccgtacccgagccagggccacgtccaccccatgctccagttcggcaagcgcctggcgtactacggcctgcgccccacactggccgtcacccgcttcatcctcgccacctgcgcgcctggcgacgccggcgtccgcctcgcggcggtctcggacggcttcgaccgcggcggcttcggcgagtgcggcgacgtggccgcctacctatcgcggctcgaggccgcgggttcggagacgctgggcgagctcctcgaggacgaggccgcgcggggccggcccgtccgggcggtggtctacgacgcgttcctgccgtgggcgcagggcgtggcgcggcggcacggcgcccgggccgcggccttcttcacgcagccgtgcgccgtcaacgtggcgtacgggcacgtgtggcgccgccggctgcgcgtgccggtggacggggtgctccgcctccctgggctgccggcgctcgacccggatggcctgccgtcgttcctcaaggtcgggaccggcctgtacccggcctacttcgagatggtcgtccgccagttccaggggctggagcaagccgacgacgtgcttgtcaactccttctatgagctggagcccgagttgtgtctttctagtgttacagtgcagaaggtcaaaactaagaaaaaacacgactacgtgtaa

SEQ ID NO: 14396 - DNA, 504 bp, Zea mays
  Peptide Sequence Number=SeqID_56175
atggcggaggggctgtacggcagcggcaaggccttcctgtgggtcgtcagggcctcggagagcgcgaagctacctgaaaacttcgccggcaggaccaccgaggagaggggcctcgtcgtgacatggagccctcagctcgaggtgctggcgcacccggctgtggggtgcttcgtgacgcactgcgggtggaactcgacgatggaggcgctgggtgccggcgtgccgatggtggccatgccgcagtggtcggaccagaccatgaacgccaagtacatcgaggacgtgtggcgcgtaggcgtgcgagtgcgcccggacgggagaggcgtggtgaggaaggaggagctcgagaggtgcgtgagggaggtgatggaaggagagaggagcttggactacatccggaacgctgccggctggaaggagaaggccaggagtgccatgagcgaaggcggcagctccgacaagaacgtcctagatttccttggcgcgcttggactgaaaaaataa

SEQ ID NO: 14397 - DNA, 441 bp, Zea mays
  Peptide Sequence Number=SeqID_56176
atggtggtcggttctcgggtggccgttggcacattgtgcgcagagcgatcgccggtgatcttgcgctccccagaggaggagaataatatgtcctttgtaatacaggatttgacaaatcagctggttgagctggagaggcacttcaataatctggagatgaacagatccgcttcagcaaaacttgccctaattgactgctcttccatgctgacagaaatattgcggaggacgcggtcaatattacataaactgaaggaacagatcagtgacggtactctagttattggagctggtgctggcataggcatatttgcaaagttcgaagaagctggtggggttgatcttataatgttgtacaactatggacggtttcgaatggctggaaggggctcactagctgggctcttgccctttggtgatgcaaatgacattgtactttag

SEQ ID NO: 14398 - DNA, 366 bp, Zea mays
  Peptide Sequence Number=SeqID_56177
atggctccaaaaagagggaatcagaagcttgtaaaagggattgagctttgccagctcaatatcattttgctagcttatattagcttccagtggcaaattgggatatcaggtgcttttaagtccgagatcgcatatgagtcagcaactagaaggcaaccagcacttaccaaatcctattcattccgctcttggagccaaaataatgtggtggcttgtgttacgtatcctagccatgatctggatatggttcccataagaacacttcaggtctacattgggttttactcttacaataatatagttttacattcagccatcatgaatgttgttcacaaggcaaagaagctactgggcatagtgatgtaa

SEQ ID NO: 14399 - DNA, 666 bp, Zea mays
  Peptide Sequence Number=SeqID_56178
atgaccgaggagtggctgcgcatatgggtggatgacgggaaggccccacgcgacggtgactccagcggaacgacgagggagaagggaatcgggctgcgcggtgggagagctaagaagaagcggaccagccctcgggagcaaatctccgcctcgctcgatgctgggctcgccctcggacgcaaatctccacctcgcctgacgctgggctcaccctcgggcgacgtctatgcctcgctcgagatcagcttcggctacccgccctgccgcgaatcccataggcggcactctggcaactgtggcacacatcagggaaggctcaaccatcgcctcaggaagacttccgcctcgcctgagcagggcgctgacctcaataatcgcaacaaaggaatcacaacgtcattcggcacagggacgctgacgcgctccgtaagaaggcttttacccataccgcagcgctgttacaacaactatggtatgggcgaccactcccctgggggctcgggcgtacgaccaacccctcgtcctcggcctcggctctcagtaggaaatcagcaagcacaagtcaacaacgcagtacaccatcatatcactcacaggacgccaagacatctcccctgggaatacgacgacccaggcttcaccagtatacatctcctaggtgtataa

SEQ ID NO: 14400 - DNA, 243 bp, Zea mays
  Peptide Sequence Number=SeqID_56179
atggcgcccgtggccttggcggggtggatcgaccactgtggcggcatcaattgctcatcggagaaggaaggtcgccgcggattgcgtctctccatgggccgccctaacctcgacgtcacggctgcggaagaaggcccagcgatggcgaggtccatcgtggtggctgggcggtggcgccatttgcgtggtctggtgagggctgaagtatccgccgttgaatcttcatccagcgtcttggattag

SEQ ID NO: 14401 - DNA, 234 bp, Zea mays
  Peptide Sequence Number=SeqID_56180
atggctcgcacaggaagatccacgcaggttcacagagcatggtcatgcagggtgaagtttatccagggcaaaagagagggggttgacccctcccttacgatagagacctttttggacacctatatcttccaagtttgtatgatgtcaagccagggtcccttaacaaactttgttcatgcatactacctctcccactttgctgtagacattctggcacaaagctacacagaatag

SEQ ID NO: 14402 - DNA, 267 bp, Zea mays
  Peptide Sequence Number=SeqID_56181
atggcgccccgcacgctccctgacgacggcggctctcggcccccatacggaagcaagaggacgtcagcaaggactcgacagccccgacagctgtcattccgccaggctctagcgctcctccgatggccacgacatctcaccaactgggtgccaaaacctctccggctgccacaacggcatggaccccccggtctcgaaacgccgacagttggcgcgccaggtaggggcctgctgcgtgttgatgaacagcttcccgtcaagctctag

SEQ ID NO: 14403 - DNA, 726 bp, Zea mays
  Peptide Sequence Number=SeqID_56182
atggcaacctcactccgattgttgttgaacagtcttttgctgagtggtgggggaagggtgttgtatttcggtccactttggacctttttctatcttaatataatgatgtgcagctctcctgcgcgttcgagaaaaaagctcaaaatgctaaatcggattgctacagtaaaagatgatggaactgtggttgttgatgtgccaagtggtctggaaccaactatagttggtggaactgaggatatttatactgaagctgttgaagaagcattagatggaacggagatactatacaggcctcctatgcaaatagttatacttattgtgggtacacgaggagatgtgcagccatttgttgctatcgggaaatgtttacaggactatgggcatcgtgtgagattggccactcatgccaactttaaggagtttgtactaacagctggcctggagttttttccgcttggtggagatcccaaaattcttgctgaatatatggtgaagaataaaggattcctaccttcgggaccatcagaaattcctattcaaaggaaacagatgaaagaaattattttttctttgctgcctgcatgcaaggaacctgatcctgacactggcattccttttaatgttgatgcaattattgcgaacccacccgcgtatggtcagtataccttgttcattttgaaaaaaaggttcttcacagtttgctttgtttctcacccgttgtaa

SEQ ID NO: 14404 - DNA, 153 bp, Zea mays
  Peptide Sequence Number=SeqID_56183
atgatcagcgagagaggaccttcaaaattaagtgctgtcacatccttacacaatgtttgctatcacattgttgtcttgtcctgctatgcttcagaggccatgccccttgagatgatagaggcttccatagatcaagcaccatgccaggggtga

SEQ ID NO: 14405 - DNA, 270 bp, Zea mays
  Peptide Sequence Number=SeqID_56184
atgtcgagtcctctcgggagcggccgacttatctgcggacctgttaatattcggcaacgcctgagggaggggggccttcggccttccccaggggcataccaaaacaagattccttatcatggtttggggaaagcaaacggttgcccggtaacttccgaagtttgcccgctaagcccgccccgatcagaccagaatggtatcagggtaatctgggacgcaaaaattaaggttgacgactcggcccgggctggaaaagggcaacccatctaa

SEQ ID NO: 14406 - DNA, 234 bp, Zea mays
  Peptide Sequence Number=SeqID_56185
atggaatctgaagacggggtgacaggtgctgttagggcattccttagacacctgccatcaaaagctgaggaacagagtctgccgcagtcatcgggcttcctggaattcttaggcccactaacacagacgacgatttcacgtctgcatggccaacccgttctgtatatgaaaagaaacagagcaaatggcgtatttggaggtgttggggacttgttctcaaatgctatgagttaa

SEQ ID NO: 14407 - DNA, 285 bp, Zea mays
  Peptide Sequence Number=SeqID_56186
atgaggtcaccgatgttgttaaggggcaagaaggcacggggaggaagtgtcagtgtcgtgggagggagggcgtcgacggtgctggtggccgggagacgcgacaacggtggaggaaaaggggagcccgagccacaacggttgtggggtacggagaagatggtcgtcgggtccatgagggtgccagtggggagaagccaaccgtgggggcgccatggcgtcgggtccatgagggggcaccagggcattggatttgaccatcaggagcaactgaggaagagcccctag

SEQ ID NO: 14408 - DNA, 822 bp, Zea mays
  Peptide Sequence Number=SeqID_56187
atggtggagggaagcaccttggtgaagatgtcagcgaactgcgacacagacatcgccagcagcgacacgctcgcagacgaagtggaggtagatctccacgtgcttcgtgcattgatgttgcacgagattggtggagagatagatcgcgcagatgttattgcagtagataagggtggagcgcgcgagggggctgcggagctcatgaagaagctagcggagccagaaaagcctcgaccactccattgggccacagtgcgatgctcgaccttagcgctggagtatgagacaatgggctaccgcttcgaggacgaggttggcgcccaggaacacgatgtagcccgatgtggaccggcacatgtcgaggcagccaacccagtcgggatcggtgtataccaccagctcagaagtcggggtgggccgaaggaggctgaagtcgatggagctgtgaaggatccgcttgagagcgaggaggtaggcggtgtcatcgccgtgtcgatggataaacaaggacgtgtcagacttggcctcgacaaagccgagggagaccaagtaggaggcaaagcgactgtatcaagcccgcggtgcctacttgaggccatacagggagcggttcagcttgcagaccagactcgagcgagcggagtcgacaaagcggacgggctagctgcagtgtaccgtctcagtcatagtgccatgaaggaaggcattcttgacgtccagttggtggacctctcgagagacggcaagggagaggacagttcgaacgttggtgaacttgacgacgggactgaaggtctcatcgtagtccactccggggattga

SEQ ID NO: 14409 - DNA, 693 bp, Zea mays
  Peptide Sequence Number=SeqID_56188
atggagcagacaacagagtgtgagagggggcagaccggcagggcagcaatggagcagacatcagagcgtgagagggggcagaccgtcagaggcgatgacttagggtcgaaaatagatgacgtttttgacttggagctttcttatcaaattgtggactccatgatttggcttggaataagggatatgataaatgagttcagaaagaaaaagctgaagctgcgtccagtaacatatctaagtggttctcagggttctggcaatgacattccgcatggatacatttggagtcctcatcttgttccgaaaccaaaagattggggcccaaagatcgatgttgttggattttgcttccttgatcttgcttccaattacgtacctcctgaaccacttgtggaatggcttgaagccggtgacaagcccatatatgttggttttggtagtcttccagttcaagatccacaaaagatgactgaaattattgtcaaagcactggaaattactggacagagaggtatcattaacaaaggctggggtggccttggaaccttgtcagaaccaaaagattttgtgtatctactagacaactgccctcatgactggctttttctgcactgcaaagcagtggtgcatcatggtggtgctggaacgacagccgcaggtcttaaagcagcggtgaagcaccctcattgttag

SEQ ID NO: 14410 - DNA, 174 bp, Zea mays
  Peptide Sequence Number=SeqID_56189
atgaatctgtcggagtttggttccagctgcgcactatggcgttgcccacataatgcttttgggaggaaggtgacgtcgaccgctgctcaatgcccaacagtatacccctactggacaacttatcaggggcccaccaagcagcccatgggacatgtccacgctatgaggacctag

SEQ ID NO: 14411 - DNA, 351 bp, Zea mays
  Peptide Sequence Number=SeqID_56190
atggctgccattgaaaggctaattgtggagctagtacctggggagcctgagaaagttgttcctaagaaaacttttgaagaaataactaaggttactaaggttgtgaagcagaagaaagttgtagcaaaggaaattagcttcgaaggggctgattacagaaaagatgcaacaattttgtcgcttaaaacaaatctagtcaaagctcaaaagtcaaatgaagacaagaggttagaaggaaagatgaaggatgagagaattatcgaacaagataaatacgttcgtgatttaaaggatgaaatagaaaatatgaagaccaatcacaaggatgatgtgaaccgtctttatacatag

SEQ ID NO: 14412 - DNA, 228 bp, Zea mays
  Peptide Sequence Number=SeqID_56191
atgaagaccgctagactcgccagcaagggtgagacgacggacatagttgagacaactccgatttcagaggtgatgagagagtctgggattgttgagccaaaggttttggaggacattgatattgcggagaagagtgattccgaggctgaagcggatagcgatgaagaagacctaacattcttcgcccaagaaagcctagtcacgttgaatttggcaaatcaactataa

SEQ ID NO: 14413 - DNA, 990 bp, Zea mays
  Peptide Sequence Number=SeqID_56192
atggaggaggcctccgaaatcgccgtccgtagagctacacttgcacggcatagccgtcaagggaccttagtcatcgatgaggagccagccgtctacggcatgtacgatgatcttcatccgacaattatggaggaggagcattggctcgaagaccataacgaagtagaggatgccaggtctctgtttggcggtagtgctgccatcaacatcgacaattatgatgacctccctggtgccgtcgccgacggtcagatgggcacaggctccacgagcccaacaccgacggcgaccggcacaagcactgctgccactagttctaaggagagtctggacgagccggtgccggatctcaagccgctccaagcgcgggacctgatccgcgtcgacggcagcgacacggacgcgctgtgcggcttcgtcggccacgtcgccgacgtcgtgcgggcttcggcgtccggcgtcgtcatctacacgttcgagaggatggaggcgtcggagctggccaagatccagcgcgagctgtcccgtccggcgttagcgcgagctgtcccgtcaggcgttcgcggtggggcctctgcacttgctgtcccaggcaccgacggagcagagcctgcacgcgcccgaccgcggctgctggcttggctggacgaccacccgccgcgctccgtgctgtacgtgagcttgggaagtgtggcctgcgtcgaccgcggcgcgttcgtggagatggcgtgggggctggcccgcagcagggtgtcgttcctctgggttggccggccgggcttggtcggcagcgtggcgagagcagggccgacgcaaactgggcgggcgggcggccggagctcgagcagggcctgctgcggcggtctggggccgaacgccgggcgggcgggtgaccggagctcgagcagagcagacggcggcggtgttggaccgaacgtcgcgcgggcgggcggagctcgagcagggccggcagcggcggtgcggggctga

SEQ ID NO: 14414 - DNA, 243 bp, Zea mays
  Peptide Sequence Number=SeqID_56193
atgaacaactttgatacggactgggttgcaagtaaccatataaagttgggcgcaatagctatccgaattcggattggcaagcgcgccgtcaaccgtggttcagtgaacctcactgaggataagaacaccatcgcggctgagacactactcggacttgcggccgcgcgcgccgtggtcttgggaccaagcctggcgaacctcggtgtccgccctaaaccaagcaacgtggaccgtagtccataa

SEQ ID NO: 14415 - DNA, 345 bp, Zea mays
  Peptide Sequence Number=SeqID_56194
atggacaacttctgtgctgcacggggaagcaccgtgtcccaccccagcctcaacgttggagatcctaaccccacgctcatctttccgtgctcaccctctctctcttctcgaacttttaaccggctagtggtgaattgcaacgagctctccgaagacgtcgcggacggaggaaggagcggtggcccttctttatctagctacgaggtgcggagttggggaggggtgggtatccagcagggaagtgcggagagggtggcagcaactaacccccgtggagtccttgggcaccagcagcagtcaagggggaggggaagctcctggcagcgcggttccacgaactggtga

SEQ ID NO: 14416 - DNA, 255 bp, Zea mays
  Peptide Sequence Number=SeqID_56195
atgtggcaagaccgggtggaccacgccaaggaggtgtgggtacttttccctggggccactgctcgactgacggatgcaaaggtcaccatcaccgaccaggaggatctggtggtggatctatccactgagttggtagagaaggaccttcagactgtgcagatgagtgctcgaattcgtgagctcgaagaacaagtggaggaaaggaaccacaccatcgaggttcttgaaaaccagctccagaatatccagcaatag

SEQ ID NO: 14417 - DNA, 1245 bp, Zea mays
  Peptide Sequence Number=SeqID_56196
atggtggcggctccgactctcgctgccggccggtccggccggagccacgcgccaagcttgcatgttcgcgctggagccgtgtgcccacgtcgggacgctgcgctcgcgctgagccgccctcgcttcggtaccccggaacctcgatgtgtggccacgcctacctcttctcttcgcccagcacaacctcgtcgccagcatcatcgtctcatcctcgactactttgtctactccgctctgacaaccgtgcgttacgctgacactcccgttgtgctgcaccacaatcgtcgcggagaccttctctgctggtcccttgagatgttggcacatatggttggggccctctacctaggtaaagatgtatttgaggcattctacaagaaagatctagctaagaggttgctgcttgggaagagcgcatcaatagatgctgaaaaatcgatgatcacaaaagacattgaattatccaaagaaataaacgattcattcaggcaatcatctcaagctaggacaaagcttccctcaggcattgaaatgagtgttcatgtgcttacaacaggctattggcctacatatccaccaatggacgtgaaactcccacacgaactgaatgtgtatcaggatatatttaaagagttctatttgagcaagtacagtggaaggcgtttaatgtggcagaattctttgggacactgtgtcttgaaagcagactttcccaaaggcaaaaaggaactcgcggtgtcattgtttcagagtgtggttttgatgttgttcaatgacgcacaaaaattaagcttccttgacatcaaagattccactggtatcgaggataaagaattgagacggacactgcaatcgcttgcatgtggtaaagttcgggttctccaaaagataccaaaagggagagatgtagaagataaggatgactttgtattcaatgaagattttagtgctcccctctatcgcataaaggtaaatgcaattcaaatgaaggagacggtagaagaaaacacgagcaccactgagagagtgttccaggatcggcagtatcaggttgatgcggccatagttcgaataatgaagacgcggaaggtcctgagccacacccttctaataaccgagctttaccagcagcttaagttccctgttaagccagctgatatcaagaaaagaatagagagcttaatagaccgggagtacctggagcgggacaggagtaacccccagatctacaactatctggcttga

SEQ ID NO: 14418 - DNA, 345 bp, Zea mays
  Peptide Sequence Number=SeqID_56197
atggggcatatatacatggcacaagatcgatttgagatttttagtgaagcagccttgcgcctgcccattgcccagcccccgaactacaaccagctacaagagatcctcctctattaccactcggttgatacattttctggttacaagccattcactgatgcaacacttcagcaatcagatctgttcatcagtacatcatttccgctcagttatgttcgatcatttcagttatgctcagttctgttcagccactcggttgatacattttctggttacaagccattcactgatgcatcacttcagcaatcaggaagaggagctggaagcaaggatcagattgcttga

SEQ ID NO: 14419 - DNA, 240 bp, Zea mays
  Peptide Sequence Number=SeqID_56198
atggctcaccagagttactccggtccgcccgaggccctctcaccgtcgttctcccttctctgcccatggattcatagccccttccccgccattgagtttgccatggtgccctctccctctctgcccaactccggcgaccctggagccaccctagctcgcgcctgcctcaactccggcgacctcaccgccacggagaggagcggcgccacttcgcgctggattgaatatgaactaaggtag

SEQ ID NO: 14420 - DNA, 165 bp, Zea mays
  Peptide Sequence Number=SeqID_56199
atgggctatgcgaacgccgccgtgttctgctcgggcaccgcccttgcctttatccggttgttatttactgttcttgttaagatcattatgttaattggaacatggagaacacccgggaaaacagtgctaccacaagggtttaatgggacgcccttggctaactaa

SEQ ID NO: 14421 - DNA, 159 bp, Zea mays
  Peptide Sequence Number=SeqID_56200
atggagactctgtcgactgaagatcagcaggagtttgaggaacacaagaagcagctgatcgaggatgcaaaggcgaaatttcttgccaacttcaaggtggataggaatctcaagagtgataattctgccagggcatctgtgtctggcctgtacccttga

SEQ ID NO: 14422 - DNA, 216 bp, Zea mays
  Peptide Sequence Number=SeqID_56201
atggcggcccatcacacggcgctctccttcccacggcgacgcggcaacgaacgaaggcgagccacggggcaggacgtggtggaggagaagggtgccgcgactcaagcatatatgcacaggaggaagataagcgatgagcaagaaagagtcaaaggcggagctcggtcgttagagcaaatctccgatgaccggcacgctatttccgtttcgagctga

SEQ ID NO: 14423 - DNA, 168 bp, Zea mays
  Peptide Sequence Number=SeqID_56202
atggcgtgggccagaatcagcagggtcgacgacgtcgaagcagcggtgccgatgacgtctacgcagcagatgcacgtcggcggtcgggatgaagagaactacgaaggcggcgcagttgtgaacagagacaaaagcgaaaattggggtgattttgatgctggctactag

SEQ ID NO: 14424 - DNA, 291 bp, Zea mays
  Peptide Sequence Number=SeqID_56203
atggacaaagaaaagcagtatgtcgcccgaatcagaccgatggtgaagcacaaggagcgggggaggtgtgtgtggggattcctaaccgtggggaggcccaaatcaaccacaatttctcgacggagctgggaaaccgccgccgtgccgcatgatgtcggtattgggcctctacgacatgcgattcctaggtatgaagtccttaccgatttccttaagcccctagctgcgttcaacacgattttgtatggagtttggtccactgtagtgtcgatcccgtggtcgccggcatga

SEQ ID NO: 14425 - DNA, 267 bp, Zea mays
  Peptide Sequence Number=SeqID_56204
atggaggaactggacgagcgcgctttcctatttgtcgtccaggctggagctgatgatggcggtcttgcggtcatcggcaaacccgaggttgatccttttagtttcttcagtcggccgcatagaggtcgcggcttgagctttcatttcgcaggcactgctaggtcttccttcaggcttggagtttgcctgcacagaagaagtcgccgacggttggtgatgagggccgcctggatggccactctgaaacattctgcggcgccttggtaa

SEQ ID NO: 14426 - DNA, 351 bp, Zea mays
  Peptide Sequence Number=SeqID_56205
atgggagcagggcgttgtgcagggggcgcggccacaggtaaaaggggatgcccgagcctgcagggggcgccatgggaaagctcggcctcggccatgggaaagaaggggaaaggaggaaggggagccagctgccctgcgtggaagaggaatagggagggcgctgggcagaggagatgggagcagggagctcggtggccaccatggctaggctatggagctcgcaggggcgaacgccaaaggtgccctgcgcgcgacgaggaggaagccagcagagaactctgcggcgagcgacagctaggggaaatggagatccgcgtgggggttgctggcaaactcgcggcagggaggtga

SEQ ID NO: 14427 - DNA, 1074 bp, Zea mays
  Peptide Sequence Number=SeqID_56206
atgctcgccaagcgcgttgctgccatcagcttcttgctcgaccgcgacgacgactcctcctccggcacgggggcggggtggtgcaagcggcgccgtctctggacgacagcggactacgagacgacccgggtgctcggggagggcagcttcggcgccgtcgtcgaggcgcggcaccgcgccacgggccaggccgtcgccgtgaagacactccgcgcgccagctggtgctggggcggagacggaggcgggggccaaagctctgcgggaggccgagctcctcgcggcctgccgcggccacccgtccctggtcggcctgcacgcgatcgccatcaaccccgccacggccgagatcgcgctcgtgatggagtgcgtcggtcccaacctccacgacgtactcaacggaagccgctaccgctccggccgcccgttcacggagcagcaagtgcggctcatcatgcggcagctcctggccggggccaagcacatgcacgcgcgccggatcatgcaccgggacataaagcccgggaacatccttgtcagcgccggcgccggcgccgatgaccgcgagcccgtctccgtcaagatatgcgacctcgggctcgccgcctcgatcaccaagccggcgtacgggcaggccggcacggtccggtacatggcgccggagatgctcctggggaagcccgactacgacgcgatggtggacatgtggtccctcggatgcgtcatggcggagctcctcaccgggaagccgctcttcgacggggaggacgacatggaggtgctcagcttgatattcggcgtgctcggcgtgtcggagcggacgacgtggccggcattcaagtccctcccgctcgccgccatggtgcccctgccgcccgtccgccaccccagcatgctgccgaagctctttcccaagaagctcctgtccgcggatggattcggcctcctgcagcggctcctctcctgcgacgccgacaagaggccgtcggcgtcggtcgcgctccgaagcccgtggttcactaaagacacggactctgctgcttcagtttctgctacagcaaagatggctcaatga

SEQ ID NO: 14428 - DNA, 1983 bp, Zea mays
  Peptide Sequence Number=SeqID_56207
atgtgcaccgagaactacgacgcgtgctacccagaccagccggtggtcgaccgctacctccccgtgtgggccaagctgccggcgttcgccgccaagccggccttcgtctgggccgacgacgacgcggcgtcgacgcgcaccgcgctgacttacgcgcagctcgacgccaccgccgcatgcatggcgcgcaacctcctcgccggcaccggcaccggcagcctccgccggggcgacgccgtcctcgtgctcgcctcgccgggcctccgcctcgtcaagctgctcttcgcgtgccagcgcgcgggggctcacggcggtacccgtcgtgccccccgacgacccggccacgctcagcggccccgcgcacgcgcacctcctgcgcgccgtgtcgcaggccaggccggctgccgctgtcgccgacgccggttacatagacgccgtcgccaaggcggtcgcttcttccgtcgccgggggcgagaacgccccgccctggctgccatgctggggagcctgcgctggctggccgtcgacgagctggagcgcgtgtgtgatgggccgcagacgccgtacgtgggctgtgggccggacgacgtgtacctgatccagtatacctccggagcgacgggcgtcccgaggcccgtggtggtcaccgcgggctcggcggcccacaacgtgcgggccgcgaggaaggcctacgacctgcaccccggcagcgtcgtcgtgtcgtggctgccgcagtaccacgactgcggcctcatgttcctgctcctcaccgtcgtcgccggcgccacctgcgtgcttgccgccccgggcgcattcgtccggcgccctgacctctggctcgaactcgtctccgagttcggggccacgtgcacgcccgtgccgtccttcgcgctgccgctcgtcctccggcgcggccagcggcggcggccgcttcagctcggcagcctgcgcaacctcatcctcatcaacgagcccatctacgagtcgcgcgtcggcgagttcgtggaggcgttccgctgccacggcctgcgcgccgcctccgtctcgccgtcctacggcctcgcggagaactgcaccttcgtgtccaccgcgtggcggccgagcgcgtgctctgaatctgatcgcctcccgtcctacatgaagctcctgccgtcggcgaggctatctccggccgcggcgaacgaggtgccggctgagatcgagatcgccgtcgtggacgagggcacaggcgaaccggtggaggacggcgtggagggtgagatatgggtgtcctcgccgagcaacgcgtcggggtacctcggccacccgtcggcgagccgcgaggtgttctgcgcgcgggtgccggggcggacaggcgcgtgcttcgtgcgcacgggcgaccgcggcgtagtcaggggggctgagcggtacctgtacgtcgtcggccggagcgccgacgtcctcgcgctcgacgcaggacggcgccacgtgcacacgcattacgtagagacggcggccttcggcagcgcgtcgggtcgcctgagaggcggctgcgtcgcagctttcgcgacgtcgtcgtcgacgccgtggtcacgttcgcagatcggcgtcgtggccgtcgtcgcggagctacagaagggaagcgccggcgtcggcgatcacaggggcctgtgcgacggcataagggcagcggtgtggcgggaagaaggcgtcagggttggtttggtcgcgctggttgacggtggggtggtgcccaagacgacgtcgggcaagttacgccgtggggcggcgagggagatgctggccgccggaaagctctcactggtctttgaaacacgatacgacgactgtgatggatcggtggctggggtgagaggcgaagaggaggagacagcggcgaagtccggagctagttggctggaaggagagggcggagagaccggcatggctaccgaagccttcgggagcgcgagccgtcgtcttcgcttgcagtcatttctttag

SEQ ID NO: 14429 - DNA, 276 bp, Zea mays
  Peptide Sequence Number=SeqID_56208
atgccaaggaaacggctaccaggatgcaggacaaacgcgctgggcatctcttcgtatattcgtggcatcgcgctcggctcatttagctacgactacacatatgcccagacagccggcacgacactacaaggaaaggtgaagaatgactgggagaggctgctgtttcagaaggagcacagcttggagcttctggagcagatttggacaggtgtgccccacctgaatgctgtattggttcttgtcttgcttaatgctaagactggagcaaggccctaa

SEQ ID NO: 14430 - DNA, 720 bp, Zea mays
  Peptide Sequence Number=SeqID_56209
atggagtgcgtcggtcccaacctccacgacgtactcaacggaagccgctaccgcgccggccgcccgttcacggagcagcaagtgcggctcatcatgcggcagctcctggccggggccaagcacatgcacgcgcgccggatcatgcaccgggacataaagcccgggaacatccttgtcggctccggctccggcgccggcgccgatgaccgcgagcccgtctccgtcaagatatgcgacctcgggctcgccgcctcgatcaccaagccggcgtacgggcaggccggcacggtccggtacatggcgccggagatgctcctggggaagcccgactacgacgcgatggtggacatgtggtccctcggctgcgtcatggcggagctcctcaccgggaagccgctcttcgacggggaggacgacatggaggtgctcagcttgatattcggcgtgctcggcgtgtcggagcggacgacgtggccggcattcaagtccctcccgctcgccgccatggtgcccctgccgcccgtccgccaccccagcatgctgccgaagctctttcccaagaagctcctgtccgcggatggattcggcctcctgcagcggctcctctcctgcgacgccgacaagaggccgtcggcgtcggtcgcgctccgaagcccgtggttcactaaagacacggactctgctgcttcagtttctgctacagcaaagatggctcaatga

SEQ ID NO: 14431 - DNA, 390 bp, Zea mays
  Peptide Sequence Number=SeqID_56210
atggcgatcgcgtgcaggccgaccagggacgggtggccgcggcaggccgcgaggagctcggcctcctgcagcgtcttggaggcgacggcgttcgcgctagctttggcccccgcctccgcctccgcccccagcaccagctggcgcgcggagtgtcttcacggcgacggcctgacccgtggcgcggtgccgcgcctcgacgacggcgccgaagctgccctccccgagcacccgggtcgtctcgtagtccgctgtcgtccagagacggcgccgcttgcaccaccccgcccccgcgccggaggagtcgtcgtcgtcgcggtcgagcaagaagctgatggcagcaacgcgcttggcgagcatcgcaaaccggtggcgaggatcgcagcagaatga

SEQ ID NO: 14432 - DNA, 3240 bp, Zea mays
  Peptide Sequence Number=SeqID_56211
atggccatgaattggagctgccgtgatcgggacgtggggcatggcgacgccgggaaggacatctgctggaacagggagcgcgcgggcgtcgctgtccacgcgccgaggcttcaggctgaggctgagtcgctgagacactccgggtgtcaatgcgtgtgtccatggtcggccgatgtctctgacggcaggcacggcagcgccaccgtgtacgccgtgcaggtggaggagcactcgccgttcggggccgcgccgctggactacgccgaggtgttcggcggcgtcgcggcgacctgctccatcccgtacctagacctgccgcccgcgccttcgctcgccgccgccgagggcttcttcgcctgccgcgggaagggggactacggggagatcttcggccgcttcgacttcgccgactttgcgctgccgtacgaggacctcttcggcgagccgcagccggagcccgttcccgacgccgcaggggagacggacccggagatcgcctcgtccagcgggagctccaccagatcatcgtttagaaaagaatccagccagctggaggatgagccttctatacttcctcaacactatcaaaatctggatcatcatcagcattttaaagaccataagttttctccaatatccttctctacagacacagaaagtccgcagtttgtgatgtcatataacaagactgctgagaggagacctgatgatctaattgagatgatgacctgcacagttaaaccttcggtggactttgtgattgattctcgcaattcattacatggtccagcaaccaatcatgtttcaagaattgattatggaacaatggccaatgatgatagtaataagaaaccaagccctgctaacacgagtgtgcagagtgctgagagtgattttgcagttgatcagaagcagcaaagtcaatcatggacacctatttctggaagtatatctgcaaacgaaaatcacaagaactctgatagtcattcaacacgtagtactgtaacgcctcctgattatgcatttcttcaggtatctgacagtgatacacagacacaatcaatcaaagtacaacaaccattgaagcaacaacctaaactgctcaacaagaaagagagtgcagctaaagaagacgtcaggattgtagacgacaattgctctccaacttctgcacatatcacttcaagtagcaacatgtctcacactgacaagaaagttgatgccaatccaacttctgcatcagcagctatgaaggaggcaatgaattttgctgaagctaggttaaaggctgcaaaagcattgttagagggaaaaggtgacagttttaaattgcggaagaagccaagtcatcttaaaagcacaaggtctacagaaatcaagtctcctatttctgtagaggccgatacttctgaacaaaaactatgggtgaaaaagtcatcggaagaagaaaagaaccctgacgattctttgtctgacaagcacaaaaagctgactgcagtcagattagatcattttgatgacaatggaaaaaaggtacttccattggagaagcctgagcatatggtgcaacactgcactgaatcctgtcaaacttccagtaaactacaaaaactaggcaactggaagtcaggtaatgacttttttgagctaacccgagatgatcagaaatgcaaaaatgatgaagccacagagggaggtgataaatgtgagcaaatgaatcctattactagtgtcatcaatgatcacaatgaaattgaattcaatgcagcaggctctgacttggacaggtatgaaaaactatgggaggttaatgatggcaggagtgtgggggtgaaacctgtaaatctgagagagaacaagacagctcccgtggacaaagataaaaataaggcacaccaaaagactcacaactcaattggtgagggacttgtaacactgaaaaatgctaaggaaagccatggtactgataagtgctttgagcttccttctatgagtggagcctccacaaagctggatgtcttcaaggatgtgtcaggttcatttccggaggctcgctcatcagtaaatgccagcgatcttggagaccatggtaatattagtccaaacttaagtccattagcaggaacatcacaagaggacacaaccagtaaactggtatcagaagtatcttgcgatggtgggatgcaacacacttctcgtagtaatgaaaagctacaggaatcctcagatgtatctgatgttgctatttcccagggaagtaacattaaatcattcattttagaagaacttaaagaatctgatgtatgtgatgctttcatgaggggacctaatggaaaagggcaggaagctgaaaattatggaagagaaaaattcagctttattgatggatcactcttgctgcgaccacacttccataacaaaggtgctaagatgaatgtaatctctgaggaagtacagaaagtcaaaaatgaggagaaacttggtccgtgtacacaccccgaagtaacaattgtggatctggatggtgattgtcctaaagatttgaatgatgttattctacaaaatgatgactttgcagacccagaagaatcaaacatgcctaatgtatttgaggtagctagcaagttgattaaaagagatctggatcaagaaatgcatgggtcattaggacatggtgaagaggagaatatggaagaaggaacagatgtacatctttgtgatattaatggcaaagaagtagatgaaaccttgttagaaaatagtgtgtgtacagatactgaagaaggatgtgctcattgtaaccaggaagaccagaattcatctgacagcaccaacagaggaaaaagtgatgtagataacatgtgttatacatcttgtgacgaggttaggtctgaatcattttcaggcgatgaagttgttatcaaaactacaattgatagcactgccagaacatttgttaatttgaaagatgagcaggttttgtcttcagaaatgtatacccgcatgcagcactcaatgcaaaaagatggtactgctgcttttcagacatctgggggtgttcctggtcttgaagaaatcggggatgtttccaacagaggaggaagagaattatcaacagaaaggtctacatgtgaagatcatggcaacgcaatcataatggaagaaaaagacactacaacaaggatatcaaaggcagagcatgcatcatctccctttggagacgatgtgtggtgtaactaa

SEQ ID NO: 14433 - DNA, 684 bp, Zea mays
  Peptide Sequence Number=SeqID_56212
atgttccagcacgccgatttgtttgccgaagaactcggcgagttgtttatcatggaaggcgcaggcgacgagcaggcaggcaggcaggtgctctcgctggccatttatgctgcggcggcggcaggacaggcggcccacggctgggtagttggcttggctggtcggccggccggcgtcctgctgcctgctgcctgctgcctgctgctggtggtggaagaatcgtggggctgggcggaccaggaggaccattccttccccgattccgattcgcaccgactcttcgtcctccgccatgaaaactgcatccgtcgcatcgcgtatgccagcgcagaaatggaaactggattctcgttttgcaaatgctggggcccgatttcccgcgagtctcggtgcaatgcatggcccagcccagcccacgagcagccatcgggtttgcttgcttctgcgttagcaggaatagtcagtcgtcctgcacacctatgggggcccgtggacactgaaacaccaccctggccactcacattaccgagcgagaagccccaagctgttgttcctcgcagctccggctccagattatcaccacgacatctaccaggagcccaggacagaatccggcacgcccgcatgcctggggagaccaacttgctccgtgtgatattatcatatacatacaccttgatttga

SEQ ID NO: 14434 - DNA, 336 bp, Zea mays
  Peptide Sequence Number=SeqID_56213
atggcttccggcggcgggtcgtcgtcgtcccgcgcgtggacgcagcggcagaacaagcagttcgagtgcgcgctggcggtgtacgacagggaggccccggaccggtggcacaacatcgcccgctacatgggcggcaccaagtccgccgacgaggtgcgccgccacttcgagcagctcgtccacgacgtcacccagatcgaggccggccgcgtccccttcccccgctacatgggcagctactacggcagcgcgccggcgcccgtcgccggcgccggcctcgacgacgacatggccgccgccacgagaaccaagcagtacccgaagttccagcgatga

SEQ ID NO: 14435 - DNA, 450 bp, Zea mays
  Peptide Sequence Number=SeqID_56214
atggagaagaaggtgatgaagaagcggctggctgtggcggccgtggtgctgttatttggcctgctactggccgtgcaggaggccgccgccgccgaggaggccgcggaagcggcgccgacgacgcccggcaacagcaaggccgactgcgaggtccccggcacttgcgaccggaacctcaaccaagccgccgaccccaaacgcccgggtacgaagaaggcgacgaacatggcgaggctggccttggtagcggcggtggttctgtgcctcctgttagcgacagggccgcagggggccatcagcgccgaggggatggtgtcatttgacaatttgatcagctgcaaggtactgggcaactgcgacaagaacctgggccccgaggcctcccgcccagggaaacccgccaacgactacacccgcggctgcaacccgatcaccggctgtcgcggctga

SEQ ID NO: 14436 - DNA, 390 bp, Zea mays
  Peptide Sequence Number=SeqID_56215
atggctacttttttaatcttcccctcctcttcctcctctctgcttggcgttgcaacccccgcttcaaaagcaacacagatggcggcggctacgacaatggcgcagaagcaccgcggcttgcgctgcaaccggaacccttttctcagccacgttcaccgcctccgcccgaggacgacaatgacgaggctaaatgctgatgagctttacaagagagtcctacaggagattacaccatccattgcttacagaagttcatatccgtacgtatcatgtggaccacaagcaagcattccgtcaacaaacaagcgcttttggttagtgttcctgcctgctatgtcatgtggaccacaagcaagcattccgtcaacaaacagaagcacttttggttag

SEQ ID NO: 14437 - DNA, 207 bp, Zea mays
  Peptide Sequence Number=SeqID_56216
atgggcgatggcgaggctgacctgtttgtggagcaggacgcgataggggaagcgttgtttgaggggtggggccgtgggggcacgcgtctgccggcaaagacacgaaacggagcgcgtagcgccagtgctggcagggacacgcgtgacacgtcagtccgcggagtcaagaaaatgaccgcgaagcacggagactcactcacgcaataa

SEQ ID NO: 14438 - DNA, 153 bp, Zea mays
  Peptide Sequence Number=SeqID_56217
atgtcgcgtgcggtggcgaaggaggtcgtcctgaactggttggcccgaacgcgacaaggcaagtctgacgttgaaaggatctgcaaggaagtcttcgaggacctgtcagacaagaacacggggctcctggacatcacaacttttgtagcatga

SEQ ID NO: 14439 - DNA, 299 bp, Zea mays
  Peptide Sequence Number=SeqID_56218
atgaatccctcgcatcctacccacacccatggcgccgccctcctgcaggaaccccagtgccgcctccctgctgtgtccaagggctccatggccgattcggccatgctcttctccccaccttgctatttttccccattgaagggagcctcgcaccatgactgccccgtcacccgtgtcgccattcggttttctcaccgcgccgagttcgccatcgcactgttgttggcgccttcaacttctcaccatcgagcagggagccacaccgcgtttgtctcgccgtccgccgtcgccgcgacgag

SEQ ID NO: 14440 - DNA, 418 bp, Zea mays
  Peptide Sequence Number=SeqID_56219
ccacagcatctcgccggccctccctgttgcgcgcacaaccatggccgacgtcgcgcctctcctcggcgccttggcctgagcgtctcctacgcgcggctatgggaaaatccgcgcaacgcatgaatccctcgcatcctacccacacccatggcgccgccctcctgcaggaaccccagtgccgcctccctgctgtgtccaagggctccatggccgattcggccatgctcttctccccaccttgctatttttccccattgaagggagcctcgcaccatgactgccccgtcacccgtgtcgccattcggttttctcaccgcgccgagttcgccatcgcactgttgttggcgccttcaacttctcaccatcgagcagggagccacaccgcgtttgtctcgccgtccgccgtcgccgcgacgag

SEQ ID NO: 14441 - DNA, 378 bp, Zea mays
  Peptide Sequence Number=SeqID_56220
atgtacgataaaaagactacgaaggtaatggtcataacaaaccaaagcaccactaaggatggagctaggataatacaaggcttgcaaagcggcaaagaaaacaaaacaaccaagggtgtgataggtgacaaagaagaggacacgaccaagggaaaagtaggcaaagtacaacgctcagatcaagatggaaaagaagaggttttaaagggcgggtataagataaacatcaaagtaagatatagagatgataagggtaaaggtgatgatgatgaaaagcatagtccatggacagagttaaagcaagacttacaaagtcacgaagtggagaaaacaatcaaggataagataagtgaggttctgacagaagagttgaaatag

SEQ ID NO: 14442 - DNA, 249 bp, Zea mays
  Peptide Sequence Number=SeqID_56221
atggccaatcacgccatgtgcgtggcccctgcccacaagcacatgctgcacaagggtcgtagcctgcgtcccagctcgcgcgtgcacaggcgggcagcgcccagccgcgctgagcagcaggccccaccacgacgcgtctcactagtcagacccttcttccccgagcaacaccacagcatctcgccggccctccctgttgcgcgcacaaccatggccgacgtcgcgcctctcctcggcgccttggcctga

SEQ ID NO: 14443 - DNA, 294 bp, Zea mays
  Peptide Sequence Number=SeqID_56222
atgggggatggtagggcgccggggcacgcgggccagagcgggccgggctgggtcgggctgggctgggctgggtcggacctggctgggccgcaccatctcaatggtgtttccccaaacagcgatgcaatgcttactaatttattggccactgagtataagaaattaaaagatgacatgaagaagatggacgaggagatccagcgacaacaacatcaggtactcaaggttgcgaagaagtggtacctctcgcacttcagggtagattgccaccagaaggttgttcgggagaggtga

SEQ ID NO: 14444 - DNA, 444 bp, Zea mays
  Peptide Sequence Number=SeqID_56223
atgggtaaagacaagagaggtcgaggctcgccccgccatgccagtgacaagcggaagcgggatccaagccctccatcggaggacttcggcgattcggagtactcggaggaggaggtttcctccgagtccgaggggtcgctggctctcgcctctcccccgacgtcgtccgatgattcgaacgactcccaggggattgctgcagaggtgtggacgtacatccactccgtcgagcacgccggactcgagggttcggatgagtcagaggtctcctcggatgaggactccttcggcttgtctgaggagcggagcggcgacgacaacgacgatgagggcggtggcggcggcgacgacagcaacgacggtgacggcggcaagggcgacgacgacggcggcgagggaggtgaaggcgacgatggtggcagtggccactggtttaaatattag

SEQ ID NO: 14445 - DNA, 183 bp, Zea mays
  Peptide Sequence Number=SeqID_56224
atgtctcgccaggggtcgaacacaaccgtggacccgcccaacgtcgctgggagccccgtagctttcgccctaccgttgttatttactgttcatgataagatcattatgttaattggaacatggagcgaccacccgggaaaacagtgctaccacaagggtttatggacgcccttggctgactaa

SEQ ID NO: 14446 - DNA, 600 bp, Zea mays
  Peptide Sequence Number=SeqID_56225
atggatctagcatatggtggtgctagaagagaacaaatacctagggatgaagctggacagatggcgtgggcactaagggaatcattgttggatcaaaggacacctcgttatagcccacctttaggtagaagtagcactgggacaagcaataccaccccaccattaggtgcatgctctcgtaggcagagtaggatggataggtactatcggagtccaagtgtgactcaggaaatatgtgatatagatttgcaatgttgtaagatgtcaacacatcctaggatagacattatgttgcatgggggtgccaaagagacttggcttcatgatatgttgaaagagaagataggtggagagcttgttagatggaatgccacgaagtttggcacacttttttgttcctacagagtttttgggacagacaagacaagttccaagcttggatggtgtctagtgattggaaaaataatgattggagagatgaagaagaccacaaattcacctacaatttgtttgataaataggatatggtgggagaaggttgaaatggtactgaaaactgtgacaccactctattctgtgcttcgatttgctgaccaatag

SEQ ID NO: 14447 - DNA, 249 bp, Zea mays
  Peptide Sequence Number=SeqID_56226
atggcggagcaacttctccgacgaagaattcgcgatcccctaaccagtaatccgccacgtcgagtctgtggacacctatggcaggctgagacgaagcgcacagagctatatggatggcgcaatggcgatggctgcgtggttctgccgacgggggacgggggggttggcggcaatggcgagccgaccccaaaacgctctctcttgcgcggcggtgtggtagtgaaaaataacattttgaatttgggatga

SEQ ID NO: 14448 - DNA, 303 bp, Zea mays
  Peptide Sequence Number=SeqID_56227
atggagcttggagggtgtcgcagcaactcactggttgcggacaacactcccggaaccaccctcgacggtgtccaggatggcagacaagcggcgcgcgatctccgcaataaatgcagagatcgcgtggcccagaggccttacgtcagagtctacctgtcggcttacatcacgggccataggccacgcggcagcaccgggtccccgccagagcggggagcggaggtcctattcaggggaacgcagaggtctcgggtcataagtgctgggatccggcactttctcacgggggtccggatccactga

SEQ ID NO: 14449 - DNA, 1623 bp, Zea mays
  Peptide Sequence Number=SeqID_56228
atggctgccctcgccgacatcgactcctcggcacttccgccgtccgagtcatccaaaggcaagggcaagatggacgaggaggaggaggacgaggcggagggcgcggagaagatgtgcggcatctgctatctcgacggccggcgggccatccgcggcgagctcgactgctgcgcccatttcttttgctttgtctgcatcatggcttggggccgcgtcgagtcccgctgtcccttctgcagggcccgcttccacaccatccgccgcccgcccgtcgccggccggttccccgacgagcgaatcgtctcgatccaagagcgcaaccaggtacaccatcctcagggcaacgggagcagcatagtgggcggagatccttacgtgaacaccatatgcaccgtttgcagcagctccagcgatgacgagctgctgctactctgcgagctctgcgactcagctgcacacacttactgtgtcgggctggggaccaccgtgccagagggggactggttctgcaaagactgcgggacgatcagagatgatcaattgagatggcaggctgagaatcagggtgaatttgagatcagcatggatgttcctggagctgagccagttccagccccctcgatttctggtgttgtggatgaggaccatgatctggaaaggccatatgcgcggagtggtggcggttcgacggatgacccggttccttccatttatgaaattgtgggtgatgattttgctaccagtgcagggatctttaggaggaggattgctgaggatattggatcccagggtacttcagctggatctcagtgtcccagatcgacccagggacgagacaatggtcttgcagcctatcatgctcacattcgtcttgaggttgagagagctagaacattacgcaattcccgcaatcttgataagcgcataagagagctgcgagagaactgggctgctctgcgtgctggttctgtggggtttgctccgcatatgcctgtcagaagaaggaaggatatggctggttctgcttctgttgctactgagcatcaacgttatgcagagcctgtaactctcagttcccgaaatggcgccgctgcagcttctgttccgctgccaatgcccttctctgaggaaactaatacctcactgggccatagtaaaaaagtcttgcaaaaggacacccgtgatgcccgtaaggcatggaaaaggttggagatggctaaatcatctggtgggaggaagacatctaagacacctgcctccattaactgctgtcccccattttccatgggtaacagatcgacttcttacagtccaattgatacaattgtgggacacaagaacgggaatctgcgtagatctagtgttggatctgggagccaatccactatgccggtaaaccctgaggaaccttcagctgtttgtgctgaagatattgcagcaaccattgaagttacgaaaagttctagtctggaccagcatgagcgcaagagaaaacacagttcggaaagatgcagtgatcaaagatccaaaagatccagagaatgcttgcataactttgttaaagaagctgtcagtttggcattgtctggcgggcagatggatcaaactggtaccccctgttag

SEQ ID NO: 14450 - DNA, 228 bp, Zea mays
  Peptide Sequence Number=SeqID_56229
atgtgggaaaggcgggacaagttgctggccgagcacgagctcgaggtggaggataaggagaagaaactggaggagaaagagcggacattggaggagcaggtatttggtctcgacttgtcgaggctggatgccagtacacttaagaaggagttggtgacctggcccccaggagggtatttcgactgggacccggacctgcacacagccttagctagggagtttcagtag

SEQ ID NO: 14451 - DNA, 207 bp, Zea mays
  Peptide Sequence Number=SeqID_56230
atggagggcgataagaaggcgggcgccgtggcagagaagaaggcggcggcggcggatcagagcaaggaggtggccgctggtgatgtgagcctgaaggagctgtccaggaggctcaacgacttcgccaaggagagggactgggagcagtaccatagcccccggaacctgctgctcgccatgttactatctggtgttaacgcctactga

SEQ ID NO: 14452 - DNA, 234 bp, Zea mays
  Peptide Sequence Number=SeqID_56231
atgccgctaccaagcccaaatatccaagatgctcacgaggactggtgcagtataccaacagtcgtatgtggtattgttgtagggcatgttccattatctgtaataaacaaaggcatgaagttgtggcaacggggggacaaagagtccccacctgatcagaatttttatatatgtaacataagttttaatgagtacaggtcggcgattgctgaggagggctctcaagcttgctga

SEQ ID NO: 14453 - DNA, 948 bp, Zea mays
  Peptide Sequence Number=SeqID_56232
atggaggacgcctccaccgtggccctgcgattcgccgacgtgccggtgcgcctgcatgccagccgccatgaccttgccagtctggacctcgacgtcgacgcactccgcctgtcgacacacatttttggcatcttctacggacacgacggtgtcgagtggccaactactgccgggagaggttccagaggctggatgatgaggtgtcaaggcaagcaagcaggcttgtccgtggcgtccatgagccatggccggtggccgccaagaacgtgggctcaaatgcggttgtcaccagtttgctcatcccatgctgtggttgccaactgcggggattcacatgtcgttctccgccgtggaaaggagacaatagagtcatcgattgatcgcacgtctgacattaaggatgagcaggcgaggattgaggcgttgggactgggatgcaaggtcatccaatggaatggctatcgagtctccggtatacttgctgtggtggactggtgtactagaagtacttcggaaaaggaacttgtaaggaagcaggtctttgtccttggccgaatgggaaatgctaaggaagctctttcgacaattataaacaaactggaagtcatgcagatgcaggaggttgttgaaattgttacggagcagcacgatgacgaactgtgggaggaactgattagacaatgccacaagaagcctgaaatgttaaggaagattaactttggatctgatcaatgttattctgattgctatgatcctatctaccaatgtggacatggttgttcaaaatccacaattcttattcatcgattatttccttccagtaacaatttcttctacttattcatggatcattttggttttagctggttgagcactttttctcaatctccagtgaacacatctaggatgactcttcacatccgtcagttgtggggctgtgctacttaa

SEQ ID NO: 14454 - DNA, 1227 bp, Zea mays
  Peptide Sequence Number=SeqID_56233
atgtccatggccgaggaggggagtgaggccgaggaggggagtgaggccgaggcgctcgagaaagacggcagcaaggcttcttcaccttcggggccagccagtcgactcgtctccagcaatgcggccggggtcggctcgctggaggtgggcgccgccaccgacacctccaacgcctccaggcagggattagatttgggcaagaaaggcccgggcgcgatgtccatggccgaggaggggagtgaggccgaggaggggagtgaggccgaggcgctcgagaaagacggcagcaaggcttcttcaccttcggggccagccagccgactcgtctccagcaatgcggccggggtcggctcgctggaggtgggcgccgccgccgacacctccaacgcctccaggcagggattagatttgggcaagaaaggcccgggcgcgatgtccatggccgaggaggggagtgaggccgaggaggggagtgaggctgaggcgctcgagaaagacggcagcaaggcttcttcaccttcggggccaagcggtcttgaggacgaggagctacaggtgcaggatgcagttgccagtggttccaagaggagcaaagactccgccgccgccgccacacgcagcgccaatgtcagctcgccctctgtggttcactctcaccctgccatcctccctgctcccgcgcagcagattccagaggttaagcaagcagtatgtataccatacggatttcatagattaaagagtttggagtattcaaagcttgtatctcagtgcctaaacactgaatggacagctaccatagggcaaagtgaagaaacggaagagttgagcaagatcacattagagaataaggatattcagcttgatatcaatataagagaagaatctcggagttcttcacaacaagggaactttgacacagaaggtaccagctccagtgaggctttcttgcttggaacggttgcttcagaaaagatgcttgagaaactgaaacataaatctggaagatgtgagcctgctttagaaaaggctattgtggaactggagcatgataattttatgtctgggctgaaggtcgtgtttgatcgagagaggaaggtcttgggctggaaaaactttgattgttacagcgtgggcaactcaagaagcaaccttccagtgaacccaaatccttctggtgttccccctgcccctggcttgggaccgaacagctacactcactcctga

SEQ ID NO: 14455 - DNA, 675 bp, Zea mays
  Peptide Sequence Number=SeqID_56234
atgaatggtgggtggttgcgcctatctatagccccaaccacccaaactagccgtttggtgaaggctgctatcgcatggcgcaccggacagtccgagtggctcccagaattcccgaaggtgagcagttcggagttggagtccctggtgcaccggacactgtccggtggtgcaccgtacactgtctggtggcacaccggacctgtccgccgtgttgctcgccgccgccccgccgtgttgctcgccgacaccgccccgccggcagccaaaatgccgttcaagaggttcgtggagatcgggcgagtggcccttgtaaactacggcaaggagtatggccgcctcgtcgtcatcgtcgacgtcgtcgaccagaacagggctcttgttgatgcccccgacatggttcgttgccaaatgaacttcaagcggctttccctgactgacatcaagattgacattaaacgtgtcccaaagaagactacactgatcaaggcaatggaggaagctgatgtgaaaagcaagtgggagaatagctcatggggcaagaagctgattgttcagaagaggagagcatcactcaatgactttgacaggttcaaggtcatgttggcgaagatcaagaggggcggtgccattaggcaagagcttgctaagcttaaaaaggtggctgctgctgcttag

SEQ ID NO: 14456 - DNA, 192 bp, Zea mays
  Peptide Sequence Number=SeqID_56235
atgacctcggttggctatggggatcttttcccaaacagtgacacgacaaagctaattgcttgcacttttgtattcataggaatggcgatcattgctctcttaatcagcaatgtggcagattaccttattgagaaacaggagaaggaaaaggatattgtcatgaaaatcacaaagttaaaaaacgaggggtaa

SEQ ID NO: 14457 - DNA, 372 bp, Zea mays
  Peptide Sequence Number=SeqID_56236
atggagtgggtgatgaagaagcggaaagcttttgaccaacgtggtgacatgattatggttgcttgggctaagcgtcagcaacacaaaatgacactacgggcacaacgattctcacgctcaaaggttgatcccaaggaagaaaggaagctatttgccaaagaaaagaaggcatccatgaggattgttgtagcatttggtgaacatgtttctatggcttcattccactctagctctgttgggctgcgtgcctcctgtccctgtgcctcgtctctgttcaacacctcgctccactggatgtttgaaatagttcaactgtcatgcttaagtagcaaatatgtcactgttatagttaggcaccaaacatccagataa

SEQ ID NO: 14458 - DNA, 336 bp, Zea mays
  Peptide Sequence Number=SeqID_56237
atggagaagaaggccaccactactgcaaagctagccgccatcgctatggacaaggtgggatttgtcgtcgttgctgtggccagtgtcgtcgccgaggaagccaacgcgcgttggattcagtggcacatcgctatttggctgaagcgatcgcgaacttccgccaagaagatgtaccgttgttgcagcatgtcgtccacggtctgggtccacgatgtgcccgtcaagggcatcggtgctcatacgcagcttgatgtctgccattttgaagaggtcgcgccatacgtcgctggtgaagaccaggttccgatcgctcatgatgagttgggagatccatag

SEQ ID NO: 14459 - DNA, 780 bp, Zea mays
  Peptide Sequence Number=SeqID_56238
atgaagcaacataagcagcgtttcaacacatggataatggtgaaggacattttacctgaagaaacaatagaagaacaaactatcaacgtccccgagccccatcttgtccaaactccgaaccctagctccttgctgccgcctcatcagacctcctgctcagccgccgctgctgccgtcgctgctcctccgggcgaactcaccgtcaccccgctcatgcccatagcattttgctacgcctgcttcaaagaccttgactcgctcccctcctcgtcgcctccgtgccaccccgacgcgccgccgacgcctggctccaatacacgcgagatgcacccgacgcgccgcctcctttacacaacaagcaaacccggccaggcaacccacaacagagaagaagaagaagggcggcgagagaggccttcgcgtcgtgtcccttcctcttcttcctcctcccgtcctctgtctctagcaccctatccatcagcactctcccgcattattcttgatcccaaccagtacaaccagtactgcgattcttccccaagatcgaaggccgaaggagaagcaagaaaggtagttattgcctctcatgttgctgtattttccttaattggatttacatgtaaaatttttaagattgtgcaggccaactggaatcctaccagtcatattgtagttattccaaatgagactaacccaaggcatatcattattattgtaaaacttctaaaggtatttcagaagaagggcttcgttctaggtttccagcttaaggacccctaa

SEQ ID NO: 14460 - DNA, 219 bp, Zea mays
  Peptide Sequence Number=SeqID_56239
atggcagcaagtagtagtagaaggaggcggccccgtctttgcagtagtgtttcttggcatgcacgtatattcaagctacatgcagatagtggcgacattaccaacgacacctggatctcgcccccgggatggaccccgtcagggaggagtgatcctagtgttggtcttaggatcggcaggccacctaatacgcctccagacgatgtacagtcgaagtga

SEQ ID NO: 14461 - DNA, 168 bp, Zea mays
  Peptide Sequence Number=SeqID_56240
atgccctgcgcccttggcccgcctgtcagcgccctaacccccctggcgctgggcccgctcgacaacgagcagtccgaggttcctgtgtgtgttgttggagacctccctgagcagcaacctggtgaaggcaagtgtcctctgacccattatgtcctacatactctatga

SEQ ID NO: 14462 - DNA, 687 bp, Zea mays
  Peptide Sequence Number=SeqID_56241
atggagaacactcaaatgaacttgtctggtctggtgcaagaccggaccatcatgtacgaagagctaactcgagaacaccaagtgaagtatgataaaatgaaagctcttttcgaagctagcctcatcggctctttcgagaggacccacaaccatggcatccggtggaaggggttcacgcccgagggcgctcttgatgaggttgacctcttgttacattcggaagagcgcactaaggcattacatcaagaagtcaactacatggtggctcattcactccatcgtcactccgtgagcctgatgaatccattcgagcgtgtggttgttcacactgtccaggagatcatgaagcatcagtactcttcaacaggcccgatgttgggaagtcataaaggggatattcctttccagacccagtcacctctaccgtattcagtagctgccccaaaaacacaattggccgcttcaccggtgtacgttgtgtacaagacgtgtggaggtcctgaggattaccagttcttcaataagccacctaaccacatcccacatggatattcatgcatgtatgtgccagactgtgccggcacggcacacccaatatggtctggtgtagcaggaatttatgaggcggacaccgagaagcaagcatggctggacaaatatgccactaggctaagtcatgagaactag

SEQ ID NO: 14463 - DNA, 581 bp, Zea mays
  Peptide Sequence Number=SeqID_56242
tcacttcatcgaatacaaagaatgcaagcaagtggggacaacaagggggctcaccagggtggacgacgtcgcaaccgaggttgtgcaagcacgacgtgctgctcgacaaccaccaaggcactgctgtagggagggaagaacatcggcctgtgccatggggaacaactcaccagcatctagagggggatgccacggggagggagcaagggacccgagaaggagggaacgccatggggctggacgagctgatgcacatagaggggaaaagaaaggggggcgaacagggagatttgctcgaccaccaagggaaacggctggcatctagggcgccatgggaggatctcctgcatgtagagaggaggaggggcttgccccttgcggtgcacgacggcaggaacatggcgagcgccatgggagggatggggaagacgccatggcggcctacgctggaggaagatagggaagggatggggcgccgacctgatgggagccaagagggaggggcgagcacctgggaagccgatggcttggcaactaaagaagacaagcgaggtggaggaaccatgggggtcgggggataa

SEQ ID NO: 14464 - DNA, 198 bp, Zea mays
  Peptide Sequence Number=SeqID_56243
atgcgtgggggccacacgctggatacaggttttggccccacctacaggctcgcaccatcccctgaggtgggcccgggggccactgtcggtacctcgaaacaggggtaccccttctgcagtatgaagacgctgcacccgtacgacacccctaggtcacgtggggagcagcacccgaccccaccacatgggcagggctag

SEQ ID NO: 14465 - DNA, 440 bp, Zea mays
  Peptide Sequence Number=SeqID_56244
ggatgaacgtcgatgagggggagtggttcggcgggcagggaacgagcgcgatcgtcgtgctgcgtggacggaactccgacgaggggctcggtgctcggagcatgtggcgcgttgggtggctgtcttggcacgcggagcttgagcgcgtcagtcgggtcggtgcgggtggcacctgggcgtcgctgctctaccggggtcggcgacgtggcaggggcggctctgctgttcctggcgctgcgcgtggaagagaagcaatggaggaggagagagagtgggtggcggctgagggagaggagcaggggaggcaagggagagaaggtggcagcggctgccagggagggagggagtgcggctgggatgatgggcctaatggaccgaatgcgtgttataaatctacccctcttaaaaagaatctcgtcctcgagattaaggaaggctag

SEQ ID NO: 14466 - DNA, 604 bp, Zea mays
  Peptide Sequence Number=SeqID_56245
aacgccgagaaggtgcgaagtggtcataccggtgagcaatcctcggctacccgccacccatctgccctccccatcggcgacatacgctcctacaggtgtaacagaatggctagagtacttacccgagatcgggatgaggttggagagcttggtcgcgacgcagtcgacggcccacgccccggggaggcttccccacgacggagggcggttcccaggcgccggcgaggaatcgttccacgcgcagaggcccttcccacccgcggactacgcgaaatgctcccaggagacttggagaaggcctccgacgaactctccgagacccaacgacagtaattgcctacttcggtcacgacggcgctctctcttccctttcggtcggcgaggggtatacggcgtggggcttctccaatggtggatccggtgggataggcgcggacgggtcccaggagctaataagggcgcggtcaggtcaaaggtgggcgaaacggccggcgagatcccaggcggaatcctgcacgacgccgggtccaacaaccggaggttggggataaccctgacaagtggggcccacgaggaagtgcctaacgcgagtgcgcagatgtaa

SEQ ID NO: 14467 - DNA, 390 bp, Zea mays
  Peptide Sequence Number=SeqID_56246
atgacacagcagcaggcgagggcgcgcagcgaagggaactcgcagccatgccataaacatgaacttggggagcgtgtcgagctaaagacgcagcagtggcatgagacccagcgagatcatggaggtggggatctgatcgagctttggtcacagtataacggcacacagctcggtgatgggataagcagcagggcaaggtcaatgaccggcgacggacatggcaggtttgagacggtgctgggcgccatgggaggggcagggagccaagagcagggagcagcggctgatgctccatggttaaaaacagataagaggcaaggaacgaccggagctcacaggggccacatagaggcggccaacgcctacggaagatgcagacccggactgtga

SEQ ID NO: 14468 - DNA, 255 bp, Zea mays
  Peptide Sequence Number=SeqID_56247
atgcgatccgccaccattgattcgctgtggtaccaacgaagtggcctcggtttggggccagggtgctacacggtgtcgtgctgggggttaccatgggcgcgctctacgggattggtggccggagtaggaccaatttctcaccgaggtcgtggatggtcgcggctccgccttgtgtcgtggcctggaggaattgctctgagaatcctgatgcccctggcttttccagaattagatggccagtccaaagagtcataa

SEQ ID NO: 14469 - DNA, 1836 bp, Zea mays
  Peptide Sequence Number=SeqID_56248
atggccgtgctgggcgagccactgccggctcttgacgaccccggcatcctcgtccaccccagcgccgacttcgccgcccaggcgctcgtctcgtccacgaaacagtaccgagatatgtaccaaaagtcgatcgacgacccagctggtttctggtcagaaatcgcagatgagttctactggaagcagaagtggagccctgataatgtttgcgctgagaaccttgacgtgaccaaggggccgatcatgattgaatggtttaaggggggaaagaccaacatatgctacaatgcagtggaccgcaatgtggaggcagggaatggggacaagatcgccatgtactgggaggggaatgagcccagtcaggatgggaagctcacctactctgaactgctggaaaaggtttgccagctgtcaaattacttgaaaagcgtcggcgtacgaaaaggtgatgccgtggtgatctacctaccaatgttgatggagctgccgattgcaatgcttgcttgtgcccgcattggtgctgttcactcggttgtgtttgctggcttctcagcagatgcactggcccaacgagtcattgattgcaagcctaaggttgttattacctgcaatgctgtgaaaagggggatgaaaatcatccatctcaaagatatagtagatgcatctctggatcaaagtgcaaagaatggagttgatgtaggcatttgcttgacatatgaaaatcagtccgctctgaataaagtagacactcgatggaaaacaggaagagatgtctggtggcaggatgttgtgcctgatttcccaactaaatgcgatgtggaatgggttgatgcagaggatccactgtttcttttgtacacaagtggcagcacaggaaagccaaaggccccaaattaccctgatcctggccgctgttgggacattgttgataaatatggagtgacaatattttatacagcaccaacacttatacgctcacttatgcgtgatggtactgagtatgttgctcggtactctcgcaagtctctccgagtacttggaagtgtgggtgagccaatcaaccccaccgcatggaggtggttgtatgatgttattggtgactcacgatgccccatatcagatacttggtggcagactgaaaccgggggattcatgatcactcctttacctggtgcttggcctcaaaagccaggatcagcaacgtttcctttcttcggtgtgcagccagtcattgttgacgagaaaggtcgggaaatggaaggagaatgcagtggatatcttttgcataaagaaatcatggcctggggctttcccggactctgtatggagataaagagagatatgagacgacatacttcaaaaccatttgctggatattatttctcgggcgatggctgcagcagggataaagatggctaccactggctgactggaagagttgatgatgttatcaatgttagtggacaccggattgggacagcggaagttgagtctgctctggtttcacatccaaaatgtgctgaggctgctgttgttggtattgatcatgaggttaaaggccagggaatatatgcttttgtgactttggtggatggtgttccctacagcgatgatctacggaaaagcctcgttacgacggtccgcagtcagattggtgcgtttgctgctcctgacaagatccattgggcacctgggctccctaagacacgaagtgggaagatcatgcgaagaatcttaagaaaaatcgcatccaggcaactagatgagctcggcgacacgagcacgcttgctgaccctggtgttgtggaccagctgattgcactcagtgacagctaa

SEQ ID NO: 14470 - DNA, 186 bp, Zea mays
  Peptide Sequence Number=SeqID_56249
atggacaatcactatgtgaaactcgatgtgcataacttggagacagctgatcgaactaaggacaaaggcaagaagaacttcgaggaaccgagtgcacgggagaagattaagaagaccgaggtacctaaagccaggggtgaagaagatggcttgaaagaagtcaagagtgttggagctcatggatag

SEQ ID NO: 14471 - DNA, 474 bp, Zea mays
  Peptide Sequence Number=SeqID_56250
atggatcctataaatggtcttcgagtcctgatcattgatgaagataaagatgatgcaaaccatatgaaggacatgctccatcaatacaactttcatgtgatagtgtttacaagtcctagagaggcactagactttcttaatggtcatgcacaagatattgatttcctattggtagcagtggatatggaagagatgtcacgatttgaattccttgatatggccatagatatgtatgaaaacatccaagaaattagccctggagctaatacagatggagaacaaagtaatgccacaaactcttctactaataaagagtatatgaataacgatatttatgaagtgcaaagctccacaggaagcaattcagtagatatgggccttgtgaactatccagaatctgaagatggtgaaactgtggagaaatgtcctaatgcataccaagaccctgaagttggcacatctcccaacaactaa

SEQ ID NO: 14472 - DNA, 930 bp, Zea mays
  Peptide Sequence Number=SeqID_56251
atggagactaccaaaggactacgtggcaaggctttaaagattttacattactacagggatatgttatggcaagtgtatactgatcagggctgggattcggctgatggtcgttatgtccctaatgaaggattttttgatgacattgttgttgaagatcctaatcctgtttcgacatctcaggctcctgattctgctgaagaacctgaagtcacgaatgatgatagtgttttggctgaagatgcaggagtcgatatttcacacaatcatggtacaaatcctggcatccagattgaagcagtggaagagataactgatgttatttcagcaaaggaggacaaatataagaaggaagttgtattgcttgctatcaatcacaagcatccagactacatggcctttagaccggaaaagagggtacaggagcttgttgaacatgaaaaggatgttgctgaaagtagtgtcactaagcaattggaggttgcagagatttataagccaagttctcatgttaaacccatatttgtggctgtcgaagctgacatggagaagtattacagtgcaccagaggcttcagatatagtcttcaggtacgtcgaaaaggaaaaattggttaaacctacagacaaggccaaggtgattcttgatgttacattatgtgatgcattgtacaaaggggctatcaaaaagggctcggcatacccaactgaaatccacaagaaagacttaggttcagcattcttaaaccgtatgcaagttcaccacaaggtatcgagaggaactcaggaggtcatacgcaagggtgccataagaactatccagatcatgacagaaagaagacagggcaacaagaagatgactcggctttcaggactcgagtgtaggttcggatgggagagccttcctagaaaatttatctccgactgcaggtag

SEQ ID NO: 14473 - DNA, 324 bp, Zea mays
  Peptide Sequence Number=SeqID_56252
atggcgctggcgatcctagcgaggcggcgggctgcagcggccgtgttgcggcggccgcagacggcggcgggggcggccgtgtccgcctggagggcgtacgcggcggcgggcgaggagagcgacgtggtggtggtgggcggcgggcccggagggtacgtggcggcgatcaaggccgcgcagctggggctcaagaccacctgcatcgagaagaggggcactctcggcgggacctgcctcaacgtcggatgcatcccatccaagatctgtgagaatcgcggatttgggggtatattaggtcatacggctgtgaacctaacctgttag

SEQ ID NO: 14474 - DNA, 133 bp, Zea mays
  Peptide Sequence Number=SeqID_56253
aggtgctgtccggttcttccccaaaagctcatcctcctgtagagtacaactgacggtggcatatgaagttcctgaaattttggccccagttgcatcagtaagtggcgtatgcataaatcttatgcttgcgtag

SEQ ID NO: 14475 - DNA, 441 bp, Zea mays
  Peptide Sequence Number=SeqID_56254
atggcgtcaactagctccgccggggacgtgggagactcaggtactaattcccaaacaaatcctggatacacggaatgctttgcatggttttgcattgatgggattggaatcctcgctgaaaaaaatgcaaagggagattacaagctagatgggtcaaaaggtgcggttgcagataaaacacttactgcttctgcaaacactagtagctcacatcaagaatctcatgatgttggagagctgcacatcattatattaagaatagaaaaaaggtcccgacatggaccagtacagaacaaaaggccgttcaaggcgctgttgactagttcttctccaccattgcatagcactctcttccccctgttggggtacaaacccttgcaaattgacttgtctaagaagctgaaaccaaaaattcctagcaaagacacggcccaccaatag

SEQ ID NO: 14476 - DNA, 456 bp, Zea mays
  Peptide Sequence Number=SeqID_56255
atgaaggtctccagccttcttgtaacacctgatggcctctccttcatgctgcagagtgcccaggcttctgctggtgccccacaccatagtcgtcaccttgcgggggtagggattgaatatgacaaacaagagttatgttcaaggtccacaaaacaagcaatgaaggccctgaaagtgattggggaaatggagggaatcagccagcaagcaaaagaagactatctgaaagttttctctgaaaacttacctcttgctcatgttgaagcgccggcagctttttttggatgggaagtgccagatgaatttaagaattacacccaacctggaggcagctcagaagtgcttaagaagaaagagagttatgggagattgctggagccaagcatctggatcttcttacagcacccattccagggatctagtgggggcctagcagtagaagtttgttataactga

SEQ ID NO: 14477 - DNA, 813 bp, Zea mays
  Peptide Sequence Number=SeqID_56256
atggctgagtctggcaaaggcaaagctatggatgctcccctggtctcgctgaaacctgatgaggttaggcctcgccgtcgccatcatcggaagaggtggcgcgactccagcccgtgcgagcgtccaatccaggcggcggcgatggagggcatggctgggtctgaggcgtttgacctcttggaggacagcagacagctcacttcggcttcctcgctccatcccctgctcaagaacattgaagggggctccatgcgtgtggcttcccaagatgaggctgcccaacgtgcccccatccccaattggcgctcgctcgggtggttcgaagatggcgtcatgtgtgtgggttcccaagaacagagcgggcgcccccttcgccccattactgaagcgttgagtccccaaatgagtgatatcctggagattcgtctgtcccccaaggttgctgaggtccctatgatggagccttgtgatggggatgaagtggtccagactgctatgtcttatgagtttgggaacgtatcagataggagaattgaggggaaggatcatgtaggctcttttcagctgactttttctcagtcagagatacatggtagcctgatttccccttcagacctaagcttgagggccccttctgaagcattctcacctactgatgacacagctttgcacgtctatactagaagagtttgcaacaacagggagaatgcggatatgcctgcggatactgatgatgatccttcagctatttcacctaccctgatgtcctttgaagtgaatatgccgtcatctccaggcaggctgagaagttga

SEQ ID NO: 14478 - DNA, 435 bp, Zea mays
  Peptide Sequence Number=SeqID_56257
atggccgcaggagccgcgttgtactaccacccaggcgccgggaaggtgagcctcgaggcggtcgtcccgtcctctccgtcgctggccctgaggctatcgcagagcaaggtgctgtgcgtcagcagcagccggtggtggatgaggcgaagatgggaggggaaggcgagcagcgtcagcagcagggcaagggcaagagcaagcgcaaggcctgccttgttctcccctgtggccatggactggcaggagtgcacgaacagtaccgagcttgaagttgatgttccatgctcggtggcctatcagtgttactcagaacgggagagtattcctcagtggatgccattcatctcgtctgtcaagggagatgcatttgtgcccctactcatcaaagcagctatagggatttttccttctcgtactacatgcaatattgtctga

SEQ ID NO: 14479 - DNA, 225 bp, Zea mays
  Peptide Sequence Number=SeqID_56258
atggcctgccagcagggccagtctgtcagcgcaaggagcatcagcgcgcggtgggacttggtgggccgcgtggatgggaagctgactgggccgagaagtggctatgagatcgatggttttggttatgactatggtgctggttgtcagcattgcaaccactgctcaggcgaagatgaagctgtggaaggagacttccaggagttccaagactatgacgagttctag

SEQ ID NO: 14480 - DNA, 711 bp, Zea mays
  Peptide Sequence Number=SeqID_56259
atgtcgcagccgttgatctcaattctcatccacgtccttgatgcagccgttgaccaggataccagcccacccgttgttctacgcatgctggacggggttgtcgccaagaatggcgcagcgcatgctgccgccaccgtcaaccacgaggaccctaccgtggcctttctcctcgaggaactcgcggaccaggacgttgtcctcctagaccttgagcgtgacaatggggccggcgaagacctggcaccgtccgtagatctggaagatgggctggagcgcgcggagctcgccgttcatgatcaggtgaggggaaatcagagactggacaccaggagattgattccccgtcactcagtcagcggtgtgcattcgattcttggcccagaggaacatgggacgggatttgggaacggacaggaggggaagtggccagtgggtggggtcaagacaggcggcagacctaggcagctgggactgggactgggaggactggccgcctgggaggctgggactgccggactggccggctcacggctgctggtgcgccgtgcgcgtgtgcgcgtgtgcgcgctgccgcgggcccgcggtgcgcgtgagttcgtgactgcggcggtgcagccgcctgccgcctggagtgaggacgccacccgatgctgggaagattggccgtctgggactctgggagtacgccgccggccgcctgggaagacttga

SEQ ID NO: 14481 - DNA, 2478 bp, Zea mays
  Peptide Sequence Number=SeqID_56260
atggcctccaagctgagtttcaagagggcagacagcatcgcggaaagcatgcccgatgcgctgaggcagagccggtaccagatgaagaaatgcttccataggtatgtttccaagggaaggaggctcttgaagaaccagcagctcatagaggagctggacaaatcactggatgacaaagtcgagagggaaaagcttgttgaaggcttcctgggttacattatttgttccacgcaggaagcagtggtgctaccgccctatgtcgcatttgctgtcaggatgaatcctggcatctgggagtatgtcaaagttcattctgatgacctgtcggtcgaaggaatcacaccctctgagtacctcaagttcaaggagacattatatgacgagaactgggccaaggatgacaactcactggaagtcgatttcggtgctcttgacctctcaacaccccatctgacactgccatcgtccataggaaacgggctccagtttgtgtccaaattcatgtcctccaagctgggcgacaagcctgaaattagcatgaagccgttgctggactacttgctttcgctaaactaccgtggcgagaagctgatggttaacgacaccatcgatactgtgaacaagcttcagacagcgctgctacttgcggaggtatttgttagcgggttgccaagatacaccccattcctgaagtttgagcaaaggtttcaagagtgggggttggagaaggggtggggtgacaatgctgaaaggtgcaaagagacgctgaattgcctctctgaagtgctacaggcgccagaccctatcaacatggagaagttcttcagcagagttccatccatattcaacatagttgtcttctccatccacggctactttggccaagagaaggttcttggcttgccagacaccggtggccaggtggtctacatcctggaccaagtcagggcccttgaagaggagttgctgcaaagaatcaagctgcagggtctgaacgtgacaccaaagattcttgtgctgactaggctgataccagatgccaagggtacaaaatgcaatgtggagctcgagccagttgaaaatacaaaacattcccacatacttcgtgtgccattcaagactgaaaacggcaaggagttgcgccagtgggtgtcccggtttgacatctacccttacctagagagatatgcccaggattcttgtgccaaaattcttgacattttggagggcaagccggacctgatcatcggcaactacactgatggcaacttagtggcgtccctcatgtcaagcaaactaggggtcactcaggggacaatcgcgcacgctctagagaagacaaagtatgaagattcagatgtgaagtggagagatctggatcagaagtaccatttctcctgccaattcactgcagatatgattgccatgaacactagtgactttatcatcactagcacataccaagaaatcgctggaagcaaggagaagcctgggcagtacgagcaccactacgcattcacaatgccggggctctgtcgctacgccacgggcatcaatgtcttcgatccaaagttcaacatcgccgcacccggtgcagaccagtccatctacttccccttcacgcagaagcagaagcggctgacagatttgcacccacagattgaggagctgctctacagcaagcaggacaccggtgaacacaggctggacaaggtgaagaatatcaccgggctagtggagtggtacggccagaacaagaagctgagggacctggtaaaccttgtcgtcgtcgcgggcctgctggaagcgtcgcagtccaaggaccgggaggagattgaagagatcaacaggatgcacagcctgatcgacaagtatcagctgaaaggacagattcgctggatcaaggcacagactgaccgtgtccgcaacggtgagctgtaccgttgcattgcagacaccaggggtgcatttgttcagcctgcactctatgaagcgttcgggctgacggtcattgaggcgatgaactgcgggctgacaacctttgcgacgaaccagggagggccagcggagatcatcgtggacggtgtctccggtttccacataaacccaacgaatggcagggaggcaagcaacaagatcgccgagttcttccagaagtgcaaggaagacccaagctactggaacaaggtgtccactgctgggctccagcgcatctacgagtgctacacatggaagatctatgcaactaaagtcctgaacatgggctcgacgtatggcttctggaagactctgaacaaggaggagagagtggccaagcagcgctacctgcagatgttctacaacctccagttcaggaacctggcaaagactgtcccaaggctgtttgaacatcctcctccgcaagccccagcaggcgcagggcctagtacgatgacggatcatgaccagcttgatggggcagaagcctgctacttctga

SEQ ID NO: 14482 - DNA, 3240 bp, Zea mays
  Peptide Sequence Number=SeqID_56261
atgtatattactcaaccaaaaaaaaagcgcattgagtttgtcagtttcactgcccacggcatgggatcttggagacaaaaactgcctgggttaggcgagggctcaggctcaggctcacaggctgctgaggccggcggtggtgggagaggtttccgtggccgtggtggcttctaccatcaacagcagtccccacaaggtggtcgtggtcgtggaactggctactacagtggtggtggtggtggtagaggtggacgtggggcagtcccgtccgccatagctcccgagctgcgccaagcaatgcaaacttcaaatgaacctgataacatcccagcgccagaggcaggctcccagtcccaggatgcgccgtcaccaagcgaagaggctgtggatcagctgaaaggcttgtctgtacaggacattgtgcaggcgtttccagtgtcgagcaagttccctcaccgcccaggaaatggaagcgttggcaccaggtgtttggtgaaggcaaatcacttctttgctgaattattacctgccaagaaggatcttcatcagtatgatgtttcagttaccccggaagtgacatcgcgaattgtgaaccgttctgtcatggaggagctggtgaggctgcacaagctgtcatatttgggaggtcggcttccagcctatgatggtagaaagagcctgtacacggctggacccctgccattcacttcgaaagaatttcacatcactctactcgaggaagacgatggttctggagtagagaggcgtaagaagacatacaaggtagtgattaaatttgccgcaagggctgacctccggcgtctggagcagtttttagctggaaggcaggcagaggctcctcaagaagccttgcaagttcttgatattgttctgcgggagctgccgacaacaagatatgcaccgtttgggcgatcgtttttctctcctgacctggggaggaggcgttcccttggtgagggaatagaaagctggcgtgggttttaccagagcattcgccctactcaaatgggcttgtcattgaatattgatatgtctgcaactgctttctttgagccattacctgtcatagattttgttgcacagcttttaaacaccgacgacatctactcgaggcccctcttagacgctgaacgtgtcaagataaagaaggccttaagaggcgtgaaggtggaagttacgcaccgtggtaacatgcgacgcaagtatcgaatagctggtttaacatctcaggaaactcgggagctaacttttcctgttgatcaaggtggcacagtgaagtcagttgtacagtattttcaagagacctatggctttgccatccagcacacctacctgccctgtctgcaggttggcaaccagcagcacccaaattaccttccaatggaggtctgcaagatagtggagggacagaggtactctaagagattaaaccagagtcagataagagctcttttagaggagacatgccaacgcccacatgatcgtgagcgcgacattattcagatgatgaatcataactcttaccatgaggatccttatgctaaagagtttggcattaagatcagcgagcgtttggcttcgattgaggcacggattttacctgctcctcggctcaaatataatgaaaccggcagagagaaggactgtttgcctagagttgggcagtggaatatgatgaacaaggacttcgcgctggagcctatccttccgcctatatacgcgcatcctgataaagtggagagagctctgaaagccaggttccatgacgcgatgaacttgctcggaccacagcgcagagaacaactcgacttgctgctcattggaatactccctgataacaacggttctctttatggtgatctgaagcgtatctgtgaaatcgaccttggattagtttcccagtgctgctgcgcaaagcaagtctttaagatgaacaagcagatactggcaaaccttgcgctgaagataaatgtcggaggaaggaacacggtgctggctgatgcggtgtcaagacgcattcccttggtgactgacaggcctaccatcatattcggtgccgatgtgacccatcctcatcctggagaagatagcagcccttccattgctgctgttgtggcttcccaagactggcctgaggtgacaaagtatgctggtctagtttctgctcagtctcataggcaagagctgatagaggatctctacaacgtcacacacgatcctcagaaaggaaccgtttgtggtggcatggtcagggagcttcttatatccttcaaaaaatcaactggtcaaaagcctcagaggatactattctacagggatggtgtgagtgaagggcagttctaccaagttctactgcatgaactggatgctatccgaaaggcgtgtgcatcgctggaagcaaactaccaaccgcaggtgactttcatcgtcgtccagaaacgccaccataccaggctgttcgcgcacaaccacaacgaccagaattcggtcgacaggagcggcaacatacttcctggaactgtcgtggactcgaagatctgccaccctacagagttcgacttcttcctgtgcagccatgctggcatcaagggcaccagccgtcctgctcactaccatgtcttgtgggacgagaacaacttcacagccgacgcactgcagaccctcaccaacaacctttgctacacctacgcgaggtgcacgcgctctgtgtccattggtaggtttgtcaaagttatatccattgctgaatcgatgcacgagcaacagataaaccaaaagatgcatatgccttccttgcagtcccgccggcgtactacgctcacctggccgcattccgcgcccggttctacatggagcctgacagctcagacagcgggtcgctggcgagtggcgcccgtggaggcggagcgccctccagctcgtcaacgtcccgcagcacccgcgccaccgccggcggagccgttagacccctccccgcgctcaaggacagcgtcaagaaggtcatgttctactgctgatgaaccggagcatgaagatagtaggcagccctgcctgaaatctgatccgcttggtgctgttgtttgccgtgctcagaagacatttgcttggtgtttgtttgatgaagggtggctagagtggtggattcgcttcctgcttgtactgagggacgaccgtaactctacgatagcaaacaaaaagtttgagatcaaactcaactaa

SEQ ID NO: 14483 - DNA, 324 bp, Zea mays
  Peptide Sequence Number=SeqID_56262
atgccctggtcgtgcgccctctgttgcgtcctcgcgtgccctggtcgcgccctcggctgcgccctggcccgcgccccggcggccgcgccatggtcgtgccctcggccgtgtgcccccggctatgcgctcgcgcgcccttgcctgagcccgtgccccggcagcctcgcgccccacgcgcctgcacgatctgttgatgtggcaatgagattgatggatttggttatgcctatggtactggttgtccgcattgcaaccactgctcaggagaagatgaaagccgtggaaggagacttccaggagttccaagattacgacgagttctag

SEQ ID NO: 14484 - DNA, 492 bp, Zea mays
  Peptide Sequence Number=SeqID_56263
atgtcaggcttcactgacgtgtgggtcgcgtcggtcaggtcgtcatcctcaacaatcgtgaccggtctccgcgagatcgccggggaaaacgggcgcgacgttgtgagccagctcggtgcgcaatatggggtccgggagtgcggcagggatcctgattgcgtgtgcgtcgagaatcaggatggttgggcgctccgggacttggcgattgctcgtcggaattcgtctccccttgtcaaactgtggcaaccgtggatgcctcaggccaacaccctaattcatggtaatgatagcctctttggatttcccatacttccctcactgtttttcattccgccacatccgcgtaagagctccgaaacgggcaaattgcatgcgcgggggtcacacctgccgctgaccacaatgggcgccgccgtggtgtgctcgattggggaaggggatgttagggtcgggtcatgcactgtcggatcgggcatcgatggctcggattag

SEQ ID NO: 14485 - DNA, 1140 bp, Zea mays
  Peptide Sequence Number=SeqID_56264
atgtatgttgacatcactactcagacttacaatagtttatatattgagcttgcaagtctgctcaagatcccgatagggcctgtatatgatccccaagaggtcatgcaaagatacgttctcggacctcgccgctttggtttttatgatgagccacctgaatggatatatattcatgtcgtcggggaagaacaagacagggtaattctggccatagccattgatgacttatgtcttattggcttcagtaatgctagtgaccattggtacaagtttaatggacagtcatcatcgttcaaaggtttgccgggagccaccgtgctaccgatcagacaaaattatcaagatttgatcaaaggacacgccaacctttggaaggttcctctggggaagaaatcagccatacatgccaccaagcagcttgcgtcgtatgaccgagccgtcacccctgactccgaactcaaggacgggctggttaggttcgtggtgatgatgtgtgaaggcatgcggttccgatcgatccgcgacatgttctcgtcgttgtcgggcaataactgggaggaggagaccttcatcactgagctccaagcaaaatctgtcgtctactggtcacaactctcgatgctcctcattcggtgggagctaaccggaaggctgcccggggggccaaaatggggtgctgttgatggtcgatataacagtatggctaagcatgtccaagagactattaatgtcaatgatgcgaacgatgctttgacaatcattgattttctgcttcgcccaacagaggaagtagatactgatagcgaaacaaaacatcgtggttctttaaagaggggcaccgagtacttcagcaagatatacaagcaggatatctataatactctgaatttgaggtcggagagagaagagagagagagagagtcctccgacgccgcctacgccttcgccgtccaggccatcgatctcacgagcgccgaggaggaccgtcgcgacgccgaggtctgtggagccgccaacgcccgcatcgtcgcgcacgacaccctcttcgtccatgacctagccgccatctccgaggagcagtgggcccacgacgactactacttcgagctaccaaatttttgcattttggctcttttttag

SEQ ID NO: 14486 - DNA, 537 bp, Zea mays
  Peptide Sequence Number=SeqID_56265
atgaagtactttccaccgctggatcgcaatcatcccgcttgggcggcccgaattcgcaacttggggagtctgggaagcctcaaagcagctgagaaagaccccatgattgtcgctatgtcgggctatttgctcagcctcgatgacctgtgcgaccaattttgccggcgtgcgagagccctgactcagcgtgctgaggaagcagaagtccgttggaggaagtcgaggttggacttggcccaggcagaagcccatgtggctaacgccgaaagctgtgtcgcccttgcagaagagaaagtttgggagcaagctgaccaccatagcaagctcctgagggacatctccctggtggaccatgtcaagcgcaaagaccctcacccccagaactctgatggaaccaacgtgcttgaaggaaccccattgtacctgttccaaccccgcagaaggatttgtggaccagcaacacccacacctcctgcatcgcctcggccagatgatgaagaaggacctagagagaccatcatagggaccgatgtttaa

SEQ ID NO: 14487 - DNA, 987 bp, Zea mays
  Peptide Sequence Number=SeqID_56266
atggggagcgaagtggaggggtgggagctcagaggagtagaggctaggacaagccgctggagtgaagggagagagctaaaacaggagatttgccagggtggaaacgtggagtggaatggaccggagtcgcgacagtttatcctcagtttctcacagctactagaaaaaaggcaaaaaacagggaatgtttctacaaacttagtgcaacaattttccaactcaacaccatttagtatttttaaggttttcccaactagtgaacagatccactacgtcaggcatcatcatttctttgccactaataacatagctgagtataaggcgctcatcgtggggctaaaatttgccatctccctcagggttcaccaattattagtcaaagagcatatttcagtatgtgttggtggaagggcgtcggtgtatggtactgatagcgcactatggggcgtaccacgtagtgcttttgagaggacggcgatgtcgattgcagctcgatggttcgtgcagggcacgatggaacacaacgagtcatacaggcaggacaatggtatactcattggcatccctaagggagagtgtggtagccattcatcatcttgcatgttgggcgcttctggtgatttcatgcccatgcaaaacgcttctagtgactccatgcccaatcgtttgcctctactgacttcatggcttcacgcccaatcgtttgaagatgctcatagaagggaaactgcacatgcctttacagcagtcccgctatgggacgctacatttcaatacaaaattgagctacatcacggcctaattctatcggtaaggaccgtatctcagaacgaagtaacaagccctacacctagttcctccgcgagttcatcccacaacgggatgagagtcaaaacaacaagaaacactgaagctatcaaggccgtcctcctccaacctccaatatcgcttacgtcgttcaagcatggtttctccggtgttctctga

SEQ ID NO: 14488 - DNA, 441 bp, Zea mays
  Peptide Sequence Number=SeqID_56267
atggtgctccataatcttcaccttgtcctcgccgaggacgctgttatagcctatcaccaagctgtcccccgagtacatcgcttcccggtcgtcttccacatcaacagacccgcggtccccgcgcccgggccacctgccgccgcccgcgcggccgcgccacagccacgggagccgcgacccccgccaccacgacctctgccatcttcgccgctgcggcccccgccgcccaggagttcaaccgtgaaacgtttcacggcttcctgtcgcgacaacttcggttgctgcgcgctgggagccgagggccgctcggcctcggcgagcagcctgtttcgccgcctcgctgcgccggatgaaccggttatcaggcgcaggctgctgcgaccgaggggcaccgcgcccggcaccggagaacgggagcgtgcggggcagcggcggcgctga

SEQ ID NO: 14489 - DNA, 1182 bp, Zea mays
  Peptide Sequence Number=SeqID_56268
atggaccacaggtgctggatccgcctggtgcggaacctgctcagcgggagatctcgctcagcggtggaagggcgaggggaggaaggcaccgcatcggactcgggcatatataacggtctacaaactgcatcgtcaccatctcctgcaccggtacccctgccctccaccctccaccaagcagccgccgaatcatccgtctgttacgctatcgccccaatggcctcctgcatagccaccggcgtccgcgagcccagggcagcgcccagaaacagcaccattgatgaatacgaggagatctgctgcctcggtatgggcgccttcggcgccgtctacaagaaggtgcgccaccgcgccaccggccagatcgtcgccatcaagcgcctcaccgacgccgtcggtttcgtggcccagataccgctcctacgagaggcgggcttactgaagaagagctgccgcgacaacccgttcgtcgtcggcttgctgagcatcgcccgcaacccggccaccatggacagcttcctcgtgatggagtgtgtcggcccgagcctctgcgacctcctccgacagcgccaccacgccgggatgccgccgctacctgaggcgaccgtgcgcgctgtcatgtggcagctgctcacgggggccaagaagatgcatgatggccacgtcgtccatcgggatatcaagccgggaaatatcctggtcagcgccgacggcaccatcgtaaagatatgcgacttcgggctcgccatgggcatggacgtgcaggagccgccgtacgaggccaccggcacgctgtggtacatggcacccgaaatgctgctgggaaagcccgactatgacgcccgcgttgacacttggtcactcggctgcgtgatggcggagctgatcaaggggtcccgtctattcgcgcactccgatgcagcaaaccagcttgccggcatctttgaggtgctcggcgtgccagatgaaacggcatggccgtggttctcgtccacaccgttcgccacccagatcgtgccgatacaggggcgcaacctgctacgcgagttcttccccgagacgaagctgtccgaggaagggttccagcagctgctccagaacaaccctgatggttttaaacccatcgagtacttcatggtccatgcttcaactcatctaaaccatccaagttttcattgctag

SEQ ID NO: 14490 - DNA, 519 bp, Zea mays
  Peptide Sequence Number=SeqID_56269
atggcttcaattattcagtaccactttaccagtttgctaacatatgtcaagtttacacttgtaggcacgttcaagctgactctgcaatttacagaagattaccccaacaaacctccgactgttcggtttgtttcgaggatgtttcacccaaacatttatgcggatggaagcatctgtttggacatcctacaaaaccagtggagtcctatatacgatgttgcggcaatattgacctctattcagttttggaataaatactccagttccatacgaacagtggaagaaagaaatggtttccctcgtttacctgatgtcactagagaaagaatccatgttccatatttgaagcgggttgacctctgtgcttctctcatggtacaatacgtcatgtccctgctgtgtgacccaaacccaaattctcctgccaactctgaagcagccagaatgttcagcgagaacaagcgtgagtacaaccgcaaagttcgtgaggttgtggagcagagctggacagctgattaa

SEQ ID NO: 14491 - DNA, 1896 bp, Zea mays
  Peptide Sequence Number=SeqID_56270
atgggagtaccggcgttctaccggtggctggcggaccgctacccgctgacggtgtctgacgcggaggaggaggagcccgtggagctcgagcccggcgccttcgtccccgttgacctccgccgccccaatcccaacggcctcgagtttgacaacctctacctcgacatgaatggtatcatccacccatgcttccaccccgagggccggccggcgcccaccacctacgacgaggtgttcaagtcgatttttgattacatcgaccacctcttcggcctcatccgccccaggaagcttctctacatggccattgatggtgttgctccaagggcaaaaatgaaccagcagaggtccaggcgattccgggctgctaaggacgcggctgatgcggcagcggaggaagagaggctgaggaaggagtttgaggcagagggtaggactctagcccagaaagagaagtcggaggcaattgactccaatgtcattactccagggacggagttcatgtttgtactatctacggcgcttcagtactacatacagctgaggctgaatcacacgcttggatggcagtctgtaaagataatactgtctgattccaatgtccctggagagggagagcacaaaattatgtcatacatccgcctgcagcgcaatcttcctggctttgatcccaatacacgccattgcttatatggcctggacgctgatttgattatgcttgctctagcgactcacgaggttcacttctcaattttaagagaggtgatctccatgccagggcaacatgaaaaatgttttctttgtggtcaagttgggcatttggctgctgaatgcagaggtcctagtcagcctgataattctgtggagctacctcctattcataaaaagaaataccagtttcttaacatatgggtgttgcgtgaatacctggcaaaggatttggaaattatagatgctcccttcaagataaactttgaacgtcttattgatgattttgtgtttatgtgtttctttgttggcaatgactttcttcctcatatgccaactttggaaattcgtgagggtgccattaatcttctcatgagtatctacaggtcggagttcacatcaatgggtggttacctaactgatgtgggtgaggtgaagttaggagagccaggatacagggagcgttattatgctgataagtttaaagaagaggcagaatcaaaacccattgttcaagttcggagagatgttagcctaaggcggctgcgagctgcagcacggctgctgctgcagcgcatcggagggcggcgcgacgacgaggtcggggtgacggcggtggctgcgagagagcgggagaagcggggagagggagggaggcgctgctccaatgcactgccaaaatactatggggatttgatgagtgatccagattcaccgttgaagtctttctacccaaaagattttgagatagacatgaatgggaaacgttttgcatggcagggtgttgcaaaattgccttttattgatgaaaggcgtctgcttgcggaaacaagaaaacttgaagatactttgacagaagaagagaaattcaggaataggactatgcttgacataatttacgttagagatactcatccattgatcactcagattatcttcctgtatcagaactattaccatctatcaagaacagacccttatgttattcccattgagcctgctgctagtggtggaatgaatggattcctatgtttatctgaaaggaactggtatagtgtcactgtcacttctccagttaaggggttcaatggcattgctcagaacagagttttgaatgctgcctatctcaatcctcagtatcacaaacacatcccagagcctccagcgggggtcatcatacctgcgaag

SEQ ID NO: 14492 - DNA, 372 bp, Zea mays
  Peptide Sequence Number=SeqID_56271
gttgaaaatgggaaggcacaagctgcaaactttcccttttgcaccatcaacccaaaggttggtgtggtggctatccctgatcctcgtttgcaagtgctcttgaaattaaacaagtcactgcagacggttccaacatccattgagcttgtgtacattgttggtctcgtcaaaggagcaagcaaaggagaggcaccagttttgtcattgtcattaattaacctgcagggcaggatatctccaactcttagcaaagttgagatggttgtgcgatgctttgaggatgacgatatagttcatgtcaatggcaaggtcgatcccaaatcaaacattgatgtcattaacctagagctgatatttttagatcttgaatag

SEQ ID NO: 14493 - DNA, 705 bp, Zea mays
  Peptide Sequence Number=SeqID_56272
atggcgcgcaagacggccgcgctcgagttcaccacgcgcacgctccgcaccgccatgtcgcgctgggtctcccgctccatccacgcccgcctgctgcccatcctcgccgacgcgcacatcgtcgacctgcaggacctcctgctccgcctcacctttgacaacatctgcggcctcgccttcgggaaggaccccgagacgctcgcccggtgcctccccgacaacgccttcgcctccgcgttggaccgcgccacggaggccaccctcaaccgcttcatcttccccgagtgcgtctggcgctgcaagaagtggctgggcctcggcatggagacgacgccggcgcgcagcgtccgccacgtcgaccgctacctctcggctgtcatcaaggcgcgcaacctcgagctctccgcctccttgccgccgccgccacgaggaaggacctcctctcggccacgccgcacgacgacctcctctcgcgcttcatgcgcaaggggacctactccgacgaggcgctgcagcacgtggcgctcaacttcatcctcgccggccgcgacagctcctcggtggcgctctcctggttcttttggctgcggcagctcactcgcgtcccagctcgactgccgcggtggtactaaacttctccggccactcaaccaactgaccaacgcgtactcccgctgggttgtcgactccgcggtgggctcctga

SEQ ID NO: 14494 - DNA, 504 bp, Zea mays
  Peptide Sequence Number=SeqID_56273
atgtcgctgatcgccggggaggacttccagcatatcctgcgtttgctgaacaccaacgtggatgggaagcagaagatcatgttcgccatgacctcaatcaagggtgtcgggcgccgcttctccaacatcgtctgcaagaaggccgacatcgacatgaacaagaggcaagcgtcgcgctttagctccaaggatattatcagatctctctgggccggcgagctgacgcctgatgagctggagcgcctgatgacggtcgtggccaaccctaggcagttcaaggtgccggactggttcctcaacaggaagaaggattacaaggacggcaggttctcgcaggtcgtctccaacgcccttgatatgaagctcagggacgaccttgagaggctcaagaagatcaggaaccaccgtggtctgcgtcactactggggcctccgcgtccgtggccagcacaccaagactactggtaggcgtggaaagaccgttggtgtctccaagaagcgatga

SEQ ID NO: 14495 - DNA, 441 bp, Zea mays
  Peptide Sequence Number=SeqID_56274
atgccgtctgttccctatccaccggcacaaccttctctgaagaccaggttcctaccctcaaccctcttctgcacccggtatcgccaagggccacgcttcacgccgtctactcgcgtatctaccggcacaacctttcccggaatgctcgatttgctctgttacacgactgttgtgtcatcgttgttaaagaggcgaaaaggttatacttctgttgaattaacctactttctaatcgattctgcatattggccccttgcattgaacaaaaaaacatctctaaattttcaacaacttggatttgaattacaagagatacgaaagcttggtctcaaaggaaaaaggtctgtacacctcaaacagaaaaaggtcgaggtctatgattatggacttgctaagaaatacaaggacattcagactcataaacacatcccatacaagtga

SEQ ID NO: 14496 - DNA, 378 bp, Zea mays
  Peptide Sequence Number=SeqID_56275
atggacgccgccgccgaggggctgcacgacatgatcctcctgaatgctcgcgacgaccttgatgttttatctctgtggtcggtgggggcgtcggcggatgcaaatggatctacattattgaagggatttaggaaaccatcaccgaacaacaacctattagagtgtactcaacatgcttacgatatctgcactgtggaccagggctctcttctgaagcaactagcaaataagagtatcagtggtggtgtagctgctgttctagctgaaagggacaaggaagagatggagatggacatagcaaagctagaagttggctccatggaaacatctgtaatatgtaggagtgacggtcctctaattctagcatacttgaggaag

SEQ ID NO: 14497 - DNA, 1263 bp, Zea mays
  Peptide Sequence Number=SeqID_56276
atggcgctccgcctcaacgacgtcgcgctctgcctctccccgccgctcgccgcccgccgccgccgcagccgcagccgcagcagcggcaggttcgtcgccgtcgcctccatgacgtccgccgtctccaccaatctgcagcaggccagcagcggaggtgaagacgcgtgtttgctgtcgagattgtgccactctcagtatgttggggtcgagaataagaagccatttgctcctccaagggaggtacatgtccaggttacacattcaatgccacctcacaagattgaaattttcaagtcacttgatgattgggctagagataatatcttgacacatctcaagccagtcgagaagtgttggcagccacaggatttcctccctgacccagcatctgaaggatttcatgatgaagttaaggagctcagagaacgtgccaaggaaatccctgatgattattttgtttgtttggtgggagacatgattaccgaggaagctctaccaacataccagactatgcttaacaccctcgatggtgtcagagatgagacaggtgcaagccccactgcctgggctgtttggacgagggcatggactgctgaggagaacaggcatggtgatctgctcaacaagtatatgtacctcactgggagggtggatatgaggcagattgagaagacaattcagtatcttattggctctggaatggatcctaggactgagaataatccttatcttggtttcatctacacctccttccaagagcgggcgaccttcatctcacacgggaacactgctcgtcacgccaaggactttggcgacttaaagcttgcacaaatctgcggcatcattgcctcggatgagaagcgacatgaaactgcgtacaccaagatcgtggagaagctgtttgagatcgaccctgatggtaccgtggtcgctctggctgacatgatgaggaagaagatctcaatgcctgcccacctgatgtttgacgggcaggacgacaagctgttcgagcacttctccatggtcgcgcagaggcttggcgtttacactgccagggactacgccgacatcctcgagttcctcgtcgacaggtggaaggtggtgaacctgactggtctgtcgggtgaagggaacaaggcgcaggactacctttgcacccttgcttcaaggatcaggaggctggaggagagggcccagagcagagccaagaaagcaggcacgctgcctttcagctgggtatacggtagggacgtccaactgtga

SEQ ID NO: 14498 - DNA, 123 bp, Zea mays
  Peptide Sequence Number=SeqID_56277
atggggaagagaaagtcagctgctaagccacctcctaagaagcggatggacaagcttgacactgtcttttcctgcccattctgcaaccacgggagtagtgttgagtgccgaatcactcactga

SEQ ID NO: 14499 - DNA, 1155 bp, Zea mays
  Peptide Sequence Number=SeqID_56278
atgatcgggtggggcgacgtgtacaaggtggtggcggcgacggtgccgctctacttcgcgctgttcctgggctacggctcggtgcggtggtggcgcatcttcacgcgggagcagtgcgacgcggtgaaccggctggtggccttcttcgcgctgcccttcttcacgttcgagttcacgctgcacacggacccgttccaggtgaactaccgcgccgtggccgccgacgtgatctccaaggccgtgatcgtgggcgtgatcggctgctgggccggcagcagggtgggctccgcgggcaagggcaagggcgccgtcggctggtccatcaccgggttctcgctgtccacgctaaccaactccctggtggtcggcgtgcccatggccagggccatgtacggcgagtgggcgcagcagctcgtcgtccagctctccgtcttccaggccatcgtctggctgacgctcctcctcttcgtgctcgagaccagaaaggccgccatcggcatgtacgtcgtccccggcggcgctgctgacagcgacggcgggcgtgccggactcgcccggtcaagggacaaaggacgtcgaggccgctgcccggcgatcgtcgtcccgcccgccggccctgccgctgctgccaccgtcgtggtcgtcgtccccgtgaagccctcgctctgggcgctcatcaaggtggtggcgcacaagctgtcgcgcaaccccaacacgtacgccagcttcgtcggcatcacctgggcctgcgtcgccaacaggctgcacatcgagctgcccagcgccttcgaggggtcggtgctcatcatgtccaagtcgggcacgggaatggccatgttcagcatggggctgttcatggcgcagcaggagaaggtgctggcgtgcgggcccagcttcgcggcgctgggcctggtgctcaagttcgcgctcggcccggccgccatggccatcggctccatcgccgtcggcctccgcggcgacgtcctccgcgtcgccatcatacaggccgcactaccccaatccatcacatcgttcatatttgcaaaagaatatgggttgcacgctgatgttcttagcactgcggttatttttgggatgcttgtctccttgccgttgctagttggattttatattgttttggaactaattagatag

SEQ ID NO: 14500 - DNA, 312 bp, Zea mays
  Peptide Sequence Number=SeqID_56279
atgcatcgacacagggtcaaggtgaggaatatgactccagggagccagttcgagccgatgggtcgtggctccagggacctcgtgccctcgctgatgcatcgcggctccattgcagggagctcacgccctcgccctcgcagccatccgctagcacagggaccaagccttcgcgccgggatcacgcctccgcgagggggagcttcgcctgctctaggaatcatcctcgctgatgggtcgcggtgttgggggctcgtgcccaggcagaccgcctacgcgctgggatcgtcgttaacccgcctcgagggccattag

SEQ ID NO: 14501 - DNA, 550 bp, Zea mays
  Peptide Sequence Number=SeqID_56280
gaaacttcctgaagatttggattaccactcaatgacaaatctatcacttgaagctcgtgagaaactttccaaggtgcgtccacaaacaataggtcaagctagcagaatcggcggtgtgagcccagcagacatgacagttctcctcatttggatggagagcaaccgacgcatggctacccacaggagacagcgagagcagctgggatcagttgcagtcgagtcggatgggagcctgcgcgtctgtggtacaacgatgcagggaggcgccaagttgaacccatattatctcgtatttgagaaatcaaggatcaacctgtcggggaccataattaggggtaccctcaagactcctaattctcagctgggctcggactcgggctcagccccggaagacgacgaactccgctccgcccgacccagggctcggactcgggctaagccccggaagacggcgaactccgctccgcccgacccagggctcggactcgggctaagccccggaagacggcgaactccgctccgcccgacccagggctcggactcgggctaa

SEQ ID NO: 14502 - DNA, 2343 bp, Zea mays
  Peptide Sequence Number=SeqID_56281
atggaggccttctacctccaccttctccgctcctgcgcggcgctaccgcacgtcgcggcagtgcacgcccaccttgcgcgcgcgcacccaaacgcctctctcttcctccgcaactgcctcctggcctcctactgccgcctcggggttggggccccactccacgccgcccgcctgctcgacgaaatgccccgccgcaacgccgtctcctacaacctcgtcatcgtcgcctattcccgcgcgggactcccggccctctccctggcgacgttcgcgcgcgcgcgggcgtgggccagggtggtcgaccggttcacgtacgccgcggcgctcgccgcgtgctctcgggcgctcgacgtgaggacggggaaggccgtgcacgccatggtcgtcctgggaggtctcggcaacgggttgttcctgtccaactcggtcgccagcatgtacgccaggtgcggcgagatgggcgaggccaggcgcgtgtttgatgcagccgaggagcgtgacgacgtctcgtggaacgcgctgctctccgggtacgtccgtgccggtgcacgtgaggagacgctggaggtgttctctctgatgtgccggcatggtctggggtggaactcgttcgcgcttgggagcatcatcaagtgctgtgcctcctcctcttcttatgctgctgctggtgatgtcggaggagggcgcatcgctgaggcggttcatgggtgcgtggtgaaggctggactggacgccgacctgttcctcgcgagcgcaatgatcgacatgtacgctaagagaggcgccttgaccaacgcggttgctcttttcaagtcagtgccagacccgaatgtgattgttttaaatgcgatgattgcaggattctgtcgtgaggaagcagccgacgtcgctagagaagctttgggcctgtattcagagctgcagagccgagggatgcagccttctgagttctcattctcaagtatcctgcgtgcatgtaacctggccggtgaatttggattcgggaaacagatacatggccaagtgctcaagcacagcttccaaggcgatgtctatatcgggagcgcactcattgacttgtactctggctctggttgcatggaggacggatacaggtgtttcagatccctgcctaagcaggacgtcgtcatctggacgtcagtgatttcagggtgcgttcagaacgagctttttgaggaggcactgaggctgttccaagaatcagtacgctgtggactgagacctgatgttttcgcgatgtcgagcgtgatgaacgcatgtgccagtttagctgttgcaaggaccggtgagcagatccagtgccttgctgtaaagtctggctttaaccgcttcaccgccatggggaattccttcatacacatgtgtgctaggtcaggggatgttgatgctgccacccggaggtttcaggagatggaatcgcgtgatgttgtctcttggtccgcggtgatatcaagccacgcgcaccatggctgtgcaagggatgctttatgcgttttcaatgaaatgctggatgcgaaggtggcaccgcctaacgagatcacttttctcagcatccttactgcatgtagtcatggaggattggttgatgagggactcaggtattatggaattatgaatgatgaatatggattgagcccaaccataaagcattgcacctgtgttgttgatcttcttggacgagccgggaggttagccgatgctgaggctttcataagggattcagcattccatgacgatgctgtggtctggcggtctttgctggcctcgtgtcgtatccacggagacatggagagaggccaacttgtggcggacaagataatggatctggagcccacttcctcagcatcctacgtaattctctacaacatgtatctggatgctggcgagctgtcctcggcttcaaagactcgagatctgatgaaagagcgaggcgtgaagaaagagcctggtcttagttggatcgagctgagctctggagttcactcttttgttgccggtgacaagtcccatccagagagcaaagcaatatacagaaaagtggcagagatggtttccaaggtggcgggcatctctagcagggagcaggatttggcgggttgccacagcgaaaaactagctgtggcatttggaatgatccatttgccgcaatcagctccgatccgagtgatgaagaacctgagagtttgccgtgactgccactcgaccatggagctgatatccaagaagacggttcctgttcctgtggcggttactggtgatgatgaccaacccaaggctcaaaagcgcgacatagcccacctattgcttgacgcgagcacctga

SEQ ID NO: 14503 - DNA, 519 bp, Zea mays
  Peptide Sequence Number=SeqID_56282
atgaacacgaccacgtgttcgacgcgccctggcgccagagcacgccctcggcgctccgcccacgcgcgcagccttgcgccgtgccaaccccacgcccacgcccacgctcacggctataaaagctaccccggcctcgaccgtacaaccccgcacgtccctgacccaactcgagctcaacttctacggacctcagtgaagctcccagagccagggattgaactttacctcaccgaagatgtcagatcgacgtcgctagacttcaaccagccgccgtcgcacgtagaccgagctccacagccggagcacacgccgccgacgagcctgaccgcctgcgcacaaggtcagccctattccggctatcaccatcgacgatctgcacctcgacgtgaccgccaggacctcccggatctaacccctcccttcaccggacctccctcaccgccggagccagcaccagagcctaccatcgaggatctgcctgccccagctttggaaggcaagccccagttttatgcataa

SEQ ID NO: 14504 - DNA, 348 bp, Zea mays
  Peptide Sequence Number=SeqID_56283
atgacggccgttaccccgcgcggacccccggtcgcgcacatagccaacgcacacacgcaccgcacacacgttctaactccgcgccgctgccgccaggacctgacggcgaaggcaccttcgccagccaccttcgccggccacctgcccggaccgccagacgccccgacgcacagcgcgccgccgccccgacgcccgctcacagcgcgccgccgccccgacgaccgcacacctgccccgacgcccgtacagcgcgccgccgccgccgcgcctcgagccgcccgcgcccggctttgcccaccgccgccgcccggggctccccagagccgtccgccgtccgtcgccgtccgg

SEQ ID NO: 14505 - DNA, 228 bp, Zea mays
  Peptide Sequence Number=SeqID_56284
atggctgagctgcagggtcacttggaggcttccctcacggctctgcgagcgtccgacgcccgtattgcggacctccagccgtgtctggccaccatggaagtgcacacattaaggtgggaggcgaaactaatggagctccaccagcagatcgacatggtgacccacagtgttcgtgctcatggggtgacccatatgcagcgcctgctagacatcctaggtcgtgtctag

SEQ ID NO: 14506 - DNA, 210 bp, Zea mays
  Peptide Sequence Number=SeqID_56285
atggtgaccaccgcctccggcgccaccatcatgaccgtggaacgcctcaacctcgggctcctcgtggacgaggagccggtcatggagcgggtcgagtccgggagagccctccgcgagaaggtgttcgaacggctcagcaaagaaagcgccgtgcccaacgacaccgtcgcctccgccaacgtagagatgatggcatgccagtggaggtag

SEQ ID NO: 14507 - DNA, 240 bp, Zea mays
  Peptide Sequence Number=SeqID_56286
atgtccttcgtgctttttgactacttcgaaaagtggatcctgaaaacgacggagtacacctccttcctgctcggcgcgcgcccgcctccctgctcccctcgagctcatcctgcccaagtccggttgtctactccttctctgctcgacgccgcggcagacgatgctgcattccggctggacgtcaagatccagtggaacctcgtggtggcggcgctggcggatggcgcgctgctttcgtga

SEQ ID NO: 14508 - DNA, 1257 bp, Zea mays
  Peptide Sequence Number=SeqID_56287
atggcttccagaaggttaaatcttgctagctcaacacgcttctttagacaacgactgcagaaatccctgaagaggccacaagagaataaattaagcaataaaaaggataaagctgacgaggatattgtgaagaaccacaaaagctcaaagaactgtgaaggttcggaaaactcactggacaagctgatgaatcctaccagtaccactcctgattcgaagtggatgcctcccgccaccaccgatggatccatggacagacgaggaaacccagctgtcaagacaaccaccggaggatggagatctgccatcctggtgctagctaactatggactcgccacgtgcgccttcttcggcgtcggcgtcaacaacatcgtggtgttcctgcgccgggtgctccaccagtgcaacgccgaggccgccaacaacatcagcaagtggacagggaccgtctacatcttctcgctcttcggcgccttcctcagcgactcctactggggccgatacgtcacatgcgccatctttcagatcatctacgtcacggtgcgatcatctgttcagacactggccaaaccatcagtctcctgtgatcggtcctgttcttacttgcctgtgttgtgttgtgtttgttcttggtggtcaggggctcagggcctggtgatcctgtcgcttgcctcatggacatggttcttgttggtgaagccctccggctgcggcggcgtcaaggcgcactgcgacgaggggtcggcgcccggcgtcgcgctcttctacctgtcttccatcgcgacgttcgggtcggaccagttcgacgagacggaccccaaaggaggcgcgctccaaggtcgcctactggccttcttcagctacttctacctggcgctcaacgtcggctccctgttctcccaacaccgtgctggtgtactacgaggactctgggcggtgggtcatggggttctgggtctcggcggccaccgcagcgctggcgctcgtgctcttcttgctcggcacgcccaactaccggcacttcaagccgagcggcaaccgctgacccgcgtcgcgcaggtgttcgtcgccacgctgcgcaagtggcacgctgaggtgcgacgtggcgagctcctccgcgaggtggaaggagaggaccctaacgtctcgggcatccgcaagattcttcgcagcgacgagctcaggttcctcgacaaggcggcgacggtcacagaggaggataagatggagagcccgtggaggtgctctgcacggtga

SEQ ID NO: 14509 - DNA, 396 bp, Zea mays
  Peptide Sequence Number=SeqID_56288
atggccgcgcagatgaaggccttcttcgacgcgaccggcgggctgtggcgggagcagagcctggctggcaagcccgccggcctcttcttcagcaccagcagccagggcggcgggcaggagaccacgcccatatgctcacgttttcccttaatttgtcgggctgacggcggtgacgcagctgacgcaccacgggatggtgttcgtgccggtggggtacacgttcggcgccaagatattcgacatggagagcgtgcacggcggcagcccgtacggcgcgggcacactttcgccggggacgggtcgcggtggccgacggagctggagctggagcacgccttccaccagggcaagtacttcgccggcatcgccaagaggctcaagggcggctctgcctga

SEQ ID NO: 14510 - DNA, 883 bp, Zea mays
  Peptide Sequence Number=SeqID_56289
atggcctcgaacaacctcctcaaccttcctcctttcaagatcgcgctcaaccccccgcccccgccactcccgacgcgcccatcggtcttcttggcaccgcgtcagatcccaccctgccgctctctactccgcagcaagccaccgccgcggcaaggcgtccgatcatccacgtctccgcagctagacactgccaacaccccgtcgccgccgtcttcgaggcaggaggccgtcgcccaggcacggtcctgcctcgccacggcgctgcagaagccgctcaacagctcgatcccgctcaagaggcagcggcagccgcggttccgcgcggagatccccgtagtcgacgaatcgccgggctccctcgcgcgcctcgcgttcgacgtgctctcgggcggagcaggggcgtcgaggaagggcgcgccggcgaggctgctgctcatctggccctcggccgaggcgctgtccgtggccttgagggagttcgaggaccagggggactcggcgacggcgcacgcccgactgggctcgatggcgccggacgcgctgggcgcctgcgatgccgcggtgttcctggccaccgggccggcgcaggtggagcaggtgaaggccgccgccgcggcgctggagcccaggccggtggtgctgttcaacccgtcgtggagcttcgacgaggagggagacggggagaaattcggcgccggcgcgaggggcttcgtggggtccttcgacgtggtctactccttcacggggctggaggtgcggggcctgctgagcaagaagaggggcgtgctgctgcggtgcgccgaggccgggcggttcggtggcgagggctgggtgctcatggtggagaatgacggcggccgcgtcggacgggcaggagttcaag

SEQ ID NO: 14511 - DNA, 984 bp, Zea mays
  Peptide Sequence Number=SeqID_56290
atggcagacgagtggtggagctgcacgcgtgctgccgacgacgacgacgacgccggtggctcgccctgctccacagccccggcaacaacggaccagctcgacgctgccgacgagccggcggcgacgagcactgcctcgatcgatttccggcggccaacctcattattgcacgtcgtccgccacgctgccgtcccgccatcatcccccttaatcctcgccgatccaccccatcatatcgacgactggacgcaagcctacttgtgcgggagagcgccgctcgcggcggcggcggcggcagaggcgagcacaagcctcagcgcgctgctccagctccacggcggcgacgctgctggccgccacttcctgctcgcccagcacctccacggtgacgctgctgacagcgcggcggcgcacgtggcagcagcgtcgcagagctcggccctgtacgccgccgccggcaaccagccgtactcctccagctacggcggcggcgcgccggcggcaggagcgctgatggcccagcagccgccgttccctcatcaggacgaattcgaattctcatccgccagcctctttgttggctcctcgtcgtcgacgcgggattccgccggcgtgccggcggcagcggcgcggcggcccgccgtgacgacgacgaagccgcttctcttgcaggccttggagcaaaaggctttcgcggtgaggaaagagaagctcggggacagaatcactgcgctccagcagctagtctcgccttttggaaagtccctgagctctccctacctcgggtgtgggcggcccgtagtgcagcagatacagcaacgacgacaggcgaaggacgacggcggcgccgcggcgaaggaggacctgcgaagccgagggctgtgccttgtcccggtggcgagcactacgacttatgcagtggccgctggtggcgagacggcgccggagttctggctccctaactttgggggcacactacggtag

SEQ ID NO: 14512 - DNA, 1281 bp, Zea mays
  Peptide Sequence Number=SeqID_56291
atggagcaggagctgaggaccggcggccgcggcggcggcaacctcagggcgcacagctctgcctgcctctctggcgcgctcatcgatggcccgcgcatccagcagcttctcctccactgcgccgcggcgctcgagtccaacgacgtcacgctggcgcagcaggccatgtgggtgctcaacaacatcgcctcctcgcagggggaccccagccagcgcctcacgtcgtggttgctccgcgcgctggtcgcgcgcgcgtgccgcctgtgcgccccgcccggcagcactacccagtctgccgccgccgccgcggccgctaggacacccgcgccgcgggagcgggccatgtcggtcacggagctggccgagtacgtcgacctcatgccgtggcaccgcttcggcttcacggcctccaacggcgccatcctccgtgcggtggtgggcagcgccgcggtacacgtcgtggacctcagcgtcacacgctgcatgcagtggcccacgctcatcgacatgctctcgaagcggcccgggggcccgccggagctccgcatcaccgtgccttccgcccgccccgccgtgccgccgcagctcggcgtgtcggacgcggagatcggcctccgcctcgccaacttcgccaagtccaaaggcgtgcagctgcatttcagcgtcgtcgagggcgtgacgtcgccgcctccagagaagcaggcggcggcgctgtgccaggacctcgcgtccgtgctgtccgaccggcaggcgctggggctacgggacggcgaggcgctcgtcgtcaactgccagagctggatccgccacgtcgcgccgggctcgagggacgcgttcctcggcgccgtccgcgcgctgaacccgtgcctggtcaccgtgaccgacgaggacgcggacctggactcgccgagcctggccacccgtatcgcgggctgcttcgacttccactggatcctgttcgacgccctggacacgtcggcgcccagggacagcccgcggcgtgcggagcacgaggcggccgtgggcaggaagatcgagggcgtcgtcggcgccgacgacgccgacggggcggagcgctccgagtccggcgcgaggctcgccgagaggatgcggaggaacgggttcgtgagcgtcgcgttcgacgaggaggccgcgggcgaggtgaggcgccttctgagcgagcacgcgaccgggtggggcatgaagcgggaggaggacatgctcgtgctcacctggaagggccatggcgccgtgtacaccagcgcctggatgcccaactag

SEQ ID NO: 14513 - DNA, 1101 bp, Zea mays
  Peptide Sequence Number=SeqID_56292
atgccggggcggcgggcgatcgacgtccggctgctgccgggcggcggcgacgccgctgcggcgcccaagtggcgcatgtcgctgctggagaacacgttcagcgggttcctgcagggcgccggcgccgacaccgcggcgagggccgtgttcgcggaggggtccctgttctgcccgttcctgttcggcaacttcttcgacccggccgacccgttcccgctgtgggagttcgagtccgacgtgctgctcgccgcgctccgccgcggcaacgccaggaccaccgtcgactgggccgagaccgactgcgagtactacctcagagccgacgtgccaggtggaaggagatgcgacgtggaggtgagcggggacgcgatgaaggtgatcgacatctgcgggctgtggcgggcgccggcggcggacggccgggactggcgctgcggccggtggtgggagcacggcttcgtccggcgggtggagctgccggaggacgcggagtggaggaaagtggaggcgcacttcgacgactgcgagggggccctggagataaaggtcgcggattcagattctcccgtttctttcggcctgctgaaggctctctactctaatcatcctggtcgcttctattccccaatcagcaggcacatgatcagcatcagagagctccgacggacagacatttgcttccatttcaccaggaagaaccgacacttgattcagtgcatacactgtttcccgcgatgctcttaccgtacgcaaccgattattacagttggtgctggtgatccagcagtcgacacaggcgttctcgagaattctttgtcaccttccatgcgcatcgccagcagctcatcgctgcgagcccagtcgctcgtcaggatcgacggcaagaagacagggatacgacaaggcgtcgcgacaggcaggcacaccgcacaccccaacccaaactatggtttccaatcaggcaatctgggccctcggcgtgacgagagcaacaggtccttcgtcggcgcccggagatgccccgctcgtgtggattttacctcctatagaatcggcctgcttgcttgctcggttctcggttcgcccgccccatcggcatag

SEQ ID NO: 14514 - DNA, 237 bp, Zea mays
  Peptide Sequence Number=SeqID_56293
atggcgtcttgctcaccttctacatgtcgcgggcgcccacctggagcttcatcgtgcgccttgctcgaacgccgtcgtccgcctccatctgcaggagccccaacgtcgcatctgactgtagcaagaggcgcggtcatcctgtctcctcttttttttgttctctcagatcttccatttgttggcgcaaacagatcctcggtatttttcggccagaatgatctttttcgttacggatag

SEQ ID NO: 14515 - DNA, 1482 bp, Zea mays
  Peptide Sequence Number=SeqID_56294
atggcttcagctaagcagagcaagaagacgcgcatacttgtgattccattcttcgccagcagccacatcggcccccacaccgacttcgccgtccgcctcgcagcggcccggccaggagtcgtcgagcccacggtcgccgtgaccccggctaacgtcacggtggttcggtcggccctcgagcgccacggccccgcggcgagcggcacggtcaagatcgtcacgtacccgttcccgtgcgtggacggcctcgctccgggcgtggagaacctctccactgccggagccgacgcgtggcgcatcaacgccgccgccatcgacgaggccctctcgcggccggcacaggaggcgctcctcagggagcagtcccccgacgccgtcgtgacggacttccacttcttctggaacagcatcatcgccgccgagctgggcctgccgtgcgtcgttttcagtgtcatcggccccttctcggggctcatcatgcatctcctcagcggcgccgccgtcgtcggtgacggcggctctgagtctgagtcccgtgaagttgccgttcccgggttgccggagccggagatacggatccccgtcagcgagctgccggagttcttgagacgcccagcgaagggccaaggcacgttgaacccttgcaacgcggcgatggccaggtgcctgggcgtcgcctacaacacgttcgcgggcctggagcaggagtaccgcgaggcgagcatgcgcgtcgcgtccttgaagcgcagctacttcgtcggccccgtctcactgccgctgccgccggccgcggcaggcgtcactgagcctccatgcatccggtggctccactccaagccgagctgctcggtggtgtatgtgtgcttcggcacctacgccgccatctcgggcgagcagctccgggagctggcgctcgggctggaagcctcggggaagccgttcctgtgggtggtcagggctggcgacgggtgggcgccgccggacggctgggctgagcgggttggggagcgtgggatgctggtcagaggatgggcgccgcagacggcggtactcgcccaccctgcggtgggcgcgttcctgacgcactgcgggtcgagctcgctgctggaggcggcggcggccggcgtgccgatgctgacatggccgctggtgttcgaccagttcatcgaggagaggctggtgacggacgtgctcgggatcggggagcgggtctggagcggggcgcggagcacgcggtacgaggagagggaggtcgtgccggcggaggccgtggctcgggcagtggagaggttcttggagcccggtgggccgggggaggcggcgaggggcagggcgcgggatctcgccgtcaaggcccacgcggccgtggcggaaggcggctcgtcgtcccgtgatttgcagcgcctcatcgacgacctggtcgaaggcagggcggctgccggcgtgccgacctcgccgtccgttgcatccgtgggaacgtga

SEQ ID NO: 14516 - DNA, 282 bp, Zea mays
  Peptide Sequence Number=SeqID_56295
atgaagaacaggcatgagaggcatgggggagggggcgtgcgctgcctcgacgagtattggggggaggggtggggtgctgagccgaggccgaggaaaatctcatggcattgggcgggggcgtccagcaacgccgggcatcacggcgctggggagaatggggagcgcgggcatcacggcgtcgcgaggggtggggatgacggccatcgcggggataggggcgtcgaaggggcggcgctgagtcctttcctagcgggaatggcggagcggggctcgggcgagtag

SEQ ID NO: 14517 - DNA, 1494 bp, Zea mays
  Peptide Sequence Number=SeqID_56296
atggccacagagacagctatgccgagaaagaagatgcgcatcctgctcatgcccttcttcgctaccagccacatcgcccccttcacggacctcgcctttcacctcgtcgcggccaggcctgacgacgtggaggccacagttgcagtcactccggcaaacgccttggttgtgcagtcagctctcgcccggcgtggcgccagtcatctggccacggtcaaggtggccacctacccgttcccctccgtggacggccttccaccgggagtggagaaccactccaaggtcaaggccgccgccgacgcgtggcgcatcgatgccgtcgccacggacgagaagctgatgcggccagggcaggagagtctcatccgcgagcacgcgccggacctcgtcatcaccgacatacacttctggtggaacgtcgatgtcgccaccgacatcggcgcgccatgcgtcacgttccacgccatggggaccttcccgacgctggccatgtttaacttgtcacgtgccgccggtgcagtcgacgccgccggtggcgtggtgactcttccggggtttccaccgccggaaattcaggtcccaaccaccgagctacccgagatgctaaggaggcaagaaacagccgacgaccgtgccacaggcaacgcggtacacgcagcgcacaggcggtgcttcgggcttgccgttaacacgttcttcgatttggagcacgggcattgcgagacgttcgtaggcaacggttacgtgaagcgagcatacttcgtcgggcccctatcgttgtcgccgtcaccatcatcgccggtggcagccggcggcggcgcctacggctcacggtgcatcgactggctggacaagaaaccgccccagtccgtggtgtacttgtgcttcggtagcttgactcacgtttcagaggctcagctacgtgagctagctcttgggctagaggcctccgagaagccattcctttgggtggtcaggtcggagacatgggcgccaccggaggggtgggaggagcgtgtcggggacagggggatggtggtcacgggctgggctccgcagaccgcgatactggcgcaccacgccgtgggcgcgttcgtgacgcactgcgggtggaactcggtcctcgagacggtggtggccggcgtgccagtgctgacatggcccatggtgttcgagcaattcatcgccgagaggttcgtgacgcaagtgctggcgatcggagagcggctgtggccagcgggtgccggagtaagaagcacgaggtccgaggagcacgagctggtccctgctggggcagtggcgcaagcggtggcaaggttcgtggagcccggagggcctggggatgcagcgaggaagagggtcaaggagctctctgtgaaggcgcgtgcggccatggcggaaggcggctcctcccaccatgaccttcgcgccatgatcgatgatatcatggaagaagcaggaacggcggctgcaggaccagttctctccggctga

SEQ ID NO: 14518 - DNA, 303 bp, Zea mays
  Peptide Sequence Number=SeqID_56297
atgacgaacactgacctttacctgttcgacgacagcactagcaaggctcgcgggttgtgcttactagagaacacatcggcgttcgaggagtactccgacttcaaactcgtcaccttcgggaaattccagaggcgactccgctataattcaccggactgtccggtgtacaccggacatgtccggtgctccaaggaagagcggcctccggaactcgccagcctcgggatttcattgaagcagctccgctataattcaccggactgtccgatgtacaccggactatccggtgtaacagcggggtaa

SEQ ID NO: 14519 - DNA, 537 bp, Zea mays
  Peptide Sequence Number=SeqID_56298
atggtgcctccccgaaggccttctatcgtggagagcaactcagaggaccctcccaccgaaattcaagaagaaaaacacatgttgagtgccctcgatgctctatgcaaaagagaggtcatggctctatgcaaaagagaggtcatggctctggcaccgtcgaggctgggcctagcacccagcctagaggacgtcgaccgggctacggttggttgtgccactcgtccaaatccccagggcccaacacctgtggatgatgacaacgatggtatgggctacgtcgttgatcttccccctcctaatgctctagttatctgtgggcttcactttcgtcaggatcgcgctattcgtcatggtggtgaacccgatgtggattattgttccaagggtggttcagcaacattgcaggacaagaggccgttcctcttcatcagcctttcaatgacattgatcagtagcaccaatatcattacggtgtccccttcacaacccctgaagatgatgaagatgatgttatgtcgtgaactctatgtgatgtga

SEQ ID NO: 14520 - DNA, 618 bp, Zea mays
  Peptide Sequence Number=SeqID_56299
atggggtccagcctaatcgagactggcagaaccgtacctgcaatatctccaccaaggagagctgcccctcgaccgagccgaggctcgaaggcacccggaggctacacgcacctgctgatcgccatcgacaaattctccaagtggatcgaggtccgacccctgaacagcatcaggtccgaacaggcggtggcattcttcaccaacatcatccatcgctttggggtttcgaactccatcatcaccgacaacggcacccagttcacctgcagaaagttcctggacttctgcgagggtcaccacatccgtgtggactgggccaccgtggctcaccccatgacgaatgggcaggtggaacatgccaacggcatgattctgcaaggactcaagccgaggatctacaacgacctccacaagttcggcagacgatggatgaaggaactcccctcgatggtctggagtctgaggacaacgccgagccgagccacgggcttcacaccgttctttctagtctatggggccgaggccatcttgcccatggacttagaatacagttccccgaggacgagggcgtacgacgaccaaagcaaccagaccgaccgagaagactcactggactag

SEQ ID NO: 14521 - DNA, 786 bp, Zea mays
  Peptide Sequence Number=SeqID_56300
atgcctacacgccaaccaacaccaacttatccaggcctggacaaaatatttgaaggccgaggaggccttaatcaagggtcaggtcaggtcatgctagctgcgcgttgcagccactgctgtaggctactgatgaaagtgttagatgtatatacctatgtattcttgtatatctccactgtattgtataagggatttagtgcaaatatccacagggaagacaaggacatattcatagcaactttgaagaacaagtttgataatgatcattctgtatttgatcttgttgtgttcggagtgacctcatgcacggctacgcttagcctcgcaccccctgcgatccacgacagtgtcccctatcccgccaacacctaccctcgcatgcagggccggaccctacaccacgcatggagagccctccccggcttcctcgcccactgtcatatgctccctgaacccgcgtgggctttgaccactccgttcgacctcgacgcgccctcattggtcccttcgcctacaccgcgactattgccttgcccattctggttacgtctcttgccacagtctaggtcgatgccactcgggaccacgaacttgttgcatccctcacttgtgagcacgagcgcgacatggtggttgacaactcagatggccgaagctcagtgcctccttctcgatcacatcgatgtgccttcttcggtgactgcactgccatgccccacctccaggcccaacgtcgccaccatcaccgctcttcatgctcaggcggtcgaggttctcaacatctag

SEQ ID NO: 14522 - DNA, 228 bp, Zea mays
  Peptide Sequence Number=SeqID_56301
atgaatgctgcagataatcttgacgtcatcgcgtgccaggatgatgatgtaccccgtaagcggcccttggcccatatcctgggctgttacaaccactacggcgtgggcggcctctccctcgggagctcgggcgcagccgacttggggttcgccgctaacccacacctagaactcatcatagtcttgaaactcctagaaatccttcgctacgccttcatcttctcctaa

SEQ ID NO: 14523 - DNA, 642 bp, Zea mays
  Peptide Sequence Number=SeqID_56302
tcctccggcacggccatttacgacaacctgtgccggcggttcgtgaagctgagcaagggcgtggtggtgtccgtgaactaccggcgcgcccccgagcaccggtacccgtgcgcctacgacgacggctgggccgcgctgaagtgggccacgtcgcagcccttcctccgcagcggcggggacgggcggccccgcgtgttcctgtcgggcgacagctcggggcggcaacatcgccccaccacgtggccgtccgcgccgccgacgccggggatcaacatatgcggcaacatcctgctgaacgccatgttcgggcggcaccgagcgcaccgagtcggagcggcggctggacggcaagcgtacctgcccgaggacgccgaccgggaccatccggcgtgcaacccgttcgggccgaacgggcggcggctcagggggctccccttcaccaagagcctcatcatcgtgtcgggcctggacctcacctgcgatcggcagctggcgtacgccgagggcctccagcaagacggccaccatgtgaaggtcgtgtaccgtgagaaggccaccgtgggtttctacctgctgtccaacacggaccactaccacgaggtcatggaggagatcggcgacttcctcgcggctaacctctag

SEQ ID NO: 14524 - DNA, 315 bp, Zea mays
  Peptide Sequence Number=SeqID_56303
atggcgtccgggattggagatcccggaatcgaggcaaggcatggtcgagagcatgattacttcggatgcgattctgcggcaaccaaccgcggacgggaggatggaacgatgaacgttgatggtgaatctgcggcaaccaaccacagacggggcgctgattacgtcagttgggattatgcggcatccgcggaagggattggagcggcaaccgcggacgggattctggggcatggcatggtgggcgctgatggcgtcagatgggattctgcggcatccgcggaagggattatgaggcagccacgaaagggcttctag

SEQ ID NO: 14525 - DNA, 1962 bp, Zea mays
  Peptide Sequence Number=SeqID_56304
atggatcccccacgcggaggaccagtgattgatcctgctaaatgtcgattgatgagtgtggatgaaaagcgagaactcgttcgtgatttatcaaagagcccagaaagtgctcctgacaggctccagtcatggacccggcgagaaattgtagagattctttgttctgatcttggaagggagaggaaatatactggtttatccaagcagagaatgctagattatctatttagttatgatgataacaaggacccaagcctctggttgtcctgtagttcagaccaacacttacaaaaggatacctgtggtttctcatgccatcttgaatgtgctctaaaggatgaaagaacagcctttgctgttatggttcttttggatcgatccatgtacggtcatcatttattcaaggaaaagaatgctcacaggtcctggaagaaacaactggtgatagcaaaagatgctcggcgattggatgtgttgtgtcatcggatttatctcagtcacaagatcctcgtctccacagaaaagtacttggtattgcatgagattgttgatacagcattgaagaaactggaggctgaggtcggtcctatatctggagctccaaatatgagtcgtggaattgtcagtcgacttactgttggtgccgaagttcagaaactttgtgctcaagcaatagatgctatggaatcattgttctcgggtgtatctcctgctggttcaagaatcccgcgaccatgtatggtaccaccaaattttgtgaagtttgaagctataacccaaacatctgtcatggtatttttggatttggttcactatcctatgcttgcccaagaggcaacttcatttaatatatggcaccgaatggctgttactgaagcttacctgacaaatccgactggcataatacttcccccatcgaaaaaattacctgtcactgggcttgcaccggctacaagctatatctttaagattattgctttcaaaaactcaatcgagttgggttcatgggaaattagaacgaagacaagctatcaaaaggatgatccaaggggttcaatgccaggtggtactagactaggacataatagtgagagcctgaaggcaaacagtgatggccagtctgatccttcctcagagggtgtggactcaaacaataatactgctgtttatgctgatctaaacaagtcccctgaaagtgattttgagtactgtgaaaatcctgagatcctagattcagataaagcgtctcgtcgcctcagcgaacacatcgatgacttgcaaaatatacagatggctgcagatagggtaacagaagtcactgagctggaagaatcgcctgggctctcagcctcagccttggatgaggaacccaacgcttgtgttcaagcagtgcttctcagggagccaaacccactaggacacaatcaaagaactgtagttcctagatcacagcatgcatctaatgtactgggtggaaatgagttggtgattgttggacctcgatatgctggttctgtgccacccattgcaacaagaggtctggaaaacagcaaggagagcggtggaaggggcttcaaacccaaaccttgtaacaacattttccaaaatggctcttcaaagcctgaaagggaaccgggcaattcgtcaaacaaaagaacagctggtaaaacggaggaccttggtcacaaggatagttcatctgaagtgtcctacgagtactgtgtaagggtggtcaggtggctggagtgcgagggctacatcgagacaaacttcagggtgaagtttctcacatggtttagcctgcgtgccaccccgcaggagagaaagatagtcggtgtctatgtggatacccttattgaggaccctgtcagcctttctggccagctcgttgacagcttctcggaggcggtatatagcaaaaagcggacgccttctggtttctgcatggacctgtggcattga

SEQ ID NO: 14526 - DNA, 689 bp, Zea mays
  Peptide Sequence Number=SeqID_56305
atggatgcaatgtttgcaaggggtatacttaagtgccccaatagatcagcgaggccaatatggctaatgagcacacgaaatcctagagaatcctcggttaaaacaaaaggcacgagcgacaatcatgaggagaggcaggagataggtaccgaacgatctgaccccaatcccagggcaggcagcgacccgccctcaccatcgacatgggggccaaagcgaaaacagaaagacagggagagggaggggataatacctgaggttggcggtgtccgccgacccgtccccggcgagccccatgagcgccacctccgcgccgccctcccggccctggcaccagcagcaggaggaggaggaacaggagagcgcccgccccgggagcagggggaggaggaggaggagcaccaccgcgagatgcgcgcggatggaggtgctggtggtggtccccacggcccctcctcgcgcatgaaaaggggcgtgcagggatggggggagggagagccgggaagcaggggaaggggggaacggatggacgagaggagagggaggcgtgcaagggaagctgctcgcgtgctttcctttgagtttgaggaaagcagaggagtggatgagaatgatcggggagcggttgacgtggcgggccgccgcgactggacggtggacgcacccgaccccggcgacccggccgtgtc

SEQ ID NO: 14527 - DNA, 1280 bp, Zea mays
  Peptide Sequence Number=SeqID_56306
gaccaccgccgcctcctcctcctcctctctgctgcggccgctgtaccgtcggtcgcctggacgggtgcggcggccacgtcttcgtcttcatcgtgacccacgacggagaggacacacacacacacagagagagagagaggcctggcgtcagggaggaagacgtctcgcctcgtctcgtcgtcttctgcggcgtccgttcttcaagccctcccccgtcgcccaccagtagcccgcccgcccgctccccaaggaggacgcagcggtacggctcgtcccctctcctccgcttcgccgacttttggccggtctgcgtgcggttgtgcgccgccgatcacgtttgccatgagaagacagctttggttgtgccaaagccaaacacgaacaccagcctaggaattccagcatgggttcagggaatctggtgcgcctcgtatgagaagggctgtaggcctttcatatgcgacaccgaccagactcgctccaactgtctcgagaggttcagaggcgctcatggactgccactgccagtgccagccaacgccagagcctcctcccgtaccgtggctcctctcaacagcatccataccattaccatctcttcgtcgaatgcaaacaacaaccgcccggcttgcccgctgtgtagaggcgatgtgatggggtggttcgtcatcggcgaggctcgctcgcaccttaaccagaagagaagatgctgcgaagagagccgctgctcgtacgtcggcagcttccacgagctccagaggcacacccagcaaaagcatccggactcgcgcccttccgcgatcgaccctgctcgccgggccgattgggagaacctgcagcggtcttccgacgtggtagatgtcctgagcacaatacacgcgcaggttccaaacggtgtggttcttggagactatgtcatcgagtacggggacggtgacgaagctggagacgacgactacgaggtttaccacggggttagagcaagctggtggacgtcctgtatcttctgcaaagcgttctgtaggtcttcccccccaggaggagtccggagaaggacgagaacaggggaaaggagaagcagtggtggaagtggaacaaggagcagcagcaacaggtctagctctagtcaagaaaggttcactcttgatgaagttgacgatggatatgtagttgcaggggccatggccagggctgccgtgtcagggacaatggatgctcgttacagcttcaccggaaagcagcagttgagtaagcacgaagtgaggcaaaagcattgctaa

SEQ ID NO: 14528 - DNA, 936 bp, Zea mays
  Peptide Sequence Number=SeqID_56307
atggaggacttctatgaggcaaggatagacgacgttgacggagagaaagttggaatgtttggtgtgtatgatggtcacggaggagtcagagcagctgagtacgttaagcagcatcttttcagcaatttaatcaaacacccaaagttcatcactgataccaaggccgctattgctgaaacttacaaccgcacagattcagaatttctgaaagctgatagcactcaaactcgagatgctggctcaactgcctcaacagctattattgtaggtgatcgtttgcttgttgcaaatgttggagattctagagctgttatttctaaaggaggacaggcaattgcggtttcaagggatcacaaacctgatcagacagatgagaggcaaagaattgaggatgcagggggctttgttatgtgggctgggacatggagagtgggtggcgttctcgctgtctctcgagcatttggtgataaactcttgaagccgtatgttgttgctgaccctgaaatcaaggaggaggtggtcgacagctcccttgaattcctcatccttgctagcgacggactctgggatgttgtcactaatgaggaagctgttgccatggtcaagcctatccaggacccccaggaagcagcaaacaagcttctcgaagaagcttcccgaaggggaagctccgataacatcacagttatcatcgtccgcttcatagacggaactaccggggtcaagcttgcattgggcctgcaatatggacttggcctgaccctgacggccctgacctcgcattgcataaggattctatcctctgtttggtataacttgtcgcacagtttcttcgtagatttaagcagaagtcgtactaaacagcagtctctcattacttcatctgcttctcggacaagtcgcttttcgaaagagcaacagtttaaaggattctaa

SEQ ID NO: 14529 - DNA, 867 bp, Zea mays
  Peptide Sequence Number=SeqID_56308
atggaggagcactgctactccgtgtccgcggaggaggtcgtcggcacgcacctgtccttagggatcggcggcggcggcggcggaggagataagaggatgctaacaacgctgccgccgtctcggacggtagtgcagctgttcggcgaggtgctgtcggtgcaggacggtgacgaagcgcaagctcttcgtcatcaccacacgggccggccgacggcggcgagcaggaagaagaagaggagggacgccgccgctggtggcgccagcgccactgacgccgctgccaatggccatcatcatcagagcaagaaaaccaagacgacggcggcgcgccgagacgacggaggcggcggcggcggcggcggaaggaagaagctccggctcaccgccgcgcaggccaccttgctcgaggacagcttccgcgcccacaacatcctctctcacgtatgtcgattcatgcacgcaccgcacgcacccttcatacacacgtacgtaattctccattcgtcatctcttccgctgatgggtcgaatctaccagggggagaagcaggagctggcgcggcaggcggggctgagcgcgcggcaggtggaggtgtggttccagaaccggagggcccggaccaagctcaagcagacggaggtcgactgcgacctgctccgccgctggtgcgcccgcctctccgacgacaacgaccgcctccgccgagacctcgccgacctccgccgggcggcggcggcgtccgcgggcctcggcgccgtcgtctgctgcgcctcatgcggcgccgacaggcagctcgccctcgccgccgccgccgacaacgtgctgccgtcggtcgcctcgcctagtcactcacctcacctcacctga

SEQ ID NO: 14530 - DNA, 318 bp, Zea mays
  Peptide Sequence Number=SeqID_56309
atgatattgagagcatggataaaattctcagcgaaaacatttcgagaaaaccgaaaatcacgtttaaaaacgaaaaaaccgagaaatctgataaacacatttttcgagagaacattgagaggactagatgaaggggaggaggaggagagcagaggcctcgatgaagaaaaggctgcagtgcaccattgggtccatttcgcaaggaaactgatgccttcgcatgcgtcctgccgttctgaattcatccaccagttcgacggctcggtcagtgtggccaagacgcaaagcctgggagactgtgtctccaaccactgctag

SEQ ID NO: 14531 - DNA, 2013 bp, Zea mays
  Peptide Sequence Number=SeqID_56310
atggatcacggcggcgaggaccgcgtcgtggcggcgagcctcgcggcggcgcggcgcacgctgcgcgccggcttggacaagtcgcgcgcgctgggccacgcgctagcccgcgcggggccccgcctgaaggagatccaagcggcgctgccggtgctggaggccgcagtgcgcccgatccgcgcgccgcgggccgagctcgccgccgccgggccccacatcgaccgcgccgtgggccccgccgccgccgtgctcaaggtgttcgatgccgtgcacggtctcgagccgccgctcctggcgcccggcgccgcgggctctggcgcggctggggacttgccggggtacctcgccgtcctggcgcagctcgaggaggcgcacaggttcctcgccgacaactgcgggctcgccgcgcagtggctcgccgacattgtcgagtacctcggcgaccgtttcctcgtcgacccgcgcttcctcgccgacatcgaggtcacgctcgacgagctcaaggcaccccctaccggcgacctcgacggagggctcctggccgccgccctcggtatcctcgaggccgagttccgccgcctcctcgccgaccattccgcgccgctcgcgatgccgcagcccggcgccgccgctggctcaaccgcgccatcccgcgtgcctgccgctgccgtccacaaactcaccctcattctcgatcgcctcgtggccaacggcaggcaagaccgctgcgtggccgtttatatcgacgcgcgcgggggtgtggtcagtgccagtcttcgcgctcttggcctagactacctgcgtgagccgtctcaggatgcacaggcattgggacctgctcttgagctgtgggggcggcatctagagtttgtggtccgccgtctcctcgagtcggagcggcagctctgtgccaaggtgtttggcctgcataaggatgtcgcgtccgcatgctttgcagaggtggcggcacaagctggggttcttgaattcttgaggtttggccgtgcagttgctgatgccaagaaggatcccatcaagcttcagcgtctgctcgaggtgtttgattctttgaataagctgagactggatttcaataggttgttcggtggcaaagcatgtgcggagattcagagccagacaagggaccttgtcaagttgttgatagacggtgctgtcgagatctttgaggagttgatcgtgcaggtggagctacagcggcacatgcctcccccagtcgatgggggcgtgccacgcttagttacctttgttgtcgagtactgcgaccgtctgcttggtgaacaatacaggcccatgcttgggcaggcatatgacaatgctacgctctcgtatctcttcatgatgaatactcattggcatttctttaggcatttgaaggctactaagttaggagagatcttgggtgatgtgtggctgcgagagcatgaacaatacaaggactactatttgtcaatgttcatcagggagagctggggagcactttcgccactactgaaccgggagggattaatactgttctccaagggccaggctacggcaagggacctggtgaagcagcgcctcaaaacattcaattcaagcttcgatgagatgcattgcaggcaatcatcatgggttataccagacaaggatttgcgggagaggacatgtaatcttgtggtgcagactattgttcctgcctatcggagctacttgcagaactatgggccacttgttgagcaagatggaaacaccagcaagtatgtaaggtacactgttgatggtttggagaagatgctcagtgccctttacatgccccggcccaggagggctgggagcttccagatcaaacactcgagtggatggatggaaggaactaaggaacttgaaatcatggacactgccacactgcactattgggcattcgcattcagggcaatagaagcatctgaaatccgtttggagaattttgtttgtttattccccattgcactaagataccttggagcaatctga

SEQ ID NO: 14532 - DNA, 162 bp, Zea mays
  Peptide Sequence Number=SeqID_56311
atggctgatgcgtcagatgagcggaggctcaacgcatacaagattacaatcgatataattaatgtctgggtgggggatttcttcgattttcaagtttgcttgtggttaaaaatttcgaagcgatggtcagcagaagccgaaagcaaaaatgaccagaactaa

SEQ ID NO: 14533 - DNA, 1143 bp, Zea mays
  Peptide Sequence Number=SeqID_56312
atgtggcgagcgacgaggcggtctccgccgttcctgcgatggctatcgtcggacgcagcctcctctaaggcgccgcggcagcgcgtagcggcgctgtgggggaacggtgactacgggcggctggggctgggctcgctggagtcgcggtggagccccacggtttgccccttcttcctcgcccgcgccgccgacccgcccgcctccctcgcctgcggcggcgcacataccctctttctcacccagaatgggcgagtgttcgctacagggctgaacgactttgggcagctggggataggaacctctgttacacatatgctggagcctgttgaaatttctggatttcacgaaagagttgtagaagtttcagctggcaaccatcattcttgtgcagtcaccgcggatggtaagctctttgtttggggcagaaactcaggtggccagcttggccttggtaaaggggcaggtaaagtagtttctaccccaacaaaggttgattgtttgactgacctcagagtaaaaacggttgctctgggatcagagcattcaattgctgttacagaggaaggtgaagtcttgagttggggagctgctggttctggtaggctcggacatggccgtcaatctagcatcctgggattttctctgacctcaactgaatatactccaagattgatcaaaaactttgatggtatcaagattaaaaagatagctgcaggaatgttgcactcagcttgcattgatgaaaaaggtactttgttcatatttgggcagaagactgagaaggtgggatttggaagaccgaacgaagaattcagaccaaatattgttgaagagataccattttcagaagaagttgcttgtggaggttaccatacttgtgttgtaacagctatacgctatcgctgtgctctgagcacctcaaaacatccaggtgatgacatctacacatggggttggggaggcgccaatgggacttttttcgaagagggccattcttccggtggacagctgggacatggaaacgacgtagactattttgagcctatgatggttccctttggcacgaatgcaagagccgtccatgtatcgtgtggcttcaatcatactggtgcaatttacgagtgctccgaggactttgactga

SEQ ID NO: 14534 - DNA, 717 bp, Zea mays
  Peptide Sequence Number=SeqID_56313
atgtgggattgtctattcactattcttgttgatgaatctcatgatatatcaattaaagaacaaatggaattggttgtgagatttgtgaatactaaaggagaggtaattgaaagatttctgggtctcaagcatgtcaaggacacaacatcggaagcattgaagagagcattggttgaggcattaagtggccatggtttatgtgttgcaaaacttcgagggcaagggtacgatggtgcttctaatatgagaggagaatttaatggtcttcaaaaaataattcgagatgagaacctgcatgctcattatattcattgctttgctcatcaattgcaatcggtagttgttgtggtctcaaaatgttgctcatctattgaagatttctttgagtatgtttcattgattgtgaatagcactagtgcttcttgcaaaaggaaagatgtgttggttcataagcatcacttaaatcttttgtctaagttagctagtggacaaattgtatcgaggagagatgctattaccactgagtttgatcatcgcttcaatgagacatcctcggagttgttggtttgttttgcatgtcttgatccaagagacccattctcgaagtttgatgtggataagctttcttggcttacggatatgtattgtgatgacttctcttttgatgaccgcaagataataaaggatcacctacacactttcattattcatgtgtga

SEQ ID NO: 14535 - DNA, 420 bp, Zea mays
  Peptide Sequence Number=SeqID_56314
atgacggcggacgtcaaggcgaggtgctccgacgaggccgcgactaacgttggggcgagctcgatcgcgggtgggggaagggcggctggctggcaccatcggcgcgaccagagcaggcgctcgacacgggggtgggcgcgcgacgtgcgcggacgggctgcatggggcgcggcggcggctaggggagggcgcgactgggcgagcgcgctgggcaggcgcgcgcaggcggtggcgctaaggtttggggcgctgggctggcgaggctgctgcgctgttgggccacagaagcaggccggggtggggatgccgcggctggggaaaggggcgcacgctgggtgggccgcggccgcggtggcgcgcgatgggccgggatggctgagcggcccaggacggggagaggggagcgagcgtcgagtgtaa

SEQ ID NO: 14536 - DNA, 204 bp, Zea mays
  Peptide Sequence Number=SeqID_56315
atggccactgagggcaaccccgacacggaggagaagcagatatggtcacagttccggacaatggcccgcgggcttatggcgaagtccgccgccaaatcgatttttatttgtcgcgagcgcgacgtctgggccatgttgcagggccatcaggccatgttgtgtcgtttaaacaagcagctggctctaaagagtgtcgaggactag

SEQ ID NO: 14537 - DNA, 1377 bp, Zea mays
  Peptide Sequence Number=SeqID_56316
atggtcgccacgtcggaggccgctccgctccgcgtctccgcttcggtggggagcaagcaccacggcggcgcagggacgcgggggccagcgacgcgccgccgcgcgcgcgacgttgtcgtgttcgcggccggcgtcgcggcgaccctgctcgcgcttgtgggcacggcgtcggtcctcgaccccggcgggcgcggcggcctggtcgccttgcgcgtccccgtccccgttcccggccctgaggacgggccgcgcacgttctacgacgacccggaggtgtcgtacgccgtggcggcgggccggcgcctcaccggctgggacgccaaacgcgcggagtggctgcgctcgcgcgggctcggccgccggagcgcgccggagcgcgtggtgatggtgtccgggtcgcagccggagccgtgccccggcggcgcgggcgaccacctcatgctgcggttcctcaagaacaagctcgactactgccgcctgcacgggatcgagctgctctacaacagggagttcctgcacccggccatgggaggctactgggccaagatccccatcgtccgcgccgccatgctcgcccacccggacgcggagtgggtctggtgggtggactccgacgccgtcttcaccgacatggacttctccctgcccctcgccaagtacggcggccgcaacttcgtcgtgtatggctggcccgacaagttcttcgtgaggaagtcgtggctggggctgaacgccggcgtgttcctcatccgcaactgccagtggtcgctcgacttcatggacgagtgggcgcgcatgggccccgcgtacccggaggaccacgcccggtggggggaggtgctcagagccacgctcagcgacaaggactccgacgtggcgtgcgaccagtccgcgctcgtgtacctgctcctcaacaactgggagaggccggggaagaagaccttcgtcgagacggagtacttcttccagggctactggaaggaggtcgtggaccgcctcgatggcgtcgccgcgcggtacgaggccgtcgagcggcgctcgccggggctccggcggcggcacgcggagcaggagcacctgcgctacgcgggggcgcgaaacgcggccttgaggggcgtcgtaccggggccggccggtggcggggaggtggggtggcggcggccgctcatcacgcacttcgtcggctgccagccctgcagcggcggtcggaacccgatgtactcgagggagagctgcgacgacgggatgcgccacgcgctggggttcgcggacgaccaggtgctccgcgcgtacgggttccgccacgccgccccgctcaacgacagcgtgcgggggctgccgttcgattacccagctgcgcacgcgcgcaacgattga

SEQ ID NO: 14538 - DNA, 825 bp, Zea mays
  Peptide Sequence Number=SeqID_56317
atgagcgagcgcgccgggtatccggcgccagccgtggccgccattgccggtacggccgtcgcgtcggcgccggaccacatggacgagcagccggcgagggggaggtaccacccgttcgaggagatctccgaggcggtgcagctggacgacggcgagccggcccacctgaccgacgccgagtcagcccgaacaatcgtcgaggtgaacaacaaggcgacggtgatgatctccacgctcgtcggcgacggtgtgcacgagcggatcatcctgccggagttcccctacctcaccgacgagaacggagatatctacttcgaggtcgacaacgaggacgcgctgctggagagcatcatgggggaggacaagatcgcgcacgttatcatcggattggacaacacacaggtcttcgccgacttggatctcgtctcggcctccgccacagagtttgcgcaagaagacgacaacggcgatgaggacgatgacggctccgacgatgatgaggaaagcgactttgacgaggacttcaacgacgtgccaaaggtaaagattgaagaataccagaaggctaagccggacatcatcgcgcattctgcaccgaacgtaatatcgcgcctgagagctggtggagacaaggtcacccaggctctgaaatctctctgttggaggagcaaggccattcaagtagaggaggcagcggtgatcggagtggactgccttggttttgacctgagagtgtgctcaggaactcaagtgcagacattgagatttgctttccctacaaagaggaagctcagtgcaactccaacagattgcctatccaagtag

SEQ ID NO: 14539 - DNA, 738 bp, Zea mays
  Peptide Sequence Number=SeqID_56318
atgccctccatcctggcatcgtcagtctccattagatcccacgaacgcgacacgaactcggtggacaagcctgtgaagaggctcgtggagttagtgagccagaaaatcagatgtacgtacgtgcgtaccttggaggacaggcgcatggcgacggagagtcgtgacaacggtttgaggtgcttgctgacggagaaggtaaagacggtggttggtgagtcaaaggccaccaggatgaactgctcgatgttctctatagtggtgcggaagaatctaagtgagagtgggagacaggaggccgaggacatgggaagcatcctcaagatcatcgtcgcagattgcacacgaggcgtttggcacaatgtatttgcgatggaggcgcaactcccctgcctcctcgtttcatttcaccagagccaaaatcgagcaccagcgccagagcgaaggggagatgagcagggagcgcctgccaacgccgtccccgtccacgaccgacgttcggggatctgtgacgagtctgggagcttcgtggagttgcttgagaggcacacatggctgagtggggaaggattgaccaccgtggcggccggaattcttcatcgaacacagagatccaccgcacgctgtgggtggggcttggcactccttgaatcacggaaaactccgaccatggcgccgccgagattcggcatcgaggggatggaaggggacgtggtcgtggatccgcaatgggacaattag

SEQ ID NO: 14540 - DNA, 228 bp, Zea mays
  Peptide Sequence Number=SeqID_56319
atgaggagtatgcgaggcaagctagactgtgaggtgggaatgggattggatttgaggcgagattggggtaaggaagaggaggactggaggaggctcacggcggatgcatatgaggagagagaagcagagcctctgaaagaaatagtggatgtggcggccaagccgaggagaggggactccgcccatcgggacattgatgtgctctccatcttccctcaacgcacttag

SEQ ID NO: 14541 - DNA, 252 bp, Zea mays
  Peptide Sequence Number=SeqID_56320
atgaccagcaccctcgcagcagccctcgcccgctttgccctccactccacagtgccatcattgtccctgcctaagcgccgtccaaattcctgcagcaagcctcacccagcaacgcccagtggcagcatggtgtttcgcctcgcgctttgcgtgctcgacggatcgcagcagcgagccacgtccttcacttcgtttcggtatcctgtgcgcgacgacgcgttcgtctccgcgccacgtgtgcaacaaccatga

SEQ ID NO: 14542 - DNA, 369 bp, Zea mays
  Peptide Sequence Number=SeqID_56321
atgggtgagaggggagctcacagggggtcgcttgcaggggaatggaggctggggaggaagagctactgctcccctgtggcaagggacacaggaagaaggccgacgtcgagctcctggacatgggggtcgctggagcatcggcttcattccctgagcagggcgtcggccattggggctgctgggaatgggggtcgctggctgctgttggccggagagcaggaggaggacggaccgagcgagggaggaagggactgctgctcgccaggaggaggaggagcagaggtccggccgtggggagaggagcctagctccatgcttgctgccgtgaagcagggaggaagaagttgggacatagagatatttggctga

SEQ ID NO: 14543 - DNA, 300 bp, Zea mays
  Peptide Sequence Number=SeqID_56322
atgcctcatttccatctcttctgcctgttgttgctcggccgcaagctcctcttatttcttctgcattttcaccttgtcctctgcatcccacttctttatctcctccatccactccttgtctttctgaggatgaatggcatggggaggacgagcaaaaacgagatgacggatataaacagaacaccgtatgttggagggggtgctatttatacattggtgctcaaggccaatggtcatggcaccaagctcaacgcgaagatctacgacgcccagggtcagcgcctaaatccatggcgctaa

SEQ ID NO: 14544 - DNA, 480 bp, Zea mays
  Peptide Sequence Number=SeqID_56323
atgcccacggagaagctcctgcgcgctggggagaagggctccctgctgccgaacgtcgtggagaaggggggtgccatgggcgacggcgagctcactgctcgagctcggaccagagaaggtccgcgccatggctggagcaaaggggcccgtggccaaggggagagcaggggtgagagaagctcgttcgcgccttggaccaacagagggaatctgcctgctggggggttcataggggcgcgcaccgggggaaagggtggcttcctgctgccatgcctgaaaggggcgccatggggagaggtggacgaccgttggcctgggggagaggcgccgagcgccatggtggccgaggggaggaggggcgcggtccctgggcagagaggagggagccagatgaaggaggaagaaggccggctgctgccgcacgagggagaagaagctccacgggagagaagattgagagaaaaagaaagtggcgactag

SEQ ID NO: 14545 - DNA, 402 bp, Zea mays
  Peptide Sequence Number=SeqID_56324
atggactggggcatctcgcgtgccgaccactggggcacctcgtgcaccggcccccagggcacctcttgcatcagcggcagcccccggggcaccttgtgcatcgacatcgaccctaggggcatctcgcacgctggccctcgtggcacctcttgcatcggcatcagctctaggggtgactgctcagacagaggtctgcaggtgcaccttcaggtgctagtgctacccgtggtgacagacgccggagcactggagtactggacgtcggtggcagacactggacggctagagcacttggagcagagacgtcggcagaaaccagagaggacaaaggagaggaggagggtttctggcggctgggagggtttctggcggctgatttactgctggagggggctactgtag

SEQ ID NO: 14546 - DNA, 1899 bp, Zea mays
  Peptide Sequence Number=SeqID_56325
atggagttcgacttcgactcccatggcggcgacgcttggctgctcgacgccatgtccacgtcgctccacttttcggccgtttcgcccccggtgccgtcgccgtggccgtgcggcgacccgcatcatccttccatgtggctggacacggttgccctgcaagacgacggcccgagcgtccccgccgagaaatctgaaatatccaagaaatgtgaacatttaaatggtaaatgccaggttcatctttccctggttgatggttgttctgatagctcatatttcttgaaggaaaagctcacagtagctctcatgtacttcaaggagtctaccaagcagcatttgttggttcaagtttgggtgcctatcaggaaaggggaccactacatgctaagcacttcagggcagccctttgtgcttgacgaacagagcatcggacttcttgattatagggctgtgtccatgatgtatacgttcgctgtggatggggatagtgtcgaagaattgggtctacctggacgcgtatacaagcagaggctacctgaatggacgcccgatgtgcagtactacagcagtattgaatatgcacggcttaaccatgcaataagttacgacgtacatggtactgttgccttgcctgtgtttgattcttccatgaagtcatgcatcgctgttgttgaacttataatgacatcaaagaaagtaaactatgcaagagaggttggtgaagtctccaaagctcttgaggccgtgaatcttaaaagcactgaagttatcgaacatccatatgtccagatatttaatgaaggacatcaaaatgttcttgtagagatgttggaaatcataacagtaatttgtgaagagctcaaactacccatagctcagacttgggtgccatgcaaataccaaaatttattgatacattgtggtggtgaaaataagagttgcttcgatattcatgaaagttgtgcccaagaactatgcatgtcaacaagtgctgttatgtttcatattatcgatgctcatatgtggggcttccgagatgcctgtgtagagcaccacctgaagaagggacaaggggtttctggaaaggcttttatcctacgtaggccttgctttacgaaagatgttactagattctctaaaatggagtacccccttgttcactatgctcgtatgtttggattagctggctgtttttcgatatgcttgcaaagtgcttataatagaaatgaggactatgtattggagttcttcttgccacctgattgtagagaagatggtgagcaaaaggttcttttggactccatcttagctctgctgagacagtatcttaatagattgcaggtagccactgacgaaggctcaaatgaagtttaccttcaagtcgatgctattactataattgaaaatggagatataaagaatgcacatgtacaacatatgaactgtgaaggtggcattcatgcatcagatgagagaaatatgcatgtaatccatgagtctgacagccagaaaagaatatccccaacagaatctgaaacatgtccatcgcctgataacaccaaatgcaatgacaaattatttgctagacaaaatggtggatgtatctcagattctttattgcttgaaaacaatagcaagcatagtggaaggagacaaggaaaagaagaaaaaacattcagtttagaggttattcaacagtattttactggaagcttgaagaatgcagcaaaaagtcttggaggcgatgttcttggtctgactacaactgtccatggacgctacgccttagaaaccaatacagcacctccaatgggttgtcacaatcttgtggagtgcgaccaccggccacgagggcacttgtcctacaagcaatcgaagaaccagcaagaacaagtataa

SEQ ID NO: 14547 - DNA, 990 bp, Zea mays
  Peptide Sequence Number=SeqID_56326
atgaagcgcatttgtaggcaacatggtatttctcgctggccatctcgacaaatcagcaaggttaaccgtactgtttcaaaattaaagaaggtaattgaatctgttgaagggcatgagggtgcatttactctcacatctgtcacaggtcctcttcctgttgcttttggtccatccaatcctatcagtataaagaaccaaagccaaattaatgtttctggacttcccattccttctgttcaagaaaacagagactcatcctcacagagtaagttactagaaaatgatattcaccgaagcactcttgttccccagaaaagctttctagctaatatcaacagacagattgaagcagagaaagcttccaactcgagaaattcatcgaaagattgtagaacacattctgggagatcagaagaatcctaccctgttagccctgcaaacatgacatttgtttcaacactcctagaaccgcaacaaaacatgtacatacaagatggcttcacaaaagagtcttttcagaaagaggacctgcggtttcatgggatgtttgttaacggatcaggaagcttgaaagattgcatgaaccacatcacttctgcagttaacggaacgattatagggcatccaggaagtctcacgactgcacaaaattcagggataataacatgtccaggcagtctcatcagtgcgcagaattcaaggatagtaacagtaaaggcacgctacaaggaagacttgttaaggtttcggttcccatgttctggaagctttatcactttgaaagatgaggtggccaaaagaatacaaatggatggtgttctttttgacatcaagtatcttgatgatgatcatgaatgggtgaagttgacatgcgacaccgacttagaagagtgcatggagatctctcgggcatctggtagcaacgttttgaggctgctggtcactgacattgctccagtccttgggagttcttgtggtagcactggatga

SEQ ID NO: 14548 - DNA, 756 bp, Zea mays
  Peptide Sequence Number=SeqID_56327
atgtgcgtcgactccaccaggatccagaaaggaatcaccgcaaggaaacctctgcgcccttgtcctcccgtcttcggcgccccacaccggcgccccacaccatgtccgccgcgacctccgccccacccccacctccaggtcatccagcctcatcccaatcgcgacaagccagaggagagcgcgagaaaatccccaatccgcatgccaccgcttcccctctccgtctcctccaaatccaatcgtctccaaccgtcaatccgcccgccacctccaccaccgaatcccaggcaggcatggagtgcgagccagaggagctccgttgggcggcgtcggcatcgtggagggggagcagctggggcgccccaccatccgctgcaccaccgacgacgtctacttcgcggatcgtctccaaccgtcgatccgcccgccacctccaccaccgaatcccaggcaggcatggagtgcgagccagaggagctccgttgggcggcgtcggcatcgtggagggggagcagctggggcgccccgccatccgctgcaccaccgacgatgtctacttcgcggatcgtctccaaccgtcgatccgcccgccacctccaccaccgaatcccaggcaggcatggagtgcgagcgagaggagctccgttgggcggcgtcggcatctaccgcttgtccgcctaccacgccgccttcgtgctcctctttgcctccatattccctgaatggcaagcctccatattccagctacgcatgtag

SEQ ID NO: 14549 - DNA, 1860 bp, Zea mays
  Peptide Sequence Number=SeqID_56328
atggcgggcgggtctggcgtcaagagagcgcgcaaatttggagacaccggagaggagatggcgggcgggtctggcggcgagagaccgcgcagagaagagagcggcgacgcggagatggcggccagagagcgcgcagatggcgggcgggagagacagcagagaggagagcggggtcggaccttccatggaactatgcggaccttccatggttggagattccccttccacgatggctgccgagagagcgggggcgcgagagaggagagcgtgggcgacgttagtatggaaatcttccgcttcttgagattagggtcccctggtcctagagtacaaatcgtgttgacctcgtggaatgtaaggtcaatcctcttcgatgagggtcctttagcgcgtcttggctttagttgggagtatattcttcctgaggtgaaaagatgtttcccgccaagccccctaccctccaaggccgccacgaacgccacagctccccgatgccgcgccgcgccctcgggcgacgcctcgctgtgcgccttccgcgcgcaccacagcgccggccacgccctccacactaacccggctctgatgcccgcgctcgccgcctgcgcgcggctgccctccgccgtggccgaggccgagcagatccacgcactcctcgtcaagtcaggcggctcgcgggctgtctcccacgtccaagccttcacgtccctgattcgcgcctacgcgaggctcggccgcgtgtgcgacgcgcggaaggtgttcgatggaatggccgaccggacggtggtcacctggaacgtgctgcttgatgcgcttatcagagatggcgacttggacgctgcgtgggaggtgtttgtgaaaatgccgcagcgcaatgcggtttcttggaacaccataatttctggttttgcaaggaacgggtgggcgccggtggcagtggacttgtttatcgagatgactgtggcttatggtttagcgccagatgaggccacgatggttggcttcgtgtcggctgttcgggacattggtctacttgcaattgggaagagcgcacacgggtatgttctccgtcgggagttctcacttgatggtcctctcggggttgcactggtcagtatgtacacgaggtgcgggagcatgggtgctgcacacagttgcttcttaagtgtcaccaccaagaatgtggagcattggacctctttgatcgcaggtttcgcagcacatggtcaaccagagaatgccttgaggttgttcgtcgagatgaggcaggtgggcattgagcctaatggtgtcaccttcgtagccgtcttgagtgcctgcagccatggcgggctcgtcgatgagggcttcaagtacttcgacctaatgaggagcatgggcatcaggccgatgatccagcactatggctgcttggttgatctccttggccgtgctgggttcttgaaggaggctttcaatcttgccagcaatctacctgaagatcctggttttgtaatctggagctcgctactagcagcctgccgtagccatggcaacgtcgagatggcagagctcactgcgtcgaagttggcagaggcaaaaccaagtcatggcagctcgtatgtgctgctatcgaacacatatgcacgagcggaacaatgggaggactcgaagaggacgcggaggaggatggaggaacatagagtagccaagaaacctgggctcagctggatagagatagatggaagcgtacattcctttgccactgcagacaagctgcatatagaaagcgagggtatttatcatatgttggaggatttgaaacataattttacatcagctgcatatgaacctgaaccgttcgctatttctgaacaattgtaa

SEQ ID NO: 14550 - DNA, 633 bp, Zea mays
  Peptide Sequence Number=SeqID_56329
atgcccacgcccacgacggtagcagccaaggcggtgcgtgcctcggcagcactcacgcctgtggaggtcacacacacggtagtgtctaggctgacgactacagtgaggacgggcggcgtgctagccgcgtcggatgcccaagatgggcagcgcgctggccagagggagagacatgcgacaacaacatcagaggagaggggcatactgaccatggtgccggctgcgggggccgcaaaggagaaatttgtcaaaatgggtcgctctacgttgccgctctctaaaataggttatgtcttattgcacttgtcaaataggtacaatctgttgctgcacccggcacttgtgctctcaatgaagaccccacgatcaatgaaaatcatcagggtgagtgagtacttcctcgttgagtgcagcctcgtgttcgtggtggcgttcctcatcaaggtcatcgtcaccgggtccatctgcaatgcggacaacctcttctcggacgacgcagacgcgtgtggctacctcactcagcagtcgtcgtcttggcgctcacggccgcctacctcgtcttcgtcgtctacctggcgtttagtatgggtatttcggacatatccatggaagggacccactagtgagacgtaa

SEQ ID NO: 14551 - DNA, 972 bp, Zea mays
  Peptide Sequence Number=SeqID_56330
atggacaccgctctaccttccgtcctcataggcggcggactctccgtgtccgtctccatttccaccgccactaaagccggcagccaatccatttcctcccacctctcgacctcctccctccgtttaaccgctcgccatcggaaccggcgccgtttgcccctccttgcatcatcttccgagtctcctcccgcgcaactagccgccgcttcgactgagagccagtcgcgttcctccaggtgggtggttgtgatggatacgccccctgccgccgcgggaggcagcggggtgtcccgcgcagaggccgtggattactacgcagccacactggcccaggttgttggaagtgagaaggaggcgcagatgcgcatatgtgaggcttcgtgggatgggacctacgagttccgctgcgagatcgacgaggatgcatcgaaggagcttgcaaactcagacatactattccgaagtagttttttagcatgccaagagatgcctggagtgttatctgttcaactagatatgggtaacaaatcagagaaggataatcacagcttgagtctctcgacagctaaccttgtaagcattagtgatggtgcttctacatcttcaagtgggaaaaatgagttttggcttgtccggatggagaagcccggagttgaagttgtgacaaaggcccaaatggtggatcactacacccaaatccttatgaaagtgttggggaacgaacaggatgctcaggttagtatatatcacgtttcatgggatagggattatggtttctgttgtcatattgatgaagaatgcgcaaaagagttagctgatgttcctggagtgttatctgttcaacccgatacgaactttggatcagacaacaaaaattacaaagccaaaattattttcttcctgtccaagacctttattggtgcatttccatacatgaaaccaccaatgttgctataccaatcttgtgcctag

SEQ ID NO: 14552 - DNA, 2419 bp, Zea mays
  Peptide Sequence Number=SeqID_56331
atgccgtcgtggcctcagcacaaagacagcagcctctgtgtcacgtcgtcccgtgtggaggggcgcaagactcggtttaggccgcgcctcgccatcgctggtgctcggctgctcgctgctgtgtaccattcggaaacgaatccggaccctgaaccacctgagacgaaaccaaactccgataaaacaggagctcccgagcaccccaactctcctccgatcgatgcgcgcgcatcctgtatcgtagcggactgcggacctaaccgcgcccgccgcgtacgttgtagcggggccggagagaaaataaggcacgccccgccctgcgccgcggccgcgcgatctcttgtcgaggcaatgggggcgctgccggcgggcctgccgccgctgccgccacatctggggactctgcgatcgacgccggatcagcgcggggcgcaggagccgctgctagggctcgactggagcgtcgccgacggtgacggtggcgccggggagcaagcggcgtggggggtgggtgacggttccgcgaggggcgtcgtggggcgcctgcggcgggcggccagggcggtgcgctcgctggtcgtcgagatgtgggagttcgcgcgcaaggacccgcggaagcccgtgttcgcggcgaaggttgccgtggcgctcgcgctcatcacgctgctcgtcttcctccgcgagcccagcgatatcgccagccattctgtatgggccatactcaccgtcgtcgtcgtgttcgagttcagcatcgggggccttgctctattggtcgctgagctagcggcacaaatgggaaaatatgacatgttggtcctcatcataagcacttttgtagttgcgttctgtgccaccttgacgaagctgcaccccaagatgaaaccatacgagtatggatttcgcgtgttcttgctgactttctgctacgtcacggtctctgggtacaacacgggagaattcacggctacggctataagcagatttgtgctgatcgctcttggtgccgctgtcagtctcggcatcaacatatgcatacacccaatctgggcaggagaggaccttcacctgttggtggccaggaatttttctggtgttgcaaaatctttagaaggatgtgttgatggatatctggcctgcatggaatatgagagggttccatccaagatactcacgtacgaagcatctgacgatgatcctgtctacagcgggtacagggcagctgttgaagcatcagcacaggaggaaaccttgctaggatttgctatatgggagccaccgcatggaccttacaagatggtgaaatatccgtggaagaactacaccaaagttggtggtgcgttgaggcattgctcattctcagtcatggcattgcatgggtgcatactttcagagatccaggcaccaccggagagcagaaaggttttctgtgcggagcttcacagagtgggccaagaaggtgctgaagtgcttcgcgaacttgggcagagagtcaagacgatgacgaagctgagctctccaaacattctttcagaagtgcacttggcagctgaagagctgcagaagaagatcgatgagaagtcttaccttctcgtcaatacagaaaggactcacgatggtgccagtgctcctgacaaggatgaatcgcccgagaacgccgctgccgattcagtgcacacgtcgaccagcttcgcttcaaacctgtacctcagcagatacgattcttcaaacccgtttctcggcagatacgattcgggatcaacggcgggcggtttatataaggcgcagtcatcgtggcctgctcggcaatctttccacccaagccttccatttgaaattgaggaatcaagaatttatgagagcgcaagcgccttgtcgctggccacgttcgcatcgctcctcattgagtttgttgcccggctccagaatcttgttgatgcatttgaagagttgagcgacaaggctaacttcaaggaccctgtggaggaaccttctacaatcagcagggagactcccggggttttagctagaatacataacttttttttggttcaagtgacgaggatgccgtctcctccagatccgttgttccccgtcttggatccgtgcttaagtcatctgctccaggtctgttctcttctattcacaactcgtcttcaatctgtgctcgcgcctcttctcttcctctccctgtcttccctgcccatctactccatccgcatggtgaggtccgacgccatgagctcggacgctgctcgctccagtgctagtgactcgacaagctcgcaggccgcacgctgtccatcgcagagggagattctgctgctgggtgcacaccgtccattcgaccagggatcttcacccaccggtgaacaccgctcattcttcaacatctccggcgaccatggggtcggcggcgctg

SEQ ID NO: 14553 - DNA, 2322 bp, Zea mays
  Peptide Sequence Number=SeqID_56332
atggatctggagtccgcggacggagcggaggcggctgacgggaagcggcgtggggagtcattgcgcgcgacgctgctgctcgcgtaccagagcctcggggtggtgtacggcgacgtggccacgtccccgctctacgtctacaagagcgccttcgctggcaacgacatccagcactcggagggcaacgaggagatctacggcgtgctctcgttcgtcttctggacgctgaccctcatcaccctcatcaagtacgtgctcatcgtgctccgtgccgacgacggcggagagggcggcaccttcgcgctctactccctcatctgccgccacgtccgcgccggcctcctgcctggcggcggcaccagagatgagctcatggaggaagagaaggtcaccgggcgtcgtggtgagcggcctgtgtccagggtcagggcggtgctggagaagtacagagtgctgcagcggctgctgctgctgttcgcactgctcggaacatgtatggtcatcggggatggcgtgctcacccctgcagtctcagtgttttctgcggtatctgggcttgagttgtcgttggaaaaggaacagcacaaatatatagaacttccagtggcctgtgccatacttatatgcttgtttgcgctgcaacactacggcacacacaaagttgggtttctttttgcaccaatcgtatgcatttggcttgtctgcataagtgcgattggcctctacaatatcatccgttgggatccccatgtttatcgagccctctcgccatactacatgtatcaattcctcaggaagactcaaactggtggctggatgtcactgggtggaatccttctttgtgtaacaggctctgaagctatgtatgcagatcttggacatttttcgcaatcatcaatccagattgcatttatatccgtggtttatcctgcacttgtattggcttatatgggacaagcggcttttatttcacaacatcacagctttgagagcagttatcatattggattttatgtgtcagtaccagaaacactcagatggcctgttctggtgattgctatactagcagctgtagttgggagtcaggcaattattactggaaccttttcaatcatcaaacagtgctcttcattaagttgtttccctggagtgaagattgtgcacacatcctcaacactgcatggtcagatatacataccagaaatcaattggatgctgatgatactctgcctggctgttactattggtttcagagacacaaaacacttggcaaatgcacaagggttggcagtaataactgtcatgcttgttaccacttgcttaatgtcactcgttattgttctttgctggaacaagagtatcttccttgcccttggtttcctacttttctttggcacgatcgaagtaatctacttctcagcttcccttgtcaagtttcatgaaggtgcttgggttcctattagtctctccttcatatttatggtgatcatgagtgtctggcactatggcacaataaagaagtacgagttcgatgtgcaaaacaaggtttcagtaaactggctcttaaaccttggcccttcactgggcattgtacgagttcgaggcattggactaatacatacagaactaatgtctggaatcccagctatcttctcccactttgtcaccaatctgcctgcgtttcaccaggtactggtattcctatgtgtcaaatcagttcctgtgccacatgtgcaaccggaggaacgatttctggtgggtcgcattggtccaaaagagtataggctatacagggtcattgtcagatatggttatcgcgatgtgcagaaggatgacctggagttcgagaaggagctagtcagcaacattgcagagttcatccgcagcagtggggaatatgacaagaatggcttcgtcgaggacgcagataagcccttcgagaagctgtccaccatcagtactggaatcaatatgttggaagaggatggagaagttgatgcacatgtatcccctcataaggagatagacccacacaatgcggcacccaagcgaaagaaagccaggttcatgataccaaagagtgctcaggtggacagtgaggtgcgccgcgagctgcaggagctcatggacgctagggaggcaggcatgtccttcatcctggggcactcgtacatgaaggcgaagagcgggtcgagtttcataaagcgggttgtgataaacttcttctacgagttcttgaggaagaacagccgtggccctgcatacgccgcaaacataccccacgcctccactctggaggtaggaatggtctaccaggtctga

SEQ ID NO: 14554 - DNA, 438 bp, Zea mays
  Peptide Sequence Number=SeqID_56333
atgccggataaaaggcttatgtgcgccaccaagaagaacttctcctcacgtcaagcttacctaaagacatgcaatgccctagatggaaaatactctgcgatgaccgacatctggaagctcaggctctcagacaaggtgaagatattttgttgggtcttcctcaaggacaaactccacacccgcgacaacatgttcaagaagagcattctgccagactcgatgtgccccgctgtgaagacggtgtggaggacacactccatacgtttgtgttatgcccagatcgccgagatttggagcccaactggcatcagcattgacacccttgatggctccacttgctcctactccaccattctgtcgaccgccatatctcaaaagtcatatcataaattgttcatgatgccatgggaagccaacaatgtcgttgtctttagatga

SEQ ID NO: 14555 - DNA, 390 bp, Zea mays
  Peptide Sequence Number=SeqID_56334
atgcggagttcgtcgtcttccggggctgagcccgagtccgagcccatcgggcgatgcggagttcgttgtcttccggggctgagcccgagttcaagcccttcgggcgatgcagagtttcctatggcgcctgaggccggacttggctgctgtcagcctcactctgtcgagtggcacaacagtcggagcggcgcaggcggcgctgtcctcttgtcaggccgggcacgtgtcaggataaggtgtcaggccacctttgcattaaatgctcctgcgatacggtcggtcggcgtggcgacttggccaaggttgcttcttggtgaagactgggcctcgggcgagccgaaggatttcgagtcccacgctctacatcggataagggcgacgtgcgactaa

SEQ ID NO: 14556 - DNA, 552 bp, Zea mays
  Peptide Sequence Number=SeqID_56335
atgctggcgcaccggacactctacagtacgtgtccggtgcgccaccggacatcaaggcgggcccagaagtcagaactccaacggtcgatttccaacggcactggtgacgtggcgggggcaccggactgtccgctcgtacaccaagttagctgcaaaagcccatgtacacttttcatgccatttcacccagagtacaggtcctccctggatcgcagcaggattggcgccaaccttgcaaacttgtcctccgcaggatggcaaatagataattcaaaaggtgttacacaggtcaagatgaatcacgctttgcacctgggaatcgaccgggtgaagactgacaaggccgggcgcttgagggcgggcgcacacgcctggattaaggcgagtgagtccggcgagatgcgccagcggagatgcctcggatgggcctccgtggagcagcacaaccaggacacctaccggacctccacgaataggaaccaccagctatgcaagaagcagaagattcggcttccatgcgcggaaaaaggaaggagagctggagggcagtaa

SEQ ID NO: 14557 - DNA, 597 bp, Zea mays
  Peptide Sequence Number=SeqID_56336
atggctgccttcatcgactttttcacgttatccagctcttccatcactaactccagagctgatctcatgaacattgctatgactacccttagttcaaaaattctttcccaggataaagagtactttgctgaacttgcagttgacgctgtattaaggcttaagggcagcaccaacctggaagccattcaaattctgaagaaacctggaggatctcttaaggactcctttttggatgaagggttcattcttgacaagaaaattggcattgggcaacctaagagaattgagaatgccaaaattttggttgcaaacagtgctatggacacagatttaagactatggggcatgcagttaatctataacttccctgaagaactctttgctgatgctggcatcctcgcgattgagcatgctgattttgagggcattgaacggctagctcttgtcactggtggtgagatcgcatcaacttttgataatccggagtctgttaagcttgggcactgcaaggcggcacggctgacgatattgcgtcgcggggctgcgaggagctcggcggaggaggccgccgagatccgcggtgaccggaaaccctag

SEQ ID NO: 14558 - DNA, 408 bp, Zea mays
  Peptide Sequence Number=SeqID_56337
atgaaggagcaactccgtgctatactcgaggcttcagtggtaataggggctcatggggctggtctaacacacttggtttcagcaactcctgatacaaaggttcttgagattatcagcagcatgtacgggcccccacattttgcactgatctcacacgggaagtctctagagtaccatgccataaatctccccggatcatttgcaaggatcacagatgtcatcgcggcctggcggacggcagcaagtcagcaggcagcaactgcctgggccctgggcggacggccggacgtggaccgcagaggcaccgagggagaggcggggcggggcagggcggcgcgctcagaatgccggatagaagaggctgggactgggagcctgggtcctgggacgctgggtcacagactctaa

SEQ ID NO: 14559 - DNA, 894 bp, Zea mays
  Peptide Sequence Number=SeqID_56338
atggatacagacgtcaatccaaattctgcttcaatttgtaaaggctcttcaaattctacttcgttttgtgaaggtggcagtcgtgaaggtggccatgaacaaaaaaatccaaacacttttgtgagagaaagcagttttcctaaaatgcagaaaagaggactatctgcttgtggaaattggagatgctcagttgactacagcttatttttgacatcaatgcaccgtgctggtgatatgagtaacacattgatgagtgttatcgtcgaatacttcaacagtatttctggggccctctttgacactgtttctagaccctctaccatttctaaatatgtcatctgtcctttcttgttgaagaaagttaaaaagggttgcaactttaaagttaaagatagtttactgaagactcttgaggaaacccagaaaagagatatgattatgctcctgattctggatggcagtcattggcaacttcttgctaatttcatcgaattactgaagatacataaatgcataaaatttgatgttaattctttcgaaaagatcaaagctagcgaaattgttgcatgcagaatgaaactcacacatatgctgatcaaatctaaacaaaatagtgctgatccatgttatgtggttaaaaaactagatgcgaatataaagaaatatggcattaattcccgaaaggtgatcacaagtaagaatttgacgatgctgatgggactaatagatcaagagattgaagagattaatgcagaaaagagaaagcgaagtggacatccagcaggaggacaaccagaactgaaggacgatgacggtcaactaagggcaaactcagtcaaggctcgcgacgctgaattgcgttgtgaaagggctgtaaagctacgacgactatag

SEQ ID NO: 14560 - DNA, 1842 bp, Zea mays
  Peptide Sequence Number=SeqID_56339
atgtacccgatcgtcaacgtcaccgggctcccgtccctcgtgaagccatctccggtctggctgaacgtgcagcaccccaccttctacaagcagcgcggtctggacatgagcagctacatcctctcgacccatcaagacctggtacccaccgtggcatacatctcgtcgccggagctgggcttcctccagaccatatccgccgtcgccggtcgcactcgcacgacgaccaagctcgttttcagcttcctcgacaaggccctcctggaccactccgtcaacaggacgtacggctcgctgctggcgaacctgacgctcgtcaggtccgtcgcgtccgggatcatggtgcccaagagctacatctggccggtgaccggcgacaactacctgctgccgtccacgtccgtcgtcacggacgcccacaaagcggggctggaggtttatgcctctgacttcgccaatgatagggtcatcccctacaactacagctacgatccggtggccgagtacctgagctttgtcggtgatggcggcttctctgtcgacggcgtgctgtccgactaccctatcactgcgtcagaggcaattggttgttttgccaaactgaattcaagcaagactgatcatgggaaacccttggtcatctcgcacaacggcgccagcggagactacccggactgcacagacctggcctaccacagcgcgatcgacgacggcgcagacgtcatcgactgccctgtccaggtcacgagcgacggagttcttgtgtgcatgagctccgtcaacctgcttgacaccacgaatgttcagacaactcctctcgcgacccctctttgtcttgtcccggagatccagtctacgccagggatcttcaccttcaacctcacctgggccagcatcagcagcggtgctttaaaacccaagatttcttccccggtgagtgagtactatctcgtaaggaacccaaggtacgcaagccaagggaagtttctgaagctgtccgacttccttgcgatgaacgctgcgtacatagcgacgtcactaggaatcgacgtcgtcgactccgtaaccgccgccttgaacgccgccggcttcgacaagcagacgagcaagcaagtcctcatccagtcgaccgacagcgccgtcctcgtcaagctgaagcagcagggaacaagatgcaggctcgtctacaccctcccgctgggcatcggggacgcctcgaactcgtcgctgcaggacatgaagaacttcgcggaggccgtggtcgtcgacagggggtccgtgttcgccgtgagctacgcgttcatcgagggccagaaccgtctcgtgccggacctgcaggcggcggggctggccgtgttcgcgcaggtgttccggaacgagttcgtcgcccgcccgatcgacttcttcggggacgccaccgtggagatcaactactacgtccaggcgcttggtctggcaggcctcatcgctgatttccccaggacggccaggagatacatggagaacacctgcacggttctggggaatggcatgcccggctacatgcggcctgtggagcctggcgcaatcatgaagctgctccggtccttccaagcccagccgccgtacgtggcgccgatgccggcgctgaatgcgtcgagcgtggaggagccgcctcttcctcctgccgcgccaagaaccgtgccgcccggtggtggcctctcaggaccagcggacgccgccggaactcctgctgctggtgctcgtcacacggctgccgtaggcactggtctgctgctcgtggtggtttccgcagctttgctggtctgggcagacacacgtgagactgtggctaatttatag

SEQ ID NO: 14561 - DNA, 1443 bp, Zea mays
  Peptide Sequence Number=SeqID_56340
atggaggcggctgtagacggcggggttggtgtaggcctcgggcccgtcatctgggttgtagcggcggagatcggcgagcgcttcgctttctacgcagtggcctcaactctgatcacctatctaacgggacccctgcaagagggaatcgcggccgcggctgccgccacaaacgtgtggaacggcacggcgctgatgctgcccctgctgggcggcgccattgctgacctgtggctgggaagatacctcaccattgtcttagcgtcactcctatacatcctgggtttaggcctgctggccgtgtcaaccgtggttggggggcagcactgcgacgctgccgcccacaccgccggtgagaagtgcccgccgccgcccgccgcccaggtggtcctgttctacgtgtcgctctacgtggtggccgtgggcgagggcgggcacaagccgtgcgcgcacgcgttcggcgccgaccagttcagcggcagcgacccgggcgagtccgtctccaggggcgccttcttcaactggtggtacttcggcgtgtgcgccggcaccgtcgccacgctcctggtcgtcagctacgtgcaggagaacctcggctggggcctcggcttcgccgtcccgtgcgccgtcatggcgtgcgccctcgccgtgttcctgctcgccgtcctcctggtcagcgaaaccaaggacgtcctccgtctgttgccgatatgggcgacaacgctggtgtacgccgtggtgtactcgcagtccatgacgttcttcacaaagcaggcggcgacgctggaccggcgcgtgggcgagctggccaaggtgccggcggcggcgctgctggccttcatcagcgtgaccatcatggcgctgatcccggtctacgaccgcgtggtggtcccgctggcgcgggcgggtacaccggcaggccgtcggggatcacgatgctgcagcgcatcggcgcgggggatgctcctgtccgtcgcgtccacggtgaccgcggcgctcgtcgaggcgcgccggctccgggtcgcgcgggccgccgccggcctgctggccgacacgcccggcaaggcggcggcgcagcagcagctgccgatgagcctgtggtggatggtgccgcagtacgtggtgttcggcgccgccgacgtgttcgccatggtcggcctgcaggagttcttctatgaccaggtgcccgacaggctgcgcagcgtcgggctggcgctgtacatcagtgtcttcggcgtcgggagcttcgtcagcagcgcgctcgtgtcgggcatccaccgggcgacggcggccaggggccagagctggttctcggataacatgaacggcggccacctcgactacttctactggctgctcgccgcgctcagcgccctccagttcttcgcctatgtcttcgttgcgtggaggtacaaatataaggacgctggagccgagcacacgtga

SEQ ID NO: 14562 - DNA, 261 bp, Zea mays
  Peptide Sequence Number=SeqID_56341
atgaatcatgctttgcacctgggaatcgactgggtgaatactgacaaggtcgaccgcttgagggtgggcgcacgcacctggaataaggcgagtgagtccggcgagatgcgccagcggagatgcctcggatgggcctccgtggagcagcacaaccaggacgcctgccggacctccacgaagaggaaccaccagggacgcaagaagcagaagattcggctttcatgcgcgaaaaaggaaggagagctggagggcagcaattga

SEQ ID NO: 14563 - DNA, 381 bp, Zea mays
  Peptide Sequence Number=SeqID_56342
atgacgaggagtggctcgcttcgacccgccgtgacttgcgatgccgtatgttcagataagttcagagctgatctcatgaacattgctatgactacccttagttcaaaaattctttcccaggataaagagtactttgctgaacttgcagttgacgctgtattaaggcttaagggcagcaccaacctggaagccattcaaattctgaagaaacctggaggatctcttaaggactcctttttggatgaagggttcattcttgacaagaaaattggcattgggcaacctaagagaattgagaatgccaaaattttggttgcaaacagtgctatggacacagatttaagactatggggcatgtgtctgggtggattcaatgtttaa

SEQ ID NO: 14564 - DNA, 594 bp, Zea mays
  Peptide Sequence Number=SeqID_56343
atggcgccgctgtcgaggaagcaccaagtcctaatccaggcgctgctcgcccgcggcccgctcttcgagcgcgacttccacgctatcttcgatggcgcctttggcaagaacaccgccaatgatcaacaactgttcaatgatacgctttggaacatcaacaaagaactcgcatttgtgagctttgagttgcaagcattcatcaatcaatatgatggaatggtgtactacggagtgttagaagcaattattcgggaagctggaaacgatgggagcataaccagtattgatgctctcaatgtccaacttgaaaaccaggtcacgactgtagatggttcacaggacaaccaatctcatcttcctataaagaacctctcgttgagcgagaaagagaaagctctagatgaactgatacgggattgttggttgtcatatacctccacaggcaagattggtctgggctccagatcatttcttgatctccgaagctggttctattataatgacatcccatcatgtgtggatcgcctattcaccctcccccctctaggtgctctcaattggtatcggagccgtactcttcatgtaagggactaa

SEQ ID NO: 14565 - DNA, 339 bp, Zea mays
  Peptide Sequence Number=SeqID_56344
atggacgcaagaagcaccagcacccctgagatacacatgacggacaacccatcgataaacgacccgtcgttaagggcaactcagaggccaagaatcctcagtgttgactccctgtcaacacgacggacggctacaacgcccatcttctcgaccggaaaaaacaacaccgctccactgcggggctgcccatcttcttctgacctctttcttctccgcatccactgccgcgacgggacctcgccgcggtgcgacctcaccgctccactgacgcaacctcgtcggctgtgccatgggagctctggccccctcgcatcagctgctggcgggcccgcgagctag

SEQ ID NO: 14566 - DNA, 3090 bp, Zea mays
  Peptide Sequence Number=SeqID_56345
atgggaggctcccgctggctgctccacttcctgctcgtctccgtgctgctgcacgtcgtccggtccctggagtcccaggcgtgccaccccgccgacctgagggcgctcctcgacttctccggcggctgggacagcaaggccgccgggctcgtcgggtggggtcccggcgccgccgcctgctgctcctggacgggcgtcgcctgcgatctcgggcgggtcgtcgcgctggatctctccaacaggagcctccacggcgtcatctcccccgcggtcgcctccctcgacggcctcgccgcgctcaacctctcccggaacgcgctccgcggcgccgcgccggaggcgctggcccgcctcccgaggctgcgggcgctcgacctcagcgccaacgcgctctccggcccgttccccgccgccggcttcccggcgatcgaggagctcaacatctccttcaacagcttcgacgggccgcaccccgcgttccccgccgcggcgaacctcacggcgcttgacgtctccgccaacaacttctccggcggcatcaactcgtccgcgctctgcctctcgccgctccaggtcctgcgcttctcggggaacgccctctccggcgagatacccagcgggttgagccagtgcagggcgctcactgacctctccctcgacggcaactgtttcaccgggaacgtccccggcgacctgtacacgctgcccaacctgaggaggctgagcttacaggaaaatcagctcactggcaacctcggcagtgaccttggcaacctctctcagatcgtgcagcttgacttgtcctataacaagttcacaggctccatccctgatgtctttggaaacatgaggtggctagagtccgtaaacctagccaccaacaggttggatggagagttgcctgcttccctgtcaagttgtccactgcttagggtaatcagcctgaggaacaactctctgtctggcgagattgctatcgacttcagccggctgccgaacctgaatactttcgatattggaaccaactatctgagtggcgctatacctcctggcatcgctgtgtgcaccgagctcaggacgctgaatcttgcaaggaacaagctcgtgggggagataccagagagcttcaaggagttgacatccctgtcgtacctctcgctgacagggaatagcttcaccaacctggcatcggcactgcaggtattgcaacacctgcccaacctgacaagcttggtgctgaccaggaatttccggggtggcgagacgataccagtggacggcatcagcgggttcaagagcatgcaggtgctcgtcctggcgaactgtttactcaccggcgtcatcccgccgtggctgcagagcttgggaagcctcaatgtgctggacatttcatggaacaagttgaatgggaatatcccgccatggctggggaagctggacaacctcttctacattgacctgtcaaacaactctttcagtggtgagctccctatcagcttcacacagatgaggagcttgacttcaactaatggctcgagcgagcggtcgccgacagaggacctcccattgttcatcaagaggaactcaactggcaaaggtctgcagtacaaccaagtcagcagcttcccaccgtcgctcatactctcgaacaatctgctcgtggggccggtcttgtcgagctttggttaccttgtgaagctccatgtcctggatctgagctggaacaacttctcagggccgatccctgacgaactgtcaaacatgtcgagcttggaagtgctgaatttagcccacaacgatctcgacgggacgataccttcgtctctaacgaggctgaattttctctccatgttcgacgtgtcgtacaacaatctgaccggagatatacctaccggcgggcagttctccacgtttgcacctgagaattttgacggcaaccctgccctgtgccttcggaactcttcgtgtgcagagaaggactcgtctgtgggagctgctggacacagtaataagaaaaggaaagctgccaccgtcgccctcggactgggaactgcggtcggggttctcctcctcgtgctctgtgcttatgtgatcgtgtcaaggatcgtccattcaaggatgcaggagcgcaatccgaaggccgtagcgaacgccgaggactcggagtgtagttccaactcctgcctggtgctgctattccaaaacaacaaagagttgagcatcgaggacatcctcaagtccaccaacaacttcgaccaggcctatatagtcgggtgcggcggtttcggcctcgtctaccggtcgacgctgccggacgggaggagagtggcgatcaaaagactgtcgggagactactcgcagatcgagcgggagttccaggccgaggtggagacgctgtcgcgggcacagcacgagaacctcgtcttgctgcaaggctactgcaaggtcggcagcgacaggctgctcatctactcgtacatggagaacggcagcctggactactggctccacgagagggccgacgacagcggggtgctgctggactggcggaagaggctacggatcgcgcagggctccgcgagggggctggcgtacctgcacatgtcctgcgacccccacatactgcaccgcgacatcaagtccagcaacatcctcctggacgacaacttcgaggctcacctggccgacttcggcttggccaggctcatctgcgcgtacgagacgcacgtcaccaccgacgtcgtcgggaccctgggctacatccctcccgagtacggccagtcgccagtggcgacctacaagggcgacgtatacagcttcggcatcgtcctgctcgagctgctcaccggccggaggcccgtcgacatgtgccggcccaaggggaccagggacgtcgtgtcgtgggtgcttcggatgaaggaggagggcagggaggctgaggtcttccatccgagcatacaccacgaggacaaccaaggccagctggtgaggatcctcgacattgcgtgcctttgtgtcaccgctgctcctaaatcgagaccgacgtcgcagcagctagtcgcgtggctggacgacatcgcggagggctga

SEQ ID NO: 14567 - DNA, 432 bp, Zea mays
  Peptide Sequence Number=SeqID_56346
atggaggaagatctcgtcgacctcgtcatccttgggccgcgctggattgcagagtcgccgaaagaggacgagggtggggaaagtcagaagaaagacagggacgtgggcggttgtgtggacttgggagagcgactgacagaggtggagtcaagacgacggcgacagccgttcgagggcacccggagagtctgtttgcttgtttggtgtattttctttttctgcggctttggcgtctattcagtgaccaaacttgcgccaccattaaagattgttggcagtacgcggatggtcgtggtcgacgaggaaggaccaacggtgggtgtgggtgggatgagcgacaacgtaggcttgatcgatgatagaggtctaatagtgagttgtgcgatgttagatgtcgaattgtgggtggggagcaccattgttggcagatag

SEQ ID NO: 14568 - DNA, 411 bp, Zea mays
  Peptide Sequence Number=SeqID_56347
atggctcctcatcagcacaacccggggccggggcaacgtcccccagtggatgctagcctgatcgggtccccacggtcgatgggttcgccttggtccgccaatggcagacgcgacgagtacgtgaggatccctgaggaggtggaggtggcgtccaagggggagggagatgctgcggcggccatcaaggcggccgtggcagcggagtgcccgagggtgctgcggtgccgcgcgatccggtggtgggccaaggtcgccgtgcttgggatcttccttgcaggggccggagctgctgccgtggtcttcctcggcccgctcgttattaagaaggaatgcaggataaatggtgggcgtgcggagtcgcacgcacgatctacactacaccacgcggcgaggacggatggaagaggataa

SEQ ID NO: 14569 - DNA, 150 bp, Zea mays
  Peptide Sequence Number=SeqID_56348
atggcaaagaagaggaccaatgtgatccccattattgaggatgtcaggcatccggcaaggtaccagatgttggttggcatggttgatgttatcttctctgatgttgcacagccaaaccagattcgagtttctgatgccagttgtgcttaa

SEQ ID NO: 14570 - DNA, 342 bp, Zea mays
  Peptide Sequence Number=SeqID_56349
atggcgtatttgtcccgcacagccgccgccgtcgccgtcgccgtgaggtcggcggtccgctccgcacctctcactggccgcgtcctcggagcgccactgccttcccttgcctcgccttccgctgcccggacggcggccgcggcgtcggcggggctggagactctaatgccgctgcacagcgcggtggcggccgcgcggcttaggtcctgcatcgtcgtcgactcctcgtgctggagctcgctctcgcaaggtcaggttcatataggagctaccgctttaggaattaggactagttacacttgtgagaagaacttaaatgctagcagttcatctcaaaactag

SEQ ID NO: 14571 - DNA, 387 bp, Zea mays
  Peptide Sequence Number=SeqID_56350
atgaggccgccggcgacgaaggatgcggtattggccaagccgtcttcgactacggaagcccctgcccccgccaccgagccggtggcgaccaggctcgactggtacatggagctgaggatgcgtaaggctgcacttgtgctctctagggatggcaatagccatggcttggtggtggctggtctcccgcgcgccaagcatgaatcttgggaccgcgaaagtggcagccatcaggagggaggtgaggtgacaggagaggaggaggttgctgagctcaccttcttcaggttctatcaggagaagctactacacgctggtggctccggtcatagccaacgtgccggagagcgtgtgggcatctccttcacatctcctcgccgaggttgctga

SEQ ID NO: 14572 - DNA, 678 bp, Zea mays
  Peptide Sequence Number=SeqID_56351
atggcgccgctcgctgccagtggcagtggcagtgccactggcactggcactggcaagcaacagagttggcctacacggtcgccagtgaccagtcaatccatccatccggacggaggactggagggtggtggacagtggactagtggtgagaagaagtgcctcaactcggagctgtggcacgcctgcgccggcccgctcgtctgcctccccaccgtcggtacgcgcgtcgtctacttcccgcagggccacagcgagcaggtggcagcgtcgacgaacaaggaggtggacgggcacatccccaactaccccaacctgccgccgcagctgatctgccagctccatgatgtcacaatgcatgcggatgtggagacagacgaagtgtacgcgcagatgacgctgcagccgctcaatccacaagagcagaacgacgcgtacctgcctgccgagatgggaatcatgagcaagcagccgacgaattacttctgcaagacgctgactgcgagcgacaccagcacgcacggcgggttctctgtgccccgtcgtgcggccgagcgcgtcttccccccgctggatttcacacagcagcctccagcacaggagcttattgcacgggatattcatgatgttgagtggaagttcaggcatatcttccgaggcaagttcgacaaaaatccataa

SEQ ID NO: 14573 - DNA, 336 bp, Zea mays
  Peptide Sequence Number=SeqID_56352
atggtggacgggggcgcgactatggtgggcggcgcgggagggcgggtgtgcgggcgggcgtcgtcgacggcggcgcggcgcggcgcgtggagggacgactttgttgccccggtggacaatcggagctcgacctctcttggtgacgaaaaactagaaggggttgaaggccccttggtccacaccccctcggctcagggaccaggacgatggctagatgccaagacgaatgtatggcaaggttggagggccatcgctccccatcggtggtggtcacatggaaatgggaaggcgtcgaagacctcaaggcaaagtcctctcaaggacctaaagtcctaa

SEQ ID NO: 14574 - DNA, 330 bp, Zea mays
  Peptide Sequence Number=SeqID_56353
atgaagctgttcgtcaacacgcagcaggcccctacctggcgcgccaactatcggcttttcgagaccgggggatccctaagccgacgagtgaaatgtcgccgcatgccccagcctagatgggtcggcgcgaggctgagcgcgaaggggggaagtgaggcggccggagacaggcgtgagagaggtggaaatcctgcggccttcgtgttcgtcccgcgcccaggtcaggttgggcgatgtggaagctcctccgaagccgaggtcgagtctgtcttccgtggccgaggtcgagtccgagcccctggttcgggcgaggcggagaccgtcggctga

SEQ ID NO: 14575 - DNA, 216 bp, Zea mays
  Peptide Sequence Number=SeqID_56354
atggggatgcgttgtctacgagacggaaaatggaataaggattacgatgtggtaccgtgtgtcaagcgtttgaacgtaataagcacatgccgagaaatatggctctctggaggatatggttgctggagtgacttggccgtctaccttgccaccgggttggatagtcgagtaggaccctacctcggccggagaggagcaggaggagtgatgggctag

SEQ ID NO: 14576 - DNA, 252 bp, Zea mays
  Peptide Sequence Number=SeqID_56355
atggccggttcaagggataactctgatgtctccccaagcaatagcatagaaccgacttgggaaaccttgccggctgacgaacagctcaagttcgaggagcacaaggagcagctgatccaagaggcaaaggcgaagttcctggccaacttcaaggtggatatggatccctacccagtgaatgtgatagatttcgagggcaaaaggatcctaattcagacggcatggacgataagggcaaaggcaaggaagtaa

SEQ ID NO: 14577 - DNA, 759 bp, Zea mays
  Peptide Sequence Number=SeqID_56356
atggcgactcctgttgacgtggtcggtccgagccctaggttgggcgaggtggaggctcctccgaggtcgaggtcgagtctgtcttccgaggccgaggtcgagtccgagcccctgggtcgggcgaggcggagttcgtcgtccttcggggctgagcccgagtccgagccctggggtcgggcgaagcggagttcgtcttcttccggggctgagcccaagtccgagccctggggtcgggcggagcggagttcgtcgtcttccggggctgagcccaagtccgagccctggggtcgggtggagcggagttcgccgtcttccggggctgagcccgagtccgagccctggggtcgggcggagcggagttcgccgtcttctggggctgagcctaagtccgagcattggggtcaggcggagcggatttcgccgtcttccggggctgagcccgagtccgagccctggggtcgggcggagcggagttcgtcgtcttccgggaccgagcccgagtccgagccctggggtcgggcggagcggagttcgccgtcttacggggctgaacccgagtccgagccctggggttgggcgaagcggagtttcttatggcgcatgaggccggacttggctgctgtaagcctcactctgccgagtggcacagcagtcggagcggcgcaggcggcgttgtcctcttgtcagaccggtcagtggagcggtgaagtgactacggtcacttcggctctgtcgactggggggcatgcgtcaggataa

SEQ ID NO: 14578 - DNA, 762 bp, Zea mays
  Peptide Sequence Number=SeqID_56357
atggcgctcgcgtccacctccgccaccgcgcccgctgccgtgctcaagaccccgttccttggcgccaggcgcgcgctcgccaatgccgccgcgcccaagcccgcgccgcgccgcgcgctcctcgccgtcgccgcggccgccgccaagaagtcgtggatccccgccttcaagagcgacgccgagttcatcaacccgccctggctcgacggatcgctgaaatggacgacatctctccgatccgctggagaggacaagagaccaggctttcctcaagagtaccgggaggcggagctgatccatgggcggtgggcgatggccgccgtgatgggcatcttcgtggggcaggcctggagcggcatcccgtggttcgaggccggcgccgaccccagcgccatcgcgcccttctccttcggctcgcttctgggcacgcagctgctgctcatggggtgggtggagtcgaagcggtgggtggacttcttcaacccggactcgcagtccgtcgagtgggccacgccctggtcccgcactgccgagaacttcgccaacttcaccggcgaccagggctacccgggcggcaagttcttcgacccgctcggcctcgccggcaccgtcaaggacggcgtctacgtccccgacgtcgagaagctcgagcggcttaagctggccgagatcaagcacgcccgcatcgccatgcttgccatgctcgttttctacttcgaggccggacagggcaagacgccgctcggcgcgcttggcctatga

SEQ ID NO: 14579 - DNA, 420 bp, Zea mays
  Peptide Sequence Number=SeqID_56358
atggccgccgtgctgggcatcttcgtggggcaggcctggagcggcatcccgtggttcgaggccggcgccgacccgggcgccatcgcgcccttctccttcggctcgctgctgggcacgcagctgctgctcatggggtgggtggagtcgaagcgtccgtcgagtggggccacgccctggtcccgcactgccgagaacttcgccaacttcaccggcgaccagggctacccgggcggcaagttcttcgacccgctcggcctcgccggcaccgtcaaggacggcgtctacgtccccgacgtcgagaagctcgagcggcttaagctggccgagatcaagcacgcccgcatcgccatgcttgccatgctcgttttctacttcgaggccggacagggcaagacgccgctcggcgcgcttggcctatga

SEQ ID NO: 14580 - DNA, 849 bp, Zea mays
  Peptide Sequence Number=SeqID_56359
atggcgatggcgatgccgatggcagtggcgcgggtgaccagcctcgcctgcgccccccgacaggcgcagcatcgccgccgccatagccttgccccgccgtgcgcctcgggtgcggtggaggtgcgggtctgcacgaaccgcacgtgcgcgcggcagggtgggcgcgaggtcctggctgcgctcgcgggactcgcgccgccggcggtcgacgtggcctcctgcgggtgcctcgggcgctgcggcgccgggcccaacgttgcggcgtccgtccctgggagcgccgcggtgttcggccacgttattgggttcaatgcttgtggtggtctgcatttggtgtacatgagcaggtctaaggcgagattggaaattggggatatccctggtgcacttggggatgctgaggaagcaataagaatagctcccagatttcctcaggctcacttattgcgaggcgacgcactttttgcaatgggtgaatattctgtcgcggaagatgcctatgcagatgccttggatcttgatccatctattcgccggtccaagtctttcagggtgaaggtaacggaaatgcaacatggttattgtcttgcacttagccggtgctatatccatttttttgtgtatgaaggttgccctagttcaaagctacacatctcagacttcaggtgcaccctcccccagctccccctcactgtaaagcaatgtttggttggtgggatgatccctccttttggtgctgtttggtctgtctacgtcaaacggggccttgattccaggcttacactctttcttaaagacttgttcgtcctcattatccatgtgcttgtgtgcagttcaagcatcgcctga

SEQ ID NO: 14581 - DNA, 1032 bp, Zea mays
  Peptide Sequence Number=SeqID_56360
atgaggcggggcgctttttttctgtggatggtatattccctgagaagagctagtcagctagataagcgaccgttgccgttggcgcctactccactccgctccatcctcactccctcccgatgccttccacttccctcgccgtccccaccggcgccgtcggcgtcgccggctctcgccgctatccattcatcagcaaccgatcagcctcaagcgccccgcgcctccgccgcgcgccccggctcgtcatggtctccgcctcggcgtctctcgaggccctcatctttgattgcgacggcgtcatactggagtcagagcacctccaccgcccaggcctacaacgacgcgttcgcgaacttcggggtgcgctgcccgccgggctccgccgacctgctgtactgggacgaggccttctacgacaacctacagaaccgcatcggcggagggaagcccaagatgcggtggtactttggggaaaatgggtggcctccttcaaagatctttgagacaccaccttcgactgactctgataaggagaagctggttgatataattcaggattggaaaacagagagatacaaagaaataataaactctggaactgtgaagcctagacctggtgtcttgcagttgatggatgaagtaaaggatgcgggtatcaagcttgctgtttgctctgcagcaactaaaagttcagtcataatgtgccttgaaaaccttattggacttgagcgatttaatggcctggattgcttccttgctggtgatgatgttaaactaaagaagcctgatccaacaatatatataacagcatcagagaaattaggtgtggaaagcaagaactgccttgtggttgaggatagtgtcattggattacaggctgcaaaaggagcaggaatgtcatgtataataacatatacaccttcaactgctagccaagatttcaaggatgcaattgctacctatcctgaccttaataatgtcaggcttgaggacctcaagctattactccagaaaactcttgttactggatag

SEQ ID NO: 14582 - DNA, 1638 bp, Zea mays
  Peptide Sequence Number=SeqID_56361
atgtgcgccttctcggggaggctgaggacactggtgaagcaggagaagaagaagaagaagggcggcggcaggaaggaagccgtgtccatcaatctcgccggcggcttcccgggcggcgccgacggcttcgagctcgtggccaggttctgctacaacgacggccgcgtcctgctctgcacctccaacctcccgctcctgcactgcgccgccgtgtccctggagatgaccgaggaggccttcgtcaacgggctctactactggacctggggcgacgtgctggccgcggtccggagctgcgagcccttcgccgcggcggccgacgcctcgggactcctggacaggctcatctccgcgctcttctccaagatcaccggcgccaccccgggcccgggcccggggacgccgaaccgctcctcgtcgtcgtgctcgtcgtcgcccgacaccgcgggcttgcgccggtcgtcgtcgtccgccaacaagacgccggactcgatgcggccctgcgccggcagggagtggtggttcgacgacatgacgtcgctgtccccgccgaccgtcgagaaggtgatgcgcgtgctcggctgctacggcgtcgagaacaagaacctgatcctcacgcggttcctgctgcactacctccgcgccgccacgcgcaggccgccggcgcttgagcgggagggcgccgcgctcgccggcctcgcggaaacggccgtccacggcgtggcgctcgtcgggggcacggcgttctcgtgccggggcctcttctgggtgctccggatcgtgtcggcggtggggctgagcagggagtgccgccacaagctggagcggctcatggggctgatgctggaccaggccacgctcgacgacctcctcgtctccggcgacgacggcggcggcgtgtacgacgtcaacctggtcatgaggctggtcagggtgttcgtggcctccgaagaggaggcagacgcgccgtcggagaggatgcggaaggtggggcgcctggtcgacaagtacctcggcgaaatctcgccggaccaggggctgaaggtgtccaagttcctcgccgtcgccgagagcctgccggactcggccagggactgctacgacggcgtgtaccgggcgctggacatctacctcgagtcgcacccagcactgtccctagaggagcgcacgacgctgtgccggtgcctcaactacgagaagctgacgctggaggcgtgcaaggacctggccaagaaccggcggatcccgccgggcgtggcggtgcaggcgctggcgtcgcagcagtgcaagctccacatcagcgagccgggccccggcgggagcgcgacggcggcagcggggaaggagcgccggcccgacccgtcctcctgctcccagtcccagacgccgaggaggagggtcgcccgccgcgccacccgcagcgtggacctcggcagaaggagcggcggcgacgacgacgagaaggagctgctgcggctgaacctgcagagaatgcagagccgggtggtggagctggagcgggcgtgcaaggagatgaagggccagatgtccagaatggccaagggcaagtccttgtccttgtccttcggctccggcgccgcctcctgcccaccagaccggcggcaggggcttgcctag

SEQ ID NO: 14583 - DNA, 3120 bp, Zea mays
  Peptide Sequence Number=SeqID_56362
atgtcggcggcgctcgcggtgacggacgaggtggccctgccgatccgggcggtgggggatctagcggccgccgccgaggtctcgcgggaggaggtcgccgtcatcacccagtgcgcggcgctcgtcattaaaaacgtggaaagcttgagggagcaattggttgctgaaatcaggcgggtgctgaaagctggtggaagagtattggtgcagagccctgcaccctcatccagtcagaagccgaacactgatattgagcgcaagttactgatgggtggatttgctgaagtgcaatcttctgctgcaagctcgcaggatagcgtgcaatctgttacagttaaggcaaagaaggctagctggagcatgggctcttcttttccccttaagaaaacaacaaaagcccttcccaagattcaaattgacgacgactctgatctgattgatgaagacagtctcttgactgaggaggacctgaagaaaccacaacttccagttggtagagcaacaaaacccgtcaacttagttcaactcccaaagaaagcatgcaagaactgtacttgtggcagggctgaggccgaggagaaggttgggaagctggagctcactgcggagcagatcaataaccctcagtcagcttgtggcagttgtgggttgggtgatgccttccgctgtggaacctgtccctacagaggtcttccaccattcaagcctggcgagaagcctggatgcctcttcttaattgagacgaaggacgtggacacggacaacctatacattttcccgcctcccgcgctcccctgctcgcttcttctcctttccctgctctgtttccgagggacggcggccgccaagaacaattgtccagccacgagccaagaacaggcgccttactctagcgccatgtcgtcgtcgctagtgtccaccccattcgccgccgcggcgcagaagcagctcctggcggcgcccgtgccgctgcactcgttcctcctgagcagccgtcgccagcagccgcggcgcgccggcgccatccggtgcgcggtcgccggcggcaacggcttgttcacgcagaccaagcccgaggtgcggcgcgtggtgccggccgacccgcggggcctgcctcgggtcaaggtcgtctacgtcgtgctggaggcgcacagctcaacgctgacccgcgccgcgccgcgtcgttcgaggtcgtgggctaccttccgcgccgacctcgccgacgtcaacgtcttcatcggctccctcatcttcgtcgaggagctggcgctcaaggtcaaggccgcggccgagaaggagcgcgaccgcatggacgccgtccttgtcttcccctccatgcccgaggtcatgcgcctcaacaagctcggctccttcagcatgtcgcagctggggcagtccaagagccccttcttccagctcttcaagcgcagcaagtccaactccagcaacttcgccgacagcatgctcaagctcgtgcgcacgctgcccaaggtgctcaagtacctgccctccgacaaggcgcaggacgcctggctgtacatcctcagcctccagttctggctcggcggctcggcggacaacctccagaacttcctcaagatgatcgccggatcctacttgccggtgcttaggggcgccggcatcaagtacgacgaccccgtgctctacctcgactccggcatctggcacccgctggcgcccaccatgtacgaggacgtcaaggagtacctcaactggctcaaggaccccaacgcacccgtcatcggcctcgtcctacagaggagccacattgtcaccggcgacgacggccactacgtcgccgtcatcatggagctcgaggccaggggtcacattgtctggggtgccaaggtcattcccatcttcgccggcggcctcgacttctccggtcccacgcagcgctacctggtcgacccgattaccggcaagccgttcgtgaacgccgtggtgtctctcaccgggttcgcgctcgtcggcgggccggcgaggcaggaccaccccaaggccattgccgcgttgcagaagctcgacgtgccgtacattgtcgcgctcccgctcgtgttccagaccacagaggagtggctcaacagcaccttggggcttcaccccattcaggtggcgctgcaggtcgcgctgccggagctcgacgggaaatcacatgcattgcataggagagtggagcagctctgcactagagctatcagatgggcagaactgaagaggaaaactaaggaggacaagaaactggcgatcaccgtcttcagtttcccacctgacaagggcaacgtcgggactgcagcatatctgaatgtgttcagctccatctactctgtgctgtcagacctcaagaaggacggctacaacgtagagggtcttccggacacacctgaagccctcatcgaggaggtgatccatgacaaggaagctcagttcaacagccccaacctgaatgttgcttaccgcatgaatgtgagggagtatcaggcgctcacctcctatgcctccttgctggaggagaactgggggaagccacctgggcacctcaactctgatggcgagaacctccttgtctatgggaagcagtatggcaatgtcttcatcggagtgcagcccactttcgggtacgaaggcgatccgatgcggcttctgctctcaaagtctgccagccctcaccatggctttgcagcatactacacctttgtcgagaagatcttccaggccgatgctgtcctgaactttggaacacacgggtccctcgagttcatgcctggcaaacaggttgggatgagtgatgcctgctaccctgacagtctcatcggcaacatccccaacatctactactacgccgcaaacaacccgtcagaggccacagtcgccaagcgccggagctatgcgaacaccatcagctacctgaccccaccggctgagaacgccggcctctacaaggggctcaagcagctggcagagctcatctcttcttaccagtctctcaaggacactgggcgtggtcctcagattgtgagctcaatcatcagcaccgcaaagcaatgcaaccttgacaaggatgtcccactgcccgaggaagggaggagctcccaccaa

SEQ ID NO: 14584 - DNA, 504 bp, Zea mays
  Peptide Sequence Number=SeqID_56363
atggagatagagtcactgctccctccgtgcggtgtgcacgtgatcagcgagccgccaaacgctattgagacggtggccacacaggtgaacatagccgccctcgaccgccccgaggatggcataatctcgctgcccggcatacttgccgccacagtgggcagggacattgaagatgtgtacaggggaagcgacaagggcatactggctgacgtcgagctcctgaggcagataactgaagcttcgcgtggcgccatcactgcctttgttgagaagaccacaaacagcaaagggcagaaccatgggtgcagtaccaagttcatcagggcagacagggagaagctgagggttctgtttgggttcctgggggagtgcttgaagctcgtggtacaggacaatgagctgggcagcggcagaggctactgggagacatcggaggagaacctggacaggctcagggagctctactcggaggttgaagacaagattgaggggattgaccggtaa

SEQ ID NO: 14585 - DNA, 123 bp, Zea mays
  Peptide Sequence Number=SeqID_56364
atgtcgcgcgtgttcgacgactactatatcatggactgtggcatcatctcggtgccggaggcgtggggcgtgctctccaatgatgagaccatgaaatcgtggcatatattaaagtctgcatga

SEQ ID NO: 14586 - DNA, 978 bp, Zea mays
  Peptide Sequence Number=SeqID_56365
atgaccacgtcaaaaaaggctagcccctcggaggggttcaacagccgcctcagagcgctcgggctccgcgcccactactggtcagaggttcgaagcctggcccctcggaagggttcaacggccgcctcaagccactcgggctccgcacccactactgatcagaggctggccctcgaagggttcacagccgcctcagacgcagagcgagggatgaccctggggctcggactcgggttcagccctgggaagacgacgaactccgcatcgcccgaccccagggctcggactcgggctcagcccccggaagacgacgaactccgctttcgcccgaccctagggctcggactcgggctcagcccccggaagaagacgaactccgcctcgcccgaccccagggctcggactcgggctcggccccggaagacgacgaactccggcctcgcccgaccccagggctcggactcagccctggcctcagccgacggtctccgcctcgcccgacccaggggctcggactcgggctcagccccggaagacgacgaactccgcttcgcccgaccccagggctcggactcgggctcagccccggaagacgacgaactccgcatcgcccgaccccagggctcggactcgggctcagccccagaagacgacgaactccgcctcgcccgaccccagggctcggactcgggctcggccccggaagacgacgaactccgcctcgcccgacccccagggctcggactcagccctggcctcagccgacggtctccgcctcgcccgacccaggggctcggactcgacctcggcctcggaggacagactcgacctcgacctcggaggagcctccacctcgcccgacccaaggctcggaccgaccacgtcacaggaggcgccatcattaccctaccccaagctaactcaggctacggggaacaagaccggcgtcccatctggctcgccccgataaataagtaa

SEQ ID NO: 14587 - DNA, 1497 bp, Zea mays
  Peptide Sequence Number=SeqID_56366
atggacaacaccattgatcggactgggccgggcgaggagctggccgagctgctgtgggaccgtggcccggcgctgcggagggcgccgccgccgttccagcccttcacctgcagcgccgccggcagcagcaggtcgcaggagctgaagcggcatgcctcggacaccaccaaggcgtcagcgttcgtgaccgccgtctccgtcccgctgggcacgcacgacgccggctccgggctcgggctcgccggcctccccgtccacgacgacgacgacgccgtgccgtggttgcattgccccgtcgccgacgacggcgacggcgacacggcgccgctgccgccggagttctgcgccggcctcctgtccgagtactcggaggtggccgcgccggcgccggccttccacgccgcggccacgccgccggccgaggccgcggccaacaagctggccccgccgagcgccgccggcggaggggagggcgtcttgaacttcaccttcttctcgcggcccctccagcgaccgcaggcggcggcggcgcccgccgccgcggccgcgagcaaccccgtcgagtccacggtcgtccaggcggcagcgaaccggctgcggagcacgccgctgttctccgagcagaggatggcgtggctgcagccacccaaggcgccgcgcaccacagcggcagcggcggcgccacctcctcctccgctggcgcctctgctcccagatagccgccatggggagacggtcggcacggtagctcaacctcagccccggtcgcaaccagaagcaagacctccggatgcggcggcggtgacgacctcttcggtctgctccggcaacggtggtcggagccagctcaagaggagccgccacctggccgcggactgctcggacctggacgacgagcccggcgcgacgaggaggtcggcggcgcggagcgccaagcgctgccgcaccgccgaggtgcacaacctgtcggagaggaggagacgggaccggatcaacgagaagatgcgcgccctgcaggagctcattcccaactgcaacaaggtcgacaagtcgtcgatgctggaggaggcgatcgagtacctgaagacgctgcagctgcaagtgcagatgatgtcgatggggaccgggctgtgcatgccaccggcggcgatgctgctgccagcgatgcagcagcagctcctgcaccaccaccccatggcgcacttcccccatctcggcatgggcctgggcttcggcatgggcgcggcggcggggttcgacatgctcccgttcccgtgcgtcgcggccggcgcccacttcccgtgcccgccgggggccatgttcggcgtgccggggcaggcgatgccctcgctgccggcggcgttcgctcacatgtacggcgctggcagtggcgccgggccggctgggcagacggaagctgctgatgcggctgctcctgcacggccaggagaggcagagcagggtgatcagcaggtgcagcacgcgaagcagacgtga

SEQ ID NO: 14588 - DNA, 252 bp, Zea mays
  Peptide Sequence Number=SeqID_56367
atggaaaccttgccggctgaagaacagctcttgttcgaggagcgccaggagcagctgatcaatgaaacaaaagcgaaattcctggccgacttcaaggtggacagggataacaaagtagttcgactacgggcgacagacctggcgtcgctccaacccacaacagatacccccaatgtgtggagcacaggaacaggagcggtgaagggcgagtgctgggtcttgactgacaaatcagagcagccaggtgactaa

SEQ ID NO: 14589 - DNA, 156 bp, Zea mays
  Peptide Sequence Number=SeqID_56368
atgggcgagtcagacgatgacgcccgcaccttcaaggtcgttttcaccaccaccggagaggagcagttccgggagctcgtgagggagaagctgcgcggattcaggaggggtctggacgacaccctcgtggttcttactgttgtcgcgcgggcttga

SEQ ID NO: 14590 - DNA, 1677 bp, Zea mays
  Peptide Sequence Number=SeqID_56369
atgacctttcctgtatgtggaaaggaactagcaactaattgtggtggcaccaaaaagcagaggttgtggggccatctttcttcaaatatgcacttatatgtgcaaccacaagaacgaactcgggaggttaaggatgatgaggcccccaaagaagtatctggaagagaaaaatcatcagatgtgctcccgagaagcaaacatcaaactcattctgggcacacaattgaatcaagtgaagctactagtaggagacggagtaaccgggaatggaaagggattggtcggaagggtaatgaaaaatttccgcttcgaaatgtactaactgatattcttcatggggaggacaaaagatcgcaaaagtccaatgaagtacgaccccctccatcaaaacaacagaacgacaggaagcgtgaaagggatgatgagacacatcaaacaaagtccaaatatttgttcatcatgaaagtgcaatgtgagtttcgacagtttatcttcagtaagtactatgacttatacaatgagcttgttttctttgttaacagaaggactcctcatcacgctccatgcttggtgatgggtgcttcccgtcgtcttctacagtttgctgtccgagatgctgtaaaagctgtacagccaaccagtacctctgctgaaccagcatccaagcgcctgtgctctgtggtcgccactacttctacagagcacatgcgtgataggagatcagaaagatctcaggactacctgaacgatagaagatcagaaagatctcaagacaacttgagtgacagaagatcagaaagaactaggccaatgctacaggtacatggagctgctttagctcttagagctgcagcggaagctgctgcagattctgcaaaggttagatctactggaagtgttttcaagcgattgggtcaagggaatgttgtgaaacagccatctcgttctcgtgaagagaagagagattatgaagattttgagccagttacgatcgcagatgaacatgattctgatcaatatgttaataatgaggaatccgaagaggaatctggagagctaaccatggcagatagggtagctggaagtggaatgtatgttgattcgagctctgaagatgatatggaccgagatgagggtattacaagataccaaacttctctttcacatgacgatactttctcaccatttgcagagaagaaaactgtatcggcaccatgcagtgttgaactagagactaatgcaataagaccttcaagtgtgaatgacgaggaacaacctgttccttcaacaccaacagcaagtaaagctgtcgctatttctgttgatgtaaatatggtggagcctcccagttatgcaacaccaaaagatgttcatgttgtggagaagccttatgttgcacccatgaattcaaatgccgccagtattgctaccaatgccaaagaattaggtcatgctgaagttcaaaaggattctcagcggtctgcaccatctgttccggtttcatatagcacagcgcatccgatggaggatgcagattcaagaacgctttatgttaacaatgttcactttgctgccaccaaggactcattatctcgccatttcaacaagtttggtgcagtgctgaaagtagtcattgtcactaatgccgcaacgggccagccaacagggtcagtttaa

SEQ ID NO: 14591 - DNA, 509 bp, Zea mays
  Peptide Sequence Number=SeqID_56370
ccgccgtgctcctcgccttcgtgctgcagcccttcctcgacgccgtccactctgccgacgccgatgccaccatcacctccggctcacgctactacatctcgtcccccggctgcctcaccttcgtgttgcctttgagaatgaggcgctcacctccgcgcctccacgacgcctgcccatgcctactcctccccgtcctccttgacttcctctgcctccgagctcctatacaacggccaccacactcctgcgccgatgtcgagggggccctggccagacctagagggggctatgtcaccaagcgcaagcttctatacagcggccaccatgctcccacagaccacctacttcatgaccgaccccgacaagatcatcgacttccccatccctgggcccccctccttctccgctgcctcagaggctaccactgtcgcagcgcccaaatggatgcccacgcccgcgtagttcttaagatcaacacacctacttttgcattgggagttacagactaa

SEQ ID NO: 14592 - DNA, 738 bp, Zea mays
  Peptide Sequence Number=SeqID_56371
atgacacgcccgagcccgagaaggtctcggccctacccgaggcgccctcggctcagcccgaggctccctcggcccccgagggtgaggcactgcgcatcgaggaagagcggaatggggtcatgcctaatcgaaactggcagaccccgtacctgcaatatctccaccgaggagagctacccctcgatagagccgaagcttggcgactggcgcggcgcgccaagtcgttcgtcttgctgggtgacgaaggcacccgggggctacacgcacctgctggtcgccatcgacaaattatccaagtggatcgaggtcagacccctaaatagcatcaggtccgaacaggcggtggcattcttcaccaacatcatccatcgctttggggtcccgaactccatcatcactgacaacgacacccagttcaccgacagaaagttccgggacttctgcgaggatcaccacatccgggtggactgggccgccgtagctcaccccatgatgaatgggcaggtagagcgtgccaacgacatgattctgcaaggactcaagccacggatctacaacgacctcaacaagttcgacaggcgatggatgaaggaactcccctcggtggtctggagtctgagaacgacaccaagccgagccacgggcttcacgctgttttttctagtctatggggccgaagctatcttgcccacagacttagaatacggatccccgaggatgaaggcgtacgacgactga

SEQ ID NO: 14593 - DNA, 228 bp, Zea mays
  Peptide Sequence Number=SeqID_56372
atggccgagcaaccggaggttgttgcggagtttgttgccgccgagattcatggcagaaagcacggattcggcggagatcttctgtggagacgaagaacaggcgctggggtgacagaggggctgaccaagtgggacccgcggaatagcggctcaagttgtggacgcgcgcgagtcttacattatggctgtgtattagactctgtggatgtcttggacatcttattgtaa

SEQ ID NO: 14594 - DNA, 300 bp, Zea mays
  Peptide Sequence Number=SeqID_56373
atggaaaatctcaagtcttcaggaaataagcaagaagacaagacttcatcgaaagaggtcaagatatccggcaaaccaccatattttgatagtgaagactattctatgtggagtgataaaatgaggcaccatctaacctcactccacgaaagcatttgggatatttttgagtttggagtgcaggcaccacaggtgggcgatgaggactatgactctagtgaggccgcccaagtgaggcacttcaactccttagccaccaccatactcctcgcttccttttgtaaggaggagtataactag

SEQ ID NO: 14595 - DNA, 408 bp, Zea mays
  Peptide Sequence Number=SeqID_56374
atggggaagggaaacgattgtcttgaagctccattaatgaagaaacggacatgcggtcggctcgggcgtcgggttcgtcggttgtcagtgggggaagtcggggcgtcggggtcggggcaacgcacggctgcgcagggtctttgtcgggtgcgtcggggcgtggggtcctgcggggtcggtgctggtccttggcgcgttcatgtggctggcgggcgggtgcttggcgtcgggcgcgtcggtcctcctggcggcgaccgggtgagagcaggagaggagggatggggccaggtggatcccgctatgagagagagaaggagtggcgacgacggcttgggaaagctagggagcggcggctggattagggcagctcggggctgtggccactacatgggcgtaatgggccgttag

SEQ ID NO: 14596 - DNA, 297 bp, Zea mays
  Peptide Sequence Number=SeqID_56375
atggggccgccgtggcacgtggccgtgtgcctccgcgccataatcgctaaattcgaatcgaagtgtaacgagccggggagggggaaattcgtcgcttttgcttgggcgccgccgtcggccgcctgcaccagggccggggatcagcgtcgagtccatgctcgagtctgggagctgtggcgcagggccaccgtcggcggcaatggcctcctccgtggaatgcctggtgtcgccgcaccgtggatcgtgttgggagaaaatgcgccagccgtcggatgtaggactggtggccgagattag

SEQ ID NO: 14597 - DNA, 219 bp, Zea mays
  Peptide Sequence Number=SeqID_56376
atggcgtggaggcacatggccacaagccacggtggccccgcggtcttctacgcactgcgaagagctctggtccgacaccaagggcggcgaccagggcttatatgcatcgagggatggaccactaggcacccagatgatgcccacgactttcggggaggtggttatgccagcgcgcggccggcgaagaccgcggcgaggactcggattcttctgttgtga

SEQ ID NO: 14598 - DNA, 306 bp, Zea mays
  Peptide Sequence Number=SeqID_56377
atgggggacagaacgcgcaggagggaggaaacctgcgcgcgggctggccgtggagctgctcgggcagcgtggggctgcaggggagagagcggcttgcaggtggccagggtgggcaccggtggctcgctggcggcggcgctcgtggagcagcgaccacgtgacttctgggagagttcggccagggccagccgtggcaacatctatgcaaggaagcagcgaatggggatatggggagggcagttatgggaggctccatgtcatagccggcttgggcgaacgagggagttccgagagagaaggagatga

SEQ ID NO: 14599 - DNA, 390 bp, Zea mays
  Peptide Sequence Number=SeqID_56378
atgaacgtatgtgagctcacccttgctgtactcacatcctccctaggtcaagaacagaaggtgccgaactccgcctacaaactctacaaggtggatctgctgaccaactctctgacaaccaactccgccgaccaacatcgaataggatggtcacgactcgcccaaggccttcaccgggtgggagatgtagtcacgactcaaccaagaccaacctcgggcgggagacgtagtcacgatttgctcaagtccaacctcgggcgagagacgaactcacgcctcgcacgaggccaacctcaggcgggatacggaatgatgactcgcctgatgccaacctttaggaggagacgcagacacaactcgtctaaggccaacctcaggcagaagacataa

SEQ ID NO: 14600 - DNA, 354 bp, Zea mays
  Peptide Sequence Number=SeqID_56379
atgcagccgacatgcaaccgcgccaagtggacgcgcttctccgactcccgacacgccagcatggaggcccaggcccacacgagcagtgggcgacgcttcgccttcgccgtaataaccgcgccaaaaaagggaccgggaaagggggataccccgaaaaggatccttccccgtgaaggaaccaggctccgagcctccctactgatcagaggttcaaaggctggccccccgaagggttcaacagccgcctcagatcgcgtgggccctacacccactactggtcagaggttcgaaggccggccccccgaagggttccacggccgccttaggctacccgggctccgcgcccattactga

SEQ ID NO: 14601 - DNA, 1746 bp, Zea mays
  Peptide Sequence Number=SeqID_56380
atgccgcctcgcttccgtacttcttggagaaggtgttttgtgcagaccacgttcaagggccgggtgtttatgacccacgccacaaaggctatttacaagctgctgctctcggattatgtcaaagtcagcaaagtgtccgtggaggatatgttgtatgatgagagtgacattgctcgctccatggataaaatcgaggttattgatttccaccagacattggaagttaatgggatacgcttctggtgctacactgctggccatgtgcttggtgccgccatgttcatggttgatattgctggcgtgcgcattctttacactggtgattactcccgtgaagaagaccgccacctacgagctgctgagctcccacagttctccccagacatttgcattattgagtcgacttatggtgtacagcaacatcagccccggattatacgtgagaagcgctttactgaggtcatccacaatactgtttcacaggggggtcgtgttcttatcccggcatttgcacttggcagagcacaagaactgttacttatcctcgatgagtattggtcaaaacatccagagctccataagattccgatctattacgcttcccctcttgccaagaggtgcatggctgtataccagacatacataaactccatgaatgaaaggatacggaaccagtttgcacaatccaatcccttccatttcaagcatatcgagtccttgaatagcattgataactttcatgatgtgggtccttcagtggtgatggctagtccaggtggtctccagagtggtctctctaggcagctttttgataagtggtgcacagataagaagaatgcttgtgttattccaggttatgttgtggaggggacccttgcaaagaccattatcaacgagccaagagaagtgacactggctaatgggctcactgctcctcttcatatgtcggtccactacatctctttttcagctcatgccgatttcccgcagacaagcaactttttggatgaacttcggccaccaaatattattctcgtgcatggagaagcaaatgaaatgtccaggcttaaacaaaaacttattactcagtttgatggttggcagaacaagtaccagaaaggtggagagtcttccagtggcctacttgtcaagaagggattcacatatcagattatggctcctgaagatctccgtgtgttcacgcagttatctacagctaacatcattcagcgtatcgcggtcccttactctggatcttttgaagtcataaggtacagactgaaacaaatatacgagagcgtggagtcagcaacagaggaatctgatgttccgacgttaatcgtgcatgaaagagtgacggttcgcctggattcagaaagttatgttacactgcagtggtcgtccgatcccatcagcgacatggtgtctgattctgtggtggctatggtcttgaacatcggtcgggaaggccccaaagttgttccggtcgaagaagcggtgaagaccaaagaggagacggagaaggctgccctaaaggtggtgtatgctcttatgacatcgcttttcggtgacgttaaagtcgcagaggaagggaaatttgtcatatctgtagatgggaatgtggcgcacttggatgggaggagtggcgatgtcgaatgtgaaaatgctacgctgaaggaacggatcaagaccgccttccgtcgcattcagggcgccgtgagaccaatcccactttcagcctcttga

SEQ ID NO: 14602 - DNA, 342 bp, Zea mays
  Peptide Sequence Number=SeqID_56381
atggggttcaactacgcgcaccgctctgcggtagacgtcgtcatcgtcgatgtcctcctccgctacatcacccacctggactggccttgccgccttccatgccaaccttgccggccgcacactcgccaacgagctcgacgtcgtacatgtgttcgcaggtggtcggcactgacacagacggccagcgagcacggcggccaagaaccgttgcctggtcggcttaggtcccacggccacaaactgatgcctcgtttgcaatatattagcggcgggggcagaatgcgcgatagcgaccgagacgcaatcttttgcttttgttgtagcatgtttgaatgggtgcag

SEQ ID NO: 14603 - DNA, 591 bp, Zea mays
  Peptide Sequence Number=SeqID_56382
atggcaggccatccgttgcgtggtccactggtcagagggcccgaccgccaccgtacccaccccccggcgacgaagcagcggacgacgctggtgttcacgtacgggacgctgaagcgcggcttctccaaccaccgcctcctggaggagctcttcgcgagcggggacgcgtcgctggtgggccccgcggtgacgtcggcgcggctgccgctggtgtgcgggccgtaccgggtgccgttccttctgaacctccccggcgccggcgccggggcgcaccgcgtgcgcggggaggcgtacgcggtgacggcccgcgggcttgcgcggctggacgagctggagggcgtggagacggggcactacgagcggctggccgtggccgtggacctcgagggcgggcggcgcggtggatgcgatcgcctacttcgcgcaccggagctacgccaacgacatgtggcggcgcagcggggagaagggcgtccccgagtacacccacggcgtggcggccgggtatgtccggcgcaaggaccggccgcaggggcagacgttcctggagcagatccggatcttcaattcgtctcctcccaatccgcttaa

SEQ ID NO: 14604 - DNA, 1131 bp, Zea mays
  Peptide Sequence Number=SeqID_56383
atggtgatcttcttgtatcatgtggcgttgactgcacacagaggcattctagtgtccactggatttccatatgtgtcaagttgctttacttctctaaacgtgttcgactctggaaagttccgatgcttaaaatggtggatactagtgagcgtgctggagataattcccaggcatccatcagcagtttacacctggaagcatgcattctggggtgctgatcaccagtgggacggcaatcttttcgcaactgttggtgctcaagttgatatatgggatcctgacaggtcagagccaataaatagcttcgaatggggtaaagatacggttctttctgtgcgatttgatcctggagactctaatattttgattacgtcgggcaggggatttgagggagtggcagcgggctgctgtgccacagtactgcggcacaacagtacccacggtgatcggagtctgacactctatgacttgcgtatgtcatctccagctagaaagctgataatgaagacaaggtgcaattcagtatgctggaaccctagagagcctatgaacttcactgctgcaaatgaagacacaaactgttactcctttgatgctagaaaattagatgaagcaaaaattgttcacaaaggccatgtttcagcagtgatggatattgactactcaccaacagggcgtgaatttgtcactggttcatatgatagaacagtaaggatttttaattatcttggagaccacagcagagagatttaccacaccaagaggatgcaaagggtgttttgtgtgaagtacacctatgatgggacctatttagtctctggcagtgatgatacaaatcttcgtctgtggaagtccaaagcttcagaacaacttggagttcttcttccacgggagcgcaaaaagcaagagtaccaggatgctttgaaggagcggtacaagcatctcccagaagtcaagcggattgtaaggcatagacatctaccgaagccaatctacaaggcagccaacctacggcgtacgatgatcgaagctgaaagccgtaaagaggaaaggaggcgaaagcacagtgctcccgggagcatgcctgtgcagcccttcaggaagcggagaatcatcagagaagttgagtag

SEQ ID NO: 14605 - DNA, 489 bp, Zea mays
  Peptide Sequence Number=SeqID_56384
atgaccaccagtatgtgtgatttttccctcattgctggtatctataaaacaacctttgcaaaaacaatgataaaaaatctaacttatcaagaaagctgtgtttcagtaatttcaggaatgtttaatggttgcctcaaaaggattatttctgttagactaggaccattttcatttctttttttggacctaaagtatgatacaattgagtcaacgtacaacacaaagcatgctgtaccgaggagagaatcaccctggaaagtggatgtagaatcttcaggagttccagcaaaacttaggttgctggagcaggaattacttaacctggaaaagaaggtgaaacctaaacggatatgtattttgtgcagcaaaacaagtgacccttgtgattcaagaatttatcttcggagtttaaaacacgagcggcaaacagaattctttgctggaaacggtttcaacctttggcatcgtgcaactggaaaacgagcctaa

SEQ ID NO: 14606 - DNA, 465 bp, Zea mays
  Peptide Sequence Number=SeqID_56385
atgtcagaaaaggactgcggacggtccggccctaaggcccggacggtccgcagtgcaaagcaacaaagtggcctccgaagaagacagtcttcggaccctctggtggatcgcgaacagtccgccctcaaggcccggacgactcggacgacatcgagcgacgaggagggccgacgaggtggaggcccggcagggaggtcggctttcctgggcaacgactgggcctgggacgacggccttggcgaagaggatggcagcgactggacgactgtggcttgggcgacgtccgccaagaggatggcggcgactggatgcgtgctgcgtcaaggatgtgtgctgcgtcgaggatgcgcgctgcgtcggggtaacgactgggatgcgaagaggacgacggtggcctgggcgtctaggaccgatctggcctacggcggcctagccggcggcgtgaggcaaaatatctgcggctag

SEQ ID NO: 14607 - DNA, 213 bp, Zea mays
  Peptide Sequence Number=SeqID_56386
atggggttctcggccgggagcacagttgcgagcgtgtcgaggggctactccgtgcacgtgctcgtcaggggcagaggcagcgagcttatcctcgaggtgggcgagggtctacaccagcataccctccaggaagatgagcttggggacggggtggcgaggcccggtggcatcgtcggagtagaagaagaaggccagctcgtgctggccacctag

SEQ ID NO: 14608 - DNA, 273 bp, Zea mays
  Peptide Sequence Number=SeqID_56387
atgggcggccccttctctagcatcgtcggtgccctcggcccctgctaccctgtcccccgcggcgctgccccatccgcgatggaggcatttgagcacgggctcttgcctatccaaaagctcgtattcctggaggagcacaaatgtgagattgtgcagatgttgcaaaccagaaagcacatatgtgggatgactggacatagagttaatgatgcacttgatttgaagatagcagatattggtattgttgtggctgatgctactgatactgcttga

SEQ ID NO: 14609 - DNA, 1170 bp, Zea mays
  Peptide Sequence Number=SeqID_56388
atggccccgccgccatggcctctccttgcgacttccctcctcctcatcctattccaccactcgcctcgcgccgcggtggcgtttccgccgtctctgggcgacagcctcctgggcgccgcccgcgcgccgggtttcgcggcttggctgcgcggcttgcggcgccgcatccacgagcgccccgagctcgccttccaggagcaccgcaccagcgagctcgtccgcgacgagctcgacgcgatcggggtgccgtacgcgtggcccgtcgcgcagacgggcgtcgtggcgaccatcgccggcggcagcgatggccccgtcgtcgcgctccgagccgacatggacgcgctacccttgcaggaattggtagactgggaacacaagagcaaggagagtggaaagatgcatgcttgtggacatgatgctcacaccacgatgcttcttggggcagctaaattgcttcatgctcggaaggatgatctgaagggtaccgtgaagcttgtcttccagccaggcgaagaaggctacggcggcgcttaccatgttctcagagaaggtagatttcgggtgacggtcactggaaaaggaggacatgctgcagggccgcaggatgctgtggatcccattgttgcagcatcctctgccatcgtcagccttcagcttcttgttgcccgcgaaattgatcccctccaggctgcagtggtctcggttacgttcatgaaaggaggtgatgcttacaacgtcattccagagtcagcatccttcggcgggaccttcaggagcttgacaacagaaggcttttcgtatctcatgaagaggatcaaagaggagaagctccgcccgtacccagccaccgtgaacgacgaagggatgtaccgtcacgccagagaagtggcagaggccatgcttgggcaggacaaggtgagtgtaggcgcgcagatgatgggcgccgaggatttctccttctacgcggagaagtttgcaggggcgttcttcatgatcggagtccgcaacaagagcatggaggaggcgatgcgtcctctccactccccgtacttcgtgatagatgaggacgtgctgcctgtaggagctgccttccactctgcagtagcgatggagtacctgaacaaatactcaacgacccggcaaactgagctgctgcgcattgagctgtga

SEQ ID NO: 14610 - DNA, 252 bp, Zea mays
  Peptide Sequence Number=SeqID_56389
atggagagagtaggcgccgagaccgacgaggacggggggcggagggggagtcgccgaggacagggggcgacgaggggcgtcaggcgggggcgggcgtggagcgaggcgtcgaagacggggagaacgagaacacgcggcgcgacgagcagaggatgggggctggatcgaaacttctggggtcgcgatgaattcgggccggggaagcaggatcggggcacacgatacgaggcgtgggataagacgactgcgtga

SEQ ID NO: 14611 - DNA, 483 bp, Zea mays
  Peptide Sequence Number=SeqID_56390
atggccgcatgggttcttgggttgcaactgagcagtggtcagggtgatagaggcaggcgccagaggggggccggcaggcagccgcactacaagcaagggatggaaagcttttgtccaagtccgctgctcagactcaagccacaggcggcgacaggccatcgggcatcagccccagccgggcagaggaaaaagaaaaacgggtacccgagttccgggtacccgtatccgacccgagattttcgatacccgttccgggtacccatcccgttttcatccctatgcatgcagcggaaacaggagcacagcagcgacagggaggggtggggggagagtagtgggagagacgacgacggaggaggaggaggacaaggactggaggacgccagcccccccttagacactgccatctgccgcgcgatggcgaatggcaggtcaagccgctcagagacacagagtactgtactaaaatttggaagcacatga

SEQ ID NO: 14612 - DNA, 639 bp, Zea mays
  Peptide Sequence Number=SeqID_56391
atgtgtggctgctggtacgactgctgcggcaaggtcaaggattggctcatctttctcgccatcgtcattggccttgctattgctgccgccgtcgtcatagtcatcctcatctttggaggccccctccggcatgtgaagatcagcgtcgaggacgcgtcgctcacccggttcgcgctggtgaccacgcccacgacggcgctcgcgtacaacctcacgctggcgctggccatccgcaaccccaactgggccatcggcatcaagcacgacaagccgctggaggccgcgtacagcttcgacggccagccgttcgagcgcgtgcaggtcgcggacaagggcgagaagcagggcgccaggaagacggtggtgtaccacctggcctcgagctcggacgccaggggcgtggcgttgggcaacgccggcgaggccgagttcaggaaggagaacgcgacgggactgttcgaggtggaggtggcggtcaccggcaagttcaagtacacgctgcgcaagaccaagtgcaagatcgaggccacctgccccctcaaactgcagctcgccacgccgggggccgcgacgtcgtcgtccgtcgtgttccagaaggttgactgcgaggtcgccaaatccgacgacaagtactgctag

SEQ ID NO: 14613 - DNA, 1071 bp, Zea mays
  Peptide Sequence Number=SeqID_56392
atggatccattcttcttcggatactcttcctcctcctctgtcactactgtccgaaattcaattctgctttgctggaccagtaattttagaaacaaattacctccagaggactccgaagtgaaagagctggtggactgggagcacaagagccaggagagtgggaaaatgcacgcttgcggacacgacgtgcacacgacaatgcttctgggggctgccagaatactccaggatcgcaagagcgacctaatgggcaccgtgaagcttgtattccagccggcagaggagggccagggcggcgcgtactacgtgctgcaagaaggcgtccttgacgacgcgtcagccatattcggcttgcacgttgacccggccctccccgtcggcgtcgtttcgtccaggccagggcccttcgcggcgacgtccggtcggttcctggcgacggtcaccggtaaaggcgggcacgccgcgatgccccacgaatccatcgaccctgttgtagctgcagccactactgtcgtcagcctccagaagatcatctcccgagaaatcgatcccctgcagggcgcggttgtgtccgtcacttttctgaagggaggagaagcgtacaatgtcatcccagagaatgtggcctttggcggcaccatgaggagcatgacgaatgaaggtctatcgtatctcaagaagaggatcaaagagatcgtcgaaggacaggcagcggtgcaccactgcagtgccagcgtggacttcatggaggacacgatgaagccgtacccggccgtggtcaacgacgaagggatgtacgctcacgccaaggaggtggccgagggcctccttggggagaagaacgtcagggtgggtccccaggtgatgggcgcggaggacttcgggttctacgcgcagaggatggcgggcgccttcttcaccatcggggtcggcaacgcgagcaccatggcgaccatccattccacccactcgcctcacttcgtcgtcgacgaggacgtgcttcccgtcggagctgcgttccatgctgctgtggcgattgaatatgtcaggaagaaccgtgcgtcgacctaa

SEQ ID NO: 14614 - DNA, 372 bp, Zea mays
  Peptide Sequence Number=SeqID_56393
atgaatacgaggccggtggtgctcgtcttcctcctgctcgtgctcgtcatcacgtcgcagttcgagtggaagcagcagatcggggaggccgcggacgccgacccggccgctgcccgccgccggcagcagctgcacgccagggaggatgccgtcaaggaaaaggttcttgccaaatctgccccatttcctctttatccgtcggtctgcgctctagttgttaaggatattgagaacctgtctatagacagttatgttcaattacaatacgttgatttctattttcattttaggtccaaagataaccttttgagcaaatgggaatattttttggagaatcaagtccctttttcgagatttaagggtgcactgtga

SEQ ID NO: 14615 - DNA, 375 bp, Zea mays
  Peptide Sequence Number=SeqID_56394
atgggtcgtcccaaaggccgaacgtattgcatcgatcggacgaacctgtacagccaacaacaaggactatcccagtcccatcccatcccagcgtcgtcgggtgcaacgtactacatatactccagcaagtatgcagccagcgaacgacagctaggaatgtcttcgattgttggctgggcaccaggaatattagcacgtaacctcatttttggtccatcgccaggggcgaagccagaaaatggaaccatcaggtacgtgctcatctccaagcaaggagctgtccacgaggaagaccaggagcaaactcccgagactgccatcgaagatctccctgtagccccagctattgaaggcaagccccaattttatgcataa

SEQ ID NO: 14616 - DNA, 219 bp, Zea mays
  Peptide Sequence Number=SeqID_56395
atggccaccctcaccaagggagtgatattgatctttcagcggggacccgtccagccagctatcctcccagaaccttacttgagatccgtcattgaccagaaagtgaattgggatgccaaggtaattgattggaaagttgccggctttgcacccgaagagttccgtgtacaactctacctgctcatgggcatcccaaaacagaacaactcactcttgtga

SEQ ID NO: 14617 - DNA, 879 bp, Zea mays
  Peptide Sequence Number=SeqID_56396
atgaagtttagagcgtggtgccacatccaaagcaaaaacattgtgggaatcaagtggatgttccacaagaagcaagatgagtacggggtggtgacaagaaacaagtccagacttatggcaaaatgttatgccaagctgcagcataagctaggcagaggaagccgggacaaggtgcaacagttcatggcaattaccggcgcaagtgagaaagctgcccttcaggctcttaaagctagtgattggcacttggaaggagcttttgatgttttctacagccagccacaaattgctgttgctaatactcgacatctggaagagctctacaacagatataaagaaccagatgctgatatgataatggtggaaggcatatcacagatctgcaatgatttacaggtggatcctcaggatattgttatgcttgtcatatcgtggcatatgaaagcttccactatgtgtgaattcactcgccaggagttcattggtggactgcagtcaataggagtggattcaatagagaagcttcaggcgaagttaccttcattgcgagctgagcttaaagatgatcagaagttccatgaaatatacaactttgcatttgcctgggcaagggagaagggccagaaatctctcgcattggagactgctattggcatgtggcagttgctatttgctgaaaggagctggcctctcattgactactggtgccaatttctacaggtaaggcataataaagcaatctccagggatacatgggcacagttattggagtttgttaagacaattgatcctcagctaaccaactatgacgaagaaggtgcttggccctacctaatcgatgaatttgtggactacttgaaagagaacggtcttgcctag

SEQ ID NO: 14618 - DNA, 1323 bp, Zea mays
  Peptide Sequence Number=SeqID_56397
atgtcaaaaacccccgcggaaccacttcgagcgagggcagtgtctctgccatctagcgacgtcttcggcaccagtggacaggcggcgcggcttatccgcaataaatgctggggccgcgcggccgagaggccttatgtcaggctccgcccgctggattacgtcacgagcagtggaccacgtggcagtatcgggtctccgcctgaacgggagcagaagcgtacaccgcatggctcggatacgtgtcggctctggacctcccgcctggccttcaataaggtccggctattctttgtcccagaatcccgggaccctgttgggtccggcactttcccatgggggtctggacccactgccgatatcttggaggatatcatcttctctggccacgtggcggccccggagccgtccgtgtggtggggtcaggcgctgtttgtcacgcgactagagatagccgcctcgtcgcgcgacgatatggagctcgccgaggcgccggcgcccgtgcccgacgaggacgggctggacgaacgcggcgtggcgctgcacctcccgaggctgctggccggcgtcgtctccggcgccctcactggcatcttcgctctcggtacttgcacagttgcacttacttgcgcaagctcctttcgcctcccttttgccctgttggcttccgacagcggcggcgtcctgcggggagctggactgggggcggtcgccggagctgtcctctccattgaggtccttgaggcttctcgcgcttactggtgctcgtcggaccggctgggctcgcacggcggagcatcgtccatggctgatttcattgagcagcttcttcgtgcccggtttgtgcaagagcaatttactgcttcaggatatgcatcatatcgctggcaggatgacctatacgacatctttggggacatttcatctgaagggctctcgcaagagtcactgaagaaactaccacatcatgtggtcagtgaccaccagacgcgggacttactcggcgaaatcctgtgttgtcctatctgtctacaggacattgtggccggtgagacagcgaggaggctgcccggctgctctcacgccttccaccagccttgcgtggacagatggctcgtcggccatggctcgtgccccgctccgggcgctgttccgcccgtgtcggcgatattcttgctgtcctcgttcttgcggatgcagaccctgggtttggcatcaggtgttggtgagcaggtctacagaaccgagagctcagcttctgatcagagtgttaaacaaccgaagattgaatgcccatatcctccaaagcaaactccctctcggtag

SEQ ID NO: 14619 - DNA, 633 bp, Zea mays
  Peptide Sequence Number=SeqID_56398
atggaggatctctcggatcttggaggccacggccacccgggtgctgctgcctggcggcccgcggcgccatcattggcgtcctcttccaaggtctcggtgcaagtctacaccgtcccaagctcagctgctaccggccgtgaagcccgaggtcaaggtgttgcaccaatgatgcatgcgtctagcgtcgctggccatggcggccgcgctgctgatctagaccccgtcaaggccaagatcgtctcccaccctagctaccaccgcctgctcgccgccttcttggactgccacaaggcacgcgcgccgatcgacgacccttcaactttagcgcgcgcgcgcgcgcacgtcggctgcccgccggaagcggccgaggagatcgcggcggtggcgcgggagcgcgaggcgtggcagcgtgcagccgcgggcgacgtcgcgcacacaaggccggacccggagctcgaccagttcatggagtcctactgcgagctgcttgtgacgtggaaggaggagctgacccggccgctccgggaggcggaggagttcctgacgacagtggaggcgcagctcaactccattaccaacaccgggccaaccatgggagctttcatctcttcagctgcagctgcaggtgactaa

SEQ ID NO: 14620 - DNA, 711 bp, Zea mays
  Peptide Sequence Number=SeqID_56399
atgcagcttcggtgttacgtgttcccttggagcggtgccggtgctgctggtggcggtggcgccgccgccgacgacgacgacggcaactccactgtcgtcagtgccgccgtcagcgtacgtactagcaggcagcaacaaaacagcacaaggcaagccaaatgcacgccacttcagaggccaagtggtggtacgccaagcgcttcctgcaccccagcgtacgtcgtggcgccctacgactacgtcttcctgtgggagtgggacgaggacgtggacgccaccttagcttcttcgacgccgacgagtacgtgcccatcgtccggagccacgccacgcgggggaaaacgtcctacgacgtcctcgtccggagggccgcgcgccggcgaggtgctgcacaggaacaccgtcggcgggcccgggaactgctccgacctgcaccgcccgccctgcagcggcttcgtcgaggtcattgcgcccgtgttcaccagggagctgaggcgtgggcctgcgtgtggcagcacatggtgcagaacgacctcgtgcagtgcacggctggggcctggacctcaacttctggagggaagggtatctttaagcgtcaagccttacccgcataatatgcagagtctggggttcgaacctgggatcttccggttacagacagtaggctctaccgctgcaccaggcccgcccttcataatacagatacgatga

SEQ ID NO: 14621 - DNA, 660 bp, Zea mays
  Peptide Sequence Number=SeqID_56400
atggcgtcgtcccgaatcaagggcggcgccgccgtcgaggcggcaataatccaactcgctggggtgtaccacgtcgatataatcgggaccgtccgctatgagcaagccacaaaggatccaggagttcagcaggtagaagttgctgagcaggagctcattgaaggcaagttggacctgcgcgtaaattctaaggacgacgggttctattcacagaaagccgagggggtcttaagaaaaacaaccatagcgaaaggggatgaggacgaggctgggcgtatcagtggcggagcacgatcacggacggcggccgagctataccggcgacgaattcaggcgcagggggcctggcgacagggaagctccgacgggcttgaagaaccggcgcgtgtagctcagctgggtggcgacgtgggcacggcaatctcggcgtgcgtgcgcgcggtccgcgcaggcgagcggttgaaggaggagggggagggactggcgagcggggcccgcgggacaatggcacagacgagcgagcgcagatcgagccgaagcgccgacagggcgaccccaccgaacagcgagagggagaaagggaagaggggcgcgggtcagcgccgacaggcggggcccacctgtcagagaccaaaggcgcgcgggcgaagctgggcttag

SEQ ID NO: 14622 - DNA, 1314 bp, Zea mays
  Peptide Sequence Number=SeqID_56401
atggggaactgcgccagcgccatcgacgccttcgtccagcgcggcaacagggcgtcgccggccgctactgctggaatgtccgcgtcgaggaggactagtagctctgccaccacggggaagctgtcaacgcttagcagcgccagcaccttcatgccatccacggttagtggcggcgacgacgacgacgatgacccagtgggccagatcctcgagtccccaaacctcaagatatacaccttcgcggagctcaagagcgccaccaggaacttcaggccggagacggtgctcggggagggcgggttcggcaaggtgtacaagggctgggtcgatgagaagaccatgaacccatccaaggctagcactggcgtcatggtcgccgtcaagaagctcaatcctgagagtgtgcaggggatggaacaatggcagtctgaagtcaatttcctcgggaggatttcgcaccccaatctcgtcagactcctgggctactccatggacgacaacgagctactgctcgtgtacgagttcatggcgaaggggagcttggagaaccacctgttccgaagaggggcggtctacgagccgctgccctggagcctgaggctgaagatcctcatcggtgcagctcgtggcctcgcgttccttcattcgtcagagaggcagatcatctacagggacttcaaggcttccaacatcttactggattcgcacttcaacgcgaagctctcggatttcggattggccaagcatggtccagacggcggggagtctcatgtgacaacaagagtcatggggacctatggctatgcagctccagagtacgtttctaccggccacctgtacgtgaagagcgacgtgtacggcttcggcgtcgtgctgctggagatgatctccggcctgagggcgctggacccgagccgcgagcgcgagaaggtgaacctggtgaactgggcgaggccgttgctgtccgaccggaggaagcttagccagctgatggacggcgggctggaggggcagtacaaccccaaagccgccctcctggccgcccagctgaccctcaggtgcctcaacggcgaccccaagagacggccgtccatgaaggaggtggtggaggcgctggagaagatcgagtcgtcggcgaagggcaggatggcgagggagccccggaacagctcgcgccgtggcctggtgcagtcccctaggggtgacagcgctaggaacaactccagctccaggggcaggataaagtttgaaatattatgtgataaaatagtggagctgctggaggcagtaatcatggttctgtacaagtgctga

SEQ ID NO: 14623 - DNA, 312 bp, Zea mays
  Peptide Sequence Number=SeqID_56402
atgtcgtcttcttcttcatctgctgcgagcgcgtcgccggccacgccgtcatttgaggagacattgagcaatttggcggtggttgaactgcagcctggccataccgtcgagttcgggacctcgaggatttttttgggccacgtgttggagatgcagcggctaggttattttgggaacggtgtcgggcgggctccaggggcagaagaggtccccgagccagagggggagttgattgtttttgaagcttttttcgctgctggtcttcgcctcccgacgcattggtttgtagtggaggttttgcgaaagttcgag

SEQ ID NO: 14624 - DNA, 234 bp, Zea mays
  Peptide Sequence Number=SeqID_56403
atggcgctcggtgtcgatggaaaaggggagaaaggagagggtttggctagggtatataggggtgaggcacagccgaaggcgttaatgaaaactcggaagagtcgctgggtccccggagtgcggaaggtgcggacatggacgtgcgcggtcaaggctgaaattccggtgcgcgtgggatcctcggaggagaagcaactgaccgcccggtccaaaagtcagtggcgcagggagtaa

SEQ ID NO: 14625 - DNA, 321 bp, Zea mays
  Peptide Sequence Number=SeqID_56404
atggctcccctcgctcgtcgatctctacatcaacgttctataggccgaagggccgtgccagcaggctctgtcgtcctggccgtagatgtcgtccatgcgaaggcccaagcgcccccttcgctccgacaagccgaggcgaagatcatcaacgacttcgaggaccggatgaccgaggccacgaaggccacaaggctttgtgtccctcgatgcgagaaggtgcccgtgtgcaatctggcccatgtcgtagggccccgcccgcagattgccatgtttccaaaatttagagagtatggatcactaatttcaccttttacagtttaa

SEQ ID NO: 14626 - DNA, 267 bp, Zea mays
  Peptide Sequence Number=SeqID_56405
atggagctcaataccaccacacgtgatgtcatggacgaagttgtcgtccaagcacatgatgattattctttcctcgctcatcgatcgatttttgtatattgtgtttttcttggtggttccctcattgcttggaagattaagaagcagttagcagtttccctgtttgagtacagagagcttcaactagctagtttcttcaccaaggctgaaactaggtctcaacatagattctatccctccaaactcactttggtagatctaccttaa

SEQ ID NO: 14627 - DNA, 324 bp, Zea mays
  Peptide Sequence Number=SeqID_56406
atggctagagagcaggtagcccgcgagctagctttggtgcctagttcggctgctccggagacaaaggatgaggtatcagctgtggcaactgaagccactgtattacaagctggaggcgctgttacagagccatccgaagggtcaagcgacgacaacgatgatattgatattgaagaggacaacaccatcatccgccctacaaagtcgagtgatgtggacttcgggaaatcaaagattaaaggagggcacattgaggtactcactaagtttgattacattgacaatgttgagtgggtctggcttggggtgataatttattactga

SEQ ID NO: 14628 - DNA, 393 bp, Zea mays
  Peptide Sequence Number=SeqID_56407
atggggctggggagcgagcgggacgcagagggcagggccgagcgccgtggcgagctggaagtgcgcgcggccaccagagaagaagctgcgcgcggcaaggagctggggccaagcagccgccatggggaagcagagcagccggtgaccttccatgggcggcgtctacggagaggggcggcaggggaagggcagagggagctcgggaatggagcgcgtgctagcaggaggagcggccggggctggggcgagccaggaatggagctcatgccggcgaggaagaagacgcagggtgccgtgggagctcgtagggagcgagaggagcagaacacggtgggatatttgaaaaatcccgggcgggacgcaggggattctgcgatggacagcgaggcttga

SEQ ID NO: 14629 - DNA, 423 bp, Zea mays
  Peptide Sequence Number=SeqID_56408
atggctgccatcgtcaagcttggactcgccctttgccgcgcccctagctcagtccctggcgcgcgcgaagtttactcccctgcgcacgtcttcttcctcgccgtgcccctgtttcccatggcgtccgtgctccctctgccatggccgccgagcacccttcagtcctctctgctcgctggagctctctatcgcgcccagccatctcctcttctctctccctcagccgcggcactccagctcgccgtgcctgcgtgctgctcgccccagctcccagccatggcgtcggccagagctcctgcgcgttgtgtgcccagctcccttttccgcgtgtgcgtgcttggctcgcttttctgcgcgcccagcattctgctcccgctcgtccctgcgcgtctgcgttctgctcggattcagtcatgcacgtag

SEQ ID NO: 14630 - DNA, 209 bp, Zea mays
  Peptide Sequence Number=SeqID_56409
atgtggtgcatttctattggctcaagatttgccacacaaaaggttataaagaacataatcgcagaagatcccaagggtgggatctcgggttggggcacgccaccggtgagccgcggtcggccgtggcggggctacaggctgggctcgccatggctgtttgccgtgcccgcgcctaagccgccgttcagcggctccaggcccgtgagccg

SEQ ID NO: 14631 - DNA, 441 bp, Zea mays
  Peptide Sequence Number=SeqID_56410
atggccgccgtggtctgcttggcggtgctcatcgtcgccatcgtcgccgccgccgcgggcgcctgtgagctgcccgtcgcccgcgccgccgcggtgcacgacgttgagcaggcgctcgggcccggcacgctcatgccgtacggccaggcgaaggcggccgccggaaagacagggagcgcgtcgccgggcggcgtcggcgaggaggaggcgccttgttgcgccatctgcctgtccgagtacgccgagggcgacgagatggtgcgggtgctgccggcgtgcggccacttcttccacgccgactgccgcatcgactggtggctccggcagcgcgggacgtgcccggtctgccgcggtggactgctgccgctgccgccgaggccggagtgtccgctcatgccgccgcgaccggccggcgctgcggtggtccgaggcagggggtga

SEQ ID NO: 14632 - DNA, 2658 bp, Zea mays
  Peptide Sequence Number=SeqID_56411
atggacttcaacggcaacggacgggacgaggcaaacccgagcggctctgaggcggggaaccacaacgagcaccgcggcgacgacccctcgcgcgttggccagagcctgcccgccgatatccgccaaaatgggcagccaaccctcggggaggagatcaccgcgccgctgtgggaggagttcgaggcgctcggcatccacgtccgccgctccgagcccgtgttcccgccgcgcccagggtacggcgccgcggggacgccgtacgtcgtcagggccaacctcttcctcggtcgcctcgtcgacgaggccctgcatcagtacaacgtaaccatttcgcccgagccgacgcccaaggccgcgtacagagagatcatgacgaagctgttgtccgagaaccagcacacggatttcgacggccgcttctccgtgtacgatgacggtgactcgctcttcacagccggtgcgctgccgttcgacaccaaggagttcgaggtccccctctctgcaggcggcgacgaaaagatggacaggaagtacaaggtgatgatcaaccatgccgcaacgattagtctgctacagctgaggatgctgttagcgggctatcccacggacatccccgcgcaggcgctcgtggtcctcgacaccgtgctgcgtgacgtcttcaacgaacgcaatgacatggaatgcgtcgtgattgacaaaaaggatcgcacactgggtgttgacgcatggaaggggctctatctgagcatcaggccaacacagaactgcttgtctctgattgcagacgtgtcctcatctgtattcgttcaacccctgctattgattgaattcgttcagaagatcctaaagatagatgccgtggataggaacttgactaaacctgagtatgacaagctcttgaaggccctcaggggtgtgaggattcaagtcacacacagagataatagacgccgagtatggtcaaagaaaaaagataatagacgccaactctctacgtacagagttgctggcttgtcagtgaatcctactaatgatttgagttttgaatcaaaggttggagtcacaacgactgtgattgattacttcagagaaatatacggcctggaactgaaatacaaatatctcccatgcgtcaatgctggcagcgagcaggatccaatctattttcctatagaggtttgcaagatagctcccaagcagtgttaccagaagaagctggaaggtagtcagttttctactccaaggaagtcagcctggatccatcctgaagccgagcaatcctgtcctcagcttaagtatgatgattctgtatcacagaaaacatggtttccactggatgggtactggaatatgaaagacaagaaagtaataaatggtgccaagatcagaaactgggcatgtcttaatttttgtgaagatttatccaaggaagatattaagaagttttgctttaagctggctgaaatgtctcgtattactggactggactttgccgatttgaagctcccaatattcactgcacgtccagatcgagttgaagatggtattcgtaggtgctatcaggaagcgaagaacaagctaagggatcagaagattgatttactgcttgctatactaccagataaaaaagacagtttatatggaaatattaaaaggatctgtgagacagatattggtcttgtgtcacagtgttgtcgaaggtcaagagtcttagtgaataataatcagatattggcaaatattgctattaagatcaatgccaaggttggaggaagaatctcagtattcgatgacgtacagaagagtttaccggttgtttcaaataagccaacaattatatttggtgctcatgtttctcacccttctgttgtagatggttctactggcccttctattgcttctgtcgttgcatcccaagactggcatgaggtgtctaagtataatggtgttgttcgtgcacaaggtcacactgaagagatcggtggccttgaagacattgtcaaggagctccttcatgcatttgcaaacgagtccaaggagaagctccagcagctgatattctacagggatggcataagtgagggtcaattcaatcgaattttggagaaagaaatcccagcgatagaaaaggcttggaacgcactgtatgacaatgagaagccacaaatcaccttcgttgttgtgcagaagaggcataaactgaggctgttccccgtggacgacaactataagatccgttctgctaagaagaaaattgttgagcctggcacagtggttgatagtgagatctgtcacccagcagaatttgatttcttcctttgcagccaatctggtggtatcaaaggtccaaggcgtcctgtgaggtaccttgtactgcgagatgataacaacttctcggcagatgaactgcaggctctcacaaataacctgtgctacacgttcctgacagtttgtcctgtcttgtctctcatcagttattcaggcggcaatcgttcgttgtcggtcgctcctcccgcatactacgcccaaaagctcgcacatcgggcccgcgtctacctcgccaaaggctcggacaataatgcagctgctgctaatggtggtcggaagcaaattccagagataaagaatgagctgaaggggtccatgttctactgctag

SEQ ID NO: 14633 - DNA, 168 bp, Zea mays
  Peptide Sequence Number=SeqID_56412
atggtgtccaccgaagaccctagacccctacccggagctcgggtgacgcgtatggctcaagtcagcgacgacggaacacagggctccgtggcgggtggtggcggtccgcccgccaaaagagtgctggcgcaggagtggtcctcgtcggtccagacggggaccagctga

SEQ ID NO: 14634 - DNA, 468 bp, Zea mays
  Peptide Sequence Number=SeqID_56413
atgagcctcgacaccacctccgcgatcgcggtcgccgcggcggccgccctcgcggcgctcatcgtggccatcgtcgccgcggcgtccgcgggcgcatgcggcggaccgccgggcggcgcagccgcggtgcacgacgtcgagcgcgcgctcggggacgccacgctcatgacgtacgagcaggcgcgggcggccgcccggaagagcgcggccgcggacgaggaggccccgcgctgcgcgctctgcctgtcggagttcgccggcggcagggcgggcgagctcgtgcgggtggtctcggcgtgcggccacttcttccacgcggagtgcggcgtcgacgcctggctcagggcgcgcggggacgtgcccgctctgccgggccgaggtgtgggcgacactgccgcgccccgagtgcccgccgttgccggcgcgatccggcggcgccactgtgggctcgcgttagtgagacagtag

SEQ ID NO: 14635 - DNA, 540 bp, Zea mays
  Peptide Sequence Number=SeqID_56414
atggcgctgctccgcccgcggcaggaggcgttcgagcatgggctcctgcccatccctaagctcatcttcccggagggcatgctggcgcagaccctcgcccagctcaaggagaagctcgccgcctcagtccctgacgggcgcatgcgcgctgcggccctggctgaggcgcagcagatcccgcaggagcaggcggcgctcgccctcggcacgctcacggcggtgctcccggccgaggaccccgtgcttggggacggcgccatggatggtgctgccaccgacatccgcgacgtgctgctcttcctctatatccagtcttacaagcgcctcgttccgcggagctcgcacaaggactcgcacgccgtgccggacgtctggccgtccacctccgcgttcgatgggtacctctccgcgctctccccgatccagtgtcactcagactacactgcacagatcatcttatcgtctgaagtatgcctggttctctgttttgaatgcaaggatgagcaagacgtattcaacattagtgagctggtgaaatga

SEQ ID NO: 14636 - DNA, 2196 bp, Zea mays
  Peptide Sequence Number=SeqID_56415
atgtcagacaatccacacgagaaaaatactgatttcgactcaactgtgcaggcccgcctgacacaaccagatgctctaagcaagggtgtagtattccctctcgtgctggtcaaagtcgagagcagcaaggacatagatcgcgtagatgattctggtgacataaccaaggattcggaggaggcaagggaggacggacagggaagtttggttgtggaaatggatgtggtggaatcctcgccgtcgtcgtcgccgatatcgtctccggccgggtcttcggagtccatagacctcaacttcctgccgttcctcaagagggagcccaagtcggagcccgcgtcaccagagctcgggcccctgccgctgcctgcgcccccaacccagacgccccagcagcagcatgcagcggctccggctcctgaggccacggcgcctctgtcgccagcgactcctgacctctcgtccgctccggtgatggcgccgctgcagtcgctgccgcctaacctggacgaggacgcgctccttcgggagtactaccgcctcgcgggcctctacctctcgtctgcgaggtccggggcgatcatcccagcgctagctccggaggcggccgcaccggcggtggtgcagtcggggtccgggtctgtcgtgaagaagcgccggccgcgttcgtcggacctcgtgcgggtctcctcgctcggcgtgcaggaccagatctacttccgcgacctcgtgcgcagggcgcgcatcactttcgaatgcctccgcgggcttctactcagggacgacgagcgcgccgagtccctcggccttgcggccgtcgccgggttcggcgttgccagggaccggcgccgcgtccgcgcggacctgcgtgccgcagcgctcatgggggaccacgacctctggctcaatcgcgaccgccgcatcgtcgggccgatgcccgggatctcggtgggtgacgctttcttcttccgcatggagctttgcgtgcttggactccatggccaggtgcaggccggaattgattatgtcagtgcagggaggtctgcatctggggagcctatagccacatctataattgtatctggtgggtatgaggatgatgatgatcacggcgatgtacttgtgtacactgggcatggcggccgtgatcccaacctccacaagcattgcgtcgatcagaagctggagggcggcaatcttgccctcgagcgcagcatggcttatggtattgagattcgtgtaatccgtgctgtcaagtcaagacgaagccctgttggtaaggtttacttctacgatggcctctacaaggttgttgactactggctcgaccgtgggaaatctgggtttgctgaacagcttaaggtggatgtgtttgctataaggccaacagggtatttgagctttgatatctccatgggccgtgataccttgtcagttgcactcttcaatgatgttgatgatgatcaggacccactcttattcgaatatctggcacgtccaatatttcctacctctgctgtccaggggaagtttgctgaaggtggtggtggtggttgtgattgtgctgagatttgctcaattggatgtaactgtgcagggaggaatggtggcgagtttgcatatgataggactggaaccctgctacgaggcaagccactggtatatgagtgtgggccatactgcagatgcccacctagttgccccaacagggttagtcagaaggggcttcaacataggcttgaggtattccggtcaagggagactgggtggggagttcggtctttggatctcattaaggctggcacattcatttgtgagttcagcgggattatccttactcaccagcagtcagaggttgtggcagcaaacggcgattgcttggtgcgtccaagtaggtttcctccaaggtggttggattggggtgatatatctgatgtctaccctgattatgtggcgccagaccatccttctattcctgagttaaaatttgcaattgatgtgtcaagggcaaggaatgtggcatgctatttcagccacagttgcagtccaaacgtgtttgtccagtttgtgctgtttgatcattacaatgtgtcttacccccacctcatgatctttgccatggaaaacattccaccgttgagggagctaagcattgactatgggatggttgacgaatggattggacagttaactatgtag

SEQ ID NO: 14637 - DNA, 1059 bp, Zea mays
  Peptide Sequence Number=SeqID_56416
atgtacttcgatgggttgctgatgaaaacaggagcaggtgctggcctgctcttcatctcacccctcaggaaacatctccgctatgtgctgcgcctccatttcccggcgtcaaacaacgtggccgagtacgaggctatggttaatgggttgcacatcgccatcgagctaggggtccggcgcttcgacgctcgcggcgactcgcagcttgtcattgaccaagtcatgaagaactcccactgccgcgaccggaagatggaggcctactgcgacgaagttcaacgcctggaagacaagttctacgggctggagctcaaccacatcgctcgacggtacaacaagactgcggatgagctagcgaagatagcctcggggcggacaacggttctccctgacgtcttctccagagacatacatcaaccctccgtcaagatcggcgacacgcccgaggaggcctcggcccagcccgaggtatcctcggccgccgaggcacctcgagccctcgtggggaacgccttccgacaaggtttctactggtcgaccacggtggccgacgccactaggattgtacgctcctgccaagggtgtcaattctacgcgagacagacgcacctgccggctcaggccctgcagacaatatccatcacctggccgtttgcagtgtggggtctggacctcgtcggtcccttgcagaaggcacctaggggcttctcgcacctgctggtagccatcgacaaattctccaagtggatcgaggtccggcccctaaccagcatcaggtccgagcaggcggtggcgttcttcacgaacatcatccatcgctttggggtcccgaactccatcatcaccgacaatggcacacaattcattgggaagaagttcctggacttctgcgaggaccaccacatccgtgtggactgggccgccgtagctcaccccatgacgaatgggcaggtggagcgtgccaacggtatgattctgcagggacttaaaccgaggatctacaacgacctcaacaagttcggcaagcggtggatgaaagagctaccctcggtggtctag

SEQ ID NO: 14638 - DNA, 813 bp, Zea mays
  Peptide Sequence Number=SeqID_56417
atgggatcccacctagagctggcagtgaccggagcttgtctggtcgtggttctgttgagggatgacgacgtgtatgtaatgaaccttggggatagccgtgccattgtggcgcagcgatgggacgacgaagattgcttgattggaagcatgtgggtggaggacattggtgtgggcttggagaccgagacaaggatccctgggtattcggcaattgggctcgaggcattgcagctgtcgactgatcatagcacgagcattgaagaggaagtgcagaggatcagacgcgaacatctagatgatgatcaatgtgttgttaatgatagagtgaaaggtcgtctaacagttacccgtgcatttggtgctgggtatctcaaacagagtttaattgaggagctactctcccgtgctgcaaagaaagctggtaagcttattgtgtggtcttcttcttccaagcccgacgctcctaggaccacaccgtccaagccctcgagcgaatctgcgatacgcaagtggtggcgcagcctcgcgctcgccctgctcgccgccgcactggcgatcacggtggccgcgctgcagcagacgacggagcacgcagacaccaaggagcggccgctgctgcggttcgggctaggaacacgcggacgccaaggggcggccgccgctgtggctcacctgtttgggctgctcggctgggcagcttttctagcctcgcgttgtcgtgatcagggtggaacgaccatcgggcatgaaggcttctgtctacgcgggtcgactcggcggcgccttaactttggtggtgctgagagtgactaa

SEQ ID NO: 14639 - DNA, 348 bp, Zea mays
  Peptide Sequence Number=SeqID_56418
atgacggaagatgatgttgtactgaatacaaccctggacctcatcatgagaagcaaggcggagaagcggtgcctcaagaggcgcgacgccacccttaagcggcgcctcaaacaacatgtcgccaccaccaaacaacagaaggaggaagcgccaccatccaccctggtggctgtcatcgaccgacagctgtcgttcatccttaacttgctcgaggacaactctagtcgtggttcaaccggggctaactccgacaccgacgaggcgctagagagggcttgctttgtggcaacaccacaacgaaacaacaacgacggaggggacaaggaggcaacccaaccaggaggatga

SEQ ID NO: 14640 - DNA, 1212 bp, Zea mays
  Peptide Sequence Number=SeqID_56419
atgatggtcctcgcctcagttgccgccatctcggtcgccatcctacttcttttatctctcccctcaagtctccgcctccacgccaccccattctcggcacagggtgtgggagtaggcgcctactccccgtattcatccgacaccaaactcgacactgacccacacattggctattgcacgtccatgaggacgcttcacagcatacgcgtaccatcgttttcgccgtcgtcggacatcccgttcgtcttcccggccttcgccctcttcttcctccccaacctactgccccgcccatggttaccgcccccacctccgtcctccctcgtcgcgagagccacctccccgcacaagccgcgccatgcgtcctacccgacgttgtcgctccgcaaacaacctctgcgccagtcgtcgtccacactcgcctgcctggataaggatgcaaggtccaaatcctcattcgaccggttccctacttccctcaaaccacgtcctgagtgcacgacctccagttcccatctgaacgattttggtggcatggacttcatgttcaccatcgtcggcttcctcaccgcatgctcagtggacaggagaggacataagaatcctcaccgcatgttcaccatcgtcggcttcctcaccgcatgcctcaacactattcattacgctgatagtgtttctgttaattccaatgttgttcagttggatgcaattccaactagagttaagcttgcgagttgtgagttggatttgaggttctgttctgctacatgcttggagagaagacaaacactggtagtcgtagaacccaatgaaattaacttcactagaataaagaagaaaaagaagaagcaggtggatcttgatttaacttttaatgagcttggagatggggaggacactcaaggtccttggttcgactccctcggccctggtcacggtcattctcacatgggctacagtgacgctgtgtatgggtggggtagaggttcagaacaccagtcgatccatgcacagattatcaggaagggtggtgggaagtgttcgacttgctaccaattctcatctctcacctctctatcacatgaaccaacatatttctacaatgtggacattcctctcgagtcatcaaagaacaaggcgcggatgggtgcgacggagctgtgggatctcttggcctccgactcagataaattcatgaagaactggttgtaa

SEQ ID NO: 14641 - DNA, 228 bp, Zea mays
  Peptide Sequence Number=SeqID_56420
atgggcgcactctgcacccggtctgactccgccaggttgggccccctcaccattgtagatcttcccaagctagaatcttgcggcaataaccgccttgccgaattcctcgctaggttcgtgccccgcgccaactataataatgtcgggggaccgtattccggcgatggcgtcaccgcttcggccgtcggcaccgccgtgtcggtgtaccggttggatcaaggcgcctag

SEQ ID NO: 14642 - DNA, 336 bp, Zea mays
  Peptide Sequence Number=SeqID_56421
atggccgaggcttgggcagtggtggcgggcggtggcgcggcgtgttcgaggcgaagtccgggagggctcggcgagcagggagcagggaagggaggtctcggcggcaggggacgggcatggccgagggtgcggtgcagacagatggtccaggcatggccggggcagggcacggtgcatatggacggtccggcgagctccacggacggtggcggctctggcgaggcgcaggcgaggaagagagcgggaagccgaggagacacgggctggttcgggcaagggcgagggtcggcgtccgggcgggtcgcggtggtgcgtgtggtgcggcgtgggcactag

SEQ ID NO: 14643 - DNA, 291 bp, Zea mays
  Peptide Sequence Number=SeqID_56422
atgaatttatggtgcttgtcctggggtggagctggtggtggtgatggagcagctacatctaagcgacagctactggatctgtcccagccggtgcagggttcggtggaggattcatctctggttgtggttggttacaatcctcctgcgatggttgttggcagagtggagaagataagaatagtcagagtagaacaaccaaaggtgagacacgatcaagataagtatagaaagaatcagagtaaggacatgacacactgtcaagatcgcctcacctcaccattccttagatag

SEQ ID NO: 14644 - DNA, 318 bp, Zea mays
  Peptide Sequence Number=SeqID_56423
atgaccgggtttgactggcccaacaaggcagcgtgggtacatttgggaccgtacgtgggggcgtacatttgtgtcgacagggacttcccgatgcgccttaggtgtgccacatgtatgcctagacgtgacatgtggatgatgcttcttgttgtagtagacatgggtcagcagtactggattgggacctccgcctcgccaagttgctcaattaggagttggtcggccattccgcctcgcagcgttacttggtggggacctggtcggttgctctacctcgccgagttgcttggcggggacctgtggctctacctcgcatag

SEQ ID NO: 14645 - DNA, 1023 bp, Zea mays
  Peptide Sequence Number=SeqID_56424
atgccgccttccaaagcacgccgaaagaggtcacttcgtgatatcactgccaccgttgccactgggactgttgccaactcgaaacctggctcatcatcgacgaacgaggggaagcaacaggacaagaaaaaggagggtccacaggaaccggacatcccaccattaccgccggtggtggtgaatatagtcccacgacaaggattaggatgtgaagtagtggaagggctactcgtgcctagtcggaagcgagagtacaagcccaatagcaagtatactgtgggaaatcacccgatctatgccatcgggttcaatttcattgacatgcgctactatgatgtctttgccatcgccagttgcaatagtgtgataatttaccgatgccttgagaatggtggttttggtcttctacaaaattatgttgatgaggataaggatgagtcattctacactctaagctggaccatcgatcaagttgatagctcaccgctgttggtggccgcaggaagcaatcggatcattcgggtcttgactgctgcagtacactctgactatgttgattgtacaagatggcttggtgacttcatcctatcaaagagtgtaaagaatgcagttttgctttgggaaccaaaaccagacaagcgtaggcctggggaggggagtgttgatgttcttcagaagtacccggtgccaaagtgttcattatggtttatgaaattttcatgtgatttttactccaaccagatggcaataggcaacaataaaggcgagatctatgtctgggaagtgcagtccagcccgcccgtcttaattgaccggctgtgcaaccaggaatgcaagtcgccgataaggcagaccgcagtgtcattcgacggaagcacgatccttggagccgccgacgacggcgcgatctggcggtgggacgaagtggaccctgctgcttccagctccaaacctgatcaagctgctgcgcccgccgccggtgtcggtgccggtgccggtgccgacgccgacgccgacgcctga

SEQ ID NO: 14646 - DNA, 429 bp, Zea mays
  Peptide Sequence Number=SeqID_56425
atgggctatcaaaacagttatgcagagaagagttactgctatagaggtgatgctaaaggtggaactgcaaagctagagcttgacgcctcggccagcgcccaacgggtagtggccctaggcgggggcgagggtcatgggtccacggagaggagctctgggcggagctctactggagggcaacaggcggccggggcggagctcggcctggggcatgggcgttcccggcgccaccccgacgacttagcagacgagcggaggcaggtggccagagccggaggtggaccgcgggcgggggcaagggaacacggctctgctcggggcgacgacaactggcgacagagtcatggagctgaccatctagtggagaccacagtggcttggccgttcctgttcgcgtcgggcgtcggcggtggctcgctacgacgctag

SEQ ID NO: 14647 - DNA, 432 bp, Zea mays
  Peptide Sequence Number=SeqID_56426
atgtcgtgtgagttgagtaaaggtgtcagggcgccgccgtcggggttttctcatcaacgcgactcggagctcgggctgcgccgtgggcggacctcggtggactggctcgaacccgttcgtgacctcaggttgggctgggagtcgtccggttggggggatttctcgttggagtgctacgcggccgcaagaatggtgctgtgtcgtggccgaccgggccgctctcgcttcattattgaggttaagctcatcctgttcgccgaagttagccatattgtttttgtctatctattgcttcgaactgcgaggctggtgtccgtgcagagttcaccgacgagagcgccgccgtggctgtgctggggtaggggaacgacgtcggcgccgttggatctgtgtagggcggtcaggattaaactaaggagcagcatcgtgtag

SEQ ID NO: 14648 - DNA, 471 bp, Zea mays
  Peptide Sequence Number=SeqID_56427
atgacgcgtgggtccagcgaggcagtgaaacgacgcgagtcaaacacagttggtgagtggggtccgcagtgtagtgagcgcccggtggatggcgtgcgggaaccacacaaggttccaactaatccttgttggtgcacctatgcaaagatgctcaacacattgttttgtgctaagtgtcaaagagatgcaaatggaaaagcaagcctgcggtgcaccgaactgtccggtgctcaggctggcgcactcggcgaactggctgctctcgggaaaagttgtgggagccatggctataattcaccggactgtccgacagaaggcaacaatggccttccaaatggagctccaatgactcctagctgtcttggggctataaaagggacccctaggagcatggagcactacaccaagcctccattgaacatcctacaacacctaaactctgcaaacacacatttggttcattgtgtttga

SEQ ID NO: 14649 - DNA, 964 bp, Zea mays
  Peptide Sequence Number=SeqID_56428
atgacggcagtggagtcccgcgtcgtcgttgcgactcctgcaaacacgaaggtgatgagcgagaaggagaaccacatcctgaggatctcaaactccctgaacaagaagctggatcacgctaagaacactcctgaggcccctgaagcggcttgcaacgagaggaagaggaaaggcgaggcgaggaacgcatccatcgacggcggcgagcaagagaacaataacaacggtgggaggaagaggagcctgccggccgagcgcgaggcgaggctgaagaggaagtcgacggagcctcctccccaggtgaagaatctgcgatcggtttctgtgatatgccgcgccacggcaatagagggcggcttcctccgcccgcccccgtcccggcgcctcgacatctgcgctttctacctctgcctctcctcctgctccaccatgacgcccgtggagctcacgctggcctaccacccagccatcggggacgcggcgctggggctaaacggccgcgcgctcctgccagccgcgcccgccaaggtcactctccgccgggtcgccgccaacgcgtacgcgagcgccgaccgcgtcgccgccgccgaggtcgcgcggttcgtggtgctcgccgccaccggggaggaggtcgcggcgaagggtgtcttctccgcgcggcgcgagggggtggcacgtggagtgccgtcgagcactaccctcgccggaggtgtgtgtggcggaggtggtggtgctcgcgaagggtggcgtgctgatgcgggacagggcccgcgcggccggccgaggccggggcggatgcggtgcggagccacccgactggaggggataccagaggaggacgccaccacgggcctctgcggctggtgccgctgtgagtgcgacgacgatgggttgggaggtggtcggggacgcagagtaggaggagcaggaggtcgagatggagacggtgcggtgggcgatggag

SEQ ID NO: 14650 - DNA, 822 bp, Zea mays
  Peptide Sequence Number=SeqID_56429
atggacaagaagccgccttcctccaagaaccagctcccggttccccctgccgccgccgccgcagcagcagcagcagcgaagaacaacggtggcgggaagctgccggggctgtcgcggaagttgttccagaaagcctcgtccaccgaggcggcggcgcccaggaagacgaaggccctgatggaagtcaagaacagcggcaacaacgccaacacgcggacgctcggcatggtgctgcgcagcgagcgggagctcctggcgcagaccagggcgcaggaggacgagatcgccgcgctccgcctgcagctcgagaacaaggaccgggaggtggagcggctcaaggacctatgcctgcggcagcgggaggagatcaggacgctcaaagacgccgtcctgttcccggacgtggagccggagccagagcccgaccgccgcctccgacacgagatttccacgctcaccgaccagatccagtgcctcgcgcaggaggtcgcccaggttaaggccgagaagcactcggcaaggtcgtgctttgacgaggatggatacttctcttcccctaggacgcctgggtttaacgaggagaccgctttctctctggagtgcagcattggggaagctgagacgccgaactacggtagcccagacgaaatgttcagcaaggatcttaatccttgcttgaccccgtgcattgccaagagcagatctgatgtatccgcacaattccagtcgtcttcctcccagttcacaaagcttgcccagctatttggaatggaatgccagtttggctctgctatgtcatcgataggtgaatgtagcatgtga

SEQ ID NO: 14651 - DNA, 3771 bp, Zea mays
  Peptide Sequence Number=SeqID_56430
atgccgcttttcatctccgacgaggagctccgtctcctcggcggcgacacggctgccgttgccgagcgggctgatgctgccatccgtgagctccggcggcaggtggataccgtacgcgccgaggcggatgccgctgcgatcgctgccgagcagacctgcgccctcctcgagcaacggtacgcctccctctccgcggagttcgatcgctccaaggccgaggctgccgagctcaccgcctctgccgagcgccgcgctgccgagcttgcctcctctcaggcggagatacatcagcttcgcatccaggcgattgctaaggatggtgaggtggagaggttgaaaattgaaatctcggagctgcacaagtccaagtgccagtcgctggagttgattgagcagagagatgcagaaattaaagagaaggacggcatcatccagagctactacaataaaattgtaaacctggcagaaacttctgctggtaaagaggccaggatacaagaggtcgaagcaaagtttacccattgtcaagcaatttgcaatcgcatgactcaggagaaggagctgcttgaaaagcacaatgtctggcttgatgaagaactgaaagcaaaacttgaaagagagatatctgaatcctctagctccttgaggcgaagcaaagaacgcatctctgaactggagcaaagggagttgcgctcaacaaaggatactgcagctgctaatgaacaacgtctgggtgctgagctttcaactgtcaagaaacttgctgagcttcaccaagaaagttctgaggaatggtcgaaaaaggctggggagctcgaaggtgttattaaagcattagaggaagctgtcaacttgaagcagaagcttgaaaagtgtgaatttgatctggagaatacaaggaagtccagtgaattgagcctcgttccattgaccagcattgcagcaggctcttctgatgtagtagacacaacagtacaaggactgcctatttctgatgcagttaatcagaatgatctaatggttattccaaaggtacctagtggtgtttctggtactgctttagctgcttctcttcttcgtgatggttggagtcttgctaagatctatgagaaataccaagaagctactgatgcttttcttcatgagaggcggggaaggagacatgcagaagcagttttggaaagggttttgcatgaaatagaagagaaggccgagcttatcctagatgaacgggctgaacatgagaggatggttgaagcttatgctatgatggatcagaaattgcagcaagcattgctggagcacgacaattttgaaaacaatgttaggaatctaaaggttgctgtccttttaaaagaatgccaagacatacaacttcgttgtggttctagccttcctaatgtaggttatgtcgcttcttcaagcttagtcaatgttctttccaatgtagagcatgatatcaaggacaatatgtcttttaaagacatcaacgggttagttcaacaaaatgttcaactaagaaatcaaattcacatgctctcagccgatcttgacaaaaaggatatggaactacgggagagcttccaaatcgagttgaagaaaattacagatgctgctgcgtccagggttgaaaaagttatgaagaaatctgaagaacaagcaataatgattgaatctctccatcgatctgtggcgatgtatcggaaactttgtgaggagcagcagaaggctcgttcaaatgttgaatcggcacccactactctgcaagatagcagcagaacagacctgatggttctgtttgaaggatcacaggaagtctcgaagaaagcttatgagcaagtctctgaacgagccagaagccttgatgaagagttgacaaaattgaggactgagcttgagtctctgcggtctgagcgtgataaggcggtgcttgaagctgattttgctcgggaccggcttaatgggtttgcagcggagcttgagcatcagaggaaggagtctaactctgcttcacttagaaatgcggagttgactcgtttagtagttgattatgaaagaagacttcgtgaagatttggattctaaacaagctttagaggagaatctaaggaagctatcaatggagaaaggtcacaacagtaagggggccgagccggcggctcgtgggcaccgtcggcgagcaggagggccgagtacgagcaggaaggccgcagggaggggccaggcggaccgcgacgcgaggaaagggtggtcggcagtggtgatccggaggtcggcagacggaggggagccacacggtggggggggtctagggtggccgacgtcgctgcgcgggcctacgttagggatggccgacattggaaggaggctgctcggcgagcgacaccaacaactgagggccacaatcgacacaatccataccactgaggaggtccaagagagggattgggctgagcttaacaaggagcttcaagagcaacgagatcatgtccgtgttttgtctcttgacaagaaaaatgtcttcgacagctgcatgaagcaggtagaggatatgagaaaagagctaaataactcgtggaaagctgtttctgatgctgaagcaagggctgccattgcggaggccaagtgttctgatctagaggcaaaggtgaaatcgagaaagaccgaggttggcaggaaagccttggaagatgagattgttaacttgagggataagttatcagaaatggagaagagttatgtcattaagtgtgaagaagctgccaatgcaattgaatctaaagagaagcacatcacttctctcatgaatgaaatttctgttttaagaacagaagtttctcagaaactaccacagttagaaaaattggaaattgaattggctttgtcaaagagttcacttgatgagcagtataagcgctggcgaactgcccaagataattatgaacgccaggccgaaacagagatatcattgcttaaacaggagaagtctcggcttcagatagaactggaaagttctttaaagtctgccaaggaggcacaggacttgttgcgaagtcaagctgatagtgccagggcattgatgttcaaggatgaagagttcaagtcactgcagattcagaaattccgtgaagaagctcaaaaggctaaaatggaatctgagaggttgcagaaccttctactggagaaggaggtagacgctgaaatgtgcaaaagagaactggaaatgcagaaggcagaaatagctaatctcaaccaaagtatttctgagtcaaccttgagagagaattctatggagcttgaaagtgcaaagatactgctttctgagaaagaagttgccataaaaattttggaggataagctttcattatgtcaatctgaattggattccaaggaaaagaagctgaatgatgtagaggcgtcccttaaatctgagattgacaagcataagaagattaatttaaacttaaagagaaagcatgacaatttgatgaaggagaagggagagattgctaaagaaaatcaaagccttgtaaagcagatggaggatcttaaatcaactcagaagacaacatctgaaacaacacttgagcaggctattaaagaaaaggatttcaggatacagacattagaaagaactctggaaaaggaaagagatgataacaagaaagagaaggcaaagagtaggaggaatgagaacacaatctttggtgcacttcagaaggtgcaacaggactatagaagcttcctcatgagctatctttatgggtgctag

SEQ ID NO: 14652 - DNA, 1743 bp, Zea mays
  Peptide Sequence Number=SeqID_56431
atggccggggaagaaggctgcggccgcgctgctccgtggccggttccgccgggggaagagggcccgcgctggaggaggggggcaggccgcggccacgccagcgcggaggagggggacagacgcggagtactgattgcgagcattgatttacaggacaagaaacaagtagaggagtctatagataagcataagcaggctgtgagagagttgattgagaattatcctggattatcatctgaagtgccacctatctctgcactagaagagcaacttctttcatacttccgtgcagctaaagatatggaggaatcttctagtcccttccgtgatggtgcagcaactcaaactccagttgttgaaactgcccctgtggatgcacctacttcagctggagtactcataagtcattctgaagcatttgatgttgtttcctatgtgatgacatttgattcattactcttccggtcaatgtgggagctgataagtcgttcagttgcaggacgtccagtagatacttcgtcaaggccagctaaagctaaaatgacggaagaaagagcagttcccaaaccaagcagtgaagtacgtaggcctggaggaagaagaccccttgttcgtcctactcttgaacgaactgaagaacctcatgctgatacagatatatcagctgttgatgcctccacagttcaggacaaaggggggccaccagcagagcaagaaacttctggaattttacctgtgttacagcctttgagtcgtaaacggcttatcacatcttcacagacggtagacagtgcctcgcagggtgaggctaatgatgtcaatcctccatctaagaagcccaaggaggaagaatcttcacaagggactagtgaactcaaaagtggtcaaccacctcttggggatgtagcggcacaggttaatgtgcttccagccactgatgacctagatggacaacagcctacagaagagatcgatactgatcaggcacctgagccaatggtagaggttgaggcaacaagggaagaggatgggggtgataaagatgactctggagatgcatcaacggacatcaaaggccaggatgctgatgctaatattgacgcaaatgcaattcctttagaagaagagcatgtagtggcaaagtcagaggcaataattgaatcatttgatgatgaccggaaaacagaagattcgaaggaagatgctcagcgtactactgcaactgatgttgatgatgacatggaggagggagagttggcagaggaacctgaagacaagagtgacgttgatatgtcagagatcgagggtgaggctacagccgaacgtgctgctgtggaaccggaccaaagtcctataacacaacctggtgcagctgatgcctcaccaagcagaactgcagatgcatctcctgctcgtgaaccttcccctagtccggtccaagctggtgcatcttctcgaccccagaatactagcactgcaacagaggcacgtgaaccttcctctaacccagcccaagctggtgcgtcttctgaacagcggaacaccagtactgtagtggaggctgctgaaactcgttccagaacaatcaacttaagtgagagggccagacaaaacaggcaaaccaggtttcaacgcgcacaacaacctggcactgctcggggtcgtggccagcaatctgttacactcaggaaagatgctacgggtcgaggatcaaggggccgcggggggcgtggtcagtcctag

SEQ ID NO: 14653 - DNA, 387 bp, Zea mays
  Peptide Sequence Number=SeqID_56432
atggagctgcacatgcaagtacttgaagatggtcacgacaaaaggatgaagggcttggtccaccagcgtgctaggccatatgtcatgccaccaccacccaaagaaagactcaaagcgctacaggcgagttgctccgcgtgcacttatgctctgggtcaccgaatcgacctcctagcgcaattccaccaacttggcttcctgccctgctcagagacgaaaagaaacataagcctcaacgcccccgataggaaggaaggaaatgagaagcagagcgagtgggatactcgtcacatgggcctttacaatggccaatcgcgcttgaagacctgcaacatgagtgtaggatgttcgtacgaccgattgagatgcctcccgccgatcccatag

SEQ ID NO: 14654 - DNA, 141 bp, Zea mays
  Peptide Sequence Number=SeqID_56433
atgggtataatcacggggatcattgacagagggaaatgctgcatcttcctggagcaaaagtcatcacaggaggcgatcccccgcgcgcggggccgtctggaccgcagcggcaagcagcagggcggggtggagaagacctaa

SEQ ID NO: 14655 - DNA, 429 bp, Zea mays
  Peptide Sequence Number=SeqID_56434
atggctcaagaagtcatgagtcaagtttcaacctacaagatcccccaagaggtgtggtttgagctccaaaagacttatgcatcccagtctacgacaaggactatgaacacgaggatcgccctgacaacaactagaaaagatgagatggaatctacaaagaagatgcctatttcgcaatctagtgctgatttagcgttgaaaggcctagatcaactgcactactttcttggcattgagaagcgtggttttattcagaccgtggagctgcagacacttagaatgccccctgccgtgaagagtctttcaataagatggactcgtgacattgatgataggcgctctacaagagattttgcagtatatcttggtaaagattttggtgtcttggtgtgctcacaagcagcccacagtctcaaggtcaagtactaa

SEQ ID NO: 14656 - DNA, 1569 bp, Zea mays
  Peptide Sequence Number=SeqID_56435
ctgctgttatcaccccaacccaaatcagtttcgaaggtcaagttatctaacaatattcccaaagggaatatctcgagttcacctgcaccttctcctgaacaacctggagcaagcaatccttcatttcctgttggatcagatgcaaataatgaagtcacaacaccttttgatttgaacaaaggggaaaacagtaaacatgagaaatcgactgcaagtaagatgtctaacaaaggtataaatcgccgtgcaagttctcatgctgcaaatgtggataataatacaaaagaagtgcgaagctacttgatatctgtgctctcaaaaaatccaaaaggaatgggcctaaaggccttggagaaagttgctgcagatgcatttccaaatgcatcaaagaaaatagagagcatcgtcaagaatattgcaaattaccaagggcctgagaggtatgttctcaaaccagggttggaggtagaaagctctaaaaggcatgcatctgaaggagtaagatccatcagcgagaatattgaggaatctgctccaagcctaaagattgatgatcctgatatatgtgagaggattgacattgtgggctccccacttgctgtaacagatggaaaactcagtaatgatagtgaaggtaaggctggaacttccagtgacagtggaagtgacagcgatagtgatagtgacagcagtgacagtggaagtgatagtgagagccaaagcagaagtgctgcggaaactggtagtgggagtagcagtgatagtgacagtgatgcctcatcaagcagcaaggaaggatctgatgcaattgttgatattacaagtgatgatgacaaagcaaatacagcacacacaaaagtagtagatgaccttaatttgtcttcatcaccaagagatttgacaagacttaatgttgacgatgaacaaattgacattggaacaaatctggactacaggagtgcatcaccccatattgatctgaacaattttaatactggcaatgatgatgcagcagcagagggctttagttctggcaacctgaacaagccatctgaaatgccgggaagcaagaacatgacaaacaccagaatggattctatcggagttgataacaagcacaatgaaatgtctttcgtggacaaccttttcgatgattccatgagagcagccagtgagaactcacccaagggggaagctggtcaattgacagtgcagcatggcaataagagaaaatcaacatctaaggatgaatcaaaactcgtcccagtgaatattgccaaacccaaattaaaaaggtcttctggtagtgagaactccacagcaaagcctgagagtgccaaaaaggccaaacctgacgtaacatcaccaataggttctttatcagaacacaaaagaagtttaccccctgaaaagcataccaatgataggttgaacaaggagacggggaatgttagccgtgatgcttcacgagatagcagtcctgcccatgaaaggaagaccttcagctcctggaaatttacagaggatagatcagagcccaaatttacctatcccaacaatgcattctga

SEQ ID NO: 14657 - DNA, 255 bp, Zea mays
  Peptide Sequence Number=SeqID_56436
atggagcaccacttgcacgtggagaatgcccgtgactctctacggagttactcgactgagtttagagataagtttttggaagttctaattcaccccctcttaggcgtcaccgtttccttcacagctgttggtcacttggcacaccggacagtctggtgcagcctggtgaccattggcctggctgacgtggcccgcgcggattgcgcggccgaccaatggccagacgtgaggctaacacactggacagtccgatga

SEQ ID NO: 14658 - DNA, 819 bp, Zea mays
  Peptide Sequence Number=SeqID_56437
atggaggctgttaggtgccctatttcttcaccgtcgtccgccaagaagggatcctgcatgcaacaggcgtgggatgtgatgactggcggtgaagaattggtgatgggccttgaggaaaaaaaaaaccaacatgctcacatgatctctgcgaggaacggagatgacgccggggcacgccctctcgagcgtcgtcttcacgtcgttgatgaagtcgtagccgaagatgccactgttctccaccgccgtcttctccggcaaggccccacgcacgcccgcaaggacgtccacctggcctccttgcgcgccaggctcgcgcagcagggcaaggccggcgtggcgctgcgcctgctcctcgccgccgcgctcgctggcttcctccttgtcttcgccgcgcgcaccctggtcacgtcgcctgtcccgtcatcgccctcgtgcttgttggagccgcagccgctggtgcactacgccacgtccaacgcgacgccgcagcagacggcggaggagatcagggtggcgctgcgcgtgctgcagcgccgcacgccctgcaacttcctggtgttcgggctgggcctcgacagccccatgtgggcggcgctgaaccacggggggcggaccgtgttcctggaggaggacgcggcgtggatcggtagcgtgcggggcaggcacccggcgctggagtcccaccacgtggcctacgacacggcgctggccgacgccgacgcgctgctggggctccgcacccacccggcctgcgtcgcgcagcccgaccgaagaggcgtgaggcgagagaggcgagagccgcggcgcgtctgcgagtga

SEQ ID NO: 14659 - DNA, 609 bp, Zea mays
  Peptide Sequence Number=SeqID_56438
atggatcgagtacatgagcagcacctagacaggaactggacggacgtggacaggaaccggatggagatggatcgagtacaaaccatcataaaaaagtcaaaaagaagtgaaggagtttggctcaaaagagacagagtgggcttctccggacagtccggtgtgccccggacatgtctggtgctggcccgggcaattggccacaactggctgctctcaggtttttgctttggctcgctggctaaaatttaccagacagtctggtgtgcaccggacatatctggtgggccagacgacaaacgatcgacaacgcgatcgacgtcggccgcgtcagcacaccaacagtcaagaaagggtcaccggacagtccggtgcctacccgaaaaggaaagcgaccaatcaaccgatcttgtgaccgttgcataccagagtgtccggtgcacccacagacagaaggcaatctttagtttccaaaggaagaagcagtctccttggcttcttggggctataaaagaggcccatatgcgtgaatgcgtctatacccgtacaccaagcattttaagagcacactacagctcggaaactccgcggccacgctgttctagtgtttga

SEQ ID NO: 14660 - DNA, 594 bp, Zea mays
  Peptide Sequence Number=SeqID_56439
tatgaacaaatggtgctggaggatttgctgaggaaaggtcatgctgaacctgctaagaagattggggcaggagtcgaagcatttgagataggcaaccacccggtgtggaaaagtcactgcttctttgtgcgcaggactgatggatctgtggatgacttcagcttccgcaaatgtgtggacaacatactgcccctccctgaggactttaagatcggcaatggcaagaagtctggtggccaccaaaaggatggcggtggagggcgggcaggaggacgccgtggaggaggccgaggcggctggcgtggtggacggggccggggcaggaggggaggcagcatggactcctgcatgcaggcgttgaggcatcgtcatccatctcgtcagcgtctcagcgacgctcacgagccgcagccggccgcgacagtgctgtggtggttgaagttgaagtcagtgttgacgaaggtgacggcgaagccacagtcgaggaggcagtcggctagctccatgaacgagatcacgtggccctgcgccaggtacgggagcaacgactcgtacggcgtcgacgaccatcttttcttggtcttgacctcttga

SEQ ID NO: 14661 - DNA, 333 bp, Zea mays
  Peptide Sequence Number=SeqID_56440
atgtacaagctcagtggccgtggtggtgggcgcggcggcagcggcgcggcaaagcgcccgctgcccccccacggccgcggccggggcggcgcctcctctatcggcgggatggccgggccgccccgcggtcgcgccggcgccggcgctgcaacgcagccggcggggcgcgacgaggcgttccgcctcgagtccagcgggccgccagcctttgcggctataatacggctgacgcccgacctcgtcgacgagatccggcgggcggaggaggccggtggaggcgcccgcatcaagttcaaccctaacatgtacaactcgtcggagaactgtatatga

SEQ ID NO: 14662 - DNA, 903 bp, Zea mays
  Peptide Sequence Number=SeqID_56441
atgtttttcgacgggtcgctgatgaaaacagggtcaggcgcaggcctactcttcatctcgcccctcgggaagcacctccgctacgtgctgcgcctccatttcccggcgtccaacaacgtggctgagtacgaggctctggtcaacggggtgcgcattgccatcgagctaggggtccgatgcctcaacgctcgcggtgactcgcagctcgtcatcgaccaagtcatgaagaactcccactgccgcgactcgaagatggaagcctactgcgacgagaaggcacccgggggctacacgcacctactggtcgccatcgacaaattctccaagtggatcgaggtccggcccctaaacagcatcaggtccgaacaggcggtggcgttctttaccaacatcatccatcgctttggggtcccgaactccatcatcatcgacaacggcacccagttcatcggcagaaagttcctggacttctgcgaggatcaccacatccgggtggactgggccgccgtggctcaccccatgacgaatgggcaagtagagcgtgccaacggcatgattctgcgaggactcaagccacggatctacaacgacctcaacaagttcggcaagcgatggatgaaggagctcccctcggtggtctggagtctgaggacaacgccgagccgagccacgggcttcacaccgttctttctagtctatggggccgaggccatcttgcccacagacttagaatacgattccccgagggcgagggcctacgacgaccaaagcaatcaagctaaccgagaagactcactggaccatctggaagaggctcaggacatggccttactacactcggcgcggtatcagcagtccctgcgacgctaccacgcccgaggggttcggtcccgagacctctag

SEQ ID NO: 14663 - DNA, 1584 bp, Zea mays
  Peptide Sequence Number=SeqID_56442
atggttacggtcggagcttgcgtttgtagagcggctccatgcttgcttgattcggtggtcgacgggacggaggacgtcagcgttgggtttgggggcatcgacggtgaaccgctcgccgatgggtatgatggtggcaagaggcgcggtccgcgtcggcgtccgacgaggccgaccgtttttcagaaggaggtgggcgcaagaactgctccaccggcgatggcgtcggagccggacagcaaatctgagcatggggtgtcgaggctgcacttcctggaggagagggacgaggagacgctgtcaagaaggttgataaagctcagccaaaacaacaaggtcagaagtgccactgagctgtttgattcaatgcgcgcatctgggctgcaaccgagcgcacatgcctgcaactccctgttggcttgctatgtgcgtagaagtccactggcggatgcaatgaggatgtttgagttcatgaaggcgaaaggaatggcgacagggcacacgtataccatgatactcaaggctgttgcgagcaatcagggttatgtttctgcactggaaatgttcgataagattgaggaggaggagggttcaaagaaaatcattgacgtaattgtttataatacgatgatatctgtttgtggaagagcgaaagaatggatgcttgtggagagactatggagaaggctagagcaacattctttgaatggaactttactgacatacgatttgttagtcagcatattcgtgcaatgtgggcagtctgagttagcaattgctgcatatcaggaaatgctccagaagggacttgatccgagcgaggatataatgaaggctatcattgcatcctgcactaaagaagggaaatgggagtttgcaatgtcaacatttagtagaatgctgagggctggcatgaaacccagtttaattttgttcaactcaatcatcaactcactggggaaggctggtcaagatgaactcgcctttaggatgtaccatctgctggaaaaatcaggccttaagcctgatcaatatacatggagcgcactgttgttggcattatacaggtccgggcgatgctgggattgcctaaagcttttccatggaatcaaaggcaagcatccgacactcttaaatgatcatctctacaacactgctttgatgtcctgcgaaaagcttggtcaatgggaacatggtttgcagctgctgtggttgatggaaaaaagaggactgaaattatcagtggtatcttacaatcatgtgataggtgcttgtgaggttgctagcaagccaaaagttgctcttaaagtgtaccagcgcatgattaatcagaggtgttcgccagacacattcacacatttgtctgttatacgagcttgcatctggggatctctttggactgaagtagaggatatattggaggaggtggctccagactcttcgatctacaacgcggtcatccacgggctgtgtttgcgaggcaagaccgggctagccaacaaggtgtacgccaagatgcggagcatggggctggtaccggacggcaagacgagagcgttcatgctgcagcacattgctacggactag

SEQ ID NO: 14664 - DNA, 570 bp, Zea mays
  Peptide Sequence Number=SeqID_56443
atgactgttgcagcaagaccatactccaggagtggagctgtctatatgaagagtgtaggtagagacaattggctaatattgtacaggttcagtttgcaggatcgtagcaacagggttcaaagacgtgtgtttgaaagggcagttgctgatgatcagcatgatggaagtcagtggaaactggattctgccacttctatctgtgaaaggatgcaaggccagctacctcatgctgttgctgttgtggagaaaagacatgcgaagtcggattttccggctgctagagcaacaggaaatgcagcagacaatgatacgtctggtaaagtttttgacagtaggatgaacaacggtgcttctcactgccaatcagtttcagaaacttcatcagatggtggacttcatgagaagctgaagtccatgctgactggaccaagtgtttttgttggtgatgaaaatacttcagaacagggtggactgaaatcaaggatatttattcctcatcagtcaccagaagaactatcggataaccaaatttatgaagagtatgattttgaattaagtggaatcagatga

SEQ ID NO: 14665 - DNA, 522 bp, Zea mays
  Peptide Sequence Number=SeqID_56444
atgacggagtccctggtgcggaacaagccggggatggccagcatcaaggagatgccggtgctgcaggacgggccgccgccgggcggtttcgcgcccgtgcgctacgcgcgccggattcccacctcgggccccagcgccactgccatcttcctcacggccttcggcgccttcgcgtatggcatgtaccaggtcggtcaggggaacaaggtgcgccgggcactcaaagaagagaaaattgctgctcgtagtgctatactaccgatgctccaagctgaagaggatgaaaggtactatccaatactgtttgccattatcattggtgttatatattctctggcgttcacaaaacacttaaaaggtccatggcgctcatgtagatttgtcaaagagtggaagaagtatcttgaggaggaggcgaggattatgaaagatgttccagggtggaaggttggcgagagtgtgtacaattccgggaaatggatgcccccggccaccggtgagctccgccctgaggtgtggtaa

SEQ ID NO: 14666 - DNA, 1932 bp, Zea mays
  Peptide Sequence Number=SeqID_56445
atgttcatcgagagcttccgcgtcgagagcccccacgtgcggtacggcccgacggagatcgagtcggagtaccggtacgacacgacggagctggtacacgagggcaaggacggcgcctcacgctgggtcgtccgccccaagtccgtcaagtacaacttccggaccagaaccgccgtccccaagctcgggctgtcagccgcttgtctctgtctgacggatgatgccaacttttctgttctggtggtgcagggtgatgcttgtggggtgggggaggcaacaacgggtcccacgatgacggctggggtctttgccaacagggaggggatctcatgggcgaccaaggacaaggtgcagcaagccaactactacggctccctcacccaggcctccaccatcagagtcggcagctacaacggggaggagatctatgcgccgttcaagagcctccttcccatggtgaacccagacgacattgtgttcggaggctgggacattagcaacatgaacctggccgactccatgaccagggccaaggtgctggatattgacctgcagaagcagctcaggccctacatggagtccatggtgccacttcccggtatctatgatccggacttcatcgcggctaaccagggctctcgcgccaacagtgtcatcaagggcaccaagaaagaacaggtggagcagatcatcaaggatatcagggagtttaaggagaagaacaaagtggacaagatagttgtgttgtggactgcaaacactgaaaggtatagcaatgtgtgcgctggtctcaacgacacgatggagaatctactggcatctgtggacaagaacgaggcggaggtatcaccatcaacactatatgccattgcctgtgtcatggagggggtgccgttcatcaatgggagcccccagaacacctttgtgcctgggctgattgatcttgctataaaaaacaactgcttgattggtggtgacgacttcaagagtggacagaccaagatgaaatctgtcttggtcgatttccttgttggtgctggaataaagcccacctcaatcgtgagctacaaccacttgggaaacaacgatggcatgaacctgtctgcccctcaaacattcaggtccaaggagatctccaagagcaacgtggtggatgacatggtctcgagcaatgccatcctctatgagcccggcgagcatcccgatcatgtcgttgtcatcaagtatgtgccgtacgtgggagacagcaagagggctatggacgagtacacctcagagatcttcatgggcggcaagaacaccatcgtgctgcacaacacctgtgaggactcgctcctcgccgcacctatcatccttgatctggtgctcttggctgagctcagcaccaggatccagctgaaagctgagggagaggacaaattccactccttccacccggtggccaccatcctgagctacctcaccaaggcacccctggttccccctggcacaccggtggtgaacgctctggccaagcagagggcgatgctggagaacatcatgagggcctgcgttgggctggccccagagaacaacatgatcctggagtacaacggcacggagcctgtaattgtattgtatgataatgtgatcgaggtggtcgagctacgcctcgccccggccttctctaccttcgtcgatgtcgcctgcgtcgtcgggagcgaccgcgagtacccgatgatcatcaagcagctgcacgagattgctcttcggtcgctcaagcctctctcgccaccatcgccatttcccaccatcctccaacagaactgtgtgcgaggcaaattaaacgcgggaaccagctacatgcgcacgctgggtgtattggggaacaaatttgtgcacacaaatacgagggagaaaggacagcagatgagggagaaaggacgcctttaa

SEQ ID NO: 14667 - DNA, 399 bp, Zea mays
  Peptide Sequence Number=SeqID_56446
atgtccggtgaggtccggaccgtccacaacgagatctcgggacagggaatatcctggcttgagtcgggggcgtacaggagtccaacacagacacttgtcgggattttgtcaggcacgcctactctccccgcctgggcggaaacccgatgctgccacgtgtctgtggcctgtgatgaaagccgaagagcagggcctgacgtaaggattcaggctcgtgcgatctctgcatttattgcggagatcgtgcgccgcctgaccgcccttctcacaggcgaagtgccgactcggcatttaatgcgccccgtccactctggtggcaggcgtcgaccagagcgggcggcatacctgtccaatcaaagcagtgggcagtacgcccgcaccgctgcatgctcgcagtag

SEQ ID NO: 14668 - DNA, 180 bp, Zea mays
  Peptide Sequence Number=SeqID_56447
atgggggagttgaagtatttccttggatctaaatcagcacttcgagagggtacttccatcgaccaaataaagtttgggctatggtaccccaagggatccacctttgatctaattgagtatcctaacgccgattatgccgaatgtaagattgatagaaaaagtacatcagggactttttag

SEQ ID NO: 14669 - DNA, 237 bp, Zea mays
  Peptide Sequence Number=SeqID_56448
atggggaatggggatgacgaagaaatgtccccgcgattgttcgtggggatccccgtggggaatttgtttcgttgctcggatggggagatattccctgacggagaatttctcattgccatccctagatgtggatcagggtgcacaggggaggtggtggtggcacccgactatggggcttgtggcgcgttagcccgcaacacacttcttcttcaatttgtgatactcatggtccgttga

SEQ ID NO: 14670 - DNA, 291 bp, Zea mays
  Peptide Sequence Number=SeqID_56449
atgtcggatcacctaggaagtgatcaatggggagtcatgatccctaggcagaacgggaattacgactcgtgggtaaatttctcttattcaaggatctccacatattggagtctcttgcagccgtacaatgttgatgggaggtacaacttcaaagaacaacaagggagaggagtagaacgcgcgcaagagcacaagaacaactccacaaagcaagaacacaaatacaaagtaacagcatggctcaatctcatgacaaatggcgctcagatcactttgatgttttttctctaa

SEQ ID NO: 14671 - DNA, 390 bp, Zea mays
  Peptide Sequence Number=SeqID_56450
atgcaggatgttgcacggtgtgcactctcgcagtattgctcgttgtttagtagggtggctgacgatcttaacctcaggtattaccctcgccgttcaactggcagtatagggagtgtgattgtctcacctattggcgaaggcaatcctaggttaagcggcacagtcaacctagttgttgtgctcaacaccaagctggaccacgctcttgaagagttgagtagggtttgtgttgagatcgtggagctacgggctgagcgtgtggagcaccatcaccaggaggatggttctcccgcccccgctaggactcaacacctgtaccgctcaccgccacgtggacaccatgtttatggcactcctaattgtaggaccaagatagatctagatccttag

SEQ ID NO: 14672 - DNA, 1509 bp, Zea mays
  Peptide Sequence Number=SeqID_56451
atgtcgcgtacgaacaccggcggcacgtcggcgcgacagaacagcgacgagtctgtctccccgaggtgcgtcctcgacgacggcggctataggatgagcaccagcaacgccggcagtagcaccacgaccaccatggccagcggcagcagtaccccagcaacgacgagcgcgtcgtctccagctacaacggtggcggtgacgacgtacaccgacccatccgcgctactgaaggcggccgggcggcgcgacgggtcggcggcgccgccgtggaaggccgtggccgaggcgtggcggtccagggccaagcgccagctctctgtccgcatcccgtcgttagggcccacgatgtcgtcgacactgcggcgtctgagcagccgccggacggacaacatcgaggtgcacgagttctgcgtcctcaagccgaccctccgcactttctccctcgccgagctcaagaaggccacccgcaacttcagcaaagagaacgtggtgggcaggggagggttcgccaaggtgtatcgaggcagcctccccggcggcgagctggtggcggtgaagaagctgacggcaacgcagggggccgaacggatggagggcttcctgtcggagctggggcacgtggtgaacgtgagccaccccaacatcgccaggctcgtgggcgtgggcgtcgacggcggcgagcacctcgtgttccccttctcccgcctcggctgcctctccgggatgctccacagcaacagcggcgcagagcccatgccgtgggaggcgaggtacagggtggcgctgggcactgcgcgcgggctagaatacttgcacgagaggtgcgcccggagaatcgtgcatagggacatcaagcccgccaacatcctcctcatggacaactatgaacccctgatctgcgatttcgggctggcgaggtggctgccggcgaagctgacgcacctgcaggtgagcgtgttcgagggcaccttcggctacgtgccgcccgagtacacgacgcacggcgtgttcagcgagaagacggacgtgttcgctctcggcgtcgtgctgctcgagctcctcaccggccgccgcgccgtcgacaccgccaagctcagcctcgtcgcatgggcaaagcagtacctcgaagtcgacgacgacgacgaggacgagaccctcaagatggccgacccagcgctgggcggccggtacgacgccgagcagctccggaacatggcgtgggcggccaagctctgcgtccacgcctccccgcaccagcgcccacagatgagcgagatactagcaggagagggggcgcatctacgtggcggcaggggggcccacggggtcgacgacgagctgctgccggagacggacggctacgacggcgacgcggcgcctgggtacgtggatgatctgagccgccataaggcgctcgccttcgccgtcgacgtcgacgtggactcggacgaggattccacgccaccagtgcgacacgcacccgccaccacgtttgttcgtgaagtgtag

SEQ ID NO: 14673 - DNA, 327 bp, Zea mays
  Peptide Sequence Number=SeqID_56452
atggcgtcgtttccagtcacaatgttcggcaggaacatccatctgtgcagtgcgccgctcccaatgcaaggacaaagcgcagcagcccaatgcgtcggcaatggtgagcacgtctgcggcaaggggctgccctccggcttctaccatggtggtgtcctcaccttcgatgaagccagcgcccagcgggcaccagcagggagaggcaaacatcaggagcaagagagccagaggatgaagaagagggcaaaagcgacatttcaccaccttctctttcctcagccaatgtcatcaaagaacagtgtccgccagcaaaattttcctaaatga

SEQ ID NO: 14674 - DNA, 1200 bp, Zea mays
  Peptide Sequence Number=SeqID_56453
atggcgtcgcggctcctgccgttggtcgcggcgctcctcctcctcctcctcctgacggcggcgtcgtccgaggcgacgctgcacccggtggactacctggcgctgcaggcggtgcggcgggcgctgtcggacctgccgggctcccgcttcttcgcgtcgtgggacttcacgggcgacccctgctcgttcgcgggcgtgtcgtgcacggccgacggcgcccgcgtggagacgctggcgctgggcgacccgcgcgcgggcgcgccgggcctcgggggcgcgttcccgtccgcggccgtcgccaggctgccggcgctgacgtcgctgtccctcgtgccggggcgcgtcacgggcggcctccccgccgccgtggccgcgctcccggcgctccgcttcctcgcgctcgccgggaacctgctctccggcgacctcccgcgcgcgttcgcgccggcgctgcgcaccgtcgacctcagcaagaacgggttcacggggacggtaccggcgccgctcctccagctgcggggcctgcgcacgctcgtgctctcgcacaacgccctctcgggcgagatcccgcggtcggtgcgggcgccgctgctccacctcgacctgcgcgggaaccggctgtcgggcggggtgccgccgctgccgggcacgctggcgtacctgtcgctggcggggaaccgtctgtcgggccccgtcggcggcgtgctgcggcgcctgccgaggctgacgttcctcgacctcggccggaactggctgtcgggcgaggtcccgggcgaggtgttcgcgttccggcgcatcgcgtacctgcagctgcggaagaacgccttctcgggcgagctccggcccgcggggcgcgtgccggcgggcgccacggtggacctgagccacaacgcgctgtcggggcgcgtgccgcccgagctggccaccgccggcgccgtttacctgaacgggaaccggctcgcgggcgaggtgccgcgcgaggtggcggcggcggcggaggccgggcggatgcgcgtgctgtttctgcaggacaacttcctgacgggggtcggcgtgggcggcgcgctgccggccagcgccgccgtgtgcgcgcactggaactgcgtcgcgccgccgccggctgtggtggccgcgtgccccgccaagggcggcaggggacgccgccggccgcaggcgcagtgccgcggccggacggggtga

SEQ ID NO: 14675 - DNA, 2172 bp, Zea mays
  Peptide Sequence Number=SeqID_56454
atgaggaacagcaacctcagccccaagcaagatgaattgcttctagaagatatatggactcttttaagagcaggaagattagaagaggcatctgacttgtgccgttctgctggccaggcatggagagttgccactctttgtccttttggcggcataaatatgttcccttccctgaatgcattgcacaaaaatggaaagtacagaacactacaagccatggaattagaaagtggtgttgggcggcagtggcgtctttggaaatgggcatcatattgtgcttcagagaaaatcgctgagcaagatggaggccgttatgagatggctgtatatgctttacaatgcagtaacttaaagcgtgtcttgccaatctgtactgactgggagtcagcttgttgggcaatggcaagatcctggctagatgttcaagtggatctagaattatctcagtaccaaacaagtagaccagaaaagcaacttgatgacgacatgaatggagcccaaagttcagttggtccagaaagttggccataccatgttcttgatcagcaacctcatgatttaactgctcttctgcagaaactccactcaagtgaccttgttcatgaaactgtctctcgagcatgccgagagcagcatcgacaaattcagatgaatctcatgagtggaaatatatctcatcttcttgaccttctatggtcatggttatcacctgctgaagagaaccataataatactgcaaggccccttgatgaccctgagatgatacggttcggggcgcatattgttcttgtgctgaggcaccttttcagtgatgggatggatgatgagttagatgaaaaactggttactgtcggtgatctcatcatcaacatgtacgtgaggtatttgttctcagaggatcaagaggagttggttggaatatatgcctcacagcttcaacatgacctttgcattactttgtttgtagaaatgatggaactaaggttaaatagcagtttgcatactatgtacaagctcttcctttctgctgtggagtatctgccattctcatctgataatgtatccaaggcttgttttgaagagatcatcgagagggtgctttcaagatctcggcaaacaaaacccactaagtatgatggggatttctctgatgttgcgcatcaacatcacctgcaatcacttcaaaaggctatggttattcagtggctttgcttcacaccaccatcctcgattccagactttcaaatgatcagttggaagcttctgatacgggcattgacacatagcaatacactgttcagggagttttctctgatatcaatgaggagagtccctgagctaccagcagggccacacaagttgcttgccattttagctgaaccgttaaagcaaaaagaaaatttaatttcacgggaagatccggagcatgaatattactcccttgacgcgacttaccgcagttggcttaaaattgagatgatgaatgccgctgtttctcctgagatgctttcggcagaggaaaagggtcaagctgttgctgcagctaaagaaacactgaacttggcatgttcgttactacgcaatgcaacatcatgcacagctttgacaagtgcactatattcaactgtcagtgaagatgatgtgctgcatcgcctgttgaaggtggatgtccaggtctcttctagagacccctgctgtattgaagtcgctcttcgctgcttagcagcagaaggtgatggatatgggcttcatgaagccaacgatggaggtcttcttgctgcagtcatggctgctggctttaaaggtgaactcagtcggttccaacctggagtttcgatggcaatttcacggcttgatgcttggtattctgaccggagtggttccgtggagagcaccgctgcttacataattcgagggctgtgtcggaggtgctgccttcctgaaacaattctaagatctatgcaggcatgtatcgcactctccgcggctggtgatgatctagattactctctagataaatgtgacgaacttgttgagttagttggttcagccgagtctggaatgatgcatttgttcagccagcagcagttgcaggagttcctgattttcgagagggaatatctcatatgtacaatggagtttgaggaggaccggttgccttgtgatggctaa

SEQ ID NO: 14676 - DNA, 2172 bp, Zea mays
  Peptide Sequence Number=SeqID_56455
atgaggaacagcaacctcagccccaagcaagatgaattgcttctagaagatatatggactcttttaagagcaggaagattagaagaggcatctgacttgtgccgttctgctggccaggcatggagagttgccactctttgtccttttggcggcataaatatgttcccttccctgaatgcattgcacaaaaatggaaagtacagaacactacaagccatggaattagaaagtggtgttgggcggcagtggcgtctttggaaatgggcatcatattgtgcttcagagaaaatcgctgagcaagatggaggccgttatgagatggctgtatatgctttacaatgcagtaacttaaagcgtgtcttgccaatctgtactgactgggagtcagcttgttgggcaatggcaagatcctggctagatgttcaagtggatctagaattatctcagtaccaaacaagtagaccagaaaagcaacttgatgacgacatgaatggagcccaaagttcagttggtccagaaagttggccataccatgttcttgatcagcaacctcatgatttaactgctcttctgcagaaactccactcaagtgaccttgttcatgaaactgtctctcgagcatgccgagagcagcatcgacaaattcagatgaatctcatgagtggaaatatatctcatcttcttgaccttctatggtcatggttatcacctgctgaagagaaccataataatactgcaaggccccttgatgaccctgagatgatacggttcggggcgcatattgttcttgtgctgaggcaccttttcagtgatgggatggatgatgagttagatgaaaaactggttactgtcggtgatctcatcatcaacatgtacgtgaggtatttgttctcagaggatcaagaggagttggttggaatatatgcctcacagcttcaacatgacctttgcattactttgtttgtagaaatgatggaactaaggttaaatagcagtttgcatactatgtacaagctcttcctttctgctgtggagtatctgccattctcatctgataatgtatccaaggcttgttttgaagagatcatcgagagggtgctttcaagatctcggcaaacaaaacccactaagtatgatggggatttctctgatgttgcgcatcaacatcacctgcaatcacttcaaaaggctatggttattcagtggctttgcttcacaccaccatcctcgattccagactttcaaatgatcagttggaagcttctgatacgggcattgacacatagcaatacactgttcagggagttttctctgatatcaatgaggagagtccctgagctaccagcagggccacacaagttgcttgccattttagctgaaccgttaaagcaaaaagaaaatttaatttcacgggaagatccggagcatgaatattactcccttgacgcgacttaccgcagttggcttaaaattgagatgatgaatgccgctgtttctcctgagatgctttcggcagaggaaaagggtcaagctgttgctgcagctaaagaaacactgaacttggcatgttcgttactacgcaatgcaacatcatgcacagctttgacaagtgcactatattcaactgtcagtgaagatgatgtgctgcatcgcctgttgaaggtggatgtccaggtctcttctagagacccctgctgtattgaagttgctcttcgctgcttagcagcagaaggtgatggatatgggcttcatgaagccaacgatggaggtcttcttgctgcagtcatggctgctggctttaaaggtgaactcagtcggttccaacctggagtttcgatggcaatttcacggcttgatgcttggtattctgaccggagtggttccgtggagagcaccgctgcttacataattcgagggctgtgtcggaggtgctgccttcctgaaacaattctaagatctatgcaggcatgtatcgcactctccgcggctggtgatgatctagattactctctagataaatgtgacgaacttgttgagttagttggttcagccgagtctggaatgatgcatttgttcagccagcagcagttgcaggagttcctgattttcgagagggaatatctcatatgtacaatggagtttgaggaggaccggttgccttgtgatggctaa

SEQ ID NO: 14677 - DNA, 2985 bp, Zea mays
  Peptide Sequence Number=SeqID_56456
atgggtgcactgtcatcttgggatggggacgcttctaacaggagcgctcctcatttctgccggtggaacggcgtgacgtgcagcagccaccagcacggcagccatgtcactgccttgcgcctgcgagccttcggtctggaaggcaacatctcccagtcgcttgggaatcttagccacctccaaaccctggatctgtcgaacaacaacctagaaggcgagataccttccagtatcggtaacttgtttgctctccattttctcaacctaagtgttaaccacctgtccgggaacgttcctcagtccatcggccgtctttccgaactcgaaattctgaatttccgcgacaatgacatcgtaggaagcattccttcttcagtgctcaaccttacaggactcacaatgcttagtgccaccgaaaattacatgacagggaggattccagattggttgggaaacttgacggatctgacagatttgaacttggcatggaataacttcagtggacagatcccacaagctttaggtaagctacctaaccttgctagattgactatgcaaggtaatcaattggaaggtttaatctctcctacactgtttaacatttcatcccttgagaatttaaatctcggctataacaagctttcaggttctctacctccaaatattggatttacacttccaaatattgtagcatttagtgtatgctataacaaatttgagggtccagttccatcctccctgtccaatatttctgtgctccaacagctcatcctccacgggaacagatttcatggccgaattccacctaatattggtgtccacggcagcttaactaatcttgaattaggcaacaatcagcttcaagtcgtggatactaaagattgggattttctaacccctttggtgaattgcagtcatcttaaatatcttaatcttgagctaaataacatttctggcattttgccaaatgctgtttctaatctctcctatgagctggaagcgttactgatgggtggaaaccaaataaccgggaccgtaccttcagggataggtaggcttcaaaagctccaaatacttgatctgtcagataacctgttttcaggcgccgtaccttcgagtataggtaaactctccagcctagacagccttgtgctattcagtaataaatttgacggggagatcccttcatcacttggaaatcttacaaaactaaccgagctagttttacattccaatgacctgcatgggagcatgcctccaagccttggtaatatgacaatcttagaatccatcgacctttcatataaccgcctcagtggccaaattccccaagagatcttaagcatgtattcccttacaaaatttctaaatctctccaacaattttttcagcggacccatttcccaacagatcaggctcttgatcagtcttggtacaatggatctctcaagcaataatttatctggtgagattccacatacccttggtagctgtgttacactgcagttcctgtatttgcaaggaaacctcctacaaggtcaaataccagtggaactgaatgcactaagaggcttagaagttttggatatctcaagcaacaacctgtcaggacccattcctgattttcttggtgacttccaagttctcaagaagctgaacctatcattcaataacctatctggtccggtgcttgatcgaggtatcttccacaataatgccacctctgtttcactttctggtaatgccatgctttgtggagggcctggtttctttcaacttccaccatgctcaactcaagcaacctatggccgttccaatcatcaacgaatgcatgtcttggccttttcctttactggagctttagtagtctttgtgtgcatcactgtatgctacttcatgaaaagggcatctgacaaagcaagtgatgctgagcatgggttagttacgcttcctagaaacaaatacaagaggatatcatatgctgagttatatgaagctacagattcattttccgattcaaatctggttggtcgtggaagatttggtactgtatataaaggaattctacatgatgacagtaatacagaaactgtagcagtaaaggtactcgatcttaagcaacaaggagctagtaggaccttctttactgagtgtgatgccctcaaaagaattaaacatcgtaaactggtcaaggttataactgtgtgcgacagcttggataacaacggtgatgaattcaaggcgcttgtgctggaattcattcccaatggaaccttggatgaatggttgcacccaagtgcacttgtcaccaacagagcaactgggagtctaagcatcattcagaggttaaacatcgctcttgatgtggcagaagcattggcatatcttcatcaccacagcaatccatcaattgtccactgcgatattaaaccaagcaacattctacttgatgaaaatatgactgcacatgttggtgactttggtttagcaagaattctaaacatggatgcatgtgaacataattctggtggaagtagctcggctggaattcgaggcacaattgggtaccttgcaccagagcatgccatgggactcagagttggtgtagaggccgaggtatacagctatggagtgctgctgatggagatacttactaaactaagaccaacagatcatatgtcttttgatggggccacaagccttgtaaagcatgtcgagatggcatacccttacaggctgctggaaatactggatgatataatgctacaaggaagcacaagtcacagcacacaagagacgatggatatggtcatcattcctgtcgtgagaataggactagcttgttgcaggactgctgcaagccagcgaattaggatggacgaggtggtgaaagaactcaatgacattaagaagacatgggaagaccatttcgcagaaatcaccggggcaaccggcagagcggcggatggacgagcaatccattga

SEQ ID NO: 14678 - DNA, 360 bp, Zea mays
  Peptide Sequence Number=SeqID_56457
atggctggcggcgtgggcgcaaaatcagcggcggtcgtggggattccagcaaaatcacggcggtcgtggcaggctgcggcgcgcggggtgcgcgggagcaggggtttcacagcggctgtggcgcgcgggcgtgcggaggacggcgtggcgtgctgtgcgggaggctgttgcaggtgcgggcagggagcgggggtttcacagcggttgcggcgcgtgcggaggacggcgtggcgtgctgtgcaggaggccgttgcgggtgcgggcagggagctggggtttcgcggcggctgcggcgcgcgggtgcgggaggcagttgctggtgcgggtagggagcgggggcagtctacactgcccccttaa

SEQ ID NO: 14679 - DNA, 198 bp, Zea mays
  Peptide Sequence Number=SeqID_56458
atggctgtaagtatgttcccttacttgatcatatgcaaaatccttctctcttatacagaggagtgcatctgttccagattggtgtgcataccttctaaaattcgcattgatcttcggttcaacaatcattttgcgcccaaaagagtcgacatatattttctactcgttgagtcatactatgatgaaatgttggactaa

SEQ ID NO: 14680 - DNA, 222 bp, Zea mays
  Peptide Sequence Number=SeqID_56459
atgcctccatatcctttgcgctacccacccaaatctctgctaaagtgtttgcaaaatgttgtggtaacaaaaacaaaagagttcaagaatttagtttccaactgttcatcttacatgttcttctacaacagcatgaacaacagcatcagtttatcatacaatgaccgaacatgtgcagatggctgtcttgacttcaatggtgatgttggaggtgaggactaa

SEQ ID NO: 14681 - DNA, 267 bp, Zea mays
  Peptide Sequence Number=SeqID_56460
atggccggaggcccaaatttcccccaacccaatcggccccaatctccgcttctcccctctcctttcacatttcgcgaaactgtaagtggcggccggcggacaccggcgaggaggcgacggaccgacggcgcactccgtcgaggggacgcggaagaggtattcggcaacctacgagccaaggaggcgacgcggtgcggcgctgagcacggtgccggaggcccggagcggcgggcgcaaccggcttggcggggcggtgtccgtgcttga

SEQ ID NO: 14682 - DNA, 744 bp, Zea mays
  Peptide Sequence Number=SeqID_56461
atgctgaagccggcaaaggtggacaggatgatggtggttacaacttgcagccacatctacacaccacaaaaaatctcaagtcttgtatttaagaagattactaacagggttgcatacaaaacagtcatcaaagctcacagtgatgttgtgttaaaggctaagagcatggctgacaaggttgagtgggcaaataagactaaagttgttattcaaagcaaagggggttctttcaagggtccaagtattgagggtggttcaatgaggcaaatcaatttggatggtgctttagtgaatatggactatggccttgatccaacaatagggaaagccataatacaggcagctgaggaggtcgtagagggaaagttggatgatcacttcccacttgttacctggcaaactggcagtggcacacaaagcaacatgaatgccaatgaggtgaatatggactatggccttgatccaacaatagggaaggccataatacaggcagctgaggaggtcgcagagggaaagttagatgatcacttcccacttgttatctggcaaactggcagtggcacacaaagcaacatgaatgccaatgaggtaattgcaaatagggcatctgagatccttggacacaagggcggtcagaagtttgtgcacccaaatgaccatgtgaataggtcacaatcttcaaatgatacatttcccactatgtttattattcatggcgttgacatttccagggattcagattga

SEQ ID NO: 14683 - DNA, 1112 bp, Zea mays
  Peptide Sequence Number=SeqID_56462
atgaggcgcctccagttcctggccgccgccgccgccgccatcttcctcctcgcgcttccgctgatggcgacggcccagccgaagctgaggccggactactacgccggcgtctgcccgaacctcgagagcattgtccgcggcgccgtgcggcagtccgtggcgctctcgccgctcgccgccccggccacgctccggctcttcttccacgactgcgcggtcagggtacgtgcgtgcgattataatacggatgatgccgatgagagaactgatgccgtgccggtgccaccactctcttgtgaatttaagggctgcgacgcgtcggtgatgctcatcgacccggccggcggcgacgagtggcggagccccgacggcgtgatgctgaagccggaagggttcagcacggtgatgagcgccaaggcggcggtggacagcgacccgcagtgccggaacatggtgtcctgcgccgacatcttggccctcgccgccagggactccgtgttcctgagcggagggccagactacgaagtggagctgggcaggttcgacggcagggtgtcgagtggtggcagcgtcgtggttcctcatggcacgttcgacctcgaccagctcaacgccttcttctccagcctcggtctctcccagaccgacatgatcgcactgtcagggggtcacacgatcggcgcggcgtcgtgcggctccttcgcgtaccgggtgggcgcggatccggccatggacccggcgctcgcgcagcaggtcctggcgcgctgcccggggggcgggccagccgggttcgcgttcctggacgccacgacgccgctgcggttcgacaacgagtactaccggaacctgctcggcgggatggggatcctggcctccgaccaggtgctgtacgccgacccgaggtcccgcggcgccgtcgagcgctacgccgcggaccaggccgccttcttcggggactttgccgcggcaatgacgaggctcggcagggtcggggtccgcacggcggccgacggcgagatacgccgcgactgcaggaaggctctgggcctggtgggctgtgtcctgtgtggctccaagatgggtgtcatatctgttgtgaagggaaatgaaat

SEQ ID NO: 14684 - DNA, 492 bp, Zea mays
  Peptide Sequence Number=SeqID_56463
atggagagggcacaccgaagggtgtcccaagtagctgacggcaaggcgaagctcaccgtggcactcgacggggcatgggcgcaacggcggccacagaacaggcagtggacgtcggcggggcagtggcggagctctccggttcacgcaggcagagcgagagagagggcgagggggctgggcagaggcacaaatgagagagggggatgtgggcgagtaggggcgcggggctcgggcgtggccgaagaacgtgcggtcgtgggcgtgtacacggcgggggagatcatgggcgagaggttagagacagctaacaggtggggacagcgggatagagagagagagggagcgggtgcgcgcgagagaaacagcgccgacaggactggcccacgggacagagagagggggaaaggagtgagcgcgctggttggcgccgacaggcggggaccgcctgtcaggcacaaggggatgcgcgggcgcgcgcgggggctagactaa

SEQ ID NO: 14685 - DNA, 1458 bp, Zea mays
  Peptide Sequence Number=SeqID_56464
atgcccctccgcctcctcccgccgcctcgccgcgccgccgcgccactcctcaccccgaccgtctcccacctcgcgtgcctcctcctcggccaggggccggacacacctccgctcctcctcgcgctactcccggtctgcccggccctcctcacgccgctcctctcccgcctcctcctctcgcacacgccgccgctcccggcgctctccctgtaccgccgcctcctcgcgctccgccacttcaacgtgccggaaagctccctcccggtcctgctccgcctcctcgcgcgctcccgccgccacgcccacctctcgttcccgctgctcgagtccctcccgtacacgcacccgcacctcctctccacgcccgcgctcgccgccctcctctcgaccgcgctctccgcatcagcacccggcgcgtccttcgacgctgccgtcacctgcttcgaatccgccgctcgcgtctgggcgcgcgccggcagggccttcggcgccgccgagctcaatgtgctgctccgcgccttctgcgcccgcggccgcgtggccgaggcccgcgctctcttccaccgctactgcgacgcgtacccgcccgacacgcgcacgttcaacacgctgctgctcgggttcaaggaggccggacacgtccacgcgctggacctcttctaccatgacgccgtgctgcggggcttcgtggcggacgccgtgtcgtactgcatcaggatggacgcctactgcaagaaaggtaggttcctggacgccctcgagctgctcgacgaaatgcgcagcaagggggactacaagcccacgctgcaggtgttcaccacgttgatatacggagctgggattgtcaggaacgcggcgagagcacgcgccctgtttgatgaaatggagaagtggggagtgactcctgaccgcggtgctcataatgcgctcatgggcgtgtatgtgagggttagggacttgcagtctgcgatggcggtgatgagtgacatggagaggaaggggatcggtctagatgatgttagctacaacacgatgctttgcgggtttcagagagttggcgacttggaggggatctggaaagtgtacagcaagatggttagctcagggttcatgccgaggaccaggacgacaatgctgctcatgaaggtcttctgcgagaatggacgacctgaccttgggctggagctgtgggattatctgatgggaaggggctgtgtacctcaccagcatgcattggacattctggtcactggtttatgctgtagaggtgtggttgctgaggcatacaggtgtttcagggaaataatcgagacggggatggcaccaacagagcgagcattcacggtcttggaagggtttttaaggcggaaacgggaacacgggaaggttgaggagattaggcaaatgatgaaggctgcccagctgcaggggcatcagattgaagaagaggctacgtga

SEQ ID NO: 14686 - DNA, 651 bp, Zea mays
  Peptide Sequence Number=SeqID_56465
atggacagccaggataactcatggatgtgggccccgggtatggctactgatttgcttcgtattcacagaatcctctccaccttgttggagataaaggggataatcatcgtgaaatatataaaaggtagagataacatccaggaaataaccagatcattgctgagagctggtgagcaagagcttctatgcaccttggaagagccaatggacgagcactgcgtacgagacagcaaggactcagttcggacaacaatcgtggagcatgataaggtcttcagacagcaggggtcaaagttgaatctcaagagcagtccttcaacatcagggacaaatcaatcagctcgccttggtaatgcacaacactcaactccccagcaagtaactgaagattcgagtcttcacgaatgcaagccagtaaactgcctcagcctctttagtgaagaaaactcaacagtcaaagaaagatttcacagggagacccataaatcagttgaagacgaaagttggagtgcatctgtagagagtgatcttgacctcaaactaagcattgggcccagttcacattcaccaaaaacacagcactggaaagctgaagcctccattgaaaatggcatgtggatctgtggaaatacaggcctcaagaaaaaatga

SEQ ID NO: 14687 - DNA, 936 bp, Zea mays
  Peptide Sequence Number=SeqID_56466
atgactggccctaagcgaggcattgagttgtgtggcagtattataattgaatttgacatgaggatcaagatgggcggagaagagaaagacgatccacaactgattgatggtgcatcagtggtactagacgacagatgcatgcctaatagcgcttatgcattcacaagacgcatctacggggatagtggagcggttgacataactgtatcacgtcttgactttgcagttgaggcgacgatagaagtacacatatctgaagtagaaggcagtttcagtttgtgtgtgggctgttttaccagtgggttatgtgaagaaatccagctctttaagggcgtcattattgagccgagtgccttaaggagacatgttgttgctgcagtaatagatacttggatggatgtgaagttgaagttgccttcgtccgtgtgcccccactctctctgcgatgtgggcccgcctcatcagcgccagttgccttcgtccgcgcgcccgtgcctctacgccgtgggcccgccctatcagtctcgtcttctccgcaaccgtggtggaccagcacacacgcacgcacgccgagaagcccagccacgtcgcctgcccacgcgccccagctcctttttgagccccgcccgcacccgctctatctcccctgcctcatttcactcacgctcgctctctttcgcgctctgccgccgtcgccaaagcccaccggagatccgcgcccgccgtgccagccatccaagccgcccggagccgcgccaggccgtcccaagcaccgtcccaagccccgccagtatgttcgtcgagtcctcctcaccagttccagccagccccggtgacctcagatccctcagagcctgcgtctgccccgtctccgacgacttcgccgctgcggatagagcaacgccaatcaccgcgctgttcacccctgcgcgctag

SEQ ID NO: 14688 - DNA, 339 bp, Zea mays
  Peptide Sequence Number=SeqID_56467
atggggcttgctgcatccatgccgaggtcgagcgtgggggagacatcgtgcggtgaagggggtggccagcgtcagagatggagaatctcgccgaccaagggagctagtatggaggcaaggccttcaccggattttggagcatggaggcgcttggaggaaggcgcctgctcacgctattgggattcgagggaagcagggaaccggcatggaggggaggtgcagggagggggaaagcgctggtcttggagaagaagttcctctacgcaaggaatagagaggaggggggctggagccgaccttggacgcagccatggaggagctcaactgctgcacctgtag

SEQ ID NO: 14689 - DNA, 282 bp, Zea mays
  Peptide Sequence Number=SeqID_56468
atggagaagctcgccgatcaagggagctggtatggaggcgaggcctcaccgaattttggagcagggaagcgcttggaggagggagatgaggagtcccgctggggaaggcgcatgctcacgctgctaggatccgagagaataagggaaccgacctggaggggaggcgcgactaaggcggaaccggcaccgacgaggtgggtggcgagctcggctggggtcaagcatggagacgaagtgaagaagagggtgacagggaggaggaagaagtgctgtggtggctag

SEQ ID NO: 14690 - DNA, 297 bp, Zea mays
  Peptide Sequence Number=SeqID_56469
atggagtccagtgaaaatcttgttttattgtccagtgaaaacccagttgttggagccatcatggagtcttacattcctgcctcggtcgagccatcctttgttgaaagtgcaaatccggttgctggagccatggtggagtcctacattcctgcctcggtcgagccatccaatgctgtttcatcaagggattccattgcggtgaaggaaaagaaaaggaagagaggaaaggaggttgattattcatggaagttcaccgaatttggagttattcgatctcgagacaaatgccgaaattag

SEQ ID NO: 14691 - DNA, 216 bp, Zea mays
  Peptide Sequence Number=SeqID_56470
atggctctgtacctcttcgctgcgtcaaccttacaaaagagaccctctgtttttgtaaaactaatccacggtccagaccagtggcgcgctgtgtcttggcgatcttgcgggttagcccttgtatttcctgtagaagagcctgtgactggggatcctggtgaccagcagataaaagtagctgagcaggagctcattgaaggcaagttgtgcccttga

SEQ ID NO: 14692 - DNA, 534 bp, Zea mays
  Peptide Sequence Number=SeqID_56471
atggagaggggtcgggccgcctccattgcagagttcagggacgtgaagcgagtgtgtggctgtgcgcgtctaacggaagacgcgccaacgggcggacgcacaaaaccagaacgtgagtttgaagatgagtttagaactgacgtgtgggcccctaatgttatgttacacaccgcgaacccactgtcccgcgaagggtgtcgccattttgaggtctttgaacagagcaatgaggacctcgacatgtgggttttccaagttgatgatgtgcccttcaagcaatctgttggtgcactttttgatcggatgtggggtagtcacagtcgctccgtggctagggagagggttgcctgggcgatggagcaggcgcagaaggatgaggaaaccaaatatttggattgcttggaaggctcgctggctactctggacgatgtcggtgttgaaacgggctcggaggagcagtcttcgcgggcaggggttgatataggcgagcccagcgctacggagacttctcaccgttctgctggcgaagtttag

SEQ ID NO: 14693 - DNA, 438 bp, Zea mays
  Peptide Sequence Number=SeqID_56472
atgaacaaaaacacactggcactcaaggtgccatcacacacagaactccggctccccctccgcaggtacgaacaaccccacaagactggggagcctgcggagcgatcgtgggccgacgggcggcccgccgccacccggtccgacaaccgcggcaaccaccctcgccccgggcggcgaagcagcttcggcagcggcttcggggcaggggttacgacggaagggctctcacccgcaggggacgagaaccagccattcaggccgggagacggagacccagggctactggcggggttggcaatctcgtcggtagagaagccacccccggctgccgacgcctcgaagcgcgctggcaggcttccgccccagtcagaaccgcccagagcatgggcaccgcactcgcggtacgcagcgcaaccgtcatccggacggaaggcgtag

SEQ ID NO: 14694 - DNA, 693 bp, Zea mays
  Peptide Sequence Number=SeqID_56473
atggatcctaagggaaaggggatagtgatcaatgacaacgagaaggagaagaggcgcatcaagaagatagtctactacgacgacagcgacgagtcatcttcttcccaaaaggacaactgtaacaccctgaatttggggaaccgcccagctactcgtgctcctgtcgatcccccacccctccactccccgacggttggtggccgtctcgccgaagtggcccagccggtgcagccgagatggcgaagggcgatgggcgcagaggaggaccgcgggggcttcgaccggccatgcggcgacatcatccatggtgccgacaattggggcatggagctctggcggtgctgctccgcccaggcatcgtccgacgtgctcaacgctatcgacacgtgcgctacggtgctgcagaccgtgtggctcgtctccaagacatgcgacaacgtctctaggaaagagaagcatgagatgatcgtgtcttgccccttcctgctgtacctcgtctcgtcacaggataaggctgtgcagatctttggtctgaaaacttgtgagcgggagtttcttattgctaccaccaagaggcttcttaatcttgtttcgttaaaggcgattgacatatcaggtgtatcaatgctggttattgatggactgaaatgtttaatagaccaccatattaatgacaaaatattttctgattag

SEQ ID NO: 14695 - DNA, 837 bp, Zea mays
  Peptide Sequence Number=SeqID_56474
atggacaaagaaaagaagaggaacataaaagaaaaagcccagaattctttccccttcatttctcccttcctgggccgctcggccaccctggcccacgcgccttcgcctcccccccccccaccgcaccctgctcgcgctcctgggccgctgcgcgcgcccacggcccagctggaccgcgcccctggctcgctcccacagcgcgcgttgccggcccaccccgcgcggcccagcgcgcaggcacccacacccaggtcgccaggccagcgccccctccctggcccagcaaccgcggcccacccagcacgctcgcgaggacgcgcccggccatcgtgcctcgctcccgcatgggcgaacgttgcccctgccctcgcgccgccgggcccaccggccaccctaagcaactattcatcttctttaggcactcttcgtgatttgcgctcccattccgccaagaaccgcccagctactcgtgctcctgtcaatcccccacccctccactccccgacagttggtggacgtctcgccgaagtggcccagccggtgcagccgagatggcgaagggtgatgggcgcagaggaggaccgcgggggcttcgaccggccatgcggcgacatcatccatggtgccgacaattggggcatggagctctggcggtgctgctccgcccaggcatcgtccgacgtgctcaacgctatcgacacgtgcgctacggtgctgcagaccgtgtggctcgtctccaagacatgcgacaacgtctctaggaaagagaagcatgagatgatcgtgtcttgccccttcctgctgtacctcatctcgtcacaggataaggctgtgcag

SEQ ID NO: 14696 - DNA, 348 bp, Zea mays
  Peptide Sequence Number=SeqID_56475
atgggggctgtgatcatcacgtgtaaactggcgagcagaaaggagagtgtgcataagagcgggggagcacgcaagcgggaaggaggcatacgagcagaagcggaaacaagggaggaggcacatgggagatcgcagtggctcagggaaacacgcgtgcgtatgcatggggtaggcggcctgatgcgaggtggagacggggccaaggatttcgcggcgtgggaggagctaggcccgggcaagagaaggggaagaaagaaaggaacaaagaataagggcagtgctgaagttattaaaaagttgggtgatgctactctacttttcgctgaagaaaaatttaacgaggtctaa

SEQ ID NO: 14697 - DNA, 240 bp, Zea mays
  Peptide Sequence Number=SeqID_56476
atgtcgaggacgcagcagcagcagatggcggcgcagctgcatgagcaaagccaagcatgcagcagagagagacaggcaggagagacagaaaccggccacgcggtatccatcgtcaccgataaacgatttttaatcacgtttccctacacaggcaggctgcgtgttgaaggccatgccatgtggagcggcggcaccaccaccagtaggagttggcaggacggcacgcctccgctgacctga

SEQ ID NO: 14698 - DNA, 228 bp, Zea mays
  Peptide Sequence Number=SeqID_56477
atgattgactacctcttcctcatggtccttgtgcatgaaggcaaactcaaatgccagatggagtccatttctttcggtgagttcagcttggctctggagaaggccatgggcaaacatggaagccagccgaagcaagttatcaagttctgggaccagggcggtttagaggatctgagagcatacgattgccatcgatctgtatcaatgatgaatccaacagttagctag

SEQ ID NO: 14699 - DNA, 1095 bp, Zea mays
  Peptide Sequence Number=SeqID_56478
atgggaaggtggacaaaggccgtcgagggggccttgatggtcaagtcaatgagaaagcttccaaacattgttctgcatgaaagagtcaaagtattgggtgagcaacggccagatagtgtatttcaaggattaaggccaatagcatcacctgatgaattacaaaaggcaaacagagcaaagaaattaattgagaaaaggaccgctgcaaatgaagagttaaaacatgattatctgaaacattcatccattggatacctcaacactcaagtagaggtctcgctttgtcgaacattagctttgctgcagcgatattgggatgcactgcagattatcaaccgaaccctcaaacttggaaatgacgcactcactggtgacaaaaaagaggaactcagatccttgggtgctcaaatagcttatagagctccagatcccagtcatggctttaagtatgtccgttacgttgttcagcagcacccatattctcttgccgcatggaattcctactataaggtggtatcaagaatagaggacaggtttccacatcatttcaaatatctccttcggacaagagaagcgaatcctgactgtgtgcctccaataatcatatccgggcatcgatttactgctataagtcagcatcagtcagctgcccgggattaccttgaagcttataagctggacccagaaaaccctcttattaatctatgtgtaggcactgccttgattagtttggcccttggcttcaggcttcagaataagaaccagtgcatcgtccaagcttttgctttcctgtacagataccttcgcctttgtgataacagtcaggaagcctcgtacaacattgctcgagcgtatcaccacattggcctgaataccttggcagctgtttactacgacaaggctttgtcaaccgaggagaaggatcatcccatccccaagcttccgtacgaggctggttcacgtgcgccagaggatctgaggccagggtattgtgatgtgcgaagagaggcagcgttcaatctgcatctaatctatatgaagagtggagctaccgatcttgcgagacggatcctaaaaacttactgcactgtctaa

SEQ ID NO: 14700 - DNA, 465 bp, Zea mays
  Peptide Sequence Number=SeqID_56479
atggagatatccccccacagtcggaatgcgggtgtgaatgctgcaactggagtagcccatgcagatgatagcctttttgccgataatgtcgagatagccgagtgcaagggcgtcgagccgttgtcgaggtgtcgtgcgtcgggtagctgtggtcgatatagctgtcgagaacgccgaaaaagacaagccgggcaagtcgccggcacaagcgcaacacgtgggaaggcctgcgatgcgccaggaggtgccaaggtgacggtggcacaggagggcgccatatacaaagttggcgacacagtcgtgaaggaagtagccgttgacgaggacgatgatgtcaaatcgccgtggacgaggcctgctccatgtttgccacgcctagaaactcgtcgtagacgaatgcacgtgccgatgttgccagtaccgcacgtaccaggtagaaggccccaaccaagtgtcagcgtctga

SEQ ID NO: 14701 - DNA, 363 bp, Zea mays
  Peptide Sequence Number=SeqID_56480
atgacgctaattgacatggcgaggactatgcttggagaatacaagacgcttgagcggttttggtcggaagttgtgaatacagcttgccatgccataaaccagctctatttgcatcacctcctcaagaagacatcttacgaactcctaaccgtggcaactgcaactgttgaaagggctttttctacaatgaacattatcaagactgaaagaaaaaataaaatgggtgatgaatggatgaataacatcatgctatgctatattgagcgggatatgtttgtagatattcatgatgaaaagattttgaagcattttcaaggcttaagaactcggaagataaatttacctcgcagcatcaactcatga

SEQ ID NO: 14702 - DNA, 210 bp, Zea mays
  Peptide Sequence Number=SeqID_56481
atggagcagggcaaggagcgacccgtgacgcagatgacaccactcctcccccatctggacatcatcgtcggaggaggaatcaagatgctcgacaatccaaaccatcatgtcaagcaggaaggcaggggaaagcctaagctaaagcccctacctggcgcgccaaatgtcggagcgaagtatgccttgaatggtgacgtgtggtggagttaa

SEQ ID NO: 14703 - DNA, 327 bp, Zea mays
  Peptide Sequence Number=SeqID_56482
atggccatcgcctcccgcgtctcccgcctcgaggccgacgctgcgcgcctccgccgtgacctcgccgaccgtgaccgcgccgaggccgacctccgcgcctgcctcgccgactccgacgcacgcctggccgccgctctcgacgagaacgcgaagctggcgaaggaaagggactcgctcgcggcgacggtcaaaaagctgaccaggaatctggcgaagggcatatttgtccccaacatggatcgttttaatgaagagagtgagcatggccttactgtcgccaagagatcaaatctgaacccgctgcttgatgaaaaggacaagccatga

SEQ ID NO: 14704 - DNA, 801 bp, Zea mays
  Peptide Sequence Number=SeqID_56483
atggcgtccccgcggaggcgcggacccatccgagccgcgtatgcagaaccagatcatgtgccatgcttgccggacccttctgctctacccgcgtggcgcgtccagcgtctgctgcgcggtttgccaggccatcaccaccgtgccgccaccagattcccgaggttcacagcgcgatttgttgcgtggcggctatctggatcgagtgcatctctaggaggaataggggctcctgcctgtgtggtcccatacgtcagcgacgtcagggatatacaggcacgctgtattaccctgcccgcgcgggcccgcccgacagtgacacaagagcggctgcaattgagagcacaggtgggccggcgaggtgtaaagcccaactggacgaaagcaggattggagatggctcagcttatatgtggtggctgtcgaactttgctgatgtatactcgcagtgcagacaccgtaaggtgttcatgttgcaacacagtgaaccttgttagaccagtgaataatatagctcatgtgaactgcggccagtgccggacaactttgatgtatccatacggcgcaccttcagtaaaatgtgccgtgtgcaattatgtcacagctactggagtaaatactgtggcacccaccccatctgcgaggccaacatcagatgggtcttcatatagtggctcatctacttctgctcctaaatctcaatctcagaatgtaactgttgttgttgagaaccctatgacagttgatgacaagggaaaacttgtcagcagcgttgtagttggagtcacagctgggaaagagtga

SEQ ID NO: 14705 - DNA, 279 bp, Zea mays
  Peptide Sequence Number=SeqID_56484
atgacgggatttgggcgcgtgggcgtgcgggtcgcggcgggctgtgcgggcggttcccaagcgcgtagggaggcggccgttgcgggcgtgcggtgcggcatggacggcatcgcgcggcgggcgtgcgcagcggctagcagggacggcgtgcgggtcgcggcgggattcgcgggcggttgcgggcgtgcggcgcggcatggacggcgtcaagcggtgggattcgtggacaactcgagcgggggccggctgcggctcgcgccgtcgcgcggaggagggtag

SEQ ID NO: 14706 - DNA, 204 bp, Zea mays
  Peptide Sequence Number=SeqID_56485
atgggttcgaaaaccctgagtatgaagggtactttcgcaagtcttacccgactaaggaaaaagactctcaaggatatgctggcttttgggaatcaaggttcgtccatcaacatcgtcttgcggagtagtccacctgttacgtcatcttgggtcgacttggctttgattcttcgcctcacgtggttaatcaacgtacctaaatga

SEQ ID NO: 14707 - DNA, 480 bp, Zea mays
  Peptide Sequence Number=SeqID_56486
atggcagcctcctcctcacgtggcgccgccgccgctgccgctgatgatgacgacgagccctacctcctgggcttcatcatctccaacatatacgctactaccgcggcaaggagaggaatgcttggaacggtttcagctgctatcgttgcagtaactattggattgccaatgagttctgttgtactttgcttgatgggaatcttaacagcagtcgccattgctgatgtaacaatagatgcttcaatcgcaaagaatagtattgataagccgacgctggctccagacatgcagagcctctgtgcattctcatcatctctaggtgcacttgttgggtatgctacaagtggattatttgtccatcatcttggagcacagggtgcattaggtgttatggctatacctcctaccacagtagttttccttggatttttcatatatgagctgaaaacacatcgacataattttaaagagaagaagtga

SEQ ID NO: 14708 - DNA, 2235 bp, Zea mays
  Peptide Sequence Number=SeqID_56487
atggcggttgctgcatgcggcggcggcggcggacgtggtcgctctcctctgtcaagactgtcacctcagctgggctgcctcctcgtcgtctcgctgctctgcctccgcgccgccgtcgtctgccgcgcgcaggtccaggagcaggggcagctgcagccgctgccggcgctggagatcgagacctacaactacacgtcgtttgacgagggcaactcgcgggagcagcgggagctggcgttcagcagggatgcccgcatctaccagggcgccatccaggtctccccggacaccggcaacgtcggcagctaccaggacatcatggtcaacaagtccggcaacgtcctcctccagcgccgcttcaccatgtcgtgtcgtttcaacagcaccttctccatcaacgtgttccacctcccggactcgtcgccgcggcccggcgagggcctcgccttcgtcgtcgcgccgtcccgcgccgagccgccgccgggcagctacggcggctacctcggcctgaccaacgcgacgctggaggccagcagcggcggcggtccggcgaggagccgcttcgtggccgtcgagttcgacacgctgaagcaggactacgaccccagcgacaaccacgtgggcctcaacgtcggctccgtcgtgtcggtcgcgacggcggacctgacggccttccgcatcgccaccaacagcaccggccccgccaactacacggcctgggtcgagtacgacggcgcggcgcggcgcgtggcggtgtacatggccgtccgtggcgagcctaaaccggcagccccggtgctcgactcgccgctcgacctcagccagcacctgcccgagcaggcgtacatcggcttcaccgcgtccaccggcgccgacttcgagctcaactgcgtcctcgactgggcgctgtcgatcgagatcatcccggagaggaagagccgggcgtgggttgtcgctgtcgccgccgccgtgccggcggctgccatcgcggccagcgttgccgccttcttcctcgccaggacgctgcgggccaggcgggccgtggagaagcggcaggagcggctggagcggcggctcaccaacctccccgggatgcccagggtgttcgcgtacgacaagctgaggaaggccaccggcaacttcgacgagcggctgcggctggggagaggcggctacggcgtggtctacaagggcctgctccccgccgacgacgcccggccggaggggacgatggaggtggcggtcaagcggttcacccgggacgacggcaaggacgtcaacgacttcctccaggaggtcgacatcatcaacaggctgcgccacaaaaacatcgtccctctcatcggctggtgcttcaataaagggcagctgctgctggtgtacgagtacatgccgaacggcagcctagaccagcacctgttccggcggggcgcgcacgagcagcggcccgtgctggactgggcgagccggtacgcgatcgtgcgcgacgtcgcggcggggctgcactacgtgcaccacgagcacacgcgcatggtgctgcaccgcgacgtgaaggccagcaacgtgctgctggacgcggcgtggcgcgcgcggctgggcgacttcgggctggcgcgcgtgctggaccagggccgtgagtcgttcacggacgtgcacgtggccggcaccttcgggttcatcgcccccgagtactccgtgggccaccgggcgacgcgggagacggacgtgttcgcgttcggcgcgctcgtgctggaggcggtcacggggcagccggcgctgcgggacggcggcggcgacggcggggggtgccggctgctgtcggactgggtgtggcagatgcacggccgcggcgcgctgctgggcgccgtggaccagggcctcggcgccaccgggttcgaccacgccgaggcggcccgcctgctgctgctcgcgctggcgtgctgcagccccaacccgggcgaccgccccgccatgccgcaggtgctgcaggtcctgtccaaggcttcgccgccgcccgaggtgccgccgttcaagccgcagttcgtctggccgcccgaggggggagcgcaattccggctcagcgacatcgagaggaccacgaccggcaccggcgacgccgacgccgacggcgcgtccacgcgggccacgcgcagcacctcctacgacagcttccggccgcacaacacggccgacagcagcgacggttacttccccgccctctcatccggccgttga

SEQ ID NO: 14709 - DNA, 414 bp, Zea mays
  Peptide Sequence Number=SeqID_56488
atggctccggccagcgggtggggccgggcggtggggaacacgcggtcgttcgtgggcaacgcgctgggcggcctccgcgggtggagcaacctcgcctcctggaccgtcgccggaaccctcgcctactacctctgggtgaagcccgcgcgccagctccagaaggagcaggagctgatgttgttcttgagtacctgtaggcatagctgtggcattagcaattgttccatgtggatcctgctggtgctcgaagtcgggctgtatctgtgcctgttgcggatgcaggaggagcgagccgctttggctgctgcaacggatccttatcgttacgtcgagaagcggaaaccgattcctgatccacaggacactggccttatctatgggaagaagagggagcctaccaaatctcaagattag

SEQ ID NO: 14710 - DNA, 615 bp, Zea mays
  Peptide Sequence Number=SeqID_56489
atggtgtccgacacgttggtaatggtggcgctgacaggccagaccgccagactgggcaaaatccaggcacccgtgtgcctgccggcttcaaggttcaggccgtccctgcccaggggtgagtcgcaggccacagcctcaccggcgggcggcggctgcatgtctttcgaggaggcgcacgacggcggagccactgtccagctagccggaggacgtgcccggctgcgtaacgatgcaggaacaacagaagctgttgacgtgtttgttgatggcaacgagatatatcctcaggcgccacaggaagctccgcctcgctcgaccttgggcctcggtctcaggagaagtctccgcctcgcccgaccccagggctcggcccccgcatcggcctcggacaatggactccgcctcgcccgaccccagggctcggcccccgcctcggcctcggaagatggactccgcctcgcccgaccccagggctcggcctcgacctcgacctcgggcggaatcgcgtcctcgctcggcctcaacctcgacctcggaggagtttccgcctcacccgaccttgggctcggaccgaccacgccacagggggatcatcattaccctacccctagctag

SEQ ID NO: 14711 - DNA, 528 bp, Zea mays
  Peptide Sequence Number=SeqID_56490
atggatggggaggaactagatgatcaagggatcatccttgattccaccatgcagcaggcaaaccaaacaccgagattggtggtcccatcgtatttggtgatgatgtggcgggcgtcgcagatgttgctgagttggttctttatgggaacccatgacttcgtggactgtgagggtagcgtctccctgctccatgttgatgtgaagcaggttatggtacattgtccacgcctccggttcgactggatcaagcatggaccagaccatcatggctattgtggccatgttctattcgaggatttcatgactggcaagaatctacgccttgtgttggcactggcgctacttgaaagcgacaatggtgtagaatgtgaggcctcccgtgcttgtggtgatagacgcgttaaagtcggcgaggcggagttcgccaatggcggtggtgaggaagtcgagggagccaaaggtaatgcggcttccaagcgcgaaggtctcactaccggtgaaacacagatgattgagccatcggagtga

SEQ ID NO: 14712 - DNA, 1956 bp, Zea mays
  Peptide Sequence Number=SeqID_56491
atggatggtaggaaaaggaaggggaaattcaggaattctctcaggcgtatggctatggagtgcctgtgctctggtgagcagttgaaggcgtcagatgagaccatgcggtcatctgattctacgatcacaaaggatttctcggccagtgggtactcttctcagaatggagagattgagcagtaccttgataatggcaacatagaggaagccgagttgtcgctccgggagggcatttgcctaaattatgaggaagcaagggcattgctaggaaggctagaatatcaacggggtcatgtagaggcagcactccgtgtctttgatgggatagacatatctgcattagttcctaagatgaaaatctcaattgctagaaaaacagaccgtcggaagactcattcacagtgggattccccaccaatgcccttgcatgctgtcagccttctcatggaggccatatatcttaaagcaagagcacttcatgatcttgggaaagataaagaagctgcacaagaatgtagaatgatattggatattgtggaagcagctgtacctgagggcttgccagcaggctttgggaaaggctgtaaattgaacgaaataatatgcaaggctgtagagttgctccctgagctgtggaaatcaggggggttttcacttgaaaccatttcttcatataggaggtcacttcttaataattggaatcttgatggagagacaatagcaaggatacaaaagaaatttgctgtttttctcctatatagtggttgtgaagcacgccctccaaatcttcattctcagttggacggttcatttgtacctcgcaacaatattgaagaggctatccttcttttgatgattcttttgaggaagtccaatctcaagaggattgagcaagatccctctgtgatgcatcaccttacttttgcactgtccatgtcaggacagctaattccactggctggacagtttgaagaattgttacctggtgtgttagacaaaaaagaatggttgtacagcgttgcattgtgttatttagcagaagaagatgatctgagtgccctgaatctactcaaaattatactaaaatctggagaggactccgttcaactcatagaactgcttctagcttcaaaggcttgcattgagatgagtattcatactgaaggtgctttttatgcaaggagagccattgcaaatatgcagggaggatgcaaaccaatggcaggacttgcaaacctattgcttggtgttgcactttctaatcaggctagaagtgcaatatctgatacagatagagcttcttggcagtgcgaagcactggaagcccttgggaatgctgaaaaaaatatacatgggaaagattctagggcattatacagtctcagccttgaaaatgctgtgcagaggaaattagaattagctgccttttatgcaaagaggctggtgaaacttgaggctggatcagagttgaggagttggctccttttagctcgaatacttagtgctcaaaagctgtttgctgatgctgaaacagttgttgatgctgctctagatcaaactgggaaatggtgtcaaggagatttattgcgaaccaaagccagaattcaggctgcacaggggcaatttagagaagcggttgaaacatacacccaacttcttgctatcattcaacttagaacgaaaagtttaactgctggagtttgcttgccaaagtctttgccagtctcgtctgctactccatcgacgatgtcatattcagttgtgcctccttttgtgatcatgatgagcatgtggaagcctactgtttcatggagaaggctcaagctcgtcgttcttgatagggtactagtggtgctggtactggaggatcttaggggagtttggctacgactatggaggccaattgctcatgctgcttcattgccttgcaccctctacacctacaggagatgctag

SEQ ID NO: 14713 - DNA, 648 bp, Zea mays
  Peptide Sequence Number=SeqID_56492
atgaacgggtgcagtatatttgctgttgtcataagtcctctcatcgctgtgcacgtggacaaagaaaaccagatccacatactcaaccaaaaaccaaaacatcatgaaaagctggaggaagaaattattgatgcaaaatacactctgacatgtgacagaattgtgagcttgaaggacaaggcaaggaagattgaagaaagcattgagctgactagaagagacatggttcatcctacagaggtggaaattgagctcaagaagaggcttgatcaactaactgatcggttgattcagaaacaaatgcagcatctcttgcgattttgttgccagtttttttttgatcagtatgggttttacagtggagtccctatcttcagagaaggcagctctgtcaatgagaatcaagacgacaatgctccctccaacgcttcaggccacagacatggtggtatcagccgtcatgcatccacatcttctgttgatgaccgctccataaagtctggtgacgattctgatggggccgagagtaccaatggcagaagcagtaacacggagatctcgtttctagaaaatgataccgtctggataccacctcaagcggcagataaggaggatgaggcccagagtggatacataatgccaagctga

SEQ ID NO: 14714 - DNA, 717 bp, Zea mays
  Peptide Sequence Number=SeqID_56493
atggggcatggaaaagtagagctgaagaagattgagaatccaacaaaccgccaagttaccttctccaagaggcggatggggttgttcaagaaggcaaatgaggtatccattctttgtgatgcgcaaatcagagtcatcatattctctggcagtggtaggatgtacgagtactccagccctccatggagaatagcaagcgtctttgataggtacctgaaagcccctagcacccatttcgaggagatggacatccagcagaaaatcatccaggagatgactaggatgaaggatgagaggaacagtctgaggatgatcatggcgcggtacatggcggaggacctggcctcattctccgtgcaggatctgagcaaccttgagcagcagatcgagttttcgctatacaaagttcacctcaggaagcaagagctactcgaccagcagctgctcgagatccgccaaagggagatgcacatgccagcagagcagggcggctacttgtgcctcatggtcaaaaacctacggtcattcaacctaagccacattcttgactgcttaaaactcaacttcaccaccacctccttgctccatcagctgtggacacgaggaattgttgttcaggatgtgatcaacacaattggagggcatctactagcagttcatctactgccaatttgcatccacaaaaaatttcaggacattactcttcttattcgttag

SEQ ID NO: 14715 - DNA, 165 bp, Zea mays
  Peptide Sequence Number=SeqID_56494
atggctgcaggccaccacgtggccgctcctcatactggtgctcctcaactgcatcaagagggcatcttggggaagaagcatggtgccaccaagagcgttgttgttcgtatgttccgcgttgttgtccagtgtgtagaggatctcaagctatcaggttggctctga

SEQ ID NO: 14716 - DNA, 582 bp, Zea mays
  Peptide Sequence Number=SeqID_56495
atggagatggatgaagaggagatgcaacttgttgaagaaggaatgcgggcatccatgatgaaatatgacctgaacaggagaaaatcagtccgcagtttcaagttgcagcaacaaatttgcttgaaagcttaccttggcctgagaagctgcggaagccgtcgatgcgttgcagcgaacccccgacggtgtcctgccgtccggattactacaagtaaaaaactggttcaagaaacaaactatgaacacggaaagagatttgatccaaggattactacaagtaaaaaactggttcaagaaacaaactatgaacacggaaagagatttgatccaaggattactacaagtaaaaaactggttcaagaaacaaactatgaacacggaaagagatttgatccaaggattactacaagtaaaaaactggttcaagaaacaaactatgaacacggaaagagatttgatccaaggattactacaagtaaaaaactggttcaagaaacaaactatgaacacggaaagagatttgatccaagaattcctgaaacaaactatgatacaaggaaagagaagtgcatgaagcggtga

SEQ ID NO: 14717 - DNA, 384 bp, Zea mays
  Peptide Sequence Number=SeqID_56496
atggccgagggcgttctcaccattggctcgcccttctggaagaggttgaacatacatgagcatcccggggtccgcgggtgggcgcttgggcccgaagaacttggccgcaaagtaccagacgggacggcggagtgcgcgcgcgtggctggggacgggacgacgcgcggccggccggctggggaggagacgacggcgcgcggatgggctggggaggagactgcgcgcggccgggcgactggggaggagacgacggcgcgcggatgggctggggaggagactgcgcgcggccggccgactggggaggagacgacggcgcgcagatgggtctgggaggagactgcgcgcggcggctggatgttttggtcgccgctgctcgggaagtaa

SEQ ID NO: 14718 - DNA, 465 bp, Zea mays
  Peptide Sequence Number=SeqID_56497
atgcctatgcattcaccaatattctattttcatcagggaccacagggatctaaatgcttacatctggggatagatgacaagagggaagttgtcggcactactgtcgttgttcgggagcttttttacaatcaaccagtacggaggaaacaaatgcaatctagtgagaaaagagaactacatcatgtgaagaagtgtgtccttcaaattgcgcttattcatccacagatttcactcagactgcttgataatgacagcgaagatgagctgctatacacagaattttcttcatcccctttgcctcttatatcaaaaacttttggggatgatatctccagatgtctccatgagataactgcctctgaccagggctggactctttcaggtcatatatctgggcctgcagatgtgttttgtacgaaggagggaggtcctagaggtagtttatgtggtttgggacatgtctaa

SEQ ID NO: 14719 - DNA, 504 bp, Zea mays
  Peptide Sequence Number=SeqID_56498
atgtggatgctactcgtgttgaacgccaggcacaattttgaagccaagttcactgacgcttgttattggcatcaggtttcacggttgcgtgagtaccagggtgtagattcacgttttgatgtgattgcaagacaataccttgaaattgtatgggtaatctttccggtgttgctgccattagtttgcttgctaaccatggtcgagcttcagaaactagagagcatgcagtggacaattcaccagattgcaattttgtcattccaaaaggcaaatcaaagtggaattgataataacctagatcgtgcaaaattgggaaaattgggagacctaagaaattcgtggaacatgctctctaagcaatacaaggaagaatatgagaaatgcatagaagaatcgaagtcaccagattatgataaactgtataaaggtctggaggtgctagctgatcttgacaagcatgcaaattctacggttatcatacctctcactggttctcccttgtaa

SEQ ID NO: 14720 - DNA, 528 bp, Zea mays
  Peptide Sequence Number=SeqID_56499
atggggtgcaggctcatcgtctaccattactgcctctccgtgctggttcctaccaatattcagcatatagttgccttttcagggaatgcatcacaaggtggtaccacattacccatgatctacgtgctcggagactccctggcgcctgtcaagaacaacaataacctggtgacactgctcaaggccaacttcctacgaaacaacatcgactacctagggcacaaggccaccggctgcttcagcaatggcaagaactccatcgacttcctcggtacgaagaaggtaggggaaaagcagggaagtaggtcgtaccacggtgcctcgtgctatcgccaacgagggagctcgctcaacaattccttgttgatttcctcccgtgcacgagtgtccctgcagccacagggagaccacatcgagctgcaccagaagcgccatggtaagcacttggaccacgagttgattggtactaagggcaagaggtttgtcaagaaacgctatgctgagaaggcacagatgaagaagacataa

SEQ ID NO: 14721 - DNA, 186 bp, Zea mays
  Peptide Sequence Number=SeqID_56500
atgtccgtgctaagctgcccttccctgggcgtggtccatctctttgggcgtggcgaggaggccggcaccggtggcccggcaacaggggaggtggccgcgctgtgccagctcgacatgcagcagatgtcgtcgtcgtccgacctcgagcagcagcaaccagactctgcatcccttgtggaaatgtga

SEQ ID NO: 14722 - DNA, 135 bp, Zea mays
  Peptide Sequence Number=SeqID_56501
atgcgtgtagaagaaaggaaaaaccaccgcgtatcgtcgggccccgacgacatccgtctacccctagacgatgttcgtctacccatagacgacgcccgtctacccccgaacccgttcgactaccccgtgtattag

SEQ ID NO: 14723 - DNA, 321 bp, Zea mays
  Peptide Sequence Number=SeqID_56502
atggctacagaaagatgcaggaccgacgtcaagtctgctttataccatacgggggtggattacgatgcatttttcaccatacttatcactgtttcaacaactacgaccataccatcaggcaggatcaggtatgcgtccgagctcccggtcgtggcatcagctctctgctcggtcaagatgcaagatacaggggctggacgttctcccctggttcaaatcaaccgccagtacaagggccattccatcggcaataccggctacaagggctcgggctcgcctcctctcccatacacgacaaactgtggtgctcctgggatctga

SEQ ID NO: 14724 - DNA, 570 bp, Zea mays
  Peptide Sequence Number=SeqID_56503
atgaactaccgtatgacccaagaatttaagccaccattccgtgtaaccgcactaattgaagaagctggaccagcgagggctgaagttctactgaaaataagagctgacttctccgcgagtgccactgctaacacaatcgtagtacaaatgccagtgcctgcatacacaatgagagcgagttttgagttggaagctggagcagttggacagacaaccgattttaaggaaggatccaggagacttgagtggaatctaaagaaggcaagtaccagcaaggatatcttgctaaacaattttaactacacattacagattgttggtggttctgagcacaccctccgtgcaaagctgacattttctcaggagtcacatgggaatatcacaaaggaagctggcccagtgaacatgaatttcactataccgatgtacaatgcatcaaagttgcaggcaaggccatatactttttgtatggtcaggtatcttcagatcgcaaagaaatcgaaggcatacaacccttatagatgggtgcgatacgttacacaagccaactcctacgtagctcgtctatga

SEQ ID NO: 14725 - DNA, 1827 bp, Zea mays
  Peptide Sequence Number=SeqID_56504
atgcattcgccgaggtcgcgcattcgcgtccgcgacccacacccaaacccgcaccggccctcgggtggcggacgaggaggaggaggaggatgcctccgccgccggtcaccgcctgctccgccctccccgcgttaccggcgacgcccgcagaggcacaccccgccgccgcggcgcggcagcgatcctcaccccgacatctccgccatcgcccgccaccgcatcctgctcgaggccggccgcttcgccgcgcattacctggtcgcccagggcgtcctccccgaccacgtgctcagggacagggaagacccgcccgccagccgcgggaggaatctagacggcggcggcgatcctagatcgagctggaacgatggggactgggcccgcgcctgggaggatgacgacaggcaggcacggaagtcgacgagatgggacaggagaagccagagctttgacgacaggggtaaaaagtaccacgacgccggccgtgatgtagaccggggtgcccgccggactcgagattacgatgagcccaggagacctccgatgtcgagatcctactcgcataacgaccgccgcccttccggctccgctgatggcggcagagtggatccaaggagcaggagcaggagtagaagcagggccaggatccgcagagatttggatcacaccaaggtgacagactctggcattattcctgctgatgctgctgatgatggagactgtgatgtgcactacggtcatgttgatgaaatgccaaggcagcagcggagggtgcctagttcagtggtggttgcagacagtgccgatcaggcaatggctaccgaagacggggaggcggagttcgatatccatggactgaatcgcactcgagacgtttctgaagacgaggacggtgagtttgcagctgctcgcttgaatggtgaagatgatgttcatccgttgaaatctgttaaggaaccggccttgcatagggggtcccagctcagcaatgccgtagaggacagggaagctgccaatgcacccaccatggtcatggatgcttgtacgagggaaacatcaggtgaggacaatgcctactctgaagcaacaaatgaaatggtggctccacatccacatagtgaaggtaaaccagagctgccagcttcgtgcagaccttttgacctcaacgtcgtcgaaactccagatgcctgtgaaatggctggtgatcctcaagcagaccatgtttctgatttagttggctggatacaccagcaaactaactgccatgcttcagaatttcaaggtcaagatgagcgtcacatgctgaagaatgggcacgacttgattaggtatgatctgaacagcgaggctgttgaagacgcacaggatattcacctgctggaggatgagaaattacctgtaggtcttggcattgatgcgcatgatacgactagaatccaatgttggcgcggttcgcatttacgtctgaatcaaaatgctggtgagctggaacatgaaaacgactgtgtgattggtgagcagctgctgctaagtgatggcatggatggacatcttgtccgcgattaccaaatggcgtcagaacccaagatgggtgtctatgatttgcacagctacaatctggaaagcgagaaaatgctcctagatgatggtgcagagaaacacgcacatgataattgccatctacacgacgggcaagtgcttttcaatcagtctgcgaatctacaggctcacaatagggccaatgagcgaacaattcctgtgatcaatctcgaagatgatgattatgaagagcagtctgatatcagggagtttctcgaatccaagtaa

SEQ ID NO: 14726 - DNA, 414 bp, Zea mays
  Peptide Sequence Number=SeqID_56505
atgggcgggtccaaagcctccacgtgtctagagaaggtggtatacttcaaagcatcaacagtgagtccggaccttcacgggagagtaccggacccctggatatacagtccggaccctaaggttggtctcggaccctcggatatacaggtcggacctccggtgttggtcctgaacctccacttgtgtcagccggacccctggaatgggatccggaccccccgtatggggtcgggactgcccacagggtggtcccaaggtcccaagacagaacatacccaggccgtaaataggacccaggcaggggtctggtgtcgacatgtgtccagacccagtcttgtgtggacctatccgcactcgctactactcctcgtccaggcggagacccgatgctgccacgtggccaaccgcgcgtga

SEQ ID NO: 14727 - DNA, 702 bp, Zea mays
  Peptide Sequence Number=SeqID_56506
atggcccataccatacgcaaggctcatagccacaatctagaaaactattcgttcgttccttcttctgtctactgggcagactctgttcaaagcttgcttcgatgttcatggccaatcaaaggacagggtgtgtgtccagcaagtcattggggagatctactaggaagtcaaggtatggcggcagccatacctagccatatcagatccttcgtacctgcatggctgcatgtgtgtgcctacatgttgcagcaatatatgagattgcttcatctatcttttacaatcgtggaagctagagcaatgcttatgcaacgtttgcaataccagtccaaacttgaaactgagcatctaggtcatcataaggatgaccttggagttcaattacgaggagacaccttgaaagatgctacagaagcattcccattcacgcgatgggaagcagcttctgttatgcccataacagaaattgagattgagaagcatcctatccaagtaactgaagttgcagttgtggacaaatcggtcatcgaagaggagctgcccaagggtcatgctgagacctcaaatgttttgcaagaggcctttgatgatgacatagacgattggttcgaggaggctgatcttgctggccacccaactatccacataggtgacgaggaagacgtgtcttttagtgacttggaagaggatgacgtgaaatga

SEQ ID NO: 14728 - DNA, 1521 bp, Zea mays
  Peptide Sequence Number=SeqID_56507
atgaagtacgtctccgggccgtacttcgaaccggacttcgacccgctactcgaccgcttcggcaccccaggggtcgtcgtcgacaatgagacacgcgaggactgcacgctcgtcaaggttgacagcgtgaaccgggacggcgtgctgctggagatggtgcagctgctcaccgatctcgacctcgtcatctccaagtcgtacatctcctccgacggcggctggctcatggatggcaaggactgctcctctttgttccatgtgacggaccagatcgggcgcaagctgacggacccgtcgctgcccgagttcatccagcgcgcgctcgtgccgacccaccggccgggcaacggcccgtctccgaggttcaccacgtgcctgggcaacgtggtcgggccgggcggccccgacgtttcgggctgcgccgcgctcgagttcacggtgcacgaccgcccggggctcctgtcctccatcacgtccgtgctggccgacaacgggtgccacgtcgcgtccgggcaggcgtggacgcacaacggccgcgcggctggggtgctgtacgtgacggacaccgcgggcggcgccgcgctgctcccgggccggtgcgcgcgcatcgagcggctggtgaacgccgtggtggacgcgcgcgagaacgtgaccggggagcgccactgggtgcgcgtgtcggagcccgcgcagggccgcgtgcacacggagcgccgcctgcaccaactcatgcacgacgacagggactacgagtccggcccggccccgacccccgtcgacgaggacctcttcagcgtgggcgaaaaggcggcgaccgcgcggacggcccgccgcgccgtgacgcgggtgtccatcgacagctgggaggagcggggctacgccgtcgtcaagatgacgagcagggaccgccccaggctgctcttcgacacggtgtgcgcgctcaccgacatgcagtacgtcgtcttccacgctaccgtcggatcccaggggcctcttgccattcaggttgtctctcagctcttgtcagagtattacatccggcacaaggacgggcgcacggtcgacaacagcgccgagaggcagaaggtctcccggtgcctcgtggccgcggtggagcggagggccactcatggcgtcagggtggaggtgcgcgccgccgaccggtcgggcttgctatcggatttcaccagggtgctgcgggagcacggcctgtcgctgctgagagttgagctcaagaggcacaaggacgaggccttcggcatattttacctcgtcacggacaccggaggcgaggtgcgcgctgagtcgttgcgcgccgtgcaggcgagggtcgccgagatggatatctcgctcgacgttgtgaaggaggcccctggctggccgccggtgaggaagactagcgtaccagccccgcccgccgccgggtctcagcctcaggagaggcccagaccttccctggggagcctcctatggtcacaccttgggaagctctcgaataacttcaacaacatcaggtcttga

SEQ ID NO: 14729 - DNA, 762 bp, Zea mays
  Peptide Sequence Number=SeqID_56508
atggccgttggaagactgctgtcgcatggcgcaccggacagtccggtgcgccaccggacactgttcgggctcggactcaacctcgacgccggactacggtctccgcctcgcctgaccccagggatcgaactcagcctcgacctcggaagacggactccgcctcacccgaccccagggctcgggctcagcctcgactccggaaggcagtctccgcctcgcccgaccccatggctcggactcaacctcgacgccggacgacggtctctacctcgcccgaccccagggatcacactcagcctcgaccttggaagacggacgccgccttgcccgaccctagggctcgggctcagcctcgactccggaaggcggtctccgcctcgcccgaccctagggctcggactcaacctcgacctcggaagacggactctgcctcgcccgaccccatggctcggactcagcctcgacctcggaagacggactccgcctcgcccgaccccagggctcgggcttagcctcgactccggaaggtggtctccgcctcgcccaaccccagggctcggactcagcctcgacctcgaaagacggactccgcctcgccagaccccagggctcggactcagcctcgacctcggacgacgatctccgcctcgctcgacccccgggcccggactcagcctcaacctcggaggagcctccgcctcgctcgaccttgggctcggaccgaccacgtcacagggggggccatcattaccctactcctag

SEQ ID NO: 14730 - DNA, 768 bp, Zea mays
  Peptide Sequence Number=SeqID_56509
atgagccgtcgagccaagcatcagcagcagtcgtcggcggcgggtagccgccggaccaggcgtgccgagctggcgagcctcgccgaggccccccagatcgtgtccaaccccatctttcgctacgaggccgggccgagccagcccaacaacagtccaccgggtggacagctgcgctgcgtctacggcccgggctcgctctacgcgctcgtgcacgaccctgccgctgccgctgccgcggagacggggagcggcatcggattcggcgagggcgcgcagcagcccctgccgcttcccccgtgcagggtccacccgtcagggcgtgtggggcccgcgcgcgctgtgggcggcccacacccacatggtagggtactgaggagggcgccccatgacccgttcctggccgcctacgtggcgtgcagcaagagcgccgctgaggcagtcgaccgcccccaccagaagcggagacagaagcaagggaggaggaggaaggagaaggaggaggaggaggcgacgggaaagaaatgcggcgaggtgctgtttcggggatgtggggtctggagcgggtgggcggcgggcgccaagtacgccggggcgatgtcgtgcaggtacggctgcgccgtcgccgggcaggacggagacgcagacgcagacgcggccaagaccaagaccaagtctgaggacgacgcgccagggggcccaacgctcgacctgtcgtggacgccggcggtgctctcggcgagggccctggaacggagggagcagcgctga

SEQ ID NO: 14731 - DNA, 570 bp, Zea mays
  Peptide Sequence Number=SeqID_56510
atgtggagctcctcgacccccagagtataccgcagctgggttcgtatccaaaacaagttcagaggatggaaaggaagaaaagagtttatgtttatccggcagaaaattgtgaagatactggcccatgtacgtggacatcaggtaaggaaaaactatcggaaggtagtctggtctgttggcatcatggagaaagtcatactgaggtggaggagaaagggaaggggtctgcgaggtttccaacctgagaaacaacttgaaggtccatcatggcagatccaacctgcaaaggctgaggctgaggatgaatatgacttcttgaaggatggcaggaaacaggctacaggcaggttggatagagcactggctcgtgtgcgttccatgaatcagtatcctgaagcaagagaccagtaccgcaggctgcaagcctgtgttaacagcctacgagagtcccaggcgatgcaggacaggatgctggctgattcagctggcaccgatgggggtgatttcatgactgaattggaggagctatgccgggatgatggcgatgccccgatgtcgactatttcttga

SEQ ID NO: 14732 - DNA, 450 bp, Zea mays
  Peptide Sequence Number=SeqID_56511
atgactaggaccctcctcgccacttcagatagtataagggcaagacagtttaccttgagcagcaagggggcaagaaaaagagacggttggatagagccacccatgcagcagttgccgcagcaacaacagcagatcaggcagagcagggagccttccatcacacctgttgcgtctactacctccaccacaccagcttccattgctcccgctcccacttccgctccacctattcctccacctcatttctgggagcgtgatgagactaagatgcgtcctcttgctgcagacccatgcctgctcgaccttcaaagggccacagctgccagggtgtgtcgattcagacacgtgctagtggactcgtggctgcctgctcagcaggatcgggcagctacaccacttttcagtaccaggacccaggagtccttcttgagggctcagctgtcaacttag

SEQ ID NO: 14733 - DNA, 393 bp, Zea mays
  Peptide Sequence Number=SeqID_56512
atgaggcttcacaacatgtgctatggtacctcagaccctcctcgtcgtcctcatggtggagtagctcctggcaccgctcacgtcgccgctatgttcagacctccattcacagacgggtctcgacgttctcctgctgacttaaccccagcggtgaagtttttatatgagctcatgaggcgcaccctgctaccgaggatgggatacagagtggccaccacacatattcagctccggctccttggtgctctgctgatccatcctcctcagttccaggctacccttgatgcctccatacttcagtttggattttaccgcccagcttctgaggacaccgctctagcttcagtagatccactggtgtcgggccttagggatgaggacgaggctatttga

SEQ ID NO: 14734 - DNA, 2184 bp, Zea mays
  Peptide Sequence Number=SeqID_56513
atgtgggaggtccgagtggtcagtgcgggggggctgcgctggctgctgctgaattgttctgcatttgggttttggcgggcgtggggtggtacatgcactcgtccgctccacgtaatagtcgctgagccagagttaactagtaacgtgcatgagcttaaagcacgtgttgccacttttcagttttgggaaaatgtggctattgagctgtgctctatgggaggtattgctgaatgtggtgtgagcattgacactaaagcttcaccacgccgtgcagccatagagaaagctcaggaggagctcaggcaggaatatgatgtccgtgaagaacgaaggagagagcttgaatttcttgagaagggaggcaatcccttggatttcaaacttggccatgtagcttcccttagtgtacagtccacttctgtgacagaacagatagctgaacaaaatgtgataagtgaggccaaaggtagttctgcatttgctacgtcatctcatggagattctgttgaaagcaacgacaagccaggaaattcattgtgccgtgaaggcaatacagccgataatcttacgcttttggatggagatgccagcaacctgggtgtggataaaattgtgaaacatggaactaagagaactaattcagctcaagctgagcagttcctgcactgtgatggtcagaacaatgcaaaagaagaagattctgggttgttccgtcttggtccaaagagccaagcgtatgcacgacgtaggtcaaagcctatcagagaaaatgcatatagtctatctgttatgtacccaccaattcctccattaagttctcagcaaaaagatgtgacaggattaatcccagaaaccaagactgaggataatggtgtttcatccattggtgattcaaaaccgactagtcctaactctaaaaatatggtgacaaatgcatcattactgaatgataaggtggaaatggagacagaaaatgttcaagcaattcctgaaggcaatcaagcaccaaaaaacgagttatcaaacagcaacaatggtagtcctgctatggagatttcaccaaatagtgtgcctgataattctcgtcttactgtaagtgatcagatggctactgcatttgtttctgtggaatccccagatgctatttcaaaagtagctgcttcaaggatagtttgttctctcccatatatatccaatgaaatattgaaagaagcacaaactcttgagaaggcaggtaataacccatctatggtaagtgtggttgacgttcatgcatatggtatggataacaatggtgcagcaccttactctgctgtgaaaagtgctagtttgaatgaaaatgaagttgatccaattcatgcatatgctgccaaagctgttactgaacatccataccaaaatgagaatcttgtaccagtgaatgcagatgaaatggctgatgaaggcttgaatgagatcctacctgatgacaaggatgacaagaaagattgtcaactggaagttagtagtgggcctgtcattttgaatgacagttctactcctgtctatcctgaatttagcaatttcttttatgcaaaagatggaacagaagtttctaacaatgcagtagattcaaaaaataacgcagaacagcatgcttcttctaatcagggaaaagggaacatggaggaatgtaaagattctgatggaaacaatgcaagtgaatcgagtgttgcccaaaagctagtgtctgttattgtgctccctgcttcagacacaggcgatgtgagtaactttgtagaaaatgatgttgagaaatctagcagagatcaggagaaggtagcaaagaaggaatatgaagattctgtcgtggcaaagaaggatcacgaagatgctatcctcagaagggcacggtatatagaggcaaatattaagagggctggtgaatggtctctctgcaatatttctctagagaagaagcagaagagccactgggattttgttctggaggagatggtctggatggcaaatgacttcacacaggagcgtttgtggaaaaatacagtcgcagcacagatgtcccattggatttcttctagagtccatactttacgagctagtggtggtattcctaaaccaatgcaaatacagcaaccgaatgagctagaggaaaataagcttggtggggtcaaaaccagaaaagcg

SEQ ID NO: 14735 - DNA, 261 bp, Zea mays
  Peptide Sequence Number=SeqID_56514
atggccgcgacggcggccgggagaagtgccacgacaacgactgaagggaagaccactacgatggctaaaaaaagattagaaaaccctaacaataacctgctttgttaccatatgccagctggtcattcaggtcctggaagtccatggtcaagttttgaggatcaggctcttgttgtccttgtccatgatatgggtgaaaactgggaattggttagcgatgcccttaacagcatcatccaattgaagggctttggatcttaa

SEQ ID NO: 14736 - DNA, 390 bp, Zea mays
  Peptide Sequence Number=SeqID_56515
atggctgccatagggggagggggcggccagccaagggggagaaagggggtggcggccaagaggggggtgaagggaaaaaaggggtggccacctagggtttttgtgggagaaagaaacgacgcctcagatgacttctatctttgcatccaatggcccacaaccctttacctcatccacgcaccaaagattaacttttggtcaacatttttttgggatattacagaatggaaggtacaaaatgaaaatgtcattattgaagattgtgatagtgataatgaagatgaatatgcttctcctacttatgatgaattagcgtacttgcttaaagaatatactcaaattgaaagggaaataggcttacaccttttcctaattgattttggtggttga

SEQ ID NO: 14737 - DNA, 366 bp, Zea mays
  Peptide Sequence Number=SeqID_56516
atggctcttcctccgaggctcggatttggcgtcgggtatagaggatggaaggggcgcgcctcgggcggatccgatgatggcggcgccgatggcgtggggaggagtgtgcgtcgcggagagaatctcgggcgtgcattcacatctcagaatgatcaagaagaagcacaagacaccccttcatccattacagcagttgcagcacatgtaacacaggggagagctgtcgatccagagcagcccaccactgtacagcatgctgacatcgaacctgaacaattccagcacttctgcctccttcattccctcttggactgcacaaatatattgccatcacctttcctatcaccagatgttgaactacactga

SEQ ID NO: 14738 - DNA, 762 bp, Zea mays
  Peptide Sequence Number=SeqID_56517
atggggagcaacattgtacctctcccctgtgttacatgtgctgcaactgctgtaatggatgaagggcggatccaatctcgccccctgaccctccgctgcctcctcccatcccctccggctaagttgtcgccgcacgccatcccgcatccccaacatagcgtcgcggtgccgcgaagcttccttgggccttccctacgttcttgccacgtcggaggttggtccacagtgtcgacgacctcccccgacttccctgccacgggcgctgtcccggggagccacggtgctcatggccgagaagctcgaagccactgggttcatgctaaaggaggtggtgcgatgtccagctcccaagtcgtcgccctcaccctcgtcatgctcctgggcaacgagatgttcgtctccgtgctcggcctcatcctcgagtcgtcgcgcaagcagcgagagcagtgtggctctcattgtcaggatcacgccagcagggtaaggccatcgtcggtcacggctgccatccgcgatgagctggatcttgaagaggcgggcgtggttgaagctctggacgccaagagggccactgtagtcactgccgaggaagcgtgcactgccgccagggagatggagaagaaggccgccactactgcaaagctagccgccatcgctatggacaaggtgggatttgtcgtcgttgatgtggccagtgccgtcgccgaggaagccaatgccttggattcagtggcacatcgctatttggatatgaacttatga

SEQ ID NO: 14739 - DNA, 816 bp, Zea mays
  Peptide Sequence Number=SeqID_56518
atggaggcggagaaaccaaggaagagcaaaagcatcgggactcgtcggcgaggcgtgcgagctggcggaggttgggggaggtccatccacccgcagtggcgcggcgtaggaaaggtctgtggtggggctggcaatggttgctccgactgttccctggcggcggaggaggacgcgcccgcgccgaagcggcgcgagtgcgaggagccggagtcggtgcagaggtccgcgaggcagtcggtgaaggcgaagaaaacggcctcggcgatggcgatgacggggaagaagaccgcgcagaggcgctcccccaacgacagcgagctctcggaccgctgccagggaagaaaacagacgaggaaccatgagatgaatccagagaagaggagagatctaccaagaacccgctggggatactcgccgggagaagggtggacattgcagccacctggcacctaccacgccgccggaggaggagcgggagttcatggcgaccgggcgccctgggcctggagtgaactgggaagccgcctcagtggctcgtggcattcgtgcgccgctttaaggctgtcaagcaacgaaaaaacgaactcgatggcgacagggaacgggatcgcaccatcaggcatcagcctcgggcagtgtttctgcctctgcctgcatgaggattcaacacccttggtcaccggggatcacggatcaccgtccattgtctggtgtgcaccagacagtccagtgcacatgcggacagaaggaaaccagggcttgccaaatggagctccaacggctcctaagtccattggggaaatccatgaatcataa

SEQ ID NO: 14740 - DNA, 543 bp, Zea mays
  Peptide Sequence Number=SeqID_56519
atggttcttcatcaggaagaacttcagctggcactgttcaaaactccaagcggcgagaatctttttcttgatagagttttttatttgtttgatgagaagaaaaatggtgtgatcgagtttgatgagtttattcattccctaagtgtcttccaccccttggcaccaattgaagacaagatcgattcatgcatttcgtatgtttcagttgcatttaggttgtatgacttgagacaaactgggtttattgagcgtgaagaggttaagcaaatggtaattgctatattgatggaatctgatttaaaattatcagatgacttactcgaggccatcatagataagacatttgaagatgctgatgcggataaggatggaaaaataaataaagaggagtggaaggaatttgcgttacgccaccctaacctgttaaagaatatgacactgccttatctgaggttcacccccgatctcctgatctttatgaaaagtagggacatcacaaccgtcttccctagtttcgtcttcaacacggcggtggaagattag

SEQ ID NO: 14741 - DNA, 197 bp, Zea mays
  Peptide Sequence Number=SeqID_56520
atggagctccggcgccctccccaagctcgcgcactacctgaccagcgcgtcggcgtcctcggcggcggcaaggttgccgtgccgctagcgcctcgagtggctcccagatccgagccgacgccggagcaagaacaagacgctgccagcggcaatggcgaacgtcgtggggccgcttcctcctctgctgccgctggact

SEQ ID NO: 14742 - DNA, 1368 bp, Zea mays
  Peptide Sequence Number=SeqID_56521
atgatgatgccagagtttcagttacaagtctcgcaaggaaataatcatgctgtgcatttcagcggtccaccatattccaacactggggcatcttcacctgttcaatctttacctgcccagcagtcccaaccacatcagatgccacaacaatcacacatgtatggaaacacacaccttcttcatacccaaggaacaaaccagtcaaatccacagcaacagcaggcttatgctatgcgcttggccaaagagaggcatatgcaacagatgatgccccaacaacagcgtccattatctgttgccagtgcagtgtcagctgtacagaatggctcaccgatgcaacagcagagccaaggatctgcaacttgcgtaatcccagctacacagacacaacataagcagcaatatcctgcacaaaatgcacaaggtagctcaatgcttccccatcagccttcagccaccactacacataaacagaagaagcaacagggccagcagcagcctagacaaaatcaacagcaacgaaatcaaggcagtcaacaagctaagcttatgaagagtttaggccgagggaacatgatgcagcagagtcctgtggatgttattcaagcaagtggcatatcaacaagctgtaaagatcaagttcctgataagaatatgatgcaacagggtccagggcattttgttgtaagtaaaggatcaatcccattgatacctcaacctgggaatcaaccaaatgtatacacttctcagatgcctccgtctccaatgcagacaccggatattagtaatcagggtgcagtcaagggttcttccaaccatgccttgttaacttcccagcaaggttcactccatacgccttcacagttggcacagcagcagcagcagcaactacggttcatgaatccgtcacagaataatatgcaaaggttgataatgcaacagaatcggcatgtgaacacagatggcaggattgagttacctgctgaccaagtacagcataaccaggtaatgtcatctgcctcacttgcaagaagtacagattcaggcagcccaggaatctcatctataagccagcggaaacaagagtcatctcatgacccaagtgcaattacctcaacctcgcagctagctagctcacctcaagacacctttgttggaagtgatagggtgttgccatcatccagccaaagcatgccgcaaaggcaaatgtccggtggtgtgcctgtacatggatatggcattggtggccaggtgcagctacaacagtctcggcagcaactccagtctcagcagcagcagcagcagcagcagaggcctgttgtccaaggtggtgtatatgctcacccctcaaattcaggacaaggatga

SEQ ID NO: 14743 - DNA, 690 bp, Zea mays
  Peptide Sequence Number=SeqID_56522
atggatcaagaagaggagccagattcttcaaagtcatatgcttttgcatgtgacgaacacaaaaggatgaaaggcaagacgaaggctccaagctcaagtgaagaagaagaagatgatgatgatcaagcctcaacatcatcctccaacgacgaagaaatagtccaacacgtcggaaaggtaatgtggatgattcacaagattaatctaatgggtgtgcacctgcaagtcgaggatctcctctttaacattgataggaaaaagcaaagaaagagatactactttgcatgtggagagaagggccacttcagggacaactgtccaaatatggtcaaacccataaagaggaggagcaaaggcaaggcactcacaagtgttaagacttgggatgattcttcaagcgaagatgatcttccaaggacttgcagccaccgctcttcatcacgctcttcacggtcatcacacaaatgctttatggcaagagaaacatttgcaaatttaaattgtgagctaacaactaaaactgagcaaatagagtataaagctccatcatcaactaccgatgataatcttgttaaaaagaatgaaaaacttaaagctaagttagctagctctcaggatacaattgaaaatttgctagagaaaattgaaattcttagcattcacaataacgagctaattactaagctataa

SEQ ID NO: 14744 - DNA, 366 bp, Zea mays
  Peptide Sequence Number=SeqID_56523
atggcgtatcaaatgttgccggtgtgggttcatagttatacgcttagtgccttacaatttggtggaccccatctgttagtaactattgctattctaccaaaagggaaggtgttttttcggaccttcagcttaaggccttcgttcatgtcgcagtctgaattcgttgattataacaaattaatactgcgaggggctactgttggggccttcgtcttccgaaggtaccttcggactcaaaataaaactgtacacgatatgaaaagcatggtcgagacgaaggtcgatgcagttccgaagttacgtgcaaaggagcttcggttgaacggcagaaagaggaaccgacttaaaggggaaaaggctatctag

SEQ ID NO: 14745 - DNA, 237 bp, Zea mays
  Peptide Sequence Number=SeqID_56524
atggcgcccgaggccagacttggctgctgtcagcctcactctgtcgagtggcacagcagtcggagcgacacaggcggtgctgtcttcttgtcagattgcaacctcgctgacagagagtacgtgctcatcccggagcaaggaggtgctcatgagggagtccaggagccagcaccagagcctgccactgaggatctccccgccccagcttttgaaggcaagccccggttttatgcataa

SEQ ID NO: 14746 - DNA, 318 bp, Zea mays
  Peptide Sequence Number=SeqID_56525
atggaggcaagaagagctttgaggtaccgagtgcatgggagaaggtctagaaggtcgaggtaccaaaagccaggggtgaagaagaaaacttgcaaagtcaaggttgatcgagttgagaagagttgtgggtcccactcgactgtccagcccggtggcagggtggatggccaagtcactccagcaaccatgtcatctaagcagcatggatcaagcagtctcattagctgcgagaagcagacgattcaaatggagtttttaaccatgcaagtgaccgcacttgtacccaccatatccggaatgggagactacgtctcatga

SEQ ID NO: 14747 - DNA, 261 bp, Zea mays
  Peptide Sequence Number=SeqID_56526
atggaggagctcggagagggcgccatgggagccgatccctgctgccggaggtggaataaaaggggggacgtcgtagggaagggtctctgcctgctgccgagcgccggaaggagcagtggaggtgaggggctgcttttaaaggcggtgctcgctgcagccattggcgaacacgggtggcatgctgcagagctcagtttcctcagaggcacagaaaagaacacacattggacggcagtttatgtcgttttctgtttggaatag

SEQ ID NO: 14748 - DNA, 261 bp, Zea mays
  Peptide Sequence Number=SeqID_56527
atggcgtacttcttcagtggcttcgcctctcaaagagaaagggtcttctggtttgggtccaatggctgcagagcggtagcccctgttgctgaagctttcttcggtggcatgacgaagacgaaggtcatgaaggacataccttcgtacatcgaaggtatgatggagaaaatagaaacaatattggattacatttggtaccttcgacttgatagacagcaaaggtacgagcgtgatgccaaagcaaatgccaagtcagcgtga

SEQ ID NO: 14749 - DNA, 411 bp, Zea mays
  Peptide Sequence Number=SeqID_56528
accctcactacgacgagcaccacaggggccatctcacagcagagggagaggtttggacccacgactggttttcaggaggagatgcggtacgatgacagatacactcctctcctagagagggctggcttggacgttgtatcattccaggtttgccgtgggttgccgacattcaaccctatggcgttgacggctatggtcgatagagggtcgaggccttccttgggagagtacttcctgatgacctacgaggcagcacctgaggcccacaactgcctaccgttgggccaggtccaggagccattcgcacgacaccaacgtgcctacatggagtactccaatgagctggacgcacttacgccttcgatggtgacctggcaaccatatcatgagcccgctttcgcccacatctag

SEQ ID NO: 14750 - DNA, 537 bp, Zea mays
  Peptide Sequence Number=SeqID_56529
atgccccaattgtttaatttactcccaccccgagtaggaaggtgtagcagcggacaccattctgaatcattctccaagctccaatttcaccttcccggcccagatcgagagcgcttcctagtctgtcgtgccgtcgcgaatcacggccagtgcgtaggagcgagtcaccgccaggaaaaaaccctcgcgtcgagagatcctagtcacagtagttttctcaatgttaccaccttcgaagacgcggtcatctgtagtcttgctgatactgacagggacccgattatgagccacgtcttctcccgaatcacactcatgccgaggtcgtgtcgtgcccaatgttgcggtattctcacggtgtgtgcatgcgccaagctgtggccctccaaaagcaccgactctcaacgagatcccttgaccgtcaaagtacgcacccagcaggctctgccgcaggacaaggaagccatcacttgccaaaactccatgttggtcaaagctcagttcgtcactctcaacttatatcaccacagccagctataa

SEQ ID NO: 14751 - DNA, 1566 bp, Zea mays
  Peptide Sequence Number=SeqID_56530
atggtgcagcaaccacgaatcaactctgcaatagtgagtgccatccgtgcggccaggatgtcaaagaacactaatccagcagcagccggctcatcagcaggctcgcatcactatatacagaatgttgataggcccgacagggcatacacaactgaaagggccaagcgaggcggaaaggcaaacgcttcgagcggccagatctttgtgacgactgcgccggatcattttgggccaatccttgccgaacatgaccccaggaggaacaccggtgtgcgagttggagaaacatgggaagatagacttgagtgtaggcaatggggtgctcatctgcctcacatagccggaattgctgggcagagcagatttggtgctcaatcagtcgccctgtccggaggctacgaagatgatgaagaccacggggagtggttcctttataccggaagtggcgggagggatctaagtggaaacaagcgaacaaataaggagcaaggttttgatcaaacatttgtgaagatgaatgaggctctccgacaaagctgcttgaggggttaccctgttcgggttgtacggtcccataaagagaaacgctcttcgtacgctcctgaattgggtgtgaggtatgatggaatttacaggattgagaagtgttggaggaagattggtgttcagggaacgttcaaagtctgcaggtatctgtttgtacgctgtgacaatgaaccagcaccttggaccagtgatgatcatggtgaccgtccaaggccattgcccaacattcccgagttaaaagatgcaactgatataaatgagagagatgagcgtccttcatggggctacgatgagaaggaaggccgctggaaatggatgtacgagccgccaacgagcaggaaacctgttcgcactgggcttcgtcctaagaccggcaagcaagcccggaaaagagcaaggagtgatgagatgcctaacgaccctgaaaaactcctgaatgagtttagctgttgtatctgcttccaagtgatggcagagccactcactgctccctgtggtgacagcttctgcaaggcttgtctgctgggggcatatgataaccagtcctccgtgagagaaagaagccatggcggccgcactctgagggctcaaaagatcgtcaagagatgcccatcctgtgcaactgacatcagcgacttcctagcggatccacagatcaaccgagacataatggatgtgattgagtcactgcaacggaaaggcgacaccaccaccaaggacgacgctgcttcatatggatatggtgctgacaaggccgaggaattccgtggtggtgacctgcaagaggaagctgatccggagatggatgctgaggataactctgaatctgacacggatgctgatgcttcttgtggcagaactgtggttgggatcaaggatcaggaaggccagcagctgcagccccagaagcgcaagggtggcgttgccattattggcactgatgatggtcctagcaaaaggattacagcaagtgctgatgtggaacagaaaggttggaataccagtactgtcgtcgtttag

SEQ ID NO: 14752 - DNA, 351 bp, Zea mays
  Peptide Sequence Number=SeqID_56531
atggaggcactcctaaccgatgaccagcagcacttcgatgacctcataaggcgcaaggaggaggagacggaccatgtgagggtcagcccagaccgtctagcgatagcatggaccatcaggcgtatttcgttggaccgtctgaccctatgtgagtctactcgcagaccacccaggtcgcgctgcacatggctggattattcgggtacaaccctggacaatttggccttgtcgcggaccatctggccccttacgttagaccgttcgggtatggaacaacccaagcagtgccatatacggctggacagtcttgatatggcctcggaccgttcgacccgattgtggaccatctga

SEQ ID NO: 14753 - DNA, 441 bp, Zea mays
  Peptide Sequence Number=SeqID_56532
atggccgtgatgtgttcaacattagaaaagatgtacctctaccagggaaagcgctggcaagcgcccgaagagacgtgcacaaggaggcacagcgacatggcgcaactgatggcgacaggagcaagggaggcgcgcggccatggagatgagctgggcgcgagcgagcagaggggggcgacgctggagagagagcgcgtggccagtctggaggagcagggggcatggcagccatggaaggggagcacaaccgccatgagaagcaggggcgcgcgcttgaggaggaagaggaaggagccgagcgctatgggaaccaaggcggggtcgaggctggcgagctggagatggccggcgacgcgagcagggaaggagcagagggatgtgcacgcaggggagctccagggcgcgcgcctggggaaggagctcggggccaagctcggctag

SEQ ID NO: 14754 - DNA, 186 bp, Zea mays
  Peptide Sequence Number=SeqID_56533
atggcggtgctctctgtggaggcgcggacggtccacgtcctaggccggacgaaccataaaactcgcctcatggtagatcccatcgaggagaagagttccaagggttgctccagggttggcaggccacctggggcatctgtaatcggcgtagagtcgaagagagatggttgtggaagactaaactag

SEQ ID NO: 14755 - DNA, 270 bp, Zea mays
  Peptide Sequence Number=SeqID_56534
atgaactcgggcgatgccaaagcaaaggacctctgtgcgcaggagaggacgttctctggcgagtaccaaatgtgggagtcatcgagtgcaagcgcggagaaggccaccatcttcggcccaattgctcgtcggagacaaggctccactgcggaacaccataatgtcatggccaaggactgcagctgcataacacccgcactaggcagaggtgactcctgtgccgagtgcagcactaggcagaggcgaatcctgtgccgagtgcagcactag

SEQ ID NO: 14756 - DNA, 222 bp, Zea mays
  Peptide Sequence Number=SeqID_56535
atggcccctgccgagacgaaggtacaagatgtaccaaaaaagactaccgatacttctccgtcttcctctatcggtgtttcagaaatattgaagacaaaggagaagggaattgaacaaagcttgggagggaaggagactgctttggctactgggggaaatgccaggggtcagaagaaatggcgaatgatgaacataatgaaagccatccaaaagaccccctag

SEQ ID NO: 14757 - DNA, 240 bp, Zea mays
  Peptide Sequence Number=SeqID_56536
atggatgggatgttttcaaaaataaaacttggtggtggatccatcagggccatgatgggttcaacatcggaaaagatgtacctctgccagactaataccagaaaggccaacacacaatgggagtggagagatggcgagagtagcgtgtaccctccgtggcaagaggatggacggtggtgtatctatgctctcggttggcgtgaacccggtctggtcttaagaacctcggtggcgagttga

SEQ ID NO: 14758 - DNA, 195 bp, Zea mays
  Peptide Sequence Number=SeqID_56537
atggatgggatgttttcaaaaataaaacttggtggtggatccatcagggccatgatggattcagcatcggaaaagatgtacctctgccaggtgaaacgctcttgggcgaggaaaagaatacatataccaaacttgtcgagtaattatgtgcatctacagggttgtctaaggtccattggacaaggacaactatag

SEQ ID NO: 14759 - DNA, 564 bp, Zea mays
  Peptide Sequence Number=SeqID_56538
atgtgccatgttggtcacttgcttttgattacttcatggtatcaaaaacacggcaacccaaagttagaagatggtgtccttcttcctttggttacctcttcttcgaggggtaatctaaagggagaagaagccacttcttcacaagtcgaagctactattgtgaacccatttgaaggactgggcgaggacaacgatgatattgatactgaggaggacaatactatgatccgtcctacaaagccaagccatgtggacttcagaaagtcaagattaaaggaggacacattgaggctacaaccgaagctgtggtgcttcctaccatcgaagagacccttagcaattgttgcttctgaaataaaggaaattactgcctcggagcatctgctgagcagcgaagaagaagaagacgaagaacacatagctccagtgatgagttcgttcttttctgatgacgatgaagaccactatgcacaagccagggcaactactgtagcggtcatgacaagaatggatatgatacagcatgctacaactgcaatggtgccagaaagcctgaaggtctag

SEQ ID NO: 14760 - DNA, 1437 bp, Zea mays
  Peptide Sequence Number=SeqID_56539
atgaagcttcttgtggtcattgttagttcatcggaggtgggcgccaatgttggtcactttcttttgattacttcatggggtgtcatcgtatttttctctttcttgcttgccgcccaagtcttcaacgctttccctttccattggttcacgtgtgaagcttttcctgatgccgagggtggtggcttcggtgcacatcttcgtcaggccgtgccgtctcctgcgcccaaccgagccatgttgtggcgctcatcggccttgccccttccccgcgtccctgctgtgccgtgggatatgaggaactcggtgtcggagcggagcttcctcatcgagagcgacgatgacgacgatgccgccgtggaggacgggaagcggcgcggccttggcggcggcggcggcggcgacgacgacgacgacgggtccgactcctcgtcgccgtgcgacagcccgcgggtggtggcggcgcggtgcagccagccgagttcgtacacgcagcaatggccgcagagctacaggcaatccattgacatgtacagcagtgtgcactctcccaacctgagcttcttgggcacgccatcactgagccggttgtccaactcgttcctcacaaactcattccgggggaagccacctgagatcatctccagcttaatcaagccattactgccgacaagcattgcttccgccagcgatgaccagcagcagcagcagcatgaggacgtccggaagagctcccattacctgccaccatcacgcaaggcgtcgtcgctgcagaggatccccgaggaccagagacctatggttgggggccatgaggtgggtccctaccggcagtgctcctatacccaaggggtcatgaacggagtgaatgtcttatgtggtgtggggatcctgtcaacaccttatgctgtcaagcagggtggctggcttggactggtgatactagcggtattgggtgcactggcttggtacactggcatacttctgcgccgttgcctggacagcaaggatgggctcgagacttaccctgacatcggacatgctgcctttggtactgctggccgtatcatcatctcggcaactggtggagtcattgcatctatcgtcattgtctcctgcttgttctgggtgggacttgttgatcacgttggcacagtcgagagtgaagggacggcactgaaccttcctggaatccccattgccatcgggttgtatgggtattgctactcaggccatggagtgttcccaaacatctactcttctctgaagaaaagcaaccagttccctgctgttcttttcacctgtatcgctctgtctactgttctgttcgctgctgctgcaatcatgggatacattatgttcggtgaatctacagagtcccaattcacactgaacttacccccaaatcttgtggcttccaagattgcggtctggactacg

SEQ ID NO: 14761 - DNA, 192 bp, Zea mays
  Peptide Sequence Number=SeqID_56540
atggagcaatcaggacttgggtacctggaaaggcaagaaattggtatctcaagtcgtgactcggagacaactgatcaagccaaggacgaaggcaagaagagcttcgaggtagcaagtgcatgggagaaggtcaagaaggctgaggaacccaaagccaagggtgaagaagaaggcttgcaaagtcaagggtga

SEQ ID NO: 14762 - DNA, 453 bp, Zea mays
  Peptide Sequence Number=SeqID_56541
atgtgcgagtgcggtacagccagcatcgcaccacgagtccacgatgaaggcaagcaagaaggctgcactgctgccgtgaccatgaacaggcacgagtcgcaggcacaactgccgtcggaacacgccacaggcttccacgcaggccgccgtcgacgctgctacgccgcgagcaggccgggctcacgggcaccgacgccgccgcacccgagcaagcaggcgcgagcacgtgggcacagccccgccgccacttcaggccgcgccgccgcaagtcgaagaaaccacaggtcgtcgttaagagccataagaatgcagaagaaagagaaggagatagtggttcggacgggcaggccgagcagggctaccaccgtcagcaggtcatgtcgccatcacatctcgcaagcgctgccaccacgccgccccgcaagcagtgcaattggaacttacaagaagtaa

SEQ ID NO: 14763 - DNA, 177 bp, Zea mays
  Peptide Sequence Number=SeqID_56542
atgacgccctccgccgtggacagtactcctgcgcgcgtgacgcgtgggaacctatgcgtcggtcgtggttacgccgacgagctcgccgtctgggactactcgggcgccgccgctctgagcactcgatggggaagacaggggatggccctagacttcgagatatgcggccaggattag

SEQ ID NO: 14764 - DNA, 507 bp, Zea mays
  Peptide Sequence Number=SeqID_56543
atggacacgccgggcctggcagccgacgacggcgagacccaggaccccagcggcagtgggcaggccagcctgggcgccaccgcgggcttggcgaagagcatggcgaggctggcgctgacgccgccccggtccgggctctgctcgcgggagctgctgctcacgctcggggccagcgacgacgcgttcgacacgtgcgcgctggcgctgcccccggtcccggcagtgtccacggacacggtgtcgtgcagcagagatcgacaacaggtcctggtgctgctgccgctgccgtccgccccgctcgacagcggcaggcagcgccgcctggatcttgcagcaggtgtccgccatgcagccgccggcctgcaccagcgccacggcggcgccaccgccttccttcctgcgccgtacctggtcgccagggagcagcgtgccgctgtccatgatcttgtccacgtcgtagcgcgtggtgtcgaagttggtgaccgcgttcaggcccccggaacttga

SEQ ID NO: 14765 - DNA, 1440 bp, Zea mays
  Peptide Sequence Number=SeqID_56544
atggacggcgcggccgacggctccagcggcgtcccggtgcagcagcagcaccacggaggcctcttctaccctcccgtcatcagctcctcgctcgcgcccttctgctacgctctcggcggcgggcaaggcggtctcgccacgtcggccgccgacggtggcgaggagttctacgccgggctctcgtctatgccgctcaagtccgacggctccctatgcatcatggaggccctccgtaggagcgagcaagaacgtcacggggtggcggtgtcctcggtatcgccgaagctggaggatttcttgggcgcgagcgcgagcaccgcaatggcgctgagcttggacagccccagcttctactacggcggcgcccacggccacggcgggtacctgcagccgctgcagtgctcgatggtacccgtctcgttgggggacgacgtttacggcggctgccacgcgcagatggtggacgagcagtccgccgcggcaatggcagcgagctggttctcagcccgcggcggtggcggttgctacgacgtcaacggcgccggcgccatcgagccgtcgcagggccacccgcacgcgcttgacctttccatgagctccgggacggcgcacgtcgcagtaccgcggcgtcaccaggtatccctcgtattctccccgttcccggaccggccgtacgccgcggccgtcgctgtcccgcacgagtcgctcactggccgcgtgcgtggtttccaccgtgctaaaagcaggcataggtggacggggaggtatgaggcgcacctctgggacaacagctgcaggaaggaaggccagacccggaaaggccggcaagggcacatggttcaggtcgaggactacagggagcagctggaggagatgaagaacatgaccaggcaggagtacgtcgctcacctgagaaggaaaagcagcggcttctcgcgcggcgcttccatctaccggggagtgaccaggcatcaccagcacgggcggtggcaggcgcgcatcggccgcgtctcgggcaacaaggacctctacctgggaacattcagggcccctttgagccctgccaaaggggtcagtatgtgtcttccctctcaccttctctcgattccaagtcgttatcggttcatccgtctagagaagaagcctccgactgcaaaactcaactcctatctgtcacgcatcatgatggccagtgccagtgctccgctgccgggctatccgttgccgtcgccgaggccgcgtgtcacgttcaagggagcagggtgtccagtcccaatgatcgagaaccgagcgagcccaatggatgccctggccggctggccctcccccaaagaatgttttgccctgcgcgcttttggcgctctcgcgcattgcatcgccacggcggccccagtggtggtctcgctgctctcgcgtatgcaaccggcttgcttttcctaa

SEQ ID NO: 14766 - DNA, 258 bp, Zea mays
  Peptide Sequence Number=SeqID_56545
atggaccggtcggtcggtcatcaggccgctgtcgccgtgcaagataaggaagcaaaagagctagctagccgcgggagcggcgccaaagacgacgacggcctgcggctagctgggaccccggccggcgtcaccgcaccgggtgtggtggtggtgctggcggcgacgtgtgtctgccctgcacccgtgtcagcgggctcgccgctcgttgggacgaaggtcctcctcgcctctcagagaagcggaaccgaggttggatga

SEQ ID NO: 14767 - DNA, 777 bp, Zea mays
  Peptide Sequence Number=SeqID_56546
atggaccgcctcgtcgtcttctcccggcgccgccgccgctggatcctcctcgctgcggccggtgcggcggcggccgtcggcgcgtacaagatctaccaccaccctgccgtcgcggaacgtcgccgccgcctcgtgcgcctagccgccgccatcgcggccttcgctgatgccgccgcatcatccgccgacgccgtggccctggtgacatccgatctcgccgactttgtccattccgacgcggacgaggtcccccgcagcgtcaagcagctggccaagctcgccgcctcccctgaggtatccgccaccgtctccaccctatccgaggcagtaacctccgggatccttcgcgggtcgggatcctctagctccgggcccgcatccggcggtaccgtggccctctccgatcgtctcgtagacaggctcttctctgactcaggcgagcgcctcgcgtccgcggttgccggcagcttcgcccgccatctcgtcctcgccttttactccgctccttcaccacaaggggaggcgtcctcctccccgacgatgtgggtcaacgtggttgcgactggaaagtgccggaaggcgataagcaactgggttgaggtcttcgtggggactgctgtgagggagttcattgacaagaccatccacatcaacacctacgagcagctcttcgaagggctcaccaatccgagacatgacgctaaggatggggcaaggaagggcggtggctccgtggttgacagtggcctgcgcgtcgtgagaaatcctaattcctaa

SEQ ID NO: 14768 - DNA, 216 bp, Zea mays
  Peptide Sequence Number=SeqID_56547
atgaagatgatcaaagtagtcacccaggaggacctgcatcttctgatgagccaccacctcatcctccacttcttgagacctcctctagtgctgctgctggctctcgtccaatggaccatggcggtcgaggaagaggtcagggatgaggaatatggcgtgtcgtttattactgaggaagatgaggaagaggattatgatgattcatcttacttttag

SEQ ID NO: 14769 - DNA, 364 bp, Zea mays
  Peptide Sequence Number=SeqID_56548
atggcgcacggcgcggcgtctagggctccaacagggaggttgctgcagcgcgacccaggcgggaaccagtggctcgtccaccggtcccaggctagagggaggagggcggtggcagagcatctaggtcaggcctcgggcttcacggctggtttatatgcgggtgctagggatctcgcgatgcgcatttggaggagcgatccgcgcggaggccgtggggtctgtttacgccgcgctattcttgcggggaagaagaagaccggatggcgtgagggcccactaacagcggaagtagcggtagttgatgcgcggggggagaagatgacctccgacagcacggacccacgcgtcagagaaagagataacg

SEQ ID NO: 14770 - DNA, 136 bp, Zea mays
  Peptide Sequence Number=SeqID_56549
atgaccaattcgacggtgaccactgccctggacctttgctgtgatcgtggaaaggggcgcgtgagcacaaggctccgacgatccctcgtcgggtgggcacaagcgccgtcgcacaactcggcctgggtagaggaag

SEQ ID NO: 14771 - DNA, 633 bp, Zea mays
  Peptide Sequence Number=SeqID_56550
atggagatcgagcaggcgatgcgcggcagcagcgacgtccggctgcgcgccaagtacgacgccgctgtctacatcgtccgccgcgcctacgccttgtacccagcaagttcaggtggtgacgtggacgacgacagcacggtcctccagaccgtgaagaactgccccatgcggaccatctacttcgaggaccccgatgctttccccgaaatcgactgcttcacgtacgagacggcatcgacgtacggcttgccactggaaagtatcaggacagggtacaagtccggactagaagccctgctcaaggagaagcctaccaaggcgatcttacttggcactagaaacggcgaccccaacgcggttggtcaacaagagttctcccctagctcgcctgactggcctcctttcatgagggtgaaccctatcttggattggtcctacaggtacacttctattggcagcgtacacaacactgttccaaaccagcttctgcgtgatggcccgggcgggtcgtacaggccggcgtatacgctgtcagatgggagtcttgagagggctggtcgagcaaagaagaccgggaagagagatggctcggctaatggcacgaagaacaacggcaatgaaacgaaacaatag

SEQ ID NO: 14772 - DNA, 198 bp, Zea mays
  Peptide Sequence Number=SeqID_56551
atggagaagcgagcacgagcagcatacgcggaggcctcgccggcgtggactggaactcggactttcacctgctgctgctggctccggcctctttggttctacttcgataataagctgaaggccagagcctgcgtctacgccgcctcgtcggttgggctccccagcagcggcgacgcgtgcggcgtgctagactactag

SEQ ID NO: 14773 - DNA, 379 bp, Zea mays
  Peptide Sequence Number=SeqID_56552
actttggggttggccacgcgcgaatgcggcgcttggactgttggaaggcgaggcgcgagcccgggggcgtccgactccggctaggccgtcggacggtgggtggcggcgccggcgtcacgcgtcgagccggcgagggccgatcgtcgagggcgaggccgcgaggggtcggccgacggcgggggcgggacactgtcggcggcgagggcacgccagcgccgcgcgtgtggcgagtgctagcaggtggcggcagccggttccgggcttggcggcggttgactgtagggctaggcggcagtggagataggagaaagcaagctagtagtgtctctgtgcgagagagattgccagattggtgggcttactgggctgctgggctatg

SEQ ID NO: 14774 - DNA, 543 bp, Zea mays
  Peptide Sequence Number=SeqID_56553
atgccaaactgtcagaagacgaaacagaagctcgagccggtaaaaacggagaaagacgcgcgcgcttaccgtatggagaatggctcagcggcggcgggcttcggcatcctgccttcctctcacccggggcgcaggtgcgctccgccggcgagagatggggatgggggtctgagcctctggcgagggggagagcagctcgaggctcgagctgggaagggagaagacggaggtggcgaaaaagaaaaacaaaaggcgagtccagaggagcggtgcgtggggcagaccggcagaggtgctgtgggtcccggcgcgcggcggattggacgtcagggttcaccgagtcgcctgctttcaattactgctctgcctcgtgaagcgcgcgtgttcttctttggtggggctggccgcgaccgcgcgtcgtgtacgctgcgcgctgtggtgccgcggcgggccgtgggccggaccgggcgcgcaggcggccttgccctccgggtatcccgcgtccgcgttacaagatttcaaagtttttcaagactgccatag

SEQ ID NO: 14775 - DNA, 384 bp, Zea mays
  Peptide Sequence Number=SeqID_56554
atgacgaagcattcggagaagcagtggaggtttcagcaagcgttggcctggatggtctccgtcgacagcggcgacgattatgcggcgaagcagggagaacgctgcggcggatggcaccgacgtagtgccaggggcagcgaaagccgtaggggtggggacgccgagagcaagtccgacgtcaactgtgtggagaagatggcgacacgacggaaggaacccctgacgtctcccattctctctgatttatttgtctcccgtctggaagactctggtagcggctacagaggaaaagagcatgcggaaggcagagtggaggaaataaacttggctttggacggctggatttggaatcctgtaggtcatcggacggcaaaaaaattctag

SEQ ID NO: 14776 - DNA, 126 bp, Zea mays
  Peptide Sequence Number=SeqID_56555
atggaggagacgaggggaggcgactgcacaaccgagaggatggaggtgcgggaaccaaagattagaccaatatatgtcatcaggctcaggagccaaagtagtactcagctggaggtatttgcatga

SEQ ID NO: 14777 - DNA, 174 bp, Zea mays
  Peptide Sequence Number=SeqID_56556
atgggtgttcttggcacccttgctagaaatctggacgcccttgttggctacgcgtccatgcgcgccatagagagcccttcttccctggacgatcagcagtggctcacctactgggtcctgtattccctgatcgccctcttcgagctctcatgctggaaagtcctgcagtggtaa

SEQ ID NO: 14778 - DNA, 207 bp, Zea mays
  Peptide Sequence Number=SeqID_56557
atgaccacctacgccgcgtggtacctcgccatcgccgcgctcctcaacggccaggccgaaggcgtggcgcactccggccccaccaagctcgtgctctacttcaccggcgccaccaacatcctgtacaccttcggcggccacgccgtcacagtgactttccagcatgagagctcgaagagggcgatcagggaatacaggacccagtag

SEQ ID NO: 14779 - DNA, 780 bp, Zea mays
  Peptide Sequence Number=SeqID_56558
atggccgccggtaaaacctcctcccatcgaaatgacagcctcccagtcccagcctgcattaatataatggcagcctgctctcatcgcaaggcctctctggccgtagcagcgctcgtcgctgcggcgctgctggtcgccgccagccacgcgacgcccgccgacgacaaggccagggcgccaacgtcggccataactaacaagcctgccgagcattcagcctacggcagcgcgatgccgcgagggtcgccgtcgccagcatcgccagcacccgtgaacaagggtgtgccgtcacccggcggcactgctgcgccgcctccgggctacaacagcaacaatgccacgccgccgtcgctgcccctcgttccgccgccgcggccgcttccattcgtcatcgtagagggcgtcatatactgcaagagctgcaaggggaagggctacaacaccggcatagacgcgtcgccactgcaaggggccacggcgatgatggtgtgctacgggcggaaggtggtgaacgcgacggggacggtgaccgacgccaacggctacttcctcatcatgttctacgacatggccagcttcagctccaagacctgcaagatgtacctggtctcgtcgccgacgccgcagtgcagcaagcccttctacccgcccaaccagtggatcgggctctccctggtcagggagaccaggacggtcccgccggcggggctgcagggcatctacacccccaccagcgtcctcttctacgcccccgccgccaaaggccagtgcccctactga

SEQ ID NO: 14780 - DNA, 789 bp, Zea mays
  Peptide Sequence Number=SeqID_56559
atggggaggggccgcagcgagataaagcggatcgagaacccgacgcagcggcagtccaccttctacaagcgcagggacgggctcttcaagaaggcaagggagctcgccgtcctgtgcgacgtcgacctgctgctgctcctcttctccggctccgggaagctgtaccactacctctcgcccaccgtgcccactgtcaaggacctggtcgagaggtacgaggccgcgacgcacagcaaggtctgggccgacgttcgccaggagcggcgcgcggagctggagaaggcggagcggatgtgcgagctcatggagaaggagctgcggttcatgacggtggacgacggggagcagtacacggtgccgtcgctggagctgctggagcacagcctggaggcggccgtgcacagggtgcgctccgagaaggaccgcaagatcggcggcgagatcgactgcctccagaacattatcagaggacgccacgaggagcgctacgggttgtgcgacaagttttttttgcatctagagtctaaaatccgtgcagaacttcttgcaaatttggccgcagcttgctcattctcaggcctggaacaacggcggggaaggtggagggtcgaccccaccaagcggcggcggcggcctggaactcaaactgggtgcgttccttacgcgaccttccattacagaccaactatttgcagtaccaaaccaaccaacctgaagctttctgcaaaattgcaggtttcaactgacgctggctggcttggaagctcgaggatggatcgaagactatga

SEQ ID NO: 14781 - DNA, 267 bp, Zea mays
  Peptide Sequence Number=SeqID_56560
atggcgtacggccagagcaccctcaatgcgttttttaaagccgaaacaagctgcattcatgtacaggcgcacggatcggaacatggacttgctcagtttggagcggccataaagcccataactgtacaagcgaacactcaagttgctgcgggtgacacgggttgccttgtagttgaagtcctttaccagaggtacgagggacagatggaaccgaggcaacttcacccagttacagattacacaagctttggactcaagatacaatag

SEQ ID NO: 14782 - DNA, 393 bp, Zea mays
  Peptide Sequence Number=SeqID_56561
atggcgcccccacgtgcgtggcccgtggaccatatatacgggcgtgccatcgatcgccccgcgagagagaaagaaacgcgatgttacccgtcgaggagagaaatagagagcaaacttggagtgccggggaggagttcgcccgggttctcgacgcccgtggcgactgcggcgctccccgtaccgtgggcggcgtcctctgcggcatcaggtttgggcgccggaactcgccttgaaagaacaccgtcgcgcagtcattctctgggagcagcctctaaacgctggtcattgcccgtcatcggcgatgtcgcggtcagggcctaccgggtgaattcgcaacgggaggtagatgacgatgttgggatcgttggatcctgtttggacgaccgggattag

SEQ ID NO: 14783 - DNA, 933 bp, Zea mays
  Peptide Sequence Number=SeqID_56562
atggcaaatcttttcttcttattttgtgatttgaaaagtccaagtcacatggtagaagtcctaaccacaaggacaaaagagattcttgtgaccggaggaacagaagaaatcctgagagtgacgacagaagctctcttgagtgcgctgacaacggttctcgatcaagatgcactgtccgaacgcatttcaaatggtgaggctgatgcttcacttacagtagcctccaaagaggcagattcttcagaagcttccatgacaaaggagcagaagctgaaagctgagaggcttcgccgtgcaaagatgtttgctgcaatcattaagagtggagacaagaagatgaatgatttagctgtgtttgctgcaatcattaagagtggagacaagaagatgaatgatttagctgcatcatcggatccaactagtgaagctgccaaggcaattcctgatatgaatgtgtctggacttgatcagcaatctgtggctaaggaacgtgaaggtagttctgatccgtttgaacatgagggaccaaacttgacaaatcataataaagactctgatgatgaaccaaacagagtgcggaagtatagaaagaaacatcgagaatcccatgaggaaaaagatgaatcggaggatatctataagcactcgaggaagaggcatcacccagagcattcaagaggccctagcaaggatgttcacaaacataagcacaagagcctcaaggtcgcacagaagtgtccgcgtctggatcaggctgcagcgtcatatttctacgggatatttctagcggatttctgcactgatggaataattaatgtggtcttcatgtggaggacagcatctctgttttgtggtgttgaggacagcagcatcaacagtcttttgactgttgtaggacagcaggcagcagcagtctttttgactgtactttag

SEQ ID NO: 14784 - DNA, 375 bp, Zea mays
  Peptide Sequence Number=SeqID_56563
atggctatgcaagcagtggttctgtgcaagcgtgcaagcaaaccatttgatccattagattacgattcaaccacagatacaaccatgatactgaacagatggttggagacttggagcagagatgaagttcctactagtgatgcacattgtttccctgcaatgtatcttgatgctctagccattactgagacatttttttgctcccatgttttaaatttacagcctccttctgagaaggcacatcagataattgcaagaacaactttatttgtcagcgagcatgggggtagggctggacgaaatacttgtggctcgttggctcgctcggttcatgctcggctcggatcggctcgtttgaattttttcatgagctga

SEQ ID NO: 14785 - DNA, 330 bp, Zea mays
  Peptide Sequence Number=SeqID_56564
atgacgaaacatagaacgaaacaacgtcggcagaacgacactcaaaacgtagaatggaacaaactaaactggagctcaaatatatccacaaagggtaaggcagaagctagacacacacaaaaaaggaatgaagaagctgacagctacagatacgagaggatagaggagacggcgcaaaggaagatccatttatacctgagggggctgcatctccagaaccctcgtattcaccgtcgccagccgggacgtccagatagcgctcgcgatcgggctcggtctcagactctcagagacgccgtcgggggagggcgtggagaggagggccactga

SEQ ID NO: 14786 - DNA, 1701 bp, Zea mays
  Peptide Sequence Number=SeqID_56565
atggcggcgagcgggcgctggaggaggctgcggacgctgggccgcggcgcgtcgggcgccgtggtgtcgctggcgtcggacgcggcgtcgggggagctgttcgcggtcaagtcagccggcgcgagcggcgcggcgacgctgcggcgggagcatgcggtgctgcgcggcctgcggtcgccgcacgtggtgcgctgcgtgggcggcggcgagggcgcggacgggtcgtaccaggtgttcctcgagtacgcccccggcgggtcggtcgccgacgcggtggccaggggcgggggcgcgctggaggagcgcgccatccgcgcgctcgccgcggacgtgctgcgcgggctggcctacctccacggccgctccgtggtgcacggcgacgtgaaggcgcgcaacgtgctgctgggcgccgacgggcgcgccaggctggcggacttcgggtgcgcgcggacgcccggcttctccgcgcggcgcccgctcggcggcacgccggcgttcatggcgcccgaggttgcccgcggggaggcccagggccccgccgccgacgtgtgggcgctcggctgcacggtcgtcgagatggccaccggccgcgccccgtggggcggcgccgacgccgacgtcctcgccgccgtgcaccggatcgggtacacggacgccgtgcccgacgcgccgtcctggatgtcggccgaggcccgggacttcctggcccgctgcttcgccagggacgccgccgagcggtggaccgccgcgcagctccttgagcacccgttcgtggcggctccctgccacggccacggcgaccacgaggccccgcgggtgtcgcccaagagcacgctggacgccgcattctgggaggccgaagacgacgacgacgacgcggacgaggcagtgtcggcgagtgcgtcggagaggatcaagtcgctggcgtgctccgcctgcgccttgcccgactgggacggggaggacgggtggatcgaagtgctgggtgatcagcagcgggtcgaggtctgcggcgcggtgcaggtggcgcgcagcgcgccaggcaaagtgtccagcgtcctggcggtgccagctggggagatggatgtcggcggcggcggcggcggcggcggtgatgaactggaagcagaggacgtgtcgttcggtggcgaggttccaggatcagcggatgcttcggctgagcgtcagaagaaacgctatttgattttgcgttcgcactactgtcatgtactctcgtgtctggaccgggaaaccggcggtggattctcttctctccggggcacggccggcgggcaggcatcggctgacgcgaagaacgaaaagaagcaggcactccgatcgcgcaaaggcaggcaggcagcagcatctgcccctttcgacggggaacgggcaaaacgggattatccacagccgacaccacagcgtcatgcggccgggctggtgggtggcggccgagtcggtgcgcgcttgatggggggccggcgaggcggcacgccggctgacgcgacccccgcatcatgggttccgtcacggcgcaatatgcctatgctatgcgggtgtctcaccgtaccgtacgcggtcaaagcacaagccggcaccatgatttactcgctcctccgtggcgttcttcggaaggcttgggttcggttcggtgaagtcaacggctttggaatgttcgagggggcgcgcagaagggtgtga

SEQ ID NO: 14787 - DNA, 231 bp, Zea mays
  Peptide Sequence Number=SeqID_56566
atggtggaggggccaatttggccagagggtgctcggggtggccggtccacggtgcggtggcgggcgctcgcggcgagccaggagggcgaggctctgggagcagaggaaggattcatatacgttcttgagctccagctcggggaaggaggaagccgggtggccgaggccggggcatttgcggagctaggacacatgaaacacattgtggatatcagacatggattctggtaa

SEQ ID NO: 14788 - DNA, 846 bp, Zea mays
  Peptide Sequence Number=SeqID_56567
atggggtttctcccctcgaaagatgtctcagggtggaggctagaagttgagggcgaggtgccccgacccaaggacgatgaagttatcatgcccacgtccttctacaagcgcgagtttgggttgccccttcatccattcgtacacaggatcctccactactaccaggccacagcgatcaaccgtttgtcagatcgaccatcattcaactttgctccattggaagctagagtacttcaagaccctatcccctcctccattcgatatgaaggtgagtggttctacgtgaggcatgtggctacgagcactccatcgttcactggccgtgagcccgtgtcctcaagtgaatggcaacacgctggggaggcgagcctcaagattgaggtagggaacctgctgagggcggtcaagacattgaagcagcggggtctctccagcgcgtggctggtgaggacttttatgcatcaccggatccagcctttgatggctggccataggccgatgcatcaatactccggggtcgacgaccccaaccatcagtcccctatgccacttgctctatcggagatcgaggccaggatcaagtttgtcatgacattgtcatccggatccttcatgggcaaagatctacccccttccttgtccaaagacgtcgcgagcaccctagtgagccccttctccttggggatcgaaacctttgtggcatgccttccgccccttcctaaggtcgctgttatcgagcgaaagcggacgagggacacagatggtgaaatattggcggagcattcgaggcgcgtccgatcgaagaaggagaaggggaaggccctcaacccatccacgtggagctag

SEQ ID NO: 14789 - DNA, 348 bp, Zea mays
  Peptide Sequence Number=SeqID_56568
atgcgtggcctcgtccttgcactggagctgttgggttgttctggttggttgctggggcaggaaggcgaggtgcctagttgttctgacgctggtactgatttcctccctactggttgttttgacggtactgttgttgctgctgagggaactacctctggtattgctgctagtgctgatgctgatgctgtccttcaggtacatggtaacgacgaaattatccctgaattcctcccaggtgacggcttcaagccaatcttcggcatccatgggatcaatagaatgggcaaagacatgggatggcccctcatgaattctgttcgcttgtctcagggcacctgtggcatctga

SEQ ID NO: 14790 - DNA, 168 bp, Zea mays
  Peptide Sequence Number=SeqID_56569
atggagagtcatgatctccgggcagaatgggaatcacgacttgtgggtaaagtgtgcgacctctgtagagtgttagaaactggttgtccgcagtgtattcagtgctcagcaggagatgctggcaacatggaggactttgaggagtttcaggactacgacaagttctag

SEQ ID NO: 14791 - DNA, 609 bp, Zea mays
  Peptide Sequence Number=SeqID_56570
gtcagacacatgtttgacgagattgattatattttagaaggaaaaaatgctgaaaggtttgctactctttattcacatggttcaagtggggtcaattctgaagctagtacaagtatcaaggtcccaaaagtttactggaactatacatgtaaaaccatattgacactggaatggattgatggaattaagctaactgatgctgagcgcatcagcaaagccaatttgaacaggaaaagaatgatagatgagggtctctattgctcattgcgacaactgcttgaagaagggtttttccatgcagacccccatcctggtaatctagttgcaactgaaggtggatctctagcatattttgactttggtatgatgggagatattccgaggcactatcgtgtggggcttatacaaatgcttgtacattatgttaatcgggactccttaggcttggcgaatgacttccattcactaggatttgttcctgagggaacagatttacttgcagttgcagatgcgttgcggttttcctttggtgatgtcaggaggcaatcaaatgatttccaggccttaggagaggcggtgtccgccaaacttgacatggagaatcaataa

SEQ ID NO: 14792 - DNA, 897 bp, Zea mays
  Peptide Sequence Number=SeqID_56571
atgaggacacgagaaatccagatcacaatgaaaaagatcaatgacctgagcaaccctggacgtggaagtggaaaaaggaagacgagagtgacggtcgagctgacaagcatgaaagagggcgtaatgaaccatttgtatgatgtgatgtatgaatttagtttctcccttccccctgattatgcgttggtgataagagctcttggttctctagaagggactgcaaaagcactggatcctgagtttaaagttattgagagtgcatatccttttgtaattgggagactccttgcagaccccagccctgatatgaggaaaatattgcgggagcttcttatatgtgacgatggatccatcagatggaatcgactggaaaggctgattgcagctatatctgaacagtcatcagaatcttcaagcgcatcaggagctgactccagtgagaacgccaatggaagtcctgagtggagatcatttgatatgcattctgtgattgcagctacagaagacctatttgatttcattttatcgaggaaaggatggcgggttcgggttttccttgtccaggacatcgttaatgcttcagacgtgttccttcaagaagcgacattcccatatgtatatgcgaaagtgggaaagataggggacctaaatccagagagaagtaagatgatcaggaggctggtgaatactgtgcaatcgttccgccaagctatcaatttggctccagatgcttggagcgccatgctaatccgcactttgttgaaacctgaatcacaaaaatttgttcttgatgtgtttttggccctggctaaccattccagttacaagattccagaaacattctggctatttatgtcaagatttctaaattacttggacaaacaagatatactttag

SEQ ID NO: 14793 - DNA, 1206 bp, Zea mays
  Peptide Sequence Number=SeqID_56572
atggaaaacggacgcatcgaagttacagacttgacagagaagctggctttgctcgaagctgagaatgaaaagatgacttgtttgaacgaggcgttaaaagaagtggatgctaagctggtcatgtttgatgagctacaggaacggtttagttctactcttgctgagaaggaagaagctgcagagaagctagctgttcatgagaggacaatctcacaactgacagaggtacacacaagaaccttggagctccattctgtagctgaatcaaagaatgaagaaattggagctcagttccttgaggctcttgaaacaatatcacagaaagaagagcaagcaactgaagctgctgccgctgaagagaatcgtaaggttaaatttgatgaagcttcacagaagataaagatattggaggaacaacttgcagagacacatagcaaggtcgagcatttccttacagagaaggaaagcttggttcaagaaactagtagtctgaataaggagtttgaggtacatcagaacaagttgaacgacttacaacttgcacttgctgctgcactagcagaaaaggaggcggcatttgaagagattcattcactgtgtaaaacactcgatggaatgatcgagcacaaagcagaactagaaatacaggtatcttctactatacaagagcacgaagaactgaagagcaagtaccaaaatacaatggaagagaagcagatgttgagtgataaatatgaaacagcaaagaaagagcttgaggatgcaatagccaagttggaggaggaaatgaatgtagacaagtcagaaaaagagtctcacatctcaaagctggagcgacagattacattatcagagataaaatacatggaggagataaagactatgcaagtggaaacaactgaaaagaatgaagcactaacagccaagatgcaggaacacacagacttacaacatgagaaacacgaattggaacaacagttgctggaagttaggaaggaactggatggtgcttaccataccatagtaaatcaggaagaacaagcttctttgagagagataaagtgggacacttttaggatttattcagaggatcgtctggaagctgagcagcagcgtgctgaggagctggaactacaagtagcagctcttaaacaacagctccaagaagctgaggtccattataagcaaaaggtggcttttatttga

SEQ ID NO: 14794 - DNA, 1170 bp, Zea mays
  Peptide Sequence Number=SeqID_56573
atggaagccgaagtaagcgctccagccgatcttaaggcgcctgataagacgacgaccatactatccactactaatggccacttagggcttgttcggttctaccccaatacatatggattgaaggggtttcaatccctagtacacggtgatgacaaagaaaatataccgaatggtaatgcaaatttgcaagtgaaggaagccgacaatgatgaagacgatggaacaagatctgatgggtttgagctgatagatgtgaagcaaaacttcgattcagcaagagtggaggaagagatggccgctccaagaagtactacagtcgatacatctcctgttacagaagaaagtgaaacacaagaagacaaaacaacagcacatgaagaacaatcagttgcaacaaacacaagacatctagagtcctcaatgttgaaccaacaaacagaacaattggaaaagctgacaatgcgtattgaggagcttgaatctgaaaatgacaaactggtaaaggacttgacagaagcagaaaataagcagagcctgcactacagttgtctacaagaagctcaatgctctcttgcaatgaaagataaggagctggctgaagtaacagagtcgctgaaagatctgggttctgagcttggaacctcaaaaaagaggattcaagaaattgaagctgaattggattcatcagcagataagctttgtaaacttgaagagttgaaggatgaaagaagcttgcatgctgcacaggaggcgaagagggcctcagaacttgataagatgctagaactggcacaatcaaacatgaaagaaatggaaaaacatattggcagtcttcaagaagaagtgaagggttatcaagacaaggccgctgaccatcagcaaatagaagaatcactgagaaacacaatctcagaactcaaggtggtacaagaggcattggagctgtcaaagtcacaagtggaaaatttgaaacagaagcttgcctcacaggacactgatttcagtaaactaactgaagagttgaatctccattgttcatctgaagaatcccttaaagagaagtctcttaaactagagactgaacttactactgtacttgaagaactacaagcaaaggttttgagtttgcgagaagccgagaaatggaaacaaaacttgatgagcagttga

SEQ ID NO: 14795 - DNA, 225 bp, Zea mays
  Peptide Sequence Number=SeqID_56574
atggcggtagttgaaattgatgaaaaaacccgtgtgagaaatgaatatgtaagggtaaggattgcctacagagatgtcagtgttgttccatgcacagttgagagttctttgggtctctttatatatgattttcactttgaaagggaaattcaggaagaggacccccatgacaatcgtgatagtggcatcaaaattgatgatcaagatcagaacaatgctaagtga

SEQ ID NO: 14796 - DNA, 309 bp, Zea mays
  Peptide Sequence Number=SeqID_56575
atgacgtcagctgatgcttttatcacgcagggacattatgtgcttggccacaatttcgggccaggtagctcacataaccttcacgacaatctgaaccagttcgatcaggcttcctcggctcctaccttgcaacaacagccgtttaccgggaatggtcaactgacccagggatatcctggtgatatgcatgcgttgcagtttgtggagccaaccccccagattgaccatcagaatggcgatgagggcatagagcaacggttgaatgggacgaatggaaactggaccagaatcttgcttgacatgaaataa

SEQ ID NO: 14797 - DNA, 447 bp, Zea mays
  Peptide Sequence Number=SeqID_56576
atggagtacgagcgcggggaccgggccaagcggggccgtggaggtggcggcggcggcggcggcggcggaggacgcggaggtggcggcgagtacgggcggcagcacggaggcgcgtacggcggaggcggatggcacgggcacgacgaaggaggaggctacggcgggggccgtggaggcggtggctactatcaccaagggcctcgcggccgcggagggtggcgcggccccggcgcgggcggcagccaggcgtacgggtccggcggcggccgcgcgtgggcgccggggccgggtgaggggagaggccttggggttggccgcgagtacgcccccgtcaggcgggcagcgccggcgcctgcgcctgcgcctagggaggttgcgactgcgcccatggtcaaaggaagcgccgagttcgtcgggatccgttggttccgttccgtgctgctatga

SEQ ID NO: 14798 - DNA, 243 bp, Zea mays
  Peptide Sequence Number=SeqID_56577
atgagctaccaggctcctcctcccggcaccgcagcctacccgccgccgggcacggcctacccgccgccaggccagcaggcgtacccgccgcctgctacggtgcgccgccacccatggccgccggcgggtacccgccccccgccgcctccgcagccgcaggactccaagcgcagcaacgacggcttcttgaaaggatgcttggccgcgctctgctgctgctgcatgctcgacatgtgcttctga

SEQ ID NO: 14799 - DNA, 732 bp, Zea mays
  Peptide Sequence Number=SeqID_56578
atggcgcacgttctgccgcggccgcaccccgccccgcatcccacccgcaatcggcgcctccgccgccgcagcccttccttcgccgcagcgcttccagaaatctccatcccgaaacctccgtgccgtccccgctatagcagtccacaaccgtccgccgacgccatgatccaaaacttcccgcgcacacccgcgcggccgtgccgtccctgcgctatgcgctccatggaaggccggcgccgctccgaaaacctccgcgcacacccatgcggccgtgctgtccctgtgctctgctatctatggaaggcctgcggcactccgaaacctccacgcacacccgcgcagccacgccatccccgcgctctgctctccatggaaggtcggcgccgccatcccacgcccgatttgctctccatggaaggccgtccccgcgatctgctgtccatggagagcacgaccgcaggccttccgaaatctccgccccacccccgcgaccgcgcgatccactcccccatgcccgatctgctctccaacatacaccatccgcgtgatccatggacatcagacagtccccgcgccttcccgatcggcgtcgcccacacaatccacgcacctctgtgccccgtccggcagtgcctcagtggagatggtgctggatccgtagtggcggcggcggccatggacaagagcatgctcggcgacctggatgacctccccgaggaggacaagatgtag

SEQ ID NO: 14800 - DNA, 633 bp, Zea mays
  Peptide Sequence Number=SeqID_56579
atggccaccccatccaccgccggcgaccctgcccctgccggcgaaccagtaccaaccccattgcaaggaccagcccagcgtcgcatctcaacatcccgcatctcccacatcgtgcgcacctacctagacctctccagttccaggaagcgccgttccgctcctaagaaccagcccaaggccggggacaaggaaagggatgcggcggccgccgaaactgacgggtccaaggcggggccgtcctcgtcccacccgtctcggctgctccgggagctgggcatccgcgtctcccgctacacgcatgaggagcgccgggatatcatcctccgctacatgcagaagcggagcggtcgccagatcgtcaaccgcgcggccagtaaggtcccatcgaggcaggctctggcagtcaggcggcggaggggtgctggagggaagttcctcggcaaggatgacgcccaggttcttgacgcatctgtttctgtatgcacccgttcacatcaccgccttcagtcgcatcaatgcctgttcgctaacctcgccgcccagccgcatcaacgccgatcggcctcatcctgtccactgcccaagcccgaccccgtccactgtcctagcccgacgtctcaaccaaaaaattaa

SEQ ID NO: 14801 - DNA, 576 bp, Zea mays
  Peptide Sequence Number=SeqID_56580
atgtcgccctcctcctacttctccatcccgcccgggctcagccccgccgagctgctggactcgcccgtcccgctccactcttcctcgaacttcttcgcgtcgcccaccaccggcgccatcccggcgcagaggttcgactggaagcaggccgccgacctgatcgcgtctcagtctcagcaagacgacagcaagacgacagccgagctgcggtcggcggcgccttcaacgacttctccttccacgcgcccaccatgcccgcgcagaccacgttgttcccttccttcaaggagcagcagcaacagcaagtcgaagcagcgaccatgggtgggcgcaacggggaggggagctcagatcggcggcgatctcggtgcggtggttgaggggaggcgcgggcgcggagggggcatgggtgggcgcaacggggaggggaggggcgaggactatcggcgttggggcggacgcatcgggagtgggggtgggcgcggcgggggttgtgggcgcggaggggaactgactcggagaaggcggagaagtggaggccgtgatgagggatgccgcgggagtggagctgactga

SEQ ID NO: 14802 - DNA, 828 bp, Zea mays
  Peptide Sequence Number=SeqID_56581
atgtgggaatctatcaggaattcagctaattcaatgcgggctacttgccacaaaggaaatggttatgagatgaaacattcaggccataaagtttgcgattgggattcatcatcgaagtctgatcggtctcaccaagaagcatcagcagcaagtgaaagcagtccaaatgaacacacatcgactcaatcagacaatgatgaagatcatgggaaagataatcaggacacaatgaagccagtattgtccttggggaaggaaggctctgcctttttggccccaaaattacattacagcccatcttttgcttgtattccttatactgttgatgcttattatagtggggttggggtcttgacaggatatgctccacatgccattgtccatccccagcaaaatgatacaacgaacactccgggtatgttacctgtggaacctgcagaagaaccaatatatgttaatgcaaaacaataccatgcaatccttaggaggaggcaaacacgtgctaaattggaggcccaaaacaagatggtgaaaaatcggaaggctgcaaaggagggcgagcctttttgggatagcccttggggccgtggaagaccgggatggcatattgaatgcagcgcaatgagtgctcactatttaggacatgtattcgatattcatggtggggggaaagatttgatttttcctcatcatgagaatgagcttgcacaaagccaagctgcttatcctgagagtgaggtgaagtgctggatgcataatggctttgttaacaaggatgataaaaaaatggcaaaatcagataataacttttcacgattagagatgtaa

SEQ ID NO: 14803 - DNA, 429 bp, Zea mays
  Peptide Sequence Number=SeqID_56582
atggccatcgcctcccgcgtctcccgcctcgaggccgacgctgcgcgcctccgccgtgacctcgccgaccgtgaccgcgccgaggccgacctccgcgcctgcctcgccgactccgacgcgcgccttgccaccgctctcgacgagaacgcgaagctggcgaaggaaagggactcgctcgcggcgacggtcaaaaagctgaccaggaatttggcgaagttggaggcttttaagaaacaattgatgaaatcattgagtgaagataatctattgatgaagtttcgagcagtaacacttcttcagatgcctccagcagatctacaattactgaatccgtccatgacggagtggttctccccgagcttattcaactggcccaccctctcccaagttcttatctggtccgacttcacctgcaaaagctcgatctga

SEQ ID NO: 14804 - DNA, 2781 bp, Zea mays
  Peptide Sequence Number=SeqID_56583
atgaacccgggcatcaagtgcgactgctccgaccacaacaacaccatctgccacattaccgagctgaaaatgaacaaactggatgtggttggtcctatacctgaggagctgaggaacctcagccacttgacaactctgaatttacaacagaattacttaacagggcctttgccatcgttccttggagaattaactgctttgcagcagatgtcgctttctggcaatgcattatcaggaactattccaaaggagctggggaaccttgtgaatctcataatcctgagtttaggcacgaacaatttaactggctcccttccttctgaattgggtaacctggttaaactagagcatatgtacattgatagtgctggcttaagtggtcctataccatcatcattttcgaaacttacacgattgaaaacattgtgcgcatcagataatgactttactgggaaaataccagattacattggaagctggagtaatttaacagatttgcggtttcaaggcaattcattccaaggtccacttccaagcactcttgctaatcttgttcagctaacaagcttaattttaaggaattgcaggatatttggtactttggcattagtgaacttttcaaaatttacaggattaacattattggatttgagttttaataatatcataggtgaagtaccacaagctctactaaatatgaattcactcaccttgttagacttttcctacaactacctctcaggaaaccttccttcttgggctagtcataatttgcaatttgtcttacctgcggggctggagtgccttcagcgaaacacgtcatgctttcttggctctccacaatcttcctcctttactgtagactgtgggagtagtagatctgtatttgcttcagataattccatgtatcaacctgatgatgccaatcttggtgttgcatcatattatatttcaagcccaccaagatggggtgttagtaatgtcgggagattcatggatacatcaaacgggagttacatagtcaacagttcacgccggtttcagaataccctagattccaaacttttccaaacagcaaggatgtcagcatcaactttaagatactatggttttggacttgaaaatggggactacacagtcacacttcaatttggagaatttgactttgaagatttacaaacttggaagagcgttgggagaagggttttcgatatctatctccagggtgagcgtaaggagcagaactttaacataaagaaggcagcaaaagaagctggcgaagcaagcacatcgtacactgctgtcaagaaacaatatactgtacctgtcacaaaaaacatcctagaaattcatctcttttgggctggaaagggcacttgttgcatccctaatcaaggcgattatgggcctacaatatcagctttgagtgcaactctaaatacaaaaaagaagggtaataaaataggtgtaattattggagtcgtgattggtgcaacagttttaggactagcaatacttgctacactctgtgtgtggaggcacaaaaggagaaaagtatcactagagcagcaagagctctacaatattgttcgaatacctaatgtattctgttacacttatggtgaactaaggaccgctactgaaaattttagttctgctaatcttcttggtgaagggggatatggatcagtttataagggtaaattagttgatggcagtgtggtggcaattaaacaactatctgaaacatctcgccaagggaagaaggaattcgtagctgaaatagaaactatttcccgagtgcagcaccgtaatcttgtgaagttgtttggtttttgccttgagggaaataaaccacttttggtttatgagtacatggagagtggaagccttgataaagcattgtttggaaatggaagattgaacttgaattggtcaacacgatataaaatatgcttggggattgcaagaggcttagcttatctccacgaagagtctagcatccgcattgtgcatagggacataaaggccagcaatgtattacttgatgccactttgaaccctaagatttcggatttcgggctcgccaaactttatgacgataaaaagacacatgttagcacaaaagttgctggtacatttggctatctttcacctgagtacgccatgagaggtcacatgactgagaaagttgatatttttgcttttggtgtggtcatgttggagattattgctggaaggccgaactatgatggtaagcttgaccaagacatggcttatcttttagaatgggtctggcaactttacgaggaagaccatccgctggacattgcggatcccaagctcacagaattcgatagtgtcgagttgctccgtgccatccgcatcgccctcctctgcatccagagctcacctcgtcaaaggccatccatgtcgagagtggtgtcaatgctcacaggagacagcgaggcgcctgaggcagtgtccaagcctagctatgttgccgaatggcagagcaacactgaagggacgtcaagctcagtgtccacagcagaggctgtgtccgtggctccattcctaaaccccgttgtggacgatggccgatttagaattactcgtgcaagaggtgtttgcttcactctatatagaaaaccagatgacacacccttacaagaaacaaagtgtgcatttataaaattagatttagccttagctctttctttacaacaacaacaacaacaacaaagccttttttgtcccaagcacgttggggtaggctag

SEQ ID NO: 14805 - DNA, 1110 bp, Zea mays
  Peptide Sequence Number=SeqID_56584
atggaggaagtggaggaggcgaacagggaagccgtggagagctgccgcagggtgctagccttgctctcccatccgcatgaccccgcgcaggtcaggagcatagctctggggacggacgaagcatgcaccaagtttaggaaggtggtctccctgctcagcaatggagaagtaggaacaggagaagccggaccatcaggcacaagcgcaagcgcaagccatcctagagctaagcttgttagcagaagacagaatccagggttcttgactcagaaaggcttcctggacagtaacaccccggtcgtggtgctgaacagcgccgcccatccttctccgacctccgcgcaggtgcatccaagagccggagcattggatacggagggcgtgcaccccctcggagttggaggacctcccaagctggtccagcctttgtccgcgcattttcagttcggcaatgtgtcgtcgaggtatcagcagttaccgagtcatcatcatcgtcatcagcagcaggagaagctgcaggccgccgagatgttcaagagaagcaacagcgggataaacctgaagttcgagagcgccagcggcacgggtacaatgtcgtcggcgaggtccttcctgtcgtctctgagcatggatggcagcgtggtggctagcctggatggcaagctgccgtcgtcgtcgtcatcgttccgtttgatcggtgcgcctgcaatgagcgatccggcgaacgccgcgcagcaggccccgaggcggcggtgcacgggccgcgggaaggacgggactggcaagtgcgctttggcgggcaggtgccattgttcaaagagaagtaagaagttgcgggtgaagaggtcgattaaggttcctgccgttagtaacaagatcgctgatatacctccggatgagtactcgtggaggaagtatgggcagaagccgatcaagggttcccctcatcctaggggctactacaaatgcagcagtgtgaggggctgtccagctaggaagcacgtggaacggtgtgtggatgattcggcgatgctcatcgtgacatacgagggcgagcacaaccacaccggaatgccagctcagtcagcagcagcagcagcacaggtgtag

SEQ ID NO: 14806 - DNA, 738 bp, Zea mays
  Peptide Sequence Number=SeqID_56585
atgcagcagggcgacagcacggaggcgcaggtgacgtgggaggaccagcagaacatcaaccgcttcggtcgcctcaacaaccgcctccacgagctccaggacgagatcaaactcgcgaaggtggattccttgacatattacgtcttttcgtgcaccatctcctggaacacacactctaacaccctcccccaacgcagttacaatgggagcactgcaaacgatcagattggagaagagtcgaaggtagaagccgatgagctgaaatcccctcgcagtcgtagcgtcgtgaagatgatagcccccggatgccgaggtagccgaagtcgaggtggtcgaagttcgagcatcaacggtcggtggggtgacacaaaaatggacaacaacagactcgtggaccttcttgattctttccgtgtccggtcatcgaggagcctcgccaaggaagccggcgcagcgcatgcgtctgcgctggtcaaggaaacgaacgagaaccttgacgatgctgggaacgaactcatcctgtcggacgaagatgtcgtgcgcttccagatcggggaggtgtttgctcacatgccgagggacgacgtcgagactaggctggagcagatgaaagaggatgcggctaagaagctggagaggctagaggaggagaaggaatccgtcctcgcccagatggccgagctgaagaagatactgtacgggaagttcaaggacgccatcaacctggaggaagattaa

SEQ ID NO: 14807 - DNA, 1619 bp, Zea mays
  Peptide Sequence Number=SeqID_56586
taaataccctattggatatcgggtcccgttgcaagtccacctacctcttcgagtcgggagtccggtgcggtctccacgagcgctccagctccactcctcgcacccgaatcagccgctcagatccccaggcccgcctctccctccggcggcagttcctcgccggggtcctgcccgcctctcccttcatcccctcctcagggtttcgacgagcggcgatatgtgattggtcggtctgccttgatttcggcctttgggaacttatggatggacaggtggagacctttgtcggagatgaggaaggcgggtcgcctcaagttccttacgatggggagcagccaacgctgtatgatagtgtcgcgaagcagtacagtgaagagctaggtgaccagtacaacgagcaacctcgtgcccaatatgatgaagggtctgggaatccgtataatgattatgaagagcaagcaaacctgtacagtgaggaaactgggaatcggtacaacgaggacccagcagattcttaccaggaagagcaggagaatgcattcagtgggggcataaaccaacaggacaacttgcaggtcaacaatgttgacgataacaaatggcctggatggcctggagagagtgttttccgcatactcgttccagctcagaaggttggagctatcattggccgcaaaggggagtttatcaagaagatgtgcgaggagactaaagcgcgcatcaaaatacttgatggcccacctggtgtaccagaaagagcaatccttttaactattaatttatttggtgaatttgtcactttcacctttgaagatggtgaatctagtcaacctcaacgaagtgctggtaatataggaccaacacgacttctagtgccatcttcgcaagctggcagccttattggcaagcagggagcaactattaaatcaatacaagattcttcaaaatctattgtccgtattgttgagaatgtgcctcctgttgcactaaatgatgatagagttgtggagatacaaggcgagcctcttggtggtcctggttttggaggaaatccacagttcatgcatccaaggccgcaagacagttactatccttctcctgatgtcccccatatggaaaagcagccgcactacggtatttctgcatacggccgggaggccccaccaagtggtgcttctgctacagggaatcaaccaccctctcatgcaggttctcaggtggctcatgacatgcacattccccttgcctacgctgatgctgtgattggggcagctggtgctagtatcagttatatccgtagacacagcggcgcaacagtaactattcaagagagcagaggtgcacccggagagatgaccgtggagataactgggactgcagcccaagttcaaactgcgcagcagctgatccagaatttcatggcagaagctgccccaccaccaccaggcccggcgccagcttccaaccctcccgcaccaccagttgatccaagctatggcttttacccacccccatatggagcagctcctttttatggttttttcgcagctgctgggcctccgcagtacaatggtgggaactacggtggcccgacctaccctcccagctatggctattag

SEQ ID NO: 14808 - DNA, 552 bp, Zea mays
  Peptide Sequence Number=SeqID_56587
atgacaaggggagttgcttggggggaccttgatattcttgttgttgatatgcccccaggcactggtgatgctcaactatcaatgtcccaaaggcttcggttatctggtatttgtacatctgcctatgaagctgcaaatgttggtgctttaattgtttcaactcctcaagatattgctcttatcgatgctagaagaggagccaacatgttccgcaaagttcaagttccaattctgggattggtagagaatatgagttgctttaaatgctcaaaatgtggtgagaaatcttacatctttggggaagggtcaaaaagagagcgcaagttcttggctccagcagaaacccacaatctcatctcatctttaaatccatcctctaaggtacctcttgaaatcagtatcagaacaggttcagatgaaggcaaccctattgttgtatcatcacccaactcagcatctgcgcaagcgtacgtaaatgttgcggagaaggtgactcaaaggctcaaggagttagcagaggagcgacggatgggcccagaaatcttactttga

SEQ ID NO: 14809 - DNA, 228 bp, Zea mays
  Peptide Sequence Number=SeqID_56588
atggagaacggaggtcgaggggcgccgggcgcggtcggggattcggtggacggcggcgcaggagcgcttgcgcttctcttgcgggccgcagatgcgggcgactgggcgaggctgccgctggaccttgggaccagagatggcaatggggacccgatccccgattccccgcggggaattcctctattaggggatggggatggggaagtttctttccccacggggatgtaa

SEQ ID NO: 14810 - DNA, 168 bp, Zea mays
  Peptide Sequence Number=SeqID_56589
atggagtggaaaggcaagctcaggttccctctcacctccgccggccgcgcggtggttgaatttgagagggccttcataaatgttttttctataatgatcaaaattgctagccggctcttcctcggagacattcgacactgtccatccttccctcgtctaacccgctag

SEQ ID NO: 14811 - DNA, 1380 bp, Zea mays
  Peptide Sequence Number=SeqID_56590
atgacgagcgacgacgaggaggcgtgcgactacttctacgacgacgacgacgacgccgaggaagacgccgccgccggactggaggaggactcttcgcttccaacgccggagggccgcgcggactactgggctatcacacaagataccgttttcgctgcacaggaggtcaacagcattgcagcagctggctcaatgacaccatggagaacagtgacctgcaaagttggacggagtatttccacgctgcgggtagagagcgggaaaaagcaaattcggtgcatggaggtcaagtgctcggctttctgcgatgaggacctcgtgcggtttctccttgtccaaaagtatccagacatggccaagaacttcaatcgcttcctgcttgggtcctaccttgaggacaatgcctctgtgaagtggtgccctagcaccccgaactgtggccatgccattcgcgtgggcactgatgagcgctgctgtgaggtggaatgcccctgcggcttaagcttctgctttaactgcatggggcatgcgcactcgccttgcccgtgcaccatatgggagaaatggaatgccagccggtccgagggagagaacatcaagtggatcctcgctaacaccaagagctgccccaaatgcttcaaggccatcgagaagaacggcggctgcaaccttgtccgctgcaagtgcggacagtgtatgtgttggctctgcggcggaggtaccggccaagatcacacgtggaacagcattaccggccacagctgcaaccgctacgaggaggagatctgtgtagagaccgtgcacaccggcaggcagcagatgcagcggtacaagcactaccacgaccggttcaagatccacggcgactcgtcgtacggcgtggagaagcagaagcttggggcggccatcgaggagcgggtgcggcttcttgagtcggaccgcgagcgcccgctcgccatccgcgacggcgactggctgacccgggcgcaccggcggctgctggtttctcggcaggtgctgtcgcggtcgtacgtgttcgcatactacatgttcggcggccacgagctgcggacgcgcccggccgagcgggcgaacctgggcgtggcgcgtaacctgttcgagcaccagcaggagcagctggagcggcacgtagagcacctgtccaggtcgctcgcggagtcggccgacctggcgggggctccggacgcggagatcgtgaagcagaagcagacggcgatcacgctcaccaagaccgtggagcggctgtgcggggagatgtacaagtgcatccaggacgagctgctgacgctgctcgtggagcccatgagcatcgcggcgtacaggccggacggccccgacagagcgaagcccgcgatctga

SEQ ID NO: 14812 - DNA, 648 bp, Zea mays
  Peptide Sequence Number=SeqID_56591
atggccatcctcatcgccaacctctcggccgtcgtcacgggcgcgctcgaagcggcaagggccattgccaccgagacgctcccggcggccgtgacgagggacgccgtcgtcgaggcgtcgagagcctcggtggcatggctcacgagctacctgtgggcctggctggccgtcgccgtcgacaacctcccggcgggcgccgcggcggtgagctccgcggccgacgcctcggggccctgcctccagacggcggccaagctcctccgcggcctctacgcctggctggccgccgcggtggtccagaagctcccggacgtcgccgccgagaagctgctgggcgacgcggcggcgtggctcgtgcgcggccgcggcggcgcggtgtacgccacgctggcgctcgcgctcctggccgtcgccttcctcggtggcgccgtgtgcgcgctcacctgccgccgctccatgatgaggcccgggcccgggaccgggctcggcggagcgcggagcgtgctcgaggccaaccccaagcgctactgctacgccaccgtgcggaccgtgcggcgccgcgccggtggggctgctggttgcaagatgcttccggccgggcttctcgtcgcgttcgtggcctacctggctgcaaaaacgctctactaa

SEQ ID NO: 14813 - DNA, 1233 bp, Zea mays
  Peptide Sequence Number=SeqID_56592
atgtcgcccgaagaagttctggggaagttcgtaagcgggcgaatgatgatcaaggaggcaagatatgtggacgacgcgttgaacggtcctattcatgagcctcaacccattgctctcaaggcaacgaggagcaaggaggcgctaccgagcaaggtggcgcaagttgaggcggccggactaaataatgaggagatggccctcatcattaagcgcttcaagacggcgcttaaaggtcgcaagggacagccaagcaagaccaagacaaaggagaagcgctcgtgcttcaaatgtggtaagattggtcatttcattgctaactgtcccgataatgaaagtgaccaggaaaaggggaacaaaagggagaagaagaagcattacaagaaggccaagggcgaggcacatatcggaaaggagtgggattcggattgctcctcctccgactccgacaatgaaggactcgccgccaccgccttcaacaagtcatccctcttccccaacgagcgtcacacttgcctcatggcaagggagaagaaagtttgtgcatccgggggttcaagctggattatcgacagcggatgcacaaaccatatgacgggggagaagaagatgttcacctcctacgtcaagaataaggattcccaagattcaattatattcggtgatgggaatcaaggcaaggataagtctgaaacccaagggaccctcaagcgcttcctcaggagagctcaaaatgagtttgagctcaaggtgaagaagataaggagcgacaacgggtccgagttcaagaaccttcaagtggaggagttccttgaggaggaagggatcaaacacgagttctccgctccctacacaccacagcaaaatggtgtggtagagaggaagaacaggacactactcgatatggcgaggacgatgcttggagaattcaagacccctgagcatttttggtcagaagccgtgaacacggcttgccacgccatcaacagggtctaccttcatcgcctcctcaagaagactttgtatgagctactaaccggtaacaaacccaatatgaagaagatgttccgacggccgctatacgaaccatggcgattggagaagtgcggccacaggaacaagatgaacgagatcaaccttcttcctcaacaacggtgcatcccccaactcaagacgatgaacaggttcatcaaaaggaggcgtgtgatcatgggggagcacaagatgatcacgtga

SEQ ID NO: 14814 - DNA, 273 bp, Zea mays
  Peptide Sequence Number=SeqID_56593
atgtgggcctgggcggggcgaaccgttaagagggttcaaaaacaacccggccgctgggcgcacagaaaggacccgcaagtcatggagaacagaaatcaaaaaggacaggctgccaacaagaccgggccgcccagtcccgggccgggtggttatgagattgatggttctggttatgattatggtgctggttgtcagcattgcaaccactgctcaggcgaagatgaagctgtggaaggagacttccaggagttccaagattacgacgagttctag

SEQ ID NO: 14815 - DNA, 186 bp, Zea mays
  Peptide Sequence Number=SeqID_56594
atggcggctccccctggatccctccctgcgcgaaccctctcctgcagcacgccagtgccgaccacaatctcccatggcgcaggagctccccattctcctcttgctagggcgccgtcgctgggctcgcccagtctctcgctttctctgctccagcagcaaccgtctcaagatgatggttctgtttag

SEQ ID NO: 14816 - DNA, 2979 bp, Zea mays
  Peptide Sequence Number=SeqID_56595
ccctctccaacaacatttgctgaggttttccagtgcatgttcgattacatcgatagactcttcatcatggttcgccctaggaagcttatgtacatggccattgatggtgtggctccacgtgctaaaatgaaccaacagcgttctagacgattcagagctgcaaaagatgcagctgatgcggctgcagaggaagaacggttgcgtgaagagtttgagagggaaggaagaaggcttcctgcaaaacaacaatcacaaacttgtgattctaatgttattactccaggaaccgagtttatggctgttctttcagttgcgttacagtactacattcatcaaagactgaattatgatcctggatggaaaaaaatcaaagttattctatctgatgccaatgttcctggcgaaggggagcataaaataatgtcgtatattcgtggtcaacggaatctccctggatttaatccaaacacacgccattgcttatatggcctggatgcagacctcataatgttagctttagcaactcatgaagtacacttctctatattgagagaggtagtttttacacctgggcagcaggacaaatgcttcttatgtggtcaggtggggcatctagccgctaattgtgaaggaaaggcaaagagaaaagctggggaatacgatgagaaaggtgaagctattgttccaaagaaaccataccagctcgacatgaagagtgcttttcttcatggtgaccttgaggagactgtctacgcgcaccaaccggttgtggcttcatcgacctgtcaacccctggctaggtttgcccgttgtagaaatcactatattgcttcaagcaggctcctcgtgcatggcatcaccggtttgccacctaagtctggcatcctcaacattgatctgcacctcagcattggcaacgtgtcatccatcacgacatactccggcattgactgggctggatgtctagactctcgacgctctacgttaggctactctgtcttcctcggggataacctagttttctggtcttcaaaacagcagaccacagtgtctcgttttagtgcggaggcagagtaccgagctgttggcggatcacaatgtctcggttcaatgcggagacagagtaccgagttgttgctcatgcagttgttcttgaatatctggacccttcgggagtacttagaatatgagttcagaatgccaaatccgcctttccagattgattttgaacggattgttgatgatttcatcttcatgtgctttttcgttggcaacgattttcttccgcatatgccaacactagagatcagggagggagctatcaatctattaatggctgtgtacaagaaagaatttccttcaatgggtggctatttaacagattcttgcacgccggatctgaatagagtcgaacacttcattcaagcagttggctcttatgaggataaaatatttcagaaaagggcgcgtttgcatcagcgtcaagcagaaagaataaaacgggaaaaggcccaagcaaagcgcggggatgatctggatccccatgtcagagatgatcttattgtacctgtttcaaatttccgagggtcccgccttgcatctggagcagtaccttcaccatatgaacagaatggatctcagagagaaaggtacaaccaaactcggaaagctccaagagtatcatcatcaggttccagcattgctgctgctatcgttgaggctgaacaagatcttgaagcacaggagcgtgaaaataaagaagagttgaagtctatgcttaaggatgctcttcgtgagaaatcagatgtcttcaattctgaaaattcagaggaggacaaggtaaagcttggagaaccaggatggagggataggtactatgaagagaagtttggggcaaggacacctgaacggatggaagaaatacggagggatgttgctctcaaatatactgaaggattgtgttgggttatgcactactactatgaaggggtgtgctcatggcaatggttttatccttatcattatgctccttttgcttcggatttaacgagtctgagtcagctcaatataactttcgaacttgggtcaccattcaagccatttgatcagctaatgggggttttccctgctgcaagtgcccatgcacttcctttaaagtatcggcaactgatgactgatccaaattcaccaataattgatttttatccaactgattttgaagtagatatgaatgggaaaagattctcttggcagcctgaagaagcaaggagaaacagtaccatgtgcaatatgctttttgtgaatggcgcccattcactttctccctatatctactctctcaacagtaaattcgggcatctgccagacaaagaccgtggtgcaatcaaagaaaaacttgatccttcagctagtggaggaatgaatggttacattgcactctgtggtggggacccgtcccctcctgtcttcagatctcctgtagatgggcttgaggacatcatggataatcaagtgatatgctcaatctacaagcttccagatccacacaagcacatcgctcgtccaccagctggtgttatcatacccaagaagagtgtagaagccggtgatctgaaaccaccaccagtgctgtggcatgaagacagcggtaggaggcctcatgataacaaccaccggaggccttatgataacagcaacaggcaaaacccatcaggagctctatctggccgccaactcggggaagctgcccatcgacttgttgtaaacagcttgaatgttcggggtggtgggcaaaataattccccatctatgccatatcagacaatgatgagtggtatgaactatccaaatggaaggcatcatgtgggtaaccatggagtgcctccgagaatggaacagcctgctggtcgttctggctggcatgtttctgatgataacatgaccaatggtcaagcagcttatgggtcagtatcagcctga

SEQ ID NO: 14817 - DNA, 366 bp, Zea mays
  Peptide Sequence Number=SeqID_56596
atgtcgtgtcgtcaacggggttcgggcacagtacttgctctaccgaggctaggtgccgagtgtttaagagtatgtacaacccgagacaaaaagagatcacgactcgtggataaagtgtgcaacctcttcagagggttagaaactgatatatcagccgtgctcgcggttatgagcggccttggagctcctttggttagagatattatggttacggatgatgatgatggttctgattatgaattctggtatttcctctacgaggagccttacttaaacaacaaacaccaggttatccacattgcatccgctgctcaggagaagatggaggccatgcagaggactttgaggagttctagattagattag

SEQ ID NO: 14818 - DNA, 324 bp, Zea mays
  Peptide Sequence Number=SeqID_56597
atggaggccgagtacttaacgaccgtgcttgacaacaacgccgatttgatgccattttggaggaagcctgcgcctggggagccaccagcagcacccgccgactctgaagctcagttcctctcaggagacgacggcgatgaacacgggcaggccgacgacgaggatggatgtggaggtgaacgactaccaaccgttgggccccaacaaccgccacgatccacccattttggccatttccttgttcaaaggatctacgccctcgcgacatgcttggaggtttcagacttccaggtgcttactgatatttcaccacgcgcccagtag

SEQ ID NO: 14819 - DNA, 288 bp, Zea mays
  Peptide Sequence Number=SeqID_56598
atggatcgatcggaggtggtcttcgtcaaaggacgcccgagacatgctggatcggaggagatcgtcgtcttcggatgctgccgcgagcaatcactaccaccattgctgcaaggtgtcgggcggttgacgctgcagaccctcgcgccgtcgctcgacgtcaaacggttgccgccgcaggcgctcacgccgccgatcgtgccttgtgcagtcacgaccgccgcgacaatcgcaccatggggagacgctcgccgacgtcgcctcgggtcgtcgctcgccaacgtcgcctag

SEQ ID NO: 14820 - DNA, 537 bp, Zea mays
  Peptide Sequence Number=SeqID_56599
atgggcgatggtgtcgacgaagattcttccgtggtcgcgaccgtaacctgcaggacgtgcttccgtggtcgcgaccgtcgtcaagtggaagatatgtggcttgttttagagaaatcacaattccccaacatcacacatgaattcatcattgcattttcattacacatctggaggaacaatttcacagaaagcaaacaaggacaaggacatgaggagcttgatggagctagcttgcgagaacatgaagaattcacaaaggtgaaaaatatcacaaaggttgaactggggagatatgagatagatacatcatacatggtacgcacgtatctcatctgtgtgttgaggcagaggcggcgaccagcaagagcggcatgcgcacctcaggccagcctcttctctcaaccaaccacagcttggggcatgaagctatatagaagaaattaccttttgctttctgtacaacaatttcatgctaggacaagctcagctcgtccaaacttggatgaacaaaaacgtaatcagtgcttgtttatttga

SEQ ID NO: 14821 - DNA, 506 bp, Zea mays
  Peptide Sequence Number=SeqID_56600
atggcgctcggccccagctcggaccgcgcccctgcgttcgacctccccctgccatggagctcgtccttgggccatcgtcttcatctttggacgcgcgctcctccgaccaccggaccaccaccgcaacacacgtggtttagaagctctgcgcagactcggcagcgcctgctcgtcgtcactgcggcgcgctcgctcctcgtccatcgggcttcggcgtgttcgcatttgccgtcgagtcgtcgaaccccgtcctcccctgctcgactatcaagcaggctccctgatccgcgtcctgctcgccgtcgatttcccacgcctgtggctgcggcgctcgctcctcgaatcctcattgccggtcttcagttctcgtcaattgctgacgtgcagcacgcctcggtctcgtgctcgccgtcgcttgatcgtgagctgttcgcccttgcaagctcactacagctttcgcccttgcaagctcactacagcgcgccctcaggccagtgccttcctat

SEQ ID NO: 14822 - DNA, 192 bp, Zea mays
  Peptide Sequence Number=SeqID_56601
atggcgcccagccgcccctcctctctctccctcatctccctcatgctcggatctcaccctttgggcatggaaatcgacgagctcaccctgggttcaaccggcgctgaccctgctcttatctccctcatctctacaactggacgctcctctgagaaaaaggtcctagaaattggttggagaagaaggttgtag

SEQ ID NO: 14823 - DNA, 507 bp, Zea mays
  Peptide Sequence Number=SeqID_56602
atggccagttgggggtgtatttatagcccccaacacaaatctagccattggaggaaagctgttgctttctgcggtcacaacggagagtccggtggtgcaccggacagcgcactgttccttgtccgcgagaccttcacgcctgggagccgcatcacctttggctcccttgacttcctcgccaccgccaccgacgagctccgcctcgttgattctgacacgcttgttaaggcaagcatgggaggacccacacgcttcaccaccgctacgagtaaggtggagaagagatgccttaagagccatgtcgccgccctcaagcggtgccttcacaagctcgccgctacaatcaagcacaaggttgagggagcgtcaccctcaacatttatggccatcatcgaccaccaaccaacctccatcctcgaccttctcaaggatgactcaagccacggctcaatggaggagcccaacattgacgctgtaaggaaaatgtaccccgatccatttggctaa

SEQ ID NO: 14824 - DNA, 759 bp, Zea mays
  Peptide Sequence Number=SeqID_56603
atgcaggcgacatgcaactgcaccaagggggcgcaccctttcggcttcgacgcatccagcatggaggcccaggcccacacgtcatggaccgggaaaggggatactccgaaagggatccttctccgcgaaggaagcgggccccgagccctcctactgatcagaggttcgaaggctggcccctcggaagggttcgacagccgcctcagagcactcgggctccacgcccactactggtcagagaatgcccctgaagggttcgacagccgcctcagagcacgcagagcgaggaatgactctgggtacgtccgatacatggccgaggctcgggctacgctcccgagggctcggcccccgtctcgacctcagacgacggacttcgcctcgcccgaccccagagctcggactcagcctcgacgccggaagacggtctccgcctcgcccgaccctagggctcggactcaacctcgacgccgggagacggtctccgcctcgcccgaccccagggctcggactcaacctcgacgccggaagatggtctccgcctcgcccgaccccagggctcggactcaacctcgacgccggaagacggtctccgcctcgcccgaccccatggctcggactcaacctcggacgacggtctccgcctcgcccgaccctagggctcggactcagcctcgacctcggaggagtcaccacctcgcccaacctcgggctcggaccgaccacgtcacaggggggccatcattaccctacccctag

SEQ ID NO: 14825 - DNA, 177 bp, Zea mays
  Peptide Sequence Number=SeqID_56604
atgggtcgatggctgtccaagtccaacaggctgaagatctggctgcttctgctgattggtgcgctctcacaatcgacgtgccttttctggttggaagttaagattctgaattcaaacttggaaactgatatgggtaatggctccaccggtccacccacgcccaacaagggcatctaa

SEQ ID NO: 14826 - DNA, 1548 bp, Zea mays
  Peptide Sequence Number=SeqID_56605
atgacgtcgctgctgctggtcagccaaatagcggcggtcggcctctgcagcgacagaaggcgagagctgcgtgccgacggcccagccaccgtgctcgccatcgggacggcgaacccgcccaactgcgtgaggcaggaggagtacgcggactactacttccgcgttaccaagagcgagcacctcactagccttaaagacaagctcaagaggatctgccacaaatcggcaatcaagaaacgctacttccaccacacggaggagctgctacgcggccaccctgcattcatcgaccggtccatgccatcgttacatgagcggcaggacatcatggctagtgccgttcccgagctcgctgccgcagccgcagttgacgctatcgccgagtgggggcgtccagccacggagatcacgcacctcgtggtgaccacctactccggcgcccacatgccgggcgtggactggctcgtggcctcactcctcggcctgcgccccaccgtgcgccgcaccatgctctacatgaacggctgctccagcggctgcgccgcgctccgtctcgccaaggacatggccgagaacaaccgcggcgcgcgcgtgctcgtggcctgtgccgaggtcacgctcgccattttccgcgcgccccacgaggcccacgtcgacacgctcatcttgcagtcactgttaggagatggcgcgggcgccgtcatcgtcggcgccgaccccgtctccgtcgaagaaccggacttcgagatgctgtccgcctcgcagaccacgataccggagaccaagcatgtcgccgccggccagctctgtgaggatgggttacacttcaacccttccagggagatcccgtccctggtacgtgaaaacatagagcagtgtatggttgacgctctatcgctgctcggcatcggcggcagctggaacgacctcttctgggcggtccatccgggtggacgcgccgtcttggacagcgtcgaggaggggcttatgttggaaccgcacaagctggaagcgagccgccgggtgctgagtgagtacgggaacatgtctgggccgtcggtcatcttcgtgcttgacgagctccggcgccagcaagagagaaaggggatggggaggaagcactgcccgcgccgcgcgattcaagttcgatcttcagattcctacgtcgcttcaaagggcactgacagtgaccgccagatccctacctccctgacatcaagaatggtatcgtgccctaagttcaagaagggggcgggctctagccatgaggtcgtcctcgtcgtactgttcgggaatgtctaccagatctggccggtgtatctctctgggccctgcaagaagaagctcaagttgcatgccgtgtgcacgatcgtcgtgccgctgagccccgacgagtgggccgggtgggaccccttgaagtggatctacatctacagtgtcgacggtctataccaacctgtgacattcttcagggagccatcgctgtcagcaataggtatcatatgcatggctcccagacggatcgcgtcgctttctagcctcacctag

SEQ ID NO: 14827 - DNA, 297 bp, Zea mays
  Peptide Sequence Number=SeqID_56606
atgaggagtccaagtctgagatattggacaaccaagtcccatagcgtgacagtagtcggcatatgctatggagttgttggtggtgttgtgtcgcctcgtgatatactatctatgtcgcctccagatacccaggtcttcgtcgtgtcctccggcaacgaacaagtcctcgagacaaagacattgtctgaaagtggcaatgacgaatgccaaagctatagccgaagagcgactgcttcggctcaaggtggcaacgaagatcgaacttcatgccgagtcaaagaggaaaagactagttaa

SEQ ID NO: 14828 - DNA, 486 bp, Zea mays
  Peptide Sequence Number=SeqID_56607
atggtgatccacccagcgcagcgtgaccgtcttcagtggcagagacgacgcaggagctgctgctcgactgcaaggcgtccctgcaggacccgttggggcgctctctccgcctggtcgcgctccacgtcctactgcatctggccgcacgtcgcctgtgccaccagcaccgccgcgaacacgaccgtctcagtctccatctcgctccagggcctcggcctctcgggcgagctcgccgcctcctccctctaccgcgtgcggggcctggtcgcgctaagcttcgcgtccaacggcttcaaccagaccaccccgctggagctatcatgctgcgccttgctcgcgtcgctcaacctcagcaatggcgccttctggggcccgctccctgagcagcaggccatgctcacctcactcatgtcgctcgaccacagctacaacagcttcgagggccaggtgcccgccggcctcgccgcgctcggcggcctcctctag

SEQ ID NO: 14829 - DNA, 336 bp, Zea mays
  Peptide Sequence Number=SeqID_56608
atgagtcaagcgtttgaacgtactaaacatatgccgagaaatatggtactccttgatttggttgatgacgactcccaggggatcgccgcggaggtatggacttacatccggaccgtcgagcgcgccgggctcgagggctcggatgagtcggagtactcctcggacgaggagaattcctccgactcgtctgaggagggtggcggcggcgacgacgacggaggcgacggtgacggcggtggcgacagcggcaagggcgaggacggcaacggcaagggtggcaacggcgacggcggcagcaagggcagcagcaagggcaacaacaaggccagtgactag

SEQ ID NO: 14830 - DNA, 534 bp, Zea mays
  Peptide Sequence Number=SeqID_56609
atgaacacgaaggccgcgggacttccacctctcacgctcggctccggccacctcgcctctccccccttcgcgctcgcccacgcgctcgacccatctgggctggggcacgcagcacactcactcgtcggcttagggacccccctgtctcgaaacgccgacagtttggttacaaagagtattgtaacatgcccgataaacacccacatccatggacacagacaggcgaggaaccaccgatcgagatttacgatcggcggggcggaggttgacgcgctggctgctgtcgaggataagatccccgggcctagggcccatcggacagcgagcgcgctaggaaaaagcctttggcaactgggatctatcgatcaaccaggggaggaagaaaacgtctactctggaagtacccgcccccggacgaaccccatggcaccgagtccgaggtcgggcgtggtggaactagacagggtggcgggcgaaccgaagggaaaccactcgagtggatccatcgcccggcccgagaccaacccaccataa

SEQ ID NO: 14831 - DNA, 192 bp, Zea mays
  Peptide Sequence Number=SeqID_56610
atgacgggggttgattggcctcacaaggcagacatgttacgccagggatcgtacatgttaaaataccttcatgttgacggggactcctcggtgcccctttgggttgctccacggggagttggtcagccgctcgacctcattggattgctcgatggggacttagttggtcactccgcctcgcaaggttgctag

SEQ ID NO: 14832 - DNA, 381 bp, Zea mays
  Peptide Sequence Number=SeqID_56611
atggccaagtacaacgatcttgcaccccaacggcccaaaccgaatgagcctagcccaatgcgatgcccgacggaaggtgaaactactcatgggtcgcttaccggagatggagagacagttgaggcggtccactgtgtggcacggtctacggtggcacgcccgcaccggcaaggaattgccgatgatataacgatggtctcccccgttcgaggtcggcaccacacttcccactctcagatgaccctccagcacgcacccaagggacagaacgccggcgaggatgcagatccgcggtgcacttcgctccgtcctggttttggcccttcctcacggattcgtgtgcaaacgacggtcacagttgggaaaaggggaaacaggtga

SEQ ID NO: 14833 - DNA, 414 bp, Zea mays
  Peptide Sequence Number=SeqID_56612
atgcccagcaccacggcggcgccagaccggagcccgccaatagcgtgcccagggcaccaatcccgcattccgaaagaccctatgcgtagccctatcgactatgaacccaatgacggcctttcttccccagattccaaacacaaagccccacccgcgttacagcaaggtgaatcctcaacaaaggcacaccaatccttgaatcaaacggttctactcgttgcggaaatgaaggcgaataagggcaaggggtccataccgagaatcgtgcgcgtaggcgtgcagtccatgacgaagcgcggtccgcagccgcggtgtaacgacgccgaggaattcacgagcaatcgaggcgccttcatggaagaagatgtcccaccaatgaccgcacgactctccctgactccttcccggctataa

SEQ ID NO: 14834 - DNA, 375 bp, Zea mays
  Peptide Sequence Number=SeqID_56613
atggatacgacagccttcgaacttgctctcttgggggccatcgcgggttgttttttcgtcgcacgaacggtgggcgccaaatgttggaacctgccctccaagacaggtcgatccaacgagaaagtagggagagagtttgcaaagcttaacacggaagtgggttggtggaatgggtggagcggaaatgggagcgggaggaggaacagtggatgcgggagtggtggaggtggtgggtatggtggaagtggtggatggctcaggagcgactggagctggcgaagtgggaggtggagtggtagctgtggcgggtgtagagggagcaaaggagcgaggccgagacgcgagtcgacgtactttgtatgcaatctgatctga

SEQ ID NO: 14835 - DNA, 402 bp, Zea mays
  Peptide Sequence Number=SeqID_56614
atgcccgtgcttggattatcttccccaccccctgaacgccttcaccgcgcgtgcttgcgaggcacagtgggggattgggaagtcggctggtgtcctcggcaattgctcgtcgtcaccgtgaacccgtcccgtgccgtgggcaaccattcctgcgaccctattgctggccttagatcgcctgtgctctggtggagctccgccgtgctcagcgcgccggcgcctctgtttggccgtgggaggaggacaattagcctgggccgttggatcctggccaacggtgaagatgtgagcgacttgataccggttcggagtattgatcggaaccgttgtgagatgatcgtgcggttaggattgaagatgaagaactccctcggccaatgcgatcgtagccctcggttttaa

SEQ ID NO: 14836 - DNA, 621 bp, Zea mays
  Peptide Sequence Number=SeqID_56615
atggcgcccgctgtagaagccgtgaaggagacaggcaccttccagaaggttcctgccttgaacgaaaggatactgtcatccatgtccaggaggtctgttgctgcacacccttggcatgatctggagataggtattgtcattgagataccaaggggcagcaaggttaaatatgaacttgacaagaaaactggactgatcaaggtggaccgtgtgctgtattcatcagttgtttaccctcacaactatggattcattcctcgcacgctttgtgaagacagtgatcctttggatgtactggttataatgcaggagcctgttatcccaggctgtttcctacgtgcgaaggccatcggccttatgccgatgattgatcagggagaggcagatgacaagatcattgcagtgtgcgctgatgatcccgagtacaggcattacaatgatatcaaggagctcccacctcaccgcttggctgaaatcaggcgcttcttcgaggactacaagaagaatgagaacaaggaggttgctgtgaatgactttctaccagcgagcgccgcttatgaagccatacagcactctatggacctgtatgctacatacatcgttgagggcctgaggaggtag

SEQ ID NO: 14837 - DNA, 453 bp, Zea mays
  Peptide Sequence Number=SeqID_56616
atggccgagaacgatgacggcgagctgctgcgcggcaaggcgagaaatcgtgggagcgtgcgtcgtgggaagcggttggaggtgggaggcagacctgaccagtgggcccagtggctccagtacgcatgcacgcagtggcctccaccagtgctgggcgcgcgtgggcgctgggccgaggcctggggggcgtgcaaggggaagagcgtggctgggccgcgctgggccacgggaggcgtggagtgggccgcggggaagggggtggcgcgctgggtcgcgaagggggaggcgcgctggccgggagggtcgcgaggagctggccgcgcgcgctgggccgaggcaggggagctgggccgcgggaggggaggtcggcgctgggccgcgggaggggaaggggaggccgagggttggtgggctgggccgcacgaggagagaggggggaagaaagcaagctga

SEQ ID NO: 14838 - DNA, 294 bp, Zea mays
  Peptide Sequence Number=SeqID_56617
atgagcggtggctccgaatttggaagaggaaagctggcggctgaagagaggggtgaatcaccggcgcgaaataccgtggcgttcaccggggcaatgtctcaggcgatggacaggctacctacgatggtcttctgcgacgtggtaactcttctaagtacgtggcatccaggcggcaagcggcagactctggcgagggtcatcttgaccggccgcagggcaagtgggtacggcgaccagctcacggcctcatccccggtcaatatcttttcaccactggccgttatccacacctag

SEQ ID NO: 14839 - DNA, 318 bp, Zea mays
  Peptide Sequence Number=SeqID_56618
atggcgtccctggcgcagcacgtcgcgggcctaccgtgcccccctctatccggcgcgtcgcgccgtcgccccgcggcgcagaggcggcctccgtcggcgcttgtgtgcggtacctatgcgctgaccaaggacgagcgggagcgggagcggatgcgccaggtgttcgacgacgcctccgagcgctgccgcaccgcgcccatggagggcgtcgccttctcccccgacgacctcgacaccgccgtcgagtccaccgacatagacacggagatcggctcgctcgtaatccctcgattcctccccctactctattgtcattaa

SEQ ID NO: 14840 - DNA, 1347 bp, Zea mays
  Peptide Sequence Number=SeqID_56619
atgccatgggaacaacctcgtccaggctgcaaaggcacggacgtggcagctcaccagtcctacggcctgagctaccgcgagttccagacttccagtggagacagccacccaaacaggcgtattcttgctgtccacatggctatggatcaggacggtacaatggacaatctcctaattttagttacttgtgtcagattattttacgaaatttcaacttctctctgtgggacatctaatggtacaggtcttggagagatgcatttagaaaacggacagagtggagccatggtcccggcttctaattcatctgaccggtctgacagatctgacaaacctatggaccagaaggttttacgacggcttgcccaaaatcgtgaggcagcaagaaaaagccggctgaggaaaaaggcatatgtgcaacagctagagagcagtaagctaaaacttgcaagcctggagcaagaactccagaaagctcgacagcagggaatcttcatttctagttctggagatcaaactcatactatgagtggaaatggagctatgaccttcgatttagaatattctcgatggcaagaggaacaaaataagcagataaatgagctgaggactgcagtaaatgctcatgcaagtgatagtgacctccgtcttatagtcgatgggataatggcacattatgacgagatattcaggctgaagggcattgctgcaaaggctgatgtgttccatatactttcaggcatgtggaaaacatctgctgaaaggtgcttcttgtggcttgggggtttccgttcgtctgagcttctaaagctccttgtgaatcagcttgagcctctaactgagcagcaattgatggggctgtccaatctgcagcaatcttctcagcaggctgaggatgcattgtcacaaggaatggaagcattgcagcagtccttggcagaaacgctggctgggtcccttggtccatcaggatcttctggaaacgtggcaaactatatgggtcaaatggctatggccatgggaaaacttggcacactcgagaatttccttcgccagtattggtcgaggcgatctgacggagggagcagccaagtcagcaagtaccgcagcaccaagcagtcgaacagcgccgaagatgccagggctcgccgcgtcggcgtccgcagctccggcgccgttctcgttggcgacctcgcgcttaaccccggttgcaagacctgctccaagtttcagaacgcaagcttgtggattgaggtgctggattgctgcaaagctgaaactccgcaaggcattgaaaaggcatcacggatggcaacttcaaagaaatctagatgctcgagggaatga

SEQ ID NO: 14841 - DNA, 426 bp, Zea mays
  Peptide Sequence Number=SeqID_56620
atgaaaccatctctttgcattgctgtaattggagctactggtgagctggcaagaactaaagtttttccagcattatttgctctgtattacagtggttttcttcctcggaatgttggtatatttgggtattctaggaagaaattgacagatgagggcttaagatctataattgaagccaatttgacctgccgggtggatcaccatgaaaattgtgatgacaagctaattgagttcctcaaaaagaagtattatgtagatgccggacatgacaaccaagaagggatggttagattcaattctaggatgtcacaaatagagggcattggtgctgcaaacagaatattctaccttgctgttccacaagaggcactccttgatgtagcatttcctctttttgttttgcccaaattaagcaaggctgaatag

SEQ ID NO: 14842 - DNA, 1158 bp, Zea mays
  Peptide Sequence Number=SeqID_56621
atggccgcgcgcagcaaggcccgcgccgcgcggctgctctcggcctcggggagcgcccgcgtagacccgggaccttacgccaacggcgtccccgacacggagtacctggtgcacctcgccatcggcacaccgccgcagcccgcgcagctcatcctcgacaccgggagcgacctcgtctggacgcagtgccggccgtgcccccgccaccacctgcttcagccaggcgctcccatacctggacctgtccaactcctccacgttcggcgtgctcccctgcaaccagcccatcacagctgggggaaccaaacctgtgtctacgtctactcatacggcgacagctccataaccaccggccacctcaacgccgacaccttcacgttcgcggccgctgatggctccggcggccaggtctccgtacccgacctggccttcggctgcggtctcttcaacaacgggattttcgagtccaacgagaccggcatcgccggcttcgggcgcggcgcgctgtccctgccgtcgcagctcaaagtggacaacttctcctactgtttcaccgacataacgcggccggagcccagctccatcctgctcggccttccggccaacctttacggcgacgccggcggcgtagtgcagtccactcctctggtccagaacttctcgtctctggaactatactacctgtcactaaagggcataaccgtcggctcgacgaggctgccgattccggagtcaacgttcgcgttgaagcaggacgggacgggcggcacgatcatcgactctggcaccggcatgacaatgctgccccaggacgtgtacaagcttgtgcacgacgcgttcactgctcaggtgaggctgcccgtggacaacgccacgtcgtcgtcgctctcgcagctctgcttctcggtgccgcggcgagctaaacccgacgtgccacagctggtgttgcactttgagggcgcaacgctggccctgccgagggagaactacatgtttgagttcgaggacgcaggcggcagcttcacctgtcttgctatcaacgccggagatggcctgacgaccatcatcggcaactaccagcaacagaacctccacgtcctttacgacctggtgggcaacatgttatcctttgttcctgctcggtgcaacaggctttag

SEQ ID NO: 14843 - DNA, 903 bp, Zea mays
  Peptide Sequence Number=SeqID_56622
gtcattttttctgaagaaacatcaaatgaaatacaagggaggtactttggaaattatgggataatccgtgacatagttcacagccacattcttcaaacaatagctctatttgctatggaaccacctgtaagtcttgatggagaggatatccgagatgaaaaggtgaaggttctcagatcaattcggaaagtgaaccttgatgatgttgttcttggtcaacttaaagatatgtctggtaaagttgacagatacacaaaatccatgataccaacctattttgctgctgctatgtacattgacaatgcacgctgggatggggtaccattttttatcaggacaggcatgggacttatgacgaatagagcagaaattcgaattcagtttcgccatgtccctggtaatatctaccgtgaacgctttggccatgacatagatctcgacacaaacgagctggttctacgcgatcaacctgaagaagcaatcctgttgaaagtcaacaacaaggtcccagggcttgggctccagctggatgcttcagaactgaacctgctttaccgggataggtacaacaccgaggtaccagattcgtatgaacatcttctactggacgtgctagatggagatagtcatttattcatgcgcagcgacgaactggctgccgcatggaatgtgctcactccgataatccatgagatagatcagaacagagtagttcctgagctctacgaggctggggacagagggcctatcaatgcttaccatctcgctgctaaacatggggtgcgatgggatgacgactgtcagatgtacaatatgccttctgtaatcggcctgatcaaggactttcaaggagacatgcctttcaaggagatatgcaaacatggtttctttcctgtcctgtag

SEQ ID NO: 14844 - DNA, 1329 bp, Zea mays
  Peptide Sequence Number=SeqID_56623
atgcgcgcgaatcggatcagcaaggtgaagctcttcaacgccgacccgggagtcctgcgcgcgctcgccggcagcggcatccaggtcatggtcggcgttaccaacgacgagctcgcaagcatcgcggggtcgcaggcggctgcagacgactgggttgcgcagaacgtgtcccgttacgtcggccgcagcggcgtcggcatccgatacattgctgtgggcaatgagcctttcctgacaagctaccagggtcaattccaatcatatatcattccggcgatgacaaatattcagcaatcactggtgaaagctaatcttgctagctatgtaaagctagtagttccctgcaatgctgatgcttatcagagtgcttctgttccatctcaaggagtattcaggactgaattgactcagctaatgacccagctggctgcttttctgagttctagtggggctccatttgtcgtcaatatctatccattcctcagtctttatcaaaattcagatttcccacaagattatgcgttctttgaaggatctactcacccagtagtagatggtccgaacgtgtactacgatgcatttgatgggaactttgacacattagtttctgctctcagtaaaattggctacgggaacctaccaattgcaattggtgagattggttggcctactgagggagcaccaagtgcaaacttaactgcagcaagggcattcaatcaagggcttatcaatcgtattacaagcaacaagggaactccactccgacctggtgtgccaccagctgatgtatatcttttcagccttctcgatgaagaggggaagagcatactaccaggaaactttgagcggcactggggaatcttctccttcgatggacaagccaaataccccctgaatcttgggctgggaaattcagtactgaagaatgccaaagaggttccgtaccttccatcacgttggtgtgtcgcaaaccctgctcgggatcttgacagtgtttcagatcacatgaagcttgcgtgcagcatggcggattgtaccactctgtactacggaggttcatgctatggcatcggggagaagggcaatgtttcatatgcttcaacagctactatcagcagcagaagcaggacccaaagagttgtgattttgttcaaaaatgatctagtggtcgataaatattcaagaactgagataatatactatattaaagctatgcgggtggacggtggtggcgtgggcgggcaacagttgtcgccgcagcaggcgtggccgcatgtcaccttcggatgctgcaccagccagcagcattggcatgctgaaatgaaatga

SEQ ID NO: 14845 - DNA, 1461 bp, Zea mays
  Peptide Sequence Number=SeqID_56624
atgttcttcgacgggtcgctgatgaagacaggagcaggcgcaggcctgctcttcacctcgcccctcgagaagcacctacgctacgtgctacgcctccacttcccggcgtccaacaatgtggctgagtatgaggccctggtcaacggtttgcgcatcgccatcgagctaggggtccgacgcctcgacgctcatggtgactcgcagctcgtcatcgaccaagtcatgaagaactcccactgccgcgacccgaatatggaagcatactgcgatgaggttcggcgcctggaagacaagttctacgggctcgagctcaaccacatcgcccgacgctacaacgagaccacggacgagttggctaaaatagcctcggggcgaacaacgcccgaggtaccctcggcccccgagggtgaggcactgcgcgtcgaggaggagcggagcggggtcacgcctgatcgaaactggcagaccccatacctgcaatatctccaccgaggagagctacccctcgaccaagccgaagctcggcggttggcgcggcgcgccaagtcgttcgtcttgctgggagacgggaaggagctctaccaccgcagcccctcaggcatcctccagcaatgcatttccatcgccgaaggccaggagctcctacaagagatacactcgggggcttgtggccatcacgcagcacctcgagcccttgttgggaacgccttccgacaaggtttctactggccgacggcggtggccgacgccactagaattgtccacacctgcgaagggtgtcagttctacgcaaggcagatccacctgcccgctcaggccctgcagacgatacccatcacctggccttttgctgtgtggggtctggacctcgttggccccttgcagaaggcacccgggggctacacgcacctgttggtcgccatcgacaaattctccaagtggatcgaggtccgaccccttaacagcatcaggtccgaacaggcggtggcattcttcaccaacatcatccatcgcttcggggtcctgaactccatcatcaccgacaacggcaccaagttcaccggcagaaagttcctggacttctgcgaggatcaccacatccgggtggactgggccgccgtggctcaccccatgacgaatgggcaagtagagcgtgccaacgacatgatcctgcaaggactcaagccgcggatctacaacgacctcaacaagttcggcaagcgatggatgaaggaactcccctcggtggtctggagtctgaggacaacgctgagccgagccacgggcttcacaccgttctttctagtctatggggccgaggccatcttgcccacagacttagaatatggttccccgaggacgagggcctacaccgaccaaagcaatcaagctagtcgagaagactcactggaccagctggaagaggctcaggacatggccttactacactcggcgcggtag

SEQ ID NO: 14846 - DNA, 1614 bp, Zea mays
  Peptide Sequence Number=SeqID_56625
atggccgagaccgtcgacgacaagatcagttacttccaggctgtcaccggcatctccgacacggacctctgcacggaaatcctcgccgcgcacaactgggacctgcagctcgcggtgtcctccatcaccgccaacccctcctcgccctccgccccggtttccacctcctcacgcgacccggccccttccgcccctttggcagatgcggagttcgtcgcgccaccgccgccgataccgccgccgcctcagcagcagccggggatcgcgtggaagctggtgacgctccccttctacgtggtctcgggtggggccagcctcgtcgccggctccttccgccttggcgcctgggtcgccgggggcgtgctgtcccgctccctctccctcctcggcctcgcggggcaggccggcagcggcgaccgcctgctagagctgccgccgtcagctgccgaggcggctgacttcgtcgccgagttcgagcgcgagtgcggcgctggccgcggcccgcgcttcgtggccgaggggttcgctgatgcgctgcagcgagcgcagcgggaattcaagcttctgttcgtgtacctccactcccctgatcacccggatacccctgccttctgcggcggctgcctctgtgctgaaccggtcgcggcctttatagatgagaacttcgttgcgtggggtggtagtatcagaaggaccgaagggttcaagatgagcaacagcctgaatgcgtcgagattcccgttttgtgctgtggtcatggcttctacaaaccagagaatcgtgctattgcagcagttggtgctggttataataaggaaggagaatgctgttgcctctggcaagatagcaaatgttagattgtcttataaagttataaatgctaatgtttacatagctaaattagagttgttctgtattggttatattcaatgtttggcatttaaaaatgtcaggattgctaataaattatatattcatgttcctaaggttgaagggcccaaatcacctgaagagatgataacaattcttcaacgtgttgttgaagaatgtgctacatcactcgttgctgccaggattgaagctgaagagagactaaacaaccagcgtttgcgtgaggaacaagatgctgcttacagagctgcacttgaagctgaccagttaagaaagttgtaccttcaggccagggaacgtgaaaggatagaggaacaggaaagacgtgaaagggaggctgtagaggctgagaaaaagcgtaaagaagaggaggaagctgtagcaagggcagcccaagaagcagctgaaaaggaagctgctcttgcaaggaggaggcaagagaaggccatggctcttggagctgaacctgagaaaggaccaggtgttactcgggttctcataagattcccaacgggagagcgcaaagagcggagattccatagttctgcaaccgtcacttccctctatgactacgtcgattctttagactgcatgaaagcagagaattacagcctagtttcaaatttcccacgggtcacatatggtccagagaagcactccctgacactggaggaggcaggcttgcatccgcaggcgagcctgtttatcgagatagagcaatga

SEQ ID NO: 14847 - DNA, 681 bp, Zea mays
  Peptide Sequence Number=SeqID_56626
atgaacgagagggcgacggggcaggtccagccgggcaggggcctgcgccgggcctggcgagggatgggtgacgcggatggcaaaagaagtgtgaaggatctgggccgcgaccatgcggttgaggacgacgctcgcgtcctgggctgcgctgtagagcctcgggaaggagggggctcgcaggggatccccggccaggccagggcgagctcgcggcggtatgtcgaggctggggaagggggcggccgcacctccggcacagcagaggcaagggggaccgcagctgcgtgtatgcccctagggatccactgtcggcccgccgtagccgctcccacctcggatgtgttgtctgtgatgcgtcagatatgtcgttcctcggggttcgccgccgctcccactgtcgctgtgcctccggaccagggtttcgtcatcgccgcgcttccagaccaaggattcgtcgccgcatcgcctttggatcgggagctactaccaccgccacgcctccagatcgggagctgccactcgcccgcctgcctcgggtgcaccgtcgcctgcctgcctcggggtcactgtcgctcgccctgggattacgccgctcgcacgctcagtctggagtgcttttatagacgcccggacctggtccgcctcaactggatggcaccgtccggcctgggctttctctag

SEQ ID NO: 14848 - DNA, 393 bp, Zea mays
  Peptide Sequence Number=SeqID_56627
atggaaatcattgaatatgtcgaagctacccccttggcttcgaagataattcttgttgtgactgccgaagctactgtcgctccagcagaagaagcagaagtaaagagctccaagtcagaggagtatccgaagctgcagagtcccccaagcatgatggggttgacaaagttagcatctgctccagcagcaactcctaggaaaggaaggagaatggctagcgttctggacgttgttctgaaatcttcgaaggtaccgactcctgcttctactaagacttctgaagacgaaattgaggagtttggaggaaccattgctgcaagtgcttctcccgcctgcactaaagccgggccttcgaaaattaaaccagcggagctagtgaaggaagatttttga

SEQ ID NO: 14849 - DNA, 222 bp, Zea mays
  Peptide Sequence Number=SeqID_56628
atgacgaaggtgatgcttgccgaaggtgttcaaaactcaaaaaatggacgtgagttcaccggagccgaacttcttcctcgtccagagccgtatgatcctaaggccgatccagctctgaagggcgctcttgatgtgataaggatagctagtgaagctattaacgaagatgtgagtaggctcctgaacgaagctgctgataaaatcttgaaggagaatgattag

SEQ ID NO: 14850 - DNA, 711 bp, Zea mays
  Peptide Sequence Number=SeqID_56629
atggggttcctgcgcgctccctctgctcaccctgtcgtctccatccatggccgatgcgtgcccctgcactatatcttccttggccacgctgaagtctgcaccgcatggggcctgcacactctctcctctgttcctcgccagacctatagctctatatacgtcaccctcacgtatcgtcatcgagcccgtcgaaccccgttcttccctgctcgacatcgtcgaaccccgaatcccggacgttgggcaaatggctcggactcgggctcagccccggaagacgacgaactccgcatcgcccgaccccagggctcggactcgggctcagccccggaagacgacgaactccgcttcgcccgaccccagggctcggactcgggctcagccccagaagacgacgaactccgcttcgcccgaccccagggctcggactcgggctcagccccggaagacgacgaactccgcttcgcccgaccccagggctcggactcagccctggcctcagccgacggtctccgcctcgcccaacccaggggctcggactcgacctcggccttggaagacagactcgacctcgacctcggaggagcctccacctcgcccaacccagggctcggaccgaccacgtcacaggaggcgccatcattaccctaccccaagctaactcaggctacggggaacaagaccggcgtcccatctggctcgctcctgtaa

SEQ ID NO: 14851 - DNA, 423 bp, Zea mays
  Peptide Sequence Number=SeqID_56630
atggagaagatgctcggtgaagtcgctcaaagcagagcaaagatttctaggagagctcaagggcaggctagcccaggagaagtcgatgtctcgaggcctagagcaagagctcagccaggtctgatagtccctggagaaaaaaagtgcagcaaggatgagcttcttcgtgttgctgcacacttggagtgtgacgacctcagtgggggccccaagtggagggacaagtttgattgctacctagcttgggggctagatcatggaatggcgccactggaaaacaatatcatcctttcttatcgtcgtcaccacttactgttgcgttttgcttgggcacttcatcctgcttcgatcatcgaggtcgtggagttcaaaaccttcggtcctaatatccagagagggttggcagcatcgaggttcccctag

SEQ ID NO: 14852 - DNA, 948 bp, Zea mays
  Peptide Sequence Number=SeqID_56631
atgtccctgagttggaccttcttggtcagtgtggtgacctgccccttggtctgttgggcacgcctaagcagctcgttccactgcatcgatgtcaatcgccgcacaacgagcgtccacaagcctctcgaccgcctcttgtcggtgagccatcaacgccaagagactggcccacacatccttctcccagaggaggaacataccgcgggaggaggaaggcgtgaccgacaagcccttgtcggtgagacaaggtcgtcgacctcattcttcgatggcgtggtctccttcgacgtaggtgtcaccatcgaggccgcttcctccaaagaagtggccgctggcataaatggggtcggcacccccactttgacaacaggtggtgcagtggactatcgtttcctactaaaataccttaagcaattgtatgctgaagtagtgttctacaaggacccttctaagtgctcctctacaatatttgtcagggagcaagaaaataatgccatcactccatgtttgatgtggttatcatgtgattcaagtagccttgtcacttgccacttggtcaggtatcatctgaagaaagagaaagacaggttcttggaagccaaatcaagagttgatgatgccttcagaagaaaggaataccttgcattagtggattcttacatgaaggagatagatctacacagtgacaacatgtacctcaggagcacaagatatatatgcagatgtaatagcttgttcctgaccaattcctcgctgtattatgctgattgtgggagcacagtgttctgtagtggtcaggcgctaaagaacattgcgccaaccttattcatgaaagcatgccaagcccttacaaataatcgctggatgcacttttgttctccttacacacatgaggaagagataaaagaattcatttccctccggcaaggtatcaacagcactcaatga

SEQ ID NO: 14853 - DNA, 222 bp, Zea mays
  Peptide Sequence Number=SeqID_56632
atggcgcatttcttcagcggcttcgtcgatattcttctgaagagagagagcgtctcctggtttgtgtccagtggctgcagtgcagcccctgacgctgctgtcctcttcggcaacatgacgaaggttgtgaaagtgagtacaccagaggtgggcgccaatgttggtcacttgttctcaaatgttatagatcaagaacaaggcaacacaattgttaatgaataa

SEQ ID NO: 14854 - DNA, 909 bp, Zea mays
  Peptide Sequence Number=SeqID_56633
atgggagccgagaacggtagcaacaacccttcgtcgaccgtcttggatggcctctacggggtgcagctcggccgtccatcggatccggcacagaccgacggtggggcgtcgtcgtcaccagcagcttgtgaacaccaccacaagcgtggccgtggtggtacagcacaggcacagcagaggttgcagatccgaaggctatggcagcacagaccgtcttgcttcaagcccatccactgcaccattacgtgtgacaagcatgctggcgagactgtcgcgaacgtcgtcacctcgctgcccttcatcgttcttggactgcaggctccaaggcaacatatatgctttgtttgcttgcgtgctcacagcgcgaggagtctactaagtaacgcgcgatgctgcaggaagaacctgaacgccgctatctacgccaactccctggtcgggatgggagtagcgtcgagcctgtaccattcttccagaggaggaatccggaggctcctgcgttgggccgactacactatgattgccaccacaactctgtgtttgtcgagagcagtaggcaacgagaacccaagattgctcatggccgcttcagcgttgctcctgccgtttcagccactggtggtttcggctgtccacactggactcatggaggcaactagattgactgaagacaacacaacactaattattaactatcctaatggacgccgccagcaggtttcatttgcgagaagagcgtcgatggaaccggagctcaggatggcgcataacctgcacaaggtgtcgtctctgctgggaggtgcgctgttcatcgccgacgactgcttcccggagactccctatatccacgccgcgtggcatcttgctgctgccatcggcgttggcacgtgcaacaagcttcttgaatga

SEQ ID NO: 14855 - DNA, 612 bp, Zea mays
  Peptide Sequence Number=SeqID_56634
atggacaccgtcgcctcatggcgcctcctctccccgcctccctgcccgcagcagctacccaagcggcaagcgaccttcgcggcctcgccacggcagcattcggccagctccagcagcgccaagttcaggctcctctgccacctccacctccatgacaagatcgatacacatatagctaccaataatcttgcattggtttcgttgccattgccggccacctcacccatatcgatctcgcctacaattcctgccgcgccgcggtgtctgatcgtccatgctctttgttctgtttcccgtttgcttcttggacgagacgacgaacgcgcagccagcggcgtcggtgcagcagagctcgcagctgcagaggctggcaacggtgctacgccgctgatcatgaactggatgaggctgaggtggtacaagcgtgaattcgtggagacgtacctgcaattcatgttcacctacctcttctacccagcgatgatgttctgggcgccattcgtcaacttcaggaagttcccgagggatcccaccatgcggtacccttggtccaagccaaaggagggcacgccgctgttcaaagatagatacccgcctatagactcctactag

SEQ ID NO: 14856 - DNA, 597 bp, Zea mays
  Peptide Sequence Number=SeqID_56635
atgacccttgttgttcccactacagcaccaggtgaagagacatacagaagagataggacgacaccgtccacctactcctctatgcaagacgacgggctagcctacaccgcaacctacgccgcaacctacaccgtagcctacaccgatgtcttcacccgctacagccagcaagggccgcgccttcgacaacctcatcttgcggaaggcatcctgcatgccttaggggacccatggggacccataacgcacactggtggctttcaagggcagcgccaagagctacgcagcccgctgcatcggccagagttagccctccttcctccgccattcaacgacaggggaaagtcgcaatatgacttcctctacctattaatgagtctcaggaaggacgtgatcaacaacaacgccatcagcaaccttaccatgacgaagggcgacttgccgaccgtgggggcccaagggggcctaccacacgcactagtgggtttcaatgccaccgtcggccactatcaagctctgcccatggctatcgccaaggcagaatgggctgctgcttacccttcgaatctgatgtgcaacaacactcagatggtttag

SEQ ID NO: 14857 - DNA, 1632 bp, Zea mays
  Peptide Sequence Number=SeqID_56636
atggcgtggagccttgtggccacgacggggcagtgcccgggcacgcgggacagccacggcgccgcgctggtgggccaccggatgctcgtcttcgggggcaccaacggcggcaggaaggtgaacgacctgcacgtgctggacctgcgcaccggggagtggacgcgcccgcagtgcaagggcgcgccgccgccgtcgccgcgggagagccacaccgtcaccgtcgtcgggggcgaccgcctcgtcgtcttcggcggcagcggggagggcgagggcaactacctctgcgacgtgcacgtgctggacgtgcccaccatgacgtggtcctcgcccgaggtcaggggcggccacgcgcccgcgcccagggacagccacagcgccgtggccgtcggccgcaggctcttcgtcttcggcggggactgcggcgaccggtaccacggcgacgtggacgtgctcgacgtcgacaccatggcgtggtcaatgtttccggtgaagggtgcatcgcccggcgtcagagcaggtcatgcagctatgagtgttggatctaaggtatatattatcggaggcgttggcgacaagcactactacagcgatgtctgggttcttgatgtcacaaaccgctcgtggagccaacttgaggtgtgcgggcagcgaccgcaggggcggttttctcataccgcagtggccatgaatactgacatcgcaatctacggaggatgtggcgaagatgagcgtcccctgaatgagcttctcattctgcagttgggctctgagcatccaaacggccgctacaacatttccatgtgcaaggttcttagcaaccactggagccaggagaagaggaagtttctcagatcagaagctagagatgcaagtgtgagcaatggggagatggctcagaaaccccgagaagcagaaacggagcaaaggaacccgttcctgcgtggcctagagaatggccgcgtgaagcgaaggagaaccggtgaagctcgcccgaaggaggccgagtcagagcaagaggagcactcgctgtccctttcccaacattcctcgccgtcgcagtcggatcaggagcagaccggagctcacaagcttccggcctcggccaacacgtcgccttcagccctgcagccgttcgctcgtctcaacggcaatggcgctcagctgagggccgccggacccggaggcgtctcctcgaggcctctcaaggcggaccagcttctccgcaccatcgcgccacagcatcggcgggagattggcgcagaggttcatgggacagtcgatggagcctttgattctgggtacctcgtgaccgccgtcgtgaacgggcagctcttcagaggcgttctgtttgctccgggacctggggtcacagctccgaggccggcggtgcatcaccagatcctgacgagctccgccgtgcctccccagcaacggccgctgctggcgcacgccatccccgtccacgcccggccagtgccgctgccgcaggccacgggcttcgtgctgccggactgtgcccaccacgcgcggcaagggttcccggcgaaggccgtcaagtccgagccggagcgaggcagcagcgacctgcacgatgttgtgctcacgctgggagggcctggagggggcaagtga

SEQ ID NO: 14858 - DNA, 123 bp, Zea mays
  Peptide Sequence Number=SeqID_56637
atgggatacgcgacttgtgggtatagggtacaacctctgcaaagtgtaaagctgccttacacatcacatgaactcccacctttggacttccgctatgtaacaagtactctgattatattgtga

SEQ ID NO: 14859 - DNA, 315 bp, Zea mays
  Peptide Sequence Number=SeqID_56638
atggaggcccaggcccacatgtcacgcaaccggcgcgctagttgcgtggtacgagcagccgtgccaccccttgcgccactaccgcgcctcctcgactgcggaaccagtaccacgactcgaggcaaccctgcgtatgacccaatagtgccagccaggcgcatcgatcacgggccagtcagccacgggagaaggcgcgacggtcgatgcgggcaaaaatgggccggcagtaatggcagtggcagggaccgggaaagggggataccccgaaaaggatccttccccgtgaaggaaacagaccccgagcctccctactga

SEQ ID NO: 14860 - DNA, 369 bp, Zea mays
  Peptide Sequence Number=SeqID_56639
atgtcctccgccgccgatgaggatgcgttgtcgtctgacaaggggaagaagagggaggaggacggcactgacgggaggagccaacgtcaggagggtgtcgaggtggccgacgggaaagtggatctaggagacctgtacggcgcggcggcggggtgggtagaggcgcggaccagctgcccgcacatcggcaccatgccacccgctggtgctgacgacctcgcgcgcgtgccttcgcccgactctccgtgctccaggtttggcgcaacctccctcctgctagagttctctgtggattctttggagcattcgggccatgtttatgtgtacgtgaacctatatggtcacacacttaaagggttggaagcttaa

SEQ ID NO: 14861 - DNA, 270 bp, Zea mays
  Peptide Sequence Number=SeqID_56640
atggcagcggcggtcgcggctgccacgacggcggacgaggcgcgcctgctgcgtctggaggagcacgacggcggcggcgcctgggactacctctgcctcgcccgccggctccgcacccgccaccccgcccacgtccaccgcgtcggcctcgctctcctcaacaacgtgacggtctggctctgccggacagtccgcgcctgtgggccggacggtccgcgcatgcgcagagcagttcagggttccgagttttgtgctatgtttgttggctag

SEQ ID NO: 14862 - DNA, 441 bp, Zea mays
  Peptide Sequence Number=SeqID_56641
atgtcgccccccgctggtgtgccgcccctcctccagctcgcggcagcactaggcgagctccgccagcgcctgtccctacacgatcgccatacccagaggtggcgagggcacgacatcaccaacaccactgggggcggcgggctcggaagcccgtacatcgcgttggtcgcggcaagctccatcgagggccaatattctgctgtgagatccgatagcagcggctgcactgagctgggtggatctggatctgggcggggttgtggtttggatcagggagtggccggctcggcggcggcggcgtgggtggaggcaaagccgatgaggcggtcggtgccatggtcgcccacatctgcatccatgctcatgtctcgtgcaaccgccgacgctgaaaccctagttatctcgcacacagcagccattgggaaaggttggatagagtag

SEQ ID NO: 14863 - DNA, 171 bp, Zea mays
  Peptide Sequence Number=SeqID_56642
atggagagctacacttttaatcctgaagttgttagaaaggagcttgttgccatgattactttgcacaagaaggacattatggatgcatatgtgcaagaaaagaaaagagccttagactacatggatgcaagcaagtcaagagttgctattacgacaaatgtggacgtctga

SEQ ID NO: 14864 - DNA, 309 bp, Zea mays
  Peptide Sequence Number=SeqID_56643
atggctacttatgtgtttctgatctctggacctaccctccatctttggttcaattttatctcaaaattgttccccaaaaaggatgtagtgaacacattgaagaagatggctctagggcaagcagtctatggaccaattatgaagtcagttttcttctcgtataatgcaggattacaaggcgagactcttcctgagatcattgcaagattgaagagggatctagttcccgccatcacaagcgggcttttatattggccaacttgtgatctcattactttcaagtttgttccagttcatttacagatgtaa

SEQ ID NO: 14865 - DNA, 387 bp, Zea mays
  Peptide Sequence Number=SeqID_56644
atggtgaagaagcttgagaagggagaaaccgtagcacgcgtcaacctccacaagaagcgagttcctaaggcaatgagagaagcaaacaacaagaacaaggaaaaagagcaaaaagaggagagaaaaaagagatgtttcaaatgcaaggagttgggtcactttattgcttcatgcccacacatggacactgaggatgaagggaggaggtgctccacatacaacaagaagaatcatgtgatcatgtcatatcctctcatcaagaatcaaggacgtgcatcccccacgattgctctcaccaagacaaagaatgaacagcaagcgtcatatcaggctaagcgacgcttctactacaagtgtggtgagcaaggtcgtctacacaagatttaa

SEQ ID NO: 14866 - DNA, 369 bp, Zea mays
  Peptide Sequence Number=SeqID_56645
atggatgctgaggtgagaagcaaaaggatgcctcagttattaggggcagcttacgttcatcatgcaggagtagtagttattaccacaacattaaaggagatgccttcactccagaaagcattgcctccagaacttgctgataatgtgctcaggttatatcgtgaatgcttacggagggcgaagtatattagccatcagaaacacaatacaaaacttttagtcgccatggtgagacaacaattcaagaaaaacatgcatgaaactgatccagagaagatacagaaaatgaaggacgattctgcaaggggccttatcaatcatattctatatgagtccgagaagattacaggacacaagttttcaggttaa

SEQ ID NO: 14867 - DNA, 360 bp, Zea mays
  Peptide Sequence Number=SeqID_56646
gccaatcaagaggctgaacagagctatgcaggcgagcatgcattcattatattcccacagttgatattttttgagatctcgttggtcaatcccagccccgacacgccgcatgtgcctcctcccgcgtcggtggtggccgccgtggagaaggacatgatggatgaggacgtgttcctggatgaatccatcctggaggaggacgaggcagcgctgctgatgctccagtgcgacgaggccctcgcgtcccaccttgcgcggtggaagcgaaccacaatacccaccaatctcgcgcgccagatgttcctgcgctgtcggtacgacccaatttcccttctctcccagcactgtagacaagagtag

SEQ ID NO: 14868 - DNA, 144 bp, Zea mays
  Peptide Sequence Number=SeqID_56647
atgggagctggaacatcaggagcagctggtgttggtcacttgttctcagatgctatgaaccaagaacaagacaacacaaatgttaatggatataatgatcttcagacgaaggtcatgaaggatataccttcatcatttccataa

SEQ ID NO: 14869 - DNA, 138 bp, Zea mays
  Peptide Sequence Number=SeqID_56648
atggtggtcgtcctcggtcgccaacctacatccatcctcgacctcctcgaggacgactcaagcagtgcctcgacggagcctagcttggactccgatgaggctggccatgattctccgattgatccccaaactggatga

SEQ ID NO: 14870 - DNA, 651 bp, Zea mays
  Peptide Sequence Number=SeqID_56649
atgggggaggagtcccgcgcgggcgaccactcggaaccgtgcctggcgcacgccatcgcgctcacctcgccatatgacgcgggtccgatacaagcgccgctcggccacgcttgctcgcacgcacgcgctggtccgaccgccatggccgcgccatcggagccgccgcccacgcgcgggatgggccgccgcaccccgcgccgtcagtgccggggccgcgcgcccgccgaggccggctggggaagccgcctggaggaccgccgtggccggatccgcggcacccgcgcccgcgcgtcgctgctcggggccgtgcccgcgcccgcgccgcctaggccgaggccgccggggatgccggggccgcgtgcccacggaaccgcgccgtcgcctgcttggccggggttgcgcgccaccgggccgcacccgcgccaagccacccgcgtcgagccatggcctaggccgcaccgccggagagcgctcgcgtcgcgccgagccgtgcgtctgtaccgcgccggggccgcccgctggcgagtcagggacggggggcctacccgcgcgcgctcctggagctgcgcacccgcgcgcgccgcgccaccgggggcagccgcgccacggggaggcacgccgggaccagagccgccagggacggggtcatag

SEQ ID NO: 14871 - DNA, 462 bp, Zea mays
  Peptide Sequence Number=SeqID_56650
atgtaccaagattaccttgctgaaaatccaacttatggcccgaacttgtttcgacggaggttcaggatgaatcgaccactatttcttcgcatactgaatgatgtggaacaacatgatgattacttcgagcagaagagaaatgcagctcatcaacatggactaagttgttttcaaaaggttactgcagttttccgtatgctaacttatggagtagcagctgatgctatagatgagtatgtacgcattggagaaagtactacactggaaagtctacgaaggtttgttaaagctgtaatagatgtttttggagatgagtacttaaggtcacccaatgaaaaagatattgaacggttacttgcacttggtaatgaaagaggttttcctggctcatcgcgtgtggccgcgcctcactggcacgttccggagtttggcatcggacgcggctccaccgcctccttttaa

SEQ ID NO: 14872 - DNA, 321 bp, Zea mays
  Peptide Sequence Number=SeqID_56651
atgaaggaggttaatgatgctgctcctaatgcaattgagattccagagatagaaccatcacaaagacctttggagaaggagatgaagagagaagaaagacatgcaaagtcatttgctctggacaaagagatgcttgaactagaaaaggagaggattgcgctaaagaaggagaaggttgccaacgaggcaaacaataatttcttgaagaggattgcagaagaagatagaataatgaccattgatctcagtgccatgaatgagatgcagcagcaatattacctgagcattcaagctgagattatggctcgtcgcatgaattag

SEQ ID NO: 14873 - DNA, 309 bp, Zea mays
  Peptide Sequence Number=SeqID_56652
atgcagcaaagaattttcaggttggcttggatgaggtgttcttatcctttgtacagattggctgttgcaagtgaactggtgattgagagatgtcttcaaaagcgatatatccaacaaatccggcagacagttgggggtgggggtcgaggtgggggagagagaggagacctgaatccggttcctgcggcggctaggaagagatcctacgatgaccgggagcggcggggaggaactcctgcgaagaacatgagtggcggggaggaggcagagcctagcgccgacgtcaagggagcaaacagggttacatga

SEQ ID NO: 14874 - DNA, 2772 bp, Zea mays
  Peptide Sequence Number=SeqID_56653
atgaatgctgcaaagtctgcttttgaacatttcaaaaacataaatcatgatgctggatcatctggctctgctaacccacttcctgttgccgctacaaaacagtctgttgatggaaacactctacgtgcaaagctggaagttaacaaatcacaccttgcagagccaagcacagaagttgaagcaatatattcatctacagaagttgacaaactgccacttccagggccaagcatggatatcgaagtaatggactcaactcttgaagttgacaaactgccccttccagagcgaagcatggatgttaaagttgtgaattcgtctctgaaagttgacaaactgcactttgcagagccaatcacagaagctgaagtgatccactcatctctgcaagttgatgaaccgctcattccaaagccaggcatgagctcatctctagagaacacacctgctgtgaatggccactcagcccccatatccccaaccattactcctactctaataagcgtgccaacagcaaccatgcctgtcagcaatgacagatgcggttgctacatgtcaaccaacagaatccaagtctaccctcgccacactgatatggttatcccggaaggcgcggccgtgcttcccatcagcgataatcagtgggtagctgtcagcctaccttattccatggaacaaagcacacttcctcagcaagacctctgcgtcgaatgtatagagaggaccgaattggagcgttcacccattcgccgcgtgcccccgaatgttccttccgaaagcaccgcgctcgcctacagatcacgacacctcgcaccgccgctcccacttccggcctcgccgcctcgcattaggatttccagggaaatcgggggatgccactatagtgtcccgctgtcggctaatttggcggccaatgcagagtacatgaagtacaaggatccaaagcaacctattaactctagaatcagggatcttatcggtaggatgacccttgctgaaaaaattggccaaatgacacagatagaacgccaggttgcatctgcaaatgtcatgaaacagtactttataggaagcatcttaagtggtggtggaagtgttccttctccccaggccagtcctgcaatttgggtgaacatggtcaatgaatttcagaaaggtgccttgtcaacgcgtctaggaattccattgatttatggaattgatgctgttcatggtaataacaatgtctacaacgccactttattccctcataacattggacttggagctacaagggatcctggcctcataaaaagaattggtgaagcaactgctcttgaagtgcgtgcgacaggcattcaatatacttttgctccatgtattgcagtaagcacagatccaagatggggtcggtgctatgagagctacagtgaggatcacaaggttgtgcagcagatgacagatattatccttggtttgcagggtgagatcccagtcaatcataccaagggagttccatatgtagctgggaaggataaggttgctgcttgtgctaaacactatgttggtgatggtggaactcataatggaatcaatgagaataatacaatcattgatgagcatgggctgctaagcattcacatgccaccatattatgactctatcataaagggtgttgctactgttatgggtttcgtgatatctgactggctaggagtggaccgtatcacctcacctcctggcgcaaactatacttattctgtgcaagctggaattaatgctggcattgatatggtgatggtgccatacaattacactgattacattaatgatctcacttctctcgttcacaagggtgtcatcaatataagcagaattgatgatgctgtgaagcggatccttcgagtcaaatttacaatgggcctgtttgagaaccctttagctgatcttagttttgcagagcagcttggaaagaaggttgggacaacaattcttgatgcgataaagtctaccgttgctgactcgacgtctgttgtctactctgagaaccccgatgacagtttcatgaagcacaatgacttctcattcgctatcgtcgttgttggcgagccaccatacgctgaaacagttggcgatagcaccgacctcactatgctagaccctggtccagacacgatcagaactgtgtgtgctgcagttaaatgtgcagtagtcatcatttctggtcgtcccattgtgattgagccgtatgttccattagtggaagcgcttgttgcagcttggcttccgggaaccgaaggtcagggtgtcgcagatgtactctttggagactacggtttcacaggcaagctcccgcacacctggttcaagtctgtcgaccaactgcccatgaatgtgggagacctacagtacgatccactctaccctttcggcttcggtttgatgataaattcatcattgccagggttctctggtgttgacaatctgggatataggaagcaaagagtgctatttgctgtgctgccgaagcaaagatctatgtccaccttctggttgatgggcgccagccagccgattaaggcgtcgcttgagggctacggcacgcctcttgaggcgtcgcttctccttcttattcctagaggtggcagagcatgtgggtcctcccacgcccactgtgatggacacatcggagtctgtgaggcggaccttaccggtggcgatggcgaagaagtcaacggaaccgaatgtgatgcggctcctaggcgtaaaggcctcaccgccggtgaacgctga

SEQ ID NO: 14875 - DNA, 1431 bp, Zea mays
  Peptide Sequence Number=SeqID_56654
atggaatgctcgcctccacgccattcatggcgccttcctcggtccccttccccacgtccgcgacgtcttgctgtactggtcggggctggtgacggctgcggcgtccttcgtggcggcggcctccgcggcgttcctgccggaggggaaccccgtcgcctccgccatcaccggcgctgccgacctcatgtacgcctgcgacgccgcgaggctggacctatcgccggtcctcatccacatctatgtgactatgtcaccacgataaagcgcttcctccaggtgctgtgggcgatcggggcgctcggctccgtcgggacctacctcgtcgccgctcgcccgctggatgagggcctcgtgcagtacgtggtggaccaccctgccgtgttgtggtttgtcggccccacgttcgtcgtgctcactggcctcgtcttcaaggaagggcccctccaacaatcgactatagaagatagtgggtttttttattttaatacacacgagtggtatactatctttggtgccgatagtcctgctattcaggagaataaggttgctacaatgcagtacatatccggtactggatctttaagagtcgaaagtgaatttcttgcaagcttatttttgaaggcttcttctgggaggacattaatcaccgcacaaattccacttgttgcgagccatccagatgtgcatgagccatgtgatgattcctttgcccttgttgatgcactactctcagataaagcacaactcttgacactacaaccaaggttatgtatggaggtagggtttggtagtggttatgtcatcacctcgcttgcaatcatgctcaggcagttaggctctggagcccagtacctagcaactgacatcaaccaacatgctgccgagacaactcaagcgacccttgaagctcatggggtgcatgcagatgtgattgttactgacatcatgtctggtcttgataaacgccttgctggtatggttgatgtggcagttgttaaccctccttatgtgccaactcatgtggaagaagtcgtatgtagaggcattgctgcgtcttgggcagtcggtttgaatggccgccaagtgatagacaggatccttcctgctgtgcgtgagatgctatcagaaagagggtggctgtacatggtggccctcgaagataatgatccttcagacatatgtcatctgatgagcgagatggggaaccttcgagaaatgttccagattgatgctgcagattacatgatgtccatatgtggtgatgacagtctgaaagagctttcttcacctgggaaaagcggcagtattttctatctctcacaggatgaacgttttgtcataaaaaccttgagaaaaactgagttgaaggattactctgaaaggcggaagaaaggtgcagaatcacatcattgttgcattactcttatttag

SEQ ID NO: 14876 - DNA, 198 bp, Zea mays
  Peptide Sequence Number=SeqID_56655
atggccggacgcacttttcaggaccttaaggaacaacaggttgtgcatggtgaggtggaaaacactttagggcctggttctatcaacttggcattagagaatccaataccaaaggattggagaactattcatatgattggagttgaaagcaatctactagatattgtctctaattctgttggcacatctataacttaa

SEQ ID NO: 14877 - DNA, 198 bp, Zea mays
  Peptide Sequence Number=SeqID_56656
atggggcagggcggcagggtggccatggacgtggagatccgcgcgcaccaggatttcgggctagagctaccgtccgaatgtgccgtggagatccagtggtatgcgctgccccggcagcacatccacacccacgacatcaacgccgactcaccatgcgccgtctccagcagacagctgcatcacaggagcggaccatag

SEQ ID NO: 14878 - DNA, 1188 bp, Zea mays
  Peptide Sequence Number=SeqID_56657
atggatttggctaaacaacatgcagggacggtgactgcagttctaaatgctgtcaatgcatatgctgaatgggttcctgtgacagatctagccaaatatggtttaattcacggatgtgggtccttgctttcttacagcgattttcgcctccacgcttgtgagttttttaaagtgatatgtcagaggaaaagacctgtggatgtggcagttgctgagtatgatgctgcaatgtgcaacatattccagatgctggagtattaccaacactacaaaatcacacttcatttccagtctctattattttggctgagaatgctgaagaacaatggaagtgcaacttctgggttgttagaaatatggagtgaagagcttgaggggaagagcgacttctgcaactaccgcaccaaattgttggatctcattaaagtcattgcttctcaaagatctgtgattgctgcagcaattgtagttcagagaataaatgttgtctttggagatgctaatcaagcaactaagtccccacaggatcttgatgcaatggaaggggctcaactggggcttgaagcagttgtcaatgctattttcgatggctcagttgattgtgggaaaactgatttggatacgaaatcccaactgcacaagatttttgaagaacctaaccttgcagttattcatggtcattatttggatgctttgggccctttcttgaagcatcatccagatgcagttgccagtgttgttaataagctttttgaactgttgacgtctctcccaatcacatttcagttctcatttctgccatttaatgtatggctgtatctgcaggatccatcaaacaattctcgcctagcaaggttacagatctgctcatcattcattcgtatatcgagagctgctgataaagcacttctgcctcacatgaagcgacctgctcgccctgctgcgacctgcaggccgccccaacctgtgcactctgctgcaacctgcgcgccgcgccgccgcctcctcttcccgcgccgtcgcgctgctctccctcagccaccgctctccctcctgcgcaactcatctctcctctgtctggccggctggagccgcgcgcggctgccgcagccccaaggcgtcgccccgacgaagcctagacgacgccctgaggacttcctgcgccgcaacggacgccttacgctctag

SEQ ID NO: 14879 - DNA, 411 bp, Zea mays
  Peptide Sequence Number=SeqID_56658
atgaagaggaagaaccgcaaaaggaacaagaagcatgcgcattcttactctgatgatgccaggagacacaagcgcagatcaagaaggagcactgactcaagtgatgagagcgacagtgaatatgagagcaggaggcaccatcaatcatctgatgatgactcggagaaggacaaggtcaagtcaagacatgggaagcctctgagatcaagtgatgaggatgcaaagtcagattccaacagacatcagatggtagagttgctgatgaatcagagaagattagaaatggcaaaaggtcgcacaagaatggccaccgacaccaccataaaagacataattccatggtttttttttccgaaggtatgggcacaattaaacattcctgcaattattgaaccacaattttctcgataa

SEQ ID NO: 14880 - DNA, 1983 bp, Zea mays
  Peptide Sequence Number=SeqID_56659
atggggatggacgccggcggcgggaagctgccgtacagctaccccgcccaccaggacggcaagctggtgaagagcttcagccgcgtggagccccgcaagttcggcctcgccctcgtcgcgggcttcctgctcgtcacctgcgcctacttctccaccgccaagttcgacgccatccacgtcgccatgacagtcagccccgtctccggcaatgcggctgggatcggcccgctagtgggcgccgccaacgccgacacctccgactccaagcagcgattagatttgggcaagcaagacccggacgacgcgctgtccaggtccgaggaggaggaggggagcagggccgacgaggtgctggagaaggacgacggcaaggcatcctcgtcgtcggggacagattccggcagcaatgcgccgctggaggacacgaggagagacgagacctttgtgggggacagcggtggtgcatcttccgcggcgggcgccaggagtgaggcggttcctgccaggcacgagcacgacgatgacgcccccgctgccgccctgcttcctcccgtgacgtcagagggagccgcgaacagcacgcaaggatcaggagttcttgaggacgaggagctgcaggtgcaggacgctgtcgccaatccttccaagaggagcaacgattcagccgccacgcgcagcagcagcagtggccgctcgccctctgtggttcactctgatcctgccatcctccctgctccctcgcagcagattgctcctgctgctcctcaagaggcagataaggctcttgctgttcagcatattccagcgatacctgaggttaagcaatcagattcggagacgccggcgcgggagtggaagccgctgtgcgacatcacctcgaaccgccgcatcgactggtgcgagctcgacggcgacgtccgcgtgctgggcgccaacgcgagcgtcacgctggtggcgccgcccggcggggcggacggccgcaccttccgcgcggagtcgtggcgcatcaagccgtacccgcgcaaggcggacccgaacgcgatgcgcgtcgtccgcgtgctgacggtgcggtcggtgcccggcgaggcgcccgcgtgcacggaccggcacggcgtcccggcgctggtgttctcggaccgcgggtacacggggaactacttccacgcgttcacggacgtgatcctgccgctgttcctgacggcgcggcagtacgccggcgaggtgcggctgctggtgacggacctccaggcgtggtgggtgggcaagttcgcgccggtgttcaggagcatctccaactacgagctggtggacctggaccgcgacccgcgcgtgcactgcttccgccacgtccaggtggggctcaccagccacgacgacttcagcatcgacccgcgccgcgcccccaacggctactccatgctggacttcaccgggttcatgcgcgccgcctacggggctcccgcgcggcgacgtcgccgccgccgctggcccgtcgtcgaagcggcggccgaggctgctgctgatcgcgcgcgcgcggacgcggcggggacgcacgaggtggcgcccttcgcggagctggccaacagctgcgacgccatcatgggcgtgcacggcgccgggctgaccaacatggtgttcgtgccgacgggcggggtggtcatccaggtggtgccgctgggcgggctggagttcgtggcgggctacttccggggtccgtccagggacatggggctgcgctacctcgagtaccggatcacgccggaggagagcaccctgatcaaccagtacccgcgcgaccaccccatcttcacggaccccaacgggatcaagagcaagggctgggagtccctcaaggatgcctacctcgacaagcaggacgtgtcgttggacatgaagaggttccggcccacgctcaagaaggccatcgcgcacatcaggaaggccagggccaaggccaacgccggcggcggcggcaacaactag

SEQ ID NO: 14881 - DNA, 996 bp, Zea mays
  Peptide Sequence Number=SeqID_56660
atggcggcaggtttcggcccgaggttcgccgccggcgatgctccggcgagacggtgtaacctggagcggttcctcgaggccaccacgcccgtcgttgcgtcctccagctgctcgtccaaggagaccgcgaacggttgggggcagcggcagtcagacgacgcagacggctcgtcgccgttcttcgctctgggcgacctctgggactcgttcaaggagtgcagcgcgtacggcaccgctgtgccccttgctctgaacggctgcagcgacggcgtcgttcagtactacgtcccctacctgtctgcaatccagctttacggagccctcagaaggcacatcggcccttcgaggacgggtgcagaggagagcgacagcgacgcggagcgcgagacgagctccagcacgaacacgttgtcggcccgggaggaggcgagcgagagcagcaccagcggcagcgaagcctccggcgacgagggcgagccgggaccggggagctggtgccaggagcggctcctcttcgagttcctcgagtccgagcctccctaccagcgcgagcctctggctgacaaggcatgtcatatttgtagccttgcccagcggtttccggagctcaagactctcaggagctgcgacctgtctccggcaagctggatctccgtggcgtggtacccgatctaccggatcccgacggggccaacgctgcgcgacctggacgcctgcttcctcacctaccactccctgtccacgcagttcgcagcaggcgccagcagcaacgggcccagaccggcgacggcagccaccgcgacggcgatgatgtggctcccgacgttcgcgatggcgtcgtacaagctgaaggcggcggcgtggacgccgggctggcgcgaccggcaggttgccgcgtccctcgcgcaggccgccgacgcctggctcaggctcctgcgcgccgaccacccggaccaccgcttcttcgccgcccggcggcctcccaggagatggtga

SEQ ID NO: 14882 - DNA, 357 bp, Zea mays
  Peptide Sequence Number=SeqID_56661
atgtcggtcgacttcgaggtcctcgtcatggatcttgatccaacagtcgaggtggaagaacaccggctccagacgtttaacaggaggacgctaatactttgttcgatgtcggtgccaaaggttcaacacaaaccaataaaaatacaagaaagggttcaaataaaaagagcaaaagataacccaaaggcagccctggtctggcgcaccggactgtccggtgtgccaccagacagtgtccggtgcaccagagaacccaactccgaacttgccaccttcgggaattctgggagccactccgctataattcactggactgtctggtgtagcaccggactgtccggtgtgtcagcggagtaa

SEQ ID NO: 14883 - DNA, 729 bp, Zea mays
  Peptide Sequence Number=SeqID_56662
atggcaggagagcgcggagaggatggtggtgtaggaggcggtggaggggtggctgaggagggagaagacatggagggcggaggggaggatgtccgcttgggagtaagtggagatgagggcgttcgaggccgggagggaggagggaagcgcgccgagcttgagaccggtcgcgtggagggcggagactgcgtgctcggtgaggaagggtgtttggctatggagatacctaattgtgttagcactaaaccacatgtgcaagactcgaacgctgcgctctatagccgacagaagtatgcggaggcgaagttgtacgagactttgatgatgcccaccatgtgttcgttgaaatccgctcaagttgcaaagaagtatatttattatgtgcacagaccggatgaggaggaagggctcaaggccaggtgccactatcggagcgataaggtggacaacgttgtctattgtcttgaggatgacgtctatgtcaaggttagtggtgctgccgacccattcatccatcaactgcagtctctaggtcctattcatattgttcgtccatctatcgcgatcgcatctaggacggctggctccgcctacaactgcatggacaacatcccgcccgacatcatctcccagctcctcgcattctccaacaagttctgctatgagggcctgaagccaacctacgacaaccgggtcacaaccatggtgcggggtctcgacgatgcctga

SEQ ID NO: 14884 - DNA, 165 bp, Zea mays
  Peptide Sequence Number=SeqID_56663
atgggcccctgggccctcaagtcagaggaaataaaagcatccataaaagtcatagctgaccccaaagcaagagaggttcataagtgccacatcatagaatctaactcaacttacagctcaaacagagtcaagggcaaaaacatggatgaggtgagctatgactag

SEQ ID NO: 14885 - DNA, 216 bp, Zea mays
  Peptide Sequence Number=SeqID_56664
atggccaaacaccggcgagggtggaattggccgagcatagggcacaatgagggaaatttggcacagggacgggtgtctcacctcggggcagagctcggggaggcttggggcggactttggcgagctggatggccgggacacgggcgcgagtctccgacagcggctggcggcaagggcagagcgcgagagagggtgagggtgtgcgaaatgaggtga

SEQ ID NO: 14886 - DNA, 1161 bp, Zea mays
  Peptide Sequence Number=SeqID_56665
atggctgggcggagaggagccgacgcggtggaggcaggccggcgcggagctggaagaagaccggcgcaggggacggaccggcggcaggggaggaggcaggccggcgcggagctggaggaagaccggcgctggcggcggaccgccggctccttgggggcgtgtctgcgcggtggatccggcggcgcgcaggatcagccggaaggtaggggcgcggccaggtgggaggagggaggcgaccggcgcagggaagggaggagggggtgcccgcggtggctccaggggcagcggtggctgcaggggtggtgcggcggcggctccagggatgggcggcggctgggagggtcggttggggagagagagagggggaggaaacctaatttggctctggttggtcagcatatcgatctctgccagtgtctagctgagaacatggtgacctcaagcaagggcaaggaggaaacgctcgttcctgcggtgaacggtactctgaacgtgctgagatcgtgcaagaagaaccccttcctgaaaagggtcgtccttacgtcttcgtcgtctgcggtgaggatcagggacgacggccagtccagcagtaacatctcgctggacgaaacggcatggagctccgtgccactctgcgagaagatgcatctatggtatgccctagccaaggtatttgcagagaaagcggcgtgggagttcgccaaggagaacggcatcgaccttgtgactgtcctcccgtcgttcgtgatcgggcccagtttgtcccacgagctatgcgttaccgcttcagacgtcctaggcctattccaaggcgacacggcaaggttcagctcgtacggaagaatgggatacgtccacatcgacgacgttgcgagcagccacatcctggtgtacgaggccccccaggccgccgggaggtacctgtgcagctcagtggtgctggacaacgacgagctggtctcctcgctcgcgaaacgctacccgatattccccataccccggaggctgaacagcccctacggcaagcagtcgtaccagctgaacacgtcgaagctgcaggggctgggcttcaagttcagaggggtgcaggagatgttcgacgactgcgtacagtcgctcaaagaccagggacacctgctggagtgccccctggcgtcatag

SEQ ID NO: 14887 - DNA, 1755 bp, Zea mays
  Peptide Sequence Number=SeqID_56666
atgggcagcgaggtggagtggaccggctgccgtctcctggagccacaccagtgcagcaggcaggcgggcagtgaggcaacaggctgcgcgggcgcgtcagcagctgccatcgccatgcagacgcagcagggccaggccatccaccccgcacacgcaactcagcagcagccggagcctggagcagcagttgagctcccccggagaaagctgagccacggcgcctttgttgctctccgccgcacatggacagacagctcgctcttcccggcagtaacagctcaaggttctaggtctcggtcggcgatggagagggagtcgaggtcaagggtgctctcggagacggcgtcctgcgccggcacgccgaggtcggttcagtcgacttgcagtctccagcgccggtactcttcacggagcattctgaagccacatgatggcgcactggacatgtcgccacggttctcctactgcaagcctgccgccgacagagagaagatgttcaacagaagacactccctgaatttaccagagcaattgccagatttggttggggagatcgcagcgctcgagcaggaagtcatacgcaaggaactgcacctgctcgctctctacagaagagcgtttgatcaatacgtatctgaatcctgcagcttcacaagcgaggaggagcaggaggaggcaccaccagaggcaaaggcaggcgcgaggcattccagcctcgtcaacttcctgagcgcctccatctcggagtacgtgcccaagatctcgtgcaagctgtcggaggacatcctgggctgcatcgccgccgtctactgcaagctctcgggcgcggagggggagtgctgcgtggcttcgccgagcccttcggtctcgtcttggagcaccttctctccgaggcgccggaacgatagctggagccctcggtctcggtgcaacaacttcgatagctggagcccgcggccgtgtggagtcgagaaggagagcggtgagcagagcccaggcgtgatgatggtcgtcgttccgaggatacgcgtcgacgctgacacgtttgagtacgcgtcgaagatgctcgagactaccaggtctctgatacagcgcctggagaaagtcgacccggtgaagatgacgcacgaggagcagctctgcttttggatcaatatccacaatgctctggtcatgcatgcttttctggcctatggtctgcacgacaagcgcatgaagagcacggacatgattctgaaggctgcgtataatgttggcggccaatcagtaaatgcgcagactattcagaactcgattcttggatgccgccagtcccaccgtccatcattgtgggtccgcgcgctgttcacgccggcgaaaagatccgcggcgaggcacccgtatgcgctccagcacccagaacccgttgcgcatttcgcgctgtcgaccggagcgttttcggacccacctgtgcggctgtacacggcgaagaagatacagcagcagctggaggcggcgcggacggagttcatccggggcagcgtggcggtgcggaagcaggcgctgctgctgcccaaggtgctgcactgctacgcccgggacgccgcgctggagctgcggcacctggtggagctggtgtgcgagaccttgtcggacgcgcagcagaagcagctgcagctcggcctccggcggagggccgtcgacaagtgcgtcgagtggatgccgtacaagtcgtccttcagatacgttgtacatagggatctggctgacgactag

SEQ ID NO: 14888 - DNA, 567 bp, Zea mays
  Peptide Sequence Number=SeqID_56667
atggcgcgcctcgcggtcgcagggacggtcgtcacggcgcgcgagcgtggcagcgggcggccgcgccaccggacgctgccgccgccgccgctcttcctctgcagcgccgacgagctgggcttcgacgcgcccccgcgcgcgctggccgcggacgaggcgctccagccggggcagctctacctcgtgctgcccgactccgcgctgcgccggccgctgaccgccaaggacatggccgcgctcgccgttaaggccgccacggcgcttcgcggccgaggcgggtctcgccgccggcctgtcgccggggcgcgacagccgaggcgggacgccggcgggcaagaggccgcggcggcagtcggcagcgcgagtggctcctcttctagtcgccgtgagcaaggagagcagcccgcctcccgcctggcgatggtgctgctcggaagaacgacgtgcaccgtgggtacgcagcgcgtcctgcgggtcaagacggtggacgcgcagcggggaagacgaggaagggagctagctacagagcccgcggttctcgccatcgtgccgtcgtgcagaggctaa

SEQ ID NO: 14889 - DNA, 1248 bp, Zea mays
  Peptide Sequence Number=SeqID_56668
atggagactccgcaagtcgagatgggcggtttcaaggtcaacagcccgcaagtgcccaacggtggcttgcggcccaccgtgtcttcgtcctggaactcgcaagggacggtcgagagggcgctcaggagcatcaggatcgtcatttttacttccaagctcaacttgctcatgccgttcggacctgcctccatcattctccacttcacgactaggagacatggattggtttttcttttcagcatgctaggaattatgcctttagctgagcgattgggatatgcaactgagcagcttgcagtatacactggtccaacagttggtggccttctgaatgctacatttggaaatgcaactgaaatgatcattgcaatatatgctttgaaaaatggaatgatccgagtagtgcagcagtcactattgggttccattttgtcaaatatgctgttggttatgggctgtgctttctttgctggtggtattgttcatcgcaacaaagaccaagtcttcagtaaggcaactgcagctgtcaactcaggtttactgttgatggctgtcatgggattgatgtttcctgccgttctccatttcactcattcagaagtgcggcaaggagcatcagaggttgctctttcaagattcagtagctgtattatgcttgtggcgtatgcaagctacctctatttccaattaagtggacggagcaacatttacagtccaataggcagtgaagaggcgcctagcgaggataacccggaagaagatgaagaagctgagattggcatgtgggaggcagtaacatggcttgcggtgttaacattctgggtgtcttttctttctgagtacctagttaacgccattgagggagcatctgattcattgaacctaccggtggcttttatcagtgttattttgcttcctattgtgggcaatgcagctgaacatgcaagcgcaataatgtttgccatgaaagataagcttgacataacacttggtgttgcaattggttcatcaacacagatatcaatgtttgtgattccattttgtgttgttattggttggacgatgggacaaaagatggacttgaattttcagctatttgagacagcaactctcttcataacagtacttgtggtggcatttatgttacaggtttatattgaccctgattttactgctgccatttataatatggaccgtgaaaatgtgtccattttatcctttggggcagtggtaaaatggccatcttga

SEQ ID NO: 14890 - DNA, 374 bp, Zea mays
  Peptide Sequence Number=SeqID_56669
ctgctgttatagatgttgattctgctgagaatggcccagaagagggtgttgcgaagcgcaacaagaggaagagcgacgtaggggcattgctgcgctacattgttttggaaggagacagtttgttggttgtattgtattgcagcgcacagctagcaagtgttgttgtagccatcaggatgaaccggaagtctcgcagatttgcgatggaacggaaagaggctaacgctgggataccaaaggaggtaaacgacaaggcccagaacatcatgcaccaaatcaagagcccttatcccgaaagatcctttggtccccttccagctctgtacacgcccaatccgaatcccaccccaggaacaggaaatgtgcctgcttag

SEQ ID NO: 14891 - DNA, 468 bp, Zea mays
  Peptide Sequence Number=SeqID_56670
atgccgaagctgcagaggttcaggggagaagacgaggatctggctgggcacgtacgagacggcggaggacgcggcgcgggcgtacgacgaggcggcgcggctgatgagcgggccctcggcgcgcaccaacttccccctgagcctgagcggcggcggcggcaccctctccccgacgctgcgcgcgaagctgggagaaatgctgcacggcgctggcgcaagagccgcagcacggcgcggacgtgtcgcgggcgggtggggggtcgggacgacgacagtagtagccgcggcgccccacgcccggacgccggcgccgtgaaagtcgaccccgacgccgacggcgaggatcagtacatcgaggagatgatcagggagctcacctactacggccccgtggagatacagcaccacccgtccgcgtcctccggcgccgccgccgccgccgcctgctcgagctcagcgattagctga

SEQ ID NO: 14892 - DNA, 369 bp, Zea mays
  Peptide Sequence Number=SeqID_56671
atgataagcatacaccaccaagagcaaaattgcaacctcgctgacggagagtacgtcctcgtgccggagcaaggtgttgctcaggaggtagccccggatccagcactagagcctgcaccagaggatctgcctgccccagctttggaaggcaagcccccgcagattgccctcctcacgctaccagagacgtggtctcccattccggttatggtgggtacaagtgcggtgactgcacgacggcagtcggggtcagtgaggcattgttctttggaggacatggttgctggagtgacttggccgtccatcttgccaccgggttggactatcgagtgggaccccgcctcggctaaggaggagcatgaggagtga

SEQ ID NO: 14893 - DNA, 573 bp, Zea mays
  Peptide Sequence Number=SeqID_56672
atgtcgtcttcttcctcgtcatcgtccaccacgacttcgtgctcgaacgcgctatcatcggagaagacgattagtgatcccgtggaggttgtggagctacagcacgggcacacggtggagtttggcacatcgaggatttactcaggccacgtgctcgagaagcagtgtctgggttattttgggaatggagttgggagggcaccaggggctgaagatgtcccggagccggagagggagttggttgtgttcgaggtgttttttgttgctggccttcgcttgccggcgcatcgattcttaattgaagttctgcgaaagtttgagattcaaattcagcagttgacgtcgaatgctatggtggcattggcgaagcctcgcctgatgccgtctttaggggatcagatggtgtggagcccagccttcgctattgatttgcggggacgggacgcgacctccttcgtgtgggaggtggagtcggaggcaattaagattgttggaaaatatgtgccgaagactgagatgttgaggagctgggatatccgcggttccaacgtcaggttgaaccgggttttttaa

SEQ ID NO: 14894 - DNA, 822 bp, Zea mays
  Peptide Sequence Number=SeqID_56673
atggggctgaagggctctaggctttttgttgaggagttgactgggacgtgtgctgggcccggggagggctgctcaatctacgacaatgccccccgcgtggcgccagccgcggctgcgaagctgtctttgccatcgtgcgttattgaaacgactgtgttggagaccaggcaaatagggcacgagttgtccgtggacgattacctggtgggtggtgtaaccatgttcgatgcccagaccgggctgctccctgctggggcggaggctgggcaactggtggtggtgccagcgaaggtgcctgccggtctaggggatctagcgaagggtgataccaggactttgctggacccatgtttgaatttttgcgctgctgccgatggaggaagtgaagtcgctttagctgctgccattgatggcgtagcaacatctgtcacacggcagctgcaatatgtgacagtgcttgagaaggagaaagaagacctcgaccgccggctcaaagatgagaaggaagctgccgctgaggcgaagacagatgcaaagaacgctcgcgcaaaagcccaagctacccgcaagcatgccacagacctagagcttgaggtcgaagacgacgtgctaaagcactctattggggcgctttatgataggatgtggggtcctcacggccgcggcgtcgtccgggagaaggccgaccgagcacttgcacaggcaatgagggatgaagaagtggaggacctcactggcctggagagctcagtgactcgaaaggacgtcgaggtggagatgggagcggaagagcagtcctcgaacaaggaaggcggcgcttag

SEQ ID NO: 14895 - DNA, 843 bp, Zea mays
  Peptide Sequence Number=SeqID_56674
atggcgcaccagagcaccgttttttctatccaagaggcgcaatacgacgagaggagactgctttttccccacggcggccatggcggctggaatctcctcttctcagcacacggcaatgagctagatcacggtgcaccgattagagcaggcgagaagggggggaaaaagcatggttcgatttatacaccggcggcgaagtccgagcggagaaaaaggcacaggactgttgaaggccgatcttccgcgcttctgttgtggctagacgcggaacaaccgcatcacgaggggaagggagcgcaatccacggaatcccatggttccgagtccgtcactgcacagggaggggggagctccagcagagctacgacgcggatttggggaagaagagcgggagaaacgtggccagcgcggacgactgaccaacggccgagaagctgtacgtggagggagaggctaacgcccaaatccaaggcggcgacacgcgattcaggtgaagcatgcgtagacgaggtcgtgaggaatcgaccggttggttgtagactgagccgcggattccgccgagctcgtcgcgaggtggaggacgagactggggacgcaggcccaccggccagcgagaatcaaatcgcgcgtactgacggacggggcccacgtggaggcgggactgcgttcgcacgcagcgcggggtggggcgaggatgccactgaccaggcgggtcccgggcggaagtggcgcgtgcggatgactccccggctgacagctggtcccacaggtcagcgccaaggcgcgcggtggctgagtcgtggtgacgggagtagggtaatgggccaagcgagtggaaagtga

SEQ ID NO: 14896 - DNA, 300 bp, Zea mays
  Peptide Sequence Number=SeqID_56675
atgacgacaaaacgaattacacctaaggtggttgggggtatttatagccccgaaccaccaaacaaccgttggggcaggctgctgtcgatgggcgcaccggacagtccgatgcgccagccacgtcatccaaccgttagggttcgggcgcagtcgactgttggagctttgtcttctagtggcaccagacagtccggtgccgcaccggacagcttttgcagtcgaccgttgcgcgaaggagctgttgctccgctggtgcaccggaaagtccggtggcacaccggacagtccggtgaattatag

SEQ ID NO: 14897 - DNA, 315 bp, Zea mays
  Peptide Sequence Number=SeqID_56676
atggccaccacggattcagttttccaggagaataatggagaggagggcgaaaggaacaaagtaaatgtccatatcgcaagaaacggaacgacagtttcttcaatcgggcagcgcagctcgcggcaaacgggcgctgctggcgggctgcagagggcgcgggccagggcggtgctcgcgcgcgagattgtcgcggtggggccgggcgcggcgttcagcgcggcaaggccgctcaggcgcttgcgtcgcgcgggcgtgcgcgcggctgaagggcgccgagccggcgtcggggagagacgcggctgggcagggcgctga

SEQ ID NO: 14898 - DNA, 180 bp, Zea mays
  Peptide Sequence Number=SeqID_56677
atggcgctgttccggaggctcttctatcggaagccgccggatcggctcctcgagatagccgaccgcgtctacggtacggtaacccccgcgcctcctgttcgactgccgccaccgaacccgaattaccgatttggggggtacttcggggtaccacactatgtagatttaccactccgttga

SEQ ID NO: 14899 - DNA, 789 bp, Zea mays
  Peptide Sequence Number=SeqID_56678
atggaccaatacagatacaagaattacctggacaacattattttgcagctccgtgaacagtttgcagattcttcattgatggtacttaactttagagatgaaggaaaaagtcttatttcaggcattttctccaagtacaatattacagccaaagactacccttgcaagaaacaatataatggggagcaaagaactctagatatggtgtacaagcaagccccaaaggagcttcttcagatgctaaccacattgaatccacaaccgtctcatcttcggtatcttgggtacatatgcagaatggatgacggcataggatggcctacacaacctattcctttcaccttggattgtgtaattcttagagaaattccaaattttgatggagtcggtggttgtcggccaattgttcgagtatatgggcaggatattccaacaactgacagaagtcatagtgtcatttcaccaccatcaaaggccaagaaacatattaggcgttacagacaggcagataatgcgccagtgaagttaaatgtaggatcctgcgtccaaggtgatgtcgtccttgaatgtctgcatgtggatgatggccaaggaaatgaaaggttaatgtttagggtgatgttcaatacctttttcatccagtctcacattttaccgttgaactttgaggacatcgatgtcccttgggatgccgatcaccagttcacaaagaacttcaaagcagagattatattcgaactccaagtgccgaatgttggaaaaactctccattttccaactttgatctga

SEQ ID NO: 14900 - DNA, 807 bp, Zea mays
  Peptide Sequence Number=SeqID_56679
atggaggctattcttgaaagaccgaagtacgagtgcttgctgtttgatcttgatgacactctgtaccccttcagtgctggcatcaatctagcttgtcgcaaaaacatacaagattacatgcggcaccacctgcatattgaagaaaggcaggttgcagatatgtgcctggacctgtacaaggaatatggcaccacaatggctggccttaaggcattaggctacgaatttgacaacgatgagttccatgcaactgttcatggtaccttgccatatcacaacctgaggcctgaccctgttttgaggaccctcctactttcaattccacagagaaaaatagtgttcacaaattctgacaaagctcacgcggaggaagctctgtgcagacttggtttacagggttgcttcgatggcgtgatctgcttcgagacactgaatccctgcaatggtccgagcgcgttccgagacggcaacggcatgctgttcccagatgaaacgttccccgactcggctgatctgaatgaatccgatgggttcagacccatatcacccatcctctgcaagccctccattgaagccatggaagctatattttttgacgacagcactcggaacatagcttcgggaaaggcagcaggcttccatactgtgattgttggcaggccgacacttgttccaggggctgaccatgctttggagagcattcacaacatgaaggaagctctacccgagatatgggacggccaggatcggtctgagtctgatgctcttctttctcccactgctgtcgagactccggtggctgcttga

SEQ ID NO: 14901 - DNA, 471 bp, Zea mays
  Peptide Sequence Number=SeqID_56680
atgacaccctacactgctgtcggcgcggcggcggcgtatgggaaacaaagaccggtaaaaatcgagtggacgatcaacccagcacacccaccgcaacacgacaccgcgccgggcggtagctacgtcgagcggccgtccgaagcccaagcgaagacaccgccacccatcccgccgtacgagtgccggcccctgccctgccggctgaacgcgacgccttgccactgccacctttccgtcccgctcgtcctccgtgttccaccagtcgtggcgcttgcccgcccgctcgacacgtggacacaggcaacggtggagtggagctcggtgaagaagaagctggacctcgtcgcacgcggcaagctggagaatggccatctacttcacatgttcaagtcatactgcatcatgctgtggcgtctgaccctcacgcaggatatgtgcgcagtcgtacctcagcgcgaccacgggctctag

SEQ ID NO: 14902 - DNA, 375 bp, Zea mays
  Peptide Sequence Number=SeqID_56681
atggggaggaaggaagaaggggaggaagggagagggaggaagaagggagaagagtcacagaccacgaagccagtcatccagagcaaaacaccattgcagccagtcatcccgcccgtacagcgcctgttcttctacaacagggccgacctgctcgacgtctccgacttcacgctgggcgagctgccacggttcagggactccctcgccgccgcgctacaccacttctacccgttggcggggaagctaacgtgcgagctggtcgacgaggagggcgccgcaccgccggagggaccgagggaccaggagcgccgggaggaggagggatcgagggagcagggagcgccgggtggatggagcagccgagcagggagctag

SEQ ID NO: 14903 - DNA, 348 bp, Zea mays
  Peptide Sequence Number=SeqID_56682
atgtccgtccgcgtggcgtccgtgccgtacctggagcagatggcgcggtgggagcggcaggtggagcggcggcagctgttcctccgcagctaccacttctcgcgcgacgccgacgcggcggcggcgctccccccgcgcgcccgcgccaggcgcgtcgtctgggcggggatgcgccgcctgcgccgcgcagccgccacgggcctccgccgcctccgcgcgcgcctccgcctctgcttcggctgggccgcccgccgccgctcttcctcccgctacggccgcctctccggcgccggcaggccccgcgccgccgccgccgccggtgccgccgagtctgcatgcttctggtag

SEQ ID NO: 14904 - DNA, 597 bp, Zea mays
  Peptide Sequence Number=SeqID_56683
gtcggcgcttgccgtgaggtagccggagacaccgactgcgcgggtggtctagcgccggtggcaatgtccatggatgatgattccatggacgacgagttcgttaaagccatagaggccgaggaacggcgacttgaagctcagaacgagcaagatgatgcccggtgtttcctccttggtagcagctcagctgctgccatcgaggttgatggcaccggtgctgggacgggaacggagacaggaccgagcatggcggatacgctcaccggatccaccagcccaatggcgatagccgatgctagcagatctgtcgctgcctctggagcatttaacgcaaagggtgagtcagacagacagtcaggccttgccaaaggcgccacggcgaactccgctccgcccgaccccagggctcggactcgggctaagacccggaagacggcgaactccgctccgcccgaccccagggctcggactcgggctaaagacccggaagacggcgaactccgctccgcccgacccccagggctcggactcgggctaaagacccggaaagacggcgaactccgctccgcccgaccccagggctcggactcgggctaa

SEQ ID NO: 14905 - DNA, 255 bp, Zea mays
  Peptide Sequence Number=SeqID_56684
atggcgctccacaagctctgtgacgacggcggcccccagctctcttacggaagcagggcgacgtcagcaaggactcgaccgctccaacagctgtccctccgccaggcaccgtcgcacctccgacagccacgacatcacgccagcaaggaaagtaagggtacaagcgagatgccaatgccagatcagcgtgaacagtacatgactactgttcatctatttataggcacgggacgcagcccattattagagaaataa

SEQ ID NO: 14906 - DNA, 504 bp, Zea mays
  Peptide Sequence Number=SeqID_56685
atggggtcacgcctaatcgaaactggtagaccccgtacctgcaatatctccaccaggaaagctccccctcgacaaaggccgaagctcggcgactggcgtagcgcgccaagtcgttcgtcttattgggcgatgaaaaaggcacccgagggcttctcgcacctgctggtcgccatcgacaaattctccaagtggatcgaggcccgacccctaaccagcatcaggttcgagcaggcggtggcgttcttcaccaacatcatccatcgcttcggggtcccgaactccatcatcactgacaatggcacccagttcactggcaagaagttcctggacttctgcgaggaccaccacatccgggtggactgggccgccgtggctcaccccatgacaaatgggcaggtggagcgtgccaacgacatgattctgcagggacttaagctgaggatctacaacgacctcaacaagttcggcaggcggtggatgaaggaactaccctcggtggtctag

SEQ ID NO: 14907 - DNA, 1761 bp, Zea mays
  Peptide Sequence Number=SeqID_56686
atgacaaagaccggtagtggttacatgtgtaggttcccattgtctcactggaaacacacttcatcgaggctagctagaccaggccacgagctacggaggaggcaaccttttggttctggagggttcgtgctccctgcccacactgccccagtggcccagttggtccaaaagcttgctcaatgtccaagccccatttctgaaaaatctttcctctgttacaaagattttttttatttacctgtccacaccttcactgatcagcaaaatgctgttcaattgatgcagctggcgcatatgcttgatgaaatgtatctgatctgccttcctgaaatagaaatggtgttttcttccattccaggagtatctgtggagctatcatacgattcagcacaggtcaaggcgctgtccagctcagccgtcaccgagtacagagtcacggtcaccgacaagcggcgtgcctattacgtcttccagaagccgtttgtgtgcagagacaagccatgcagatcgtcggagcctatcgccgccgccggctcatttgtcaacgaggctattgctggtgccaaacggcatgagccagaggcaaacggcgagctcgccgtggttgcggagatcgaaggggccggcgtcgtgccccacgtcaagagccgtgtggctccaagcgcggtggcaatgagtagcggccgggagaagaggctcttgggtgtcctggtcgacgtgccctcccctcggcgggagctcggcgaggcaagagccacggcgcgcgacgagttctctccggtcagcaacccggcgacgactcccgtgagcaacccagtcaccgtgccggccaccaacccgatgcccccgggcttcgtcaccgtgccatcgaccaacccgggcaacgggatcgcgaccaacccgaacctgccgccgttgtacccggagccgacgacgccgggcaccatgcccatgcctgacccgacgacgacgcccgtgaccgtgccacccgccttcacgaatccggtcgccgcgccgaacaccatgccggggacggcggtgacgaacccggcgacgacgccgacgcagttccctggctcgtcgcctgtcaccaacccggtgaccacgtatccgtacccgcagcagggcggcatgccggcaacaacgccgccagcggtgtaccagcctccggcgacggcgatgcccggcacggtgcagccgggcgcgccgaccgtggcagggcaggcggcgtggtgcgtcgccaagtcggggctcatggacaccgccctccaggacgggatcgactacgcgtgcggcgtcggcggggccgactgctcggccatccagcccatgggcgcctgctacaaccccaacacgctgcaggcccacgcctcctacgccttcaacagctacttccagcgcaacccgtcggcggcgagctgcgacttcggcggcgccggcatgctcgtcaatgtcaacccaagctcaggaacttgcgtgtaccagacaccagcaggtttcggcgccggttacagcccggggacgacgggcgtcggtgtgcctagcggttacactccggggatgtcgggcgccgtgggagggggctccggctccacggtgctgaacgccaacgaccccgggggtaactccatgtacgacgacggctacgacaacccgacggggctcaccgccggctcggcgtcgctgtcctgcggcggccgggtcgtcgtgtgcctcatctggatggtcacctttgcatttgtcagggagaaaatgttgtag

SEQ ID NO: 14908 - DNA, 216 bp, Zea mays
  Peptide Sequence Number=SeqID_56687
atggcttacttgggcgtcgacgtcgcgcgagctgtggatggtgctcagggtcctaggcgatggttgttgcgcttgtggggagggggagaggaggggaaggagcagaggcgctgggcgaggtggttggcatcatgggcgagatgggtgggggaaggcggacaaagagaagaaaagcagagaaatgagagagtaacacctgaatttggtggatattag

SEQ ID NO: 14909 - DNA, 138 bp, Zea mays
  Peptide Sequence Number=SeqID_56688
atgtcgtcctcttcgtcgtcctctgcgagcgcgtcgccggccacgccgttgtctgagaaggcgcttaacgattcggcgacgttcgaggtggcggaagaggatcaagacgaggaggaccttcactatgcagccgcctga

SEQ ID NO: 14910 - DNA, 816 bp, Zea mays
  Peptide Sequence Number=SeqID_56689
aaggcacccgggggcttcacgcacctgctggtcgctatcgacaaattctccaagtggattgaggtccgacccctaaacagcatcaggtccgaacaggcggtggcattcttcaccaacatcatccatcgctttggggtctcgaactccatcatcaccgacaacggcacccagttcactagcaggaagttcttggacttctgcgaggaccaccacatccgggtggactgggccgccgtagctcaccccatgacaaatgggcaggtagagcgtgccaacgacatgattctacagggactcaagccgaggatctacaacgacctcaacaagttcggcaggcgatggatgaaggaactcccctcggtggtttggagtctgaggacgacgccaagccgagccacgagcttcacgccgttctttctagcctatggggccgaggctatctttcccacagacttagaatacggttccctgagggcgagggcgtacaacgaccgaagcaaccagaccagccgagaagactcactagaccagctggaagaggctcgggacatggccttactacactcggcgcggtatcagcagtccctgcgacgctaccgtgcccgaggggttcggtaccgagacctccaggtgggggacttggtgcttcggctacgacaagacgcccgagggcgccacaagatcacgcctccctgggaaggtccgttcatcatcgccaagattttgaagcccggaacatacaagctggccaacagtcaaggcgaggtctacaacaacgcttggaacatccgacagctacgtcgcttttacccttaa

SEQ ID NO: 14911 - DNA, 300 bp, Zea mays
  Peptide Sequence Number=SeqID_56690
atggaggaaagggcggaggggcttaccagaggtgagatagctccggtgaggcatccagggaggtcggggagctcgggtggcttggcggacggtggtgcttgctctctacggcgatcgccgatgttctccggcttggacgagagtgagggcgtgcgaggggatacggctaaggccgtgggggcacttataggtgagggcgaggcacaggcgtgcgggggcgcacgctaccgcggccagtccgcgctcggctggcctgacacggtgttgagcacttggctctttgcttctacccgagtttaa

SEQ ID NO: 14912 - DNA, 129 bp, Zea mays
  Peptide Sequence Number=SeqID_56691
atgtcgggaaatatggtaaccggtatgctacaggatatggttgacggtgtgacttggccttctaccctaccaccgagttggacggttgagtgggatgctgcctcgacaggagaggagcaggaggagtag

SEQ ID NO: 14913 - DNA, 369 bp, Zea mays
  Peptide Sequence Number=SeqID_56692
atggcccctttcacaatcctagatgctaaagatggggtcgtttctgatttcctgagcctcagcacgatgttgtttccgaattttagtgcggacttgaatgggacaactggcgatatggttgattttcaatctacaggggatgtagggaatagcgcatccatcaccgagatgggcaacctggttcctgagccatcctacgtggaagcagaagaggctagattatggagtgttgctactatgaattgcttagaatttgatgcctggaccacagttgttgaggagatggacaaaaatgctgaggttatgactaacaataataattgttatgcatgctacaagattacttgtgttctgactgccaccatgtag

SEQ ID NO: 14914 - DNA, 333 bp, Zea mays
  Peptide Sequence Number=SeqID_56693
atggccgccctcctgcggctcgccgccgagagccaagtaacctcggcgccggctgcgggcgtcctcctcctcatcgtcgtaggcatcgtcgtccagctcctcatacgtccgtccagcgcttgccggactcgcgccgtcgtccccagcagatttttagccgccgcccacgccctagataagaactgcgcgcatcccagctgcttcttcttccctgtacacaggaacaccgctcccttcctccctgctcttctcgccgagcttggtttctccctcgccggcgcgtgcccagccgaagattatcctgttctaccgttatggggaagtcgagattag

SEQ ID NO: 14915 - DNA, 534 bp, Zea mays
  Peptide Sequence Number=SeqID_56694
atgtctggtctcgcgccaccccttcgttgccgctgtgccgcacaacgcttcttgctctctattcctggccgtgcttctggggccagacgacaaccccattcccatcagctgagctggttcatggagatggattactcgagagggtccatggacaacatgggcaacgagatgctcgggaagagaggcgaggtagctctacaccatcaccaggccctgggagcggtggagcaccaaggagtacgcccgcttcatcgaggctctactcatgtttggacgcgtctggaagaaattggggagcatgtcagcaccaagacaatcgtccaggatggtgctaaagaacatgtgtatggtgcatccaacaatgcagctcgatccacaacaaacagaaaggctgcaaagaggctatttacaaaagaacttggaagtggagacattgctgacgaggacaggcaccaaaaggaagttgaagtgagactattagaggaggagacgacaaaaagagttgagcaagctattaggaagaaggttgagtag

SEQ ID NO: 14916 - DNA, 432 bp, Zea mays
  Peptide Sequence Number=SeqID_56695
atgaagatgattggcttgccatccaccttgggaagtgcttcgacgaagtccaatccgatgcctacgcacaacatggttggaatagagaacgacaaaaggaggttggatgggcgaatttgcaatagtaccccagaggaggttgcggataagccgaacgtggaagcaactagtcctgcaaagctttggaccttggttggatccatggtgatgcatgttgctaaggtgatgtggcctagatcagtcaacccacatcttgctaaatatgaggatgtcgtcgaagacgaggacgaagtgtcggagattcatccaaacttggtgatagtcgaagcagagatcaaacttggtgaagttggcgttgtggagctcgtcgagtttgtcgaccacggggatcgagaacgtgtccttgaccgtaatggcgtgagagcccagtag

SEQ ID NO: 14917 - DNA, 312 bp, Zea mays
  Peptide Sequence Number=SeqID_56696
atgtcggtgcatcagatttctgaaagtaaggcttccatgcaccaactgactaatattttctgcaatataaaggtggaggctactgctctattgagttatgaagcgaaggaagaactatttgaggagcagatgttatttctcttgtatgtcgtctatgtcatggttgcttttgttcgatgtgaagaaattgcaaatgaaaagctcaaacacttcttctctgataagggttgcttggagctagatgcagctgtaaaatctggtctaccaccagccttcggaatgaggctcagtgctattcttgactctatctga

SEQ ID NO: 14918 - DNA, 2853 bp, Zea mays
  Peptide Sequence Number=SeqID_56697
atggagcgtcaaacagctcgcaggacccagactaatgtgacacagatgatggaatctatttttgccagtgtcagtcttgctaaagatctttctgctaggtgcaaaagcagagcattgcaagtcacggatgatgagatacaaagcacagcacaagacctggagaatgtcttgcagaatatatatgatgatctttgcaggataccagcttcagcatttggcagtagtgcttacatggatgtgcctattaaatcacagccaatgagggattgctgtaaggctgatatacccataaatgtaatgggcaacagacctaggacaaggtctctccgagataatgatactccgaggctggtggactttctcaagggaatgtaccatgaatcgcatgaatttagtgggcagatgttcaacactctcctagaggttacagaatacattgagccactgtatgatgcgttcatctgtgcactaacaaatgagataatgactgatcctgtgatgattgagagtggtgtgacatgtgacaggagagccatagaggagtatattgagaggtttgcagacagttctgaacctgtctattgtcctgtcacaaagatgacaatgcaaagtaagacaatggtgagcaatgcttccctgaagtgtgtaattgaagaatggacaatgagaaatgagatcatgcgtgtcaggattgctcgtactgccctttccctgtcaactacagacacaatggtgcttgaagctatacatgagctaaagttgctggccaagttgagggtgaagaacagggagctgatgcacaagatcggagtcaccaagttcttagcacggttgttggacaaccacaatgaccagattcagtttgaagctctcaagcttttgtgcttgttagctcaagatgaagaaggaaaggatatcatcggaaaaactaaggccattgccaggacaataaaattactgtcaagtaattctactgatgaaaggcatgcagccatctctttcttgctggagctttcggagtcacagttactgttggataatattggatcaacacctggaagcattctgatcctcactacaatgaagcttaacagttcagatgatccaattgctgctgcaagagctggagcagtccttaagaacctggagaagtgtccgaagaacatcaagtacatggctgaaagtggctacttagaacctcttcagagtcatctagtggaaggttacaaaacaggctcagaagagatacagatggagatggtcggctatctatgtgaactagtccaagagcaggagctcaccattgatatcaatagaagcacctcggaaatcctcgtcaagatggtgcgtggctgcaaccccatggtccgcaaggcagcgttgaatgtccttgcccagctttctttgcaccgccccaacaacaagatgcttgtcgacacaggcgctgtccctgtcatgattgaggaactgttcatcagaaaggtcgatgacgagcctgtgaactccatggccaatgccgccactgtccttgctaacattgtcgagtcaggcattgacccagacaccacggtggtgaacaaggaaggccatgtcctcacctcgaagtactccatctacaactttgtgcacatgctcaagtgcttcatgccggacgacctcaacctcagcgtcctccgcatccttctagcgctcaccgcgctcgccaagccactagacactgtggtctcggtcatcagggagaactaccgcggccattctatcatcgagctcatgggctcaccaacggaggtgctcagcctcgccgcgacaaggctgctcatcaccctgtctccacacattggacacaccatcgtagagaggctctgcaagacacaaggacagccacacaagctggtcaaaagcatcagccatgctgggcgcatcacagaacggcaagctacgttggccacgctcctcgcgaagctaccttaccggaacacctccctcaacatcgcgcttgtgaaggatggtgccgtgccagccatgctgagggcgataaaagaggtggagaacggcgctggtagatcaagcaggcaggctgtgccatacatggagggtctcgttggcacgctcgtgcggctcactgcgactctgttcagcccagaagtgttgaaggcggccatggaccacaatctggcctcggtgctcactgagctactcgatggagcagccggaagcgacgaggtgcaacgccttgctgcagtggggctcgagaaccttagttacctatccatcaaactgtcccggccaccgcccgatgagctgcagttcaagaagaagaataccctactgaagctcctgaaggactcaaaggcgcacagcaacaagaagacctcactccaccaggtttgcgtttgcccggtgcaccgaggagtctgttctccagcggcgacattctgcctcctcgaggctggcgccttggagggcctcttgggatgcctcgagaacgacaacatccgggtggtggaggctgccctccgagcgctgtgcactctcctcgacgagagggtggacgtggagaagagcgtagcggcccttgctgagctcgacgttgctcggcgcgtgcttgctgcgctgaggcagcaccggcaaaacgtgctgtggcagaagtgcttctgcgtggtggagaagctcctggaccacggcgacgaccgatgcgtgagggaggtgacaggcgatcggatgctgcccacggcgttagtgagcgccttccacagaggggacgagagcactaagcagacggccgagagcatcctccggagactacacaagatgcctgattactctgcaacctatgtatccatggagttctag

SEQ ID NO: 14919 - DNA, 1599 bp, Zea mays
  Peptide Sequence Number=SeqID_56698
atggggaggcactctaattataagacgtcgtgtctcctccgatcaaaagcttctccagtctccacactcccacttcttcctcgccgcgctccatccaaagtcataacaacggaggagctctccaatccatacatgcgtgaagaccttcacatttctgtgcaacgagggaccggcggcaactggaagctggaattccgtccgcgcagacctcaccgtccctgcaacgagccgggcttcggcggcgccttggcgaggatggtgatgccgatctcgagcggcggcgaccaccacggcgcggagcccctgctcccggagaagcagcgcggcggcggggccggggcggacgatgccggcgacgacttccacggcgcgtccttctccggcgcggtgttcaacctctccaccaccatcgtgggcgcgggcatcatggcgctcccggccaccatgaaggtgctcggcctcgtcccgggcctcgccctgatcgcgctctccgcgctgctcacggacgcctccatcgagctcctcgtcaggttcaaccgcgccgcgggcgtcaggacctacgggaagaccatgggcgacgccttcggggtgctcggcagggggttgctccagctgtgcgtcgtcgtcaacaacgtcggcatcttggtcgtctacatgatcatcattggtgacgtgctatctggaacctcctccagcggcgtgcaccatcacggcgtgcttgaaggatggttcggcgaaaaccggtggaacggacgcttcgcgatcctcgccatcgcaacgctcggtgtgttcactccgctggcatgtgtcaagcgcgtcgactcactgcgatacacgtccgctctatcggtggctctggccgttgttttcgtcgtgatcactgccgggatcgctatgttcaagctggcgagagggcagattctaatgcctcggctattcgccgacgtccatgactggccgtccatctggaggctcttcacagcggctccagttcttgtcaccgcctacatttgccactacaatgttctccccatctacaaggagctcaaggattcttcacagatcacgcctatagtgcgcacgtcgctgctgctgtgctcggtcgtgtacgtcaccaccagcttcttcggcttcctcctcttcggcgactcgacgctggacgacgtcctcgccaacttcgacaccgacctcggcatcccttacagctcgatcttcaacgacgccgtcagggtcagctacgtgctccacctcatgctcgtcttccccatcgtgttccaggcgctgcggctcaacatggacgggctcctcttcccctcggcgcggccgctgccctgtgacaaccgaaggttcggtggtctgacggcggcgctccttgtggtgatattcctcgccgccaatttcatcccaaatatctgggacgccttccagttcaccggagccacggcttccgtctgcgtcgcctacattttccctgctgcgatcacactaagggatcctcatggcatagcgaagaagagagacaaggtcctggcagtgttcatgattgttcttgctgtggtggcaaacaccgtggcagtgtacagcgacgcttgctcgtga

SEQ ID NO: 14920 - DNA, 843 bp, Zea mays
  Peptide Sequence Number=SeqID_56699
atggcccgcgccatacctcagctcagtccgctaaaggagttaaacatattttttccagcggccaagtccatcagcgggtccatctcgtacacaagtcaccaagcttacgcgtgtcagtctccatgctctacgatcgctgccacccatcgcccaccacaaccagttgtccagctctgcgcccggcggtgccagccagccgcaagctccatgcccggcgcgtcgcaacccgccaaccccgcgcagtcgcgcacaactctgtcgtcgtccaccggagctcaaccaaaggtgcagattgacgagaagcagaacgacagaaccacggtgcaccaggggcagagggcccgtttatggccaagtacggcctacgccatacctcagctcagtccgctaaagaagttaaacatattttttcctgcggccaagcccatcagcggctccatctcgtacgcaagtcaccaagcttacacgcgccagtctccatgctccacggtcgccgccacccatcgcccaccacaaccagttgtccagctctgcgtcccgcggcgccagctagccgctagctccatgctcggcgcgccgcaacccgccaaccccgcgcagtcgcgcacagcgcacaactcttgtcatcgtccaccggagctcgttcgttggaccgcgcctcgctgtgactttgcctcacgtagctgccccgagctcgaccgcgcctcgacggtcgccacctccctcgcttggccccctcgggcctcggcctctggcgtctggccaatgtcgaaccaattgaaggcttcaagcaatgagactgtcaggccatgtgtctgtatgtgcacaacacaatgcacgtga

SEQ ID NO: 14921 - DNA, 903 bp, Zea mays
  Peptide Sequence Number=SeqID_56700
atggatctctgggagagggcccgggccttcgccggcgaggcggcgaagcggtcgcaggaactctccgcggaggcggccaagcgctcgtcggcgctggtctcggagacggcgaagaagtccaaggagatcttctccgaaaccgcctccaagtcgcgggagatcgccgctgaggccaccaagcaggccgacctcctcgccggccagatcaagcacctcgcctccgacctccctgtgccttcgatcccgcccatccccgcgatcccgcctatccccgccgctgcctcgtcggtgcccgacgcggccgagcttgagtgctacggcatcaccgacgacctccgcgagttcgtcaagggcatgaccataaacaccttccgcgacttcccactgcaagtctgtgctccggttgatagattggtgaatggtgatgaatccaaattaagcaatgaagatgaagcattgatggatatattagcaaatggaaaatgtgtgagggaaatatcaaagttcagatatgagctatgcccaagatacatgaaagagcgcaaattctggcgggtatattttttgctagtaaacagctatatagctccgtttgagaagaaatacttcgaggagctgaaagtgaaagcagaggaagagaaaaaggattcccagaaggaagcatcccaagcatctacaactgcagaaccgaaagacacaaaagtgccaagcaagacctcttcgacaaatccagaacatgacctggatgtatttctgctgggggatctgggtagcgatgatgaggcttctgttggtggtgatgatgggctagatgatgactttgataagattgatgcgacctcgggattggaaagtgatgacgatgacaaaaaggcagcaacagggaaggcagaaggtgtgtag

SEQ ID NO: 14922 - DNA, 1254 bp, Zea mays
  Peptide Sequence Number=SeqID_56701
atgccggtcaccgccggcgcccggaccaccctcctcctcttcgccaccgcagtggtgctagcgtgcacttcagcgccgccggcatgccatgccgcgcacaacatcaccgccatcctctccgggcaccgggacctcgccgagttcggccgcgagctcgcggccacggggctcgcggacgacatcgacgaccggaacacgatcactgtcctggccgtggacgacgcccacatggcgccgctgaaggcgcgcggcctgccgcgggagacgctgcggcacgtgctctccctccacgtcctcgtcgactactacgacgacgcgaagctgcaccgcctccccggcggctccgcggacgtgtccacgctgttccaggcctcgggcgacgcgccggggagcgcgggcatggtgagggtcgcggagcgccggggcgggcgcgtggccttcgcgcccgaggacgacgcggggagcgccgccgccgccgtgttctacgtcgggcccgtccacgaggcgccctacaacatctcggtcctctgggtgagcggcgtgatctcgtcccccgcggccgaggcgcccgcggcggcggccgaccggccgccgagcaggcgcaacgtgtcggacgtcatgtccgagaacgggtgcgggcgcttcgccggcctcgtcgccgccacgggcgacgcggccgcgacgttcgagaggcaggccgacggcggcggcgggctcacgctgttctgcccggcggacagggcggtggaggcgttccagcccacgctgaacagcctctccgccgacgcccggctcgcggtcgtgctgtaccacggcgcgccggggcaccactccatgcaggcgctgcgggcgggcgaccaggacctgcgcacggcggcctcgctcgacgggggcaggtcccacttggccctggccgtgcgcaacgtccgcggcagggtgacgctgctggcctccgcgacgcgcgacgtggccagggtcacccgcacgctcgcggacgaggaggccgtcgccgtgtatatgatcgacgcggtgctggtgccgggtaacctcacggcgcaaggaactgcaggggggacggagcacggcgagctcacgtccggttcgggcggggaagaagacggcggaggaggcggtgttcgccagagcagtggctccagggctctggctccggctccgtgctggctaccgcgtggatggttcgccgcttgggcgcttctgctcgctcttctggcggcgtttgcggcgtctggttga

SEQ ID NO: 14923 - DNA, 138 bp, Zea mays
  Peptide Sequence Number=SeqID_56702
atggcgtgcataggcgcagcagctggcggcagcgcgcgggtgcagccaacttccattggaggcgattttggaggtccagaattcacaaaatacatggggagaggttttgatcttcattttttggaagaagattgctaa

SEQ ID NO: 14924 - DNA, 216 bp, Zea mays
  Peptide Sequence Number=SeqID_56703
atggcgggattcagaagccttgcacccaagaccaggaacctggtggtggctgggggcctgtcggccttcgtgctcggggtctactactacaccatgagagccgtgggaggcacggacgagctgcaggtggcgatcgacaagtttgaggagatgaagaagaaggacgctgccagaaactccagcacaggaggatcgaaagggctgaacaacggctga

SEQ ID NO: 14925 - DNA, 1095 bp, Zea mays
  Peptide Sequence Number=SeqID_56704
atggctttgccgtcgcgggcgcggctcctcctcctcctctgcttcgtcgccgccgcggcgctgctcgtcgcgccgggggaggtgtccgccaccgccgccgccgccgacgccggggggcacgggaagcggcgcgggcacagcacgcacacgaggcgcctgcggcccgggaagggcgcggcggccgcgaagccgtaccccgcgaacgcggcgcgggtggaggcgatcgagcggcagttcgcgcgggccgccgtggactcgctcccgctcatcaacctcgcccgcgtcgtcatcagggtcaacgccggcacgtacacggagaaggtgagcatctcgccgatgcgcgcgttcgtcaccgtggagggcgccggcgccgacaagacggtggtgcagtggggcgacacggcggacacggccggggcctggggcaggcccatgggcacgttcggctccgccacgttcgccgtcaactccatgttcttcgtcgccaagaacattaccttcaagaacacggcccccgtgccgaggcccggcgccctgggcaagcagggggtggcgctgcggatatcggcggacagcgcggcgttcgtggggtgcaacttcctgggcgcgcaggacacgctgtacgaccacctcggccgccactactaccgggactgctacatcgagggctccgtcgacttcatctttggcaacgcgctctccctctacgaggggtgccatgtgcacgcgatcgcgcggaactacggcgcgctgacggcgcagagccggcagagcctgctggaggacacggggttctcgttcgtgagctgccgggtgacggggtccggcgcgctctacctgggccgcgcctggggcaccttctcccgcgtcgtcttcgcctacacctacatggacaacatcatcatcccgcgcggctggtacaactggggcgacccgacgcgggagatgacggtgttctacgggcagtataagtgcacggggccgggcgcgaactacgccggcagggtgcagtggtcgcgggagctcaccgacgacgaggccaagcccttcatctcactcgacttcatcgacggcttcgagtggctccggctgtag

SEQ ID NO: 14926 - DNA, 510 bp, Zea mays
  Peptide Sequence Number=SeqID_56705
atggggcgcgcgatgaggtggctcaagaaggtgctcaccggcagcagcaagaaggaagcgtcggacggggttcgcaaggcgcgcgatgccgcgtgcgccggcgccggcggtggcggtgaccacgggctgggcccgccggcatcggagaagaggcggtggagcttcgccaagccgaggagcagcgtgtctggctccgcccggaggccctccgtcgccgccggggagctgtcgcaggtgcgcccgtgcagctgcggccttgagcgcgaggtggaggccgccgccgtcatccagaaggccttcagaggctacttggctcggaaggcgctccgcgccctcaagtcgctcgtgaagctgcaagccctggtgcgaggctacctcgtgaggaagcagacggccatgacgctgcgcaggctgcaggccctcatgcggctccaggccaacacggcggcgtcccggagatccactgaacaagtgaggacattgatgagcactaaaccaatcacgttttag

SEQ ID NO: 14927 - DNA, 2898 bp, Zea mays
  Peptide Sequence Number=SeqID_56706
atgacgaactccgcttcgcccgacccccggggctcgggctcagccctggcctcagccgacggtctccgcctcgcccgacccaggggctcggactcgacctcggcctcggaagacagactcgacctcgacctcggaggagcctccatatcacccaacctagggcaccacggaccgaccacgtcaacaggaggcgccatcattaccctaccccaagctgactcaggctacgggggaacaagaccggcgtcccatccggctcgctcggccagacaagtaatgatgggcgccccgcacgctcttgtgacaacggcggctctcagcccccccttacgaaagcaagaggacgtcagcaaggactcgacagccccgacagctgtccttccgccaggctccagcgctcctccgacgctgatcgaatggatgaacgccttactcccggaattcagtttgcctccggattcatcggatgaagagctacgagagctgctcagtgacggcgtggtcctgtgccgtgttgcgaacacactcatcccggggggatcctgggacggttatgcaccgtcggatcaacggttgggcaatctgaacaaattcctctcagtgattgctgatatggggctgccaggtttcagtgtgaaagatcttgatgagggatcaatgtctcctgtagtggaatgtctcttggttttgagagacagtgtggatcctagattaggtgacgatattccaccagatgttaccagaactcctttgagaaaacaatggggagttccggaaatggacaagcctcaagttcatggtgcagcactagggaaaagatcccctgcagaggacaagagaaatggcgttgcagatcccaaagcccatcagaaaacttctgtcttttctggacaaaagttttgtgatgttttccaattaaaacacggatcatattctggacctgctgctgccaagatttcagagatgatgcactctaatagcttagataatgcaccaacacagtcacttattagtgttgtcaatggcattttggatgaaagcatagaaaggaaaaagggagaaataccacatcaaaatgttatcatgaagagaagagaacagaagtactgttcaaaaattaaagtacttgaaatgttggtaaatggcacaaatgaagaaaaccagatggcaataaacaggcttcagatagtcaagaatgagaagtcaaaaatcgaagagaggagaaaacttagtgagcaagatgttcatcgattgatgagagagaaagaacattctgaaaacatcatagcaaacctaaagaaagatatagaagccatgaatagattgcatgaacagcaacttgagcaaactgaaagaaaggcaaaggaaatggaggagcaactaaccaccaaagtaaaagaagtagagtatctcttgctacaatcgaagaagaaagttgaagaagttgagactgcttccaggctaaaatcacagttatgggataagaaagaggacaattttcagagtcacatggataatcaacaactaattatcaaggacataagaatattgtcgcgatcatgtgaaaatgatatgtatgcacttcaaatgcagtggagaaatgagatctctaacttaggatctgggttaaaatgtttggttgatgctgctgaaaattatcataaagtcttggcggagaaccaaaagttatttaatgaagtgcaagaactaaaaggtaatataagagtatattgtcgtgtgaggccatttctttcgggtcaagacaaaaagtctactacaattgactacatgggggaaaatgatgcaagcttgcactcagttaagtcgacatctgatgtattagacttgatggaaattgggcaagcaaatagagcagttggttcaacagcactaaatgagcgaagtagtcggtcacacagtggtgagtgctactgcaccgagtcaccaggtctggggttcgacgcagcctctccgcagtgcgggggtggacaagcaaaaactctaatgttcgttcaaataaatcctgatgttgagtcatattcagaaactataagcactttaaagtttgctgaaagggtgtctggagtagagttaggtgctgcaagaagcaacaaggagggaaaggatataaaagagctactggaacaggttgcgtctttgaaagacacaatttcacgcaaagatatggaaatagagcagctccaagtcatcaaagacaaagcaaaatccccaaatttattgttagatagaaatgggcctggcttgacaaagattacagtaaaccaacctagccaactattatcaggcgaacgaatgctcaagtctagtgacagagttctatcagatcctcctgataacagagattctaaccataatttgacggatactgctccagtgagcttagatgaagcagaatatgatggcaatgcatctgatgatggtttatcaggtgaagccgagaattacaattcagctgctgagatgacagcggaacggttgcatggaattccatcaagaataagcagattcactctcacaaaaaacgggcaaccatctatgtctagatcaaaatcaaaggatgctaagactccaaaaggacagcgccgcctgcgccactccgactgcagtgccactcgacagagtgagtctgacaggcaatcaggcctcgccaaaggcgccacggcgaactccgctccgcccgaccccagggctcggacacgggctaagacccggaagacggcgaactccgctccgcccgaccccagggctcggactcgggctaagacccggaagacggcgaactccgctccgcccgaccccagggctcggactcgggctaagacctggaagacgacgaaactccgctccgcccgaccccagggctcggactcgggctaa

SEQ ID NO: 14928 - DNA, 318 bp, Zea mays
  Peptide Sequence Number=SeqID_56707
atgtccgttgtaaggctcggggccgacctaaaccgcctgagctccgtcgtgcatctgactcgaagggtaagcactgtctcgttctgccttggcgatggccaaaggcagaacccggcgaaggcccttggctactaccccgaacgcaaggagcttgtgttagacgtgttgggtcttggagccaccggtgcatgtggggagctcccatgggccctccatggttggctagccacctcatgcatgatgaggttgtcgaaggcgcaacccattactggcttgcttgctggtctccacaaggtgacacggggtgccgagccctaa

SEQ ID NO: 14929 - DNA, 387 bp, Zea mays
  Peptide Sequence Number=SeqID_56708
atgggagcgccccaggcgtttgttctctcttttctctcggcggcgaaggttagggccacagtagaggctttatgcgcaggaaagcacggaatcagtcccaacggtcctacgacttcggcgcgagcttccgttaagtctggcgtccgctacggaggtggaagacgagcgctgatgtgtgggacccgctgctcagtgaagtggagggttcaagtcgtgggcacggccgcgcggaggcagagccaaggaatgggtcgcgcgcgggatattccccctggtgggcccgaatccgggctgtctggtgggcccctgataagtcatccaacagggctcactgggccacacctaggcagagcaaatttcaacgaagaagatgacactcaaagttag

SEQ ID NO: 14930 - DNA, 663 bp, Zea mays
  Peptide Sequence Number=SeqID_56709
atgcaggtggtgtgcaaccgcaccacggggacgcaccccttcgacttcgacgcatccagcatggaggcccaggcccacacgtcatgtaaccggcgcgctggttactacgtgcgagaaactgcaccgccacttgcgccaatgtcgcgccttctcgactgtggaaccagtgccgcgactcgaggcaaccctgcgcatggcccaatagtgtcaatcgagcacatcggtcacgggtcagttagccgggggaggaggcgtgacggtcgatatggccaaaagtgggccggcaggaccgggaaaggggatatttcgaaaagggatccttctccgcgaaggaagcggaccccgagccctcctactgatcaggggttcgaaggctggccccccggaagggttcgacagccgccccagagcactcgggcttcaggctcattgctgatcagaggttcgaaggctggcccctcggaagggttcgacagccgcctcagagcactcgggctccgcgccccactactgatcaggggttcgaaggctggcccctcggaagggttcgacagccgccccagagcacgaagagtgagggatgactctgggtacgtccgatacatggacgagtctcggactacgctcccgaggtaccctaggacatttccgagaccaacatga

SEQ ID NO: 14931 - DNA, 441 bp, Zea mays
  Peptide Sequence Number=SeqID_56710
atgggcacagatgtcgtcgaggcgtgcgtcgccgctatcgaagacgacaccctagccagtcccgtcgcgaatgcgggcacagctggcctaggcgcaacttctttccccgtactcccgttgtatctcccttcttccgttcttctctggtgcgatggtgcccttcccagtgccgctgtgggccactatcccctcgacgatgttgttgctgctagtgtcgccgccaagtttgtcgttgccattgcttgggagcatgagcgggctacttctctcgctttggagcaagagtgtgccaccaccgatgttcttgctcaccagcttgcggaggccgatcaaaagcttgagggtgttgtggtctctgactccttccccgaatttaatgatattgaggttttctatgtaagtagagggactctaactctcatcaagaggatgacactatga

SEQ ID NO: 14932 - DNA, 246 bp, Zea mays
  Peptide Sequence Number=SeqID_56711
atgacgctcggcacgagtacggcggcaacacaagagtctccggcgcgggcaacgacggcgatgggcacgacagggaggcacagtgagctgggtctaaaggcgacgttagtgaggcactggggcgcctgggtgcgggtgtgctgcaggggcggtgtgctgggcgcggcggccggtcggctgcacggcctggctgaagcttcggcgcggcggcttgatccttgggagttgcgcgcgagcgcggactag

SEQ ID NO: 14933 - DNA, 331 bp, Zea mays
  Peptide Sequence Number=SeqID_56712
atggagcggcttataagctttggcgcggtggctgaactgatcagtttcaaatggtcgctgaactgcgcggtggctgaactggcggtgtcgggggaaggtcgtcgggacgcagcgtcgacttcggagttccggtcgacggttaacggctccagcggcgagcggctctggtgtcgacaacacaacagctatcgggagcggctccggtcagcggtgaacggcgaggaccaagccacggaggagggagttcgatggaggtgcggctggggagctcggagtgggcttgggacggatggggactggctctatgggggcacggtcgagttttgtagag

SEQ ID NO: 14934 - DNA, 297 bp, Zea mays
  Peptide Sequence Number=SeqID_56713
atggctccaagaattcccgaaagtgcgaagttcagcttggagtcccctggtgcaccggacactgccggtggcacaccagatagtccggtggtgcaccggacactgtccggtggcacaccggatagtccggtattgagatatttattcaaatataattattgtttatttctaaacactaagatctccacgtgccccttggcctccgcgaccgtcggatctgaacgatccagaccatccgcggttataacggtcgccggtcggggatattttgtgaaagaagccctaaggaacccttaa

SEQ ID NO: 14935 - DNA, 438 bp, Zea mays
  Peptide Sequence Number=SeqID_56714
atggcgagcttcaatcccgccggcgccagcgccgccaaccataatcccaacaaatccttcgaggtgactccggcgcctggggactcggtgtccagcctcagcttcagccccaaggcgaaccacctcgttgccacctcatgggacaaccaggttcggtgctgggaggtcatggctggtggggcctgccaagcgaaggcctccatttcgcacgatcaaccggtgctgtgctcggcttggaaggatgatgggttgactgttttctcaggagcctgcgataagcagggtaaaaagtggcccctgctatcaggtgcccagcccatcgcagctcagcacatcctcttggaatggatgtcaatgcacactccaaaagcacttacgcgcaatcccattctgtcagttgttgcttttttagcctcacttccatcgctgctacactaa

SEQ ID NO: 14936 - DNA, 453 bp, Zea mays
  Peptide Sequence Number=SeqID_56715
atggcaaagaagaggaccaatgtgatccccattattgaggatgtcaggcatccggcaaggtaccagatgttggttggcatggttgatgttatcttctctgatgttgcacagccaaaccagacacatgaaaatagcgaggatattgtttttcttcagccattggacaacggaatctacattttggtgaaactcgtccttacccaatatttgattcctcggcttcaagcacaggacagtaagagagactacctagaccgtagcagtggaagtggagttggattgtacggttgtaccgaatgtgaagctgacgttgtcgcgctgatagaggaggaagtgccgcgtgttggggaagcggcacgccggttcgagtggataggcggcgaggttctccttttcctccctcttcagtcgcaacaaattctcaacgggaacacctccccgtgctcacgatga

SEQ ID NO: 14937 - DNA, 468 bp, Zea mays
  Peptide Sequence Number=SeqID_56716
atggggtgggcgacgcggttcctggcggcggtgtgcttctttgctgcgggtgtcctcttcgtccccgaggctctccttggttccccctccggcgcaggcgccgtcaccgctgccaagctggcccacgtcctctcctttgccacttcctggggcgccgccctctgggccacctttatcggcggcatcatcatgttcaagaacctgccgaggcacatgttcggcaacttgcagagcaagatgttcccggcctacttcacgcttatctctgcctgcgcagccatctcggtcgccaccttctcgcacctccacccgtggaagacggcgtccaccgtggagcgctaccagcttggattcctcctatcagcgctcggttgcaatctctccaacctgctagtcttcacccccatgacaattgagatgttggcatcacattatcacaatgtctcacacaacaaggaaattgagtaa

SEQ ID NO: 14938 - DNA, 339 bp, Zea mays
  Peptide Sequence Number=SeqID_56717
atgaacgtatgtgagctcacccttgttgtactcacatcccccaagtcaaggacagaacccgagtgtgacacaaaagcaccacgagggtacccccgggaccatctcctgcgtggcggatgtagagggaactctgcaccgcatagcaaccccacccaagaagaaatcctccttgggaacgccaaagggagctacagtgaaagcatgagccatgcccccgctagcagcgcgacagggcatggtcccgcgcaagtttgggctcagaagtccccagagggtagaaggctagtcaaccacgacctccctaacccagcgaactccgttgtccacctcacctactaa

SEQ ID NO: 14939 - DNA, 210 bp, Zea mays
  Peptide Sequence Number=SeqID_56718
atgaggattcataaggtgaagagtgttactatgaggcatatggaggaagggatcaaggatggctctaaggaaggtagtgaggataactttgaggaacaaaatgatggattaaacattgataatgatgttgttgaagatgctgactttgtcttagggatgatgagtcctcatgagaagatgatgagggaactaatcaaaaagtttaaatag

SEQ ID NO: 14940 - DNA, 105 bp, Zea mays
  Peptide Sequence Number=SeqID_56719
atgccgctcagggcgagggggtccctggattgcagcttccctaaacctgtgttgttatcacttttgttctactacttaattgagttggtatctacttatacttag

SEQ ID NO: 14941 - DNA, 420 bp, Zea mays
  Peptide Sequence Number=SeqID_56720
atggctctggctttgaccactcgtgtgaacactacccatgtccctccacctcagcaggctcctttctacccagttgtggtggaagaagaccctgaagagttgcaccaccttgttggaggaaatggtgtgattttggatgacagttatgaggagattatggcgacacccacttcgtcaccagcacctcatgtcgttgctactggagcttcttcttcagtaacccaagcccctgctcctagaggtgatgaccctgatgattctggtaatgatgatgatgaagaggataaccaagacgacaacaatggtgatgccaacaacaacaacgaacctgaccaagaggatgattttgttggaatgtggcctatcgctgagcattacacctcgatgtttgagataggtcactttccaaacatactatag

SEQ ID NO: 14942 - DNA, 195 bp, Zea mays
  Peptide Sequence Number=SeqID_56721
atgacttgttctgtagcaattttagaggaattctatccagaggtgctgcaagtggtgctctactatcttctcgtgctgaagtcaaacgatgatgatgcggcagaggctaacgacgctcacgacactcaccacgaagatcgctacgaaatcgaggagcagcaggcggacatcgacaatgatgccaacgaagagtag

SEQ ID NO: 14943 - DNA, 645 bp, Zea mays
  Peptide Sequence Number=SeqID_56722
atgtctccggcgccgagttcgcatcactcgcagatcaattcgaggaaggagaagcggatgaggaaggtggacaccttcgcgccgcacaacgatggccaccaatggaggaagtacggcgagaaaaagatcaacaacaccaacttccccaggtattactacagatgcacgtacaaggacaacatgaactgcccggccacgaagcaggtgcagcagaaggaccacagcgacccgccattgtacgcggtcacgtactacaacgaccactcgtgcaacagcgcgttcctcccgctctccccctccgagttccagctgcagacctcgtccgggaaggccgtctccatctgcttcgactcctcgtccgggacggcggcggcggcggccgccaccaccaatgccagcggcggctcgccctcttccagcgcggcggcggcggcggcgcggcgaggcacgccgccggaagtcagcaacccgcccgtgctgcggcggtctgagacgtacccgtggggcgccggcgccgtggagcagaagccggcgtcctgcagcaccgagtaccacgacgccttctcggctggcgccgccgccgtgccggaggaggtggtagatgcaggcagatttggatctatcaggttcttccattttttgtaa

SEQ ID NO: 14944 - DNA, 246 bp, Zea mays
  Peptide Sequence Number=SeqID_56723
atggttgactctgcaaaaggaacagtacgcaacagtgccgcgacagagtcagaagcgcagaagttagaaggcaccggactgtccggtgtggcacaggactgtccggtgcagctagaagacaaaggtctccaacggtcaactgctcagaaccctaacggttgcgctgacgtggcgcgcaccggacagtgcacaatggctgtccgtgtgaatttgagttggctcccatacgtcatccgctatccttga

SEQ ID NO: 14945 - DNA, 807 bp, Zea mays
  Peptide Sequence Number=SeqID_56724
atggccgccccacgaatcgcccgtccagtcgcattaactcctcggcagggcgagcgatacctttggcaggcaaagcgggcgtcgtttcacctccgccatgatgaccgcgtcaaaaaagggaccgggaaaggggacatttcgaaagggatccttctcagcgaaggaagcgggccccgagccctcctactgatcaggggttcgaaggctggcccctcggaagggggttcgaaggctggcccatcagaagggttcgacagccgccccagagcaagcagagtgagggacgactttgggtacgtctgttacatggccgaggctcgggctacgctcctgaggccggccgaggcatcacgaaaagcattaagacctcagaggagtcaaaccactcctccgaggcctcgggggctacacccggcggccttgggtgcaacaggaagctctgcctcgcccgaccttaggcctcggcctcggaaggaggtctccgcctcgcccgaccccagggctcagcctcggcctcgggaggaatcgcgtcctcacccgaccccggcctcggcctcaggagaagtctccgcctcgcccgagcttgggctcggaccgaccgcgccacaggggatacatcattaccctaccctagctagctcaggctacgagggaacaagactggcgtcccatctggcttgccccgggctcaagcacttctccgatggccacgttatcgcgtacacagggctcaagcacttctccgacagccacgttggcatgtatacagggctcaggcactcctctgccagacacgttagcgcatag

SEQ ID NO: 14946 - DNA, 900 bp, Zea mays
  Peptide Sequence Number=SeqID_56725
atggcgcgcgtgggccttgtgagccttgtgctattcaagttcggcgaggcctatggtgactgctacaagagtgcagcatgtctcagttcatcatcttctgatactggaaaaggacaaagcaagttttcaagcaacaaagtaacacacggatttcacttagtggaaggaagatctggccatgatatggaagactaccatgtagcagagtatagatatgaaaatgatcacgaacttggtctttttgctatttatgatggacatctgggagatagtgtggccagttatttgaaagctaatctttttgacaacatactgaaagagcctctcttttggtcagaccctcaagaagcaattaaaaacgcatacagctctacaaacaaatatattctggaaaacactaggcaactaggaccaggggggtcaacagcagtcactgctattgtagttgatggtacagatatgtggattgcaaatataggtgattcaagagctgttttgtctgaaactggtactgccagccaggttactgttgatcacgaacctcataccactaatgaacgaaagaggatagaagaaaaaggtggttttgtctctacgttccccggtgacgttcctcgtgtaaacggccaacttgcggttgcaagagcatttggtgatcagagcctcaaggcacacttgagctcagagcctgatgttaagcatataaagataaattcaagcacagagtttgtcatacttgccagtgacgggttatggaaggtaatgaagaaccaggaagccgttgatctggtgaagtcaaccaaggacccgcaaacagcggcgaagcgactgacgtccgaggccctgggaaggatgagcaaggacgatatctcatgcattgtcatccgttttcgatgctga

SEQ ID NO: 14947 - DNA, 1200 bp, Zea mays
  Peptide Sequence Number=SeqID_56726
atgaattgtcccctgttttcaggttcagggaagatgcaacctcatgagaaggttgctgttctgaagcctgttgcctccaggcctttctccagcttctggcccttcccaaagtttctgcacgacttcaacgccacttgttccccaacaatcaccttcccacaggagactgagctaatcaggccaaaagccactcggttggcatcgctgccgggtgaccttccaacacagattgcagcaacgacagatgccgggtcggataccatgtctgaggaggtggaagggtatgcaaaacatcacacgtatcgtgaccatgcaacagcgtgccaagctgcgaggcggaatggtgagcgcagtcgcctgtcacttgacgggtacagctggaggaaatacgggcaaaagaaagtgaaaggcagcgagttcccgcggagctactacaagtgcactcaccctagctgccctgtgaagaggaaggtggagacgacgccagatggccaggttgctgagatcgtgtatagtggtgagcacaaccacctgaagccgggcaagccttgtcccccgaggaagccattgctgtcgacaagcacagatgctgtgatcggcaaagcaagcacgcccgtgtctacaggcagctctttccatatggcgcccaagaggagcagcgaggagcgcgcggcggcggagcaggagcagccgaggctccgcggcgtgcggaagcggccgtggggcaggtacgcggcggagatccgggaccccgtgaggaaggcgcgcgtgtggctcggcaccttcgacacgcccgagcaggccgctcgtgcctacgacgccgccgcgcgcaggctccgcgggccgcgcgccaccaccaactaccccggcgacgtcgtccgagaagcgccgtgcacggccccggctctggctgcgagcgcgagcggcagcaccgagtcgtcgtcgtcgtcgtcgtcaagggacgacggccacccgccaccgccgctgcctacggcgccgtcgtcgctcggcctgggcctcgggctcttcccggcgacggtggccacccagccgtgcctgttcctggacccggcgccggtggagagggaggaaggggagcgggagcggagctgctgctcccggtcgccgccgtcggtgctggcgggcctcgggttcgacttcgacctcaacctgcctccgcccgccgagatggtcatgtag

SEQ ID NO: 14948 - DNA, 1206 bp, Zea mays
  Peptide Sequence Number=SeqID_56727
atgaaccccacgccactgagcttggagctgggcgtggagaaacctgacaggagggtagggcgctccaaagggaaaccactcaagtcgatctcgtgtctgggcttccggaccgcccgacctccggtcctagagaacgcgatggccagggaggtgcgccagctagcggccgaggagaagaagcggaagaaggacgaggcgaagaagcaggcccacaagaggatggtggctcgcgactcgctggagaagagccgcagagcgcaggcgagggaggggctccctcttgaggcctctccaagcactgaggaggaggacgacgacgatgaggggatggaggtccgcgtgagcttcaaccccgaggtcgagcctagttccacgctggccttggtgggcccctctggcggcgtggtccctttcgcacaggggccggcagcgtccatgtctggggcgcgagcattagccgagcctgcccctgtctctgccttggtggaagaggcagatgtcgtggagggggaagtcacccccttcttgagggagacggcatggcgcctgctggcgcgtaggctgggtccccttagcggctgctcactgcgggggacacggtggaggggcccttcacttcccctcacaagaggtgaccactgccccgcctacatcggcgacagggcagcaagggtcagaaatccggagcccaaggccttctgcaatgtctgtctccgggagccatctcagcaggatgttgaagtggctgttcccgctcccggggcgccggttgggcccgacacggctgcgggcgaggtggctcccgcgcgtcccgtgtcaccggcggaggccaccgtcgtctcctccgaggatgaggcagaggcggaggaggtcagttcctcggtgtcgccagggaggatagtcggcaggaacctgctcggtgacgagacgatcatcgagccccctatcatatgggctagcatgtgtccttgttcgctccggggcagacccctcaatatgaggagagtcgccctggtgtggatgtctactgagggcaacccgtactttgtcctcgacgacatcgaggagcgggagatctgggccgagttcagggcgttgggccaggcgaaggagagcctccaggcggtgacgatggagcgcgactccctctccaagtcactggaggatgaacagtccgagggctgggctctaaacacccggatatga

SEQ ID NO: 14949 - DNA, 498 bp, Zea mays
  Peptide Sequence Number=SeqID_56728
atgacgaacggcgtggtcacggtcacggggtgctgcgcggacggcgaagctccggcggggaacgtggatagtgagcatgaactccggcgaggcactccacggatggcgaacggcgtacgaacggctcgggtgacggcgtggcgcgggttctggcgcggcgagattggcgtcgggcttctggagcatggggtcgcggcgagcggcgcgtccacgggcgggcggctcaggctagcgcagttgcgcggctcggccacggtcggtcctcctggcgtgtcgcggtcggcgcgggtcagcttcaagggcgcggccgctcggttggcatgcaggggctcagtgtcgcgggcgggtcgcatggcgtcgcgtggcacaggggcgcggtggcaagcggtcgggcgcctgggtgttggcggctgggagatagagcagggtgggcgcggcttagggttaggcgcggccgccttcatgggcctaatgggccacttcggctcggtagattag

SEQ ID NO: 14950 - DNA, 432 bp, Zea mays
  Peptide Sequence Number=SeqID_56729
atggggctttccaccgtggcccgggcgtactggcgctccatcgagcgtgccgggctcagtgggtcggacgagtcggggatctcctcggatgaggcaaactccttcgactcttccgaggagtggagcggcggcgacggtgacgatgagggcgacgacagtggcgacgccagtggtgagggcgacggtggcgacgacggcggcaagggcgacagtgagggcgacggcggcagcggcagtggcgatgacggcgacggtggtgacagctgcaccaagggtgacggtggcgacgggggcaacaaaggcgacggtggcgacggcggcagtggcaacaacaagcctgctcgtcccgccggaaagatcacgatggcccccaagcggaagaggcagagcaccgctgctgcaatcatcccgcccatcgaccctaatagctag

SEQ ID NO: 14951 - DNA, 480 bp, Zea mays
  Peptide Sequence Number=SeqID_56730
atgcaagggtcattggaacaaaatgggtgttctgaaacaaacaagaggatcaagctgatcaggcctcctcagttccaggccaccctcgaggcctctcgacttcagtttggcttctatcgcccagctcctgaggacacagttccaatgccagctccagtatcagatatcagggctgaggatgaggctatcagacagttcgagactcagggtgtcactacagatacttctttcgatgatgatgaggacctagggatcccgccaccgcctcctgtgccacctcgctcccatgatcacgaggctggtagttccagtgttgctcctgctacctctccagctattgaccctaccctggctactattcttcaatctcttactcagcagcaggctcatctggcagaagagcaggcccgacaggcatctattcagcagcagatgactgagtggatgctattgatgtttcagactattcaggaccgctag

SEQ ID NO: 14952 - DNA, 996 bp, Zea mays
  Peptide Sequence Number=SeqID_56731
atggcagacgaggcggagtggaacgaggctgaggccgggatcgcggccccgggcgcgggcgtggctcctccagcgcccggaggcggcgaggaaaccaagaggaagagggggaggcccaaaggtagcctcgacacgtataagaggcggaggcggaggcggcgcaccggcgacctggtgtcggcggtgcccgcggctagcctcggggatatgggccactcatgtggctgcattcccgctcccccactccctcccccctgcactgtgtacactgtacgcgacggcggcgtggcaatcacccctcaatccatggaggacgaagcggagggggtcgaggctgagtccgggaatgcgggcgcggcctccgccgccagagacggcgaggaaaccaagcggaagaggggaagtcccgaaggtagcttgaatgagaggaacaaggacaggacgcctaagcccaaggccaaggggaggcggaggcggcgcaccgacgaccagaccttgtcggtgtccgcggtgagcctcggggatctagggctcggggtagcggcggggaccaggtcgatcagagagaggaggccggcgcccaatgcgttcttcgacgtgggcagcgacagcgatactgagcatgatgatgatgatgatgaggagcaaactacgattgatcaggccaatcacgagagtgctaaaacaggtgattctgtaaagaagggaggaagacccaggaaaatggaagcgggccaattgcatactaggacgcagatttccaatggtaaaagcaacggccatacaaatgggaatcctgctgggaagaagaggggaaggggaagacccaagaaactgacagtagaacaagcgattactaggtgccagttctccaatggtgaaacaaacaagaatcaaatcctcaacttgactacctcagacaaaatcttcctctatggtgttatcaactgctccctctaccagacccctgtaagacacctggaatgggagctgtga

SEQ ID NO: 14953 - DNA, 2667 bp, Zea mays
  Peptide Sequence Number=SeqID_56732
atggacatatctaagactagccacagtgtactcgaagctgaaaaaagatctggtatgccatctcaggctgatgctaggaacattctatcgacacgatgttcagcattgatgttgctagtgtatattgaaccaagacatcagagctattcccttccctacctgcttcttcaagtcattgatgccattaatgtccagcgaatccagctctttaacaagcaccgatgcatgcacttgacctggaagttagccttttcaattcagcatttgatgtacaatgagttccatcaggttagcaacttctttcttttgcagagtggtgccgaggcagcaaggagcaaacagtcaaggaatcgtaggatttcacagaatgcaaagaagcggaaaagagatgaagggaaggagtctatgacaaaaaagttgaacaaacggagtaagatgttgactggggaaaatgccctcatgtgccaccagtgccagaggaaggacaaaccacgggttgtccggtgtcagtcatgcaaaaaaaagcgattctgtctgccatgcatagaacaatggtatcctaatttgccagaagatgaatttgctgtgaagtgcccatattgtcgcaagaactgtaattgcaaggcatgcctaaggatgaggggagttgaagagcctccaaaaaaggagatctctaaagaaaatgaaattcgctatgcttttcatattgtaaccatgctgcttccctggatgagagaactgcgacaagaacagttggaggagaaggaagtagaggctaatatacaaggtatggagcttcgcaaaggtgagatcccaggaggagaagaggtggaatatgtgccacctgaacctaaaggtaggagttattcttttggcaagattcatctactgaaggatgctgatagaagtaagaactcctcaaatggcgagtcttacaacggcatgcctgctgttgggaactccaataatggtctgttgctctggaaagcaaaaagtaatggtagcataccttgtccaccaaaggaagtaggaggctgtggtagtacacttctggacctcaagtgtttgtttccagagaagatgtttgccgagctagaatatagagctgacaaagttctcaggagtgggacattagctaaagcaatggttagtagaagtgatcggtgcccttgcttcaatcaatcaggcaagataagaactgaaagcaaatcagtaagggaggctgcaagcaggaagggctcaagcgataacttcctatactgtccagttgctattggtattcaagatgatgacatagtgcattttcagatgcattgggcaaagggtgagccagttgttgtttctgatgtccttcagttaacctctggtctgagttgggagccaatggtggaaattaacatacataggttcttttcgggatatacaacaggcagaactcatgctaggactcactggcctcagatgcttaagctaaaagactggcctccttctagttcctttgacaagcgattgccgcggcatggtgccgaatttattagcgcattgccatttcgtgagtatactgatccacgatatggcccgctaaatcttgcagccaagcttcctgctggtgtcttgaagccagatcttggacccaaaagttacattgcttatgggttctacaaagaattgggcaggggcgattctgtgaccaagcttcactgtgacatgtctgatgcagtaaatatcttaacacacacagctgaagtcacttgtcagactgatattggcttaattgaaaaaatccaaaaagacatgagagagcaagatctgcaggaactatatgggggtctaaattcccgctctgagctcaagttgtcaccagctccaactgaatgcagggatgaatctgttgatgaaggattgaagacctcatatagtagagaaggcaattgtgtaaatagagacaattataatggtttggacatcaatgcattaccacctgatgacgatggagatattgcaaaggataaagaatcatctcctggatcagagtggcaaagtgaactaggtcagagttcagatcacaacaatggggtcaacacaactgatgagatgtacaatggagctcattacatttcacacaatcaaaaaagcactggcaggaaagttggcattaaacctcaagaagagaaatctgaaaaggctgattgcagtggcacatgtgcttatctaaaaggaagttctgaagataatccggaaatgcctattgtggagagctcagaggagcagagcaccggtggtattgaaccctggacgtttgaacagaagcttggtgaagctgttttcattcctgctggatgtcctcaccaagtgagaaatttgaagtcctgcatcaaagttgcgcttgattttgtttccccagaaaatgttggtgagtgtgttaagctgacggaggagtttagacgacttccatctttccacaaggctaaagaagacaaactagagatcaagaagatggctgttcatgccctgaacgaagctgtaaacttcctggatcctcgttcctcagaagagttgaaaattggggttggtgagaacatctgtgaggatgaatctgtagatgagaaggagctgccgcctagaagaggagttgaagtgtcaggcgttgatgagaagcctaaatag

SEQ ID NO: 14954 - DNA, 135 bp, Zea mays
  Peptide Sequence Number=SeqID_56733
atgaacggtgagggaagcaggccagcttgcgttcgttcctctgaacttttctggctccgaactgtcaaagagtcgtcgaaatctaaaacaaaaggccgtgcactgcagctggaaaattactggagctgggaataa

SEQ ID NO: 14955 - DNA, 3207 bp, Zea mays
  Peptide Sequence Number=SeqID_56734
atgcccggcataccgagggatgtcgccgagcactcgctggatattcgggccggagcccgacccgtcaggcagcctctgtgccgattcgacgaggagaagcgcagagtgataggcgaggagatccacaagctaatggcagcagggttcatcaaagaggtattccatcccgaatggcttgccaaccctgtgcttgtgaggaagaaaggggggaaatggcggatgtgtgtagactacactggtctcaacaaagcatgtccgaaggttccctaccctctgcctcgcattgatcaaatcatagattccactgctgggtgtgaaaccctgtccttcctcgatgcctactcagggcatcaccagatccggatgaaagagtccgaccaactcgcgacttctttcatcacgccgttcggcatgtactgctatgtcaccatgccgttcggcttgaggaatgcgggcgcgacgtaccagcggtgcatgaaccatgtgttcggcgaacacatcggtcgcacagtcgaggcctacgtcgatgacatcgtagtcaagacaaggaaggcttccgacctcctctccgaccttgaagtgacactccgatgtctcaaggcgaaaggagtcaagctcaaccctgagaagtgtgtcttcggggtgccccagggcatgctcctgaggttcatcgtctccgagcgaggcatcgaagccaacccggagaagatcgcagccatcaccagcatgggacccatcaaggacttaaaaggcgtacagagggtcatgggatgcctcgcggccctgagccgcttcatctcacgcctcggcgaaagaggtctgcctctgtaccgcctcttaaggaagaccgagtgtttcgcttggacccctgaggccgaggaagccctcggtaacctgaaggcgctccttacaaaggcgcctatcttggtgcccccagctgatggagaagccctcttggtctacgtcgccgccaccactcaggtggttagcgccgcgattgtggtcgagaggcaagaggaagggcatgcactgcccgttcagaggccagtctacttcgtcagcgaggtactgtccgagaccaagatccgctacccacaagttcagaagctgctgtatgctgtgatcctgacgaggtggaagttacgacactacttcgagtctcatccggtaactgtggtgtcatccttccccctgggggagatcatccagtgccgagaggcctcgggcaggatcgcaaagtgggcggtggaaatcatgggcgaaacaatctcgttcgcccctcggaaggccatcaagtcccaggtgttggcggacttcgtggccgaatgggtcgacacccagctgccgacggctccgatccaaccggagctctggaccatgtttttcgacgggtcgctgatgaagacaggagccggcgcgggcctgctcttcatctcgcccctcggaaagcacctgcgctacgtgctacgcctccatttcccggcgtccaacaatgtggccgagtacgaagctctggtcaacgggttgcggatcgccatcgagctaggggtcagacgcctcgacgcccgcggtgattcgcagctcgtcatcgaccaagtcatgaagaactcccactgccgcgacccgaagatggaggcctactgcgatgaggttcggcgcctggaagacaagttattcgggctcgagctcaaccacatcgctcggcgctacaacgagactgcagacgagctggcaaaaatagcctcggggcgaacgacggtccccccggacgtcttctcccgggatctgcatcaaccctccgtcaagatcgacgacgcgcccgagcccgaggcaccctcggctcagcccgaggcgccctcggctcggcccgaggcaccctcggctcagcccgaggtaccctcggcccccgaagccgaggcgctgaacgtcgaggaggagcagagcggggccacgcctgatcaagattggcatgccccgtacctgcgatatctccgccagggagagctacccctcgaccaagccgaggctcggcgggtagctcgacgtgccaagtcgttcgtcttgctgggtgacgaggaggagctctaccaccggagcccctcgggcatcctccagcgatgcatctccatcgccgaaggtcaggaactcctgcaagaaatacactcgggggcttgcggccatcatgcagcgcctcgagcccttgtcgggaatgccttccggcaaggcttctactggccaacggcggtggctgacgccactagaattgtccgcacctgcgaagggtgccaattctatgcgaagcagacccacctgcccgctcaggctctgcagacgatacccatcacctggccctttgctgtatggggtctggacctcgtcggtcccttgcagaaggcgcccgggggctacacgcacctgctggtcgccatcgacaaattctccaagtggatcgaggtccgacccctgaacagcatcaggtccgagcaggcggtggcgttcttcaccaacatcatccatcgcttcggggtcccaaactccatcatcaccgacaacggtacccagttcaccggcaaaaaattcttggatttttgcgaggatcaccacatccgggtagactgggccgccgtggctcatcccatgtcgaatgggcaagtagagcgtgccaacgacatgattctacaagggctcaagcctcggatttacaacagcctcaacaagttcggcaagcgatggatgaaggaactcccctcggtggtctggagcctaaggacgacgccgagccgtgccacgggtttaacgccgttcttcctggtctacggggctgaggccatcttgcccactgacctggaatacggctccccgaggacgagggcctataccgatcaaagcaaccaagctagccgagaagaatcgctggaccagctggaagaggctcgggacaaggccttactacactcggcgcggtaccagcagtccctgcgacgctaccacgcccgaggggtccggccccgagacctccaggtgggcgacctggtgcttcggctgcggcaagacgcccgggggaggcacaaactcacgcccccctgggaggggccgttcgtcatcgccaaagttctgaagcccggaacgtacaagctggccaacaatcaaggcgagatctacggcaacgcttggaacatcaaacagctacgtcgcttctacccttaa

SEQ ID NO: 14956 - DNA, 750 bp, Zea mays
  Peptide Sequence Number=SeqID_56735
atggccacggcgacgaccctctctttcagcggcggcggcggcggcactaccctgctccgcgggcacgtggccttgacgtcggggcggtgctgcacgttcccgagctcgcggtggaggccgccgcgcttgtcggcctcccgcgcggatgactcctcgccggctccgttcgagatgacggtggaggacgcgctgaagctgctcggcgtcgcagagggcgcgtcgttcgacgaaatcctgcgcgccaagaacgccgtcctcgcctcctgcaaggacgaccaggacgccgtcgcccaggtcgaagcagcctatgacatgttgcttatgcagagcttatcacagcggagggctggaaaggttgctaataaccgcatccgctttgctgatgttaaacctgtaaagagtgcaggagctgggacagtcccacagtggatgcaggcaaccatgaagaatgcacccattacatttgagactccatcttcgagcagcttgggcatccagtcatgtgtttatggtgcactaatggttttcacctatgctagtggaagctcgacatctttgccgtctgcgtacagtagccctgatgtgccaggttttatcctagcaacaggatttggtgcatcactgtattttctggcaaagaaaaatatgaacttagtgctgacagtgggtgagcatgtgggttttgctggcatagaattccagaagccccgtacctgcttttgtgcttatcatgccattgtttgcttatag

SEQ ID NO: 14957 - DNA, 441 bp, Zea mays
  Peptide Sequence Number=SeqID_56736
atggccgcaggcctctggtgccgcgcgcgcgcccttgtcagggtcctgcgcgtcctgcgtcttcttccccaagctcggccgccgtgctctctgcgcgcgactctgctcttctgggtgcgcgcctgggtccctgctgagctcggcgtctatctctatgtagctctagtttttccccagcacgctttcctccctgctcggccatgggagccgcgccgtccaccctgcctgaaatcccctcgggcacgtcttcccttctttgctccttgcacgagccgcgaccctcttgaccagtcccagccgaactcccttccagtccaaccgctgctcctggctcgcccgtccgtgcggcacttcgtctatagccgctgtccgccgtcgagtctagctacccatcgcgaagtccctgctgtcagcctccgcacatgtcctaaactgtcatag

SEQ ID NO: 14958 - DNA, 243 bp, Zea mays
  Peptide Sequence Number=SeqID_56737
atggcgcaaccccctactcaagatgaggaacatgtacctcaggacgatggcattgatcaagggattgcgcatgaagaagaagataatgaggaagaagatgttccacagggtagaagaagctttgaaggatccagactaggtggtggccatgcaggaagatctcaacaacttcaagagaaaagtctagagcttggtgccacgtctaaagcaaaacattgtgacaaccaagtgggtgttccataa

SEQ ID NO: 14959 - DNA, 291 bp, Zea mays
  Peptide Sequence Number=SeqID_56738
atgctaatcatttttccgcaacatggcagtattttagagtcaagtcatggaggctcatatcaaaagcatgatggcacaaccacgtgggataaagagtatcagttgtttcaaccatctggagctatcaagtttcctctacaagtcacgaccacagatgcttggctagaaaagataaaaaggctggaactgctacttacggtgaaggaatctgctatggatgttccttcaaacctagaagccagaaaggcgtcttacattttttaccaactccttatttatggatatgcctga

SEQ ID NO: 14960 - DNA, 201 bp, Zea mays
  Peptide Sequence Number=SeqID_56739
atgagagcaaatggggagatacaaaggggagagaaggcaaaagcagtccaagagggaagactcgcaaacacgataatacgagcgaggggtgggctgagcaagctcccagtgaggcgcaagctaggtgactggcacataggtcatttgctcatacccatgttcaaggtcgtacctcacattctctcgcgggaacctggctga

SEQ ID NO: 14961 - DNA, 1137 bp, Zea mays
  Peptide Sequence Number=SeqID_56740
atgctcggcgttggcctcggcgtccgactgatggtagctgttgcccctgcgcctccagttccagccccaccaggcaaaccgccccttcctctctgctcctctctccgccaccgctcctccggctggtggttctccaacggcgacgcccatggaagagacagcaccgccgccaccacgagcagcagggcgacgaggcggaagtggtggtccgaccccgacggcagccaagaagactacggttcctcttctctagaggaggacgagtacggttacggttacgactacgattacgaggatgaggctgcgttccccggatttggaggggctggggagatgttcgacgagccctggttctccaaggtattcaagacgtacggattcatgctaccggtgatgcttgcatccatgtttgctgtaacagggctaaaggcctttctaatggccatggcgatcccgctcggtcagtcggccatatcatttataattgacgctgtatggccaaggagaaaaggcaaccgtgacgacaggtggaggagaccagtccaagaggaggaggaggaggaggaagatttccctagggacgccactgactttgcaacaggtggtcgaggcagatacagcagcagctattatgaggggaggagagggaggcagagctaccagtcaagtgtctctaacgattttgctgatgctgcctcagctgctgttggagctgatgatagcaccaagagcagcagcagtggagatggcggaggcaacaaaagcagcggtggatatggaggatgggatgagcttctggacaacaataacaacactgctgctgcccgggaggcaaagaggagcagcaactcattctcagctggcaacacttattacagcacgaaatcgcggccttcggcgactggggaggcagatgcggattataccgccgctggcggtggcggaagagcggagcagggagtaggagctcctccggaaagaatgagaatgagacgacggcgggtgccgagaacgatggggctgggcagtaccaggcagtcgcagaagtttgattcaatcataggctggagccgaatggaatcagaagtgaagctgtggattggaaggaagacaagtgtcgtgaagaagatcgattga

SEQ ID NO: 14962 - DNA, 1989 bp, Zea mays
  Peptide Sequence Number=SeqID_56741
atggatagagaaccccaacagctaacccctgagcaaagatacaacctttcatgggaggcagcgactgagagattcatggagtactcagaccttgacaaggttctgaacaatgaggctgctcagcctaaacaaggtaggaaaagaaagaataaaagaacctcacagcctaatttgttcgacatcatggatggcggtctagcgttggcccatcgatgcttaaccggcaatgaggttctcaggctggcaaccgaagccattcctggtacccgggactacgataagagcaatgtgtggatatgggtctcttgcctcctcaagtacaacaccctgtatatggctgagggcgcgcctgtgccaacgacggaagcaaagaagctggcgtcctccatcgcgaggtccaagcaggagatcacagaggacttctcgtcgattggcaggacatggcccccgcggcggtctaagaagagaccagtctccctacccggctgccgttttcctcctgtgggctgtggccgatcgcccgagcctgatctcgatcccgatcccgccgccgtctcagcctccaaggctccaagcgctaaccggagcgatcgcccgagcccgaccccgactggcgagtggcgactcaccggagtcgcggcctcccctgcggtcaccggagtcggagagcagccctgcgcgagcgcgaccggtcaggcggtcaccggagtcgcggcctccgctgcgcgagcgcgagcgccgaggcgccgaccggagccgcggcctctcctgcgccgctgcgcgagcgcgaccgctgaggcgcctttgcgccctgcgtccctgcggccgagcgcgaccgccgaccggagccgcggctggctctgcgccctgccgccctgcgtccctgcagagccgcgaccgcctctgcggcctgcgccctgcccccacgagctccagcactccggcaaggcggcaaccgtggcgccacctccacggccacccggcccaccgaccgccgcggggacggctagagcagacccccctgctcctcctcgacctccaggacagggagtttcccttcctccccgaccacctttgcgtctgtgtgtccctgctcttgctaccgacggccaacttgagtcggccaccatttctatggatgggaactcgaatcgaatcgacaataacagcagccaatcatttgccgttgccgatcctctgactttgagttccactggtcgcgagattgctttggatgcagatacaggtacaggtacagctgcgacgccgtcgacagcgacagcgagtaccgcaagcacggatactatatgccacaagcgcggtcgcaagagcacttccgatgtatggaatgacttcgagcaattgttcaaggacataaatggtaagaaggttaggtatgccgccaaatgcctttactgcaagtctcaacttactgcttcttcaactgctggtactggtcatttgaaacgacatcatagtacttgtgcatctaaagctcaacgtgctgctaagactcaatctttaattcagtttaatgccgatggttctgttcgttcatgggactataatcctgatattgctcgtactgagttgtgtcgattgatatgtactttagatcttcctctaggtattggttccactgctgcatttgaacgttacataaaacatgctcataatcctaggtttactgctgtttgtagacaaacaaccactagagattttgtaaagttttataatcaaagttgtacttcaccaatagatgtattgaagtctagtgtttcatgtgttgctcttacttctgatatttggtctggaaatgctaaggaagattatattagtgtggttgctcattatgttaatgctgattgggttttggaaaagagggtaattggtatgagattgattgatgtttcacataatggggctaatattgcagatcgtgttaaaactgtttttgctgattttggattgactgataaggttgattga

SEQ ID NO: 14963 - DNA, 486 bp, Zea mays
  Peptide Sequence Number=SeqID_56742
atgccgatgtgcacgagagttaatacgatagacatcgtgtgctgtaagagacacaaccgcttacctcggtatcccgcggtgcactgttcaggcctgtgcacggcgctgacaagcaacagtccgcattggaaacgtgcggagcgatcattcgcgtctgcaccgcctgacaaaagcctgcacatgccctgtgcgtggcagggcacaccttcgacgcttgcattaaatgtgggcagcgggcttgcttctaggcgaaggctcctgccacgtgcatatgagccacatggcggcaccagacccctgctcgagcgaagagtgggaaccaagggtgcacactggcctgaaaacttgggtcccacctgttggggtccagatgtcaagcggcgagagacagacgccttaagccatccgcttcagttgatgacttctttaaagacatatgcaacccacaaaaataactggtatcttaagtggtatctaaggagttaa

SEQ ID NO: 14964 - DNA, 246 bp, Zea mays
  Peptide Sequence Number=SeqID_56743
atgccccgcctggctgagctgaaggaagcgcggaccaaagacagagtgggtaccaggggcgagttcacggcaacagacatgcttgacaatcacaaacgcagccggataactaaaactactgcgacagccaaaaatcggctcggagacgacgaccggcacgcaagagaggagctcgacgcggaaactcgacacgctgttgcgagtagagaacttcgcgcgcataataacgtgatggaggagaactga

SEQ ID NO: 14965 - DNA, 477 bp, Zea mays
  Peptide Sequence Number=SeqID_56744
atgtccaagctttttgtcgcgcacttggtgaacaccacgcttgctagcttcgtcttcacccgacgcttgggatttcttgatgacgcgcagaacgatgacgacacaggagggagaaggagatggccaccagagaggcatggccaggattggaggctgcttcggctggaagacggcatgctgcgagctggagatggccgggagagaaagagcagcgcagaaaaatccggcgctgagagcaggggaccgagcagggaagacgcaaagatgggcgcgtggccagggaactgggctgggcggccgggcgaccaagcgccatggggaaaagcctcgggaggaggggatccaggcgcggtgagcagcggagaggaacgggggcgcgccatggaggagagagagaaaaacattggcgcacagaagcagaggaccgagtgcggcagagaacgagcagcagacacgcctagaggagctgaaggttga

SEQ ID NO: 14966 - DNA, 240 bp, Zea mays
  Peptide Sequence Number=SeqID_56745
atgcctatgtgcatgctgcacgtcctgctgctcgccatggctgccacaagatctagccgcctcgacatcccctcggcgtcgctggcgtcacccgatttgggggaaaagggaaattgggaggctatggtggacgatcagagctacaattcgactatagaaaccttgatcatttatgtgacaccccaggtgtctatttcatgttacgtcgggagatttatcctaatctcggatgctcagtga

SEQ ID NO: 14967 - DNA, 318 bp, Zea mays
  Peptide Sequence Number=SeqID_56746
atgggaggaagctcacgcacctggaagaaggaaatgttcgtgggggagcatagggcttgcgcgccatggggatctggcgccgtgggtttgggggctcggagccgatgccccgacggtgttgatggccggaggtggaagaaaggggcgtcgtggaaggaggagaggtggcggctggagctactggcgagcaggtgcagcatgcagctgttggccggcgtagccggtggccgggcgttagctgctagacagagcaggccatggtgtgctggagaaaagaagacagatgctggcaaaacatttaaggagaaaaaaagctaa

SEQ ID NO: 14968 - DNA, 438 bp, Zea mays
  Peptide Sequence Number=SeqID_56747
atggagcagagcatcgccgacttatcaaagctcctgcaagccatgcaaagccagaacgagtccatcaaatcggctctggaagctaatatagtagcggtgagagatctgtcaagttggaggccgcacatcgaagcggatgtgggcgatctgcgagtggagttgagcaacctctccactcaggtgaaggaattgacgaccatgcagagtgaaatcgcagaggcccgcaagatgttcgagatggggtctcaaggacaaccatcgtcaacaacggctccatgggtatcaccagagttcatgccgattgctgcgaatggggaatctggcgtaaatacatatcaccgaggtgctggttttagggtaatccataccctaacaccacctccggtcaaaggaggaagtactctctccacgttgccaacaagtatcaactggctctga

SEQ ID NO: 14969 - DNA, 1581 bp, Zea mays
  Peptide Sequence Number=SeqID_56748
atgggggacggcgccagcgcccgcggcggtcgaagcggcgccgggcgccgggtgggggagtacgagctgctgcgaccgattgggtcgggagcctactcgcaggtgtggctgggacggcaccgggtgcggggcacggaggtggcggtgaaggagatcgccatggaacgtctcagcaaaaagctccgcgagagcctcctctccgaggtcgacatccttcgtcgcatccgacacgataacgtcatcgcactccacgactccgtcaaggtatcctgcccgcggcttgccgccccatttgatgtcgttcgtgatcccccgtgctatagatgtggatctgcaagaacattcttcttgttgaaaataatgaaaaatactctgttgaagattgccgactttggatttgcaaaatttttgcaaccctttgccctagccgaaacactttgtggttcaccactttacatggctccagaagtcatgcaaggtcagaagtatgatgcaaagttgcttaaaaatatactcaggacgcatgaaatacgattaccatctgattgtgaattgagccatgactgcatcgacttgtgcagaaagttgctgcggctcaattcagtggagcggcttacagttgaagaatttgtgcaccacccatttctttctgaacatgctccagagaggaccttgagccggacattatctgaaataagagatggctttccaataaataatatcagtccaacaaggccttcaagccaaagttcacaagaagattgtatgccttttcctttggatgatgagtcaagtggacaggatgagggtccaattcctgacagtaagagtccgatgaaatcttatgggtttcccacagattcccctatcattgattcattagagtttgtagatcaggaatatgtatttgtgtctggaccacacccagagggatcatcgtcttcaacaaatgcttctcagcagcttaacttaccggcaaaatatgataatttatctgtttcaccaccgaagttaactttcttgagtgcaccaatgccgataaacggtttgccgattaatagacaacaatctgctgggactggtagcttcgacagccactattctcctgcatctgtcatttcacagggatctgcggatataagtgatgccatggatcagcccccatctgattatctgacgaggattagattgttagagcaatatgcatcagccatagcagggttggtcagggatgagatagagaaacagtttctctccgaagttgaatatgcggaagaactagccagcactgtgggacagatagctgatggtacagagatgccagatgcaatcgaaatgatatttcagtctgctttacttacaggaaggcgaggcggtgttgatgagatgtttgggaaagcagcggatgccatgactgggtatacgagggcggtatccatgctgcggtttctcctgatcgaggcaccatcacttgccctcaaccctcctttgactctgacaagatccgatcggcatcgacttcgcacatacattgaagctctcaacaccaggctctgtcagatgcagagccagaggcattga

SEQ ID NO: 14970 - DNA, 279 bp, Zea mays
  Peptide Sequence Number=SeqID_56749
atggccatgatgggttcaacatcggaaaagatgtacctctgccagagcggatgccggggtaatgcaccagtcaacggagtaagcggggcgccgccgtggagacctccgccgctgtggtacaacgcgtgcgcgctgtcgccagctgacctcaagttcgatactatgatcgacacggatatggtggaggtaccgatggtaactacaccaagggacactagacgcggatatgatcgcgagcaccgctcccggctccctccaccactcacgaagtatctatag

SEQ ID NO: 14971 - DNA, 492 bp, Zea mays
  Peptide Sequence Number=SeqID_56750
atggttttttcacatcccttgctgttctccactgcttgccttcttcctctccttgcatttccaccatgggcaagaaaacgcaagcgcgagccgactcctccgtccgaagactttggtgactcggaatactcagaggaggagttctcctctgagtccgaggggtctccggctcccatccctctgcgtgagtcgtctgatgattcagacgactcccaggggctcgccgccgaggtctggacttacatctgggccgtcgagcgttccgggctcgcgggctcggatgagtcggagtactcctcggacgaggaggactcgttcgaggaggacggtggcggcgatggcgaaggcgacgacgacgacgacggaggcgatggcggcggcgacgacggtgatgacggcgatggcggcagcaggggcggcaacggaagcagcaggggcggcagcggcggcggtggcaggggcggcagcggcggcaacaaggccagtggctaa

SEQ ID NO: 14972 - DNA, 459 bp, Zea mays
  Peptide Sequence Number=SeqID_56751
atgggcaagagcaagaaaggcgagagctcttcacaccattccggcgataagcggaaacgcgagccgactcctccctcggaggacttcggcgattctgagtactcggaagaggagttctcctccgggttcgagggatcgtcgttccctgcctctccctcagcatcgtctgatgacttagacgactcccaggggatcatcacggaggtgtggacctacatccgggctgttgagcgcgccgggctcgagggctcggatgagtctaaggtctcctcggacgaggagaactcctcggactcgtccgaggagagtggcggtggcggcgatggcgagggtgatgacgacggcggaggcgacggcaatggcgacggaggcgaaggtgacgacaagggcgacggcggcgacggcagcggcaagggcgacggcggcagcggcaagggcagcaacaaggccagtggctaa

SEQ ID NO: 14973 - DNA, 319 bp, Zea mays
  Peptide Sequence Number=SeqID_56752
ggagccctccaacgcgtccccgagcctcacaggtctagactgcgacgggctcaagaagatccagggctacaagaagagggagatcgagcgccagatggccgccgccaagctactcgtggaggaacagctcgccgaggatctcacgctcaagaggggcatctccatggaggctggttgttttcatgagaaaaataccggttatggagctgatagatacacggagttagacgttgtttcatataccaacttccattgcttgagtttgcttgctgactaccaatggctaattgctagatacatggagccacatgttatttga

SEQ ID NO: 14974 - DNA, 525 bp, Zea mays
  Peptide Sequence Number=SeqID_56753
atggcgtcggtgaagcgatttcgggtgacaaggaaggacaagatcatgcggcggtgcgctgggaagcaacacttgctcgccaagaaaaacaccaagcgcaagaagagactctccaagatgttaccactactatttttgaaaaagctagaaaatagtcatgacaattttgagaataaggagatgttcgccgatctgtgggccaaaggcttcagtttgctaggatttgaggctgccatagtatgctctctgaccgtgctaacgggaggaaggagttcaagttttgtttttattgaagcatacatttacataaaattagaatgtcaattccatacacaaatcactgatgggtttttgcttgtagggatatgccttgggatggagaaatgtcacagaacacaggatgaagacgattccaagaatccacccatgtcaggactagaagacgccttcacatcacggagtagagctctcagcaacaacagtgcaacgatgtttggacttttgttcacatatgggagtgtttaa

SEQ ID NO: 14975 - DNA, 237 bp, Zea mays
  Peptide Sequence Number=SeqID_56754
atgggtagcttcctgccacctgggctggcgaagacgacgaagagcacggggcgcgcgagggcaagggacaacgctattggaggggcgcagtggcaggagacggtagggaaggagaggaataattatttatcgcaaatagcaaatgatctaaagcttgaacatgtccatttcagctactggataggtcttcaaacattatcagaaaatagaacactaaaggacccaaaatggatctag

SEQ ID NO: 14976 - DNA, 960 bp, Zea mays
  Peptide Sequence Number=SeqID_56755
atgaagaagttaagacggacaggttacgaagttcttacctatggtggtggggtgacacgctcttaccacagggagaggaagaaccgtcgagcccaacgatctccgatgagaaattccctggactcggatgactctacgcccgattgcttgcccgagcacgatccacggtcgcaggtgaaacctccacgagcactctaccgaccaccgaacgaccgcagacgtgaggaacagttgcgcaagcagcatgacgagctgatggtccgagtgggtgacgtgcgggcctggggtgtcggcgcctggctggagtgctgggccgcgcggtgggattgggctgaaagccagcttataggcccgactggcacaaccatgcccccgcctccatctcgaccgtccgattgccggatcaaccccgcctccatcccaaccgtccgattgcctcgctcccgcacccgcacccgccgccatgcgtgcagccgcccccggccatgcgctaccgctgccgctcccgcacccgccgcagccaccccggccatccgcgcacccacccccacacccgccgcagctgcccccacatgcctcgctaccgcgccccatattcttagcgccgggtccggtgtcgccgtcaacaaccacgcgcgcagcagcctccaccggatccgcgattgccggtcaacaaccatgtgtgcccgcatcgcagagagacttcttgcgtgcgttccagtcgctggacgcgctccggtcctggtcatgtaccccaactacgcgtccgccgaaaccggagaagagctcgatgtggacaaggacaataagctccgcgccggagcaagggaaaatgcggccaagatcaggagccacgggtccacggcgatgttcgtcacggtagactatgccttactggtcgccttcattggcttcctcgcctacctcctcggttcgtggatcctccccttcgtgtcctag

SEQ ID NO: 14977 - DNA, 672 bp, Zea mays
  Peptide Sequence Number=SeqID_56756
atggcgctcgaccaccgatatgaagacaacaactctcctgttcgacgaaatgtcaaggaaatgaaacaactgagaggtggctacaacatagttggtctgtctcaggggaacttgattggtcgagcagtggttgagtactgtgatgatggaccgccgtctggatttttttgcattattgttgatgctctgatcaaattggagatctactcagactatgtgcaggatatggcagattatctgaagagttgtaggtttcttccaaaacttaacaatgaaattccagataaaagaaatgccacctacaaggaaagattcagtagcttagagaatttggttctgattatggatgatgcagtcctgataccacgagaaacggcatggtttggttactaccctgatggagcctttgatccagttctaccacctcagaagacgaaactgtatgaggaagactggattggtttgaagacactggatgaagcagggcgggtgaagtttgtgtctgtgccgggaggtcatcttggtatctccaaaggtgacatgaagaagtacattgtgccttacctgacaaacaaaaaggcatcggtgacggtttctgatttgctagttgccatttggcacgctgtgcttgggctggcactggcagagggtgatgacgctgttttgatttga

SEQ ID NO: 14978 - DNA, 426 bp, Zea mays
  Peptide Sequence Number=SeqID_56757
atgggtatgagtgaattttttcctaatgggtatgggtatggcttcgtgtgcccactgggtaccttacccacttccatccctatgcctagtggtgggacaacagagccccatgatgacaaagtggcggcgataggtcagaagggaaagagaccaccgaccgaggaagctaccgaccatttcgagaaactgctcaaagccccatgtccgaaccattgctacccggtccgacacgcgtacaaggactacaagctactaaaaaggttccttggtggagaaacaccgcctgagattggggtggagcctaggcatggcgatgagcgaaagaaggcaggagttgcgttccgagatgagaccggatgccagatgatttttaggggggttagattactacacgccaagaagacatcggaagtcggaacgacgtga

SEQ ID NO: 14979 - DNA, 2895 bp, Zea mays
  Peptide Sequence Number=SeqID_56758
atgaagcttcaacatgaaacctctgatgccgaggtgctggtctcggcagcatcaaggaacctgtcgtcctcttcatcagcatttgtttcagcaaaccagtcccctttcttcacgccacggtcactgtctgcccgtgtcccagagcacactgaccctgagaacaattgctcctccaatggtattgtgctgaaaatcagtgatatactctctggtgattccttcacaccacaggaggagttaccatcagctagcgttggggtcttgccgtcagatgtgtctcctcctattagcctgtgcacttcaagcaactttggcactccagcaattgtctacaacaatcccagctttgtttctactttcaatggcccatgccaaggcagttcatcagcaaccagcaatggtggtcgttcggctccaaaggaaaagcacaagaggctagggggaatatatcggaaatcatcatcgtgccaaccgacaacgtcgtctgcctctgtcagcaggcttcgcagttacgatgtgtacgttggatttcacggccgcaaggcttcactgctgaggttcacaaactggctccgtgcagaactagagatccatggaatcagctgctttgtttctgacaggtctagatgccgaaattctcgcagccatgatgctgtcgagaggataatgaatgcttccacatatggagttgttatcctcacaaagaagtcattcggcaacccttataccattgaggagctcaggaacttctttggcaagagaaatcttatccctatattttttgatttggatgcagctgattgccttgccagagatatcgtcgagaagcgaggagatttgtgggagaaacatggtggtgagctgtggatgttatatggtgggatggaacacgagtggatggactcggttgatgctctttcccgggtggtagatgtgcaactagaagcgaatgatggcaactggagagattgcatactccaagcaatcattctcttggccacaaaattaggcagaaggagcgtggttgatagggtgtaccggggaaaagggaggttggagaaggaggaattccctttcgctcgtaacaatgattttgtcggtaggaaaaaagagctttccgaattggaactcattttgtttggtgatgtcatgggagatggagaaagagaatattttgagctcacgacaaagcagaggagaaaaggccttgcagttaggcggtctgctaacaatcatgagcacatgaatactgatgacagcaaaggtaaggagcctgttatttggaaggagactgagaaagatattgagatgcagaggctgggtagtccattgtggcatgggcgtccactgagagtgaagaatggcgtaaggtgtggaaggaaaaaaagatctaggaagatactttatggtaagggtattgcttgcatatcaggggagcctggaattggcaagacagacttggttttggagtatgcatatagattctttcagagatacaagatggttctgtgggtcagaggggaaagccgatatattcgacagaactatttggctctgcggacttttctggaagttgacttaagtgtagatagtcacttgcatgaaaagggaagcgatcgatgctttgaagagcaagaagaggaagccattgccaaaattcgtcaagaattgatgcgtgacataccgttcttagtcataattgataatttggagagtgagaaggattggtgggataagagagtcataatggaccttctgccacactttggtggggagactcacttcatcataacaacacgtcttccacgagtgatgaacttggaaccaatgaagctttcttatttatctggtgctgaggcaatgactttaatgaagggaggtgtcaaggaccatccactggtggaaactgatgcactcaaaatcattgaggaaaagcttggaagattacctcttggcctaagtattgttggagctatactctcggagcttccaatcactccaactaggctacttgacacattgaatcatggtcctaggagtctggcaactcggatgtttcaagtatgtggttggtttgcaccctctgcagttccaattcacatgttggctcgtgctgcacacaaagtcccaaagaagcaatggaggggtccaaggtggagaaagtggtggcgaccacttacttgtggccttgcaacttgtaggatgaagaaatctgaagctgaagcagctgcaatgttaatgaggtttggaattgccagatgcagtgcaaagcccgaacatgtacagttccatgatctgatcaggctatatgctcgaaagctaggaggcacaagaacagctccggccatggtccagtcagtgtacctccaaggctcaatcaaacattcctctgagcacctgtgggcttcgtgcttcatggtttttggatttggttctgatcctctgttggtagaactgagaccatctgaactaatgttctatgttaaacagattgtcatgccacttgcaatacaaacatttataacatactcccgctgtaatgcagcactagagctgcttcgcctgtgcactgatgcattagagagagcagctgagtccatgcttgctcatgctggcaaatggagagaaacatcattctcctgctttaggcaagctcattcagaagcccagtacacttatctttggcaggagctggctcttctgaaagcttctgtactggaaacaagggccaagctgatgctccggggtggacaatatgacattggagatgacttaataaggaaggccatatttatccgtacttctatctgtggcgagcaccatcctgacactgtttctgctcgagaaactctcagtaaactcacaaggcttcttacaactgttcagcttagttga

SEQ ID NO: 14980 - DNA, 1464 bp, Zea mays
  Peptide Sequence Number=SeqID_56759
atggcgacggagaggaggcgcgcgtcagtcgtggtactgggcgacatcggccgcagcccgcggatgcaataccactccctctcgctcgctaaccaggccagtatggaagtggacattgttgcaaatggaggaagtgatcctcacttgtcactgagagagaatccatcaattcacatccacgagatgaaaacagtgcagttaactggaatttcaaagatatctggtgctctgtcacttctacttaaagctgctgtccagttcattttgctggtttggtttctttgttttaagattcctcgccctgatgtcttttttgttcagaatccaccctctgttccaacactggctgctgtaaaactggcaagctggctgagaggtgctaaatttattgttgattggcataactttggatatacattgctggggttgtcgcatggcagaagtcacattattgtcaaaatctatttctggtttgagaagtactttgggcagatggctgatggtgccttttgtgttacaaaagcaatgcagcatgagcttgctcaaaattggggaatcagggcgacagttctttatgatcaatctcctgatttttttcaccctgcttcattgatggagaaacatggggtgagcatctattttgagtttttatttcctccttcctgtaccacatgtgaccttaagacacaggaagtaggggaagacatgaacactactgcctttaccagtaagattgatggccaagttttcttgaagcctaacaggccagcacttgttgtgagcagcacaagctggtctgctcttttgaaccttgcagtcattgatatagccttctttatgttcattgcatgtgattatcgagtggatagttcaaatatgagaaagacgccagatgaagatttcagcatacttttggaagcagcactaatgtacgacagacgcgtcgctgcagctttaggtgaagatgattcaatggatgaggggcaactttggattgatatcaagaacgggaagcagtttgtctacccaagattactgttcattattacaggtaaaggacctgataggaagaaatatgaggatcaaataaaaaggttgaagttgagacgtgttgccttgcggacaatgtggcttgcatcagaggactaccctttattgctcgggtcagctgatctaggagtgtcgttgcatacatcttcgtcagggctggacctaccaatgaagatgctctttaaggggtttccagaagaatgcaatgccttgaaatccctcaaagaaggtgccatgaagtcagcatcatcttcgaaatggtcaacagaatgggaaaccaatgcactacctttggtggaccaggcaaatgatcaaacattgcttgctagaattgtggttacactcatcagcttaggccttacctttttctatttcatgtccaaatttgcagagaaccagagatcggtgtactag

SEQ ID NO: 14981 - DNA, 480 bp, Zea mays
  Peptide Sequence Number=SeqID_56760
atggcgcgggtgtgcggccccgacgcgggcgaggccctcatgacgcgggtgcgcagcctcccccggcggcgcgaccgtagcagcgcgcagatccgacgacggcgggcgcgtggccccagcggccatgcggtttccggcgtgcgcgcgcaagcgcgacccccgtcggccacagcgccggtgcggtcagacgcaacacgacggcccggcagcacgggtgcgacaaccccaacgcgggctccaccggccatggcggttcagatccggactcttccagcgtgggcgggcgcgagttcccccggcgacgcggccttagcagcgacctccgatggcacgacgcggtgcgggcataacggcctgacgcttgagcgcgggcgcggccacctgcggctcagcgtcccaacggcgctcgggtacacagccccagcgcacgtgtgcagccacgacgctatcccggcgcacgtgtgcggccatgacgcatag

SEQ ID NO: 14982 - DNA, 468 bp, Zea mays
  Peptide Sequence Number=SeqID_56761
atggaaacgctacggggagaagaaactgaagccgggagctgcgcgggaggaagccaagaaaggcaccagcagttgtctgaagaaacttacatgtgcagcgtagcgaaggcccctgttgaggaatcacgcctagctacagcgaggagaaacggtgtggttcctggagcaggtgagcggcacggcacagcagcggagcaagagcacgctctctccgtcgctgccgccgccgggcgagaagcgccgcacagggtgatgctgaaggaattgggcgtttcaaggatccccagccagagccaggctctgacatctcaccgcacggggtgtcttgcaccggcaagtgacgaaatgtcgacttcgaccgaaagcgactctttggcttccctgttctcgcctcgatctcaagtaggagtaacacgggccgggcacggcagcatggaagccaagcatgacatgattcattctgtttag

SEQ ID NO: 14983 - DNA, 405 bp, Zea mays
  Peptide Sequence Number=SeqID_56762
atgcccaaaggtagtgtgtgctaccccgacccattactggcccccaaacggcatcaaaggcggtggcgacatctcaaccctacttctcctaccgactggttcttcatgatgcaagcggaggtagcaaggggagccacggtgctcttaccagatcctgcgccgccgcccgcatggagtccatttgccaccgcgtacacagtaggcgtcagcgggttaccgaaggtaaagaatgtcgcggaagccagggcgagctccacggcagaccgcggccaagggagctacgccgggctccaccgatggagaaggcctggcgcgcgcgaccatggagcacgcgaaggtgtcccgcgcttgggcttgagggagtccacaggggtcagagaatatttctctctttcttatttttaa

SEQ ID NO: 14984 - DNA, 567 bp, Zea mays
  Peptide Sequence Number=SeqID_56763
atgcccaaaggtagtgtgtgctaccccgacccattactggcccccaaacggcatcaaaggcggtggcgacatctcaaccctacttctcctaccgactggttcttcatgatgcaagcggaggtagcaaggggagccacggtgctcttaccagatcctgcgccgccgcccgcatggagtccatttgccaccgcgtacacagtaggcgtcagcgggttaccgaaggtaaagaacgtcgcggaagccagggcgagctccacggcagaccgcggccaagggagctacgccgggctccaccgatggagaaggcctggcgcgcgcgaccatggagcacgcgaaggtgtcccgcgcttgggcttgagggagtccacaggggtcagagaggaggtcgcaggggccatcttatgtgtgcctgggcagggccatggggcggcggacgccagagattccggcgtgggttacggatcgaggggatatcccttgaccagatcgcggcaggttccaggagggcgagccatgcggaggtggttgttgggggaagaagatagagctgccccaagacccacgtga

SEQ ID NO: 14985 - DNA, 129 bp, Zea mays
  Peptide Sequence Number=SeqID_56764
atggagtcttggcgtcaactggtgtatggccgcctcaagatcgtgtccatagatgtcccgatcggacgggttacaataggaaagcccttcattaaacgcgatccgttgatccctgatcggacgacctag

SEQ ID NO: 14986 - DNA, 1674 bp, Zea mays
  Peptide Sequence Number=SeqID_56765
atgggtgcaggtgcaggcaccggcgaaggttctggaagcggctctggcgatacatccggcgtcgacggggcgcgcaagcacgggggcgcactgcagcgcggtcttctgcgccgggcgcagcgcgccgaggcagttgtccctgtcgtcgaggttgacgagcgccttgtcggacggcatgcacacggcggcctccgagttgaagaagttgaaggcgaagctgaagttgacgagcgccgggagctcgcagatggactcgtgcacgatgccggtgaaaacgttccgggacacgtcgagctgctccagcttggctatgttggagagctgctcggggatggtgccgacgagcatgttcccgctgacgtcgatgacggtggtgttgaccagcaggcccatctccaacggcaggcacccgtcgagcttgttgttgaggaagatgatctcgtccagcgtcttaaccatgcggccgatgctcttggggatgcatccgacgaaggcgttgttggcgaagacgatgacggacgccgtggaattgccgaggttctcggggatgggccctacgaagcggttggtgttgacgaagatggcgtcgaggtctttgtcgaagagcgccggcggcagctcgccctcgaagtcgttgaaccggaggtcgaggtacttgagcgacaccatctcgaggcagacgtaggggaagacgcccacgaagcggttgttgctgacgtcgaactcgtgcagcagcgacagccgcgacatgctcttggggatgatgccgcagaagcggttggtgttgatgtggaagaaggcgaggtcggtgagcaggccgagctccggggggaggtacccggcgatgtcggcgccgttgaggtcgatcccggccacgaccgtgatcttggggtcgtccagcgcctcggtgcagatgacgccattgtacttgcacacgtcttcgccgacccagttggcggtgtagcccttggggtcggagtagaaggcgcggtgccaggcctggagcgcgatgtacgcgcggcggaggcgcgggttggggaagttggcggcgccgacgcggtcgtcgaactcgaagtccgccgaggctccaaccccaggcccaacgccggcggcgaggaggagttcctcctcgtccccgcgacccgcctctccgccgagcgctccgacgacgcgcccggccagcctgtgctcctctcccgcatcttcaagtccgagcgcatcgagctctcggaggaccgcctcaccgcggccagcaccaagggcttccgcatggtgcgcgcgacccgcggcgttgcggcaggggcgtggtacttcgaggtcaaggtcgtgcacctcggccccaccggccacacccgccttggatgggccaccaacaaggctgacctccagacgcccgtcggcttcgacgcctatgggtttgggtaccgtgacgtcgatggcgccaaggtgactaaggcttggagggacaagtacgctgatgaagggtacggggaaggagatgtcctggggttctacatttctctgcctgatggggagcggtatgaaccgaagcagcctgacctgattcagtacaagggaatgccttttcacgtccaagtccccaaggaggagcagaagacgccggatcctgtccctggtgagtactcattttgtttgcctttgttacatttttag

SEQ ID NO: 14987 - DNA, 1848 bp, Zea mays
  Peptide Sequence Number=SeqID_56766
atgataggtggaaggatgatgtcattgaatgatggtggaggttgggattctgctggtggtggtaatgactgctcttctttcttcggcggggcaggggtgacaaccggaggaggtgagcttactggggccggtggtggtagtgatggtggcttcactggtgctggtggaggagagctaactggtgccggtggaggaggagattttattgggggtggtggggagctaactggtgctggtggcggaggagacttcactggaggtggtggtgagctcactggtgctggaggtggcggtgacttcactggaggtggtggtgagctgatcggtgctggaggtggcggtgacttcactggaggtggtggcgagctgaccggtgctggtggtggtggagacttcacagggggaggaggtgagctcacaggggcgggtggaggtggcgacttgactggaggtggaggcgagctaactggagctggtggtggaggagacttcacctctggaggtggtggcgagctcatgggagcaggtggaggtgatgacttaggcgctggcggtggcgagctaactggtgtaggtggtggagaagactttacttctggaggtggcaagttcacaggagcaggtggaggtgacgacttaggtgtcgctggtggtgagctgactggtgccggtggtggagaagacttcaccgttggtggtggtgagctcacaacaaccggtggaggtgacgacttaggcgtcatcggtggtgagctaaccattgccggtggtggagaggacttaactattggaggtggcaagctcacgggagtaggtggcggtgatgacttgggctctgatggaggtgagatgactgttgttggtgccggtggtgtggatggcttcaccacttcaggtggtgagctcacatgcgcaggtgggcttgccggcttaggcgtcaatggtggcgagctaaccggtgcaggtggtggagaggacttcaccactggaggtggtgagctcacaacaacatgtggaggtgatgacttgggcgccaatggtggcggtggtgagcttagtggcgctggtggtggagaagacttcaccgacggtggtgagcttactggagctagtgccggtggtgagctaactggtgttggaggtggtgaacttacaggagctggtggaggcttctccggagatgaaggtggtttagacggagttgatggaggagtaggcttctcttgtggtggcggagatggaatcagtgtgggtggaggtagagacttttctggaggcggcgatgacttcaccgaagtgggtggtgttgggtattcctctggaggtggggttgatttcgcaggaggcggtggcggtggtgacttctctggaggaggaggtgagctcacaggagtcgggggtggtggagatttcatcggtggaggtgaagatgccactggtgctggcggaggaggtgatgccactggcgttggtgggggaggtgatttcacaggaggcggtggtgatgccactggtgccggtggaggaggtgatttcacgggaggtggaggtgatgccactagcgttggtgggggaggtgatttcacaggcggtggtggtgaggccaccggtgctggcggaggaggtgatttttcaggtggtggaggtgatgccactggcgcgggtgggggaggtgatttcacgggcggtggtggtgagaccactggcgctggtggtggtggagatggtgaagcaataggggccggtggagaagtagtcttcacaggtggcggtggtgatgccactggtgcctgcggaggagacaacttcaccagtgacggaggtggggtggaggcagctggaggctga

SEQ ID NO: 14988 - DNA, 651 bp, Zea mays
  Peptide Sequence Number=SeqID_56767
atggccatacatatggtattgttgcactattttttccgttgcaacgcacgggtattcaaccaggacacctcagattgggactgggaggaggacctggaggaggacgaggagatgatttcgtgctaccagggtcagaccccatctccaataaatggaccttccttctttgcctgggaagcttgtgcatcgggctactcttcaccaacagatgcaatgtttcatttattaaatgtatcagaatatttagaccaagttcaagatgctagagatgcgtattgtagacatgaagctgctcgattggtgattgacaaagagactggcaagccaaaaggttatggcttttgcgagtacaaggatgaggaaactgctttaagtgcatgctggaaccttcagggttacgagattaatggtcgtcgattatgtgttgattttgctgaaaataggaggaacactgataaaaatagagaaaaggtcgataatcctcaaaattactatagaagagtctttcctaccactttggagttctttgttaatatgagtagttgtatagtcttcgttcctgtgaatgataatagttgtgccttctccgaccatcctgtgtctcctgttgcaatttcttacaagcatgtttatgtatgtacaactgcttga

SEQ ID NO: 14989 - DNA, 264 bp, Zea mays
  Peptide Sequence Number=SeqID_56768
atggcggctgttgtgcgcgcgaggggatggactgtggctgttgtgtggaggagggggactgcggagggagcggacgctggacgggaggggatggactgggatggtggtcgtgcggaggggatagacggtgagaggatggggcggatgcggcatgcaactagcccgtgcgcggcttgcggatggggcggtttgtgcgagcgaggggaacagggcgggtgcgagcgcgagcgcagaggggaggcaggggcatcgctgtggtcttaa

SEQ ID NO: 14990 - DNA, 414 bp, Zea mays
  Peptide Sequence Number=SeqID_56769
atgacttacttttggtaccctattcctaggtactcatcatgtagtggaccactctcgaaagttggtgccatcgaagatgatagagggaagttgtacaagaggggtggaacgaggagccgccatgctgagtggagtgtgaagtgggacatggagtggaagaacagaggacgcaacaggaggggaaagccacaacaacagaggtggccaggtgctggacctcagagtgatagcgtgggagcagaggcttccaccgtgacgaccaatgatcctcctatacgagcatggtggctacatcacctacggtgcgacagcgtgccgtgctcccaccgcggtaccactgtactggctattacaattacagactcggggtctgtttggtttgtgcctaaatgtgtcacactttgcctaagttga

SEQ ID NO: 14991 - DNA, 222 bp, Zea mays
  Peptide Sequence Number=SeqID_56770
atgcgggttgccgctatcttggcgtgcagcgacctcggaatctcccaacgcgaaggcctgagctctttagccatccaagtttcgaagctgataaaggacgccatcttcctcgatggcttcgcgctggggtacaccgaggaagagttggacaaattcgaggagacagaccctccatcgcggcatttggcagatcagactggaaggaggctcttcctaaaataa

SEQ ID NO: 14992 - DNA, 1083 bp, Zea mays
  Peptide Sequence Number=SeqID_56771
atggacgagtttggtgtggtgaaaagctgtcgaattcatgacacagttcttgatttcattgtatccaaggccatcgaggagaactttgtcactttaataggagtacctggtgtaaatcctactgctgttggagacaaagacaaggtccgtcggttgtctatgcagaatgaaggcaagatcccaccggagctggtcttatctagcgtccggtcgcttaatgttttcggtgctagagtggaaatcccgtctctgtcgaggttcagacgcctgcgtgttttagcctttgaaggctgtgggcagctacaggatgaccatctcaaagatgtgggtgatctgttgcacctgaggtacttgaggctcaacgaagcaagtggtgtcacagagctcccagaaaaaacagctgggctaaagcacctgggggcactcgacgtacatgggcacaacacagtaatggaaatcccagcatccatttgtcaggccgggcgattggaatgcctggttactctagctgttgatcgtgaaactataatgcctgatgagattgcagacatgaaagcacttcaggttctggaaggcgttaatgtctacatccagtcggttgacttcattgaggggctcggcgagctaacgaacctgaggaagctggggataagatttatcaacagtgatgctgatgaagaatgggatgagaaatatgaagagatcgtctcctcggtccgtaagcttgccgactcaaaccttgattctcttcgtgttcatactttgaacgagccgccagaactactgaacaagctaaatgaccatggtacagttgaccttggagaacttgtcgtcacgggagatattgtctcggatcttgcagactggtggggtgtacttgtgaaccttcacaagctactcttttatacgtacggactcagtgagaaagatgtggagaccttaggaagcataactggtctggaatacctctgcatccatctcttcgatgcacccgacgaccctcatgagctgaaagctcccctagagagagcaatggatgcccacccaaaccgtcccagattggtatgggtcgatgaggattag

SEQ ID NO: 14993 - DNA, 369 bp, Zea mays
  Peptide Sequence Number=SeqID_56772
atgagcgaggtcgagacggaggctgtaaaaattgttggaaaatattcaacaaagactgagatgacaaagagcttggagttccgtgatggcaacattcgcttgaacagagttttcgaaatgaatgagctggaatacgggccatatcccaaggatgcggaggaaggagaagaggagggttctggtgttactatgaatgagaagaaagcaaagggatcaaaatctccaaatgaagaggaggttgcgtctaaggactttgctatgactttgccatgggataggtgggtctttggcttggggatgcttgttggttactgcccctacttcgttgttctcggttgcagtctggagagtttcatcggcaaggactag

SEQ ID NO: 14994 - DNA, 558 bp, Zea mays
  Peptide Sequence Number=SeqID_56773
atgaccttcgaatgggatgaagcgaagggccacgataaccaaggagggggacccgctgtagcccacgtgcgcgtcccaaaggctcaaactttctcccaggcagcgaagaccaagtctccactaggtcagggggagctcaactttgcggagcccagaaagcaacatacaggcttcgcccctacagaggacgaagatgtcttggaagaaggcaaagtcctaggcatcccaactaaagatcaactcgagttactagcacttcgcataaaaaacaatcacctgcagaaacaaagggaggtactcgtggccaagaggcaacagaccaatattcaagccagagtaagacatttgatcttagatgaggaacaaaaagcaagggagctagagcaagaaattcctaaaatgcagcatgaagacacccaccaccagcagtcggtcgatgtggcttaccaaaacattcaacatttccacaggtcaaccttcacaccagctaccttccaagggctaaactatatcgatgggcgaagtcccttcgcaccacagcttcaggcctccccttag

SEQ ID NO: 14995 - DNA, 381 bp, Zea mays
  Peptide Sequence Number=SeqID_56774
atggacctcgggttgctaggatgccttgcttcgtgggccatgagccgagccttgggggctgagctagataaactgtgccatcgccttggccagcttctggactacatcgtggtccacgacactcccctggtcgagcatttagacaacgccccgtgtcacatccgggatatcatcgactttagtgttcaccggagagccatggcagcgctgttgatggcggaaatttgctctggccaccgtcttcaatacatcatcggtcttccttcgtccctttccgatgaggtggccagtcatgttttcttcgggttttggctcatgacattgcgtgtgacacgtgctaatcacgatgtatcgtgcctcgatgctgcttccttaaagtaa

SEQ ID NO: 14996 - DNA, 219 bp, Zea mays
  Peptide Sequence Number=SeqID_56775
atgcaggtgtgcaactttgtgctgctgtcgccttctctgctcaaaaccccattccaactgatatggttttgttactcgattgtgctttggtcccaggttcagaataatttatgtactcctaagaatggaccgaatgcatattctggtggcggtggcgtctttgttgacgatggcatcaaacaatccagtgagaccaaacttgcccttgccgagcactag

SEQ ID NO: 14997 - DNA, 522 bp, Zea mays
  Peptide Sequence Number=SeqID_56776
atggacaagcagtgcaaacaggacagcaaggactcgattcggagaacaatcgtggagcatgataaggtgcatgagctgcatcgtttgtaccatgtacataaaacattgatggctgaatgcgatagccacaggtatcaaccgagagcagaaggaactcatgaagtggtgcagggatcaaggtcgaacctcaactgcagtccttctaccttaaggacaaaccaatctgctctccttggtaatgcacaatacccagctccgcaacaagtacatgaagatttgagtctccatgaatgcaagccagtgaactgcctcagcctcttcggtgaagaaaactcagcagccaaagaaaggtctctgctgattgacctggagccaagagtgatcaatggaatccagaacagcgagtacaggaacctgtacaaccacgagaacatatttgtcgctgagcatggtggtggtgccgggaacaactgggccagtgggtatcatcagttgcaggcttgcagatactacccagaataa

SEQ ID NO: 14998 - DNA, 444 bp, Zea mays
  Peptide Sequence Number=SeqID_56777
atggtcgttggagggagaaaactgaaagggaccatgctcgtgaaaagagcagtagaggagttctacatcaagtcaaggttgctcctaagagatccagaaatggcatcgacactatttggcaagcaggatgagagtgtactgcagggagttacacatgtgatatgttgtactggaactacagcatttccatctaaacgctgggatggagagaatactccagaacgtgtagattgggatggcatcagaaatcttgtaagtgccttgccacagacaatcaagagactggttcttgtgtcatctattggtgttacaaaatacaatgagataccatggagcatcatgaatctgtttggtgtgctcaagtacaagaagatgggagaagactttgttcgtaattcaggaataccattcacgattatcatgtattcaggcctggaagattaa

SEQ ID NO: 14999 - DNA, 585 bp, Zea mays
  Peptide Sequence Number=SeqID_56778
atgccggtaatggtagaggaagagcaacgattggatatgaggagtgccactcacaccacatttgcgatgaggagggggcgagatcgagatgggattaaagggagggggcggaccttggcggcgatcttgggcgggagggcccggtgtgggcgtccacaattggatggtgcacggttctgccaactccggacgcgctcatccccaccccgactgtcgcgccgcgaatcgcggccgccgcatcctccaatcaataccgcggccgccgtcttctctccccccgcgtggtggacaatcgtcccattccaaccctcctccctcacctgcccgcctgccagtgtccctttcttctccccgtgtggcggctcgcacccggcggcggacgtggactgcgtgacgtggagcaacgaccccggcctgctctgctacgcctgcgcctcatgcaaggccgacttgctgggcggcctgcgcgagcagtggcgcagggccaccgtcgcgctcatcttcgtctacgtcgtcggctgcagcgcattccgcaacgcgcagaccgaggacctcttccgccgctacaaatggggaaattattaa

SEQ ID NO: 15000 - DNA, 438 bp, Zea mays
  Peptide Sequence Number=SeqID_56779
atgcagctgcaccgccagttcattgcagctgtgaattccctgggggaaaaggcagttccaaagaagatattggagacaatgaaggttaaacatttgacaagggaacaagttgcaagccacctgcagaaatacaggcttcacatgagaaaagtgaatcaagcattgcacaatgacgacgacacacctccgtcatcaagccttcccaatgaatcaaacattctccggaccgaattcgacggttctttgaatccaacctattttgatcaagatggatgcacggagtactctttgcccaaggatgacctctcaagtggctcggactgtatgctgggagaacggaacaactactcaccgcaaggtttccaggatttcagatgggattcagacaagcaggcatctgaaacgacatatctatggaatttcgaggcagatgagtga

SEQ ID NO: 15001 - DNA, 297 bp, Zea mays
  Peptide Sequence Number=SeqID_56780
atggcgcggaggggcggtggcggtggcgaccggcggcggcagcgctggggcgcggagtggggaggatttcgtgtctctgttcattcattcttcgtacaccctacagtggcggacgcaggaccaaaattcatggggagccaaaaaaacacattacaactgagaaagaggcggggtcagatgatgtctccaactgagagccagggctcgctggttcgtcaagctcgccagttgtcggggacggatcgcatcgtcgagacgagcgaggttgggtttgccaagagcgggatggtgtcatga

SEQ ID NO: 15002 - DNA, 222 bp, Zea mays
  Peptide Sequence Number=SeqID_56781
atggcagcacacaactccatacacacgacagatgagcagagacactcgagcaactgttctgaacagatcgacgaggacgacatcagccaagaatcagacttgcctaccacgatagcaaatccttcaggtgatcacctcgccgccgtcgccacaccctccccactccgcgccccagcgctgccgccgccggtcgccaccgccaccgcccctccgcgccattga

SEQ ID NO: 15003 - DNA, 357 bp, Zea mays
  Peptide Sequence Number=SeqID_56782
atggggcttcggggcgtcgcgactcgggtccggttgctggtgcggctgctggcggctttgggtcacgcaggcgcgaccgtggccggggcgtcgaggtggggctgggtctcgggcagccgaattgagaatgcttggatgggagtgaatgaggaaatggttaagccaatttccctttcagccatttacaaaactctgccgacaaaggagaaaagggtttcaaatgtaagggaaaacattgaagcgggcatagatgctggaacgggacatgatgccgaagtgtttcttcttatgggaccttcggcgacgaagcagacccccaacagtagccccttcacggtgctagatcgtttttcgtaa

SEQ ID NO: 15004 - DNA, 465 bp, Zea mays
  Peptide Sequence Number=SeqID_56783
atggctgcttgcgcgatggagttgggggctgagattgtgcagctccaccctcgtagaaatgcaggatcggcccgcatgaaacaactcaccggcactccgaacccccggctcgtggaaagagacgaaactcagcacataccctgggaccgggaaaggggatactccgaaagggatccttctctgcgaaggaagcgggccccgagccctcctactgatcataggttcgaaggctggcccctccgaagggttcgacagccgcctcagagcactcgggctccacgcccactactgatcagaggtttgaaggctagcccctcaaaagggttcgacagccgcctaagagcactcgggctccgcgcccactactggtcagaggttcgaaggctggcccctcggaggggttcgacagccgcctcagaccactcgggctccgcgcccactactgatcaggggttcgtaggctag

SEQ ID NO: 15005 - DNA, 669 bp, Zea mays
  Peptide Sequence Number=SeqID_56784
atgggtcggcgcgagacgagacacaaaggggggaaaacatccaagcccgagatcgggcaaggcggtgactcctccgaggtcgaggttgagtccgagcccgggggtcaggcgaggcggagaccgtcgtccgaggtcgaggttgagtccgagccctggggtcgggcgaggcggagtccgtcttccgaggtcgaggttgagtccgagccctggggtcgggcgaggcggagtccgtcttccgaggtcgaggttgagtccgagccctggggtcgggcgaggcggagtccgtcttccgaggtcgaggttgagtccgagccctggggtcgggcgaggcggagtccgtcttccgaggtcgaggttgagtccgagccctggggtcgggcgaggcggagtccgtcttccgaggtcgaggttgagtccgagccctggggtcgggcgaggcggagtccgtcttccgaggtcgaggttgagtccgatccctggggtcgggcgaggcggagcttcctatggcacccgaggctggacttagctgttgtcagcctcactgtatcgagtggcacagcagttggagcagggcaggcgacgctgttttcctgtcaggtcgatcagtggagcggcgaagtgactgtggtcacttcggccctgtcgagtgaggagcgcgtgtcaggataa

SEQ ID NO: 15006 - DNA, 324 bp, Zea mays
  Peptide Sequence Number=SeqID_56785
atggatgccttgaaatttgagtactcggattacccaaaagtttcagaagaagatgctgctggtgtgaagagaaagaggaatgttagtattatgaagagacaagcaataaggggctatagagatactggaggtaatggtgcgacccttacctttctctacattgagtcccttcagggaaagaatgtcaaagggggcatgggtaaagcaccttcggatgcagtcgtagaggaatcgacaaaaactcaggccaacgaagctccacagaagaaacaccagataaagatagtaatgagggccattgaaagtagcctagaggaggggtaa

SEQ ID NO: 15007 - DNA, 1782 bp, Zea mays
  Peptide Sequence Number=SeqID_56786
atgggctgcgcgccgctgggacacgttctattcgacgagttcctccggttcaacccgaagaaccccgcctggttcgaccgcgaccgcttcgtgctctccgccggccacgggtgcatgatccagtacgctctcctccacctcgctgggtacaatggcgtcaagatggacgatctgaaaactttccgacaatggagaagcagaactcctggtcacccagaaaattttgaaacacctggcgttgaagtcaccacaggtcctcttgggcagggttttgcaaatgctgttggactagcacttgctgagaaacatctagcttcacgtttcaacaagactgacatgaaagtcgtggaccattacacgtatgttatacttggggatggttgccaaatggaaggtgtttcgaatgaagcggcctctcttgctggtcactggggccttggaaaattgatagctttttatgatgacaaccacatatcaattgatggtaatacagatattgcattcactgaagatgtgcttgcacgatatgaggcactagggtggcatacaatctgggtgaagaatggcaacactgggtatgatgacatacgtactgcaataaacgaagccaagggagttaaagacaagccaactcttatcaagcctttccatgttccagatgaggtgaagaggcactggagtcgccatatcgatgagggtgcttcacttgaagctgaatggaatgccaggtttgtagaatatgaaaagaaatacaaccaggaggctgctgagttaaagagcataatttcaggggaactggcttctgggtgggaaaatgctcttcgaaactacactcctgaaatgtctcctgatgctactaggaacttatctcagcagtgcttgaatgcacttgccaaagtaatacctggatttcttggaggtagttcggatctcgcaacgtcaaacatgacactgcttaagaagtttggtgacttccagagggatactcctgaagagagaaacattcgcttcggtgtgcgagagcatgctatgggtgccatttcgaatggcatcgctgttcacagccctggtctgataccttattgtgcaacgttctttgtcttcaccgactatatgagagcttccatccgcctttcagccttaagcgaatctggggtgatcttcgtgatgactcacgactccgttggcctcggggaagatgggccaacccatcagcctgttgagcatttattcagcctccgagcaatgcctaacatcttaatgcttcgtccagctgatggaaacgagacatcgggggcctataagattgcagttcttaacaggaaaaggccctcagtcattgccctctcacggcagaagctcccgcagctgagaggaacatcggtcgatgctgtttctaaaggagggtatattgtctccgatgactcatcaggcaacaaacctgatttcattctcattggcactggttcagagcttgagatcgcagaaaatgcagcaggcgagctgcggaagaaggggaggaccgtacgagtggtttcactagtttgctgggagctatttgaggagcagcctgaggagtacaaggaaagtgttctcccgagtgaggttacttctaggattagcattgaggcaggggtcacatttggatgggagaagtatattggacagaaaggcaaagctattggtatcgaccgttttggtgcaagtgctcctgcggggaaaatatacaaggaacttggtttgacagtggaacacgtcattgcagcagccgaggccctgtaa

SEQ ID NO: 15008 - DNA, 366 bp, Zea mays
  Peptide Sequence Number=SeqID_56787
atggaggtaggattaccgccgctggagaagtccccgggcgtggtcgttaaccgatcggagttcaacgaggaagtaccgccttgggcggatctcgtccaacaacgcacgctcgggagccttggccaccgatgtagattccgctcgcgcgccgtcgccttggcagtagattcctcccgccgcggcctcggtgtgctccgcttcgtggcgctcctccttctgcggcgctggtcgtctccgggtaccgcctggacgcgcaccaccgctatagcgctgccacggaaaccggccttcttgacgtctatgtcgcaggcctattcggttaagggaattgcgcacgagtgcctcgaatcgcttgcgctccggtga

SEQ ID NO: 15009 - DNA, 204 bp, Zea mays
  Peptide Sequence Number=SeqID_56788
atgacgagggagaagaagatgttcacctcatacgtcaagaataaggattcccacgtcacgattatctttggagatgggtgtaacacccctgtgaatgttgttcttaatgagtggaatgttgctaagaaccaaaatctaaggattagacagccagtttccactgtcttgcgcagtgatgacaaaccgaagtttggaggcttgtaa

SEQ ID NO: 15010 - DNA, 396 bp, Zea mays
  Peptide Sequence Number=SeqID_56789
atgggcaagagtaacaaacgcaagcgcgagccgactcctccatcgaaggacttcggcgactcggaatactcggaggaggagttctcctccgagtccgaggggtctccggctcccgtctctcccccgacgtcgtctgatgactcagacgactcccaggggattgccacggagggctcggatgagtcggagtacttctcggacgaggaggactctttggactcgtccgaggagggcagcggcggtgatggcggagacgacgacgacgacggaggcaacggtgacgacagcgacagcagcatgggcggtgacggtggcagcaagggcggcaacggcggcagcagcaggggcagcaacggcggcggcagcagcaagggcagcaacaaggccagtggctag

SEQ ID NO: 15011 - DNA, 423 bp, Zea mays
  Peptide Sequence Number=SeqID_56790
atgggcaagagcaagaaaggtggtggctcttcgcatcactcgagcgacaagcgcaagcgcgagccgactccaccctcggaggacttcggcgactcagagtactcggaggaggagttctcctccgagtccgagggttctccagctcctgcctctccctcggcgtcatctgatgattcagacgactcccaggggatcgccgtagaggtatggacttacatccgggccgtcgagcgcgccgggctcgagggcttggatgagtcagagtactcctcggacgaggagaattcctccgactcgtccgaggagggtggcggcggcgacgacagaggcgacggtgatggtggcggcgacggcagcagcaagggtggcagtggcaacggcagcggcggcagcagcaagggcagcaacaaggccagtggctag

SEQ ID NO: 15012 - DNA, 405 bp, Zea mays
  Peptide Sequence Number=SeqID_56791
atgtccatggacgatgactccatggacgatgagtttgttcaagccgctgaggccgaggagcgtcttcttgaagctcacaacgacgaagccaatggcaagtgtttcctccttggtagcagttctgctgctactatcgacgttgatggctccggtgaggggacaccgggcacgacggcggagacgaccaacggatccactaacccaacagccgttggtagcacatttgtttcagttccttatgattatggcattattgataagatctttgctattgtacttgataaagcctcatctaacaaaactacaatggatgttctaaaaccattgttttttggttatattggcaatttgattcctatgcctagtagaaatgaatatgatttgaggagtggtgacgatagctga

SEQ ID NO: 15013 - DNA, 1257 bp, Zea mays
  Peptide Sequence Number=SeqID_56792
atggccacgggcaaaccaccatggagccagcagtatcaagaggttgctcttctttttcatgttggaaccacaaagtcgcatccacctatacctgaacatctatcgcaagaggccaaagattttcttctgaagtgcctgcagaaggaaccagagctgaggtctactgccccagacttattaaagcatccttttgtcactggagaattagatgatctgcagccacgcaatcatgctgcacacaaggactgttttaatgaaattcatgcacatgatatgccaaatggcttgggtttgaatcattcttccaactggtcgaccatgaactccaatagatcatcaaaaatcaagcccttatgggaggggagctgtgacgatgttgacatgtgtgagtttgcagacaaggatgaatatgcaccagtaggatctagctataatcctatgtcagaaccatttgataactgggaaaacaagtttgacacaagcccagagcaaagttctcatgaaccaatggaatttggtgaattggccaaacatgctgaaagcagcataactgagaatgattttacgtgtcctgttgagggaagttgtgaagatgatgtacttacagagtcaaaaataaaggcatttcttgaggagaaggctcttgacctgaaaaagctacaaacacctttgtatgaggagttctacaacactgtgcacggagggagttgccaaacttccaagggaaaattcccaatcagtccaaaattgccccctcgaggaaagtcacctccaagtaagacgaggggaggtgcatgtgacactttgaataacacagctcccgaaagctgcagcaagcaatttcctagaagcagtgtggtggagagcagccgaattttgagagaaattgcttctcctcaacttaatgagtttgctgataaactccatcttgatgcccaagatagcccaaggcctgtgcatgatctaattggaagtattcctgttaacagcatcagcttcaccgaaaggcagaggaagtggaaagaagagttggaccaggaacttgagagggagagagtttttaggaagagcaatgcaggaatcctccgtctgaccgctatcgcagcaaaatcaacccgagaacctccctacacgcatactcacctactgcccttgcccctttcgggtgtggactgcgcgcacttagaacagatagcccaggggctgctacgtaaaaagctcatgactcagagcgccttgctcaggactgcgggttga

SEQ ID NO: 15014 - DNA, 855 bp, Zea mays
  Peptide Sequence Number=SeqID_56793
atgcgacgggacgacgccggcggaggaaccgggttccacgacttgtttgactcggtgcgccgctccatctccttccggcccaccgcccccgccccggaagcccccgcgggcccattcggcgcgggggcaggggggatcggcgtgcggatcagctcttgcctccggaagtcgcgggggatggggctgctaggtctcatcactaaaagcccctcgccgccgcgccgcatgctaccgccgatgcccgatcagtcggacggcggcagcggagggggtggggccaacggcggagtcggagaggagaacccactgatccggtggcgtaagggggagctcatcggggccggtgcgttcgggcaggtctaccttgggatgaacctggactcgggcgagctcctcgctgtcaaacaggttttgatcggcacgagcaacgcgacacgggagaaggctcaagctcatattaaagagctcgaagaagaagtgaagctactcaagaacctgtctcaccccaacattgttaggtaccttgggactgttcgtgaggaagacacactaaacattttgctggaatttgtccctggagggtctattcagtcacttttggggaagcttggttcattcccagagcctgtcattaagaaatacactaagcaaattttgcaaggattggagtatctgcatagcaatgcaataatacatagagatataaagggtgcaaacattcttgtagataataaagggtgcatcaaacttgctgattttggggcatctaagcaagtggcaaagttggctaggttcagggatgtaaaatttatacaaagtaggatgaaggggctgaatttccaagcgaaggcttaa

SEQ ID NO: 15015 - DNA, 342 bp, Zea mays
  Peptide Sequence Number=SeqID_56794
atggctgccacagagggcgtcggccaagggaaccgcagggggtggcgcccatgggagcttggctgctcgagctttaccggagccatggagaagtttctgcgcgcaggggagaaaggttccctgctgccggacgccgcggggaagagggaaagctccctgcgcgctgctgtgtgggatgaggagcacgggcagaggaggctggctggagcaccggtaagggcgctcggccatggagccgctgcccctgcgctgacgtgctgcaaccgtgtgggaggactgctgcgcgagggagaagaagacagggaagaaagaagctggcggctgggaaaaatggaggggtag

SEQ ID NO: 15016 - DNA, 369 bp, Zea mays
  Peptide Sequence Number=SeqID_56795
atggctgccacagagggcgtcggccaagggaaccgcagggggtggcgcccatgggagcttggctgctcgagctttaccggggccatggagaagtttctgcgcgcaggggagaaaggttccctgctgccggacgccgcggggaagagggaaagctccctgcgcgctgctgtgtgggatgaggagcacgggcagaggaggctggctggagcaccgggaagggcgctcgaccatggagccgctgcccctgcgctgacgtgctgcaaccgtgtgggaggactgctgcgcgagggagaagaagacagggaagaaagaggctggcggctgggaaaaatggaggggtgggagtgcaaaaatgcctccacttgctag

SEQ ID NO: 15017 - DNA, 243 bp, Zea mays
  Peptide Sequence Number=SeqID_56796
atggacagcgcgccgtcgacgcccgccgtgtgctcgctgtttttgcacagcccctttgtcgtcgtcgttcacccccggagaggaaccctgcgttttgcgagaagaaggccaatcattcaacgctcgtcggatgtttggagcgatgcacaaatcggaatcaccgtcattcttgcaaacaccgtttgggtttgtttatggtgtcacgaggatgattcgtggatggtgttcatgattggggagtaa

SEQ ID NO: 15018 - DNA, 1386 bp, Zea mays
  Peptide Sequence Number=SeqID_56797
atgtttttcgacgggtcactgatgaagacaggggcaggcgcgggcctgctcttcatctcgcccctcgggaagcacctacgctacgtgctacgtctccatttcccggcgtccaacaatgtggtcgagtacgaggctctggtcaacgggttgcgcatctccatcgagctaggggtccgacgcctcgacgctcgcggtgactcgcagctcgtcatcgaccaagtcatgaagaactcccactgccgcgacccgaagatggaagcctactgcgatgaggttcggcgcctagaggacaagttctacgggctcgagctcaaccacatcgcccgatgctacaacgagactgcggacgagctggctaagatagcctcggggcgaacaacggttcccccggacgtcttctcccgagatctgcatcaaccctccgtcaagaccgacgacacgcccgagcccgagagggcctcggcccagcccaaagcaccctcggcccagcacgaggcaccctcggctcagcctgaggcaccctcgacccccgaaggtgaggcactgcacgtcgaggaggagcagagcgggaaggcatccgggggctacacgcacctgctggtcgccatcgacaaattctccaagtggatcgaggtccgacccctgaatagcatcaggtccgaacaggcggtggcgttcttcaccaacatcatccatcgcttcggggtcccgaactccatcatcaccgacaacggcatccagttcaccgacagaaagttcctggacttctgcgaggatcatcacatccgggtggactgggccgccgtggctcaccccatgacgaatgggcaagtagagcgtgccaacggcatgatcctgcaaggactcaagccacggatctacaacgacctcaacaagctcggcaagcgatggatgaaggagctcccctcggtggtctggagtctgaggacaacgccgagccgagccacgggcttcacaccgttctttctagtctatggggccgaggccatcttgcccatagacttagaatacggttccccgaggacgagggcctacgacgaccaaagcaatcgagctagccgagaagactcactggaccagctggaagaggctcgggacatggccttgctacactcggtgcggtatcagcagtccctgcgacgctaccacgcccgatgggttcggtctcgagacctccaggtgggcgacttggtgctttggctgcgacaagacgcccgagggcggcacaagctcacgcctccctgggaagggccgttcgtcattgccaaggttctgaagctcgggacatacaagctggccaacagtcaaggcgaggtctacagcaacgcttggaacatccgacagctacgtcgcttctacccttaa

SEQ ID NO: 15019 - DNA, 978 bp, Zea mays
  Peptide Sequence Number=SeqID_56798
atggacatgggcagcaacaggccaacagccatactacaacatgaagcaaataatcactggaaggtttcaggctttcagcatccaagtaaaactgaaaaccaacaaacatggacatgggcagcaacaggccaacagccatacgcccatacctacaggctacagtacaacagagcacaccagaaaacagggacaagatctgaatctggagactggagaccgtacctgcaggccggctgctggcgccgccacgccggggatggaggaggggccgaggaggacgatgccgccgtatcccccgtcaccgcttatgctcacgtggtgggaattgggaaaaaagaagctggactgggccgctgggcaagtgaagtggaccattgggccgacatttcaatccagccagccaggctgatcgttcctaaattaatcggacgagcaggccctgatcgcgtcgttacccttgatcggcactggagttacgatcagccaattaatcactgcccccgctctcccctgactcccgcggaccccgcgcgcacgcctaactaccccgccgaggatcccgccgcccggcaaacaaccgccgccgaggatcccgacgcccgcccgcccacccccactcagccacgattcccagccgagcatcccgtcgcccgcccgcccccagccagccgggatttcgcgcccaacgccgcgattcgcgggcgccagccgcaattccccgccgcccggcaaccaaacgccgccgaggatcccgcgcgcgcccgcccgcccccacccagccacgattccccgcccaacgcgcgcggtgtgccgctggagaagaatgcagtgtgccgctggagaggaaggccgaatgtgaaggagcttgccccaacaccggataggaacgatatctgctactgctcaaccgtgcaggcctcgaccaagaggaaacagcccaaatctccaatggatgctggaccctacaagcttctgtag

SEQ ID NO: 15020 - DNA, 504 bp, Zea mays
  Peptide Sequence Number=SeqID_56799
atgacggtggtgagggtggacgagaaccctgcgccggatggagagaactctcccctagacgatgagtacgtctcggccgacgatgaacacgttgatgatgaagacaaggagaccgatagcatcgacgactatgaaaaccccagcgggacgccccagatgaagaagggtccctggtcgcccgaagaggataagcgtctcaaagactacgtcgaggtacacggcgcggggaactggaataaggtgcagcagaatgccaggctcaaccgctgtggcaagagctgtcgtctccgctggacgaaccacctcaggcccgatcttaagaaggagcctttcaacgctgaggaagaggaaaagataatcaagcttcacattagacggggccccaagtggtccatgatggcctcatattttcctgcttccttcctgcatttgcattcaaaacttccttttctggtatctaatattgggttccgtagatgtctaacccagcttgctttggaataa

SEQ ID NO: 15021 - DNA, 1758 bp, Zea mays
  Peptide Sequence Number=SeqID_56800
atggcaaccactacccctgctgtcacggaaccggacaatgctgacgcatctcctccatctccgacgtctccaccgtccaagaaggtcatgtacgagctcgccgcccggaacatctactacgccaagcctactgcagcgccgaggtcgctcgcgcagcttttgaagccgtgcggcgcggccccgacgccgccggactacatcctccgcgatgtgtccctcacggctcgggccggggagatcctggccgtcgtcggcccgagcggcgcagggaagtccacgctgctcgacatcctcgccgcgcgcacagcgccgacgcacgggaggctcctgctcaactccgcgccgctgcggccgtcgtcattccgcaggctctcgtcgcacgtgccccaggcagatgtcgcgctcaccctactcaccgtctccgagaccttcgcgttcgcagcgtcgctgctgcacccggagtcggagtccgctgtctcggccgcggtcaccgcgctcctcgtggacctcaggcttgcccacgtcgcgcacacgcgggtctcccccgcgcggctgtccggcggcgagcggcggcgcgtgtccatcggcctcgccctcctgcgcaacccggcggtgctcctcctcgacgagccgacgtccggcctagactcctcctcggcgcacgtggtcgtcagttgcctccgcgccgtcgcggccgcccggggcacaacggtggtgttttccatccaccagccaagcgcgcgcctcctctccgctgtggactgcctgctcctcctctcccgtggcaccgtcctccaccacggctccctcgcatccctcgacgctgccctcctctcacacggcctggtcgtccccgcgcagctcaacccactcgagttcgcccttgaggtcctcgaccagctccctcatcccaccccctctacccctgaacccaaggcgacgacgcaagaactgaactcgtcgtcgagccaccacaagatggtggccacggcgacgccgtctactgaggccgtggtcgttggcacgctgctgggcacgatctacatccacgctggctacggcgaggccggcgcgcacaagcggctgggtctgttcgccttcacgctgaccttcctgctgacttcgacgaccgagacgctgccgacgttcgtgacggagcggcccatcgttctggcggagacggcggccggactgtaccggctgtcgtctcacgcggcggcgggcacgctggtgttcctgccgtaccttcttgctgtggcgctgctctactccgtgtgcgtctacttccttgtggggctctgctcgtcagccggcgccttcgcgtcgttcgtgctggtggtgtgggcggtggtgctgacggcgaactcgttcgtgctgttcgtgagctcgttcgcgccggactacatcgcgggcatgtccctcgtatccgtgtcgctggccgggttcttcctcttctccggctacttcctgtcgcgggggagcatgccgtcgtactgggtgttcatgcactacgtgtcgccctacaagtacgcgctggacgcgctgctggcgaacgagtacacgtgcgcggggaaccggtgcttcggtgtgggcggcggcagcgagtgctcgcagacggggctcgacgtgctggtggagaaggggctgacggcggaggagcggtggaccggcgtccaggttctgttcggcttcttccttctctaccgggtgctctactgggtggtgctcagccggcgagcgtccagggcgaagagatga

SEQ ID NO: 15022 - DNA, 2265 bp, Zea mays
  Peptide Sequence Number=SeqID_56801
atggccgtccccaactacacctacctgaagctcaagatgccgggccccaacagggtcatcaccgtcggccccacgtacaaacacgcgttcgaatgcgacgtggagtgcgtggagatgaaagagtccgaccagctcgcgacttctttcatcacacccttcggcatgtactgctatgtcaccatgccgtttggcttgaggaatgcgggtgcgacgtaccagcggtgcatgaaccatgtgttcggcgaacacattggccgcacggtcgaggcctacatcaatgacatcgtagtcaagacgaggaaagcctccgacctcctttctgaccttgaagtgacattccgatgtctcaaggcgaaaggcgtcaagctcaatcccgagaagtgtgtcttcggggtgccccgaggcatgctcttggggttcatcgtctccgagcggggcatcgaagccaacccggagaagatcgcagccatcaccagcatggggcccatcaaagacttgaaaggcgtacagagggtcatgggatgtctcgcggctctgagccgcttcatctcacgcctcggcgaaagaggtctacctctgtaccgcctcttaaggaaggccgagtgcttcacttggacccctgaggccgaggaagccctcgggaacctgaaggcgctcctcacgaaggcgcctatcttggtgcccccagctgccagagaagccctcttggtctacgtcgccgcgaccactcaggtggtcagcgccgcgattgtggtcgagaggcaagaagaggggcatgcattgtccgttcagaggtcagtctacttcgtcagcgaggtactgtccgaaaccaagatcctctacccacaagttcagaagctgctgtatgcggtgatcctgacacagcggaagttgcgacactacttcgagtctcatccgatcatccagtgccgagaggcctcgggtaggattgcaaagtgggcggtggaaatcatgggcgagacaatctcgttcgcccctcggaaggccatcaagtcccaggtcttggcggacttcgtggccgaatgggtcgacacccagctaccgacggctctgatccaaccggagctctggaccatgtttttcgacgggtcgttgatgaagacgggagccggcgcgggcctactcttcatctcgcccctcgggaagcacatacgctatgtgctacgcctccatttcccggcatccaacaatgtggctgagtacgaagctctggtcaatgggttgcggatcgccatcgagctaggggtccgacgcctcgatgctcgcggtgactcgcagctcatcatcgaccaagtcatgaagaactcccactaccgcgacccgaagatggaggcctactgcgatgaggttcggcgcctggaagacaagttctacgggctcgagctcaaccacatcgctcggcgctacaatgagactgcggacgagctggctaaaatagcctcgaggcgaacaacagttcccccggacgtcttctcccgagacctgcatcaaccctccgtcaagattgacgacacgcccgagcctgaggcaccctcggcccagcccgagaaggcacccgggggcttcacgcacctgttggttgccatcgacaaattctccaagtgggtcgaggtccgacccctaaacagcatcaggtccgagcaggcggtggcgttcttcaccaacatcatccatcgcttcggggtcccaaactccatcatcaccgacaacggcacccagttcatcggcagaaagttcctggacttctgcgaggatcaccacatccgggtggactgggccgccgtagctcaccccatgtcaaatgggcaagtggagcgtgccaacgacatgattctacaagggctcaagcctcggatctacaacgacctcaacaagttcggcaagcgatggatgaaggaactcccctcggtggtctggagtctgaggacaacgccgagccgagccacgggcttcacgccgttcttcctagtctacggggccgaggccgtcttgcccacagacctggaatacggctccccgaggacgagggcctacaccgaccaaagcaaccaagctagccgagaagactcgctggaccagctggaggaggctcgggatagggccttactacactcggcgcggtaccagcagtccctgcgacgctaccacgcccgaggggtccggtcccgagacctccaggtgggcgacctggtgcttcggctgcgacaagacgcccgagggcggcacaagctcacgcccccctag

SEQ ID NO: 15023 - DNA, 693 bp, Zea mays
  Peptide Sequence Number=SeqID_56802
atgtcggtgcgcgtacgtgtggcctcgatctcgtcctgtctttgttcgatctctgcatgccgccttctcagtcagatcattcctcctgtccaattgttgcgccctgcttgtcaccggacccagctgattctgaagtctgtttgccaaagcctaggcacgctctccgtcatcctgcactacctctacaatgacaactctcaagcaggctcggcgggtgtcctcgcgcatttcgtcgagcactttgaagacgggctccaactcgccgtttttggcacagtgcctgatgaggatgttgtagacgcatctcgcctgtgttcttggagcctgtcgagggcaccgtggcagcagccgcggaggagacgaggcggtcggtcgaggcagactgcgccttgtgtgacacgcggctcgtcagtcgtcactcgtacgaatcagcgcggcagcaagcggaggagggcgagcgcgtggtcgggcgggaggcggcggacgagcggaagcaactgcagctccaggaaccggcagggctcggaggcggcggcgcgcgaggcggacgaggagcgccgagaagatggccggcgtctgggagaagccgcgctgggaggaggccgcgttgaagaggtcgagcgcgcgctccggggagggggaggacgcgatgaggtgcgcaagttccgagtggtggaggtaccgcaatgttag

SEQ ID NO: 15024 - DNA, 147 bp, Zea mays
  Peptide Sequence Number=SeqID_56803
atgacccagcagcttagctacgttcttgagctgcagctcccgtgtttgcgtcgcctggcttgctcgggagtctggctgtgcgcgtgcaaatttagccactcagcctggctccacagaaacgagatcaagctcttgtatgaggtttga

SEQ ID NO: 15025 - DNA, 405 bp, Zea mays
  Peptide Sequence Number=SeqID_56804
atggtgcagcgccgaaggtgtaagcaggaaagcttcggcgtgacagcagaaggtggaaccgacttaaagacgaaaaggctatttagacctcgacagattactatagaattattatcaagtgtaaagggcatgaatatggtagttcggtcgtttattcgccctctccctagtttcagtgaagaattgcttgctctacctactacaagaagaacctatcgtagcatactatggaaaattgaagggtgtgcggacttaatgacaaagattaaggccagtacctgtgtgtacttgtggtgtggtataagcaaaagcaagctcaaaatccagaaactgcgttcgcagcggaacggaaagaagacccttccattttactttgaggtgaaatgcagagagtacaccaattaa

SEQ ID NO: 15026 - DNA, 159 bp, Zea mays
  Peptide Sequence Number=SeqID_56805
atggcgagagtagcatgtaccctccgtggcaagaggctggacggtggtgtatatgtgctctcggtgaagaagcgacaaacttttgttgcttctattctaaggttgtatcaaaagaagaaaaccaggagtaaagctgcgcgaggaagggatcctccatag

SEQ ID NO: 15027 - DNA, 186 bp, Zea mays
  Peptide Sequence Number=SeqID_56806
atggcgatgtaccccgaacggttacccaggaggcccagccatgaaaatcttttgaaaattcttggcaacacacccaatgggtgtgcccaaggggtgccttggcggcttgaattgcttattgaatacttgcgactgttcgacgagcgtgataggatgtggacgaccacccccgacctctataaatag

SEQ ID NO: 15028 - DNA, 441 bp, Zea mays
  Peptide Sequence Number=SeqID_56807
atgggtagaggtaggagggatcgcggctggcctcgtcgtggcgacaacaagcgcaagcgtgccccgagtcctccctcggaggactttggggactcggagtactcggaggagcattccatcgagcgcgccgggcttggtggatcggacgagtcgggagtctcgtcggatgaggcagactcctccgactcttccgaggagtggagcggcgacggcggtgacgacgagggcgacggcagcggcaatgatagcggtgagggcgatggcggcgacgacgatgacggcggcagcaagggcgacggcggtagaggtagtgaaggcgatggtggtgtcggcggtagcaagggcgatggtggcgatggcggcagcaatggcgacgacaacgacagtggcgacggcgacagtggcgacggcaaggccagtggcatagcgccactggtctaa

SEQ ID NO: 15029 - DNA, 936 bp, Zea mays
  Peptide Sequence Number=SeqID_56808
atggcggtggccgccgccgccgtatctagggttctgcagccgaaggcgtcgtccgtggggttccagcatccgcagcacgtgggggctgccatgccgatgggagtaccgcagcagctgcaccagcgtgtgctgccggtgatgcgcctgcatcaggtggtggggcatgtgccgctggcggtctctgtaccgcagcttcgtccggtgccgccgcagccagtccagcgccccccggtcgccgttcccttgaaaccagagtcaccaaaactacgggcaagactgtacgaagggaaagatagtactcccacgaagaagaagtgctgcaactgcaggaattccaaatgtctgaagttgtactgtgaatgctttgcttctggtacttactgtgatggttgcaactgcaccaactgttttaataatcctgataatgaggttgccaggcgtgaagctgttgaagctatattggatcgtaatccagatgctttcaggcctaagattgggagcagcccacatatgcataggaataatgaggtgcctagtgatctccctttagtagggaagcataataaagggtgccattgcaagaagtcaggatgtctcaagaagtactgtgagtgcttccaagctaatatactatgctctgaaaactgcaagtgcatggattgcaagaattttgaaggaagtgaagagagaagaaatcttttccaaggggatcacaaaaatgcaattaacatgcagcaggtgacaaatgcagcagtaaatggtgctattggagcaacaggattcccttctccttccacatcaaggaagaggaaacataatgatccttcacttgaccatttcaataaggaacatatagcgcacaagaattatcacatacctcaggagcaagctgaagtgccttgttacattactaggagtgtgagttttttcccatga

SEQ ID NO: 15030 - DNA, 339 bp, Zea mays
  Peptide Sequence Number=SeqID_56809
atgtctcctggaacactagcactgatgtgtgatgaagaagcatttgagaaaatgtgtgacgaacaagatacaatgtttacgacttctcaaaatgctgctcctcagcagacagtaattgtcaaccataaccaatctgcactgtatgcagaacaagaaaacgttgtgctgacagaattccgggattgcctccgcaagtttgtgagatacggaagaatgaaagaggaaaggtactccatggcaatcaaatctgaaacatctggtcatcctggacagatcgttgtagccccaacaggtgctacatcgattccatggctctacaacttgcagctgccattgtga

SEQ ID NO: 15031 - DNA, 147 bp, Zea mays
  Peptide Sequence Number=SeqID_56810
atgacatcctcttatgagtcttatcccattccagagaaaaagggatcaattaggtgtttaactcaactttttgcaaaggacatcactctggatgagaaacaggaacttgatgaagcacttcaaagagagatgtacaatacagattaa

SEQ ID NO: 15032 - DNA, 735 bp, Zea mays
  Peptide Sequence Number=SeqID_56811
atgaccaagaccgaaggccccaacacagggagcttcgtcaagaaagcccaattaatgatgatgagtggtatgcaccacggcttcctctcccagcctgccctccacctccctctctactcggcggaccgcacagctccggcgcgcgcacagccgagcggcttcccgcgcacgctgctccctgcgctcgcctggctcgccgcgcgcccaagccctcttcttcctccctcctcccagcgcgctctactcctcttccccagccgcgaagttccatggcgcgccggctccctgctcggctccttcctctctgctccctgttcaccgtccacgctctatcggtctccagctcgtcgccatggcacgtctctctcccagcgtaagctcttggacgccgcatcctcccggtcatggagttcaccggtagtcgccgtcgtcgaagctccctgcgcgcgcgcatctccctactccagtccagccgctgctccttgctcgcccgaattcgatctccgccctgcccatcacccctacgcgcgctctgcttcctcgtgcggctttctgctcgcctggccacgccctgcttccatggtcgcgtgcccatcttcctccctctctgcttgccgcgtgcgcagctccctggcgcgtcttcttccctattggtgcccgcccagccgctccctcctctctccccttggcaaacctccctcaatttcccgcgccgtccatcgcgcccggctttag

SEQ ID NO: 15033 - DNA, 745 bp, Zea mays
  Peptide Sequence Number=SeqID_56812
cgtttacgttattttgggaatggtgtgggcgcgctctgggggcgaagaggtcccggagctagaggattcatcagctaacgccgaatgccatggtggccctagtgaagtttgtgtgggtggtgacttcgtacagtggagagccttaggtcaaggtctttgccaagaactactgtcttcattggcagaaaaagaggacatcgaaggggttcctgggctgcctccgtctattaagtgttcgcatttttatatcgtgtttccgtggtttaagctgaagaagggagataaggttaagctgcgcccgatgcccttcttaaataattggatggtgctgagccccgcctttgccgttgagctatggggatgggatgtgttcgccttcgtcagggaggtggaagcggaggccgtgaaaattattggcaactactcggcgaagacggagctgacgaggagttgggatatacgaggtttgaatgtcaggctaaatcgtgtttttgaattgaatggccttcagtatggtccataccctaaggagggttctgtcaacgtcggggatgaccgaggaaagaagatgacgatctgggcagacaaaggttgcttgaaagggaagactgtagttgcgcgactagaaaaggaagattggggtgaaagcgatagaaaaggatcgttaagagtcctcgccgaagaagaggaaggccccgctttggctggtggatccctatcgcgacgcgaaggcgctgtgtcctag

SEQ ID NO: 15034 - DNA, 246 bp, Zea mays
  Peptide Sequence Number=SeqID_56813
atgttgctgctgaagaatgtgatcagcctgaaccctgacgcggaggaggtgtcgcagcagaggttgctctcgctcgtggccgagcgcctcgtcccaacattactgggcaggcattgcgtcaacgtgatgttcgggaagtgcaatgagcacacacacaatatagttgtcgtcactgcattggctgttatccatggtgtcgctggacacctcgttgcagcaagtcagaatcaaaatcaaattgagtag

SEQ ID NO: 15035 - DNA, 407 bp, Zea mays
  Peptide Sequence Number=SeqID_56814
atgcggtcggtcggcgtggcgatcgggccaaggttgcttcttggcgaagactgggcctcgggcgagccgaagagccgcgccactgcttccattgctcgccatgcgttgccgatttccctcgccttcgacacttcccagccacctgtgatcagctcgagttccccggtgtcttatccttcaattctgccgcttggcgacgtcctctacgcctctgtgaccgtctccccaaattgccagcctgcacgttgtgcggcctatgccgaagctatgttgcacgcagccgcagtgcctttggagcccgcgattgttttctccctcgcctacaccctccccgctcgccctccacgtctgttgctcgccatctcttgcacgcccctgctgctcaccaccgccacagttctctgctg

SEQ ID NO: 15036 - DNA, 645 bp, Zea mays
  Peptide Sequence Number=SeqID_56815
atgccgatcgagaggcttcgcggcggtcgggcttttgctcggcgcctgtccgcccggtcgtcattgcctgccgctgccggcgaggctggtgcagcggctattgctcgtgagtgggacaggcaatatcgtaagagccgggtcaggccgcctgaacgtggacggcacccatacccagcgctaggctatcagctagcactagcagcgccgtcactgttcgaagagatcagcgcagcgaactcgcagccgagagatcgatcgaggccggccggggccgagatgggcagcgtcggcgtcggttgcggctcgccggacgaggagcagcagaccgagggcagtggccctctgccgccgccggctgtctgcgtcacggggtccaccggctacgtcggctcctggctcgtccgcacgctgctgcggcgaggctaccgcgtccacgccaccgccagggacacaggcaaggccttgcaggtgctcgccgtcgtggaagaagggagggaccggctcagggtgttcagggccgacatgggcgaggaagggagcttcgacgccgccgtcacgggatgcgtggcgctcttccacgtcgcggcctccatggacctccacgtatcacccgcccatcaggacaacctcggtgagtcgttgtga

SEQ ID NO: 15037 - DNA, 585 bp, Zea mays
  Peptide Sequence Number=SeqID_56816
atgggtggaaacatttggagaattatgagatatggatttgctgtgcttaagcaagatgtgccaacaactagtgatgagcaaaacattctattcaatgatcaagccatgaatgtgctatatgatgctttggctatcacagagttcaacaggatcaagactcacaatggctcatggaatttggaaaacattgatggaagacttggcctagatacgccggatatagatttttcttacaagttccttaagtcacttttggagaagtatgatacaattgtcaccatgttagtaagaagtgacttgaacaacacttcactaaccaaagtatcggggaaaatactcactcaagaaatattccagaaatctcaagctaaggaaataaggttggcaaagaaagtgaaaggtgaatcaatagctctcaaagctaaagcctccaaggtgattgaaaaggaagaaagtgatgatgaagagagtggaagtgagagtgatgaagaaatgcctctcttttgcgaaaaggttcaacaagttcataaagaagaaaggacaactaaggagaggtcaatcttcaagaaggaacactttcaatga

SEQ ID NO: 15038 - DNA, 294 bp, Zea mays
  Peptide Sequence Number=SeqID_56817
atgacggcgtccgcgaggcccggggagagggcgaccagcttcgtcgtcgcgtgcagcctcctcagccgcttcgtccgccagaacgacgccgcgccctcccagctaggcctcgggatcaaaggcgaggtcgagcagcaaaggacgccggcgacaattaacttgctccccggagcggacggcgaggagaccgagaggaggaaggagaccatggagcttttcccgcagagcgccgggttcggtgtcaaggatcccactgctgcccctaggtgcgtactgctgcttcacatcatgtaa

SEQ ID NO: 15039 - DNA, 339 bp, Zea mays
  Peptide Sequence Number=SeqID_56818
atggcagagggcgtggtggcgggggtcgcggctcccgtggccgtggctcgggccgtggcaggtggcgcaggcgacccgggcgcgggaccgcgggaatggaaaatgtgcatatatgctgctgattgcagtgagattagcctcgtccaagttaggggatctggtatgttaaaggattctgcctgccatgaactagacaagattagaaggttaaagaggccttacatcaagagagtacaagatcgccataaggaagtacaagtctttgaggaaagtgaccttatgaaaagtttgagcaaatcaacttgtgtgcgagaagttatgtctacttgtgctgattag

SEQ ID NO: 15040 - DNA, 1119 bp, Zea mays
  Peptide Sequence Number=SeqID_56819
atggcaccttccttttcatcggattcctcactcgccctggctttggaaaaccagactcgcttgctcctcatcgagttggacaagcgattccaagccttcgacaacaagtgggactctagagtgtgggcgttgcactccttcgacaatgacgactcggtcgccggccccgtcaatgcgctcgctgacattgagcttgctgcacgcccatacccaggagctgcctcatctccatcgactctgacgcgccgctcgaccttcctttcaccttggccatccttctgtgctgcgacaacaggggggttatgcgaccgttgtgctgagaagtgggttcatggtcacaagtgccctagtacggtgcagctccaagctatcgaagaagtctggaatatgctgagtgagaatgaagtctctgaactggttgtcaagtactctgaacaattgatgctagctttgtctacagttgcattgataggtgctaatacagctactacattgcgtctctggggcaccgtgcaacaacacaagctattgattctaataagaggatttctgtgggggattagatcagaagagggtgccttggagttgactggatatgatccatatgcttctactgcccgggatcgtgcaatgggagttaagatagttagcatggaggaatccctgacaagtgttgacttcatctcattgcacatgcttcttacccctgcaataaacaagatgctcaacgacgaggcctttgctaagatgaagaagtggcttgtgcgtggtgtaattgatgaagatgctctagtcaggcctcttgattcaggaatagtagcacatactgctcttgacgtattcactaaagaaccttcagtgcctgataacaagttggggctgcacgagaatgttactgtcacatctcaccttggtgccagcacagtgggggcacaggaaggagtcgctattgagatagctgaagctgttagagcatgcaccttttgttgtgtttgcagaaaacttgggcgtttggctgtgcaactagttgccggtggtacagttcaagaccttagaacacatgctgcttcactcatagcatcaagatcctggatgtgttcagattctgcatcgacttga

SEQ ID NO: 15041 - DNA, 195 bp, Zea mays
  Peptide Sequence Number=SeqID_56820
atgaaattggattttcgggagaattttggagaaagagaaatatccacatcaatacaacaacgtattggtcctgaatatgctggccccctgggactgcttcaagctatagcagatggaactaaagtacttttaaaagaggatatcctcccatttgaagacaagagatttgattcaacgatgccccaactgctttag

SEQ ID NO: 15042 - DNA, 261 bp, Zea mays
  Peptide Sequence Number=SeqID_56821
atggcgctccgcatcgacgaccgggatactggtgcccgaacctccggggagaacgcctccgtttggctcgccatgccgcgacaaatacgtatgtggcttcgcctggctggaatcgcgctctgcgcttccggaaccgtacgccggtgtggcaatgccaccctccggcgagacctccgccgcgaccaggactgcgctgccgctctgggttctcggttggggaagaagtctcggggtcgttggatctcgtccggacggcggtga

SEQ ID NO: 15043 - DNA, 987 bp, Zea mays
  Peptide Sequence Number=SeqID_56822
atggagttctttgaattacttgttaaactaaagggcaacacttatgtgcctgtaatgcaggcggacttcatgaagatgccgttcgatgacaacacttttgatgctgtttacgccattgaggcaacatgtcatgcacctgatccagttggttgctacaaggagatatatcgtgtgttgaagcctggccagtgctttgccgtgtacgagtggtgcattacggatcactatgatcctaacaatgcaacccacaaaaggatcaaggatgaaattgagcttggcaatggcctgccagatatcagaagcactcggcaatgtctccaggcagtaaaagacgccgggtttgaggttgtttgggataaggatcttgctgaagattctcccttgccttggtacttgcccttggatccaagccgattctccctgagtagcttccgtttgacctctgtgggacgcatgattacccgcacaatggtcaaggccctggagtacgttggtcttgctccgcagggcagtgagagggtctctaatttcctggagaaggctgcagaagggctggtagagggcggaaaggaagattcagccactgtggtggtcgtgcgcctgcgccgccgattgagcgtcattgtcgggttcgggagctccgctgcaccttcaggatcgtgctcgcggacgacgcaggtgtggtgccatgctggggcccgacgaattgctcaccggagcttcaatcacagccgcgggttgcttcggtgcgtgggcaatcgcgtctccgccttcgtcaccgcacttgagaacaagtccccaacattggcgcccacctccgggactggcacgctgcagccgctggaccccaatcaagacgtcctttctcttagagaggcacgaagccagaagaggaaggctgccagtccaacacctccggacgatgatctagatcaggagattcaaaatctgggaaatccttcagcagcaggttcaacgcaagaatga

SEQ ID NO: 15044 - DNA, 579 bp, Zea mays
  Peptide Sequence Number=SeqID_56823
atgaacttagtgtaccttataatagcttttggtaccttctccaccatctcgacatcttcattattgtctggtcaacgcaatggcggcgggactgaagaggccgtcgttcaggacgcgggcgtggcggctactgcggcaggcggtgctgtgggcgcggaagggcggcgcggcgcacagcctgcgcctgctccgcacgctccgccaccaggaccacgaccacggcacggcctcgccggcctgggcggcacgcgcggcgaccggctccgctgcggcgagcacgagtactccatccgcgcgcgtgctgcgctggtgttccagttccgcaccccgtccgcgcgcgtgatgcgcctcatcccctgcatcgcgccggccgtgcctgacacaccgggcctctacggcgacgaccgctacttcttcagcaccgccgccgcgcgtgtaatacagccatggccggctggccacatccccgtgctgccactcctgcccatcaagcagacgaagccaacgcctcctatcttcagctcaaccgcgcacgccgcaaaaacgaatccggaatccctgccgccggagcacaaatag

SEQ ID NO: 15045 - DNA, 270 bp, Zea mays
  Peptide Sequence Number=SeqID_56824
atgaacaccagaacaccaagaatcgacgaaatcgattcaaaccgtgactggaggcgagaggggaagaagaacagagagctggcgattttctacgagagcctgagcagggagcaagtctccatacttaaggaaccgagggagaaacggttgcagaagggcggtgtggagatcgaggtacttgttaggtttgaaccaaagcctatcccagtgtactccaaccctgcacgagtaagcggaggactacgccttgatccacaaactctagtgtga

SEQ ID NO: 15046 - DNA, 288 bp, Zea mays
  Peptide Sequence Number=SeqID_56825
atgggtgggagccggacttctgcatgggcttactggatacccggcaaagggggcccgaagccgcttcatgtccccatagtaaaagcagtccacgactacatccttgggccgggcccctatgggacggtcctagacacctacgtgtgccatccggacctccagccaggattagaaacaaattataatgaatacggagtgcggaagagagttcttcttgctatgagttgctcaatcaacgcggatgacttttgggagctaactcaaaagattgttagcaagagaacttag

SEQ ID NO: 15047 - DNA, 159 bp, Zea mays
  Peptide Sequence Number=SeqID_56826
atgtaccctctttttacaatggatggagtccactatcttgtcaaacacaataatgaagatgtcgagatggtggagaaggtaccaaaagctattataaggtacactaagttcattgccgggttatcggaggagaaagaggtgagcgattcaagagcttga

SEQ ID NO: 15048 - DNA, 168 bp, Zea mays
  Peptide Sequence Number=SeqID_56827
atggcaaataatatgaaactagtgagtacatggtttagaaactcatacctaagagtaattagccttataggcaagatcaacaggattggtgacacaattgttaatcagaggagtcatgatactgaggttggagggttcaggtcttttgatctgaagctagatcaatga

SEQ ID NO: 15049 - DNA, 345 bp, Zea mays
  Peptide Sequence Number=SeqID_56828
atgaccgaggctttccgggccccaatccgccacggacgtgtttcactgtcccaggtgaaccacccaagcgcccaatcgaccctagaacggtggcgtagggccaagtcagcggcggcggcgaagtcgtcgcgccccaaggtcccacggcgatgcaacggtgctgccggttgcgtttcgagggggaatagggaaagagggagctgcggcgcgattcattttatgtgtaggggtcggtcagcagcggagtccgcagcgcccaccatgaccgagcacgcacgattcgcgcggcgaaggatgaggaagacggttcagcggctgacccaggggaccgacaaggcagcgtaa

SEQ ID NO: 15050 - DNA, 288 bp, Zea mays
  Peptide Sequence Number=SeqID_56829
atgcaggaatcccttgcaggaccgccatcgcagcaaaatcctcccgagggcctccctacactgaccactcccctactgcccttgcccctttcgggcctcaaattatggaaagtgcaggggcttcgatgcagcattcccaagactcagaaaaccccaggcatggacggcgggttctattcttcagaaccccgagggttcttacgcaaaatggcgctgcgaagcggtatcggccacgatgggccgttggatcagacgtggatgtatcagattgaatctaagtctttatga

SEQ ID NO: 15051 - DNA, 144 bp, Zea mays
  Peptide Sequence Number=SeqID_56830
atgggttcgttggtcatggtgcgccgccgtggactcaaccctgagtcgtcggcgttcaaccagggtacaacctctgcagagtgtaaaactggtatactagccgagctcacggtcaagagcagctcaggactctggcatgattaa

SEQ ID NO: 15052 - DNA, 846 bp, Zea mays
  Peptide Sequence Number=SeqID_56831
atggctcaggtggcgcggtcgtcaacgttctcaattgcgatggctctctgtgtcctcccttcctccccgttctttgatttcttgccgtggccgagcgccgagcctatgggacaagggcatacgatgtctgtttatatatccgagattttccttaaatctcaagttaagacttttgggtgttacaccaggacgcacgttaccgctgcatgcggtggcggcaacagcaggatcaccaagtccgtcggcttcatcgtcaagagtgtacgccgcccgacatccccaatcgctcccctgcttctactttgtgcgcccgcacgtgatgttaacgtaacgtcgtgtccttcaattgcttgcgcagatgaaggccctgtccctcctaaaagtgaagacggcgggcgacggccatccacgcgcgccgcgtcgtcatcgacggtggcatcgaaggcgctcccccgaggcagacgagttgcaggacaaggacgtcacagcggcatcatcgtccgcgtcctcgtccgccaagatcgcgccggcgcagccgcacgaagccaccgcggtgaccttcggagagaccgcctccaccaagacgaggagctgtggcagcaaggaggagctaaacacgggcactgcgacaagtgctgctcgccattggaagacgacgtggaggaggccgccgcgggtacggcggacgtggcaggcgacgaggagtgggcggcggagtcggagcccggcgtgctgatgacgctgtggtcacgcggcgacggctccaacttgtggcagaaccgaccgaattatttcagtttaagtgccgtaacatacttaaatcggaataacccgtcagtcccttag

SEQ ID NO: 15053 - DNA, 201 bp, Zea mays
  Peptide Sequence Number=SeqID_56832
atgaaggccaaaagggatgatcaactgctcaatattgaaaagaggaagaagaaaaacaaaatgcaagatcttaagccaaagaacaattattataggatattcaacctctctagccatctagatcctttcgaagacccacttgtgtgtgggaaggcccaagggatatcaatggagttgcctgaccgggagcttggtgcttga

SEQ ID NO: 15054 - DNA, 318 bp, Zea mays
  Peptide Sequence Number=SeqID_56833
atggacccgtacccgtacccaccgggtatccgtcggcggggcagcgggctgctgcctgctggagtgctgggcgagggcgagggcgcggggctggggcctggggcctggccgccgcggcgccgcctgggagcctggacgggggcatgcggttggggcttggggcctggccgccgcggcgccgcctgggagcctggacggggactgccgcagtgccgccggccgcgtggggcgctgggtcctgggctcctggcctccacctccagggaaggctgggacgaggacgactgggactctgggagtggcggctgcggtgggtag

SEQ ID NO: 15055 - DNA, 501 bp, Zea mays
  Peptide Sequence Number=SeqID_56834
atgtccggtgcaccagaggactcaaacttcgaactcgtcaccttcgagaatttccggaagcgactccgctataattcaccggactatccggtgtacaccggacatgtccggtgctccaaggaagagtggcctccggaactcaccagcctcgggaatttattgaagctgctccgctataattcaccagactgtccggtgtacaccggactgtcccggtgtaacagcggggcaaacggctatttcggcgccaacggctacctgcgaggcattaaatgcgcgcgctgcgcgtgcagaggtcagacacgcccatactggcggcaccggacaattttacagtgcatgtccggtgcgccaccggacatccaggcggggcccagaagacagagctccaaacggtcgacccccaacgggctttctggtgacgtggctgtcgcaccggacatgtccggtgtgcaccggactgtccggtgcgccatcgaacagacagccccaccaaactag

SEQ ID NO: 15056 - DNA, 2403 bp, Zea mays
  Peptide Sequence Number=SeqID_56835
atgaggggcggatcaatggcacttttgtggtgtcaaattctggactggattgagtggttcactgttttctggtctggaaccgtttccgacttggaaccttcaaggcaaccgaacacggggacgccacatcctggggacgatatggccaccatggtgacaccgtcggcgatggaaattgaggaggggaggagtggaggacgccagctgagaaaagccgcacgacttggcacttgcccagagtccactcacctctataaattcgtgcccaccccgcttcaggttccattcctcatcaccaagccgaaccacagagctcccccacacccacagcggggtgaagcgaatcgcatcaaattcgaccgaagaatcgcgccgctcggcccggccaccatgagcttctcgtccatgagcaagcagcaggtgctggacgccggtgacggggagggggaggaggtcatggagctcatcccgggcctgccggaggaggtggccgagaagtgcctcctccacctgcccttcctctaccaccgcctcttccgcaccgtctcctccacctggaaccgcttcctcacggacgccctggccaagccactgctgttccctcacgcggcgggggcggggaccgcggccacggggtcggtgcccttcctcttcgccctcgcctttgaccccatgtcgcggcgcctccagtgccaggcgctcgaccgtttctcgaggaagtggctcctgctcccgccggtgcccggcggcgccgcggccgggtcgttcgcggtggtggggctcccccgccgcggccagatctacgtgattgggggcgtcgaggagggcggcgacaaggccgtgacgagcgtggcggtgtacagcgccgcgcggaacgggtgggaggaggcggcggcgatgcggacgccccgcgggtacatggcggccggggaggtgggagggcgggtggtggtggccggggaggacggcgaggcggaggtcttcgacccggaggccgggcggtggtcgccggccgcgccgcgccgcggcgccgccgtggcgcggtacgacgcggcggcggcgggcgggaagctgtacgtgacggagggttgggcgtggccgttcgagcgcgcgccgcgcggcgccgtgtacgacgccgccgcggactcgtggtgcgagatggcgcgcgggatgcgggaggggtggacgggctcctgcgccgtcgccggcggccggatgtatatcgtggcggagtacggggagtggcggctgaagcggtacgacgaggcccgggacgagtggcggatggtggccggcaccggggtgccccccgaggtgcgccggccgcacgtggtcgctggcgagctcggggaggtcgctggcgggaggcggaggatatacgtcgtcggcgccgggctcgacgtcgccgtgggcacggtttctgccgccgcatccgccgccgccgcggtacccggcgtcgaggacgaagtggtggagtgggaggtggtcaagggctccgccgagttcgccgggatggcgccctgcaacgcgcagatgacccagaagaaaccagatgcgcaaacgcagctgcacaggctcgcaagtcgcaacgtggtggtctggtggacgatcttgatagtattcatagcagagaagtccctttcaactcttgcagtcgccaccgcggccaagcccgaccctaggcgccatgggaaactccgcttcgcccgaccccatggctcggactcgggctcagcctcggaagacggcgaacaacgctccgcccgaccccagggctcggactcgggctcagccccggaagacgacgaactccgctccgcccgaccccagggctcggacttgggctcagccccggaagacggcgaactccgctccgcccgaccccagggctcggactcgggctcagccccggaagacggcgaactccgctcctcccgaccccagggctcggactcgggctcagcccccgctccgcccgaccccagggctcggactcgggctcagccccggaaggacggcgaaccccgctctgcccgaccccagggctcggactcgggctcagccccggaagacgacgaacttccgctccgcccgaccctaggactcggaatcgggatcagccccgaaaagacgacgaactccgcttcgcccgaccccaggggctcggactcagccctggcctcagccgacggtctccgcctcgcccgacctgggggctcggacttgacctcggcctcggaagacagactcgacctcgacctcggaggaggctccacatcgcccaacccagggcacggaccgaccacatcaacaggaggcgccatcattaccctaccccaagctgactcaggctacggggaacaagaccggcgtcctgtctggctcgctccgccagacaagtaa

SEQ ID NO: 15057 - DNA, 373 bp, Zea mays
  Peptide Sequence Number=SeqID_56836
atggcggtgtcggcgcttgaagccgccgcagggagcagggcctcagagcgtatctgcgccaacagcgtgcgcttcgccggcgacgtcatgcggcgcggtgccagtggacccttgcgggtgggccgagccaaacacactaagagggagatagtcaccagcgacaagcccgaagcctcgggaaggaagaacgatgaatggactccatcaaaggaggccgacgacaagcacaaggaggaatctgcttcctccatcaagtcacataggaagggtgacaagaagaaaaataaaatgaagaaggtggtctactacgagaccgactcttcatcaccttccacctccggcgtcgagtctaccatttctaagcgccaagagc

SEQ ID NO: 15058 - DNA, 1659 bp, Zea mays
  Peptide Sequence Number=SeqID_56837
atggccttggcgacgccgctgcggctccgccgccacctcctcctccccgccgggccgtccccggcgacccaccgcgccctgtcgctgcggcggggccgcctcctccccgcaagcctgtccgccgcagcgggcgggcggccgacggtgctggtgacggagacgctgggttccgcggggctggacctgctgcgcgccttcgccaacgtggactgctcctacgagctgacggcggaggagctccgcgccaaggtgtcgctcgtggacgcgctggtggtgcgcagcgggacgcaggtgacgcgggaggtgttcgaggccgcgcgcggcaggctccgtgtcgtcgggcgcgccggggtcggcatcgacaatgtggacctccaggcggccaccgaggccggatgcctagtcgtcaacgcgcccaccgccaacaccgtcgccgccgccgagcacgccgtcgcgctcctcgccgccgtggcgcgcaatatcgcgccggccgacgcgtcgctcaaggccggcaaatggcagcggggcaagtatgttggcgttaccttggtgggcaagacgctagctgtcatgggtttcggcaaggtcggtccagaggtggctcgacgcgcgagaggactcgggatggacgtcgtcgcccacgacccatacgctgccgccgatcgagcccgggcggtcggcgtcgacctggtgtcgtttgacgaggccatctccacggcggacttcatatcgctgcacatgcctctgaccccgtcgacggcgaagcttttcaacgacgagactttcgcgaggatgaggaagggcgtcaggatcatcaacgtttcgcggggcggagtcgtcgacgaggaagcgttgctgagggcacttgacaacggaacagtttcccaggaaggtgtagccctcgaaattgcagaggctgttatcggtgcactgcgaggagacctggctgccacggctgtcaacgccccgatggtccctgccgaggttctatccgagttatctccatacgttgtccttgcggagaagctgggccggctggtggtgcagctggtggccgttggcagcgggatcaaaggcgtcagggtggtctactcgtccgccagagaccctgacgacctggacacgagactcctccgcgccatggtcaccaagggcatcgtggagccgatctcgagcgccttcgtcaacatcgtcaacgcggactacgtcgcgaagcagcgaggcctcaggatcgtggaggagagggtcttcctcgacggcccgcccgaggtcccgctcgactccatccaggtccatctcgccaacgtggagtccaagttcgccggagccctgtccgacgcgggccacatctgcgtggagggcaaggtcagggacggcggcgcgtcgcacctcacgctcgtcgggtccttgagcgtcgacgttagccttgagggcaacctgatactgtgcggccagctcgaccacccgggcatcattgggagagtggggtcgatcctgggaaagatgaacgtgaacgtgagctttatgagcgtcagtaggactgctcccgggaagcaggcgataatggccattggagtcgacgaggagcctgggaaggaagctctcaaattgatcggtgacacgccgtctgttgaggagtttgtctttcttaagctatag

SEQ ID NO: 15059 - DNA, 444 bp, Zea mays
  Peptide Sequence Number=SeqID_56838
atggccggaggcaaaggcagcaatggcaagcgtggcaagaatgatcaaggcgagaagaggaagcattattcgactcctccatcggaggacttcagcgactccgagttcccagaggagcagttctcctccaagggtgaggagtctctgtcgctgttgcccctctctccgtcatccgagggtttaggactaagcagggctctctgtggtggagaaggccttcatccggactctgaggaggaggactccgaggaggatgaaggtggtagcggtgaggaccagagcggctatgacagcagcgatgagggtggcaatggtggcgtcaatggtggagggagcaggagcagtggtagcaacggcggcagcaatgacaagggcatcggcggcaagggtggcagcggcgacaaaggtagcagcaacgccggtggcaaggcaccaccgtcttaa

SEQ ID NO: 15060 - DNA, 627 bp, Zea mays
  Peptide Sequence Number=SeqID_56839
atgacagcccaggtcgagccgaaccctgatgataacctagtggatgctagcctagaggatgttgtggaaggtggaaatggggtgaaaatggctagatatgtggtggaggaggaagatgatgaggaagaagaggtgctttccttggttcggcgcaagcggcgctctaggactcatagtaacacctcaagccttgctgctgcagccaagatgatggatatttgtggtttgactatgtctactattgagggtgtacttgaagatgccattcctcaggatctacttctcgaattacctgaaattagagctattgatatccatatagatcacttgaacgtggtaagcgtgctagtccaccatggtgcttcagctcctatcctggagatcactcttgctcctaagggtcctctagcccccaagggtgctctagaccccgagggtgctccagcccacaagggtgcttcagttggttctccatctgctgcttcaatggatgttcacgttgggtcgctaatgcctcggactaacgatgttggggcaacaagctctattatgcccattgaaccatccgagccaaccaccttagagcttagtggttctggtgctgaaatcccgaatgggtacttctag

SEQ ID NO: 15061 - DNA, 456 bp, Zea mays
  Peptide Sequence Number=SeqID_56840
atgaaggccgcgggattcccacctctctcacgccggtctccggccgcctcgctctccccccttcgcgctcgccctcgcgctcgacccatctgggctggggcacgcggcgacactcactcgtcggcccagggaccccccggtctcgaaacgccgacagaaggcgagcacgaggagcagcagggagagggcggtggtggctgtgatggcagcagcagcagtcccaagcaggcagtcaaccctggggaagaggagatggtggaatctggtcctgtgacagcgacgcccaatgctgcttgtggattccaagaaagcagctatggtgtggtggaggtggagctcgtcttgcctaacagccccttcgtgtcccccaccaaggaggaggcctcatacgctgatgctgtcaccgctgcagccgctcggaacggtagcaggagcagccctcgccgtgtggattaa

SEQ ID NO: 15062 - DNA, 789 bp, Zea mays
  Peptide Sequence Number=SeqID_56841
atggccgagtgcgaggagctggtggagagcggcggcgccgaggaggacatgccccgcgtcgtggccgccctcgccggcatcctggagcgcgtcgcgaaccgcaacgacgcggcggcggccgcggaggtctcggccgtagccccggcgtcggcgttccgggcgacgacgaagccgggcatctcggtgcgcgcctacatggcgcgcatcgcgcggttcgctgggtgcagccccgcgtgctacgtcgtggcctacgtctacctggaccgcctcctgcgccgcggccgcctcctggcgctcgccgtcgactcctacagcgtgcaccgcctcctcattaccgccgtgctcgccgccgtcaagttcatggacgacatatgctacaacaacgcctacttcgccaaggtcgggggcatcagcctggtggagatgaactacctggaggtggacttcctgttcggcgtcggcttcgacctcaacgtggcgccggagacgttcggcgactactgcgccgtgctgcggtcggagctactgtcgtcgtcggttgtaccagctgctacagtagattgtgtatacagtgctggtgtctttggtgactttctgaatcgtgtgcgtgttcgttccggtagcgaagctaacttttgggccattttaagttttcgtatggcccagtttggccaaacatgccctgccatcagcccattaggaaaagggttcgtcttcgtgcggtgggagatgaacgcgggcgttgtttccgatgggaagcgcttgggcttggacttggagacgctctag

SEQ ID NO: 15063 - DNA, 741 bp, Zea mays
  Peptide Sequence Number=SeqID_56842
atggccaggatcccatcgtccccaacacaggcccgcgcgcgacgacggcgagttcacaacagggcactcccggcgaccacgccgtcgtgcgcggtagagccccacgagccattcccaacgcgcctattcgaagtacagaacaaagtaaaccgcatgggtgaggtcttaccacgcgacagtgagccggtgtcgcagactacggtgagaagcgcctccgccacgcagaagaactccgatgagcaattcaccggcctcctccgcacctccagtcccgatttcccacggtcgcgctcttcgtcaccagggaagtcagcccgaccacttattgcctccggcgcggcagtgcaagcgcacggtcacggcggcggcagattcgctccctacgggcgcctgggcaatggtggctggggcaatgcgacgaaggagaaaggggaggatatggctcggccatgctcccattatctacgtggggaaggaaataggggttcagagttcggtgaggtccgccatgcgcgcggaggtgaagaccgtgctgaccagtggttgcgagcaatgagtggactccgacatgcgggacccgatcgccaggcgcacatcccgcgcatgcgagcgatcaatgccaggttgcacagggccattgttctgaaaacccgggagatcgctaggcttggctatcccatggggatctgctgtgactacgtcgttctcaaggtccacaggaaattcgccatctttgggtag

SEQ ID NO: 15064 - DNA, 582 bp, Zea mays
  Peptide Sequence Number=SeqID_56843
atggaaccgggacggagctcaaccggcgcagcaaagccgagggcgaggatgtccactgtgtcacagaagcagggcgcacagggggcactcttctattcagccctcttgtgtgcgcgtgagatgttgactcaagaagatggatcagctgacttaatccgtgccctgaacaatagacttattgcactgtcctttcatatcagagagtactattggcttgacatgcaaaaattgaatgagatatatcgatataaaacagaagaatattcttatgatgctgtcaacaagttcaacatttaccctgatcagatttctccatggcttgttgagtggatacctcctaagggtggttactttattggaaacctccagccagctcatatggacttccgattcttttcactgggaaatttatggtcaatagtaagcagcttggcaacaactcatcagtcgcatgccattttagaccttattgagtctaaatggtctgatttagttgcagagatgccactaaagatatgctatcctgctcttgaaaaccaggaatggaaaatcatcactgggagtgaccctaaaaacacgtga

SEQ ID NO: 15065 - DNA, 387 bp, Zea mays
  Peptide Sequence Number=SeqID_56844
atgggcgcggtgggggcacaggcgcggcatccggagggcacgcgggcgcggcgaggggcgcgtcgaggggcgcaggcgcggtcgcggcgagtggcgagggccgaggatcgcgatcgcagcagggggcggcgtcgcggtgagggcgtccgggtggggcgcgtcgagggcggccgggtggggggcgcgtcgagggcgaaggcggcgcgaccggacggcgaggagcgcggccgcacggcgaggggcgcggacggcgacggggcggcggggcgtactcggcaaagtcctctttgccgactgcccgagaaaaagcactcgacaaagaggctggcactgggcaaaggcccggattctggtagtgaaggcaataagtcaacagataaggcatga

SEQ ID NO: 15066 - DNA, 705 bp, Zea mays
  Peptide Sequence Number=SeqID_56845
atgggtgtcctcttcctgatcgcctgccttctcgttccggccgccatttacctcctcccagccaacaacaacacaccaccatgggagcccatcacctgcacgggcggcaacgccaacggcgagtcaaactgcaccgtcaccaactcgtacggctccttcccggaccgcacagtctgccgggcggcggcggccgtctacccacagaccgagaaggagctggtcgccgccgtggcggcggttgccgcggctaaggggaaagcgaaggtcgccacgaggcactcccacagcttcaccaagctcgcgtgccccggcggccgcgatggcaccgtcataagcacccggtggctcaatcggacggtgcgcgtcgacgtcggcagacggctcctgacggtggagggcggcatggtcctcagggacctcgtccgtgtcgccgcggaggcagggctcgcgctgccgcactcgccgtactggagcgggctcaccgtcgggggcctcctggccaccggcgcccacgggagctcgctgtgggggaaagggagcgccgtgcatgagtacgtggtcgggatgaggatcgtgacgccggcgccggcgagccaggggttcgccgtggtgagggagctcggcgcagaccaccctgacctggatgccaccaaggtctccctcggtgtgctgggagtcatctctcagattacaaactatagctga

SEQ ID NO: 15067 - DNA, 1002 bp, Zea mays
  Peptide Sequence Number=SeqID_56846
atggcggagactgtgtccgtctggggtcacctccacgagttcggcgacatgacatggctgccctaccagcgcaaggtcgtgtaccgccaggatgaccgcgttgacgtcgccaccggaggagatggccacaatgacttcctcggcttccgattctactccaagcctggcgttatggccgccaggctcctagacacgtggctggaagagaaggatgttgacactgcccggtgtctgatggcacggttgccgatgtggaaagtgcagagggaggcctacggcttctctaacgacggcgtctccttcacggggtacccagtggtggggttccagcaccgcatacaggcctctggctcgtgcctggacgacggcggcggtggtttgctgctgtcagcgtgcacatgggacccgcgcctccgaggcgggctgttctacagctccggcttcagcgtgggtctatccaaggtggcagcgttcgtcgccgacgtgcagaggctccgcgacatcaacccgcgggccttctgcgggctcgagggcaagctgggcgtgttcatgcggtacgtgaaggcctcgtcggcgttcctaggcaagcccgaggactcggtggacttggacatcgtctactaccggagccacgtggagggcacgctgcgcaggcacgccgacgtggtcgacgagatggagcagatggcgctgcacaagtacggtgccatcccacactggggcaagaaccggaacttcgcctttgacggcgccatcgacaagtaccctagggcacacgagttcttgagggtgaagaacacgtacgacccggacgggatcttctccagcgagtggagtgaccaggtgcttggcgtcaagggcagccccagcatcgtcagggatggctgcgccattgaaggtctgtgcgtttgctccggcgactcgcactgcatgccggataagggctatttctgccggcctggtaaggtttacaaggaggccagggtctgcgtacgtgtttga

SEQ ID NO: 15068 - DNA, 351 bp, Zea mays
  Peptide Sequence Number=SeqID_56847
atgggcgccgatgcaggctacggttcgccgccaacaaggctggcgggccacgcttgcctccacgggaggaagcactactctagctcgttgttcgtgctggaagctcatgacgagtcgtccaccaccacctcgtcatccttggaagagatggagcacgcggagccctgctccgcggccttagaaacatgtggtcatggccaactccgatgctaccaagctgcagttgagccccaatttatctgcaccgccactggtgtcctcattgcaacacttggagatttctcctttgacctatatggatactgcatggctctaacatcagtatttttggtgggggcaatcctgttttga

SEQ ID NO: 15069 - DNA, 696 bp, Zea mays
  Peptide Sequence Number=SeqID_56848
atggttgtgcctaaagctaagatgccgatcatacctgaagaaatcccccttgaagaaaccgaagaggtgaagattgaggatgttatcgctctgagagcccaaaagatcgttcctctgaagtcgctcttagaaagcaaagaggaagaggaagaactaatagctcaaagggggctaggggaaactactggctcagctctagccccgaagagtgttatgttgcccgatgcagacacggctatgccaaagagtttgaagaggatagaggtaaagggccttaaagaagggccttttgatcaagagctgggtggccgaaaacgtaaggttcaccatgctgctaggaaggttatgggtgcaaagcagctggccgaagctatcggctacaatgaacaaattggatacccttcggggtccaccatcttcagggaacggtcggatgactatctatattgctgctcggacaacctagagaaagaagctatgtgcaaagagaagagcaagcttgaagaaacaatggggaggaaagtatcaaagctcgatgcttcgaatgctgaaaaggacaagcgaatcacattgctcgaggatgagctaaaacgagcaacatatgaagatgaaatgacgaaaacaatgcaagcatctgccaaagcagtcgtttgccttagtggcgctcaagtgaagataaatgatctcaaagattaa

SEQ ID NO: 15070 - DNA, 249 bp, Zea mays
  Peptide Sequence Number=SeqID_56849
atggcgctctccagcaacatcggcctgcccatcgtcggccactccgacacctacatcttcgtggggggcgatgcctaccagttgttttgcgcccttggggccgtcttcatcaccagccgcatggctgacgacgccaggaaaaaccataccagaaccggtgtaccagcccctggcgccgaccctcgatgttgctaccatgtcggcgaccgcagcaccccactccttccccatctacgacggcagcagtga

SEQ ID NO: 15071 - DNA, 225 bp, Zea mays
  Peptide Sequence Number=SeqID_56850
atggtccatgtgggcgttgcatgggacggcaacggcacggcagccggtggccccacagtgctggaaacagaaaaaatcgagttggagaagagatggctcgagcagccaaagtctgcccagtctgggtgcaccggactgttcggtggtgcaccggacagtgtccgcggccaggctggcttgagtaaagtggctgctcttgggacttcgacggcggtgtacggctaa

SEQ ID NO: 15072 - DNA, 888 bp, Zea mays
  Peptide Sequence Number=SeqID_56851
atgggcaacctgtgctgctgtgttcaagtcgaccagtcgactgtggccatcagggagcagtttggcaagtttgacagcgtgcttgagccaggatgccactgcatgccttggttcgccggcaagcgtgtagctgggcaactcacactcaggctgcagcaactggatgtgcgctgtgagacaaaaacaaagcttctaacacctggatttgtgcaggacaatgttttcgtgaatgtggtggcatctattcagtaccgcgctctggctgacaaagcaagtgacgctttctacaaactgagcaacacaaggtcccagatccaagcctacgtctttgacgtgatcagagcaagcgttcccaagctccatttggacgatgctttcgagcagaaggacgagatcgcaagggcggtggaggaagagcttgagaaggccatgtcggcttatggctttgagatcgtgcagactctcatcgtggacatcgagccagacgagcatgtgaagcgcgcaatgaacgagatcaacgcagctgcgaggctcagggcggctgcaaacgagaaggcggaggcggagaagatcgtgcagatcaagcgcgcggagggggaggcagaagccaagtacctgtccgggctgggcattgcgcgccagcggcaggccatcgtggacgggctcagggacagcgtgctggggttctccgtcaacgtgccgggcaccaccgccaaggacgtcatggacatggtgctcatcacccagtacttcgacaccatgaaggagatcggcgcgtcgtccaaggcgtcctcggtgttcatcccgcatggccccggagcggtgcgcgacattgccacgcagatccgcgacggcctcctgcagggatcctctgtcgccaaacactaa

SEQ ID NO: 15073 - DNA, 348 bp, Zea mays
  Peptide Sequence Number=SeqID_56852
atggaccggcccggcacgacccgaaattcaaacaatatggggctttttagacttgagacggaccgggctaggcggcccgaatgtagacctataggccctagccacgcccatatcggcgtcggcgtcatggcttgccactgtgaccctcctccatgtagagcgaaggcatcgccctgtcaccgaggtcagtgtcctcgttctccatggggaggggagcagctgcggcgttgggatccgattcaagcgacaatgcctctccctaagcagaagctatggaagaggacggaagagcggcagctagcgggagaggtgatgatgcgtccaccgtcttccgtctccccgcggtga

SEQ ID NO: 15074 - DNA, 867 bp, Zea mays
  Peptide Sequence Number=SeqID_56853
atgcggtggtacgcgaacgcgaaggaggttggcggcggcggcggcggcgccggcacggtggtgctggcccacggctacggcgccaaccagacgctgtgggacaagctcctgccggccctctcccagcaccacagggtcatcctcttcgactgggacttcaccggcgaacgggaggaggcagcggaacggtacacgttcggcaggtttgccgacgaccttatcgcgctcatggacgacaagggggtgcggggcgcggtggtggtgggccactccatgtccgccatggtcgcctgcatcgcatcggccaggaggcccgacctcttcgcccacctcgtcctcctctgcgcgtctcccaggtacctggactcgccttccgaggggtacgtgggtggcttcgaccgggcgagcatcgacgccatgcttgccgccatggagtcggacttgggcgcctgggtgaggggcttcgtgcccaacgccgcgggcgccgacccgtccgccactgcagagctggagcagagcttcctgtccatgcacccgcgcgtggcgctggaggtggcccggatgatcttcctatgcgaccagcgcggggccctggacgccgtggccgcgccgtgcaccgtcgtccaggtgtcggacgacttcgcggcggcccccgccgtggcggagtacatgaggggcaggatgaagcgggcggcggaggtggaggtggtggtcatcgactccgtcggacacttcccgcagctcgtcgcgccgcagcagctgctcgccgtgctgaagcgcgtgctacagcgtgctgctgcagccaacgaggagcgcgcggcggcagcggaagaagaggccgatggtggcatcgatgtcacggcctag

SEQ ID NO: 15075 - DNA, 2499 bp, Zea mays
  Peptide Sequence Number=SeqID_56854
atgtccttaaacagtctccaccgggggcgctccgcctccatcccgagttcgcgacccgtcgcctccctcctcctcattttcaagtttttgcttggttttcaccacttcgcgtcctgtctcctgtatgtgagtcctagcgccgccaaggaggccaggccaccaccgctcctgaactgcactgcgctctcctctccgctccaccagcggctgccgggcatccaagtccagtcgacacacagagaggataagccaagagcagccggtgggtgcggggtgaaccgtctgcctggaccgaggtttacgagtgagatgacggacgccggcgctggttccggcctgcagacgccggaccaggtccccaggggagcgggagctggtgcggtcgttgtggtggcccttcgcgccgccgccagggagatctccaagacggccgccgtctgggcgctgacgcacgtcgtccagcacggcgacagcatcctgctgctcgtgctcatcccgccgccgagctcagcagatcaagggagagcggtgtctgcgaaccgccgccgacgttttgacgacctgcaccgctgcacgggtgccggcaaatcaggcaggaagttctggggcttcccgttcttcgcggggagctgcgcaagtggacacaaggcagtgctgaatcagaggtcggatgtggctgagctgtgctctcagatggtgcggaagcttcgcgatgtgtatgatcccaacaacaagatagacgtgaaggttaagatcctgtccgggtcacctcccggcgccgtggccaaggaatccaagcgggtgcaagcagcctgggttgtgctggacaaggagctgaagcacgaggagaagcgctgcatggaggagctgcagtgcaacatcgtggctatgaagcgctcccaacccaaagttcttcggctgaacctggtgggatcgcattcgcatgagagggaagagtcgtccagaccacctcctcctccggcgccatcgccaccgccacctgagccgagcacgagtccgagtccgagccgagtgccatcgtcagcgacacctagcagcagcccagagtcagaagaagcgcccttcgacactagtaccaccgacgtcggagcgtcctgcgtctcgagctccgattcggacacgaacagcttttcgacgaataaagggacgacgacgacgacaacgacagcggcggccaaggacagcgtccagcgctcggacgccgactctgagagtgaggcttcgtcgctggagccatggatggctaccattttattacagacgcctgcagataggctagtcggaaaccggcccaggcccaggaggacgcccaccgcagactctctgctcgagaagatcgccaagctggacctcctgactgagatcagcgcgatccggagcaggtccgacctgaacttcagagggaacgtgagggacgccgtcgcgttggacaggagcgcgccgccggggcctccgcctttgtgctccatctgccagcacaaggcccccgtgttcgggaagccgccgcggtggttcagctacgcggagctggaggtcgcgaccggcggcttctcccgcgccaacttcttggccgaaggcgggttcgggtccgtccacagaggcgtccttccagacggccgggccgtcgccgtgaagcagcacaggctcgctagctcacagggcgacgtggagttctgctccgaggtggaggtcctgagctgcgcgcagcaccgcaatgtcgtcatgctgattggcttctgcgtcgagaataagaggcggttgcttgtgtacgagtacatctgcaatggatcgctggacacacacctttatgaccgtaacaaagaaacgctggagtgggctgccagacacaagattgcagtaggagccgccagaggcctgcgctacctccacgaagagtgtagggttggagatttcggcttggctaggtggcaacctgatggcgacatgggtgttgagacaagagtcattggcacattcggctatctggcgcccgagtatgctcagagtgggcaaataacggagaaggcagatgtctactcgttcggggttgtactagtggaacttgtaactggacggaaggctgtggacatcaacaggcccaagggccagcaattcctaaccgaatgggctcggcctctgctggaagagtgcgccatggacgagctgctggaccctcgcctgggagggcgcttctgcgagaacgaggtctactgcatggtgcacgcggcaaacctgtgcatacggcgtgaccctcatctcaggccgcgcatgtcccatgttctgcgcatactggagggcgggggcggcgacatggtggtggactcagctggcagcaggagctggcggatgcagcagcaccagcgttggcaggagcagagcagcccagcagctcaacgtgattcatcacagcgtgggcaggagactgcgggaagcccgtggagtcgagaacgaaggcagaacttgtgccatagatactag

SEQ ID NO: 15076 - DNA, 409 bp, Zea mays
  Peptide Sequence Number=SeqID_56855
ggaactcagactcaaactcttcaccctcgagatttctcggaagacggcgcgctataattcaccggactgtccggtgtgcaccggacatgtccggtgctccaaggaagctcggcctcctgaactcgccagcctcgggttcgcgcggcagccgctccgctataattcaccggactgtccggtgtacaccggactgtccggtgtacaccggactgtccggtgtgccagcggagcaacggctccctgcggcgccaacggctccctgcggtgcattaaatgcgcgcgcagcgcgcgcagaagtcagaatcgcccatgccggggcaccggactgtccggtgtgcaccggactgtccggtgcgccatcgagcagacgcctccagccaacggtcacttttggtggttggggctataa

SEQ ID NO: 15077 - DNA, 354 bp, Zea mays
  Peptide Sequence Number=SeqID_56856
atggccgcgacggcggcggaggagatggagaggatggtggaggcggagtgggaggaggggaagcaggggatgaggaagaggaagcggtacgggctggtggagtaccgggcgctgccggcttacctgcgggacaacgagtacatccaccgccactaccgctgcgagtggccgctcccgcaggtgctgctctccgccttctccatccacaacgagaccctcaacgtctggacagtcactgtgggtgatggtcgtggcgttgcctccatccctggacctcagcctggcgttgttcatgggcctaatggcggtcgtgacaccaacgttgctgcagttcttgccgcccaagagcgataa

SEQ ID NO: 15078 - DNA, 891 bp, Zea mays
  Peptide Sequence Number=SeqID_56857
atggctacgaagcttgtggttctcggtatcccctgggatgttgacactgaagggttacgagagtacatggccaagtttggacccctagacgattgtgtcgtcatgaagaatgttcttgattgcgagcatgttcttgggagccgtacattagaagtgaaggtagctactccaaaggaagaaatgaaatcacaaggatcaaagaaagctacaaggatattcgttgctcgaattccgcaatcggtggatgagtcgatgtttcgtagacattttgaagcttttggggaaattcttgatctttacatgccaaaggaacatggttcaaaagggcatcgtggaattgggtttatcacgtttcagagtgcagagtctgtggacaacatcatgcaagagtcacatgagcttgatggtacaacagtagttgttgatcgtgcgactcctaaggatgaagatgtcagataccccccgagtaggccatctcagggtggctatggtgcatataacgcatacatttcagctgctaccaggtatgcaactctgggtgcaccaacgctgtatgaccatcctggatcagcttatggaagagggtattatggaccctctcaagcagtgggcaagaagatatttgttggtagacttccacaagaagcaaacacagatgatctaaggcagtactttggcagatttggtcgaatcgtagatgcatatattccaaaggaccccaaaagaagcggccaccgaggttttgggtttgtcaccttcgctgatgatgacacagcggcaccacttgagattgattcagctgctggtgggtacattgatccaatgcatctttacgcagcttatgggttcatgagatctttcgcaggcttctgtggccgtctagattacgat

SEQ ID NO: 15079 - DNA, 150 bp, Zea mays
  Peptide Sequence Number=SeqID_56858
atggttggtttacaggtggcgatgaggaggatggttatgattatgcttatggtaatggttgcccttggtgcaatctatgctcaggtaaagaagaaggcgtcgaggcggatctcccaggaattacaggatgtcgatgagttcgaggattag

SEQ ID NO: 15080 - DNA, 366 bp, Zea mays
  Peptide Sequence Number=SeqID_56859
cgtggtatcagatggactgtgaacagcacaagcatccagccttgaacaagcaacagtggagcatccccatgcggcggaacacaaacgtttctgcattacggctcgccatcatcatcaccagatatccttgcacaccaaaaggtggtgcctccccgagcaatgattcccgtctgacagagaaggccccaggccacaacgccattgtggaatacaacctggcgcctgtgaaacacaacgccgggcgcataaaagcgtataggcagattcatgtcccaagatgccgagctccgcgcccgctttatggcagcttccggacaccaaacccctccatgaatgcaagcgtcaacccaccagggcttgccccag

SEQ ID NO: 15081 - DNA, 1014 bp, Zea mays
  Peptide Sequence Number=SeqID_56860
atggctgctttggtggccacggctgcagtgctgcacggctgcaccacagtcctgctccgatccaagcgcgtgcgagccatcggcgtgtgctacggcgtgctaggcagcggcctcccgtccaagagcgacgtggtgcagctctacaagtccaacggcatcgccagcatgcgcttctacttcgccgaccaggacctcctcacggcgctgcgcggctcgggcgtcgcgctcgccctcgacgtcggcaacggcaaggtcggcgagctcgccgccgacccggccagcgccgcgtcctgggtccgcgacaacgtgcaggcctactacccggacgtggacatcaggtacgtcgtggtcgggaacgaggtcgtccccggcgccgcgtcggtgctgcaggccatgcggaacgtgcacgcggcgctcgcgtcggccggcctcgccggcagcgtcaaggtgtccacggcggtcaagatggacgcggtcgacgactcctcgccgccgtcccgcggcgtgttcagggaccccgccgcgatgtcgcccatcgcgcagttcctggccgccaacggcgcgccgctgctcgccaacgtctacccctacttcgcgtaccagtacagcgacggcggcatcgacctcgactacgcgctgttccagcccagctccacgacggtgacggaccccgccaacgggctggtgtacacgaacctcttcgacgcgatggtggacgccgtccgcgccgcgctggacaaggccggcgcaggcggcgtcgacgtcgtggtgtcggagaccgggtggccgtccgccgacgggaacggcgccaccctggacaacgcgcggacgtataaccagaaccttatcgaccatgccagtaagggcacgccgaggaagccggggcccatggaggtgtacgtgttcgccatgttcaacgaggaccagaaagacggggaccctacggagaagaagtttgggctctttaatccggacaagacaccagtttaccctattaatttcgcaggaaattga

SEQ ID NO: 15082 - DNA, 351 bp, Zea mays
  Peptide Sequence Number=SeqID_56861
atggcgccccgcatactctgtgacgacggtggctctcagccccctttacggaagcaagaggacgtcagcaaggactcgaccgctccgacagctgtccctccgccaagctccatcgctcctccgacggccacgacatcacaccagctgggtgccaaaatctctccgactgccacaacggcattgctagaaacaggagaaacaattatggagaagttggctatgtacagccaaaagactgctcggtctgggtgcaccggactgtccggtggtgcaccggacagtgtccggtgcgccaggctggctctggcgaactggctgctctcgggtttcgtcggcggcgtacggctataa

SEQ ID NO: 15083 - DNA, 885 bp, Zea mays
  Peptide Sequence Number=SeqID_56862
atgcttcggcgccacttccacagggcccggccgcccgcggagggtggcaaggccagcgacgacgacaagaaggaagatcaccaggcaggagagttccccgaggtctgcgactgcttcatgatctatggtgggcaagcggcgaacgcctcagctcggcaccgcaagcaacagtgccgggaggtctgttcggtgaaggtggtggcgccagtctacctagactggtccgacaagcccatcaccttcgaccaagccgaccacctcgaccatgtgcctagcctggggaaatacccgctcgtcgtcgaccccatcatcggcgacgtcaggctcaccaaggtcctcatggacggaggcagcagcctcaacatcatctacgccgagaccctcgggctcctgcatgtcgatctgtcctccatccgggcaggcgctgcgcccttccatgggatcattcccgggaagcgcgtccagcccctcggacagctcgacctttccgtctgcttcggaacacactccaatttccgaagggagaccctgacgttcgaggtggtcgggttccgaggaacctaccacgcggtactggggaggccatgctacgcgaagttcatggccatccccaactacacctacctaaagctcaagatgccgggccccaacggggtcatcaccgtcggccccacgtacaaacacgcgttcgaatgcgacgtggagtgcgtggagtacgccgaggccctcatcgccgacctggagagcctctcgaaggaggtgccagacgtgaagcgtcatgccggcaaaattgagccagcggagacggttaagtccgtccccctcgaccccagcagtgacgcctccaagcaagtccggatcggctccgagctcggccccaaatag

SEQ ID NO: 15084 - DNA, 111 bp, Zea mays
  Peptide Sequence Number=SeqID_56863
atggcaagctgcgccaccattgagaactatgtcacctatatagacgtagaaaacatggtaatgcagcaagtacacataatatttagagtaaatgtacaaagcaatggatag

SEQ ID NO: 15085 - DNA, 165 bp, Zea mays
  Peptide Sequence Number=SeqID_56864
atggcgccgccgcgaactagatcctgtcgtgccactggatttaatgtgtcaagtgatgaaggagatccgttggacctcgcctcggggcacttggacgctggctggaagaacttcggcgagtttccgtcgcggtgcggggtcggcgccgccgcgtcctcgtgctga

SEQ ID NO: 15086 - DNA, 636 bp, Zea mays
  Peptide Sequence Number=SeqID_56865
atgggggcacagggagcgatattccttagccttgcgctaattgcaattacaggacaacaagaatatgatgacacaaccataatgaaaggttgcttgggctccaactcatccatatggccggctaggggggaagctctgcctcgcccgaccccagagctcgggctcaacctcgacgccggacgatggactccgcctcgcccgaccccagggctcggacctagcctcgacctcggaagacggactccacctcgctcgaccctagggctcggacctagcctcgactccgtaaggcggtctccgcctcgcctgaccccagggctcggactcaacctcgacctcggaagacggactccgcctcgtccgaccccagggctcggactcaacctcgactccggaaggtggtctccgcctcgcctgaccccagggctcggactcaacctcgacctcggacgacgatctccgcctcgcccgacccccgggctcggactcaacctcgaccctggacgacggtgtccgcctcgcccaacccccgggcccagactcagcctcgacctcggaggagcctccgccccgcccgacctcgggctcggaccgaccacgtcacagaggggccatcattaccctacccctagctag

SEQ ID NO: 15087 - DNA, 594 bp, Zea mays
  Peptide Sequence Number=SeqID_56866
atggccagccggtacaactacaaacgcactgtggtctgtgggctgttgctgcctccagcctccccctcatcagctgctccaagcaccgcatcctcacctccggccgacaccgccgtcgcaaggtcccgcagcagggctctctctccgcccacggcccaccgctccgtctccagcatgaagcgcctgctccggcgcctctcccgcgtggccgcggccgacgcctgcgccgccgccgccgcgtacgagcctctccggccggacgccgcggcgcccgggaaggcggccgcgctcgcggccggcgcgcggcggctgggcggcggcgcgcgcgtgccggagggccacgtgcccgtgtgcgtcggcgaggagggcggccccgtggagcgctacgccgtgcgcgccgagctcctcggccgcccggccttcgccgcgctgctccggcgcgccgcgcaggagtacgggtacggacaccccggcgcgctccgcatcccctgccccgtcgccgacttccgcgacctcctcctccagctctcctccgcctgcgccgccgcggaccaccccgacgacgacgctgcggcgctctgctactactcctag

SEQ ID NO: 15088 - DNA, 405 bp, Zea mays
  Peptide Sequence Number=SeqID_56867
atggccagggcctgctgctgtgcagtgcagtgcaggcagacgccgcgccacggccacggccacggccaccgcgcgtcgacatgtcacgagccatgtggtggcgccggctgcaacgtgccctgccaggaggcgcagccgatcagcgacgacagcaacacggcatggcgcctttgcttcccggccggcgtttgggcaccccgacacgcgtgccgcacatgcttctgcccgcccgctcgctcgctcgctcttggcttcaagtcaagttcctccgagctccaggcgtgcatgcgaatgcgagcgacgcaggtccttatcgccgccgcccgccagctgcgtccatcatctcgctgcgttttctgtggcgttcggggcctctacatcgccggcgcgcacatttttctctga

SEQ ID NO: 15089 - DNA, 285 bp, Zea mays
  Peptide Sequence Number=SeqID_56868
atgagggagctgatgcggcgcctgagcttctcggaccgcgcgggcggcggcggcgtgccccgcgggtgcgtcccggtgctggtgtgcgacggcggcggcgagtccgagcggttcgtggtgcgcgtggaggcgctgcgccacccgtcgttcgcggcgctgctggagatggcggcgcaggagttcggctacaagcaggaaggcgtcctccgcgtcccctgcgacgtccgccacttcaaggaggtcgtcctcgccgccgcctcctcgccgcgctctcggaaccgatga

SEQ ID NO: 15090 - DNA, 411 bp, Zea mays
  Peptide Sequence Number=SeqID_56869
atgggggcgtatggcatgccatcagccaccaacaatccagatgcctctggtcagtccttcagcgaagcgttgaagagttcgaggaagcatctgttgcagtacgatgccttcgaatctgcagacggtggtccaggtggtaagggcgcaaagaagaaaacgaaaaaaagcaaggaacacaggatcggcggaggcggccagtgccatgtcgctgcggggatgatgcggcacggcaagggcggcaagtgtcgcgcgctgtgttgcggcgcgtcccggctcagcgtgtcctcgtcggcgtcgtgctcgattttgtcgtctagggagcaaccgagcagtggccggaggaatccagctccatcctatgcggcggcgaccattccaatgctccctatccaactcctctccagtggctga

SEQ ID NO: 15091 - DNA, 318 bp, Zea mays
  Peptide Sequence Number=SeqID_56870
atgagggcctgtgctggacacccaagcatgtctccaaggccttccgcgatggcacccgagaaaaaacagattctggaagcacttacaacaaagaattgccgagaggacttttcgcaggaatcattagagacacttggggattctattttcaactatattacagcccaacacttttttggcaaatacaaaaatcagcatgaaggcgcgctgaccaagatgaataaaaacgtgatctcgaatgcagctttatgccagcttgcttgcagtaacagccttgcagtagtcttacctaacctggcttcttttttgaaatcttaa

SEQ ID NO: 15092 - DNA, 369 bp, Zea mays
  Peptide Sequence Number=SeqID_56871
atggcggagcgctggaagagcgtctcctccgtgccgaaggccgagaacgcgcggccgacgggacgatggccggcggcgaagcccaaggcgtcggacctgctcgcccatagccttgactgcagcctcgaccgcaaggactccatcctcgccgccatccacctcctccgccgctctatggccttcgactccacgacatctctctcgtcgtccgacccagccgctccggcgcttcacgcgccctatgacaccgacatcatatcctttgccgcacgctacatgcaagctctagaactgcaattaggtgatttcgcaactccgaaggaggcggctgcagggaccggcacgcacaccgggcacgtcaaatcgtaa

SEQ ID NO: 15093 - DNA, 210 bp, Zea mays
  Peptide Sequence Number=SeqID_56872
atggcacaccacagcggcgcggcgcggcgcggcgggcgagccatggccatgaatcgatcgggtgtccagatccggtggagggaggtccggccaggcagagccgcagccagcctgcgttgcggctgcttgttcgaagtgatcgatcagccggaggatgccgcggagtatcgatccgtcggacaattctacaccgctagttctcagacttaa

SEQ ID NO: 15094 - DNA, 492 bp, Zea mays
  Peptide Sequence Number=SeqID_56873
atgggttgctcctcctccgtgccagctagaaatactggagggctgaacactatcagcaacgatagctctccagacgccagttcaaaggacttgcgtgctaagttggtattgctgggagactcaggtgttgggaaaagttgcattgttcttcgttttgttcgtggtcagtttgatcctacttccaaggtaactgttggcgcatcttttttatcacaaacattggcattggaggattcaacaatagtgaagtttgaaatttgggatactgctgggcaagagagaggagctgctgctgcaattgttgtctatgatataacaagtccggaatcatttagcaaagcacagtattgggtaaaggaacttcagaagcatggtagtcctggtattgtaatggttttggttggtaataaggctgatctacatgataatcgaagtgtatcctcgcaggatgcgcaggactacgcagagaagaaacaatatgtttttcattga

SEQ ID NO: 15095 - DNA, 1053 bp, Zea mays
  Peptide Sequence Number=SeqID_56874
atgggtgcgggaaagggaggagacggcgaggaggccgcgcagcccgtcgtgctgaagctggacctgcattgcgccggctgcgcgcacaaggtcaagaaggccatcaggcgcgtgcctggtgtcgggtcgatcgtgacggacgtcgcggcgaacagggtcgtcgtggcgggcacggccgacgcgggcgcgctcaaggcgcggctcgaggccaagaccaacaagcccgtggaggtcgtctctgccggcggcgtccccccaaagccccccgccgctgagccccaacaggacgctggcgccggcgagaagaagggggacaagggcgcgaaccccaaggaggaggctaaggagcaacaggcggcggaggaggagaagaagaaacccaaggaggagacggtgctgctcaagatccgcctccactgcgacggctgcggcgaccgcatcaggcgacgcatctacaagttcaaaggcgtgaaggacgtggtgctggagggcaatgccaaggacgaggtgaaggtcacgggcaccatggacgtcccggacatgctctcgtacctcaaggagaagctcaaccgcgacgtggaggccgtggcgcccgccaagaaagacggcgatggcaaggacgaggacaagaaggacggcggcggcggcagcggcggcggcgaagacaagaacaagggcgcgggcgcggcgggcggcgacgacaagaaagacaagggcataggggccgacgacgtgccggtggccccgtccacggcggccgccgcggctttgatggccgcgcctgcggtggcgagcacgtaccgcgtggcgccgccgtacccgtacgggtacgtggcggcgtaccagcagcagcccccgccccccgccagctactacccgtacccgtcgtactacggcaatggcgacggcgtgggcctcgccaaccccgcccaccactacccgcagccgcagctggcgtacccgccgtacccgtaccgcttcgacgtggcgccgccgccgccgccgccgcagctcttcagcgacgagaaccccaacgcctgctccgtgatgtga

SEQ ID NO: 15096 - DNA, 492 bp, Zea mays
  Peptide Sequence Number=SeqID_56875
atggggtgcaccgaaggtgcacccaatgggtgtagcccccgaccttcaagtggatttttgaggataatccactcgaagggcaccaagcgcaagcgcgagccgactcctccgtcggacgagttcggtgactcggaatactcagaggaggagttctcctctgagtccgagggatccccggcccccgtctctcccccggcgtcgtccgatgactcggacgactcccaggggatagccgcggaggtctggacgtacatccgagccgtcgagcgcgccgggctcgaaggctcgaatgagtcggagtactcctcggatgaggaggactcggacggcggcgacgagggtgaagacgacgacgacgacgacgacgacgacgatggcgacgacagtggcaggggcggcggcgacggcagcagggacagcaccaagggcggcggcggcggcagggacagcaccaagggcggcggcggcggcaggggcagggccagtggctag

SEQ ID NO: 15097 - DNA, 258 bp, Zea mays
  Peptide Sequence Number=SeqID_56876
atgtcttggcgtgagggtgggcgctcgagcaaagagataaagagtgcgaactgtgaaggggaagggatccttggtgagctggcggggtcttgggtggagaaaatcaaaagatatgacttggctacgatggatcaggttgctagtgtgaaggacaaatcaagaggctttgaagtgacagaccacatggttgtgaagcttgagcaaggaccttggcgtcgatggaccaagtgcaatggtgaagagcaagcaaagtcgtga

SEQ ID NO: 15098 - DNA, 330 bp, Zea mays
  Peptide Sequence Number=SeqID_56877
atgaggaccactgataagcccttgataatgttcatgcctcatggctgtcactcacatcaagctgcgcgcggcaaggcgctagagcagtccgacaaggtggagatgccatgtcttgttcctccagcatatgctgcagctctggatgagaagtcctgggtgagcctggctgctttcggcgtgtacaataaatcacgcaaccactgcagcttcttttctacgcctttatgcacacacacaatgagctgtgtccaagatccgtggccacgacacggagggcgatggcacaaaaatacacacatcatgcaggactatgccatctgcacggcctga

SEQ ID NO: 15099 - DNA, 2658 bp, Zea mays
  Peptide Sequence Number=SeqID_56878
atggcgagccaaggcgagccgtcttcctccgatccgaaggggaagaaggattactctacggcgatcctggagaggaagaagtcgccgaaccggctggtggtcgacgaggccaccaatgatgacaactccgtcgtcgctctgcacccggacaccatggagaggctccagctcttccgcggtgacactgtcttgatcaagggtaagaagagaaaggacactgtctgcattgtgcttgcagatgagacatgtgaggagccaaaggtccggatgaacaagattgtcaggaagaacttgagggtacggcttggtgatgttgtatctgtccatcaatgcccagatgtcaaatacgggaagcgtgtgcacatacttccaattgatgacaccattgaaggcatcactggcaatttgtttgatgcctttctaaaaccatacttccttgaagcctatcgtcctttgaggaaaggagaccttttcctagtcaggggtggcatgagaagtgtagaattcaaagtcatagagactgatcctgcagagtattgtatcgttgcaccagatacagaaatattttgtgagggtgagcctattaagagggaggacgaggaaagactcgatgaggttggctatgacgatgttggtggagttagaaagcagatggcccaaatcagggaactggttgaacttccattgcgtcatccccagcttttcaagtctattggtgtgaaaccaccaaagggcatattgctgtttgggcctcctggctccggcaagacccttattgctagagctgtagctaatgagacaggtgctttcttctttttgatcaatggaccagaaatcatgtcaaagctagcaggagaaagtgaaagcaatctcagaaaggcatttgaagaagctgagaaaaatgcaccttccatcatttttattgatgagatagattccatagcacctaagagagagaagacccatggagaagttgaaaggcgtattgtttcacagctcttgactcttatggatgggctcaagtctcgtgcacatgtgattgttatgggtgccaccaaccgtccaaacagtatcgatcctgctcttagaaggtttggtaggtttgatcgcgagattgatattggtgttccagatgaagttggccgccttgaggttcttcggattcacacgaaaaacatgaagctggctgaagatgttgacttggagctcattgcgaaggatacccatgggtatgttggtgctgatcttgctgccctttgtactgaagctgctcttcaatgcattcgtgagaagatggatattattgaccttgaggatgagaccatagatgctgagatactgaactctatggctgtctcaaatgaccatttcaagactgcacttgggacaagcaacccatctgctctgcgtgaaactgttgttgaagtcccaaatgtctcttgggaagatattggtggtctggaaaatgttaagagggagctacaggagactgttcaatatccagtggagcatccagataaatttgaaaagtttggcatgtctccttcgaagggtgttttgttttatggccctcctggctgtggcaagactctgttggccaaggcaatcgctaatgaatgccaggctaacttcatcagtgtgaagggtcctgaactgctcaccatgtggtttggtgagagcgaggccaatgtccgtgagatttttgacaaggctaggcagtctgctccgtgtgtcctcttctttgatgagctcgactccattgctactcagagaggaagcagtgttggtgacgcgggcggtgctgctgacagggtgttgaaccagctgcttactgagatggatggcatgaatgccaagaagacggttttcattatcggcgcgactaacagaccagatatcattgaccctgccttgctgaggccaggacgcctcgatcagcttatctacattcctctgcccgatgagcagtccaggcttcagatcttcaaagcctgcctcaggaagtctcctgtggctaaggacgttgacttgcatgctcttgccaagtacacccagggtttcagtggagcagatatcaccgagatctgccagcgtgcgtgcaagtatgccatcagggagaacatcgagaaggacatcgagcgggagaggcgcaggaaggacaaccctgaggccatggaggaagacgaggtggacgacattgccgagatcatggctgcccacttcgaggagtccatgaagtacgcccgccgcagtgtcagtgatgccgacatccgcaagtaccaggccttcgcccagacactccagcagtcccgtgggtttggcagcgagttccggttctccgaccaaccgacggcagctgcccgacgatggaattctaaacgggcaacaacaagggccaattccctatatgccctcagtggcacacaagggatgagtataaaatctgatggcataccaggaattttctccaacaacaaagcaaaagttgcctcgccaacccgcgagtcacgggtgtctcttcaccaagtcactagttgccacgtcgcaggagagaaagtgagggggagggggtatatttgccaattgccacaccgtcacctagggatggcaacgggtttaaaatccgcgggtacagagattacaaacccgtacccgtga

SEQ ID NO: 15100 - DNA, 423 bp, Zea mays
  Peptide Sequence Number=SeqID_56879
atgaccttctgtgggtttcacccactggggatgctgacacaccccctcattctctttcccgctgagcggaaggatgatcggatgtggcgtgataggctggtggagaaggatttccagatcgagcagacggacactcgcacccgcgagctcaaggagcaagtggaggtccaggacaacaccattgaagtcctggagaaccagctccacgacttgcagattgagctagatgaggcaaatgcctacatggagatgcatcatcaagaaatgcagcagggcatggaggtggacggggacatcaaggaggaggaggaccccgaggagctagagccaacatctagcttggacaccgccaacttagctcactctggtggaccccgtcacttgagtctagtgcaacctcagttgctcgttgatcagttgtga

SEQ ID NO: 15101 - DNA, 513 bp, Zea mays
  Peptide Sequence Number=SeqID_56880
atggcaaaggcctggaagacgaacgggacgtccgacgacggcgaagacgatgacgaatacggggagaaggtgcatgctcccacgccctctgccaagaatggagtggcacggaggcggaggcatgaggggagagagaaaagaagcaggatggcgaacgaggtggaggttactgaggcgaggaccatcattatcgtgcggagaagagaggtcgtcctcgggaattatatccagatgtatctagtaaggatccttctgttcctcctgatcttcctgcgcctaactgtgactgtggccgccgaagaagtagaggttgcttattacaagcaaagtgtggctgaggctgatgaccagctattctcccaagctgcagatgaagcagaagccaattatcacaagagaaaggcagaaaagtgtgatgcagggcaatgctgcaagtggaacgagattgtcgttgaggattgcgcgacggatgactctgatgatgagttacttatagattgtggttctgattga

SEQ ID NO: 15102 - DNA, 1506 bp, Zea mays
  Peptide Sequence Number=SeqID_56881
atgaccgcgctgccctccactgtcgttttcctggcggcctcgattactctagctttgcagcaggctcgctcgcagtacgggagtggcaagaacattggctaccagggtcctagtgggcaaccatttcaaggatctctatttgccaattccatggccattgagtgttgccagatggaagatcagggtaaattagggtttggtctgagtcattcagatgatagaatattggatgatttttgtggacaaattgaagagatgcccttaaatgctgacaaccctgaagaagtttctgatatatctgacagtagagacgataattcagatgtgcttcatgttgatattgaagaccgtgaatctagccctgttaattgggagatagatgcttcagaaactcaaactactattcctggaagtagtgaggtgcaaaatgaccatgcaggaaagaggacctctactgtggatgatagctcatcgtcttgttcatctgactcagtgccttcagttactatgaatggatcatataaaggaggtgcctggacaagcgtcagatcctcatccaataagtatatctttcaatgcctctggccactcaaaggaaagacacgaaccatcgagttccccgccgaggaggacgaagacgaggacgccgaccggttagcacgctctcaggcgccgggggcggatggggtaattgcctggcagcgggttgtcgtgctgaagcccgacccgccgaaccctaaccctagcgctgatggggaggggatcggaaggcggcgtccgggcaggatgccgccgtcgccgcggcgcttgcgacgacctcgtctttccaggcggcgtacctccacctgcaggccgcccacacgacgttcctgccggatgcggacgccgccgctgtgtcgcacctccggaggctgtcggagctcaagcggatcgcgaggagcgggccagtgggcccgcccgtgccggacggtggttgggccctcacggcgcacctcgaggtccaagtgcgcgagaaccaggcactgctgcgggtcgttcgacgccgtggtgaaccgcctacaggccgcgctcgacgtcaaggccgccgcgctgtggctggacctcgaggcgctcgacgacgccaacgcgcggctcgtgggctgcctcgaccgcacgctcgcgcctccatcggacggctccgcaatccgaatcacgcacgcaacctcggcggctccgcgccgtgaatccgcgccgaatcagaggcctaaatggtggatcccgctgaagaaggatccgttgtggtgcggcacccgatgtggccgtgcggttcgcggcagagcggtcgcagcgggctttgcgggcgtgcggagcggtcaaggcgggcatgcgagcgcttcgcggcgggcgtgcagagcggtcaaggcgggcatgcgagcgcttcgcggcgggcatgcggagcggtcgcggcggggtagggaggcgggggcagtctacaataagctcttaatagttagtagagataaataa

SEQ ID NO: 15103 - DNA, 225 bp, Zea mays
  Peptide Sequence Number=SeqID_56882
atgtccttcaaaccgaagcttagaaagcctgagaaactagcaagcgttgttcctacagttggaccttctgtagctggacagagctcctcgcgttcgacgtgggatacttttgatgatgtggacgatgatgatgacgaagacgatgatgatgatgacgacgatgatgacgaccagggggaggagaatgtcgtggccacaggtcacgacattattggaccgtcctag

SEQ ID NO: 15104 - DNA, 852 bp, Zea mays
  Peptide Sequence Number=SeqID_56883
atgtggtctgtggtgctgagtctacaactactacaatgcatgcgcagcgcaggtcggccgaactccgaagtggctaggccggctgacgtcacgggcagggccagcgcgcgtccccaagccggaaccggccggacggacacgtcgggacggtggcccgccacatggcctgcacatgatcgaaagccccgcgcggtcgccatcatccgatggcgatcggacgaccgggatggacggggccgaggccgaggccgaggccgaggccgcgtccccttcgcgctgcagcagccagcagggtccctgtcctcccgccgggatctgacggccaggaggcgtcgaggcccggatgccaaggagtggcggtggcctggctgcgagcgtcgcatgcagacgcagacgcggatcggcagatgcagcgcagcgcagggcgggggaccggctgggccggcggtcgccgtcgctactcgcaaccatggtggggacccgccggagcgtgatatgccgggactggccgactgggatgagggacgggtgtggaggcggccaactagtcgccacttgtccggttgtatacatgctgctcagggtccagacaaaatcatctgcatgccaagggtttttgtaaggcacattatctgggcctgggcgtgggcacagctagctacagctatcacatcctcttctcatctcgttgttctgatggctcggtttctggcgccttttggtgggcgattgattggagcatcatcatcgaatgtcatgtttacactcctgagacttgacggtagcggctggtgctcgccgatatgcttcctaggagtacgagggtacaaccgattctttttcgaacaatag

SEQ ID NO: 15105 - DNA, 240 bp, Zea mays
  Peptide Sequence Number=SeqID_56884
atgcacattgaagcccgcaaagacgccatcctcaattccttgttcctactctgtgtagtcgcaggtgaacagtacgacgtctgtctgattttggattatggatgggaggagatgggatcttatatctggattagattagaggctcaagatttttgggagaaccttgaagttcctagcatgccacatcattctgaggatatgggttgggatttcgaagaatggtgggatcgtaccatgtga

SEQ ID NO: 15106 - DNA, 288 bp, Zea mays
  Peptide Sequence Number=SeqID_56885
atggctcaccggagttactccggcccgcccgaggctttctcaccgccgttctcccctcccttccccgccattgagttcaccgtggcgccctcttcctctctgcctaactccggcgatcccgaaccccccctagctcacgcctgcctcaactccgacgacctcaccaccgcggagaggagcagcgccgcccgcagtcattcaaccccctcggtctggtcccctccgtctgattcagatcgaacggcccagatcgcggttagattcacccgataccccttcgcgcggtag

SEQ ID NO: 15107 - DNA, 285 bp, Zea mays
  Peptide Sequence Number=SeqID_56886
atgaccaacgctctagggaagcttaagcgcaggtgtggcagcctagaggctggtgcccaggggcagagagatggacagctgacgcctgcatttccaaaaattgggttggacagccaccagccagtcacaaccgcacaagatgcaaaagccattagtggctccatgatgccacaatgcccctcggccgccgcacaagttcactatcctgcccccgcccgcaaggccacaagatccaagtggacgcccaccctgccacagtgcccctcccccacccgcaagatgtag

SEQ ID NO: 15108 - DNA, 1716 bp, Zea mays
  Peptide Sequence Number=SeqID_56887
atgtacctggaagacctgagcaacaaggacacgcgactacctcaccaccagcccagatctgagtcctcactctgtctcttcctcagtcccggcatcagcgctcaaaccctaacacgccacgcgatcccgatgcgcaggggtctgggcagcgaggcatcgttgcgccggcggcgcgggccggcgcggctttgggtggcagtggcggcgctggtggtcggcaccgtgtgcctcttctcctcctcttcggtcggcctgttgggcgcctcttacagggtccagattcaaatggttggagagcatcttcatgcaccacgcacctactggcctcccccaccaactgaatctgagagcaatggctacttgcgcgtccggtgcaatggtggcttgaaccaacaacgtagtgcaatatgtaatgctgttgttgctgcacggatcatgaatgctacactggtgctgccagaattagacacaaattcattctggcatgatgaaagtgagagcgagaagaggaagttctgggaagacttagatgacatggatccaagagttagaggtcaaagaagccttaaagaggatgaaagtgtgcaagatgatgggcccggatgtggctttgtaggtatttatgatgttccccacttcatcaagacactgaaatatgacgtccgaattgttatgagcattcctgaaatcactacaaatggaaagaccaagaagctcaaaggccagcagcttcggccaccaagagatgcaccggtatcttggtatgcaactgatgctttggagacgatgaagaagtatggagctatatatttaagtccattttcacaccgtttggcagaagatattgataatccagagctccagagattgagatgcagagtgaattaccatgcactacgattcaagccaaatatcatgaaaacaagcagtgagatagtgaacaagctccgctcagaaggccatttcatgtcaattcatcttcgatttgagttggatatgcttgcatttgcaggggaagaacattttgcagaaaaggaacttatccccatgaaaatcaggctcaaaggaaagtgccctttaactccagaagaggtaggttttattctacgtgccatgggatttgacaatagaacacgcatttaccttgcctctggcgagctctttggagggaaacgtttcatgaagccattcaagaccatgtttccacgcttagagaaccacagcacagttggacctggaaagctggaagagaatacccaagggctagcaggatcagcagttgactacatggtttgcctcctgtctgacattttcatgcccacatatgatggcccaagcaactttgcaaacaacctcatgggccaccgtatgtactacggtttccggaccacaatcacgccgaacagaaaggctcttgccccgatactcatcgacaggatggaaggccgccacattggctttgagagaatcaggagggtgatgtccaacacccattttggtgccccccacaagcgcgtccatccagagtctttctacacgaactcatggcctgagtgcttctgccagacggatgccaagaaccatgcagaccggtgtccccctgataacataaatgacgttctggaaagccagttccagagcgaagaagaaatggaagaagcaagagcctctaatcagactgacccatccagccaaatagaagagctgacgatttaa

SEQ ID NO: 15109 - DNA, 270 bp, Zea mays
  Peptide Sequence Number=SeqID_56888
atggagttcagctttaacgtgtgtatacatatctgggatgctatcttgggtgatccagaaggcccatcggacacattgatgaggatatgctgtgccatgctcatcctagtccgaaagcgtctcttagctggagacttcaccgccaatgtccagctgctgcaacattacccagccaccaacatcgatcacctcctccacatcgccaaccggttgagaggaactcttgtagtacctgggaaagggaagaatggatgcattcctgaattgtga

SEQ ID NO: 15110 - DNA, 669 bp, Zea mays
  Peptide Sequence Number=SeqID_56889
atgaagaagaattcatataaggtcgcctcaccggggtccaccgtggcggtcagggagtatggtgggcagcggggcggagcggtggaggaggtcaagctcaacaccggcaatgtgtttgcggcgctcgattccctcaagaaggagaagaagggcgacaaaggcaaggcggccgggtcctcctccaggaagaagcacggtgagggggccgcgcagcggcaagagccatcgcagaaggagatgttctgggcgcccgcgccacttaccaccaagtcctgggtggacgtcgaggacgacgacgactactgcttcaccaccacctcgtcgcggcgccctgtctggggcactgctggtgagcccgccaaggaagaggatgacgtcgatgatgttgtgcgcgccgcccttcaggaggaggtcaacccagtgaacttcctctcgggcctcgccatcgggttcctcctaggcctcctcctagtttgtcaaggagagccttttcaattgcaccagatgccccttaaagctggtccccctgacatcctcctccactggtcgcccacgacatcctcgccctccccatcgcgctcgccccgctccccccgcgacatcctcctccaccgtgccatggctgcccccgacatcctcaccctccctgtcatgcccgccccgctctga

SEQ ID NO: 15111 - DNA, 234 bp, Zea mays
  Peptide Sequence Number=SeqID_56890
atgactatgctggtagactacacagctgttgggggtctgcttcatcgccgaaggtcctttacaaaggacataaatgtaaatccacacagggcggcggtgaagtctctccaggtggctcgactgtcctgtcaccgtgcagcacagtggacgctccgcaaggcgagagggcaggaaagggatcaccgacttatgtggagtgcatctaagacggaccatctacaaaagatgtcgtaa

SEQ ID NO: 15112 - DNA, 657 bp, Zea mays
  Peptide Sequence Number=SeqID_56891
atggttctcttggacattctgaggtaccatctattattgttagcttctgtctgcaaccaatcacctaaaatggaaatgattgactcattgtttaagccacgagaagctaaagatgatggtctgatcagggacggtgttagcgaaagtcaatttaatcaggtgctaaacattgagttgcaacaaatcatcgaggcttgcaaatttcttgatgagaaatggaatcccaagttcacgttgattattgaccagaagaaacatcacactaaatttttcattcctagaaagccagataatgttccacctgtgattccctcacggttgtgtccttcacaaaggaagggtgtgaagccacactattatcaagcaacaaaaccagagttgtgtgacacaattataacaaaggaatcatcggccattagcacactaaaattggtgcatacagataacacacctgcaaagtgggatcatttgaacatagttcagcaaagggctgacgcacttgagtcaatcctcgagctctacgcaaagcttctggaggagaggctcgatgagctcgccgacgtttttcgaccatttggtgagagagtcgtgtcatccagagagatgagcatacaacgatgtctgaccatgagcctgatgactccaccgaagttttga

SEQ ID NO: 15113 - DNA, 810 bp, Zea mays
  Peptide Sequence Number=SeqID_56892
atgccctctcctcctccccctcatcgatcgtttcacgccgccgccaccgcaacccttgcagccccaatcccccacgacaaccatggccgacgcgtaggagtccctctcctcctctgggacctctccaccgtcctcaccacccgtcacttcgtcgaccacgagaagaacgttctctccgtcgtcttctcagtcgacaaccgccagatcgtctccgcgtcccgtgaaaagaccatcaagctctggaacactctcggcgagcgcaagtttcctgtacctcatgacctgttcaatttagcgtcagccccaactgctccttactcccaccacgttcttgttaatctgataaatccatatccagcgttatgtttgaaaaaggctcttggagaatcagttctgctgggtgcaatttatagtcgcacaatatggttactataccttgatagcagggaatcatcaatcaggaagcgaaggcaacaactaattaagatggttaatcttaacaatatggcactagacacttcgacaaactctgatctgttccatcacatactgaatgaacttcaagcccctcttattggcactttccaaatgtatgaacctggaatagcatgccctgtgctatctgcaaccgtgaaggggcaaggctacgctttaccagccgatgtccagtatgtcgatgtacaatgggaggtacctgtggttcttccacttcatggttgtctggcccatgagcttacttgctcggtgaacttgacaggaagagaactcatctcaagatcatacccttttaagaattgcttggaagcttaa

SEQ ID NO: 15114 - DNA, 120 bp, Zea mays
  Peptide Sequence Number=SeqID_56893
atggcggcggccggccggaattggctcgtcggggtgcggcgagggctgatcctcgttgtggaccttgatctgcgaagaaatagaagtttaaggacctttccgggaaataagaaattttga

SEQ ID NO: 15115 - DNA, 306 bp, Zea mays
  Peptide Sequence Number=SeqID_56894
atgggcgcaggggcgtgcggcttctggcggctccaggcacgggcactactcggcgtcgggggttgcagagcgtggagcgtggccgggtcctgggcggtcctcctggcggctcggtcggtcaggtcacgcggggaagggcgcctggcggtcggtgtcgcagctcggggcatgccagagcgcgggcgctgggctccgtgggcgcggggagagagaagcgaggaagagagagaacgggaggagggtggccggtgttacaaatctacccgtcttaaaaagaatctcgtcctcgagattaaggaaggctag

SEQ ID NO: 15116 - DNA, 321 bp, Zea mays
  Peptide Sequence Number=SeqID_56895
atgaccagggaaatccatggtcgccagatctgcacctgcttattcctctctagtccccagcgagagaatcaggtgaaacgtgaagagttgcttgagtatgcccaaagtggtattaatggagaaatatcagaaatagctgaaattgaagcagcatcaacgggtgaagctgctcggcttagagatgctctccggcgtgctccacccggcgctgttcggcaacctcaccatccttttgaacgccccaaccaccaaaatggtcgttgtggaaggctgctgtcgtatggcgcaccggacagtccggattacacagacctgatttga

SEQ ID NO: 15117 - DNA, 351 bp, Zea mays
  Peptide Sequence Number=SeqID_56896
atgaagaaatcatatgaatttgtgtacaactggcatcctacaagttctttcggtcagtgcaaatactatttcgtcaaggaggtggtcaagggcatcgacgagagcgacctccaaggctccacgagacgtggatcaaagtcttcgccatgcacaacgcccacgagcgcatcaccaagctcgagaacatgtgctggcggatctggcacctcacgcgagttcgagcatagtggagaccccaagggtcattttcaggcactgctagctctagcgatggatggtttagagaaaggaaaggctggcactgctggctcaagcgatggagggtttcgagaaaggcaaggttgtgtatga

SEQ ID NO: 15118 - DNA, 309 bp, Zea mays
  Peptide Sequence Number=SeqID_56897
atggccatgatgggttcaacatcggaaaagatgtacctctgccaggtaagtttatataactgcttccgcatttccgtatctcggatgatttgtaatgtctacgtgacgggtgaaacgctcttgggaaagaaattgcccaagggcacatttccctttctggcatcccattccaccctcatggttgtattgttttctcgagtggtcatccagcgaacaggtccttacgaagaggtactcgggaaacaaccggagtcccctaaagtatcacatgtttatcctcataatcaagatagcaccaacgtatcataa

SEQ ID NO: 15119 - DNA, 1602 bp, Zea mays
  Peptide Sequence Number=SeqID_56898
atggataaggagaggaagcagggtttcttcgccgcgctcaaggaggaggtcgtacgggggctgtcgccgtcgaggcgcccgcgggctccgccgccgccgccgccggagaaggtgctggagcagtacctgggcgagcagctcgtcgcgcgctccggcagcctgcgccccggcggggaggctctggcgccgctcatcgaggggcccgacgccgagcgcctcgccgccggcgaccccgacgcggaggactccggccgccgcgaggggttcgggcactgggtccgcggccacctgacgcgcacgccgtccatggcctcctctgccgcaggtggtggtggtggtcccggcgggtcgagcggctcgttccggcggtccgacctccgcctgctcctcggcgtcatgggcgcgccgctcgcgcccatcccgtccaagacggcggagccgctgcccctcctctccatcaagggaacccccattgagtcgtcgtccgcgcagtacatcctgcatcagtacacggcggcgtccggtggctacaagctgctgcagtcggtgcggaacgcgtacgccatgggcaaggtgcggatggtggcgtccgagttcgagacggcgacgcgcgtcgtcaagaaccgcgggcccagcggccgcggcgccgccgccgtggagcagggcggcttcgtgctgtggcagatggctcccgacatgtggtacgtagagctcgccgtcggcggcagcaaggtccatgccggctccaatggccgcctcgtctggcgccacaccccctggctcggcgcccacgccgccaaggggcccgtccgccccctacgccgcgtcctccaggtcccagctgttcttcccacgcctcgtttgatcccttccccgccgacccgagcaaatcaccttacgatctccgcctctttcctttccgtctggcattggcactggcaactggcaatgcagggcctcgatccgctgaccacggccgggctgttcgcggaggcgcgatgcgtgggcgagaagaaggtgaacggcgaggactgcttcatcctgaagctgagcgccgacccgcagacgctgaagctgcgcagcgagggcccggcggagatcatccggcacgtgctgttcggctacttcagccagcgcacggggctgatggtgcagatggaggactcgcacctgacccgcatccagccgcacgccggcggggacgccgtgtactgggagacgaccatcagctcggccctggaggactaccgcgccgtggagggcgtcatggtcgcgcacgcgggccgctccgcggtgaccctgttccggttcggcgaggccgccatgagccacaccaagacgcgcatggaggaggcctggagcatcgaggaggtggcgttcaacgttccgggactgtccgtggactgcttcatcccgccggccgacatccggtcgggctccgtcggcgaggcctgcgagctgccgtcccagccccacggcgagcgcgccaggaccggcgccgccgtgcacccctcgcgcgtggccgccgtggagcgcgccggcactgctgccggcgccggaggccgcggcgagaagaaggtcatgtggagagtgcaagtgtga

SEQ ID NO: 15120 - DNA, 183 bp, Zea mays
  Peptide Sequence Number=SeqID_56899
atggccttgctagaccctcatgagcgcttccagcccgagccgctggaggggcttggcctccagcctctacccgtggcgtcctgcttcatctttcaggcggccatcatcgcctacctccatgggatgtccatggaggcgacactccttcccgcttcttcctccagcattcggggggaaggatga

SEQ ID NO: 15121 - DNA, 279 bp, Zea mays
  Peptide Sequence Number=SeqID_56900
atgaccggcgatgcccgcgccatcgccgcagcaggctgccaccgtgggctcgcgtggccaggccacctggagctgccgccggcccagccaactccttggctatgcgcgcgctccaccagggacggctcggctggccccgccgcgctcggccgacgccggcgagccccggccaggaaaggccgatcccctttccctgtacgttccaaggaagaagacgatggaccaatctgcaaattccagaacagcaggggggcacgtttgtttcagggacctgggtga

SEQ ID NO: 15122 - DNA, 318 bp, Zea mays
  Peptide Sequence Number=SeqID_56901
atggcgttagtgtgctgcaatagaggaatgagggagtcgaggcgagcagaatgcagaggcgaggctagggtagctcagagggtgtgcggcgtgcttttaaaggcgaggcacgagcgggcgttggccgaggattggctgtccatggcggtggccactgccacacgcctggctgcttgctgctcacgctgtctccctgcagcaactgttgaacacgtattggatggctgtttttggcgttttctgtttggattcggacctggatctctgcagaagatttgttccttgatgtatactctacaaatcgtgtacaggacttga

SEQ ID NO: 15123 - DNA, 279 bp, Zea mays
  Peptide Sequence Number=SeqID_56902
atgaccggcgatgcccgcgccatcgccgcagcaggctgccaccgcgggctcgcgtggccaggccacctggagctgccgccggcccagccaactccttggctgtgcgcgcgctccaccagggacggctcggctggccccgccgcgctcggccgacgccggcgagccccggccaggaaaggccgatcccctttccctgtacgttccaaggaagaagacgatggaccaatctgcaaattccagaacagcaggggggcacgtttgtttcagggacctgggtga

SEQ ID NO: 15124 - DNA, 876 bp, Zea mays
  Peptide Sequence Number=SeqID_56903
atggcgtgttcaacgacttccattctgcaggaaccaatgagctggagatcgaagagggacaagggtacggctgcgggagccgccttgcgtggcgtcgtcggtggcttctcgacggcgtcagactcccagtcccaaaggctagccggcaaggtcgccgtcatcaccggcgcggccagcggcatcggcagggcgacggccgccgagttcgtccggaacggcgccaaggtcatcctcgcggacgtgcaggacggcgccggccgcgccgtggccgccgagctcggcccggccgcggaatacgcccgctgcgacgtcacggacgaggcccagatcgccgcggcggtggacctcgccgtggcgcgccacggccgcctggacgtgctgtacagcaacgcgggcgcgccgggcgcctcggcgccggcgccgctgccgtcgctcgacctcgccgacttcgaccgcgtcatggcggtcaacgcgcggtccgcggtggcgtgtctcaagcacgccgcgcgcgtcatggtgccccgcggcgccggctgcgtcctgtacacggggagcactacgggcatgctcggcggcctcgccgcgctgccctacagcctgtccaaggccacggtcatctccgtggtgcgggccgccgcggacgagctggcgcggtcgggggtgcgcgtcaacgccatctcgccgcacgccatcgccacgccgctgctgctccgctccctcgccaggctgcacccaggcgtccccgacgagcagctgaagcgcctggtggagactgggcatgagcgacctccgtggtgcggtgctgcaggtccaggacgtcgcaagggcggccgtctacctggcctccgacgaggccaagttcgtcaccgggcataa

SEQ ID NO: 15125 - DNA, 445 bp, Zea mays
  Peptide Sequence Number=SeqID_56904
gccctcgccgccgcctccatcgccatcccttctcctggccgccgcgtctgggggctgccgctgggatcccccgatcggcccgtgccgcggccgccgcttgttcctcccgctcacgcgctcgtaccccaacgccagccggtctcgctgcctcgttggtggcgcggcctcggcgacgggggcgcaccccaacgcgcgcatgcgcctccacgacgatctcctcaccaacgggtcggcacagtactacacgacgaggctctacatcgggactcccccgcaggagttcgcgctgatcgttgactccgggagcactgtcacctacgtgccctgcgcctcctgcgagcagtgcggcaaccaccagatgttgagattggacaactccgagaacaacgatgaggaaagacccttagcgaaggtgtcactaaactgcgagctcgttgggacgtga

SEQ ID NO: 15126 - DNA, 399 bp, Zea mays
  Peptide Sequence Number=SeqID_56905
atgtcgggggagtgcgcgacgaggcggcgacaaaagagcgggagcgcgaacgcgtgtgacaaggagagtgcggcgttgaagcaggggagcgagggtatcattgagccacggagacggagcttttgtgttgaattggttgatgtgacaagtaaagtgcattctctcaagaaaattcgtggccctgatccaagttataaggatatctgctttgcaggtgctcgaaggaacgtctcaaagctacatgaggtatttccagatgttgacatggtatttggaaatggacagaagctctcacttacacctgaaaattatttattccggcactccaaggttgatggggcttattgtttgggtgtattccaaaatggtaaagatccaacaacactattaggaggttag

SEQ ID NO: 15127 - DNA, 1350 bp, Zea mays
  Peptide Sequence Number=SeqID_56906
atgggcgagacgatctcgttcgcccctcggaaggccatcaagtcccaggtcttggcggactttgtggctgaatgggtcgacacccagctcccgacagctccgatccaaccggaactctggaccatgtttttcgacgggtcgctgatgaagacaggagcaggcgcaggcctgctcttcatctcgcccctcgggaagcacctacgctacgtgctacgcctccacttcccggcgtccaacaatgtggctgagtacgaggctctggtcaacgggttgcgcatcgccatcgagctaggggtccgacgcctcgacgctcgcggtgactcgcaactcgtcatcgaccaagtcatgaagaactcccactgtcgcgacccgaagatggaagcctactgcgatgaggctcggcgcttggaagacaagttctacgggctcgagctcaaccacatcgcccgacgctacaacgagactgcggatgagctggctaaaatagcctcggggcgaacaacggttccctcggacgtcttctcccgagacctgcatcaaccctccgtcaagaccgacgacacgcccaagcccgagaaggcctcggcccagcccgaggcacccttggctcagtccgaggaaccctcggctcggcccgaggcaccctcggctcaacccgaggcaccctcggctcggcctgagataccctcgacccccgagggtgaggcactgcgcatcgaggaggagcgaagcggggtcatgcctaatcgaaaccggcagaccccgtacctgcaatatctccaccgaggagagctacccctcgaccgagccaaagctcggcggttggtgcggcgcgccaagtcgttcgtcttgctgggagacgagaaggagctctaccaccgcagcccctcgggcatcctccagcgatgcatttccatcgccgaaggccaggagctcctacaagagatacactcgggggcttgtggccatcacgcaggacctcgagcccttgttggaaacgccttccgacaaggtttctactggccgacggcggtggccgatgccactagaattgtccgcacctgcgaagggtgtcagttctacgcaagacagacccacctgcccgctcaggctctgcagaccatacccatcacctggctgtttgctgtgtggggtctggacctagtcggccccttgcagaaggcacccgggggctacacgcacctattggtcgccatcgacaaattctccaagtggatcgaggtccgacccctaaacagcatcaggtccgaacaggcggtggcgttcttcaccaacatcatccatccctttggggtcccgaactccatcatcaccgacaacggcacctag

SEQ ID NO: 15128 - DNA, 294 bp, Zea mays
  Peptide Sequence Number=SeqID_56907
atggtcaagagtccggaggaggacggaattgagtggattcatgcgaccctagttaaaccggagttggttcggtttgttgagatacagagggaggttgaagctcaccagtcgggcccacagaggcctgatcagtggggctcgcatggaagtgatcgaccaggttggagcgaagggccgcgcggacggtccgtcgaccacggccggatggtccgcgacctgggagtttgtactggccaagctcaggcctcggacagtccgctatacaaaccacctagaacacatggtccctactga

SEQ ID NO: 15129 - DNA, 627 bp, Zea mays
  Peptide Sequence Number=SeqID_56908
atggcgcctcctgttgacgtggctggtccgcgccctaggttgggcgatgtggaggctcctccgaggtcgaggtcgagtctgtcttccgtggccgaggtcgagtccgagcccctgggtcgggcgaggcggagaccgtcagctgaggccagggctgagtccgagccctggggtcgggcggagcggtgttcgccgtcttccggggctgagcccgagtccgagccctgggtcgggcggagcggagttcgccgtcttccggggcttagcccgagtccgagccctgggtcgggcggagcggagttcgccgtcttccggggcttagcccgagtccgagccctgggtcgggcagagcggatcgatacggcgcaggcggcgctgtccttctgtcaggccgggttgcttcttggcgaagacagggcctcgggcgagccggaactttgtgctgatgggggttaccagctgagaattaggagtcttgaggatgatgatgaggataatgttggtctctattatgattatgattatgatttcaggtattctttccatttgaaaggagtacttttgggtaaagaagaaggcgccgaggcagatctccaggagttccaggacttcgacgagttcgaggattag

SEQ ID NO: 15130 - DNA, 495 bp, Zea mays
  Peptide Sequence Number=SeqID_56909
atgtctgctccctcagagcaggtccctgaaaccccttcagcgtcttctattggcgtcacagagatcttggagtttgttatagccaaggagaaaaattctaagaaagatgccgaaggaggaactagaaaagatccttcggaggctggggtggaagaaactgttcagaaaaaacggcgtatgatggttgtcatgcgggctgtgcacagaactcccccgtcgggagcaaagaaaaagactgctccttccaaggttgatgaagttgccgaaacagcacacaaagctgaaaatagcggaggcccgctcgagaccaccctattagagattgataggattatagatggtgtggtgcccgagaaggagactaacgaagtggttgctaccgaaatttcatctttgaggatgaagaatgttgaggaagcttcttcagagcgcaggaccttcaacttaaggcacttgggtgccatcaactttctgaagaagatatgtctgaactaa

SEQ ID NO: 15131 - DNA, 282 bp, Zea mays
  Peptide Sequence Number=SeqID_56910
atgggtcttcgaaaggaaaaagtctatttgatatccctcaagtccgatggggaggtggaggattcgctttcgctgacgcctgacggcaacgtgtcgcaccggcggccttggccactgtcctcgagctcgtcggcccgcccaccttcaggtccagcgccttcaccttcaccaccggctacggctaggcgcgctctcaacttcgagagtgcggactatgtcgctgatcgcagccgtgaactccaccccaacttcgacaggcatgcttacaacatactaaaataa

SEQ ID NO: 15132 - DNA, 450 bp, Zea mays
  Peptide Sequence Number=SeqID_56911
atggcgccccgcacgctctatgacgacggcggctctcagcccccttacggaagcaagaggacaattgtgacagagtttcctgctgagaaaggctctgaaggtgcaacaggaagaaaaaaggttaaaaatcttgaagatttgttgaaggagaaggattctaaaattgagtctaccgaggcaaatcttgctgaagttcgcctacgaaacgaaaaacaagatatccaaattgaagaacaaaacaaacaacttgaacagttgagcaaagagtttgaaaaagcaaaatcaactttccgagatggtatgaaccgtttaaactgcgaagccgaagatttgaaaatggaagtcaaaactgaagctgagaagaatactaaattatccaaagctttaaaatatcttcgagatacatgcttcggttttgtaacccgatgctggtcgcggttgaggccttga

SEQ ID NO: 15133 - DNA, 1008 bp, Zea mays
  Peptide Sequence Number=SeqID_56912
atggctgtcccacaagttgacaagaaaatgcttggtgaacttgaagccatgggattcccaactgcacgttcagttagggcactccatttttcaggtaattccaatcttgaatctgctgtaaactggcttctggaacatgaaagtgacccagatattgatcggctaccactgattccaagagaaataagcattgaatgcggtgacacatcagatgaagtaagaaatgacgttgaaggaatgagggatactgtgcaggagcagaaacctaaagaacacactgaaactgggagacagaatgagacatcccagttggaacgagaaccaaatgcagatggacaggaggaagaagatagaaagaggatattagcactatataagcaaaaacgagacgaggaagggagggcaagagggcggatacggagtcaattacaagaggatcagagggagaggattcgagctgctaaagaccttatggaagcaaagagaagtctcgaggaaaatcaaaggaagcgggtgatggagagtcgggtagcagatcaagaggaggagaaaagagcgagggagaggatacgccagcgtatagctgacgataaggtaaagcctgctggacgcgccgtcgttgcgtcagagcagctgagagactgcctgcgaaccgtgaagaagaaccacagggatgaccctgctgcagtggcaagagcgtaccaggtgttgctcaagattgttggcaacgtagcgaagaacccaggggaggagaagttcaggaggatccggctcagcaaccctgtgttcaaggacagggtgggcagcgtgcgaggcggcgtggagttcctggagctgtgcgggttccgcaggttcagcggcatcgggtacctggtgatgccgagggacaaggtcgacgtggctctgctcaccgccgcccggcgtcgagatcgcgtcggccttggagaacccctacttcggcctgctctccaagtgaagcgaacggccgctgtcgctgcttattgctaa

SEQ ID NO: 15134 - DNA, 816 bp, Zea mays
  Peptide Sequence Number=SeqID_56913
atggcccccctgcgacgtggtcggtccgagcccaaggtcgggcgaggcagaggctcctccgaggtcgaggctgagtccgagctctggggtcgggcgaggcggagaccgtcgtccgaggtcgaggttgagtccgagccctggggtcaggcgaggcggagaccgtcgtccgaggtcgaggttgagtccgagccctggggtcgggcgaggcggagaccgtcttccggagtcgaggttgagtccgagccctggggtcgggcgaggcggagtccgtcttccgaagtcgaggtcgagtccgagccctatggtcgggcgaggcagagaccgtcttctggagtcgaggtcgagtccgagccctggggtcgggcgaggcggagatcgtcttccgaggtcgagagcttcctatggcgcccgaggctggacttagcagctgtcgggcctcactctggcgagtggcacagcagtcggagcagggcaggcggcgctgttttcctgtcagatcacccgctcctgcgagctcgtggcggactgccaccgcgcggtgagccgccggtccgccgcacagtctcgctgcgccccacgcacgccgagccgcctccaacgtacatcgcatgcctgggcctcgaccactaccgctcgcgctacgctggccggcacaggactagcttgccgccgagctcatatgatcggtcgcagggcttcgtatctgacgacgcgtacgccaggcagccgttccgacagcagtactaccatgaggggcagcaggagggccacgtaaggcgccaccacagcgcctgccaatgcgcgcactgcctctag

SEQ ID NO: 15135 - DNA, 279 bp, Zea mays
  Peptide Sequence Number=SeqID_56914
atgcccgtggccaaggagaagggggagaggggcgagtgggcacaagaaccggcgtgggcggcttttggcgacgtgagcgcaaggtactcgaacggttggagaagcagacgtgccctgggcgtggctctggcgcacaggccccactgggcagcgacgatggtgatggttgttgcgcatgtgaggaggggaagaggaggggaaggagcaaaggcgctgggcggggtggttggcatcgtgggcgagatgggtgggagaaggcggtttggagaagatgaatag

SEQ ID NO: 15136 - DNA, 339 bp, Zea mays
  Peptide Sequence Number=SeqID_56915
atgaattccattgatggctatcaatggagctttaacgagggagaggaaatgaggaggaaagaggaacgacagcttcggttttgggtccagccggagcgtcggcgttgtcgtggcgcgggctggggctcggccgcggtcgacctggcgcgggacagcgcgcgcggtgcggggcgggcgctgctcggcgggacgtcgggttggcggcggggtcacgcctgggcgcggtgcgcagagggcacagggctgctggcggttgcctgggcgcgacgcttcggcttctggcgacgcggctgctcagtgctcaccaggaaacggcgactgcgattcgtgcgtgcataa

SEQ ID NO: 15137 - DNA, 822 bp, Zea mays
  Peptide Sequence Number=SeqID_56916
atgaatcagcttgattcgttactgattgttccacaagttgaacacgatgcatcaacggcgccgggcagctatgtagatcaaaatggcaaggggataggggaggatagcaattgtgtactaacaatcgaggattgtctttcactcttttttagagaggaggtggtagaacggagctgtgattgttccaaggtacctatggaggagccaagcactaaccaaagcagaaagggtaagcagatggaggtaggcaccaatgatgaggtagcagctaatgggagccatagtaaacagtcagaccggacaacatgctcaaatggccaatctagtaaactgaatagtttgtcagtagaatacaacagttgttactgtaggcaacaacatggttctgacgaagagagtgacattacacagatggcagatacacatactgctggagcaaattcaaggatgacttgtggtcttaaggaaaccgagtatcatggtggtattcaagaaactgtacgtagtagttccctttcgactgagaaacaaaccgatctgttgagcacccagcatagccaaagcctcatcccacagaatcaagacctgaggttggatctcagtgcacaccagttaggagacaagcaaaatggacagaaagagaggagtggacgtgctattcaaaggactaatattactaagctgccgcctgtgttgacccttcatctcaagaggtacttcaagaacggcaacgagtaccataaaaatgaagcccgcgtgagctacaaggagcatcttgatgtaggacggttcatgaactctaggtactttcctttcacatag

SEQ ID NO: 15138 - DNA, 468 bp, Zea mays
  Peptide Sequence Number=SeqID_56917
atgggaaagaacaacaagcgcaagcgtgagccaactcctccatcggaggattttggtgactcggagtactcagaggaggagttctcctctgagtctgaggggtctccggctcccatccccctgcgtgagtcgtctgacgactcagacgactcccaggggctcgcggcggaggtttggacgtacatccgggccgtcgagcgctccgggctcgagggctcggatgagtcggagtactcctcggatgaggaggactcggacggcggcggcgaggacgaggacggtgacgacgacgacgacgacgaagaaggcggtggcggcggtgacggtgacggtgacggcaggggcggcagcagcggcagcaaggacggtgacggcggcggcagcaggggcggcagcggcggtggcggcagcagcaggggcagcaataggggcggcagcggcggcggcagcaacagggccagtggctag

SEQ ID NO: 15139 - DNA, 840 bp, Zea mays
  Peptide Sequence Number=SeqID_56918
atgtgggtcccacctatcttcaacctcatagaaacaaaacatgagctggttggtgggtgtgggccaaaggactggaaagctatcgttgatgattgggttgctgctacaaaagctacgatggatagtggctcaattagcacagaagatggaggactagctactccacctatggacattggagcactctatcttgtgagccatggaacagaaatccaaaatgtctccgagcaatctaacatttctcttattcctttgactgtcatggcaaaaataaagttccttcacggcatggacgacgacgataggataagaaaaaggaggccgtctaggaacatgagcccgccagtaacacacaagaaaacgacacaggagcaaggatcgcaagcccctcgtgtgcgcatcaaagttaggcactctagtactgaacacgcacgatgggtactttctaaaaggagttctgttgagaagaaatcctttgaggagaatcatggtacagttacaagaatttctcctgttcttgaagagggggagctgccgtcaggccacgtccttcttgagaaaaatgggatgccaacccaatcatcagctggaccggaggtagggatatggaagaggaagaggaacgctcagttaactgaaatggacatggatgagacgaagcgcaagctccgtggagcttaccaggaagcagaaaactcgaaacagagacgtgcaatccaagtagtggagctgcgtgacattgcaagatcgagagacaataagcacgtaattcgctgcaggaacccttccacgaagtcaatggatctcaccaacaggacccacacgacgaacccaagttag

SEQ ID NO: 15140 - DNA, 846 bp, Zea mays
  Peptide Sequence Number=SeqID_56919
atgtcggcgacttttctttgccgagttccagcagaagtggtgagcaaccggggatgtgttgacgtgagtcctgaagattttctctcagcggcggtggtgccgcgatccgggcaatccagcgcgctcgcagtcccgcaatcgcaggaaatgatgatgtcatcagagaattcttcggcggccggcgcggcggacgacgagtcgaggctggagccgtggcgcgagctcttccgcgatcgcgacatctacgacgtgatcagcaaagccatcctcgtcgccgccaccgactcgccgcaggagttccggcgccgccgtgacggcatcgtggagcagatatacaccgcgccgaccgtgccggttccgcagggaagggccgcgggcgagcgcagcggcagagcagcgctggaggtgtcggataagggaagcaaagtggcgagctgcacggtcgtcgcgccagcagatgaaggtaacaacagcaagaagaagggcaccgccgctgcccatcatcagcacgcaaatggcaacggtgacagcgccgacactgacgccttcggtgcgagtgggatggactggctgcagtctcttgctgaagagatggacgcagaaacccagcagatcgatgaggttcttcggatcaaggaaatcctcctgaatcaccatgagctggcttggttttttgtgattgttgcacagtcatctgacaccttgttcgattcactgaggaggctacagctgatgcagctcactgcggataaaatcaagagtactgaaattgggggtgcaattgcggcaatgaggaagcacaagtcacataaaatcaggatgcttgtgcacaaaatcgtcaagtaa

SEQ ID NO: 15141 - DNA, 369 bp, Zea mays
  Peptide Sequence Number=SeqID_56920
atggaggacttgagcacaatgacccaagtgcttgtcatttgcaaactcaccgcttgcaaactagtttgtgttgagaatgtgattacaaggcaaaatgagaaactcaagcaagaagtggcttggctcactaaggacttgacccaagtgaaagggaacttctcaaatcaaaagaaattcaaatggagaagttcggctaagtccagccaaacttgcaccagcctgcggtgcaccgaacagtccggtgtccaccagacagtgtccggtgccaggctggcgcacccggtgaacatgccgctctcgggaaaaagacagggcgccgcggctataattcaccggattgtccggtgtacaccggactgttcgatgtga

SEQ ID NO: 15142 - DNA, 204 bp, Zea mays
  Peptide Sequence Number=SeqID_56921
atggggtctcaaaacggtcagattcaagagttgcctccacctctacatcctacaaatataggtgatcaacctcctccagttgagaaaacaaagaggcagtgccctgggtgccaactagatgaggtgaacaaggctagcaataaggtcccctacctcaacttctgcttcatctggatcatctgcctcactgctactgctacttga

SEQ ID NO: 15143 - DNA, 312 bp, Zea mays
  Peptide Sequence Number=SeqID_56922
atgggcagggagcgtgtagagctgctgttcggctggtacagtagagggaggaacatgctggcagctgatgccgtgaaccagggaggaagaggggtgccggctgcctgggcgccgagcgccatggcgaggagaagtcgagctccctgcctgccgccgtgcagaaccagagaagggatggcgtgggctgctgccgtgtgggagaagacagaggaaaagatagtggcggctagggagaatagaagggtgggaatgaaaaatggccaagtgagcacccctatttatagaagcagccctagggttagggtttcttag

SEQ ID NO: 15144 - DNA, 312 bp, Zea mays
  Peptide Sequence Number=SeqID_56923
atgggcagggagcgtgtagagctgctgttcggctggtacaatagagggaggaacatgctggcagctgatgccgtgaaccagggaggaagaggggtgccggctgcctgggcgccgagcgccatggcgaggagaagtcgagctccctgcctgccgccgtgcagaaccagagaagggatggcgtgggctgctgccgtgtgggagaagacagaggaaaagatagtggcggctagggagaatagaagggtgggaatgaaaaatggccaagtgagcacccctatttatagaagcagccctagggttagggtttcttag

SEQ ID NO: 15145 - DNA, 3342 bp, Zea mays
  Peptide Sequence Number=SeqID_56924
atgccgccaacgccagtcgccagggcagcaacaacaaagcaacgacgtggagccaacaacagcaaagcaacgacgtggtgcccaagactggccgaggccgactacgcggtgccacggacccgcggtggcgcggtgcgtcgggcgcgtgtgcgcgtgtgcctgcagccagagcctgggatagaggatgagaggagtgcgctgggagcggggagcctgggaggaggactgcgcgtctgcgcgcagccgcgcactgcggtgctggggcctgggagcttgggaggagccggaatggagcctggaggaggacgccgtcggcgaagcagcggcacagcccagagcccacggccaacagcgcagcccaataggcaacagcccacgactaggaccagttcgggtagaatgggtacttcgggcctcgacgatgacaaagccctcatagcttatgagatgggtagggtatcttttcatgcctccgaagagataataaaggtgtgtgccgaagttgatagcttcggcaaaaggagaaaggcttcgaacacaagccagcggagaagctttcacgcgatgaaggccaagatctgcgcagcaaaggaagcttcggccttcgaagagccatcataccaccttgtgttaaggagccgaagaattcctgacgaatttctcgtggtttccgtggacaaagctgtgacctttgcgatgcagtacaaccaccgtagccgcttgccgccgccgccgccgttcggccgtggtgggtatcctcgcggccacaagcagccgtactacgctcctcctcctcctccgccgtttccgccggcgccgccgccgccgccgctagagcgcaagtacgaggtgcttatggaggccggtcgcctcgctgccgagtatctggttgcccagggcgtgctcccgccagccgccctccagcgtggcgccggcatctctggcacgtggcttgctcatcctcttcctccgcccccgcagctaccacagcagcaggaaccccccgggttttatggccggaggaggtacgaagatgaatacaacagtaaccctaacggctggcctaggcgagccaatggcactagtagcagcactagtagcagagatgattgcagccgtggcagctacaatggaagagggaagaggaagtatggggagtacaggagggggtatctggactcagggagagacagggaggagagaggaaggccatttccgaacggtcggcactacgaggaggatggggatgaagatggggcacctgggtttcagagagagcgccgcggcaatcgggggaatgatgaggcgagtactagtgttacagaggcagtgagggaggggacaccattgacagcgaaggctgtagcagggttatgcatggaggatacaacatcgaagattatgagctctgtcaaagatactagtaaggatgctaatgatgcatcaaaggtgctggaggagactgaggaaggtgaggtggaggatgacagtgggacgcaaaattcagaaactgaggtggttaagcaagggatagacaccgatgtaaatcatgcttcttgtcgtgttgttacagagtcagatcccaaacagttaccatatggtaagattgaagatgaggttcctgatgaggaagctggaaatgaaaaaaaagttatggatgaggctactttggatcacaacacttctgatggtgagacaaatatggaagttgagatgcatgttggtaaggatagtttgattgactattgtaacttcacaagaaccccaacaaggcccaggtcagtgcgtgcacacagaaatgcagcatgtatcccaggagaaactgcagttgttgaaacagttgatctagtttcttcttgtcaagcttcacagatggtaatcggtgattctgctgagagatctttgactaacgtcgcgtcagaaaacagagaagataaaatttgccatgaaaacactagctctggtgatgtctgtgctgaaccaaaagagtcgatgcttcttcaagaaaatggaataccagttgggactggaaacatggtagaagagaaggttgatgcacaaccacatgtggttgtccagcaatataaggaagaaactaacttatctccgttaacagatgccctcaagaagagcttgatgcaggaaaccaccttatctccatttgcagcttctcacaaggatagcttgacgcaagaggatggcttcatgcaagaagctgatttatctccgttgactgctaatcacagggatagcttgattgaagaaaccaaattgctaccaacaacagcttttcacaaggtcagcttgattgaggaaactggcttaactcggacaatatcttatgagaataacttgaagttacaatttaaggaaggaacaaagatcggtgatatcgatatgctgccacaagatgtggacctgattgagttgcccgatcaaaggaaaataattggtcatgatgttggtgctgaaactgtaatagaaatggaaaagggaaagctggatcaatctagctcactaaatctatccgatcttgacctagttcgtggtacagaggttgccgctgtacacaattgtccagcgttggtccagccatctgcagctggatcttctgcagagtcaaataataaacagcaagaaggtcctgaaacttttacaggcgccaatgccagtcatacatatgatttatgccagattccattagataataaggatgttcaagtaattgatatagaatgtggcacaccagttgaagttgatggatttgatttgtcaaagtcaaatgtcatgatatttctgctaaaagttaaaatttttgattcaaccaggaatgagatgatgtgctctagcatggatagcatgatggaccccggccatggaatacatacggatattcttcctggtattcaagatggatacagccttgcattttctgattttcttggttctgatataccatgctacccatcaatgcaatcagatcttcatgctggaataggtgccaacgactctgagggcattgctgtcatggatgatccaatatatgggtccctctctgatattgacatgggccatccctctattaaccctgccggcacggcggcctacgggcgagaccctgcagcatgggccggtctatacaatgtggaatattgcgacgtatgggccttcgcggtcttcggtcttgaatatgctggtgtggggagtttgagcgagggggacgtgttcgccttcgtcccaacattaagtggcctttcctcttctggtttgcttcatgcgagaatagctggtttcatggacgtgtgggggcagcccactcaagactacgacaaattcttctag

SEQ ID NO: 15146 - DNA, 576 bp, Zea mays
  Peptide Sequence Number=SeqID_56925
atgctggggagctatccgctcaatgagtcggtcgccattgcccgggcgcgtgacaaattgcgttccatgcaactgctggcgcgtcagggcatcgacctgcctgtcacgggcattgcgcattcgccggatgataccatcaggcctttgcagctttgtgctgatgggggttaccagctgagaattaggagccttgaggggagaggtactgctgatccagacgggagaagagacgatgtggcttggcgagcaggggaaagacgagtgccaggggagctggagacggcctggggaagaactagggacgagttgagcacgcgaccaggagatgagacgaacgctagaggcgagctcgaccgtcaggggaaggtggctggtgtccatggcgcaaaggctgagagggccaagcacggccaggacttggccatgagaggaggcatcgaccatggagagcagggagggaaggccttgcatgctgctggatggagaggaccgagggaggtcgacgcatgtgctgaacacaattatcgagaggatcagcggcgtgggagagcgtgggcatgtgaggcagcatcctag

SEQ ID NO: 15147 - DNA, 303 bp, Zea mays
  Peptide Sequence Number=SeqID_56926
atggctttcaccagggcaatgtctctggcgatggacatactacctaagtacgtggtgtctgggcggcaagcggcagactccggcgaggtcatctggaccgaccgcagggcaagtgggtacgacagccagctcacggcctcatccgcggtcaagatcttttcaccgacggtcgttatcgcacctagagcgcatgaatcacaatgccgacgaggatcgaggcgcacgcccaccggcggcgataggttcactgaatctgatcttgttcagtcactgtaccatcgcgttcttcatcatacgttctga

SEQ ID NO: 15148 - DNA, 3684 bp, Zea mays
  Peptide Sequence Number=SeqID_56927
atggcctcaaacctcatctccgcctccagcctcgagacagagacagccatggcggatcctggcgaaggacctactgctccacccccgccacggctgcaggaaatagctcacgatgtgcccgaccatactgtcacgcaattttcagcctcacaagacactgaaaccgccgccggcgatgctgccacccacgactccgctcagcctaaagcggagtcggcccattgtgcggttggcgagccggagcaaaccacgacagaggcagacggtcagccacatgtcgcaaccatgccacaggaagttgccgcattgccgtcgccagctgagacaccggtgcaagagagtgcggcgcagcccacactgccgccgcagaagcaagaaagccctgttccagaactagcctcctcagtccacgaggaggagaaggacgcgtcaaaggcaaggggggacgaaggagaagagaagcccaccgcggcgcggaggccgcaactgaaagagactgtaaatttgggcgctgttgagcaaaccacgacacaggaagttgccgcattgccttcgccagctgagacaccggcgcaagagagtgcggcgaaggccacaccgccgccggagaagcaagaaggcggtgctccggaactagcctcctcggtccacgaggaggagaaggacgcgtcaaaggcaagtggggacgaaggactagagaagcctgcgagtcgtcggtggcgatggctccgcgccgtcgtgggcttgttatttctccgccccaaaagcggagagacgaagatgccgacaccgccgagcgacaagcagccggtgtcagggctggaggacacgaagcctacgacaggggagatgccgccgccccacaaggacagcggtagccctgtacttgttccatccaagcctgaagtggggaagaccgaaggcgagatgaagacggcggcggtggacgtcaagaagccggtgtcagggcaggaagaacagaagccagcggcgaagaagaagccgagccggaaatacagctctggcgctccaaggagggagatggaagacggcgaaaggagcaagggcggccgtgttgaaattgaaacccaagtggggaaggcgacaccacagctggaaggggagcgacctatgcgaaagaagctccagaaggcgatcaggttggttcagctcctcatgtccttgtacaacaagcaccgctcccaatcccaggagaagaagccagacacggcttccgatccaggtggtgaggaagacagcgaggccaggctagagtcggcgccggaagacaagaagccggcgtcagcagagcaggaagagcagaagccagcggcgaagaagaaaccgagccggaagtacagcgatggcgctgcacggaagttgaaggacgacggcgaaatgggcaagggccgccgtgatgaaatccaagtggggaaggctataccacagctggaaggggagcgccctatgcggaagaagctccagaaggcgatcaagctggttcagctcctcatgtccttgtacaacaagcaccgctcccaatcccaggataggaagccaggaacggcttctggtccgggtggggaggaagacagcgaggccaagcgagcgtcggcgccggaggaaaagaagccgcagcatcggaattggccacgagaggaagtgcgcctggagcacatcctcgaggaaactttcacaaggcttcttttgacagagtacaacaagcagctgagcggcgtgagtcagaagtgcctcctcaccttctccatcttcgagctcgcctccgaggtcaagaagcagatcatgatctattggtgggtcgcggagttcaacctccggcaccggagtgatccagcgcgggctctttctggcggtggcgaaacaagtgattcgccggcgctgcagggtaaaggcgcagacgctgctgacagcagagatgacgccgaaagcatcttcatcatgctttctgatcatggcttcctagtgccgatgaagaactggtgcagcaaggtgatccatggctgccaggtgaaccccctggtgcactggatgctgaagcgcatggcgagaggttgtcgcttcgccgagctggacgacaagggcagcccggaggacctgcaacccaattccaacatcctttgcctgacagcaggcaatcgccacgtgctgcaacagatgcacatggcggatgagtcacagacacaggccaaggccaggaagaaagatgagtcacagacacaaaccaagaagaaagatcactcacaggcctggggaaaaagcaaggtaacaaatgaaccttccatgcagggcaagggcaacgatgtccaggaccagcagcaaccggaggcacatgtcgggagcacatccacggcagcagcagataagacaccttcccagaaggacgaagacccaacccaagttacggaacagctaacaaataaggggcctcaagatgtgaagcccagctctgagcccgaacatggtgacgagattccgcctccatcatttgaagggaagcgagtgatcctaaacctcaatgcacatgtgtaccccatctgcaagtctgcattctccaaccttgccgaatgcttggttgtgctgcagctcggccggtggaacaatcttgacgacaagacatacatggaggtggatggactggagtcacgggatgccatcggctcgctcaagaaccttcggtacctgagcctccgtggtctatcacggctaacagagctcccaaaagggatcgagagccttaagaaacttgaaatcctggacatgcgaggctgccaaaacctagccagagtgtcggcaggtgtcatcaaacagttgaagcagcttacccatctggacctcaccgagtgctacatgttagagcacattggccgaggaatcacgtccctcacagagctgcaggtgttcaagggcttcgtgttcgcaaccgggactcgggggaaggaggcgtgccgaatacaagacctcagaaggctgaagaagctccagaagctcaccatttgcatcaccacggatgctaatgtaggcaagcgtgagatggcggatcttaagtacctcgctagccttcggaaactcacgattacatggagtgagataccaagcatactggagggtggcacgaagaaagcgagagagaagcgacgtggacttgttaagacgtggaccagctttcagttgccaccagacctcatgaaattggacatccggtgctaccccaaggaagagctagaactcgaatgcaacgagaagctcgagaggctctacttgagaggtggagacatgagaaggtgttccacgaaggaaccatcctccatcaagacactgcgtttgaggtatctcaggcactttgagatggggtggagtgatatccgttcaaaattcgagaaacttgaatatgtggaaatcgtagttaatgataagaatccgatggagataccagattttacattggattgggatggggtatggaccaaggatgagaaggaagagcataataaccaccagaggttgcaggcggcgcctaataaaaaagacgttgggatggataaggatgttcaggacgatggcagcgggaatcacaaagaaccaactaaagctgctagcaccatcacaaaggttaataaggacaaagctgctaccaaagaacgggcaggtcctctcttcccctaa

SEQ ID NO: 15149 - DNA, 255 bp, Zea mays
  Peptide Sequence Number=SeqID_56928
atggggctcggtgtatgcggctcgctctgccaaggtggtgacaaggatgatgtttatgactatggtaatgtgatcatggcgatgtgcgacgctcagaactgcaccagacttcatttagggagaatgcaccaaactgttatacccgatatgtacccgatatccacccgatacccgataggtacgggcacgggtaaagaagaaggcgtcgaggcagatctccaggagttccaggacttcggcgagttcgaggattag

SEQ ID NO: 15150 - DNA, 540 bp, Zea mays
  Peptide Sequence Number=SeqID_56929
atgccgcaaccgctgcgaccgccgcgactgccgcaaacacacgtgcctccctccgcctgcctccctccgcaacccgttcgccgcgggcccgatcaatccccagcaatccaccgtcgcaagcacgagcaagccattgattgtctctggcggaggtttggtatgctctcaatcctactcccttcgtgcgagacagagtcccgtgcctcatccggtcgtggtcggcaagacgagatccggaagcaggtgaggagaggaaaggagacgggagtgatggaggccaccgaccataggagattacgacatgagggtggatcgaaggatgctacctatcagtcatggccagttgacgctcatggaggggtgctccaggacgagctgttacaaatgctttataaggaatcagatagatctaaaagtcttactgccaacacatgcacacactggtggtgcctttatctagctattcagatcaaggaacatgagctgagggagaaggatccggtggtcttgggcaaggatcagctcggggcgctcatgtag

SEQ ID NO: 15151 - DNA, 597 bp, Zea mays
  Peptide Sequence Number=SeqID_56930
atggcccagtctgaagtccgccgccacaggcgccggggcagagtctggccagctggcggtcgtgccgacggcatcgtctaccggcccggtggtcacggcgacgggaacgaagggcgacacagggccttagaggacccatgggctagattctacgacgacgacaaaatcacctccactgccgctgctgcgggtgtggccgcctcggcgactgccttcacggaacgtgttgcttcgggggcactgaccttagagttcgccatcaaaaggcggcggcttgagggaaggattgagcgcctccgcacgcaacatacagaggcggtgagggacaagtcagtgacagagaataaaagtcgcaatctgcttgagaagctttcggtggcagaaaaagagatggaaaacctcagccgtcgacttgccgaggaaaaggagggcgcgaaaagagctcgcgcggaggcccaggctgcctgcgcagaagctgacgccgcgcgcgctaaggctgactttgccctcaagcgcgccgccgacaaggagtctgagctaaaaaagcctacgcaactattgcgagaaaatggaggcctccacctgctctggtgttga

SEQ ID NO: 15152 - DNA, 1032 bp, Zea mays
  Peptide Sequence Number=SeqID_56931
atgtcatcatcttcttcgtctgctgcgagcgcgtcgcgggccacgccgtcgtctgaggagatgttgagtgatttggcgatgcttgaactgcagcccggccacaccgtcgaggtcaggacctcgaggattttttcgggccatgtgctagagatgcagcggctaggctatttcgagaacggtgtcgaacgggctccaggggcagaagagaagagaaaaataggtgataagatagcccaatttagatcatgcactttcacgccgaggactgggaagacctcggctgaagttgtcgagattgttccctgtgctaggaataaatggggcaattggtgggacttttggttttatttagctcctggggtggtagaagaagatgaagacgaagaggcccttcgatatgcggctcgcctcagtagcagacgcgacctggtcgaggaattcattgcctacggggtgtggcccctggcgcatggttggacactagttgaggccgaggccgaggccgccaagattgttgggaagtacgcactagagacagagactttgaggagttgggatattcgcggttccaacgctaggttgaaccgcttttttgagctaaaccaattgctatatggcgcttacccggaggcaaactctgccaacaccgcttatcgccgagggaagaaaacgaggcccctggccgatgaaggcccctcatgggataaggctccaggtgtggtcgccaaaaagagagaattaggtacagtagctgaggatttggggctgagagcttctggtcattttgttggggagctgctagagacgtgcgcagctcccggggaaacgatgtcttcgcccgagctccaggaaacctctacacgaatgtttaaggttaccgggggtcgctggcctagtaatgttccaataccccgagcggctagcgaagattttttgtctcgattagctcgtgacttaaagattttcccttatgaaaggaacattggtgttgttgtatcagcagtgatggagaatgatcgccaggacgcgtag

SEQ ID NO: 15153 - DNA, 585 bp, Zea mays
  Peptide Sequence Number=SeqID_56932
atggatgtctgtcgtgccctcgccgctagatctcgctcacgcccacgcgttaacccagccccagctatgcccgcgctgagccctcacccacggatccgagtatctcctacccctttgtcccattcgtcgctcccggccgcaccatctgccgatgatgacgagagcccagggttgactggcccggaatccccgcaccacccccgtgagcggatcgatatcatccgcagaggtggaccgcttcgcgggaggtgcaggctcccctccatcgtcatcctcgttggcccaatcgccggtcgggtcaaccccagggaggtgaaggatgcgaggcagcggcggctggatggaccggatggtgctaggaagaggtggattgggggtatgagtggggatgtggatgtctgtgtagaggtcgccgaactcatcatcttcctccatcgtggtgggatccggggaggtggaggatgtgaggtggcggcggctggatggatcggatggcatgaagaatcattacctatttttaaaaggagattgttgggtgacttgcttgatttttctgccagggagcttcaagttcaggaatactga

SEQ ID NO: 15154 - DNA, 1119 bp, Zea mays
  Peptide Sequence Number=SeqID_56933
atggaggcgcaaggaatgatcgggatcagttcgtccctgacagcagaacgccgcatcgaggcatacaggacaaacatagagttcttatcgcggcagtcgacgacgagcggcgatcgccggttcacgttgcaccttaggtgctacgtgtctgtgcacgtcagcaccggcaacgggcggcccaacctggtgctcatgtaccgcggccaggacgccgacacgagctgccttgcgctcccggacgacgagaacggcgtccgcgacgtgctccacgacttgctgaggtcgacccggccgctgcagcacctgggcctcacggacctcgagtgggagtccctcctgtcccagcaaaatgtgtcctggctcgtggacccggttctgcgggcccgctacgccgtcgtctcggtttggcaggcggtggagctgcacgtgtgctacgacgccgtccagatgctcatgatgacgtgcaaggagtccagcgacagcggtgcggtggggggtgacgccgaggctgagtgcagcgtttgcttggtcgcgctgcgcgagagcgaggccgtggagctgccggcctgcgcgcacgccttccaccgccgctgcatctccgagtggttcgcccacaagtcgacgtgcccgttgtgccgagacgacgtggccaagtatctggagcccaagctgcagcgccagttcgccaatttcgactatgccatccttatcaaacgcaatgcaaccaacgcgccgatgcccgagcagctaggcatcgcctccaacccctccgctctcctcctcccccgaccactacgatgtctatcgtcaaggccaccgaccatgccatgccaggaggatgcatcggccgaagagcgcaagatgcgggggatctggagaacctccctcaagcccgagaacgttctcctcctctccgacgaccacgtcacgctcgtcgacgttgagtcatcgccgccgccgcgagcgtcatcccgcgaccatcgcccatcggtcgaggcatgctcgttgctcggggactcggggtgctcgtggccagtgattggcggcaacgctgatccagagacgcgctggtcaaagaacgcacgtgggagtgaaggcgtggagcactgtaggagctag

SEQ ID NO: 15155 - DNA, 474 bp, Zea mays
  Peptide Sequence Number=SeqID_56934
atgagtcaagtggctgcttttgagcgcgacgaggaggatgctgtccggcaagtgcagcttgaagctggggcggtgtcgagcgcgatggggagcggtcacagcgatgaagctctcgcggtcgccgcctcgccggtgtcggcacggatagcacagcagccccgtcggtatgtcgcaggtggcgttagccggcggctgcagtcgctgttccacggcgtctcggtgggccacaagtggcggtggtggacgcaggtggcagcggtccgaccgacaatccagttcatccagggcacggacgagcagacgatcccggacgtgcgactgaccaagtcccaggacggcaagaacgccgtcggtgttcgactcttctgcggagctcgggacatcacgggcttctacatgatcaacgacgagggcgtgctgcagtccgtggacgtgagcgctaagttcgtcaacggcaaggacgacgagggttga

SEQ ID NO: 15156 - DNA, 1140 bp, Zea mays
  Peptide Sequence Number=SeqID_56935
atgggatggatgcacacgggccctttcttacatagatggagacaaagccatgtggtcttcgcggcctcggtcatccagtccctgaggtccttgatggtcttcgccacggctcgttggagcgaagggggcgatcgggccttcgcatgggcgacgtccgtggccaggatgttagagcttgctgacacggcctttgatctatggaacgtcgatgtagaaatcttagagcgagggggaggcgtgttcgccttcgccccaatagctgtgtgcacggggttaaggctacgcgcgccggggtgggcctcaccacggcaggctgcaccgccgggtagccgagccatcgggggccgcgcccctagggctgctcgccccgccgagatcgccgctagggttcgggacaccagccccgccctcgtgttcgccacgcccgacaacgtcgagaagctatcgccgttgcgcgtcccggtcgtcctcgtccccgacgccttccacctcacggacgacggcgcccccgagttcgcgcccttccccgagttgctgctgcttgattccgagccactgccgggcccttcggtacgccaggacgacgcggccgccatcctctactcgtcggggacgggcggccagagcaagggcgtcgtgctcacgcaccgcaacctcatcgccacggtcaagctctttgtgcgcttcgaggcctcgcagtacgccgcacctgcttgtgacaatgtctacctggcggcgctgcccatgttccacgtctacggactctcgctcttcgccgtgggacttctctcgctcggttccatggtggtcgtcatgaagaggttcaaagcaggcgaagccgttaaggccattcacagattcaaagtcacgcacttcccgatcgttccgcccatcatggcggcgctggtgcacaccaccaagccagcagcaatgccgttggaatgcttggtgcaagtgtcaaccggtgcagcgccgtccagcctgcggctcatcgacgatttcgtcaaggctttccctcacgtcgatctcattcaggttcctgcctaccccacttacagtcacgtcattcgttcttccctaccttgcccaagtgtcggaatcagtggtacaacgtacaaggtgcccatatggggtgtttga

SEQ ID NO: 15157 - DNA, 933 bp, Zea mays
  Peptide Sequence Number=SeqID_56936
atgcgcgtgccccctttcccttggtctctttctctcatttcatttctcccgcgcagcaaccttttttcccacctctctctctctcccaccgaggtgggtgccctatgtcttggagacggtgatcattgggagctttgtatccccgaaggtggagctcccctccccctctcccactccctctcacttcccctccccctcccctttactttttcccctgcgcgcccccttccaccccgtcgcgcccccccgcggctcggcctcctgcgccgcatccctgcgcaccggcggctcggccccgtgcccctccgcgcctggcggcggcggcctcgcccgcggcccagcctcgcgcccccgcgaatctgcgcacccggcagcggcggctcggccccgtgcccgcggcctcgtgcccatggcccctgcgcgtccgtgcccggcggcggtggctcgacgctgcgccccgcggcccccgtgcccgaggccccgggcgcccgcgccggtggcggcggctcggcccccgcgcccgcgtgcctcgcgcccactgcctcggcggccctgcccctgtcgcgccccaccttgacggcctcgcccgcgccccccggcggcctccgcggcccctcggcctggcgcccggtggcctggcgccccgcgtcttgtctcgcgcgcccctgcgcctcgcgtcccggcagccatgtctggacctacatccggaccgtcgagcgcgccgggctcgagggctcggatgagtcggagtactccttagacgaggaggactcctcggactcgtccgaggagggcagcggcggcggcggtggtgatgatggcgacgacggaggcgacggtgatggcggcggcgacagcggtaggggtggtgacggtggccgcaagggcggcaacggcggcggcagcaaggggagcaacaaggccagtggctag

SEQ ID NO: 15158 - DNA, 507 bp, Zea mays
  Peptide Sequence Number=SeqID_56937
atgggccgccgcagcttcccctaccacaggctcaagaagctccccgccgccgccccctctcctccccatcctcctgccacgacggcgggtcctgctaccgccgccgccgccatcgaggactcgtaccggtcctactaccgcgcgctggtggcgaggcggcggaggcggggcagcggcaggcgcctgaggagggcgagagtctggggcgccctggcccgcgcgttgcggcggagggcggcggctgccggggcccgggtgcgcgcgtcggtcgccagggtggcgcgccggctgagggacggccggccctacgtcggcgacctcttcgccgggaactacatgttcctgcaggtggcgccgtcgccgatgacgatcacgggcagccacggcggcggcgctgtggtacccttcgcggagtactactacggctataaggccagggccagggccagggcagcggccgtgcagctgcaccgctatcctactggggcggtgctctacgagacgtag

SEQ ID NO: 15159 - DNA, 147 bp, Zea mays
  Peptide Sequence Number=SeqID_56938
atggagccagtcaccggcgatccattcatggcgcaacctttagctgcagcgctatcgtcaaatcggtctccaactctgcatcattttgaggaggtgttcctaagttttgacggtgtaaggaaaatggacctcagcccatttgactaa

SEQ ID NO: 15160 - DNA, 378 bp, Zea mays
  Peptide Sequence Number=SeqID_56939
atgagcacagtacaacgccaaaacaatgggagcgctatgcagcccccttgcttctgttttagtgcacgcaggcttacatacatggcatacatggctcagcagctcgtcggccggatcacaatggaggtggcgccatcgaagctgccgtcgacgatggccaggtgtgctaggctcccgaggaacctcgacacgatcgcggaggacgacgacgacaaggaggcagcagccatggagtcgacaagggagctgcctctccgcaatgcgagccgcggcgcgcaggtcgtcgtcgtcgacgcccctgtgcactgcgccgacaagctggcctgctacctcgcccccatggcgaagacgaccgagtgcctcaagatcaaagcctaa

SEQ ID NO: 15161 - DNA, 1110 bp, Zea mays
  Peptide Sequence Number=SeqID_56940
atgacctccgccgtcctcgccggccgggatgaggtccaccacggacacccgcaccaccgccactggggcggcgcccgcgcccccctcatgcccaagccatcctccaatcctaaccctaggcgctaccgcccgggaccaaaccctatcgtcagtggctcgccgccggcgccgcgggccggttcggctgtcgcggctgagcccttgccgtcgcccttaaggcacgtgaaattcaggccgtcggaactgacacccgccgaggcccgtcatctccgcgagcggctcaccggcgagcttggccgcgtccgcgctttcgtctcccgcatcgactcgtggcaggacgggcgtcgccggggcccggagcccgagccggagcctcccgcgcgccgctcttccccgccgccggcgctggtggaggcgatgcggaggcgatgtgcggatatcctgacgcggctgcggagatcgaagaaaagcgtgtggttcaattcccccgtcgacgtggagggcctcaagctgcacgactaccgcgccatcattcggagccccatggatctcggcaccgtcaagcaaaacctcaccgctggccggtacccctcgcacgaggcgttcgctggcgacgtccggctgaccttcaacaacgcgctgcggtacaaccctcccgaccaccacgtgcacaggtacgccggcgacctcctcgccacgtttgaggggatgtacaaggaggcggtctcgtggttcgagcagcagcgccagcagctcgagccgccaatgcagcttgatctgctgccaccaccaccaccaccgcaactcccagtttctgtgccagtgcaagcgcccctgaggatgtgggatgccatcgatgcgacaattgttccggatgatgatgacagggtcgaggttgctgtcaatccgtctgtggtggttgaaattggagagtcggagactgacgttccagagaagaatgaagtggaggctgagatgggtgacgagtatgtggatatcggtgatgagatgctgacgatgaattaccagtcggtggagatccagagggattccctggccgccagcagctcaagcggaccaggaagtggctcgtcttcatcaactgcttag

SEQ ID NO: 15162 - DNA, 210 bp, Zea mays
  Peptide Sequence Number=SeqID_56941
atggacacagtcgttgcgccaaggcgaagcgcccaggttttccccacggcggacggtggcggctggcagatgagggaccacggcaaccgggagggccggccgagacgcccaggccgggagcacccagagtcttcctatggcggcgaacgtgggaagcagggagaggtagaaaggataggcttcggccgtgggtttttttttcctaaatag

SEQ ID NO: 15163 - DNA, 408 bp, Zea mays
  Peptide Sequence Number=SeqID_56942
atggcccgcgggaggcggcagaagcagaagctgcggacggacggaccgcgtctccggcagtgggccggccaagtcgtcgtagccgcagcacatttcctgctccgacaagggcaaccaagctttgaattctacggacacgacgagtcctctgcaactgcaatccgcatcggtcgacggcgacgggccgggcgtacgctgccggcagaacggaggctgcatcctcgctgcttctcttctagtaacaacgtcgacggcttgggtcttcctaaacctgcaggctgcggcaacatctgccgccgtgccacggggttttcagtttgtcatcagggcatgacaggccaagccctaatcatgaaggtgggattcgaacccatgcctgatggaagaagggcgaaagatactgagtga

SEQ ID NO: 15164 - DNA, 438 bp, Zea mays
  Peptide Sequence Number=SeqID_56943
atgggcaagggtaacaaacgcaagcgcgagccgactcctccatccgaggacttcggtgactcgggatactcggaggaggagttctcctctgagtccgaggggtctccggctcccgtctctcccctggcgtcatccgacgactcggacgactctcaggggattgccgcggaggtctggacttacatccgggctgtcgagcgctccgggcttgagggctcggatgagtcggagtactcctcggacaaggaggactcgcccgaggaggacggcgatggtgacgacaacgacgacgacgacgacgacggaggcgacggcggcgatgacgatgacggcggcggcaggggcggcaacggcaacagcaagggtggcgacggcggcagcagcaggggcagcaacggcggcggcagcagcaagggcagcaacaaggccagtggctag

SEQ ID NO: 15165 - DNA, 1653 bp, Zea mays
  Peptide Sequence Number=SeqID_56944
atgccgccgccgcccgccaagtggcggggcagctgcgagttcggtggcgcgccgtgcaataagaagctcatcggcgggcagtcgctgacgccgggggagcacggcacgcacacgtccagcaccgccgtaggcgccttcgtcagcgacgtccagatgttcagggccaaagtcggcgcggcctccggcatggcgccacgcgcgcacctggcgttctacgaggtgtgcttcgaggacacgtgcccgtcgacgaagcagctgatcgccatagagcagggcgcgttcatggacagcgtagacgtgatctccatctccgccggagacgacacgcagaagcccttctaccaggacctcaccgccgttggcagcttctccgccgtcacgtcgggcgtgttcgtgagcacgagcgccggaaacgccggcccggactatgggaccgtcaccaattgtgcgccttgggtgctcaccgtggcggcgagcaccatgacccggcgcgtcgtctccaggatcaggctcggcaatgggctggtgatccaaggcgaggcgggcaggaggtacaagggcctcaaaccagcgccgctcatctacgtccaaggcgtgttcgaagacggcgcgctcaacaccgtcgacgtccgcggaaagatcgtcttctgtgaccgctccgaaaccgccaccatgcgcggcgaagatggtccgcgctgccggcggcgtgggcatcatcatgttcaacgacgcctccgagggcgcgaggccgacggcgccaagatcatgtcgtacatcaactccacggcgaaccccaccgccaacctccacttcaccggcgttatgctggacccttcctaccagccggccatcgccgaatactcctcacgaggcccctgcaacatgtcgaacctcggcgtgatcaagcccgacatcaccgggcccgggacgagcataatcgcggccgtcccgggcgccggcggcgggaatggcagcgcacccagccacaccttcggcttgctgagcggcacatccatggccgcgccgcacctctcggggatcgcagccgtgctgaagcgagcgcgcccagcgtggtcgccgtctgcgatcaagtcggcgatgatgacaaccgccgacgtgacgcacccggacggcacgcccatcaccgatcagatcaccggcaagccggcggggcccctcctcatgggatccggcatcgtgaacccgaccaaggcacttgacccgggcctcatctacgacctctcggcgctggactcccccacctacatctgcggacatcggccattgcagaacgtgagctgcgcaacggtcagcaagatcgagagcaaggacctcaactacccatcgttcctcgtgacgctcacggcggccgcgccggtggtcgaggtgaggcgcacggtgaccaacgtcggggaggctgtctcggcgtacacggcggaggtcgtggcacccaaaagcgtcgccgtcgaggtggtgccgccgaggctggagttcggctctgtgaaccagaagatggatttcagggtgaggttcagcagagttggcgccgccgcagacggcggtacggcggaaggaagcctacggtgggtctccggcaagtactctgttcgcagcccaatcctcgtcctcgatggaacgcagaatttggtctag

SEQ ID NO: 15166 - DNA, 267 bp, Zea mays
  Peptide Sequence Number=SeqID_56945
atgacggtgatgacgaggggcggcgacgacgacaaggtcggcggagggaacaagagcgatggcaagcagcagcaagtggcaaccgacagcaacaagggaaagcaaatagtgacaaagggcaacgacggcaagggcagcggcaacacccgctggcaaggcgccaccggcataaccataggctcccctatttatagcctcaaggagggctgccaggagtgccagggtttgttgcatatgggagaggaggcgtgtccaagccccatatag

SEQ ID NO: 15167 - DNA, 1728 bp, Zea mays
  Peptide Sequence Number=SeqID_56946
atggcggcggcgcagcagcagtcacggagcacgaggcaggcggtgccggcgtcgtcgagggtcgcgatcatcggcggcggcatcagcgggctcgcggcggcgaagcagctggcggcgcacgaccccgtggtgttcgaggcgacgccgtcccatcggcggggtgtggaagcactgcgtgtaccgttctccgactactcgtggcgcaaccgcgacgacccgacgttcccgacgcacggcgagatcgtcgagtacctcgagggctacgccgacaccttcgggctgtggcgctacatcatgctcggcgccaaggtggtcgacgtcaagttcctcggcggcgcggccgctgggttcacggagcgctggagcggcaccggcgaggcgctccaggggaagcccatgtgggaggtcggcgtcgccaccgccggctcccacaccgttcagtactaccagttcgagttcgtggtggtgtgcgccggcaagtacggcgacgtgccgcggatgccggtgtcgttcccggaaggcaaggggccggaggtgttccgggggcaggtgatgcactccctggactactgcaagctgagcgaggaggagaccgtggagctgatgagggggaagaaggtggtggtcgtcgggtacaagaagagcgccatcgatctagcacttgaatgcgcccaggccaaccaagcaacatgcgtgggcaacgaattgggagggagacggagacccaatcgtagagctataccagaaaaggtcactcttgtcatgatccgtcgtacactccatcttagacctacacctactagtacggcaggtgagggaggcgaggcttgcaccatgctggtgaggacccttcactgggtggtgccgtcctactccatctggggcctgcccttcttcctcttctactccacccgcctggcgcagttcctgtacgagcgccccaaccagggcatcctccgctccatgctctgcagactcatgacaccgctgagagcgggcgtgtccaagttcatcgagtcctacctggcgtggaagctcccgctggacaagtacggcctccgccctgatcaccccttcgtggaggactacgccagctgccagatggccatcctccccgacggcttcttcgacatggccgaccgggacatgatccgcttcaagagggcctccggcggctggtgcttctcccgcaacggcgtcctcctcgacgacggcaccgaggtggaggccgacctcgtcttcctcgccaccggcttcgagggcaaggacaaggtccgcgccgtcctcccggaccccttccgcggcctcgtcgtcgacaggtccggcatgatgccgctgtaccgctacgcgcgtccgtccgtacttgaaatcggcattgcacactgcagcggcaccatccaccctctgatcccgaacatggcgttcgtggggtacgtggagagcgtgtccaacctgcacacgtcggagctgcgctgccgctggctggcgggcctgctcggcggccggttcgcgctgcccagcgtggaggacatggtgcggcacgtcgagggcgaggcggaggccatgcgccgcaccacgcgcttctaccgccgccactgcatctccacctacagcatccacgacagcgacgccatgtgcgctgacctcggctccagggttctccgcaagggcaactggctcgccgagctcttcgcgccctacaacaaccaggactacaaggaagactga

SEQ ID NO: 15168 - DNA, 429 bp, Zea mays
  Peptide Sequence Number=SeqID_56947
atggtgggcttcctccgggccttcgccgccgcttccgctgtgcccgcagcagctgccgcagcctatgctctcttttcatcctccgccccttcctcctccaagctccgcttccctcttcctgactccttcctctccgccgccgcctcctcgacctccgggcgcgctcccaacgccgtgcccccgatggccaccgccgctgccacggctgatctctcggctgccgatgataagcagcgggactcggcgcttccggagctcacgttagtggatgtttttccaatttgtagagctagtaatccactagtgtgcgttagcgaagatggctacaagggattaagtaaattgtggatatgggaggtctttgaggagccactatctgatcttcagatcgtgcctttgacaggggcattcaattttactgtgaactaa

SEQ ID NO: 15169 - DNA, 168 bp, Zea mays
  Peptide Sequence Number=SeqID_56948
atggcactggccgcctccaccgatcccgtgttccttgcttttttcgttttcttctttgcgcccttaccacctgggccaccgtctgcagattcaggctggttattaaggctgcaaggcacaggcgacaacatggcgggcgttaaagagctttcggacatgatatgctaa

SEQ ID NO: 15170 - DNA, 633 bp, Zea mays
  Peptide Sequence Number=SeqID_56949
atgacgagcgtgtacatcccggtgcaggggacagaggaggaggtgcaggtggcgctggaccagcttccgcacgacgcatccgatatcctcgacatcctcaaagccgaacaggcccctcttcacctctggctcatcatcgccagagaatacttcaagcaaggaaagatagagcagttccgtcagattctggaggaaggatctggccctgaaattgacgagtattatgctgatgtgaagtatgaacggatagcaatccttactgctttgggtgctttccatactttcttgggaaaggattggagctttcagtatgctcatatgccaattgttcctgtaggtcaactctgtattgccaagggtgagttgcaaatggcgtctgactcgttcaagattgtgttggatgaagatgagaacaattttccagctctacttggtcaggcgctaaagaaacctggtgtccccgtcgccatgacaaaagatcagcaaaatgaggggaggcagaagagagtgagcaagtactggaggtctggggaggccaatcacttgtctctgctcccatcctcatcggctccagacgctatgtccatcacagacatcggacatctgggagtggcagcagcagtcaacaactag

SEQ ID NO: 15171 - DNA, 1926 bp, Zea mays
  Peptide Sequence Number=SeqID_56950
atggacctcttggcctgggaccggccgctgcagaaagaaaatgatgaagctgacgtcggtgtacgtggcgtgaactacacgttcgtgaaggacgcggcgctggcgcccagcgtgtcgtactacgactacatcatcgtgggcggcggcacggccgggtgcccgctggccgccacgctgtcggagcgcttccgcgtgctgctgctggagcgcggcgcctcgccctacgacgacgaccgcatcggggacatggcccgcttcgcggacacgctgtcggacacctccccgggctcgcccgcgcagcgcttcgtgtcggaggacggcgtcatcaactcgcgcccgcgggtgctgggcggcggcagctgcatcaacgccggcttctacacgcgggccagcgacgactacgtgcggggcgtcgggtgggacctgggcgccgccggggcggcgtaccggtgggtggaggacgtggtggcgttccagccggagctggggccctggcaggccgcgctgcagggcggcctgctcgaggccggggtcgcgccggacaacggcttcacgttcgaccacttcgacgggaccaaggtcggcgggtccatcttcgacgccgacggccggcggcacacggccgcggacctgctgaggtacgcgcgcgccgaggggctcgacgtgctgctacgggccagagtggccaagatcctgttcttcaatgtcagaggtcaggacgtacgtactcgagtaaaatgcttttaccgcttgccgacgcatgctggccaccgcagtctgcctgcgttgcgtgtcgtaccagccgaactgactggcggttacttcgcttcggcgccagggaggagatcagggaggcggacagcggcacgcggcgtggtgttccacgactccgaggggcggatgcacaaggcgttcctcagcgcgggccgccggaacgagatcatcctctcggcaggcgccatgggcagcccgcagctactgatgctcagcggcgtcggcccagccgaccacctccgctcgttcggcatccccctcgtgcgcgaccaccccgcggtcggacaggggatgtccgacaaccccatgaacgccatctacgtgccgtcgccttccccggtcgaggtctcgctcatacaggtcgtcggcatcacccaggtcgggagctacatcgagggcgccagcggctccaactggggcgtccgccactctgcctccgggtccgggccagacggtgtccaccggccgcgcaacttcggtatgttctctccacagacggggcagctggccacggtgcccccgaagcagcgcacgccggaggccatcgcgcatgcagcggagtcgatgaggcagcttgacgactccgccttccgcggtggcttcatcctggagaaggtcctcggcccgctgtccacgggccacctcgagctgcgcaaccgcgaccccgacgacaacccgctggtgacgttcaactacttctcgcaccccgaggacctccgccgctgcgtggccggcttgtcggtcatcgagcgcgtcatccactcccaggccttcaagaacttcacctaccccgacttctccatggagacgctgctcaacatgtcgacggggttccccgtcaacctgctgccccggcacgacaacgactccacgtcgcttgagatgttctgcaaggacaccgtcatgaccatctggcactaccacggtggctgccaggtcggcagggtcgtcgacgctgagtaccgagtgctcggcatcgacgcgctgcgcgtcattgacggctccactttcaacgcctcgccaggaaccaacccgcaggcaaccgtcatgatgctcggcaggtatatgggagtcagaatcacaaacgaaaggttgcacatattgtcggagttgtatcatgttgtttgttactatgtggactattatgagtga

SEQ ID NO: 15172 - DNA, 1869 bp, Zea mays
  Peptide Sequence Number=SeqID_56951
atgaagaaaatgttaaagcaatatgtccaacaaacccaacatgatgagaaagatcgcgaacaagttcttaaagacttttcaaggtttcttgatgaccagattgaaaggattgtgctttttctgctacaacaacaaggccatcttgccagtaggattgagaaattggcagaaaaacgcactgctcttctggaagagtatgacatatcacaagtttatcagctgcatgatgcatacagggaagtcgggcttgatctcataaagcttctccgctttgttgatgtgaatgctactggtatacgcaagatactaaagaaatttgataaacgctttggctacaagttcactgattattatgtcaccactcgtgcaaatcatccttattctcagcttcagcaagtatttaagcaagtgggaattgtagctgttgtaggtgcattatcgcgcaaccttgaatatctgcagcatcatgaaggaagctttgtatccatctatgatcgtccagcagttaccttgaaggaccctattatagaccaagtaaaccatgcagtacagaaactcacgcatgccacgaattttatgcaattcttgggacagcacgcgcttattgtccaggaagatgcagaaagcgagtcggaggatcttgttggtgatcagagctaccatttcatgtccctggtgcttaatctagtgaacacattcctttacatggtgaatacatatatcattgtgccgactgcagatgactatgcagtaagccttggggctgctgcaactgtatgtggtataattattggatcgatggcagtcgcccaagtattctcctcagtctacttcagtgcctggtcaaataagtcctacttcaaacctcttgtgttcagtagcattatgctgtttcttggaaacctactgtatgcattggcatatgatctgaattcactaatagttctcctgactggacgactgctatgtgggttaggttctgcaagagcagtgaaccgtcgctatatcagtgactgtgtgcctctcaagatgaggctacaagcctctgccgggttcgttagtgctagcgctcttggcatggcatgtggccctgctcttgctggttttctccagattaaattcaagatatactcgctcagttttaatcagagcacattgcctggatgggtcatgtgcatttcttggcttatttacttattgtggttgtggcttacattcaaggaaccagaacacttcactaaaactctggtcaatgaacagccgtcagaatctggtctagctgaaccattgcttcaaggtatagaacgaaggcaggatgagaactcagaagttaatgatgatactgaagtagagtcagaaagctctcatgaaccagcaacatcaattgcttcagcatacagattgctaactccatctgtgaagctactgatatacttcatgctcaagtacgcaatggaaatactactatcagaatcgagcgttgtcaccacatactattttagctggtctacaagtgctgtggctatctttctagcgattcttggattaacggttcttccagtaaatgccattgttggaagctacgttacaaatttattcgaggataggcaaattttgttggcatctgaagtcatggttctcatcggtataatcatgagcttttgtttcacacctcactactccatcccgcaatatgttctttcagctttcatcacatttgtatttgctgaggtgcttgaagatgccacgattactgcagccggttatctcggcacggacctccttctgaatgtcactcttctcccatcccttgtgatttgcatagtctccatcgcagcagcactctacacttacaacaatctctattga

SEQ ID NO: 15173 - DNA, 747 bp, Zea mays
  Peptide Sequence Number=SeqID_56952
atgtcaacgaccacagccacccccacgctgagcatgaagctcctcatcgacaggaggacccagcgggtgctgttcgcagaggcgagcaaggacgtcgtggacttcctcttctccctcctcacgctgcctgtcgccacggcggtgaagctggtcgggaaggacgccttagtcggctgcgtctgcaacctctacgccagcgtcgaaaagctcgactccgtctacctgcaggccggcgtcgccaaggaagcgctcctatgccctaaggttgtcttgccagcggctaacaccaacagctccctcctccgtctgccggagccgccggtggtggagccaaataatatgtatagatgcaccggcaatacctacggcatgtgccgcacctacatcacggacgagtacggcaagatgtgcccgcattgtagatgctctatgacgacggcagcgcagtacctgctgtcggcgcggggttcctgcggtggctccggtcaggtggcggcgccgaagagcgcggcgggagggttcgtccagggcatcgtcgtgacgtacactgtgcaggatgacctgacggtgacgcccgtgtcctctatctctagtgtctccctgctcagcaccttctccgtgagggacatctacgacctccaggagaagaccgtgcagctgggctacaacgagggtttggcaattttcaaggcgtcgctgaagtccaagtccgttctcactgacgtcttcctccacggcaaaaactag

SEQ ID NO: 15174 - DNA, 729 bp, Zea mays
  Peptide Sequence Number=SeqID_56953
atgaagctttacatcgacaggaaggcgcagcggttgctgtttgcggaggcgagcaaggacgtcgtggacttcctcttcgccatcctcgcgctgcccgtcgccacggcggttgaactggtcgggaaggaggccatggtcggctgtgtcggcaacctctacgccagcgtcgagaagctcgactccacctacttgcaggccggcgtcgctaatgttgatctcctctgcccgaccgttgtctcaccgtatgcgattgcgaacaccaggagatccctcctctgtctgccgaaggcaaagaacctgtttcgatgcggcaagactgtcgctggatccacgtactgcggtaactacataacggacatgtacaataagaagtgcccggggaattgtggcaaccatatgacggcggcagtgcagtacctgtcgtcggcggttcccagcaacgactccggcaaggtggcggcggcggcgccacagagcgcggcagaagggattgtgcagggcgtagtgacgtacatggtgctggacgacctgacggtgacgcccatggccggcgtctccagcgttgccaccgtgctcaacactttcgccgtgagggacatcggcgacctccaggagaagaccgtgcagctgggctacaaagagggtttggctattctcaaggcgtcgctgaagtccaagtccgtcctcactaacgtcttcgtccacgccaacaacagttcggtcgcttga

SEQ ID NO: 15175 - DNA, 759 bp, Zea mays
  Peptide Sequence Number=SeqID_56954
atgtcaaccaccacagccaccgccgggctgaccatgaagcttctcatcgacaggaaggcacagcgggtgctgttcgcggaggcgagcaaggacgtcgtggacttcctcttctccctcctcgtgctgcccatcgccacggcggtgaagctgatcgggaaggaggccatggttggctgcgtcggcaacctctacgcaagcgtcgacaagttggactccgctacctacgtgcaggccggcgtcggcaagaacgcgctcctctgccctacggttgtctcgccggcggcgaacactagcagctcactcctccgtctgccggcgccgtcgtcggtgcagccaaagcagctgtatagatgtaccaataccaacaatatgaacgtcaacaactgccgcgcctacatcacggaacagtacggcagggcgtgcccggcatgtggctgctccatgtctaccacagcgaattacctgccgtttgcggggggcagcagcgcctccgtcggccaatcggtggcgcagagcgcggcgggagggttcgtgcagggcaccgcgacgtacacggtgctggacgacctgacggtgacggtaacgcccaagtcctccatctcaagcatcaccttgctcaacaccttcgccgtgagggacatcggcgacctccaggagaagaccgtgcagctgggctacaaccagggtctggcgattctcgaggcgtcgctcaagtccaagtccgtcctcactgacgtcttcctctacgccaacaagtga

SEQ ID NO: 15176 - DNA, 219 bp, Zea mays
  Peptide Sequence Number=SeqID_56955
atggcgctgaagcccggcggcaagaaaggcttcgggtccacacgccggtacgccattgcaagagggtccgaagatcgccagcagacgactggagaagaagcggtttggggttttggtgaagtgacacccaacaagacccccagggacgcgaaagaaatggcaaagtcagacgacccagaaatggccaaggcgaaggcccaggcccaggcccaggcgtga

SEQ ID NO: 15177 - DNA, 834 bp, Zea mays
  Peptide Sequence Number=SeqID_56956
atgacagagtccgaccagctcgcgacttcttgcatcacacctttttgcatgtactgctatattactatgccatttggtttaaggaatgcaggcgcgacataccaaaggtgcatgaaccacgtgttcggagagcacattggccaaacggtcgaggcttacgtcgatgacatcgtagtcaagacgaggaaagcctccgacttccttactaaccttgaaacgacattcaagtgtctcaaggcgaaaggcgtaaaactcaatcccgagaagtgtgtctttggagtcccccgaggcatgctcctggggttcatcgtctccgagcggggcatcgaggccaacccggagaaaatcgcggccatctccaacatggggcccatcaaggacttgaaaggagtacagagggatcaagggaatgccttgcggcgcttcatctcgcgcctaggcgaaaagaggcctacccctgtaccgcctcttaaggaggaacgaacgcttcacttggacccccgaggccgaggaagccctcgagaacttgaaggagcgggcgcgggcctgctcttcatctcacccctcgagaagcacctccgctacgtgttgcgcctccatttcccggcatcaaacaacgtggccgagtacgaggctctcgttaacgggttgcgcatcgccatcgagctaggggttcggcgcctcaacgctcgtggcgactcgcaacttgtcatcgaccaagtcatgaagaactcccattgccacgacccgaagatggaagcctactgcgatgaggttcggcgtctggaagacaagttctacgggctcgagctcaaccacgtcgctcgacgatag

SEQ ID NO: 15178 - DNA, 846 bp, Zea mays
  Peptide Sequence Number=SeqID_56957
atgctggtggacaacgacaatgacttcgctgagtcagagtgcccgagctgtgcttgcgctgtggcacgccggcgttacctgcaccgagtacaggaacagaaggggggcaggggcatcgaggacatgatgctgcttgagatggctaaggggaagaattggaagcggtgccccaagtgtgagttcttcgtggagaagcgtgatggctgtctgcacgtcacttgcagtaggttgcttttatggcatcttgatccatcaattattaggcttgatctctcagtgatgctcaaggaggtacttgatgctttccttgcgccaggatcagggttgtggatgtttaatgatgtccctgaggttgacagagaaagaaagctaattgatggaggtttggacttcagtcgcctcgataatattactttggtgcatcgtgagggaaatgctgttattcgccatcacttggagagccttcctttagaatcattcgattctatcctgattttggcagatgaatctgtagaagattcagcaatccaagctgagtcgaggtcacttgcaactttgctgctgataagagatattcaggcaaaacgtcttacatgcaaggaatcattgatttcacatgttccccgagggaccttttctgaaggttcttggataggggagatgcaacaagcatctgataaatatgtcataatcagtgaaattttggaccccaggacaaaaaatttgttgtcagtgtcaaaaattagtgactacgttctttcaaatgaattagtgagcatggcattggcaatggtcgcagaagatcggcagataaataatgtcttggaggagctcttcgctgaataa

SEQ ID NO: 15179 - DNA, 384 bp, Zea mays
  Peptide Sequence Number=SeqID_56958
atggctaatctcgctcctttcgaagtgtctcggatgagcaagcccccggtgagcccccaagcattggctactcctcctagtgatccacatgtagagggcaagaagaacattgattctaaggctgtagctctccccatggttgcattgccagctagcctggtggttgacctgttgccaagtgatcagttgagggagggtgaggtgcctactgaagaaacgacagtgcaacgtgtcagtccttctccagcccacgaggataaaagggtggagatgctgcctactgaagaaacgttgatgttgcctagtcatcctcagcccgtgatggtggacaaattgtggccgagtctattatggtacctcagcatggcggcccaagcattttag

SEQ ID NO: 15180 - DNA, 2883 bp, Zea mays
  Peptide Sequence Number=SeqID_56959
atggacagagatggcgcacatgggggtgctgctgagaggacaggaggagagaaagagagaagcttgcaatggcttgtcctggtgtggtttggtttggtcccagcaagcacaagagtaggccatggcagtgccagcgcgtccaaccatcatattttgcctgtcaagtctaaagtcttccccacgcccccaccttccttctgtaactgcagaggagggcagcctcctgcatttccgggttcccttgcgcttgcgcctcctatttcgtctttccacgagagtgggaaggggaagccggaggatgccggccaagtacctcggcccgggggcgttggcggaggacaggcgccaggacctccaccgccaggtgggctgcgtcaccgggatcttgcaggccttcgaccgccgccaccctctcgcctcctcctcccacaagaggctgcttcccccaacaggtcccgcttcctcactctctgctttctcttctcttgcgaggtgcttgctcatgatacaccaagaaccgtcctttcacagccccatttactatctccaaatcagccaccgacaaaaaccagtccttgcaaatttggaaccttttttcagataagaaaaatgtccttgactgaaaggaataagagctttttgctacaagaaagcagaaaggcatgctcttctcttgcccggttcagcattgacaatgattcacttcttgcagcaggccatgcagtatccagtaacccaagcaaagagggcgattgcacaagatattcaccccagattgtgctggagaactcgagtaaaacatgggctgatagccaaagagcaccagcaacagaactgtctcaaacctcatattcatcgtcaccctcttcgtcattctcgtccgttgatgacaacaaatcaacacaacaggacctatcatccactgaccgaatgctatttccagagaggccgttcaagagctcgccgaagctcaagagttattttgacagtgacaccgggctcgactaccctgatgacgcgcctacgaagtccaaggacatgcccatagttcaatccagcctgccaactcttggtataagaaatcttgtgaaggattcaatctatatggatagccgtgaattgtcagtcagaatttgcactaaagaagtaacagatcacccatccaactgtggagatcaacctagggaattgaatgggcctccccgtgacagcacacaagaaaaaagcaagggtctcgtggacatcaatgaatcgcttcgagtgctagccaagctcagggaagcctcatggactcctgctgaatctgtccatcatgcaagactttcatatgatgctcctcggttctcatacgatgggaaggaggctgcatcaaaactgagggaggtaccaaggttgtcactggacatcaaggaaagtcaccttcggaatggtgaaattgactctagattgaacccaagcttgagttctacagacagaagcagcaacactgttattgggtccaatgcagcttttgagatccagcagaaacagcctgcctgcaagcggcttcctagcgttgttgcgaagctcatgggtttggaagagttgcctgagcataatcaaagtatagcatcatcacatgcatgcaaaaccgttcaagggagcaagcaagaggccatgttcaaccccttgagcatctcatctcacaacgagcatgctcttcgacaacaaaggaatcatgattcaactgttagaaatttacccaactcaaagtttcctgtcgaaactgcaccatggaagcaacaagaaaggattatccttcctcgcaaactgccaaagggatcaaaaggagcccacggaagagaacaacctgctgcatcagtcatcagtgacatagagaagcggctcaaggatcttgattttcgacaatcgtacaaggaccttagagcgcttaaacatattttggattccatgcaagcaaaaggactattggaaaacaaaaatagggaggaaatatctatgccaaagttatctgatggaaaccacaatggccaagagatagccagtgtgaacatgagagtgaacagtaacaccaacaacgtgtgtatgcctgaagagagcaacgctgaaagctctttcaaatcacctattgtgatcatgaaaccttcaaaatgtgcaaaccttttcaacgaagttgattcttctgtcttccccttagggggttcatctgatcccccacaacaacaaacaagcaatagcacctatagaaggaaagcttcaacgagaaatagaacagctaaagagcaacatgcaaaatttagttcaaaggtgcctacttctcaaccccttgtttcttatgacaggagatcatatggaaggaatgacgatagcagcaacaaccaaaaatctagttcactgctggttactgagagctcatccagaagacagcagctaccaagggacagtagcataagtatgaaaaagaataaacattccactaccccaaggttacaacagagaaaacttggttcagagcggagggctagaccacctattccttgtgctgagtctaacaaaagccaaaatcaatctggagataggaataatgcagaaacagtgtcaccccgaagcaaattcagaaggaaacttttgtgtccacaagaaggtgatgatgacatgccgagtggattgaacaacaggacaaggagcctgaaccagcatggcaatgatatgtccacaaggtcagatggcagtataactgttgcttcagagctggatattataagcaatgacagatctacggaagttgatattcctaattttgatcaaggcattggaactccatccggaaggaacccacaaagagtggtaaataatttccttgcaattttgccttatttctaa

SEQ ID NO: 15181 - DNA, 111 bp, Zea mays
  Peptide Sequence Number=SeqID_56960
atggcgtcgctgtggggggcgctgcgcagatcaacgtctcgggcgtcgaagtggtcccgcttctgccgcttcgtgtcgaagtcggtgctggaccccccagtgatcatatga

SEQ ID NO: 15182 - DNA, 318 bp, Zea mays
  Peptide Sequence Number=SeqID_56961
atgacgtgggagggagagccggagtctggagaagaggagattagggttagggatttctcgattggggagggaccgagccaccaagggagagccagagtctggagaggggcgccgcacggaaggggagctggtgacgaagatccggcagagacgacgacgacagtgaggcggtgccgcgacaaaagttactacacgtcaaggttaatttccgtcgaccatttacgaccggaaaaagttactaatattcgtcgtttaacaggcataaaatttctcggtttttctgttgtgcttgttttcccgctcctttcaatctcctag

SEQ ID NO: 15183 - DNA, 147 bp, Zea mays
  Peptide Sequence Number=SeqID_56962
atgaaggcaatgtgcgacaaggccatggataaggctgttcgcgctgggcggatcctgatgaggagacccggcgtcgtgggtatagtgatcaccctaaatcaagcaagcgtgagcatgtcgcaccgacttcaggcgtttccgacttaa

SEQ ID NO: 15184 - DNA, 1698 bp, Zea mays
  Peptide Sequence Number=SeqID_56963
atggaggcccagaacgtggaggttgctgccctggtgaagaagatcgcggacctccacgccgacatcaccaagctgccgtcgctgagcccgtcccccgacgtcaacgcgctattcaccagcctcgtcatggcctgcgtcccgccgagcactgtcgacgtgaccaagctcagcccggactcccagaggatgcgggaggagctcattcgcctctgctccgacgccgagggccacctcgaggcgcactacgccgacatgctggccgccttcgacaacccgctcgaccatctcggccgcttcccatactttagcaactacatcaacctgagcaagctagagtacgacctcctggtccgctacatcccgggtctcgcgccttcccgcgtcgccttcgtcgggtcaggccccttgccgttcagctcgctcgtgctcgccgcccgccacctgcccaacacgacattcgacaactacgaccggtgcgccgccgccaacgaccgtgcgcgaaagctggtccgcgcggacaaggacctgaacgcgcgcatgttcttccacactgtggacgcacatggcggacggagcggctctcgtcgtgcggagcgtgcacggggctcgcgtgttcctatacccgattgtggatccctaggattccgttgtggcgggtttgacgttctgacggtgtaccacccggacgatgaggtgatctactctgtcatcatcgcgcgtaagatcgacgcccatacaaacacggaggtttctgctctggtgcagaagataactggcctccacgccgctatcaacaagctgccatcgctgagcccatcccccgacgtcgacgcgctgttcaccgagctcgtcatggcctgcgtcccaccgagccccgtcgacgtgaccaagctcggcacggacgcgcagaggatgcgggaggagctcatccgcctctgctgcgacgccgagggccacctcgaggcgcactatgccgacatgctcgccgccttcgacaacccgcttgaccatctcggtcgcttcccttacttcaacaactacgtcaacctgagcaagttggagtacgacctcctggtccgctatgtcacgggcatcgcaccttccagaatcgccttcgtcgggtccgaccccctgccgttcagctcgctcgtgctcgcctcccgccacctgccgaacgtgatgttcgacaactacgaccggtgcgccgctgccaacgaccgtgcacgaaagctggtccgcgcggacgagggcctgcgcaagcaaatgttcttccacaccgccgacgtcgccaacctcacggacgagctccgcaagtacgacgtggtcttcctggccgcgctcgtcggcatggcggccgaggacaaggccaaggtggttgcgcaccttggcagacacatggtggatggagcggctctcgtcgtgcggagcgcccacggggctcgagggttcctgtacccgatcgtcgatcctgaggacatccgtcgcggtggcttcgacgtgcttgccgtgtaccacccggacgacgaagtcattaactccgtcatcgtcgcgcgcaagatcaacgcccacgtgaaggggcttcaggatggacacgcgcatgcgcgcggtgcggtgccgatagtgagcccgccatgcaagtgctgcaagatggtggcgaacacgctccaccaaaagagggaggagatggcaacggcgtag

SEQ ID NO: 15185 - DNA, 642 bp, Zea mays
  Peptide Sequence Number=SeqID_56964
atgtactccattgcccaagctctgtctaaggttcactgggggttcgcgggcactctcaaatccccggactccatcttccgcgcacgcgctcccctggcggtgggcgaccagtggcagcgagacctcctcagctgccgctcactccgcgcctcacaccctaggcttgccgccgacaggcgggcccgcccgggcagctcctcgcgtggcgtgtgtgtgttccattaccgagtcaatggcacgtcgggcccactgggcagtcgctcagcgtcgcgcgtgaccgtcttcttcgcacagctccacctctgcatctgccgcccgcaccccaccgcgcctacaaatattggagcccacgaccttgcccactcgtgctcctatttccttgctgccgtctctccacaccattcactgcgccgccacgtcccgcgcggagaagttgaacccgccgccagagaactcgtctgtgccgagcataccagcctttacgcacggttgagggtgtgcaccgggggccagggtagccggctgtgccccaatttgaactacacaccgctcgggctcaaggaattcctcaccggaggccaaatctgggcggaatcgcccctcctccggggtccaagcgcgtcgcatcgtcaccgtcggtga

SEQ ID NO: 15186 - DNA, 1662 bp, Zea mays
  Peptide Sequence Number=SeqID_56965
atgaaatgctctatgatatttgtgaagaacatttacttgcgaattaagtataactttcacttatcaaagctggtggagacacaagatggtggagatgcaaaagtagaagtctcccctcgtgacatagtttacatggaaaatgctgagcctataaatggtgaacacccagagattctgcataaacttgaccttcgctatgctggcacctcttggtgtgatgaatctcttgctttagtgtatgaatcttggtttaaaactcggaaaatcagaacatgggtgctctctcctgataaaaaagatgtcagcccacgcgttttattcgaccggtcttcagaagatgtatactctgaccctggctcaccaatgatgcgaagaactgtgatgggaacatatgtcatcgcaaagatcaagaaagaagacggaaatatttatgtcttgttgaatgggatgggtgccacaccagaaggaaatattccattcctcgatttgtttgatataaatactgggagtaaagagcgtatatgggagagcgacagggaaaagtactatgaaactgttgttgcactgatgtcagacaaaactgacggggaactgctccttgatcagttaaagatacttacgtcgaaagaatcaaaaacagaaaacacacaatattacttgcagacttggccagaaaagaatcaagttaagataacaaatttcccccacccatatcctcagcttgcttcattgtataaggaaatgataagataccagcgaaaggatggagttcaacttacagcaaacttatacctgcccccagggtatgattcatcaaaagatggacctttgccatgtctagtttggtcctaccctggtgaatttaaaagcaaagatgctgctggtcaagttcgtggttcccctaatgaatttccagggattggtgctacatctcctcttctttggtttgtgattctgtctggtccgacaatcccaattatcggtgaaggcgatgaagaggccaatgacagtattacaaactattgcagatatgtggaacaactagtaacgagtgcagaggctgcagttgaggaagttgtcaaaagaggggtggctcaccctgataaaattgctgtcggtggtcattcatatggtgcattcatgacagctaatctgctggctcacgctcctcatcttttctgctgtggaatcgctcgctctggagcttacaacaggactctaactccatttggttttcagaacgaggatagaacactctgggaggcaacaaacacatatgtcgagatgagccctttcatgtctgcaaacaaaatcaagaaaccaattttacttatccatggagagcaggacaacaattctgggacattgacaatgcagtcagaccgattcttcaatgccttgaaaggtcatggtgcactgtctcgtttggtaatacttccttttgagagccatgggtactctgccagggagagtatcatgcacgtcctctgggagaccgataggtggttgcagaactactgtgtaaatggtactagcaaggttgactcagtgtcagaggctgacagtaaaaacaaaacattgtcagctagtggtggcagtgcagcccgtgaaggtctaaaccctgaggaactctcatcattaccaagatcgcttctgtggtaa

SEQ ID NO: 15187 - DNA, 1032 bp, Zea mays
  Peptide Sequence Number=SeqID_56966
atgctgctgcttgggagccactgcacgacttcaagtacctactcggacgttcacctcgaggatgagctgtttgaagagatggggagagatgttatgatcgacatcttctatgcgcgccggaaaacgagccacgcaggtctttcatctggggatatgggctaccgccttcctccaaaagaaatacaggacattgttgatgcaccaccacttcctgtcttgtcattctctccaaacaaagataaaattctgtttctgaagcgtcgagcactgccaccactatcagacattgcaaagcctgaggagaagcttgctggtctaaggattgatggaaattctaatactaggagccgaatgtctttctacactggaataagtatccataagctgttagacgatgggactttgggcccagagaaagaggaagacagcaaaagtggaaagctgagagtgtggattgctgatgtggagtctggagaagcaaggccactttttaaatcgcctgaaatatacctaaatgctatttttgacagctttgtatgggttaatgattgtacactgctagtctgcactattcctgcgacacgtggagatccaccacataagccatcagttccatctggcccgaaaattcaatctaatgagtcaaagaatgtagtccaagcgagaactttccaagatcttctgaaagatgaatatgatgcaaaactatttgattactatgcaacctcacagcttgtgttggcctctttggatggaacagtgaagccaattggccctccagctatatatacatctgttgatccatcaccggatgataaatacataatgctttcttctatccaccgcccatattcctacattgtaccttgtgggaggtttccaaagaaagttgagttgtggactgtagatggaaagtttattagggaactttgtgatttgcccctggctgaggacattccaattacgatgagcagtgtacgcaaggatgaactcctcctgcaacatctactgcgcctcaagccctcaacataa

SEQ ID NO: 15188 - DNA, 195 bp, Zea mays
  Peptide Sequence Number=SeqID_56967
atggacgtggatgtcgagtgcagtggaaaagaattggaggacgtgacacaggggatggtggaggtggtggagacgatggtggaggtggagaaggtgatagtggtggaggcctcttcctatcttggtcgtcgagtctctaggctcgttgttgagcccatgggtccatccgttcagatccttcttcatgaagtttga

SEQ ID NO: 15189 - DNA, 324 bp, Zea mays
  Peptide Sequence Number=SeqID_56968
atgaccaactctccgatgaccgcctccgctgaccaactctgcttggcagaccggatggccaactctttaacgatgaccaactctccgctctcggatgaccacctcaccgaccaactctgcgaggcagaccagatgaccaactctccgatgatggccaactctcatatgatgaccaactctccgatgatgaccaactctcagatgatgacaaactctatgatgatgaccaactctccaattatgaccaactctctaatgatgaccaactctcagatgatgaccaactctccgatgatgaccaactcggatgaaaaactccgatga

SEQ ID NO: 15190 - DNA, 1935 bp, Zea mays
  Peptide Sequence Number=SeqID_56969
atgaaatctgtggacaagaataataatcacaatgattccagccaagggttgctagctacaatgcgtgaccattttggatcggtaaactgtgtgagatgggcaaggcatggccgctatctggcttctggatcagatgatcaggttatcctaattcatgagagaaaagctggttctggaacatctgagtttggtagtggggaacctccagatgtggaaaattggaaggttattatgaccttaagagggcatactgcggacgtggtagatcttaactggtcccctgatgattcaacattggctagtggtagcttggataatactgttcacatatggaacataaccaatggtatgtgcactgccgtcttgagagggcattccagcttggtcaagggtgttacctgggatcctattggctctttcatcgcaagccaatcagatgataagaccgttataatatggcgtacaagtgactggagtcttgctcacaagacagaaggccattgggaaaaatctcttggttcaacattttttaggcgacttgcgtggtcaccttgtggccacttcattactacgactcatggcttccagaaacctaggcattcagcccctgtgcttgaaagaggcgagtggtctgctacatttgactttctaggacataacgcacctatcgtggtggttaagtttaataactcaatgttccgtaagagtttctccaatggtcaagacacaaaagctgcaccagctggatgggccaatgggacatcaaagatatcatcaaaagaacagcaaccatataatgttattgctattggaagtcaggacagaacaattactgtttggacaacagcgagtgcacggccattgttcgttgctaagcattttttctctcaaagcgtggttgatttatcttggagccctgatggttattcactttttgcatgctccttggatggatctgttgccaacttccactttgaagcaaaggagcttggatacaagttaagtgattctgatctggatgaattgaagaggagcagatatggtgatgttagaggacggcaatcaaatctggctgaaagccctgcacagttactgctagaagaagcatcagcaaagcaatcggctagcaaaaaagggactccgattgtccagcaatttcaagcaccccaaaaactttctgcagatgtgcttaacccagctcctgttgtgcaaaatcagaaagctcctgaagctttacctgaagatgagaagaaatcatcagatcctgctgctgatggtatgaataaagttactcggttatctagtccagtgaagcagagagaataccggcgtcctgatggcaggaaaagaataatcccagaggctgttggatttccatccaaccaggataacatacccagccgttctcagaaccacgttatagatttttcatccttagatcagcgaatgaatgggataagaccatcttattgtagtagcagtaactgtaacaactctggagttaaggactgctctggtgtcacagcaagggctaacattacagaaagtcttgttattcaaaaagcttcaaccaatgctagcagtgatggaaggctgactgtagaacgcactggatctgttgttccaggctctttgaactgccctgcactttctatacatgtattagataagaaagacaatgaggattccttgccagtctgccttgaggcaaatcctgtagaacacgctgcaggtgatatgaatggtgtcggtggtgccttttcaacaaaaggaacagaaataaggtgtacaagaggaacagaaactctttggttggatcgtatatctgcaaaggttactgccttggcaggcaatacaaatttctgggctgttggctgtgaagatggttacctgcaggcaagtaatattttcctatctgaatttcttatagattga

SEQ ID NO: 15191 - DNA, 222 bp, Zea mays
  Peptide Sequence Number=SeqID_56970
atgtcgcgcgcattcgacgactactgtatcaaggatagtggcgtcatctcggtgccggaggtgacgcagatgaggatcgacagcaatgaccagttcgtcatccacgccaccgtcaagggtgtgggacgtgctctccaacgacaaggccatgtagatcatggcatatatagaaatctacatggcactgatagtcacaatgtagtggtgaaacaactagattaa

SEQ ID NO: 15192 - DNA, 300 bp, Zea mays
  Peptide Sequence Number=SeqID_56971
atggggcggcctctgcagtgtgtgtcattgcagtcaatagggccatcagcctccgccaggtctgacagactggaggagtggccgggtgctgcgctacgggtacggctgagcggacggaaaggtctctttgcaaaattgtcagttgacgagacactattgcagccgtacagtgtgtatgtggtccggaggaaggacaacgactactactacgctgccgccgacaaggacaacgacacaacttgcaatggcacacaggccgagactttcaggcccaagatccaccggttcctctccaactga

SEQ ID NO: 15193 - DNA, 627 bp, Zea mays
  Peptide Sequence Number=SeqID_56972
atgacgcgctcgcccagcccgcgagctcgcgctccgcgagccgtcccacgccggcccgcctgccgcgcccgaacccgccctgccgcgcccgggcccgccctgccgcgccccgaccccgccctgccgcgccccgaccccgccctgccgcgccccgaccccgcccctccccgcgcccggctcggccgccccccggcgagccccacctcggccccgcctcgccgcgcccggccgcgcccgcgccggccccgcctcgccccgcgccaccgcggcttcgtcccgcgctcgcccgcgtccggcctcgccccggccgcccccgcctcgcctcgccgcgcccgcgcccgcccccctccggcgagcccgcccccgcgtcgcctcaccccggcgagccccgccccgccctcgcccggcctcgctccggcgagccgccccgccccgtcccgtgcccggctcggccgccccccgccgcgcccggcgagccccgccccggctcggccgcccgcccccgtgcctagctcggccgcgccgtcctcgccccggcgtggtggtcggccgtgtcctcgctcgcccgtgctcgcttgccccggcgtgcttgcccgctcgccccgccgtgccttgctcgcgtcgtga

SEQ ID NO: 15194 - DNA, 252 bp, Zea mays
  Peptide Sequence Number=SeqID_56973
atggcaatggaggtccatgggccagattacgatctgaggaccgaggacatcgacgaagatgtcctcaggaaggtgcgagcaaggagcacgagcgtgagcctagccatacaacctcagcagcaaagctcacaacatcgcatccaggaactcccgatgggtgatgcaagaagacacaagttttatcctggttcgggcaatagaaggccctacttccagcagagggggatgagacttatattatcttgcacctag

SEQ ID NO: 15195 - DNA, 150 bp, Zea mays
  Peptide Sequence Number=SeqID_56974
atgaccctctcctctaagtctcagcgcaaggcatatccatgtagggctctgcagagccagcgcctcacccttaccacatccctaaaccctaggcttagtttagcgcctcccgaacaagaggctcaagaagttgttgattgggatgagtaa

SEQ ID NO: 15196 - DNA, 207 bp, Zea mays
  Peptide Sequence Number=SeqID_56975
atggccgcctcgtcgaccgccacctccgtccacgacttcatcgtcaaggatgcgagcggcaaagacgttgacctcagcacctacaaggggaaggttcttctcattgttaacgtcgcatcccagtggtatgaatcatctgcagcagaaacttttctaatcttcttactatttgtgattgtttggcccatggcaaaagcgtatcagtaa

SEQ ID NO: 15197 - DNA, 1359 bp, Zea mays
  Peptide Sequence Number=SeqID_56976
atgacgattattgtgcagggtaaccaccaggaagtggaagatgagtacggagatgagtactatgatcaagatgagtatgatgaggaaggttcgggtgctggggatgagtattttgaggaggaagagcctacagagggacaaaaggagatcctagaattgagagaacgattaaaagagcagattaggcgaaaggcaaaggctgctgcttcctgcacagctggcagatcgtcttctttacaaatacctcaagccagggacaaatttggctctttctttgggccatccaagccggtgatttctcgtcgagtgattgaagaaagaaaatcattgaaagaactgcatagcacagttgcaagggagccaaggccttcgggaaaggacattccgtcgtcctctaaagtgcaaagtaaagtaaatggacatcagcataaacagaaaattgttaatcaggtaaagaagaaggccgaggcacttaaggataaccgggattattcatttctactctcggatgatgctgacctgtcatcctctccaaaggagaagcctgctgctagatcttccttgactcaaagggctgatcgtgaggtgatgcgaacaacagtgaagagcaaggcaccaacaagtcaacctgcacgggtgtcaaatggatatggatctaagaacaaaatgtcaactcaaaggcatgccgaaggtagggtagataccatgagaaaggaggctttcttgaacagagaaagggttgtctcacgtgacaatgaaaggatgcatgaaagggttgtttcacgtggcaatgagaggatgcatggtagtgcaataaatgggtccaaccaggcaagtactagcaaaaccacaatccaaaagcttacaagcagaggttccattgctaataagcaagcttccacggatctgaatgatgctgctctgaggaagagcagtgtagccccaaagcaccatttctcagaggttgacagatcaaaatccttgcaaagccagaaagatgcagtcagctggtcagagactgcagcattctttcccatgggacaatacttggagcaaagaagagtacaggcaaatgatagagtcaaacaagctgaaaggcacattcggcctccctcgaagtccatgccatctcgaccagtctcctctaatggaattcgcgatgatcatgcaaagagaaagcaagtggtaaaaagaagatttgatgacgacgacgatgaggacgaccccttggcaatgatcagaaatatgttcggtgcgaggatagctaggcaggaggacgaagagcaacttcgcttgattgaggaagaagagagacgcgagcaggagaggaagaggcgaaagatggcacgaggccgatag

SEQ ID NO: 15198 - DNA, 930 bp, Zea mays
  Peptide Sequence Number=SeqID_56977
atggcgagtcacgactcaagaatcgcggacatggcaggaggagaagcaggagaagacgagagaccgagcgaaagcggatgggacgacgacgacaaggatgacggaaagtacccgatcgggttccgcttgaagccgacgaccgcggtgaagcgaccggcggcgagcgcgcacaccggcgcgccgaacaagcggacctcgttgccggacggacggctagcgcgaacgcgtggcgaaggcggcagtggcgtgcgcatgccgccggtcggagtcggagccggagcagcagggtgtcatcacgggccagggctgcccacgcattggccgtcggcgaggatgccgaacgcgaacggccaggcgccagggcaggcgccgcggatgtcgaggctaggcccgccgcaccggaccagtgcgatcgcccccaactctcagggtgctagtgctacaactacaatgatgcccccgccgaacctagatcctggccaaccagctcggctgccctctccacagcatccaccgccggagtcggcggaggaagcgtacaagaaccgagtgtacgcgagactgatagctgaaatgaatctacagaaagcacagcagtcggaggaagcgtacaagaaccgagtgtatgcgagaatgatagccgaaatgaaactacagaaagcacagcagcaggacagcgcggctcgcgccgagcacgagcagcaacggatcggccagaacgcgtccgcggaggcggagccaggatgctcccacgacgagggcgccaatcgccatgctggagtcgaagtcacggcccctcccgatcagtttccgctgcctcatggtgggtacccttacgggagaagtaacaacgatcttgctcagcgaacccacttgcagcaatctagctcagcggtggaaaaggcaccggcggctgagaagctgctctaa

SEQ ID NO: 15199 - DNA, 180 bp, Zea mays
  Peptide Sequence Number=SeqID_56978
atgacgaatgcgcccacaagctacgagctttcctttccaagcctggctctagagaaacggccaattcctacgtatctcgggagccaggcccaagaggaatatttgcatcccgcgagccagactgaagaggctgatcaggcaaccaaacagaagaaagctgtatcccgtgagcctggctag

SEQ ID NO: 15200 - DNA, 891 bp, Zea mays
  Peptide Sequence Number=SeqID_56979
aagtacacgcacgacttgctaaagcggtttgggatgaaggacgccaagcccgcaaagacgccgatggggaccgacggacacaccgacctcaacaaaggagtgaagcgaatccttagatatttagttgctacgccttgcttcgggctctggtatccaaaggggtctacctttgacttgattggatattcagattccgactatgctggatgtaaggtcgataggaagagtacatcggggacgtgccaattcttaggaaggtccctggtgtcatggaattctaagaaacaaacctctgttgccctatccaccgctgaggccgagtacgttgccgcaggacagtgttgcgcacaactactttggatgaggcaaaccctccgggactttggctacaatctgagcaaagtcccactcctatgtgataatgagagtgctatccgcatggcggaaaatcctgttgagcacagccgcacaaagcacatagacatccggcatcactttttgagagaccaccagcaaaagggggatatcgaagtgtttcattctcgaaggagaattgaaagggaaaaggtggacttggaccatgaaagacttccactgcactccgatgagaggggatgctatgtcaaaggcctcgaaagccgccacaaagacctagctctcgtcgaagcaggctgtcgttacgcccgatcgggacttcagctgtcgaggaagacaagacaaaggaaggtcccaataacggactttgatgcccgcattgaggtctacgaagcctggtcaaaggccacatacataatattgaggactacggatgtagcacgtgccaagggtaagcctgcactttcatgggatgcctcttggtcactctacagatacccctggctgaggacctaa

SEQ ID NO: 15201 - DNA, 2463 bp, Zea mays
  Peptide Sequence Number=SeqID_56980
atggatttgtccaggctcgcctccgtcgccgggcccagccgcgcggccccgcgggcgggcctgcagatcggcgccgccgggaatggcttccgcgtctgctccctgcggcaccgcggcgccgggaacgggcgcctcacgtccgccgccgccctcctccgcggcagcagcgggctcttctacctggctcccgcgcgcgggggccctccccgtctccgcgccagagggcggccgcggtgccagggcagcgactcgttggcctacgtcgacggccccttggaggccgccaagggctccggcgaggtctacgacgacgatgccaccagctcggggcccgacgacgacgacaatgacaagggccccgccgacgtggacggtctccgggagatgctgcagaggtgcaggaacgagctcgaggtggccaggctcaacagcaccatgttcgaggagaaggctcagcggatatccgagtcggccatcgcgctcaaggaccgcgccgaaggcgcccagagggacgtgtccgcggccgtcgccaccgtgcaggaggtcatcgtcaaggaggcggacgccaaggaggccgtccagaaggctaccatggcgctgtcgatggccgaggccaggctgcagctggcgtccgaggcgctggatgccaagcgggggtcggtcgggcccatggaggttagcatcgaaggcgtggaggaggaggcccttgtgtctgctcaggaagagatcaaggattgccgggcagccttgttgcggtgtgaggaggagctggaacgcatccaggaacagaaaatgaacctgcagaaggaggttgataggctcaccgagctcgctgagaaggcccagttggatgcatccaaggccgaagaagatgtcaccaatataatggtgttggctgagcaggcggtggctcttgagatgaaagccacgcagcgtgtcaacgacgcggaggcggtgctgctgaaagcggagaaggtcatatcctcggttgacaccgtggtggagctaacatcacttgctgaagagcagaaaagcgctgaagaggatagcgtttctgaagggtatgagtatagcagcaatggcactgatgatgttcctgtgagggatgaggtgtcaagtatcgagcgtctaatggtaggtgacttgactgttgagggcattgagcagcttgaaccatcccgtgaaatatatgatgaagcaagcagcgataagatgtccgttgagcctcagaaagaagctgagcctgattcagacaagttgaagcaagggaagaagcaggaaatggaacgaaaggagttcaccaaggaaccactgagtgctcaaaaatcactgaagaagagatcatcccgcttcttcccggcatctttcttctcctccaaagctgatggagagtttacacctacatctgtctttcgggggttaatgaaatcagtgcaaaaacaggctcccaagcttgttgttgggatattgcttcttggtgcaggggctttcttcttaaatagagctgagaagagtcaactatttcagcagcaagaaattgccacaagtattggaaaggtaacctccacgacaaagcccatagttcgtgagatacggcaaattccacagagagtaaagaagctaatagagctcttacctcatcaagaggtaaatgaggaagaagcttcacttttcgacatactgtatttgcttcttgccagtgttatttttgtaccattatttcagaaaatccctggaggcagtcctgttcttggatatcttgctgctggtgtcctcattggtccatatgggctctccatcatccgtaatgtgcatgggacaaaggcaattgcggaattcggagtcgtgttcttactgtttaacattggacttgagctttctgtggaaaggctaagttcgatgaagaagtatgtcttcggcttgggatctgctcaggtgctagctactactgcagctgttggtgtgatagctcatcgttttgctgtgctaccaggaccagcagcaattgttgttgggagtggcttggctctgtcatccacggctgttgtcttgcaagtattgcaagagcgtggtgaaagtacgtcgcgtcatggacgtgccacattttctgtgttattgttccaggttggtttccaagcaatagcagaagccatgggaatggctgcagtcaaagcagtagctgctataactgccataattgctggaggtcgtctgttgcttcggcctatttacaagcaaattgctgaaaatcagaatgctgagatattttcagcaaatacactccttgttatttttggcacaagtcttcttacagcccgggctgggttatcgatggcacttggagcttttttggctggtctgttactagcagaaacagagttctccttacaggttgagtcagatatagctccttatcgtggtcttctgttaggacttttctttatgacgatggaaccattttaa

SEQ ID NO: 15202 - DNA, 810 bp, Zea mays
  Peptide Sequence Number=SeqID_56981
atggtgactcggtgcgccgtcggtgttctccgccctgtcgacttgctgatcctggcagatgatacgactgccactcctccggacgccaacctggtccccctcctccgtttgcaccgccctcaccgacccctatcggcgttgcgctatggaggagtacgcgaccctactggccaaccacacctaggccctggtgccgtgtccaccaggcaccgacgtgtttgtgtttgcgtgaactgtgaagcgtcatctaagttacataatctgttcctatcactatacccacgggtacccgatacccgacgggttggagagtgcgttgctgtgtggtggaggccgaactttgagactgtgatgtatccttactgtcctccacatatcactaagcccaaggagtgcaagaaacttttcattgttcacctatccgaaagagagtattttgctgttccaaggaatctgaaactgcttgctgttccactgtttgaactctacgacaatgttcagaggtacgggcctgtcatctctaccatcccgcagcagctttctaggttccagttcaacatgttgcatttgagctcgttattttcatcatcctcttcccatattgccatgtttccccttgagaatgaagtgcgctccgcattttccaagtactccacaagagagctaaagaacattctcaacaaagcatttttacccaaaaaacaaacaaacaaaccagattttggctacaaagggcctgtttatgggctgcgactaacaggtttaactgactttagttctatccgtaatcagtaccacactagaaattaa

SEQ ID NO: 15203 - DNA, 861 bp, Zea mays
  Peptide Sequence Number=SeqID_56982
atgtccatcaggcaccatgatggaacggcgggcgacgagatcgtcgaggacgtggtcggcgagagcgtatcgccgaagcgtgaggacctagccccgccaatgagggtagtgggagtacgtctggtccaacacaatagacatgagggaccggatgttgtgcattccagcgtcctgagcgtggagagcgggcgatgtggtcagcgtcgagtccaggggcgagggggcctcgggtgtgagcggaggagcctcatggtctaccggaggatgggcgaggatgagacgttgcgcggtggccatctgggcagtcaaggctacgcccatggcacgctcgtgctccagggcgagggacgcggctcgctggcgctcctgcgaggcagccacgacggcctggatggtggcgatggcggcgaccagcggggagtcggtggcgaacgccgtgtaggacgcgacgatgtcgttctaggcgggtacagcgagggcgggaaagcccggaggggagcctcggcaccattgctgcgctgcggcagacgtaggaggtgcgtcggggaggggcccgaggccgacgatgtagggggggcctccaacaacgagctcgctgcgggggacgaagccggccagggaggggccgacgctcaggggggcagccaggagtctggcaaagaggtgctggtcggggatgacgtccaggggcggtcggcgacgcccgcggtcagggccacgtcagcggccgcgcctaggccgttcatgccagtgaggggtgggaggaaggccaccatgcgccgaggagcagggctcgccgacggggagggcggcggccggagcgaagggagccagggacggctgggttggggcgatggctag

SEQ ID NO: 15204 - DNA, 492 bp, Zea mays
  Peptide Sequence Number=SeqID_56983
atggcgaagatggcgtggtgtccggagatggccggagcgacggtgattgacagagatggcgcgacgttcgcgagcggcggtcacggcgtgcacgagcgagcggcggagcgtgtggacggcggcggcgcacggtgtggcggggcgcggggtagggcacgcgcgtgggggtggcggggcgcgtacgggcagcggggcgcgtacggtcagcggcgcgcgcgggttggcaggaagcggggccgggagcgcacgggcgggggcggcgtggtgtggcgcggcgagcagtgggcggcagcgcacgcgagcgtggacggcgacggcagtgcaggtggtcgcggggcacgggggcggcggcgcgcgatggtggcggggggcgtcctcgacgggaaacgaggtgagaagtacaaacgtgaaaagaatgacgaactaaaactatgggctggccgggtcctcgctcctgcatcttctggtataaaatgggcagaacgacgctga

SEQ ID NO: 15205 - DNA, 381 bp, Zea mays
  Peptide Sequence Number=SeqID_56984
atggcagtccatgtggagcttcagagtactgacgagagaaactgtctgagccccaaaagggaagaccaccttcggcagacagtgcggaatcgaaaaattgcagcaacaggaagccttgctatgacagtttcgaaaagatcttcagggaaatctctccatatctcttgttccatgacttcaattttgtttgaggagggtgccttttcacggtttcgatctctccgcggtcgcttgcaagggggagattgggaaacaaaaactcaaatggctggattctatgtgaatctgaggaaaattgaagctgggaggatactctccttatggcctgacaggcaatgcagtgaaggcctctttggattacatccaggaaacattgcctga

SEQ ID NO: 15206 - DNA, 423 bp, Zea mays
  Peptide Sequence Number=SeqID_56985
atggcgcctagtaagaaaaggaagagaaggaaagaagtagaggaatttatagaatcacaaagaggtgccatggataaatttgttcgcactaatacaagaacttcaagtaatgaagatcaaccaaatttggctatagttgttgtggcggaacaaccaaataccaacgaagaagatcatgaccctacacttgaagaaaatgttgacatcaacacaaatggtaatgatgtgactggccatgatccaatatttgattcatctcatataggaaatgatagctttgatgaacagtcggttcctactgaggatatctatgacccaaggaattggggtaatcttgataacaagtcgagggatatattggttgagaagggacctataagagaagaaaatattgtatttcctttggatgctaatgctttttaa

SEQ ID NO: 15207 - DNA, 339 bp, Zea mays
  Peptide Sequence Number=SeqID_56986
atggatcgtgtcggatctggtgggggcgagaggattgagcagtgggggacgacgcattgctggcgcggcggattcggggactgcgggcgcggtggcttcgcggccgttgcagctttgcgggcgcggcggggactgcgggggcgcggcggattcagggacagcgggcgcgaggacggcggcggggactgcgggcgcagggaatcgcgggcgcggcagaacatcgcgagcttgcggcagaacatagcaaatgtggacgcctacactaagggcataaggagtagtagagattatgtcatatattttaacatgtctttaaccgttctgtgggtctgtggctag

SEQ ID NO: 15208 - DNA, 307 bp, Zea mays
  Peptide Sequence Number=SeqID_56987
tctggtacaagcaaacccagcagcgccgggaatcagcgatcagctgcggggcccacgggactctgggagcagttgcagacggaccttatgggcgtcggtgcatcgggtctagcggagacccgccattcccctccagttggccccaccagccccacggtcttcgtcctcgcctcggcgtctcagcctcgcgacccgcgtggagctcacggcggcgaccgccattgtagttcccggagcatttgtgatttaggtgctagatcaattgctgcgatcacagggggggtgggagctcgatttggaaatcaag

SEQ ID NO: 15209 - DNA, 279 bp, Zea mays
  Peptide Sequence Number=SeqID_56988
atggctggcgcaccggacagtgtccggtggcgcaccggactgtctgctcttgtattgaatgtgttggctgaaaacttggatgccttgaagtgtggtggctgggaggttgctcgactgcgagttggtcggcgggagttgattagcggagagttggtcatcggagttggtcattggagagttggtcaatcgatccgcctcgcagagttggtcgatgaagtggttgaaacagtgcttggcatggtcttcagcaagattcacgggagagtaggtggcatttaa

SEQ ID NO: 15210 - DNA, 1452 bp, Zea mays
  Peptide Sequence Number=SeqID_56989
ccgattaatggtagaacaagtgataaatctcctttctctgaaaactcttcaagggaaaataagtttggctcaccagatcatatatcatcagatgacagttgtcatcctaacttgctgcatgagaattttgattcagatgatcaaatctccaaggcttcatcttctgaagacacagatgattcagaaacgggtcctccgaagttactagttgcatctactgaagcaaacaaattgatgtgcaatgcatctattgatggttctgatgccattaagcaatcgagaaaggatggtttccatgcttctgatgttgagccacgtctccaaagaaacagtatcagcggtgatattggcacaagcgcttcttccagcagcaaccatctcgaagttgttgagaaggataaggaggaacaggtctcaagtaacagcattgcatcagagactacaagaaatggccgaacggtcacctgctcaaaaccaaattttcagccaaggttgggtggtgttcgttctcgaaatcatttagtctggcagcaacgatcagataaagctgtttcattggattcaagatctgattttgctattgttgataataaagttcgtaaacttattgaggatctaaaaaatgagcgtactgatcccgagagggcagcaataggagagctgctggtcctttcaaggcataacatggagagtagaatttccattgcaaaccacggtgctatacccttcttggtgaatcttctttactctgcagaccccagcatgcaggaaaatgctgtaacagtgatcctgaatttgtcgttagatgacaacaacaagatcaccatcgcaagcgcggacgccatcaagcctctcatccacgtccttgagacgggtaacccagaggcaagagcaaactcagctgcaactctcttcagcctttcagtaaacgaagagaacaaggccaaaatcggacgatctggagcaatcaaacccctggtcgacctgctgcgagatggcagtgcacaggggaagaaggatgcagcaacggctctcttcaacctatcgatatttcacgagaacaaggcccgggttgttgaggccggggctgtaaagcccctggtggagctgatggacccagcagctgggatggttgacaaggccgtcgccgttttggcaatccttgccacggtgcaggagggaaggaacggtattgctcaggcaggtggcatcccggtgctggtcgaggtcgttgagctgggctcggcacgggcgaaggagaacgctgctgctgctctgctgcagctctgcacgaacaacagcaggttctgcagcctggtgctccaggaaggcgccatgcctcctttggtggctctgtcgcaatcgggcacggcgcgtgcacgagagaaggcacaggtccttctgagctattttcgcaaccagcgtcaagtcggcaaggtcaccaggcgctaa

SEQ ID NO: 15211 - DNA, 294 bp, Zea mays
  Peptide Sequence Number=SeqID_56990
atgtcagtgccatcctgcgcgctctctccctctctccctctcgctgcccggagtgacctccggtccgcccgagattccccctccaccatctgcccgtctcagcctcgttcctgcaacccggacctcgccatagggctcatcgagtcctccccaacctttctggctatcaacaccacccccagcaccctagaaaccccaatctacctcgtctacggcagctgcgccgccgcgggtgagaatggcgccgcccctagccggccggagaaggtgaaatcccctggcaccccatcttaa

SEQ ID NO: 15212 - DNA, 900 bp, Zea mays
  Peptide Sequence Number=SeqID_56991
atgaacgaggtttcggagttccggtgcttcatgcgggccctgccgcactactacgaggtggagttacacaacttcaaccccaactccatcaccgaggtgaggagcgtgcaccacaccgtttgtgtcggcggctgcacgctccagctatgctcggactgggcggtgttagaagaaatggaggtgggggctgccgtgggagctctagacccacctcaaatcgctgcaggaggcactgcggaagctctaggtccgcggtctcaccatggccggggtttttgcggccttccactggcggacggtgctggtgctggcgctggccgactccacctcgacgagatgacccccgaggcctccgtggaaagctcccgaatggcctcgatcgccctctccaccgacgaacttctctggcaagtgaaggaaatagcagggaaagcggattattccgtcgtggtgccgatgcgccccgagcagggctacgtgtccctgggcttccgaaccgcccgaccctcggccctagtggacacggtggacagggaggtgtgctggctggcggccgaggagaagaagtggaagaaggatgaggcgaagaagcggccccgcaagaagatggtggctcgcgattcgctagagaagcgccacagagcacaggatagggaggggatcccgctcgaggcctctcccagtgctgaggaggaggatgatgacgacgatgatgaggggatggaggtccgcgagggcttcagccccaaggtcgggcccagtagcatcgctgcccgggcgccaacgtcagccgagcctgcccccgtccctgcctcggcggaagaggcagaggtcatggagggggaagccactccccttcccatggaagccgttgtcgcacttgcgggtgcgccggcctaa

SEQ ID NO: 15213 - DNA, 441 bp, Zea mays
  Peptide Sequence Number=SeqID_56992
atgacgaaggacacaggccatgggtcacggggaggaagtacagtgatcttctccgccatcaaaatgagggaagaggcgagaggagacgaagggctctgtaggaagaaggcgagaacgacgttcgaagtatgtcccatcgcattaaatgactgtgtcccctctgaggaaaaactcgtcgagcgccattccacatcccgcctcaaaagggaggcatcgagccctcagaccccatcgaacgggtctatgaccacaagaatcacccgcagataccttttggggcgtgtctccgaacctcaagctgatttcgatcgaaaggagctcagacccctgttcggatcacccgttaacagctcaatggaaacgtcatgcgcgttacccatcaagggtagcatgatgcattcccccttcctcctcgcagagaggcgacaaaggggcgtatga

SEQ ID NO: 15214 - DNA, 1191 bp, Zea mays
  Peptide Sequence Number=SeqID_56993
aagataaaaataggtgataagatagctcaatttggatcgtgcactttcacgccgaggactgggaagacctcggctgaagttgttgagattgttccctacgctaggaataagtggggcaattggtgggatttttggttttatgtggcacccggggatatcgaagggttgccgagtttgccccttgccatcctgtgttcgcattgctatgtggcgtttccacaatttgaggtggcaaaagaagatgaagacgagggggcccttcgatatgcggcgcacctgagtagcagatgtgacttggtcgaggagtttactgcctacgggctggtgcgaagtcctgtcttcgccgtggatctgcgcagccgagacgtggccgcgtttgtgcatgaggtcgaggccgaggccgtcatgattgttggcaattacacggcgaagacaaagactttgaggagatgggatatttgcggttccaacgctaggttgaaccacgtttttgagctgaatcgtttgccgtacggctcttacacggagggggactctgccgacaccgctgatcaccgagggaaacaaccaaggccctcagccgatgaaggcccctcacgggataaggctccgggtgcagtcgctagaaagaggaaattaggtacggcggctgaggagttgggtctgatggcttttggtcattttgttggggaattgctagagatgtgcgcagctcctggggaaacgatgtcttcgcccgagctccgggaaacctctgcgcgaatgctaaaggttaccggggcagtgatggagaaagatcgccaggatgcacaacagaagaagcatcgggcccccgtcaggttggtggacccgaggcgtgaagtgaaggtggcgtggcctagcatgaagtccgccgcctcaggtgccggtatgcccctgcccgctacgcccgccagtgggcgaaggcccccctcgccaccatgcattgccgagacggtagtggcagcagctggaggagtctccacggagctgtctgtggacgactacctggtgggcggggtcgctatgtttgacgcccagacggggctgccgcctgctggggcggtgtctggccagctggcggttgtgccggcggcggcgtccgctggcccggtggtcgcggcgacagaaacgaagggtgacacgggggcccttagagggcccatgggctag

SEQ ID NO: 15215 - DNA, 462 bp, Zea mays
  Peptide Sequence Number=SeqID_56994
atgggcaagaacaacaagcgcaagcatgagccaactcctccatcggaggattttggtgactcggagtactcagaggaggagttctcctctgagtctgaggggtctccggctcccatccccctgtgtgagttgtctgacgactcagacgactcccaggggctcgcggcggaggtctggacgtacatccgggccgtcgagcgctccgggctcgagggctcggatgagtcggagtactcctcggatgaggaggactcggacggtggcggcaaggacgaggacggcgacgacgacgacgatgaaggcggtggcggcggtgacggtgacggcagcggcaggggcggcagcagcggcagcaaggacggtgacggcggcgggagcaggggcggcagcggcggtggcggcagcagcaggggcagcaacaggggcggcagcgacagcggcagcaacagggctagtggctag

SEQ ID NO: 15216 - DNA, 432 bp, Zea mays
  Peptide Sequence Number=SeqID_56995
atgtgggggccgccttgtctgtcgttcttccaccttgtaacagaactgccccgtagctcgcgcgaccttctcgccaccgcgacaatcgcgcaacaaccgcgcgttgccagggaaaaccgggaccgggcgctccgtgggctgggggataaaagcccggcttccctcgcgcccttccattatcagctgccagtgtgcttcaaacccagacccaccgccgcaaggagggaagaagaagggaggccaccgcgaccaatcctcgtcctctctgccgtgttcttgggggaggtggattccgccagcgagggtgggcataaaatccgccgcaacctattgactcgtccaaactccattgccctcagcattcgccgttggctcgcgctgctgtgtcggggaatccttccgccgcggagtgacctcaccattgttccgtga

SEQ ID NO: 15217 - DNA, 372 bp, Zea mays
  Peptide Sequence Number=SeqID_56996
atggcggtgtatcagggcctgcggcaagcagtatccttgacgcgagccagcgcggagctcaactctggtctcatcatcgatgtctctattctcaatggtcatatccagcagccccctcgaggtggtccaccagatgaccgagggcagcgtttgtcctccccttcgaatgaaagacttcaggattggcccatgaggatgaaccattccctcgagggggctagtgttgggatgaaggtcaacctagccctcggtcaatcaaacgaagtcatcaccaaccctcgactaaccgtaatgctgcaggttgctagagacttcacgtggcaacaaattcgacaacatcagccatcgactggcggagtcgaaggcatgtga

SEQ ID NO: 15218 - DNA, 228 bp, Zea mays
  Peptide Sequence Number=SeqID_56997
atggcgttgtgtggagattggagaggatttgatctctttgcatatgacaatatatttgagaatctaaatctgttggcaaccattcccttgtgcaaattattgggtttgatgttcctagctctgcatctcaaggcagcaacattttcaagaccaggattgaaggtgcaaacaacgttgatgcaggttcataagattgaaattgaagaattcaatgtgaacaatatctaa

SEQ ID NO: 15219 - DNA, 282 bp, Zea mays
  Peptide Sequence Number=SeqID_56998
atggcgcacaccaccacggcctggtttcggtcaccagacgatgccgcagccgagatcccgaccacggcggcaatggcgcagccgcttctctctctctcggtttgggctctggcggcagtgcgggtggagaaatgggccaaggcgagggttttctttagtgggccgaaagtgggatccgaggcccaggtgaagaagcagcaaatttttgttgtttctgttccaaggtggtacctaaagaagaaaatcaagactgaagctacgggaggaagggtcctccgttaa

SEQ ID NO: 15220 - DNA, 417 bp, Zea mays
  Peptide Sequence Number=SeqID_56999
atgggagctggcgcagcgggagcagttgaaggaggaccctatggggagctagacatctttggagcccctcctatgaacatcgtggatgatcgccctcctgaagctagtagcggatctagagcggccaagaatatgccgacaagaactcgtggtcatgatggggcagggacttctcggggtagtaaagaggagaccccaatcccaccacttgtacctccaattttggcggaggccattgctgccttgcttaatgctacggctgacaacacccggtttctccgggaaatggcgggaaatcagatccatccgcaaggaggccgaggccaaaatcaagccccggagatactacttatatggagtttttggaaagttgtccccctgttttcgttaaagcagacgaactctggaggcggatga

SEQ ID NO: 15221 - DNA, 201 bp, Zea mays
  Peptide Sequence Number=SeqID_57000
atggcgagagtagcgtgtaccgtccgtggcaagaggctggacggtggagtatctgtgctctcggttggtgtgaacccattctggtctttagaaacccggatcctcagctgggtattaatcgattcatatcgtcgttacttctcggacatgaagacttggtcaccgccctataccgtagtgacaagtgaactcaggatgtga

SEQ ID NO: 15222 - DNA, 486 bp, Zea mays
  Peptide Sequence Number=SeqID_57001
atgaaatcaaacaattttgtgagcaatgctgtgttaactggaacagaagagacggtaagagcagcctcaaagcgactaactcagggaatggcagatttcagcaaggcaatatcttcagcaaaaaccgaagaggaaaaaactaaaattaaaggcgatcaacaaacttcaacaaggacaatgaggtcatataacaatatattggcaatggcacagattctgggtgctagcagttcttataacattggaggcagatacaagatggtgatacaccagattgtgcatatgtttgcaaatcattcaagggggaagaggtcacaacctgctactacaaatgggaatggccctgcaaacaagaaagggagaggaggaatgcacaaccagcttgtgaacagagcttttgaaggactgtctcgtggtggtagaggcactggaagggggcgtggcaggggtggccgaggacgaagagggtggggtggctaccgctga

SEQ ID NO: 15223 - DNA, 1107 bp, Zea mays
  Peptide Sequence Number=SeqID_57002
atgagccacctcactcctagggctgatgagcggtcgtttgaggactggtggaggaaggccagtaagagtacaaggaaggataagagaaaagggttaaactgtgtcatcatcccgggggcttggtgcctctggctgcatagaaatagaacggtctttgatgggatttgtccttccattcagaggatgcagcagctgttcagtgatgagttctcctgttggctcatggcgggcgccagaagtttgggtcagctagggttaacggggctgactgaattggatgatagtattgaggcccataggttgttcattctcttatatgtccattggttccttctgttaatgcgtaccttatattggccagattctttacaacctttatttaagcatgtggagcaaggatcagagattcgtgagaagattatttgttttcttcgagacaaggtttttcctcttaaagcagagctactgaaacctcaagcagaaatggagagatttataacggatttggtaaagaaaagtgtgcaagatgtaactggttcagaatttgaactattcatggggtttctgcgaagcttgagcatatttggggattctgctcctagagagtcctttcaagaactaattgaaattattcaagcacaggctgatctcaactcacaattcaatgtttcggacattgaccacattgaaaggtggatttcatgcatgtatatggctcttcctatcttcatgagaggagcatcagcaagcaagttcctcaattacttcgttaagcaaattgttccagcattcgagaagattcctgaagaaaagaaactggatttgctcaagactattgcttcaagttcaccgtacgcgacagctcaagattcacgtcagctgcttccatctgttgttcagttactcaacaaatatatgcctgggaagaaggtggacgatatcaaccataattatgttgaatgcttgctgtacacttatcatcatttggctcataagactccaaacacaacgaacagtctatgtggttacaagattgttactgggcaaccatcggatagacttggagaggacttcacagagcattacaaagattttacagagaggtag

SEQ ID NO: 15224 - DNA, 204 bp, Zea mays
  Peptide Sequence Number=SeqID_57003
atggccgagcggctccctcgtggtgcccaggatcccctcccgcacatcttcctactggagctcgagctcaacccagctcacgccccaccgtcaatcccgtctaggccctggcatcggcttagtgcgctccaccttgaggtggtgtccgccgtcgtggagcaccgctgcgagctcccagcgccctcgcctccagtctcgccctag

SEQ ID NO: 15225 - DNA, 591 bp, Zea mays
  Peptide Sequence Number=SeqID_57004
atggtagtcgggaagaacgcgagcagtcgtgagaagttgcttcccaaaaaccttattttcctctcccgcgagggattgttgtcatcatcgtcgttcggatggaaggttgcgaggtcactcttagtcggctgctgcagccacagcttctcggtagacttactggagcgtctatccaccgacttcgatagttgcacgctccgacacgtcgactctcacagtcccatcgtgagctccccaagcggtcaagcccaaggccgcggacacgctaggccaccagggcggcggcgacgaacacgagtagggccaatgccaccgcgtcaagtgtgtcaggttcttcagcggctgcctaggcactgcggccccgccttcgtcatcctactgtctctcggcacccgacgacgagagcagcgggagcacgaggggcaccgactcgtggagccatcgaagctgggcttgggcactggggagcaccatgagggcgctgagactgaccagctccttgtccagcaagagcatcatggtcgtatccacaatcgcgtgaacggcaccatgcatgcggggtttgcttcatgggttgatgccgctgcatga

SEQ ID NO: 15226 - DNA, 456 bp, Zea mays
  Peptide Sequence Number=SeqID_57005
atgcaggtggcgtgtaaccgcaccacggggatgcaccccttcgacttcatcgcatccagcacggaggcccaggcccacacgtcatgtaaccggcgcgccggttactacgtgcgagaaactgcaccgccacttgcgccaatgcagcgccttctcgactgcggaaccattgccgcgactcgaggcaaccctgcgtgtggcccaacagtgccaatcgagcacatcgatcacggggaccgggaaaggggatatttcgaaagggatccttctccgcgaaggaagcgggccccgagccctcctactgatcaggggttcaaaggctggcccctcggaagggttcgacggtcgccccagagcactcgagcttcgagctcactactaatcaggggttcgaaggctggcccctcgaaagggttcgacagccgtctcagagcacccgggctctgcgcccactactga

SEQ ID NO: 15227 - DNA, 339 bp, Zea mays
  Peptide Sequence Number=SeqID_57006
atgccgcttgtgcttccgaccgtcgtccccgcccgtggaaatctcactcacccgctcgtcctggctgcggcaggctcgtgcctagggttcctcttcctgcaggccgaccaacagctaggcggcgctccgcccacgacccgagctgctccgcccttgaccccgcgagcgactccacccacgcgcttccgcctccctccgctcgcacatctgagatatccattggcatttgcagagaagctggttttggcggtctttggggcttggttagctaccatatcactcgctatctacaaggcttttgatcatctcggcatgttaaagaagaagaaatgcttctaa

SEQ ID NO: 15228 - DNA, 1182 bp, Zea mays
  Peptide Sequence Number=SeqID_57007
atggctgttctgacactggttaatatccttatcagcttcgctgcttgtgctgaagctctaaggagagcagacttccctcaaggtttcgtctttggcactgcttcttcagcttaccagtatgaaggtgctgtcaacgagggtcaacgtggacctacaatatgggatactctcacaagacgacccggacgggtgatagatttcagcaatgcagatgttgccgttgatcactaccatcgttataagaatactggtcccactgaaaactatccagaaacgactagcctaacatttgactggcaggaagatgtggacttgattaaggacattggcatggatgcataccggttctctatctcgtggtcacgtatctttccaaatggaactggtgaacctaatgaagaaggattgaattactataacagcctcataaatactctattagacaaaggtatacaaccatatgtaacactctttcactgggaccttccgcaagcactagaagacagatatggtggatgggatgattttgttcactatgcctctacttgcttcaaggaatttggagatagagtgaaacactggatcactttcaatgagccccataattttgcgattgaaggctatgaccttggcatccaggcacctgggagggagggcaaatcatcgactgagccttatgtcgtagctcacaacatactcttagcgcatgctggtgcctttcatacttataagcagcatttcaagaaagaacaaggaggtatcattggcattgcactcgattctaagtggtatgagccactgtcagatgttgatgaggacacagaggcagcagcacgagcaatggactttgagcttggatggttcctggatcccttaatgtttggccactatcctccttctatgcagaaacttgtgggcgacaggctgcctcagttttcagctcgggcttcgatgttagtgtcaggctcactagattttgtgggcataaaccattacaccacactgtatgttaggaacgacagaatgcggatcaggaaacttgtaatgaatgatgcttcaactgatgctgcggtcatacctactggcagcgtcaggatggctgcacatagtgccctggggcatgttcaagctgatgaagcacatcaaagaaaagtacgggaatccgcccgtgatcattactga

SEQ ID NO: 15229 - DNA, 594 bp, Zea mays
  Peptide Sequence Number=SeqID_57008
atggcgtcgctctccatctccgcgctaggcgcggcgacggcgagcagcagcagcttctggggcaaccggctcgccacctactccgcgccgcagcctggggtctgttcctgcttcccaattccgttccgttctgctgatggtttggtaaggtttatggtcaagatatgcccaattgaaatgagacttaagagatgggagcgaaagaagtgtaaaccaaacagtcttcctgtgctgcacaagatgcatgttaggatcggggacacggtacaggttattgcaggccgtgagaaaggaaaggttggagaagtcacacgccttttcaagcacaacagcacggtgatcgtgaaggacctgaacttgaagtcgaagcacaagaaaggcacagacgatgaacccggtgaaatcgtcatgattgaaggccccattcatagctcaaatgtgatgctctactctaaggagaagagtgtggtaagcagggttggccacaaattcctggaggacgggaccaaggtccgatacctggtcaagaccggtgaagtaatcgacagtgttgagaagtgggtaaaggtttttaaggaaggaaattcggagtaa

SEQ ID NO: 15230 - DNA, 658 bp, Zea mays
  Peptide Sequence Number=SeqID_57009
atggctggaagcaacccggctatccaccaagagcaaaggagagcctggaagcgtacgctgaggagatccaagaagatggccattctgtggtggacggcgctcaagaagtccctgagctgcaagtcgcaggactcctgcgacgtgatcaagcgggacgacgcctcgcgcggcgccagcgccagcgccaggggcctcggtctcaagaggtcgttcctgctgcagccgtcgttgtcgctgccgaggtcggggtgctcgcgctccatctccaatctgcgggacgtgatccacagcgccaggttccaggcgccaccggccgtgcgcagcaagtgcgacagcccgatgtcggtcgagagcagcgacgtccttaacgcggtgacgcacgacgtgctgctcgccgccggggggccagcatccgcgctcgccgcctcggacgtaggcgcggtgccgccgtacgcgcacagcccgctcctgatgcggtgcgccaccggcgcccgtctctcccagaggaagtcaccgctccgcctcggcggcggcgacctggggtcgcccattcccgcctgggccccctgcgtcgaggtcggggtccgatgcaaccgctgtggcgcccgcttccccaacgacaacgccctggagtcgcatcacctcgtcttccacgctg

SEQ ID NO: 15231 - DNA, 369 bp, Zea mays
  Peptide Sequence Number=SeqID_57010
atgtcaggagcacacgccaagaaggagatggtgaccggcgagaagcccgccacaagccacgagaaagctccatcgggagagtccggcaacaagaagagggaggaatcacctccccacgtcaagtcgcaccggagtggcgacaagaagaagaaaatgaataaagtggtctactacgagaccgattcttcgtcgccttccacctccggctccgacacgctgtccgtcacttctaagcgccatgagcgcaagaagtttagtatgatccccttacgctatcctcgcatttccaaacgtactcctttaccttccgtcccactaggcaaaccaccggttttaacggtgaagattattgtcggggaccataattag

SEQ ID NO: 15232 - DNA, 486 bp, Zea mays
  Peptide Sequence Number=SeqID_57011
atggcaaataacatgccgtcgtctcaaatccacagccgcctgcgctgcagctgcagctggctgctgcttctcgtcctccatttctctagctcagccagcagggccgccggcggcaaggtgccggcgctgatcgtgttcggggactcgacggtcgacccgggcaacaacaacttcatccccaccgtcgccagggccaacttcccgccgtacgggcgcgacttcgaccggggcgtcgccaccggcaggttctccaatggccgcctcgtcacggacttcctttccgaggcgttcggcttgccgtcgtctgtgccggcctacctcgaccccagctataccatcgaccagctcgccaccggggtcagctttgcctccggtggcaccgggctggatgatctaacggcgaacatcccaggccaagtacggtccagaaatgaccctcaaaggcaccattttaacaagttaagggacacccggtgcatcacttaa

SEQ ID NO: 15233 - DNA, 123 bp, Zea mays
  Peptide Sequence Number=SeqID_57012
atggacgacatggacagagtccacctcgccgtggacgacatggacagcgccgcccgctctgcagcctgttcgtcccagcgtcctatgtcgccgcgacctacagatgtctaccttatgatttga

SEQ ID NO: 15234 - DNA, 348 bp, Zea mays
  Peptide Sequence Number=SeqID_57013
atggcgggcgagcgtaggtccatgacggtggctggcggccagagcacgtcatgtccggtgagaagcgctaggagacctgcgcgcgacggcctggcagcgctggaagccatgttgagtgtggggaccgagaggaggaagagaggagatggcgtgagggagaagggagagggtgggctgccatttatagagcaaagctctggacatgccagactgcaccagcaggtggcagacgttgacacaatagagatttcgctggagaatgcggattcggactacgtatttggacatagcctgactgtcgagaaagcggattcggacatagatcagataacatcacaactgtcgtga

SEQ ID NO: 15235 - DNA, 237 bp, Zea mays
  Peptide Sequence Number=SeqID_57014
atggatgaacccacattcgttctcactcgcaggatccaagatccacaaccagataaccctcctcaccctgatcacgcccgatcagatatcgacggtctggatctacctgatcgaaccgggaccgacggccaggttgtcatctccagcctcactataggaaccgagcagcaggaccctgccgacggcgacgaggttcaccggtgccacgacacgaaggttcctacgccccaattctag

SEQ ID NO: 15236 - DNA, 435 bp, Zea mays
  Peptide Sequence Number=SeqID_57015
atggcgcctcctgttgacgtggttggtctacgccctaggttgggtgatgtggaagctcctccgaggccgaggtcgagtctgtcttccgtggtcgaggtcgagtccgagcccctgggtcgggcgaagcggagttcgtcgtcttctagggctaagcccaagtccgagccctgggtcgggcggagcggagttcatcgtcttccggggctgagcccgagtccgagccctggtttgggcggagtggagttcgtcgtctttccgggacttagcccgtgtccgagccctgggtcgggcggagcggagttcgccgtcttccggggacttagcccgagtccgagccctgggtcgggcggagcggagttcgccgtcttccgggacttagcccgagtccgagccctgggtcgggcggagcggagtttgccgtcctccgggacttag

SEQ ID NO: 15237 - DNA, 339 bp, Zea mays
  Peptide Sequence Number=SeqID_57016
atgaccctcggacagaaccaaagcaaaaacgcaagtatacactacggaccgtccgacggaaaagcaagcaccgtccgagaccaagcgcggaccgtccggtcagtgaagaaccgaaaatccgaagtagaagagcctgtgactgaggatcctagtgcccaacagatagaagttgctgagcaggagctcgttgaagcatgtctggtaataggcgaccctgaatatactccgacagaatctctgcaacagtcgtcaagaactctaaccgatgaaagcaaccaagacattgaggaaatacaacaaggctacaatgcatacatacatatgaaacaggacaagtga

SEQ ID NO: 15238 - DNA, 1203 bp, Zea mays
  Peptide Sequence Number=SeqID_57017
atggccctcccgccgtcctcctcgccgtcgtcgctctccgccgcgtcagcgcagcccacgcccctgcacctgcacctcccgaccaaggcgcccggccgcctcccgctgctccccttctcgcgcgccgccctcccgccgccgctgcgcctccgcattgcgcgcaccagcctctccccgggcacgcccctcccgcgcgcgctcctgccaccaccctccgcctccgccgacgccgcagcctccgacgtcggcggcggcggcgccggcttcggcggccatgacgacgacggccacaaccaccacggcggcgagggtggcggcgacgacggcggccatggcgacgacgccggccacggcgatgacgcgcccggcggcggcgacgcccgcggggaggcgctgttcgtgctggcgcagctgggccgcaagctcgacagcctgccgtccgatctcgccgccgccgtcgacagcggccgcatcggggccgacatcgtgcgccgcttcaccgaactcgaggccaacggcttcttccgatggctcctccagttccagggcttcagggagaggctcctcgccgacgagctcttcctcaccaagctcggcatagagtgcggcatcggtctcgtcgccaagaccgtggctgagttccagaagagaggggacaatttcttcaaagagattgaagttgtcatatctgatgtggtcatggcgattgttgcggacgtcatgcttgtctatcttcctgctccaactattggtttacagccgccactggcaagaaacgctggagctattgccaactttttctataactgccctgataatactttccaaattgctatggctggaaggtcattctcacttctgcagaggattggagcttttgtgattggcactagtgtcacgaatgcagcgctcaaagcaaagagggctgttgataaggaccttgaggacgaagtcatggaaattccagtcgtctcaactagtgttgcctatggtgtatacatgtccatttctagtaacctcaggtatcagcttctggctggtgtgatcgagcagaggatgctggagccgttgctgcataaccagaagctactgctgagtgcaatgtgcttcatcgttcgtacgggcaacacattccttggctctttgctgtgggttgactatgccagatggataggcgtccagaagtctcacgaagaggcctaa

SEQ ID NO: 15239 - DNA, 3027 bp, Zea mays
  Peptide Sequence Number=SeqID_57018
atggccgccactactgccgccaactctcctgctctcctcctcttcctcctgctgctgctcattgggggcgcgccaccagcgacgaaggccgacatgccgatggcggtgaacgaggaggtgctggggctggtagtgttcaagtcggcgctgtccgacccgacaggtgcgctggcgacgtggacggagtcggacgcgacgccgtgcgggtgggcgcgcgtggagtgcgacccggccacctcccgcgtgctccgcctcgccctcgacgggctggcgctgtccggccgcatgccacggggcctcgaccgcctgggcgcgctccaggacctctccctcgcccgcaacaacctctccggcccgctcccgccgggcctctccctcctcggctccctccgctccctcgacctctcctacaacgccttctccggcccgctccccgacgacgtcgcgcgcctcgcctccctccgctacctcgacctcacgggcaacgccttctcgggaccgctcccgcccgccttcccgcgcacgctccgcttcctcgtgctgtccggcaaccagttctccgggcccgtgccggaggggctggcgtccgggagcccgctcctgctccacctcaacgtgtccggcaaccagctctccggctcgccggacttcgcgggcgcgctctggccgctcgagcgcctgcgcacgctcgacctgtcccacaacctcttctccggccccgtcactgacggcattgccaggctccataacctcaagaccctcagcctcagtggcaaccgcttcttcggcgctgtcccggcggacatcggccggtgcccgcacctcagcaccatcgacctcagctccaacgcgttcgacggccacctccccgactccatcggccagctcgcctcgctggtctacctctccgcgtccggaaaccgtctctccggcgacgtccccgcgtggctcggcaagctggccgcggtgcagcacctggacttatccgacaacgctctcaccggaagcttgccggactcgctcggcgacctcaaggcgctcaagtacctgagcctgtccaggaaccagctctccggcgccgtcccggcctcgatgtccgggtgcaccaagctcgccgagctgcatcttagggacaacaacctcagcggcagcatcccggacgctctgttcgacgtcgggctcgagacgctcgacgtgtcgtcgaacgcgctctcgggcgtcctgccctcgggctccaccaggctggcggagacgctgcagtcgctcgacctctccggcaaccagctcaccggcggcatccccaccgagatgtcgctcttcttcaagctccggtacctcaacctgtcccgcaacgacctccgcgcgccgctgccgccggagctcggcctgctccgcaacctgacggtgctcgacctgcgtagcacgggactgtacggcgccatgcctgccgacctctgcgagtccggtagcctcgccgtgctccagctcgacggcaactctctctctggccccatccccgacagcatcggaaactgttcttctctgtacctcctgagcttagggcacaacggcttgacggggccgatcccggcgggcatctcggagctgaagaagctggagatcctgcggctggagtacaacaacctgagcggcgagattccccagcagctgggcgggctggagaacctcctggccgtgaacatctcgcacaaccgcctcgtcgggcggctgccggcgtcgggcgtgttccagagcctggacgcgagcgcgctggagggcaacctgggcatctgcagcccgctggtggcggaacggtgcatgatgaacgtgccgaagccgctggtgctggaccccaacgagtacacgcacggcggcgggggcgacaacaacaacatggggacgaacggcggtggcgtgggcgcgccgaggaagcggcggttcctgagcgtgtccgccatggtggccatctgcgcggcggtcgcgatcgtcctcggcgtcatcgtgatcacgctgctcaacgtgtcggcccggcgccgggccgaggcggcgggtggtgtcggccctgggcacgggcagaagaaggaggtggacgagagcgtggtgaccagcagcagctcgacgaccaagtcgtcgccggcgccggcaccggggggcaagggcaagggcaagctcgccgccggcaagatggtgacgttcggccccgggagcagcctccggtcggaggacctggtggccggcgcggacgcgctgctgggcaaggcgacggagatcgggcgcggcgcgttcggcacggtgtaccgcgctcccgtgggcgacgggcgcgtggtggctgtgaagaagctggcggcggcgagcatggtgcggtcgcgcgaggagttcgagcgggagcctggaggcgcggctgcacggcggcggcggcggagaggcgatgacgtgggaggagcgggttccgcgtgttgtccgggacggcccgggcgctggcgcacctgcaccatgcgttcccgccccgccgctggtgcactacaacgtgaagccgagcaacatctcattgcggacgcggagtgcaacccggcggtgggcgagttcgggctggcgcggctgctggcggacggcggcgggaggcagcaggtggcgatgggcggcgggcggttccagcagggcggggccgggtacgtggcgccggagctggcgtgccagagcctgcgcgtgaacgagaagtgcgacatctacgggctgggcgtgctgatcctggagctggtgacggggcgtcgggcggtggagtacggggacgacgacgtggtggtgctggtggaccaggtgcgcgccctgctggagcacggcaacgcgctggagtgcgtggacccgggcatgggcgggcgcgtcccggaggaggaggtgctgccggtgctgaagctgggcatggtgtgcacgtcgcagatcccgtcgaaccggccgtccatggcggaggtggtccagatcctgcaggtcatcaaggcgcccgtgggcagaatggaaggctccttctga

SEQ ID NO: 15240 - DNA, 207 bp, Zea mays
  Peptide Sequence Number=SeqID_57019
atggacttcagccaacaatcagcgtgtaaaggatctggagtgctggcgaacatcagtggcttgtggctcatgaactctcggtgcttgtcctggggtggaactggtggtggaggaggaggcaatgcatctgcatctgagctgcaaccactggatcagtcccagtcggtggaggattcaaaggattcatatctacttgttgttgtctaa

SEQ ID NO: 15241 - DNA, 936 bp, Zea mays
  Peptide Sequence Number=SeqID_57020
atggaagtgaaggcgcacacggcacgggtcctggtggcccggctgcgcggcgccaccgccgcgcgcgacggggccgcggcggcggcggtgtccgagatccgcctcgccaccaagacggacccggagatccgggcgccgctggcggacgcgggcgcgctgcccctcctggccgcgcagctccagcgcgcgtcccccgcggccgtggacgcggcggccgcgctcctcaacatctccatctcggcgcgggaccaggtggcgtcggccccgggcgtgctggacgcgctgacggccgcgctgcgctcgggcgacgccgcgcaccacgcggcgtccttggtccacagcctcctctgcggcggggagccgcaccgcgcgacggtgccgggcgccacgcgcgccaccaaggacgccctcagggcgctgttcggcgccgcgctctacccgcccgcccgcgccgcgctcgtctcgctcggcgccgtgcaggcgctcttcgcgctcgtgctcacggacgcgcgcgacggcgtcgtggaggacgccaccgccgtggtcgcgcaggtggccgggtgcgccgagagcctcgaggccttccgctgggtctccggggtgcgcatcctcctcgacctcgtcgagtcggggggcgccgccacgcccagggcgcgggagaacgccgctgccgcgctgctcaacctcgtcgtggccggcggggaggccgccgcggcagatgtggtcgcagtcggcggcgccgaggagaccgtgcgggagctcgccgaggacagcgccgccagcccccgggggaaggccaaggcggaggcgctgctgcgcgcgctcgaggacgccgccgtcaggaggcgcgagcaccgcctagctgatttcctcgacgggctcgtgcagtccgatccttacatctcgtcgccggcgtcggcgtccacgcacggctag

SEQ ID NO: 15242 - DNA, 297 bp, Zea mays
  Peptide Sequence Number=SeqID_57021
atggtcttcgctctacgattaaggttgtgttcggtctccttccaacaggaccaccctcggagtggttcatcagacttcgatggtttttacaagcagattttgagtgtcgcggagacagagatggaggcggaggactttgttggttcggtaacggaggctgagattgagaagggtgctgctctacgtgggggccacatccacctcaactgtgtttttagcttgatgggtctcgagtatgaggagcacaaggccaagccaaagagagggaggaagacgtcgaccggggttcccgcctaa

SEQ ID NO: 15243 - DNA, 498 bp, Zea mays
  Peptide Sequence Number=SeqID_57022
atgagagagaaacatggaccagacgtcgactggatgatagctgactttgacacggtggtagcttatgcggctggtggagatgtgcgacatgggaggtttaggacatacactatagtacctcagcaaggcgttactccgactccgctagcgaaccctgcgtcttcgcatggtgatgcatcacaaggttctgggacaggtccccacaaccaaatgatgccccaacgatgtcgtgggtatgccgcctcagatgcttatgcaaatgctgcctcagataccaatgccgacgccgcctcagataccaacgtcgatgctaccgccacagatgtcgtggggatatcctcccatggagctatcacaaatgccttggggatatgctccatggccgacacagccaccccatcacgtggagtgggttcaggttcgtgtcctactccagacgacgctatgaacttcgtcgacccgatcttcaacacgactgatgacccacctcaagtttga

SEQ ID NO: 15244 - DNA, 478 bp, Zea mays
  Peptide Sequence Number=SeqID_57023
atggcaactgtcaacggcgacatcaatcggaggcagctcaggaacccacctccgtcagcgtttgcggtggatctcgaaccacgagtcgacacgatagccccacgccagcaagtagcggcacctggaggagctctgtgggagcacagggatgcgccacgctcactcggcctgcacgcttttactcctcatgggaaggacaaagttgagttgtcctttggaggcaattcagcagatcgtagaggagatgcctcttggacaagtctggcaggaacatcacagcaagaatccgagttagctgcattgcggatgcatggaatgttctcacctggggggcagggtccatctctatctggtgttcaggcaactgctgaaggtagcaaggcaaaaaggcgtacaaaggccgagaagaccgttagtttgcagattcttcgacagtacttcactggtagcctgaaagatgcagcaaggagccttggag

SEQ ID NO: 15245 - DNA, 2625 bp, Zea mays
  Peptide Sequence Number=SeqID_57024
atgtacaagagggcaccacagaagctgaaaagcaagttctacaggatgacaattagacctgctatgttatatggtccatttggaggcccaggataccacaatcaagaacgtgagaagcactttgaacatcttacacctaatatgagcaaaacacgaaatggatctgcattttctcaggatgaaattaactcacacagagagcattttcgtaatgaactgaccccagattcagttgcttcaaagaagccaaaagtaaggaagaaagaaattaacaattctgtttcaacttctccccacagcattcctaataatcaagaagttattgctaccttctgtgaggcggtggaggatttctgtggaaaagctgaaattcctgacgatggtgatggtggtgactggttgtcaatcccacttgacgatgttaaggttcttgtgaatgaaattacatctgttcgatccaaaaggatattgcatgaggttcctatggatacagttacaaggttattagacgtgattgaccgtcagattcgatgttctcaaggtttgtcgatagatgtgaaggaaaattctgacgcctttgatgctgaacctctggttttctctgctttggagtccagtcatgctgcgttggcaattatgacccaccatgatatgccaaagcaactgtatcgggaagaacttattgagcgtattatcgatttctcaaggcatcagatcacagattgtatggcagcaagtaacccaacctttcgagctctctacaaaccagctggaaatgttgcaaatgatggagatgatgatgaaggtgatttggaaaatggacaagttagcaaaaggagacgtactgctactaatttgagcatgagaaaatcttcaaacagagtttctgcttctgtttattctgctgtgcagaaactatgcttgatattgggttttcttaaggaactgctcacaacagtgcgcttgtcagatagttgtattctgcaattagcgaaaacatgctttactacattcttggtggataatatgcagctattacaattgaaagcgattggggttatttgcacggtgttttcatcatacacacagcacaggagttacttggttgatgaaacacttcaccttcttcgtaagttgcagttttccaagaatgccgttagaacctaccatctagcagatgaagaccaaaagcaaatccagatgataacagcactgttagttcacttggttcagtttagtgctattgttcctgatagcttaaagggaacagttgattggaccactatcgttgatgcctctagtgatgctgattattatccaattcaatgccatgaagcggcaacagaggcttgttgtcgtttttggactgatgtccttcaacgttttactgctgctaaatctcaagatatgtcggaaaccaaagggataatagacaatcttgttcaggatttcctaacgatactaaacttgccggagtatccagctgctgcttctattcttgaggttctctgcgtgttgctgcttcagaatgctggattgaaatctaaggacattaatgctcggtgctttgctattgatcttcttggtggtattgcatcaagattaaagcgtgattctgtcgtctgtagtgaagaaaagctttggatattgcaagatttcactgataaaggcagtgacggctcaatttttttgaaaaacaagtgttgcgtttgtcttggtggaagaggcataaatatagcctgtaatgaatgtggaagatgtttccattcagattgtatgggggctggtagtcaggataacttacagcgtgatagtgtctgccccttgtgtttttgcaaacaacagctcaatgtgctacagtcgtactgccagtcacaaattaaagaaaatggcaaaaaaactgctgcctctgccagtaagaaatctgctaaaccaactgaggtgtcagcagtggaaattgttcaacaaatactactgagttatctccaagaagctggttcacaagatgatgggaacctgtttactcgatggttctatctgtgcatctggaacaaagatgaccaacattctcaggagaagatcatttactatcttgctagattaaaatccaaggagattctgcgagattctggcaatggtctggcaatttccagagattcagcaaagaaaatttgcttggcacttggtcagaagaactcattttgtaggggttttgataaaattcttgcccttcttttggctagtttgagagaaaattctcctgtaataagagcaaaagcattacgtgcggtcagctgtatagttgaagctgatcctgaggtcttgggtgacaaacgtgtccaatatgctgttgaagggagattttgtgattcagctatttctgttcgtgaagctgcccttgaacttgttgggaggcatattgcttcacatcctgatgtgggcctgaagtatatagaaaaagttgctgagcggataaaggacactggagtcagcgttcgcaagcgtgcaatcaaaattataagggatctttgtgcttcaaatccgaacacggacacaactcatgcctttgtggagataatttctcgtgttaatgatgaggagtccagtgtacaggttgattcttag

SEQ ID NO: 15246 - DNA, 621 bp, Zea mays
  Peptide Sequence Number=SeqID_57025
atgtcccgcgccgcggtgacaggatccgagaacacccctgcggacgcatccaggattcaaggcctccccctcccttcccctgccctcaccccctcggcgatgcccggattcatggtggcgcaggcgctggaggcgtccacagggggcgacactaagctcctcgcccgtgcttgcttcaccagcgattcggggaggccatgcccccctcggtcgcaccccctctctccccctcgccgcctcctgcctcctccccctcgaccgcatctacctccctccgtgggcctcgctaccaaggtcgagatcgtcgagatcgacctcaccgaggaagacactagctccttggcccacgactccccctcgtccacatcgattgaggtggtcgggattcggcgcctggaggaggccatccacggtgtcatcgatcacgactccccctcgtccacatcgattgaggtggtcgggattcggcgcctggaggaggccatccacggtgtcatcccagaaggctgcttcggtctggagcaccggactgtccggtggtgcactggacagtgtccggtgcgccaggctgcctcggccgaagaggccgctcttaggaatttgctgacggcgtacggctaa

SEQ ID NO: 15247 - DNA, 630 bp, Zea mays
  Peptide Sequence Number=SeqID_57026
atgtggaagttatgctatgtttttgaaaatctatgttctcatgagagattactcctgcagatagaaattgcatcgtcatgctcagatttgtaccatgtagttggtgagacctactgggttgctacaagatgtgatagtatggcgtttcggggaggcaagacaggatttgactttgcaattcgaacaccttgcacgccatcgagatgggaggagtatgatgaagaaatgactgcagcctgggaggctatttgtgaggcatattgtaatgacacaaaccccacacgagaccctggtgtgcttgatgctgtgaaggacgcgatattgcggatgacatattactggtacaattttatgcctctttcgagaggctcggctgttgttggctacgtagtgttgctcggtttattcctggcagcaaacatggatattactgccagcattccacccggtgtccaagttgattgggaggcgatcctgtctccagatcccggcacatttgttgacgccgtgaagccctggttgtacccatccacaaaaataagcaggtgcctgaaagattacacggacgtcagctgcgcgttcagcacgacaggttcggttgtagcggccctaacatctgttgacccatag

SEQ ID NO: 15248 - DNA, 450 bp, Zea mays
  Peptide Sequence Number=SeqID_57027
atgggcaagagcaagaaaggtggaagttcctcacaccattccggtgataagcggaagcgcgagccgactcctccctcggaggacttcggcgattccgagtactcggaggaggagttctcctccgagtccaagggttcgccggtccatgcctctcccccggcgtcgtctaacgactcagacgactcccaggggatcgccgcagaggtgtggacctacatccgggccgtcgagcgcgtcgggctcgagggctcggatgagtcggaggtctcctcggacgaggagaactcctcagactcgtccgaggagggcggtggtgacgacgatggcgagggcgacgacgacgacggaggcgacgacgatggcgacggcgacgacggcgaaggtggcggcaagggcggcaaaggtgacggcaaggacggccgcaagggcagcaacaaggccagtggctag

SEQ ID NO: 15249 - DNA, 1737 bp, Zea mays
  Peptide Sequence Number=SeqID_57028
atggcggcgttcggctgcgtccacgccgccgcggctacccttggcggcggcgcgcggttcgcggtgcgcgtcctgtgcggccgctggttcatgctcttcgcttccaccatgatcatgaccacgagtggcggcgcctacatcttcggcgcctactccaaggcgctcaaggcgtcgctggagtacgacctggacacgctcgacaccatcggcttctccaagaacatgggcataagcctaggcatcgtgtcgggcctcatcaacgaggtcgccccgccgtgggtcgtgctggttaccggcgccgccatgaacctggcgggctacctcatggtctacctcgccatgtccgccgccgctcatcggccaccggtgtggctcatgtgcctgtacatattcgttggcaccgtctcccaaacgttcgccagcacgggggccctcgtcaccagcgtcaggaacttcccggacgaccgcggcgtcgtgctcggcatgctcttgggctacgctgggttcagcggcgccgtcttcacgcagctctaccgcgccttcgatggtggtggtggcggtgaagcggccacgcttttgctgctcctggcatgcctccccactgccgtctcgctgctctttagcttcaccgttcgcgtcatcccaccacgacgaccaccgataagcagcagcacggcggaacgcaagggcgtgctgggtttccttggcgtctctgtcctcgtcggcgtctacctcctcgctctgaacgttgtcgaggtgaaggcagcgacccgactgccgaggcgtttctaccacgtcaccaacaccttgctcgtcctcatcctcgtcgtcggcccactcgtcgtcgtcgtgaagcaggagtaccaccagcagacctcatcccatagccatagtacgcttcagcaagacgtcccccgagctgtgccgggaccgggagagcaagagatcaactactcggttcggcaggctctttgcagccagcacatgctgctgctcttcgtcgccaccgcctgcggcatcggcggcatcatgacggtggtggacaacatgagccagatcgggcagtcgctggggcactcgcagcgcaccatcacaatgctggtgtcgctcgtgagcctggccaactacgctgggcgcgtgctggccggcctgggctccgactacgtggtggcgcgctacaggctgccgcgcccgctggcgctcaccgccacgctcctcctcgccttcttcggccacctcctcgtcgccgcgggcctgcgtgatggcgtctacgccgcgtcgctcatcatgggcttctgcctcggctctctatggacggtgctgttcgccgtcgtgtcggaggtgtttgggctgaagcacttctccacgctctacaacctgtccacgttggcgagccccgtcggatcctacgtgctgagcgtgcaggtggcgggccggatgtacgaccgtgaggcgcaacggcagggccatcgccggcaagacgagctcgcctgcgttggggttcagtgcttcagggcatcgttcgagatcatcgccggtgtcacgttgctcggcgtggcggtgtccatggtgatggcctggaggacgagggcgttctaccatgataggacgcggttcttattcagtgctgctgctgctgatgtcgcagacacagccgccacgacagacagcagcagcagcaggcaagaagacgaaaacaaaacgatagctgcaagtcaaagtatcggtatttgctag

SEQ ID NO: 15250 - DNA, 540 bp, Zea mays
  Peptide Sequence Number=SeqID_57029
aaggaaatggctctgtatattgcttcaaaggccaatttagagttctctcagttcaacattgatgatgatgttgacccactatttaaggttaagtaccgcatggccgggttggctgctattgagattgctcagaaagtgtccaaggcttggcgctttctaaggaatccgaagaacatcgcaaagttagttaggaaaagggataaacttaacatgagccagaacaggggaggttattgtagcactagcactttggctggatctccaacttccagcccaaatgaagacagggtctcctccgggatctctctttcctggcaggatgtctataacattgctgttaagtggagacaaatttctgaaccttgtgatccagttgtttgggtcaataagctaagtgaagagttcaattctggatttggttctcataccccaatgcttcttggtcaagcaaaagttattcgctactatccatattaccaaagagtcttggaaactgcgaagactataatgcttgactttgaaatattgacagttgaaaag

SEQ ID NO: 15251 - DNA, 462 bp, Zea mays
  Peptide Sequence Number=SeqID_57030
atggcttgccgagggaggatgggagagctgctgcgcaagggagaagaagacagggacgtcggctggagaagaaagaaggggcagggctacagggaacgagcacgatgggaggagatcggactagaggcttcgcatggggacggatcacaaccgctcgtacacgaggagagctttgggcagcgccgcgcggtgagggggggctcgtcaagcggacgctgggaggagcggagagtgctaagagagaggaagaataagacggacttttcacctgcgcacgtggagctcggctgtgacggtgacttgacggactggatgcgcacacagagggggcttgactgggcatcgccttggccggggcttgctgctgcgccgctgcgctggatcgccgggccaccaaaccaccgtgccgggctccatggccaccgaccggtcgagaatggagggcaagagagccgcgactga

SEQ ID NO: 15252 - DNA, 1662 bp, Zea mays
  Peptide Sequence Number=SeqID_57031
atggatcggttggtgatacctgagccgtcaaacgaggtgatgatccgggtggagcccggcatgcaggcgaggggggagctgacgctaaggaacgcgatgcacaccatgccggtggcgttcaggctgcagccggcggtgcgcgggcgcttcgcggttcgcccgcacacggggatcctggcgccgctcgcggcggtcaccgtggaggtgctgtacctggcctccgcgcctccagataggcccagcgggtcaggaagaggaggagggagccgtggcgaggacgcgttcctgctgcacagcgtggtcgtgccgggcgccgcggtgaaggaaccggtgacggcgctggactcggtcaacccagagtggttctcggcgaggaggaagcatgtgttcgtggacagcggcatcagggcgagcttcgtgggcgcgtccgtggccgcgcgcctcgtcgaggccggcgcggtcgaggcgctcagggaggtgctcgaccgcagcgagcctgagtggcgtgccgcggacgccgcggacgagtatggccgcacgctgctagacctcgccgtcggcctgggccgcgccgacatcgtccaggtgctgctcgagtacggcgccgacgctgacaaaccgagccgcggccggacgcccctcgaggccgccgccgcctccggcgagtgcctcatcgccgagctcctcctcgccaacggcgcgacgcccgccggctccgacgccatccacgtggccgccgccgccggccacgacgacgtcctgaagctgcttcttggcaagcccgcccctgcctctctcgcctcgtcctcgtccgcgtccttttcgtcttcttttacatctatcgacgcggcggggagggacggcaagactcctctacggctagcggccgaggcggggcggcgagacgcagtgaaggcgcttctcgcggcgggcgcgagggccgacgccaggtgcggaacggacggtgccaccgccctacacgccgcggcgaggcgcggcgacgaggcggtcgcgcgcctcctcctgtcgcacggagtggccggcacggccacggtgcgcgacgcggccgggaagactgcattcgagatcgccgcccaggagggccacggcggccggatcctgcagttcttgggcctcggcgaggcgatcctggccgccgcgcgcaagggcgaggtgagatcggtcaggcgcgcggccgacggcggcgcgtccgtcgaggggcgggacgcgcatggctggacgccgctcatgcgcgctgccttcaaagggcgggccgacacggcccgcgaccttatcgcccgtggcgcggacatcgacgcagccgacgccgagggctacacggtgctgcactgcgcggccgaggccggtcgcgccgacgtggtcgacctcctcttaaagaacggcgcgaacgccaaggctacgaccgtgaagggaagaaccgccgccgatgtcgccgccgccgcggggaggtccaaggtggttcggcttcttgacagggcaagcgtcatagggaggaaacaggatgttaccgagaaggtggcgaagggcggtagcatggacaggaaacagagagggcggaaggggagcagtggcgccataaggtttggtggtgggaaggagggattcgaagctgccgtggttacctttgggtggtcacactag

SEQ ID NO: 15253 - DNA, 306 bp, Zea mays
  Peptide Sequence Number=SeqID_57032
atggcgacgatggtggttgaaccatcaatggtgtctgtggcggtgcatgatctagcgtacgtggtcacggtcatggttggtgatgtccagagaggtcccacagtcgaaggggtgggtgtcatcagcgtgatgtttctcaagctcatgccacacgtagaggagcaagaagggcgcatttggggaggggtgtgtgcagaccgtagtgtttacaaagtgaaatttaaaagaagagatgatgaaatagctgccggagatagacttacaatagagaagaggagagaagtgcgagtggaagctttgcggtag

SEQ ID NO: 15254 - DNA, 210 bp, Zea mays
  Peptide Sequence Number=SeqID_57033
atgcaaaaggccaagttactggtatggtttgtagctgctgtgctggcatgtgctgttgttttgacagatctggcgcaccggacagtccggtgcacaccggacagtccggtgcttccttccgaccgttggctcggccacgtgtcgcgcgccgatcgcgcggccgaccgttggctcaccggacagtccggtgcacaccggacagtccggtga

SEQ ID NO: 15255 - DNA, 783 bp, Zea mays
  Peptide Sequence Number=SeqID_57034
atgcaggcagcagccgcgccgccgcttccaccgccgcgccgccgcgtgtacacggcggtggacccgcggtgcgagtggaggagcacggaggatgcggacaccctcgtcgtcgacgtgtcagggttcaagaaggacgagctgaaggtcgtgtacagcgtccggcggaagaagctgaaggccaccggcgggcgccagcccgacggcgcgcccaggctgaaggtcaccggggagcgcagggccgacggcggccggtgggcgcgcttcctcaaggtggtcccggtgcccaggagctgcgacgccggcaccatccaggccaggctagacaccgagagggcccagctctccgtcgtcctgcccaagcccaagggatcgtcatcgtcgtccaaggacagtcagaaggagcgtcaccctgcggagcgcgcacattctcttgaagagctgatgagggcggacactgcgggtggatcatcgggccgcagcgacggtagcatgcggagcgcccaggaagatgcagggaacggcaaggtcgaagacaaggagcagaaacaggatcgtcatcaggctatggaggaaccgagacatgatcaagcgatgaacgtacaagatttaccgggaggagacggtggtgcaactgaaaatgcagccaggaacaacgatggtgatggcaagggtgaggacgggaggtggtggaggaagatcagaaatctgcgtgttcttagcttcctcctggtccttgcattggtgggggttggtgccactgtcctgtatatagcgttactgtga

SEQ ID NO: 15256 - DNA, 615 bp, Zea mays
  Peptide Sequence Number=SeqID_57035
atggatccccgatcgccgattcatgacgccagccttgcttccaactcgcgaactcctttcctatctggaactccggaaggacatggctttggcagggatgaaaatgactgcccccgcttacacccgcccgacctccggaatcctcgccgcagcaaaccgcccgccaaccccgcccccgcctccaccgcccgacgtccggaatactcgccgccgcaaaccgcccgccctaccgaccgccgtcgtgatcctcaagcccgcaaatccttccgtgaatcgcgccgcgaccatcgcaatccattcgccgcgtcccccaacaatcccgagcccccgctgcaatccgtccgtcgcgtcgcgcctgccgcatactccgccgcgaaccaaaatccccgagctcaatcccccgcgtgcggccccgagctcaacccgccgtcgcaagcacgagggaaaacgcagatggcccccgccggggggcagcagcagcccatgaagcggccccgccccaccgaattctcaggtccgcctgccccttccccacccgccctcgatctgcgctgttgttcgcggttgctgcctgtctggtgcccgctcgatctgtccgtggccgctggcgcttag

SEQ ID NO: 15257 - DNA, 1884 bp, Zea mays
  Peptide Sequence Number=SeqID_57036
atgaattccagcgcttgtgtagtcgtgataccggcagagatggataacgagccagctcgactcgacttgttacggctctttacgctccagacgagcagacccatccacgagtcctcggctcctcgcccacccgcacatctcgtcaagaccgcctcgcctcgccccgcaccgagatccccaactcccgcgcgccccgcacgcgcctgcttcctactactcctcctcctcctcctcacatcctcctcactcctcgccgcccccaccagcggcagggcagagtccgggggcgggtcagttctcggtgacgcctcgtcctcctccggaaaggcacggggggacagctgcgaggagctgcagtccatcagcggcggggaggcccggtgcgcgtacctccgcgcgcagaactcgccctgctccccggcggggtacgtggactacctgcgcctcttctactgcgccttcgccggcgcgccggcggcggccgcgtgcgccgcgctcgcgctgtggctcgcggtgctcttctacctcctgggcgacaccgcgtccgagtacttctgcgcgtcgctggagggcctgtcggcggcgctgcgcctgccccccgccgtcgcgggcgtcacgctgctctcgctggggaacggcgcgcccgacgtgttcgccagcgtcgtgtccttcgcgtcgggcgacgacggcggcggcggggtcgggctcggcagcgcgctcggcggggcgctgttcgtctccaccgtcgtcgcgggcgccgtcgcgctcgccgtgggcgcgcggggcggggccgtcgtcgagtggcgcggcttcgtgcgcgacctctgcttcctcctcctcgcgctctgctacctgctggcggtgctcgtccacggggaggtcaccgtctgggtggccgcgtcgttcgtctcgctctacgtcggctacgtcgtcctcgtctggacctcccactgctgcaccgagaagggcaagccggccgccgacagcctctcggcgccgctcctcctcgacgacgacgacgacgtgggcgacgtcgtcccgtcgctgccgtcccacaccaagacggaggcgtccagcacggccacgtcgagggtcattgcgacgctgcattgcctcgcggccgcgctgtgcatgccgctgtacctgccgcgccgcctgaccatcccggacatcgcggggcaccgctggtcccggccctacgccgtggcctccgcggcgctggcgccggtcctcatcgccgtgacctggagctcgcagcgccacaacccgacgtcgtggcacggcctcgcggtcctcgtaggaggcgcgctcctgggcctcctgctcgcggcgctcgcggcggccaccacggacgcgagctcgcccccgcgcgggcggaggcggcgcgtgccgtggctcgccgcggggttcgtgatgagcgtgctgtgggcgtacaccctggcgcgcgagctggtggcgctgctggtggccatcgggtacgtggccgggatcaagccgagcgtgctgggcgtgacggtgctggcgtggggcgactccctgggcgacctggtgtcgaacgtggcgatggcggtgcacggcgggcccggcggcgcgcagacggccgtgtccgggtgctacgccggcccgctgttcaacacggtggtggggctgggcctgtcgctggcgctggcggcgggcgcgcagcacccggccccgttcgcggtgcccgtggacgcggcggcgtacgaggcggtggggttcctgggcgcggcgctggcgtgggcgctgttcgtggtgcccgtccgagggatgcggatcgaccgcgtctacggggtcgggctcatcgctatctacctctgcttcttcgccgtgcgcgtctccgagacgctggggctctggagctag

SEQ ID NO: 15258 - DNA, 597 bp, Zea mays
  Peptide Sequence Number=SeqID_57037
atggacccgaagctgctgcggcatggaaatctgagaagtattgtcctccccccagtccccagacttgcgcgcgcctccgctgctgcgactgcgagcccaagaaaaattttcctctacgagcgcatggaggtgtccgctgggctccggctgccgcccgtcgctgcggcagcgtcgctccttggctgtcggtccgcgtcggtgccgccgcgcgcggcggcttcccattctgtgcgggtctgcggggccgtcgggaccaatgggtacgccgatctcgtcctcctgttcgacattgctgcttgcagggctccagggtctctggattctgttatcagagcagctgcaattaacggcctccaaagaaacagaagtaatctcgaatcattattctgctacgacaaatctgtccccgagcaggacattggagaaccatctggtctaaatctggaaaagaagaatgtcggggacaagcctccctgctcaagctgtgaagctaaaggtgccttgctgtgtgcaacgtgcgctggttcaggcttgtacgtcgactcgatactagagagccagggaatcatcgtgaaagtcagatgcctaggtaaataa

SEQ ID NO: 15259 - DNA, 408 bp, Zea mays
  Peptide Sequence Number=SeqID_57038
atggacgaagtggcgcgcggacgggcgagcagaccgagggaggagcgcgcgccggcgagcaagctcctcggcgaggtcgcagggcggacgagtgcagcaggaaacaaggggccgggcgagctccaagcggggaacagggagaagcagcggccgagctggggctccaagacgccatgggagggaagagagctcgcgccaaccaagaagaagaccgaaccggaaccagggctgggcggcgacgcagaaaagcaccagggagaggaaagagatgggtgcgcggccggcctggaggagcaggggctgggcaccatgccaccatgggcaagcgcaggggagaagcatctcctgccgccggcgtccacgggaagaaaggcagggtcggctgcacgagggagaagaagtgcctag

SEQ ID NO: 15260 - DNA, 558 bp, Zea mays
  Peptide Sequence Number=SeqID_57039
atggcgccgccgtcgatttctgagttacttggactgcggccactatttaacagaaacccagggggttctgcgcaaacgacaccaagactcagaactcccacagtggacggcgggttgaataatagaaacccgaagtggctcagattagatcggcgtgattgcgaaccggtacacgccatcagccgcgagatcgagatccaatggttcggattttatgagactcaaactaaccacatccgaccgatacaagatctacggcacccgctctacccctctcaacacccatgcctaactgaatctggaccgcccgcgcagatcgaacggtgcccacgcatcgtcttccacacccggcagaggacggtggcgcaggcccccacggcggtgcccatggccggcgtgcagtgccctcgcggcgctggtgctctcaacttaaccccgacaggtgctaaacgatgcagtggaacatgcgagttgattcggagattccttaccatgattcgtgaaatgcagagccttcgccccggtgcacggcgtggtgtaggtgatggcaaactatga

SEQ ID NO: 15261 - DNA, 528 bp, Zea mays
  Peptide Sequence Number=SeqID_57040
atggacgtccgggatccaaaggccggcggccggtcatgggtgcggtggcgccattggacctcgcggcgaggtttcaccggagacgaggggggcggccacgatagggctttaggggtttggggaagggctcaggcatgctcagggcgatctggcgcacttagtcgtgggcgcaataccggcatggaggcaccagagagcgtgaaacacggcgaagcggagcgcctgggtgacggaagggacgtggtgaagcctcaagtcgacggcggtggactccggctgcgtaagaaatgctctggtgagcgcggaccagatgaactagagcagaagagggcaaaccaaggggtgtcccgagttgctgacggcaaggcggaactcactgaggtaacggacgcggcggcggccttcggtgagcggcggtggagctgcctggttgcgcgcgcagggcgagagagggggcgagggagctcggctgagggcgcaaatgagcaggggaagtgggcgatcggggtgcgggctctaaaggggtga

SEQ ID NO: 15262 - DNA, 396 bp, Zea mays
  Peptide Sequence Number=SeqID_57041
atgaagctacagcgtgcgcaagaaggtgccggcggtcacctcctcacgaagaccccgtcgcggcacgacgcggagcggacggtcaccaaggggtgcgcgacgttctgggtcggggaggaaggggaggccccgcggcgggtggcggtgcccgtggcgcgcctgggccacccgcgaatgctggagctgctcggggaggccagggaggagtacggcttcgcgcaccagggcgccgtcgtcgtcccgtgcgccgtcgagcggttcatgcgggcggtggaggcctcggcgtcggcggggaacaggcacgagcaccaccgccacggacaccatcaccaccactttcgcctgcctcatattcacatcgcccggtgctttagaccgtcgcacgtcgttgcttag

SEQ ID NO: 15263 - DNA, 555 bp, Zea mays
  Peptide Sequence Number=SeqID_57042
atgtcgcggtcgggcgattccgtctctggcatagcaagcaggcgcgtccgggccgtcgaggtcgagctgtggatccacgcggagatgcaagcgccacgtggcgatggcttcctcgggaagcggaaggagcgcgactattgcccgcatccctcagtgtcgccgacggagcaggcagccccgctgcagcggcaaccgccgccgttcgctaggcccgacccgcgtggcgtcaagctggatcgcccggcggtgaggtttggcgcgaagccgccgctccctcaacagggggccaaggtcgggggcaacggcaacaagctgctggcagggtatctggcgcacgagttcctgcggtgcggcacgctcctcggcgagcggaggctcgagccaccccgcctgaaggagaaggatcccgccgccccctcccccgccccaacccccgctccggagccgagcaggcgctacgcggacgtttcgcgcctgcttatgacgggcggggcccgcatccccggcgtcgtcaacccgtcacagctcggacgctggctccggattaaggagtga

SEQ ID NO: 15264 - DNA, 228 bp, Zea mays
  Peptide Sequence Number=SeqID_57043
atgggcaagcgcaggggagaagcatctcctgccgccggcgtccacgggaagaaaggcagggtcggctgcacgagggagaagaaaaggccaccaaccatcttcatctcgttcccaactggcctagctctggcgaaacggtacacactcaacttcgaatggagctacaataaaatgctcgccaaggacctgtcgcaagcgcgggacagccttgtagctcgtcactcctga

SEQ ID NO: 15265 - DNA, 420 bp, Zea mays
  Peptide Sequence Number=SeqID_57044
atgggagggaggtccgagctaggatccgacgcgcaacaacttggactagtgagcagcgacgaccatagggaagagagagaaaagcagggggccgagcatgagaacaacggcgacttgggcgagcgtatggactcgacggcggacggcggccatggacgaagtggcgcgcggacgggcgagcagaccgagggaggagcgcgcgccggcgagcaagctcctcggcgaggtcgcagggcggacgagcgcagcaggaaacaaggggccggggcaagctccaagcggggaacagggagaagcagcggccgagctggggctccaagacgccatgagagggaagagagctcgcgccaaccaagaagaagactgttaacacaactgaagggattgagatcggacagcaaaagggaaagacagaggtag

SEQ ID NO: 15266 - DNA, 204 bp, Zea mays
  Peptide Sequence Number=SeqID_57045
atggctccacgattctatgcaagagacacccaagagcatgcctcgtcgtttgtggatttcgcagggaagaaggctaagtatgtcagccgctaccgtattaccgattcagattcattagatgctgcaatggaggcaactgaccaccaacgtcaaatctctgttggtgtggtgtttgtgaccgttggcatgaatgctttgatataa

SEQ ID NO: 15267 - DNA, 375 bp, Zea mays
  Peptide Sequence Number=SeqID_57046
atggtcgggagccttccagagtctccacacgaacacaccgctaaagccttccagaaattaccgctacccgaatatctcatctctgtccgcctgctctcaaacgctctgcggtctctagcgacggcaacggcgacaccggatgccaacggccgtccatcgtcgctcctcgtgcactacgttcgcctcgacattttctacagatcgcagaaacatctggaaccaacagagctatatctgaagggatacaccttgaaggatcagagaagtaagttcaacggccccgtcgaacttaacattaagaacgtgggtaccgtcgaacttaacattaagaacgtgggtaccgtcgaacttaacactaagaacgtgcgtttttaa

SEQ ID NO: 15268 - DNA, 1968 bp, Zea mays
  Peptide Sequence Number=SeqID_57047
atggcggcctcgccggccgcggccgcggcactcctcatcctcttcgccctcggggcggccggcggagtggcggccgacggctccgaccaccggtacaagatgtacgagcccgtcccgctctacgccaacaaggtcggccccttccacaatcccagtgagacatatcgttacttcgacctgcccttctgctctcctgagaaagtgaaggagaagagcgaggcccttggcgaggtcctcaatggggatcggctagttgatgcgccttacaagcttgatttccgttcggaagttgagtccaaggcggtttgctcaaagaagcttaccaaagaggatgtagtgaagttccggaatgcagtagcgaaggactactacttccagatgtactatgatgatctcccactgtggggcttcattggtaaagttgagaagggaggcaaggccgatccgagcgagtggaagtactacctgtacaggcacatcatcttcgatatcctgtacaacaacgaccgggtgattgaaatcaatgtgcacactgatcagagtgctttggttgacctgacggaggataaggagacaaatgtggatttcctgtactcagtcaagtggaaggagacaccaacaccatttgagaagaggatggagaagtactccagctcctccaacatgccgcaccacctggaggttcattggttctcaattataaactcttgtgttactgtcctcctcctcacagggttccttgcaacaatcctcatgcgagtattgaagaatgattttgtcaagtatgcccatgatgaggaagcagctgatgaccaggaagagtctggatggaagtatattcatggtgacgtcttccggttcccaaagaataagtcgctattttccgctgctcttggcacaggaactcaattatttgcactcacaacctttatatttcttcttgcacttgttggagtattctacccttacaaccgtggtgcactatttactgcattggttgtcatctatgcactcacttcaggaattgctggatacgttgctacctctttttattctcagctggaggggacaaactgggtgaggaacttgctattgacaggatgcctgttctgtggacctctcttactgacattttgcttcttgaacactgttgctattgcttatagtgcaacagcagcactgccctttggcactatctgtgtcattgtgctcatctggaccttggtcacgtttcctttgcttgttttgggtggtattgctggtaaaaacagcaaaagtgagttccaagctccttgccgtaccacaaaataccccagggagattcctccacttccctggtaccggagaaccattccacagatggctatggctgggttcttgcctttcagcgccatatacattgagctatactacatctttgctagtgtttggggccacaggatctacacaatctacagcattctgtttattgtcttcatcatcctccttattgtcaccgcgttcatcactgttgcactgacatacttccagcttgctgctgaagaccatgagtggtggtggaggtcattcctttgcggaggatcaactgggtttttcgtgtacggctactgcctgtactactactatgcgcgatccgacatgtctggcttcatgcagacatctttcttctttggctacatggcctgcatctgctatgcattcttcttgatgctcgggatggaggactgcccttctgcggcaaacctgcacggagcggcgaaggtgaaaagtgaggtggaatggaaaggaaaggaggtcgcgtcgcgtcgccgttgccgtcttgccgccaacgccagcccaacccaccaggtccccactgtatatatgagccgtgcccgcatgtgtgttaagcccagccaacacaagtcaagtcggagcccgcaggtgtcgacaccgcgcgccgggagccggaagaagggtggggggtga

SEQ ID NO: 15269 - DNA, 1386 bp, Zea mays
  Peptide Sequence Number=SeqID_57048
atgcccccaaagcctttccacacacaaacacacagcgatatacgcacccttgaagctttccaccccgactcccttaaaagaagcaagctcatggcactgctggtcaagagccaccaccaaatgttggtctcctcctccacctcctcgtcgtccccttccgcgtcccagcagcggcagccaccgccaccacctccctcctcctcctgcctcaccgagcagcagccgtcccccgccaagcgcaagaggcgccctcccggcactccggaccccgatgcggaggtggtggcgctgtcgccgcggacgctgctggagtcggacaggtacgtgtgcgagatctgcgggcaggggttccagcgcgagcagaacctgcagatgcaccggcggcgccacaaggtgccgtggcggctcgtgaagcgggcgccgccgcctcctgctgctgctgctggcggcggcggcggcgccgccgacgctaataacagcagcggcacaggaggtggtgcaggcggcggcgcgccccggaagcgcgtgttcgtgtgccccgagccgagctgcctccaccacgaccccgcccacgcgctgggcgacctggtgggcatcaagaagcacttccggcgcaagcacggcgggcggcggcagtgggtgtgcgcccgctgcgccaagggctacgccgtgcagtccgactacaaggcccacctcaagacctgcggcacccgcggccactcctgcgactgcggccgcgtcttctcacgggtggagagcttcatcgagcaccaggacgcgtgcaactccagccggatgcgcggcgaggcggtggtggtggccgtgcccgtgcccgtgccgccgccgtcggcgctcccggtcatccgtcccgccgtcccgcggcatccgcccacggtggcagtagcaccgccgccgccgccggtgctccagctcctccccgcctccgcgggggtctcagcgccgcggactagtagcgccacgacgaccgcctctccgtccaccaccacaaccgcgtcccaccaccaagcaaaaccccacgcggcgacaacaacaaagctgcagctctccatcggccccatcgtcacggctgcggcggcggcggccgtcgactgcggcgaggacgagtccaaggcggaggagctgcggcgcgcggtggaggagaaggccgcggcggacgcggcgcgggagcgggcgcgcggggaggccgcggcggcggagcgcgccctggacgaggcccgcccgcgcccaggcagcgtcacctgccacgcgtgccgccaccgctcgctcgccgtcgccgtggtcaggggtgccgccgagggccacgccgccggccccgcggtggcctgcgactccatcaggggaggaggcttaggagcaggcatctag

SEQ ID NO: 15270 - DNA, 435 bp, Zea mays
  Peptide Sequence Number=SeqID_57049
atgctgcggcacgtcgagggccaagggcgaggacggggggtacgacattggggcggcgtggaggccgcgcacggcgaagtagaggcgggttcgccttgggagcaaggcattgtgggccgggctgagcgacagcgggttcgcgcccaggggagcgacggcggcatgcgagtaagaggaggcggcagcggcaaggagttagggttcggtcgagaccgtgaataccgaaagcgggtcttcctgggcgcgggcggcatcgggtcttcctgggcgcaggcgggtcgaggcagtcggggcgtcgggcgtcgcgtgcgcttgatccttggagcggtcgcggtagagagaagagagagggaagagaagggaggagagagagaggccgggtgggagaagcaggtggcggcggccaaaggaaggaggcacgcgcggctaggttag

SEQ ID NO: 15271 - DNA, 318 bp, Zea mays
  Peptide Sequence Number=SeqID_57050
atgtcggtagacttgtggtgtgcaggacacgcactcgctcgaggacttggtggagtggatcgtgttgccagcgtgatcgaggactggcgggacacgcgtctggtcgtgaaggacgtgcaacgaggtgcggtgctcacgacagaccactgcatacacctagttattgcagatattggtcgcgatttgagaaaaattcggtttaaactcgttctagaaaaccccaacaaaaccccgatttcttgtgattcattcacaagttcaattgagctcaaaatttgtggagtccttgaaaacatattttctcagaatgttttgtaa

SEQ ID NO: 15272 - DNA, 3417 bp, Zea mays
  Peptide Sequence Number=SeqID_57051
atgacgataagctgcgctgctgctgaggaggcgttgcagtggcagagtggacaacaggtcgcgctgctgcccgaggaggcgatgcagcagcaaccctcatgcccggcaaagaaactcgtgacagacgacaaatgtcacgggagggtgaggtcgtgcacgctatcggttggccagaccgacggcgtgcggggcgaagacgacgatggtgatgtcgatggcgaggagacttggcaccggcttcctgccttatcgcactcacgacatgtacacacatgcactacgcggcctcctcacatcggctccttaacagactcacgcaacacatcagagatggcagaggcagcactccttgctctctcgaagattgggtcctatttgggaggagaagcggctaccttcattgcaaccaaattttctaatttgatcgagctaccaaatactgtgaggcgtattcggagggaacttctgatgatgaacatctttatacgtaagacaggtgcatcctatctcagtgacgagctcctcaaggcttggatcacagaagtgagaatactggcctaccgtgtcgagaacataatcgacaacttttcataccactctcttcaattcaagcaagaccctaaagggaaaaagttggcgaatggattaagctacggtctagtgtttagtgggattgctgctgatctagctcagatagagaaggaaatagagcatgtttcgaagttgaagaatctctggttgaactcagtccatgagcttcttcatactcaagttagcagtgctgaacagcaattccctcaatacagtttgccccaaattctaaaagatgaaaacctggtggggttaaaggaagaaagagagcagttaaaggaatggttgattcccaatgcacctgtcaacatgacaaatataccagctctcaaggtggtaactttgtcgggtatgggtgggatgggaaagaccaccctgctcactagtgtgtatgataagctgaaagatatcttcgaaatccatgcttggctcactgtctcacagacatacagaagtgtcgatactttgctgaaggagctactaaagattgttagtgcctctgagcacacaactcttgttaacaatgactatcagaaggaagtgattgtaccagttgatattgatataagagacaagaaacagctgaaaccagatgtcatcgacaagatgggcatcttagacttgaagagtactttaaaagcagtcctgaaacataagagatatatagttgtgttagatgatgtatggaatcgttgtgttcacgatggaataagcgatgtgtttgaagattgtgggaaggaaagtcgcattgtcatcacaacaaggaaacaagatgtagctgcacttgccacaccaggttaccagctcaacctaaacccattagatatcaaagatgctctccagcttttctgtacaaaagcttttcccaacaaaaaccactttgattggacatcagtacttcttgaacatgctaaagatatgatgaagagatatgaaggtcttccattggaaaagtgcccactcgagcttcaagagcttgctactcatattgtaaggaaatgtgaggacttctcagtgtcaaagtgtccatctgagcttcaggatcttgcaacttataccgtaaacaaatttaagggattctcactatcagcatgcccatcagagcttcagaatcttgctactgatattgtaaaccattgtaaggatttacctctggtgaagtgtccatcagaacttcaggagattgctattgacattgtaaagaaatgtaggggtttgccgctggctattgtatcagtaggcagtaggttgtcttcaagaaagcaaatagtgccagtttggaggcagatgtgcaatgaacttccttgtgagctggaaaaagatgaccaggttcgaggaattctaaatcttagctactatgacttgccaagtgatcttcgaaactgcttcctgtactgcagcctgtttccggaagattaccacttctcaaaggacgatcttgtgcgactgtgggttgctgaaggatttgttgaaaagaaaggggacaacactcctgaggaggtagcagagggctatcttactgagctgatccaccgtaatatgctgcaacttgtggaaaatgatgagcttggcagggtgaacacatgcaaaatgcatgacattttaagagagttggcccttcacatctctaaagccgaaatgtttggtacagtaaatgattttggtgcaatggtgcagatggacacagatgttcgtcgcatatcttcatatggatggaagaagatgaaaaaaaataaatccaagttgaaatttccgcacctccgaaccctgatggcaagtgataccattgtggactatgtaccatcaatactatctgaatccaagtaccttactgtccttgagctccagaattctgatttccaggcactgcctacatctataggaaatctctttaatctgaaatacattggcctaagaaatacaagaataacgtcactgccagactccattaagaatctctccaatcttcaaactcttgatgtcaaatcaactagtataaaagctctgccacctggtatagtgaacctcactaagctaaggcaccttcttgctgacaaatttgctgataagaaccagtcagagtttcggtactttgtcggagtggacgctccagaagggctttcgaaccttgaagagttacagactcttgagactgtgcaagcaagcatggacttaccggaacaacttgataaccttttgcaactaaggagcctgtgggtagataacatcacttctgcccactgtgcagggctttttgctaccttatcaactatgccacttctttccagtttgcttctatctgcagctgatgaaaaggagacacttctcttgaaccatttcaatccaacttgcacgaagctccacaagctaattgtgagaggattgtggtctctaacaggttgtccgatacttcagaaccatggcaggtatctcaagtatcttgccctaagcagatgccattttgtaggagacccgctggtggttctagcatctactgtaccgaacatcacatatctgagacttaacaatatacctagtccacctactttggaccttctggaaggatccttcccacaactgaagacgctagttttgaagaacatgaatgatgtcagccttctgaaaattagtagcggtgcacttccagtcatagaatgtctatatatcacatcactgcccaaattgcagacagtccctcgaggcatcaaatccttgagctccttgaaaaagctctggcttctgggtctccacagtaacttcaaggctcgatgggacatggagggaatgcagaaggatctacagcatgttctggagatacgtacctaa

SEQ ID NO: 15273 - DNA, 249 bp, Zea mays
  Peptide Sequence Number=SeqID_57052
atgggtgaaaattcccagatgatcgcaaagattgttgtggtatgtaatgatccaatcattgcccactctgagcatcaatatgttgctactgggatgcccatagaagctgctctgaagccggaggagcacgaagggaggaggggccaaacaggggaggaggggaaggcagacggtacgattgatgagtcggcgagtgcaatttctatctcttaccgggttcacttccaaaagccgggagtcgtatgctaa

SEQ ID NO: 15274 - DNA, 1188 bp, Zea mays
  Peptide Sequence Number=SeqID_57053
atggatctagggttagaggatcggaggaaggaggagtcggcgggtcagggaggcgcgctgacagagaggcgcgcggcggcgcgggacagggaggcgcaaggcggcggcgggggcagggagtcttggatctgtgcgcgaggcggcgacgggggacacgaagtcttggatgaatcttctggaattgattggaccatgcgcttcaaaataatcttggggatatgcaatgggttacattttctgcatgaggagcgaagtgaagccatagttcatttgaaccttaaacctagcaacataatgttgggtgacgacatgaacaaacccagaactctcaccaaaaacgttgtgggatggataggatacattgccccggaataccattacagaggagaaatatcagttaagtcagacatattcagtttgggtgttcttattcttgaaatagtgacaggactgaagagggacctcaatattcaagacatttcttctgagttactaattgacaatgtatctaaaaattggacagaaatgtcgcatatagaatcaaagtatccatccttggaagaacaacacctactacaagtaaaaagatgcattgaacttggtttgaactgtgtggagtctgatccaaagaaaaggcctactgtaggatcaataattggtaaactcaaagaaatcagtcatgaagctagcatacacaaatttatggagaagaaactgcaactgataactgaattcccaagggaaccaaagctacacttcatagaggttatcacaggggactttgccaatgaacgtgagattggtaaaggttcttttggggtagtttataagggagtgcttcaaaatggagaagtggttgcggtcaaaaggcttttggtagttgcaaaaactaatctggataagcaatatctgaatgaagtatctagtctgattgatctcaaccatagaaatatagtgaagctatttgggtattgtaatgaaatacaacggaaactggtggagtcccatggaacatatgtttttgcagacacagaagaaaggatactctgctatgaatatttgcctaggggaagccttgacaagtatctttacggtgtattatatcctttcaagtctccttttactgtccttgtttctcatgtcaactttagtctctcttcctctattctcactaatatcacaccttag

SEQ ID NO: 15275 - DNA, 693 bp, Zea mays
  Peptide Sequence Number=SeqID_57054
atggacaaggtgtcctctaaggaggacttagatttctttgttgcgttagacggtgtgtctgcttcagaggctggagcaattgaagggccttcgaatagggccccgttacccacgataaacggcgagagggcagagttggaggaatctcgttggatgcttcttgcgaagacgactggcgaggtcctcggtccttgctgtttaggggaactagagcttagggcgctctttgagggtgaagagcttgagctcatattgtcaaagctccgtccactcaagggacacgatctcgcctcgcccgagcccagcctcgggcaggagcagcagacccaggttgattcacgcctcgcccgaggtcgacagggccgaagtgaccgcagtcacttcgcctctccactgactgacctgacaggaaaacagcgccgcctgccctgctccgactgctgtgccacccgccaggggctcggactcaacctcgaccccggaagacggtctccgcctcgcccgatcccaaggctcggactcaacctcgaccccggaagacggtctccgcctcgcccgaccctagggctcggactcaaccccgacctcggaagacggtctccgcctcgcccgaccccagggctcggactcaaccccgacctcggaggagtcaccgcctcgcccgaccttgggctcggaccgaccacgccgtag

SEQ ID NO: 15276 - DNA, 606 bp, Zea mays
  Peptide Sequence Number=SeqID_57055
atggataaggatcgccaagagtcttcggagaaaagagtaaagcttcgctatgactggtggaccctagtctcgagacgaaggcacaacatgttgatggatcgaagtacggagcaccgatgccgcggttgggggatcaaggcccagcgtcgtgcgacagctgtcgtggcaatgcctccgcacgcagcactggcttctgcggatgttggcatgccttcgcctggcaaggctagccgtgatgcgagagcgaagggtactgggaagggcgcaaccagcggcgacatgctcgatatctccgtcaatgactacttgattgaaggcgtcaacgagttcgacgcccacactaggcaggggggcggtgggttgatgtcctatgcctcccgtgttacctgcgagggtgctgccaacgccctgtctcgtgaaggctaccgtcactttgagaggaatgaggaggttgaagacctcgccggcctagagggctcagtggccactctagacgatggcatcttagaaaaaggtgcggaggagcagtcttcgcgcgttcaagctgacactggtgagcccgacgccgcgggggcttcacaccgtgttgctgacgagcaggtttga

SEQ ID NO: 15277 - DNA, 288 bp, Zea mays
  Peptide Sequence Number=SeqID_57056
atgcagtcggcatgcaaccgcgccaagtgggcgcgccccttcgactccaacgcgcccagcatggaggcccaggcccacacgtcatgcaaccggcgcgccggttgctacgtgcgagcaactgcaccgccactcgcgccactaccgcgcctcctcgattgtggaaccagtacctcaactcgaggcaaccctgcgtgtgacccagcagtgccagccagggaccgggaaagggggataccccgaaaaggatccttctccgtgaaggaaacaggcaccgagcctccctactga

SEQ ID NO: 15278 - DNA, 588 bp, Zea mays
  Peptide Sequence Number=SeqID_57057
atgggagacgggaaggaggggcctcggctagggagagcgcgcgtcggggagaaagaagatccgtgcgtgcgccatggggagctcggttgggtgcgagcaggcaacaggatccgcagcggggaagaagcggctggggaagaagacgtgcgcagggagcagggcgcgcagacacttgggcgcgcggcgcagtggagcagagggatgggcgcgtcttggggaagagccgcggccagggaaaaggttcccgccatggggagaaccacggctggctgggcgagttgggggagagtggagggaggagagaggagcggctggacaagcagccatgggagcaggggaaaagcaccgcggcgagctcgtgggagagaagcagagagtgagcgccgcaaagacaagcaggggcacacgcgccatgggagattcggccggatgctggagaggctaggcgcgatgcaggagagcaggagccaggacgccatgggagggagtcggccatggggaagagagatggagacacagccatggattgggcgccgaaatttcgtagatattgttgagccaaaatttttagatcggggcgagacgtaa

SEQ ID NO: 15279 - DNA, 322 bp, Zea mays
  Peptide Sequence Number=SeqID_57058
atgtgcgcgttggacacggtgaaacgctacatgtgcttgtgtccgagcccacccgaccgtgacctcgctttgcttctcatgtcgctgctcgccgagtccttccccagaccatatgccataaaattcgttcggccacggtcccgtcaaattgcgaagctccctgccgtgtgcttgcccagctcggatttcgccggccgccgttctctaacccgtgtgccgggcccggtcggcgtcatggagttttggtttgttcggctcattgttgacctcaccggtgtcgtcaaaccgtcgaacctgaaaggatcacgatgcccaagagggg

SEQ ID NO: 15280 - DNA, 1389 bp, Zea mays
  Peptide Sequence Number=SeqID_57059
atgggcgagacaatctcgttcgcccctcagaaggccatcaagttccaagtcctggcggactttgtggctgaatgggtcgacacccagcttccagcagctccgatccaaccggaactatggaccatgtttttcgacgggtcgttgatgaaaacaggagcgggcacgggcctgctcttcatctcacccctcgggaagcacctccgctacgtgctgcgcctccatttcccgacatccaacaacgtggccgagtacgaggctctagttaacgggttgcgcatcgccatcgagctagggcttgtcatcgaccaagtcatgaagaactcccactgccgcgacccgaagatggaagcctactgcgatgaggttcggcgcctggagaacaagttcttcgggctcgagctcaaccacatcgcccgacgatacaaggagactgcggacgagctggctaagatagcctcggggcggacaacggttcccctggacgtcttctcccgagacctacatcaaccctcagtcaagaccgacgacacgcccgagcccgagaaggtctcggccctgcccgaggcgccctcggctcggcctgaggcaccctcggcccccgaggcacctcaggccctcgttggaaatgccttccgacagggtttctactggccaaccgcggtggccgacgccactaggattaaggcaccagggggctacacgcacctactggtcgctatcgacaaattctccaagtggatcgagttcaccggcagaaatttcctggacttctgcgaggatcaccgcatccgggtggactgggccgccgtagctcaccccatgacgaatgggcaagtagagcgtgccaacggcatgattctgcaaggactcaagacgtggatctacaacgacctcaacaagttcggcaggcgatggatgaaggaactcccctcggtggtctggagtctgaggacaacgccgagccgagctacgggcttcacgccgttttttctagtctatggggccaaggccatcttgcccacagacttagaatacggttccccgaggacgagggcgtacgacgaccgaagcaatcgaaccaaccgagaagactcactggaccagctggaagaggctcgggacatggccttactacactcggcgcggtatcaacagtccctgcgacgctaccacgcccaaggggttcggtcccgagacctccaggtgggcgacttggtgcttcggctacgacaagacgcccgagggcgccacaagctcacgcctcccttggaagggccattcatcatcgccaagattttgaagcccggaacatacaagctggccaacagtcaaggcgaggtctacagcaacgcttggaacatccgacagctacgtcgcttctacccttaa

SEQ ID NO: 15281 - DNA, 774 bp, Zea mays
  Peptide Sequence Number=SeqID_57060
atggagaacgtggaggtcgggaagaagcacgtcaacctcatgttcgtcggcgacggcatcggcaagaccgtcatcaaggccagccgcaacgtcgtcgacggctacaccaccttccgctcggccacagtcgctgtggtgggcaacaacttcttggcccgcgacctgacgatcgagaactcggccgggccgtcgaagcaccaggcggtggcgctccgcgtgggggcggacctgtcggcgttctaccggtgcagcttcgtggggtaccaggacactctgtacgtgcactcgctgcggcagttcttccgcgactgcgacgtctacggcaccatcgacttcgtgttcggcaacgcggccgtggtgctgcagggctgcaacctgggcggggaggaccccaaccagaacacgggcatctccatccagaggtgcaaggtggcggcggcggccgacctcgccgccgcccagtcctccaccaagacctacctgggccgcccatggaagcagtactcccgcacggtgtacctgcagtcggagctggactcgctggtcgacccggccggctggctcgagtggaacggcagcttcgcgctcgacacgctctactacggcgagtacatgaacacggggcccggcgccggcacgtccgggcgggtcaagtggaaggggtaccgcgtcatcaccagcgccgccgaggccagcgccttcaccgttggcaacttcatcgacggcgacctctggctcgccggcacgtccatccccttcaccaccggcttgtga

SEQ ID NO: 15282 - DNA, 474 bp, Zea mays
  Peptide Sequence Number=SeqID_57061
atggcgcctccagttgacgtggccggcctgcgccctaggttggggcgatgtggaggctcctccgaggtcgaggtcgagtccgtcttccgtggccgaggtcgagtccgagccccaagcccaagtccgagccctgggtcgggcagagcggagttcgccgtctttctggggcttagcccgagtccgagccctgggtcgggaggagcggagtttcgccgtcttccggggcttagcctgagtccgagccctgggtcgggcggagcggagttcaccgtcttccagggcttagcccgagtccgagccctgggtcgggcggagcggagcttcctatggtgcgtgcggtcgggcttgactgcctgtcagcctcactctgtcaagtggcaccgcagtcggagcggcgcaggcggcgctgtctttctgtcagaccgatcagtggagcggcaaagtgacggcggtcacttcggctctgtcggctga

SEQ ID NO: 15283 - DNA, 717 bp, Zea mays
  Peptide Sequence Number=SeqID_57062
atggagattggctttttccctactgctgagatgcaggagtttgttcagtcgctctttcatttaatccatgtattccctaaccaagtcagttcatcttgcatgaagaaacggatgaacaacctgaccaaatggatttctacccgaatgcatgaccttttgctggcgaatgagaactctcaacccttggcttaccgatggcctcgacctcagacaacggactccgcctcgcccgaccccagggctcggactcagcctcgacctcggaagacgaactccgcctcgcctgaccccagggctcggactcagcctcgacctcggaagacggactccgcctcgcccgaccccagggctcggactcagcctcgacctcggaagacgaactccgcctcgcccgaccccagggatcggactcagcctcgacctcggaagacgaactccgcctcgcccgaccccagggctcggactcagactcgacgccagacgacggactccgcctcgcccgaccctagggctcggactcagcctcgacctcggaagacgaactccgcctcgcccgaccccagggctcggactcagcctcgacgccggacgacggactccgcctcgcccgaccctagggctcggactcagcctcgacctcggaggagtcaccgcctcgcccgaccccgggctcggaccgaccacgtcacaagggggccatcattaccctacccctag

SEQ ID NO: 15284 - DNA, 558 bp, Zea mays
  Peptide Sequence Number=SeqID_57063
atggtcgctgatctggtcctgcgagctccacgcgccttggctgcagtttcttggcgcgccttcctgtcctcgccttggttacgctcgccgtgtcctccgccgatattctcgcctagccgcgcggacctcgccgtcgtcttggtcatcgacgccactcaatcgtccacgtgctgttatcctcgcggacaccgcttcacaccgtcgctctattttcaccatccgtggcgtcgcagtggtgatgttctggctgcagcaccaacgtcctcgacctcgccccaaagctctatgttgggtttgtcagcgtgctactcgtccgcactcctcgcgtccacaacattgtcgcctgtctcctcgccggtcgtggacgcccaggttgaagacaccccaccatcgatccatgtattcgtgctgtgggtgatgctgctacttggcgtcactactggacgtgtccgcgatcccgtcagcctttgctcgctatccgcatcttgtgttcgtatcgaatgccaggattatggggaaaggaaagctccagcacatcagatgtcaggtgttccgtga

SEQ ID NO: 15285 - DNA, 480 bp, Zea mays
  Peptide Sequence Number=SeqID_57064
atgggagggagcacggtgtgtgatggagagccagggcagcgctgttcggcgaggtcagtcgtggcgatttggagaccagagccgacggcgaggtgggtggaaaggaaggggcgctcgcgagatccgggacggcttggctgggcgactgcatgggcggacaaagagatgggcaccgagcagggggagcagagaagggagcgggcgccgcagaaaaatccagtgacgggagctccgagcagggcgagcaggaaacctgcatgcggtttgggggagcaggggacgcgccatgggaggaggaccgagcttgaagacgcggctgcgcgcagggaaggagtagaggctgagctcagcggccatggcgaggtcggtggcggccggcaccagagcccacgagcaggcaacccgttcctgggagccgagcaggaaggaagcgctgccatggctgggactcggcaagctggagggaggagcgcggcgtga

SEQ ID NO: 15286 - DNA, 165 bp, Zea mays
  Peptide Sequence Number=SeqID_57065
atgccctcgggcgagttggaaatgtgtagcttgtccgaggttgggctcagtcaaggatggaagggggcacgacgagtgggtaaagatggaaggggcaagctactcaagggcgaagatggaaggggcactgaccgtacctggacggatgaggttggccggtgctag

SEQ ID NO: 15287 - DNA, 1056 bp, Zea mays
  Peptide Sequence Number=SeqID_57066
atggctgaagaggggaagagtggcgagctttcgcttgttgcgtattacaatgctgcagagagggccaatgtcaaaaagattaccgaagaaatcttggacggcttatcagatgactctgacgacagtgaagattttgattttaaagaagatactggtgatgccgaagtcgaaccaatgtcaaagtcgaaccatgttgtcttttgcaaatcgacaatgaagaagggtcatatcgaggtgatgaagaacaattatttttatgacatttctattgtcaggcttggtggagaggatactatctcgcgtcttgagaaagatgaggtgccacaacacggcgttcacgacaccggcacacagccggtctatcgtatgcgcgccgccgccggtcaaagagaagggtgcacccctcttcagctgccggcacccccagctcctacaacttcattgccaccagcagcgctagcggcttgcggcgcgaacacgaccgaggccagcacagcgggcacgtgcacgccgccgggcggatcctcgtcgccgtcctccttcttcgtcgcggagcggctgtcccacaacgacgactccagcaaggacggtggtggcggtccaggtccagccgcagctggcagtggagagaaggaggccgaggcggacgacaggccggcggcggccaggaggaaaggggaaaagaaggagcgccgcccgcggttcgccttccagacgcgcagccaggtcgacatcctcgacgacggctaccgctggaggaagtacggccagaaggccgtcaagaacaacaacttcccacgaagctactacagatgcacacaccaagggtgcaacgtgaagaagcaggtgcagcggctgtcaagggacgagggcgtggtggtgaccacatacgagggcacccatacacaccccatcgagaagtctaatgacaacttcgagcacattctcacccagatgcagatctactccggcatgggatcaaccttcagcaggagtagccacgacatgacagggatagaaactgatgtacaccgccctcaggaatttaaaaggtaa

SEQ ID NO: 15288 - DNA, 679 bp, Zea mays
  Peptide Sequence Number=SeqID_57067
tttggtgttcctaaatacctcaaatgttgcataccaccctctatcgcaaattataggtcattttggcttttctagttttggtttgatatttggacggagtgggagtggaaagacaacccttttgcagctgttggctggtctatcagaacctacctctgggtctatttgcattcagaagtatgatgatactgggaatcctattggcttgcctgaactgctaacttctcaacgagttggaattgtatttcagtttcctgagaggtatttcttagcggatactgtacttgaagaagttacttttggatggcctaggcaaaaggcagacctcctattaaaagaacagctcgctttaaatcttcaaaatgcttttaactcggttggtctgacaaccatctcattagatgaaaatccgcaagctctaagtggtggatttaagaggcgacttgctttggcaattcaactggttcaaactcctgatctgttgctgcttgatgagccacttgctggtctagattggaaggctcgagctgatgttgtgaatctcctaaaggacctgaagaaacatcatactatactggttggaactatatccactagtggatcgctcatggcgaatggaaatggggggaagtttgaaggaggaagctttgcctgtctaaacatgtgcttgtcagtatag

SEQ ID NO: 15289 - DNA, 144 bp, Zea mays
  Peptide Sequence Number=SeqID_57068
atggcggtgaccgtccctcgggcggcttctcattgttttccagcaaatacggccaggaaatgtaggacttgctggagctgtcgtgcggcaagagtcgaggctgggcactcccgattggagagattaccaagttgtggagtgtag

SEQ ID NO: 15290 - DNA, 333 bp, Zea mays
  Peptide Sequence Number=SeqID_57069
atggaagctgctaccgctgctgggtgtggtgaaggatgggctgctgcaccatggggaaatcagcaggaggaagaagctagggcttgggcgccatggctgggggcacgatggagagggagagctaggctgcagctggccgtgcctgaaggggaggcaagccagaggaggggtgcgcgcgtccagatgcccagggagaaaagcagagggcgtcgcgccatggacgccggcgagctcactgctcgagctcggaccagaggaggtgccacgcccatggaggagaggagctcgactgtggagattgctgggagaaggggcgttgtgcacatggagtag

SEQ ID NO: 15291 - DNA, 1167 bp, Zea mays
  Peptide Sequence Number=SeqID_57070
atgccgggtggggcccacggcgccggcgccgcggacccgatgcaggtggaccagccgctcccccctgccgccgcaggcacagcacacgcccccgccgacgccaagggagtgatccggtcacaggcccatataatctcgacaaccattggagggaagaatggagagcctaaaaggactatcagctacatggcagagagagttgtgggaactggatcatttggaatcgtcttccaggcaaaatgtctggagactggtgagactgttgcgattaagaaggttttgcaggacaagcgctacaagaacagggagctacaaatcatgcgatccatggatcactgcaatgttgtttccttgaagcattgcttcttctctaccacaagcagagatgaacttttccttaacttagtgatggacaatatgaaccagaggatgccactcatttatgtcaaattatatacctaccagatatttcgaggcttagcctatattcacacagtacctggagtttgccacagggatgtgaaaccacaaaatcttttggttgatccactgactcaccaagtgaagatatgtgattttgggagtgccaaaatgttggtcaaaggtgaagcaaacatatcatatatatgttcacgttattaccgtgctccagagctcatatttggggcaactgagtacacaacatcaattgatatttggtcagctggatgtgttcttgctgagctgcttcttggccagcctctcttccctggtgaaagtgctgtggatcagcttgttgagataataaaggttcttggtaccccaacgcgcgaggaaatccgatgtatgaatccaaactacaccgagtttagatttcctcagatcaaagctcacccatggcacaagattttccacaagcggatgcctccagaagctatagatctcgcttcacgcttgctccagtattcaccaaatctaagatgcactgctcttgaagcgtgtgcacatccattctttgacgatttgcgagaaccacatgcgaggttgccaaatggacggccatttcctccactgttcaactttaaacaggaactagcaaatgcctccccagagctcatcaacaggttgatcccagaccatgctaggcggcatcttgggctcacattattgcccgctactggaccatag

SEQ ID NO: 15292 - DNA, 351 bp, Zea mays
  Peptide Sequence Number=SeqID_57071
atgggcgcggccagccagggcctccctatcaccagcctcggcatcgtcggtgtggccccagactgtctgccccttggccccgtcctcgcgcatccgtcgaatgcattgtcacccttcgatgtggagcacgaacgcaatgcagtcgataccctcactgaacagcttgatgaggctaagcaccatctacttggctcttcctgcttcacacctccctcagagccccatgcggtcttgcctcattcggtgtacaaggtcatcgtcatcaccaacctccatgcccaagtgcgctacaccctagatgaccacatcctcaccgacactgcctccctcactatcccttcctcgcggtag

SEQ ID NO: 15293 - DNA, 1023 bp, Zea mays
  Peptide Sequence Number=SeqID_57072
atggagttggtcgtgctaatcgtcggcgctggcccagccggactggcgacggcggcatgcctgagccagcgctcgatcccgtacctgatcgttgagcgcgaggactgcagcgcgtcgctgtggcgctaccgtacctacgaccgcgtgaagctccacctgtccaaggagttcagctgcctgccgtacatgccgcacgaggaagacaccccgacctacatccccaaggcggagttcctcaagtacttggactgctaccgcgagcatttcggcatcaagcccaggtactgcacttgcgtcgtgtcggcagcatacgatgagggaaccggccgctgggtcgtcgccgcacgtgacacggtcgagggcacggagatccggtacgcggccaggttcctggttgtggccaccggcgagaatggagcggggaggattccggagatccagggtctggagagcttctgcggggaggctatccactcctcgacctacaagtctggaaaaagctatgccgggagaagggttctggtggttggtgctggaaattccgggatggagatcgcctatgatcttgcaaaccatggtgccgacacctcgattgttgttcgcagtccgttacataatactagtaaaatgccagctagctggggaggtacactcaatgccgccggcgcgctgataagagccagcgcacccgccgccgcccgttggggaaggtgctcgccgtgccgtcctcgcgccatccttattgccgatgaaataatttcttgcgttgaggatttcaacatcgtttatgcccattctcacaccatcacatgtggccacatctccctcgtcccttcgagcagcgatcgcttgatggtgacacgcgccctctccatcgcctccttgtctagcgttgttcccacgccgatgctggtccgctccactgcagttccacaacctccgactatccatcgcgctcgaagtcggaagatcagggagcacagcaggcaggtcgtgccagctggtgcgtcacagctagcctag

SEQ ID NO: 15294 - DNA, 210 bp, Zea mays
  Peptide Sequence Number=SeqID_57073
atggcatcgtacggcctggagttggccccctacaactcaaatccaaaacaggtgttcaagaggatatcgaagatcactggaaacaaagttcagttcgaatgcgggaaggactgcgaattcgatgccatcgtgtttgcgacaggttacaagagcagtgcgaatctatggctcaagatgtacaatttatattttgatcatttcttcatatga

SEQ ID NO: 15295 - DNA, 708 bp, Zea mays
  Peptide Sequence Number=SeqID_57074
atggagttggtcgtgctaatcgtcggcgctggcccagccggactggcgacggcggcatgcctgagccagcgctcgatcccgtacctgatcgttgagcgcgaggactgcagcgcgtcgctgtggcgctaccgcacctacgaccgcgtgaagctccacctgtccaaggagttcagctgcctgccgtactgcacttccgtcgtgtcggcagcatacgatgaggggaccggccgctgggtcgtcgccgcacgtgacacggtcgagggcacggagatcaggtacgcggccaggttcctggttgtggccaccggcgagaatggagcggggaggattccggagatccagggcctggagagcttctgcggggaggctatccactcctcgacctacaagtctggaagaagctatgccgggagaagggttctggtggttggtgctggaaattccgggatggagatcgcctatgatcttgcaaaccatggtgccgacacctcgattgttgttcgcagtccgttccacaacctccgactatccatcgcgctcgaagtcggaagatcagggagcacagcaggcaggtcgtgccagctggtgttcaagaggatttcgaagatcactggaaacaaagttcagttcgaatgcgggaaggactgcgaattcgatgccatcgtgtttgcaacaggttacaagagcagtgcgaatctttggctcaag

SEQ ID NO: 15296 - DNA, 597 bp, Zea mays
  Peptide Sequence Number=SeqID_57075
atggccccggcgccccccacccccgttattcccgccacgatgctcgcgttcgtgaggcgtcacgcgcacatcgcgcagcccaacccccttccccacccccacctgcgatgcaccaaaccccactcaacaccatccaccactccccggcgtggaggtcggaggtgcgagggatggcctgggccgtcgccacggcggctagtggcgcgtgcgccgcggccagctggagatctcgccagccaactctcgggcttcctctcctccatccccgagatcgtcgctcgtggagatctcactagccaatgcccgggctccctctcctccatccctgagaccgatgctcgatctgcagcccggggggaagggaagagaggcagatatacaaacgtgaaaccctaccaaggaatccctccacgcataggcaagaagggaaggggaagcgatggagtaccctgcggcggccactggatcggggggccacaaatactaataaccacaacagcactcgcactcataatcatcgcccgccacaccccgccgctcggtgggtcaagcgatggtgcgttcttggcttccctccctcttcctgaaagaagataa

SEQ ID NO: 15297 - DNA, 615 bp, Zea mays
  Peptide Sequence Number=SeqID_57076
atgctggtccgctccactgcagttccacaacctccgactatccatcgcgctcgaagtcggaagatcagggagcacagcaggcaggtcgtgccagctggctcatcttgggccgtggaacctggtgcagccaccatcattggtgtcgttgagggagattgtgtacacataatgcccaaggagctgatccgtctcggaatgacatttgtccaatacatgccagttacaatagttgaccttttcttagtgaagctagccgatttcatatttggtgatctatcaaattatggcatcgtacggcctggagttggccccctacaactcaaatccaaaacaggtagatcttctgtaattgatgttgggacagcagggttgattaagaaaggcgtcgtgaaggtgttcaagaggatttcgaagatcactggaaacaaagttcagttcgaatgcgggaaggactgcgaattcgatgccatcgtgtttgcaacaggttacaagagcagtgcgaatctttggctcaaggcagacgacaagtgcatggtgaatagtgacggacgtccaaacacatgtcgtcccaatatttggaaaggagaaaatggcctctatttctctgggttttag

SEQ ID NO: 15298 - DNA, 1182 bp, Zea mays
  Peptide Sequence Number=SeqID_57077
atggagttggtcgtgctaatcgtcggcgctggcccagccggactggcgacggcggcatgcctgagccagcgctcgatcccgtacctgatcgttgagcgcgaggactgcagcgcgtcgctgtggcgctaccgcacctacgaccgcgtgaagctccacctgtccaaggagttcagctgcctgccgtacatgccgcacgaggaagacaccccgacctacatccccaaggcggagttcctcaagtacttggactgctaccgcgagcatttcggcatcaagcccaggtactgcacttccgtcgtgtcggcagcatacgatgaggggaccggccgctgggtcgtcgccgcacgtgacacggtcgagggcacggagatcaggtacgcggccaggttcctggttgtggccaccggcgagaatggagcggggaggattccggagatccagggcctggagagcttctgcggggaggctatccactcctcgacctacaagtctggaagaagctatgccgggagaagggttctggtggttggtgctggaaattccgggatggagatcgcctatgatcttgcaaaccatggtgccgacacctcgattgttgttcgcagtccgttccacaacctccgactatccatcgcgctcgaagtcggaagatcagggagcacagcaggcaggtcgtgccagctggctcatcttgggccgtggaacctggtgcagccaccatcattggtgtcgttgagggagattgtacacataatgcccaaggagctgatccgtctcggaatgacatttgtccaatacatgccagttacaatagttgaccttttcttagtgaagctagccgatttcatatttggtgatctatcaaattatggcatcgtacggcctggagttggccccctacaactcaaatccaaaacaggtagatcttctgtaattgatgttgggacagcagggttgattaagaaaggcgtcgtgaaggtgttcaagaggatttcgaagatcactggaaacaaagttcagttcgaatgcgggaaggactgcgaattcgatgccatcgtgtttgcaacaggttacaagagcagtgcgaatctttggctcaaggcagacgacaagaggatgggattggctggtatttgcatggatgcttataatattgccaatgaaatcgtatctgtctactga

SEQ ID NO: 15299 - DNA, 861 bp, Zea mays
  Peptide Sequence Number=SeqID_57078
atggagttggtcgtgctaatcgtcggcgctggcccagccggactggcgacggcggcatgcatgagccagcgctcgatcccgtacctgatcgttgagcgcgaggactgcagcgcgtcgctgtggcgctaccgtacctacgaccgcgtgaagctccacctgtccaaggagttcagctgcctgccgtacatgccgcacgaggaagacaccccgacctacatccccaaggcggagttcctcaagtacttggactgctaccgcgagcatttcggcatcaagcccaggtactgcacttgcgtcgtgtcggcagcatacgatgagggaaccggccgctgggtcgtcgccgcacgtgacacggtcgagggcacggagatccggtacgcggccaggttcctggttgtggccaccggcgagaatggagcggggaggattccggagatccagggtctggagagcttctgcggggaggctatccactcctcgacctacaagtctggaaaaagctatgccgggagaagggttctggtggttggtgctggaaattccgggatggagatcgcctatgatcttgcaaaccatggtgccgacacctcgattgttgttcgcagtccggatttcaacatcgtttatgcccattctcacaccatcacatgtggccacatctccctcgtcccttcgagcagcgatcgcttgatggtgacacgcgccctctccatcgcctccttgtctagcgttgttcccacgccgatgctggtccgctccactgcagttccacaacctccgactatccatcgcgctcgaagtcggaagatcagggagcacagcaggcaggtcgtgccagctggtgcgtcacagctagcctag

SEQ ID NO: 15300 - DNA, 3045 bp, Zea mays
  Peptide Sequence Number=SeqID_57079
atggtgcggcttctcgggctgcggagcctgagcttcggcccggaggactcgccgcgggagatcccctccactgccgacgtggccccgcccgttggcagcagcggctggctcgtgcgcttcttcgactccgccttcttctgcgagtggattgccgtcagctatctctacaagcacgaccatgctggagtgcgcgactacctctgcaaccgcatgtacacgctcccgctgccggggctcgaggcctacctcttccaggtctgctacatgctcgtccacaagcccagcccttccctcgaccgcttcgtcatcgacacctgcgccaagtcgctccgcatcgcgctcaaggtgcactggctcctcgctgcagagcttgagctggaggatgctgacgatctcgacgggatcgataaggtgcaggagcagtgccaggttgcagcgaccgtgcagggcgagtggccaccgcttgtccggccttcacctccatcccctgctgccagtccgcgaggtaaccccatgctcagcagaatacgatcgtccaagcagcggctactgtcccttgcatcgtcaccttcgcttggactgagccccccagcaggtggtggggtcaatgtcgctgaggatgctatgggtactggagggaagcagccagccacaccgtcatcagaggataacaagttactcaagaggctgagcattggtccaaaaatgcgcgatgcactgctcttcagacgatcaggagagaaggatgaagaacaagaccgggatggtttttttaaaaggcttcttagggacagcagagacaaggaggaggaggatggtgacagagaaggatttttcaaaagattacttagcagggagaaggataatgaggaggaagaaagtgatagagatggtttcttccgcagattactcagggatagcaaagaggaggacatggaactgacaccaagctcagatggtttgttgaagcgactttttcgtgataaggaggacaggcaaggtgaggatgatgagaaggaaggattttttcgcaggatgttcaaggataagaacgaggagaggagagatagtagtcatgcaagacatgggaatgaggaaagactgggcaagagtgtggaagatgatgacagagaaggtttcttccgcaaaattttcaaagataagaatgaggagaggaaagatgaagggcatcaaaagccagatgagagggaaaaggttggtgcgaacatagaagatgataagagagatggttttttcaggcaactctttaaggagaaaaacgatgagaaaaaggaaggcagcacaccaagcaagaaagaggaagatgataaaggccataaaaatgcagatgatgataatttctttcgcaggcttttcaaggataagaatgaagaaaagaaagggattgttcatgacaggaatgaagatgacaagtgtgaggaaggtgataaagaaaacttcttccgcaaattatttaaggataaacatgaggagaggagaactgagggacctgataaaaatgatgattatggtaagggaagtagtggtatcgaagaggaagataatccagagtttttgtcattccgtaggttgtttagagtgcacccagaagattctaagagtgggcacatagaaagcagtcaatctaacaatctttctgaggggagcccaggatcagaaagcttttttaagaggctattccgtgatagagaccgctcacttgaagattctgagatttttgggtcaaaaatggcaaaagaggcaaggatctggtctcatgctttatgtgatacatcgtatggcctggtagacatatttcctattgaggatcgtaagattgccctccgggagtctcttacagagatcaatagccagattgcttctgctgaaaaaaacggaggagtatgctttccgatgggaaagggcatatatcgagtggttcatatacctgaagacgagtctgttcttctgaattctagggagaaagctccttaccttatatgtgttgaagttttaaaagcagaagctcctagccactctaaaggatcatcagatgggcacaaattatcaaaaggtgggataccattggctaatggagatgtgcaactaccaaaaccacctccatgggcctatcctttgtggagcagacacgaaacacaaaactatgaaacagacagaatgctgaagtctacttctcaggttattgaccaagcaatggctcaactctgggagactaaagtaaaatttgtaaatgttagtttctctattgagaaacttggtcgctcaaggagcattgtactttctgaaacgggtcgtaggctgcgacatgatgctacggattctcatgatccacctggagattcgcaaacagttgctgatcagcctattgaatgggtgaaggttacgttgtctgcagttccaggagttaacatggaagatgtagatgataatgaaccaacacgaaagaaggaccatcgccgtgttcctagtacaattgccattgaggaagtaaaggctgcagcattaaaaggagaagctccacctggtcttcctctgaaaggagttgcgcagagcacccaaaatttagatcctaaggctactgatggtggggatccaaaaccaaccgatgctttggctgatatatatcaagaagctggtttaccactatggctgcggccttatgaagtaattgttacttcagcttatacagcactaattgagaccatccctgatacggcatcaatccattccgtcaaaagtaggtttcccaatatttcaagtctccgagactactatgtagccaagtatgaagagaattctccaaattttaaactcgcacagagaaactttgttgaaagtatggctggatattcaattctgtgctacctacttcaggtgaaagatcgccacaatgggaatcttctaattgatgaggaaggacatattattcatattgattttggtttcatactgtcgaactctcctggaggtgtaaacttcgagagtgcaccatttaagctaacgagggaactccttgaagtatga

SEQ ID NO: 15301 - DNA, 264 bp, Zea mays
  Peptide Sequence Number=SeqID_57080
atgcagcagcaacccccgaatccaaacccttgcctccgcacgggctcgcgatccggagcctcccaaaccctagcctcgaaatcgcgtccagattcgcagcgaggggctgcagaatcgggggaggcgggcgccgaactcctacgcacatatttccgggggtggcaatttagccctgtttgtttcggtttttcgcagcttctgtatcacacctggcttttaggaacaaagtcagagagtcctgagctgctcatgaccgtgagctag

SEQ ID NO: 15302 - DNA, 741 bp, Zea mays
  Peptide Sequence Number=SeqID_57081
atgggcgcgcccgcctcggccccggcgagctcggcctcggccccggccccggtcgccctggcctcgcccgcgcccggccgcccgcccggccgccctccccgcgccgcccccggccgcccccggctcggcgagctcggccccggccccagccacccccggctcgaccgccctcggccgcccccgacgttccccgccccggccccggcgcgccgccctcccggccgcccgcgccatgacccgccccgcgccccggcctcgcccgccctccccgcgccgccccccggcgagctcacgccggccccgctttcgaccccggcctcggcccgccctgcccccgtcgcgcccagccccggcgcgcctcgctccggcgagccccgcccctcgccacgccccagctggcccggcctcggccgccccgcccccgtcgcactcggccccggcgcgcctcgctccggcgagcccgcccctcgccgcgccccggctgccccggctcggccgcccccgcgcgagccccgctctgccgcccccgtgcgagccccgctcggccgccccgtgcccggctcggccgtccccgccgcgcccgcgcccgcctcggccccgtgctgtcccggccccggccgtgccctccgccccgcccatgcgccgtacttgctcgcccgccccggcgtgccttgctcgcgttgtgatggccccggcgtggcctcgagctcggcccagcgtgcctttagcgcgcggctttga

SEQ ID NO: 15303 - DNA, 123 bp, Zea mays
  Peptide Sequence Number=SeqID_57082
atggggaacagcgaggaggcggccacggcgatggccgggcgcggcgaggggcagtgcggcgatggggcacggggtccagtgccgcacttggctcgtgggcacggaacagaagacttcgcctag

SEQ ID NO: 15304 - DNA, 576 bp, Zea mays
  Peptide Sequence Number=SeqID_57083
atgccaaatacgcgatgggagtccggcggcccaataccctcactgcctggcaaactcgccgtgactctcaacattcctgggtgtgattcgggtggaggagttaggaggacgaaggtttggggggtttgtattcccatggatgaagcaagaacccatccgggcagcccccaaagctccggcaacatcgacgaaggtggttacgagctccgccagcttcggtgttttgggctttacactgtgacaccggagatggtttcgaagcagaagactgctcctgggttgaaggtgatcatgctcttgaaagtgactgccatggagtcagcgctcatcaatgtcgccccccccctacctagcgcgctagctgttggtgtttgttacccgaccgcacaccacggggttaccctcgtgatgcttttgggcaggacagcgtcgttaatcgtgactcgatggttcgtgcggtggcacgatgggagaaacacacaagcttgtataggttcgggccgcgcgagaggcgtaacaccctacgtcctgcggggaccttggtattgtgatgagattacaagctgtgaactatga

SEQ ID NO: 15305 - DNA, 252 bp, Zea mays
  Peptide Sequence Number=SeqID_57084
atgccgacaacgaagtggaggccgaggctggccacgtcgatggcgcctctgcggcggcttccgtattccggtgagcgattacccatgccctactgctctaagatggacaccacgaactgctacgcagggagggggaagatggttcctagcgacccaggagaactccggcttttgacggtggcggcgacttcttctctctccgccctctctgaccgtggtgaggcattcggaagagatgctctctgcgtttag

SEQ ID NO: 15306 - DNA, 321 bp, Zea mays
  Peptide Sequence Number=SeqID_57085
atgggtgacggcgaggtcgaaagtggccctagtcgagctgccgcgagggtagggacggtcgtggctgccagagaagtggtcaccggtgatcgaagggagagggaggtatgtgttgcgcgagtgcttggcggtggggaggtcgtgcgggtagtggagccacgggaaccaacgcgggagggagcaggagggcggcaaagcgcgccggccaaagatgtagttctgaccaatattctatacgacgtaatatctttattttatgaaagtgcaaagaaagagttaatagaagatatacttccaattaaactcccagagaatatatag

SEQ ID NO: 15307 - DNA, 456 bp, Zea mays
  Peptide Sequence Number=SeqID_57086
atggagtacggtaccagattgattgatgccggccttattgtctcggcaatcgccgctgccgtcgtctacttcctgtacggcagccacttgcccaacatgccggcgaggagacggcgagccgtggtcgccgtcgtactgctagtccaagtcggggtgctcctctccgccgaccgcgacttgacgaacatcgccctgcgcctcgatgtcgaggagacggagtcgaaactgttgcggatggaggaaatcaagcacggcaccgagaactctgaactgaccgtcacaatgaaagatgcccatgttgatcagcctctggcagatgctgatctgcagcagcctgcagcagatgaggaccacacggcggaagaaaccatgaaggatcgtccgaagctaaacgaccacgaggttccactgtcgtcgaatggagacgggatcggggaagagaagcccaacccatag

SEQ ID NO: 15308 - DNA, 402 bp, Zea mays
  Peptide Sequence Number=SeqID_57087
atgacttccgccaaagaagggaggaagcattcagcagcaaaggccacaacactcttcacaagcttcagcccaacagcagagttcttttcggccgccagcgccaaggggcagaggcgccaggggcttcgggggaataagcagaaggaaatagcggaagcagcagcgcaacagagtcagtcgaagcagcgagccaaccccaagcatcttggcagcaacctccaccgccatcgccgacccaacgaggacaacagccagaagggacgaaaaataaacgctgattccgctgaaagtaaaggcgaagagctcctaaggaggcttacagcgaaagtcagcgctgatataaaacataatgcatctgggaaccagagggattacggtattgacttccggaactatttttga

SEQ ID NO: 15309 - DNA, 324 bp, Zea mays
  Peptide Sequence Number=SeqID_57088
atgaaatcaaaccctccctttgagatgataatggttgctttatctactcaaagatctcaaataattcatgcatcatacccacaactactccaccagtcactggaattaacaatatcctatgccaagtatcagcaagcctctgcagacgaagccaagaagcgccctcagtgggagtgcctgttcatgtccattcatgaatgcgccgacgcggacctcagcagaaggggcgaggaggcggagggggtgcaggaggcggagctcgtcgacaccatggtcaatgatgtcgccaagctggacatcgagggtggacccggtggcccatga

SEQ ID NO: 15310 - DNA, 1707 bp, Zea mays
  Peptide Sequence Number=SeqID_57089
atggaagttgatgatgacgtggaggaggatgacatagattttaaccctttccttagggaaggatctccgtctgagacctcatcaagccttacctcagaagcagaatgcgaggaacatagttctgaaaatcaaccaagtaaccatacatatcagcagaatactgtagttaatgaaaatacaagtgacagtgcacttcctcaaaatagattgtcgtctcaagatgctgttaacgaaatgtttccagaagaaacgtctacccaggttaatattgagaatgatggtcacttgaatggattggaaaaagacgttttagcaagcgaagctgcttgctctccaacagtgcaagaccctcatcatctatctctcgaaattagtgaggaagatgcaatttgcaaacggacaagggcaagatactcactagcaaactattcactcgaggaattggagacctttctccaggaatctgatgatgatagtggtctgcaaaatgttgatgaagaagaggaataccgcaagtttcttgctgctgtcctgtctggtgtaggcaatgacacacaaacattccagggggatgaaaatcaagatgaagatgataatgatgcagactttgagctcgagattgaggaggctctagaaagtgatggtgatgaaaatgttgagaactatcacaacacaaatcctagaaaagagaaagatgtccgtaggcctcagactaggcagaggcggccattaactgggatgtctggggctggtagtgatcaccaggaatccaataaaactcatttaagaccaattgtgccatatattccgtctgcattggtgactcctgcgcatgcttttggatggcaatatgctaaccagaatgcctttttcccttcatccttggtttcactaacacgtccacctttagcatgtggatttacttatcagcaactcgggcaattgcatgtgttgatatatgagcatgttcagctccttatccaaacattttccctatgtgttcttgattcatctaaacaagatgtggctaataatgtcaaaaagatgatagttgagttggttggtgctcgtgatcaagcattggccaggagctctcctcaacggcatatcttctttgaaacccaacatctctcatctagttttgtttcttctgataatttggaacgccaatggattccgttaatcaagagtcctattatatccgtccttgatgttgcaccgcttgagttggtcctcgactatttaagtgacgtcgcaactgctgtcgtgaagtatagaaaaagtcatgtggatggtactgctgacaaaacccgcaggaaagagcccctgtttccttcagcagcgattaacagttgcaaacaagtgaataatgtttctcaagatagatcaaatggtgtgcctacagcatcacctccatctgggcagttgcagcagaagaaatcgttggctgctaccctgcttgagaatattaaaaaggatacaattgctcttgttcctgctgacattgcaagattagcacagagattcttttcacttttcaattttgcactctttcctcataagtcacctccttcacctatggccaatagggttcttttcactgatgcagaggacagattattagctctaggaattctggaatataataatgactgggcagcaatacaaaagcgctttcttccttgtaaatcaaagcatcaggcttaa

SEQ ID NO: 15311 - DNA, 468 bp, Zea mays
  Peptide Sequence Number=SeqID_57090
atgcccaccaatgccataaggtggtcgaccgtagagtcccagtgtggaatcgacttggccctctcctcgtcgtctctgaaggagtatcggaggagattggctgagctgacaaaagctgaagttgatctccggagggcgctgtttgttacggtggttggatcaaggccggcggtttctacggacctggtagcagaagtcgcagcgatgctagcaatcgatgtggactgcatctcgatgcacaaatccttgctggaggacttcctggcgctgcttccaagcgaggtgatggcaagaagcgcctacaacagcagagcagtgttgcatacatccagttgctctctgaagttcaagttctggtcaagattggctcatgatgtggcagtttctttctacctctacatatgcattgagatgaggggtgttcctatgcatgcttggatgttgtccactgctcaggacctgctttag

SEQ ID NO: 15312 - DNA, 633 bp, Zea mays
  Peptide Sequence Number=SeqID_57091
atggcgaggtccgctcctcttccacacctcttccatccacttttgtcactctgcctcaactacttaggatccattatagcaaggacttccccggataccccttcttgcatcccctccaaaaatctttgtgttggagatagtgtccccaaatattgtggtcttttcagcggctcgggcaaaaggcgacaagtcagtgcagagaagatagtgcttgatctaacccctctacaggaacagaggctgcaaagtctgaaggaaaggctaaatgtgccatatgacgaaactcggacagatcatcaagaatcgcttagggctctatggaatgcatcctttcccgatacagagctcactagcttagtttcagaacagtggaaagacatggggtggcagggcgtgaacccagcaactgatttcaggggctgtgggtttgtttcgctcgagaaccttttgttttttgcaagaacatacccggcttctttcaagaggctgatgctgaagcagcaaggaatgcgaactacatgggagtacccctttgcggtcgcgggtgtaaatatctcatacatgttgattcaactgctggagctcaactcagatgtggaatctttggatttgatcacgactgttggacgatga

SEQ ID NO: 15313 - DNA, 330 bp, Zea mays
  Peptide Sequence Number=SeqID_57092
atggcgtgcacatcatctcctctcgtcagctatccacaggggcacctagaggaagaacacattcctcgattgtatcgcgctcgagtcgcggggaggaggtcgtggggagagcggttgcttgccatccctacagcgcaggcttcggcggcggggcagtcggcgctagatccggcgctgaagacgtcaccgcggaggcagaggtggacgggaatgaggccacgaagaaggatgcggatgcgcggaggtgggcacgggaggcaggctggcggcggcttgcacagagggggcgagaggcagggcgccgacggttgtggaaggagcgagagctag

SEQ ID NO: 15314 - DNA, 165 bp, Zea mays
  Peptide Sequence Number=SeqID_57093
atggaagacggcgcagggagatacttgtcacccccagggcggggagtccgcgtcttagctaagtacaccgacaccgagatcatggagttctctcgctgcaagactcggtccgtagttgacgacatggtactgaccaacagggcccacacaaggatagtgttttga

SEQ ID NO: 15315 - DNA, 1647 bp, Zea mays
  Peptide Sequence Number=SeqID_57094
atgggattatcaaatcgatctgatataatgaccagatctttcctgtacgcgttggcttacaatgggcttacgaacgcgaagcgcatgatccggggatttgaaagacaagactgcagcagggccgtcctggcgctcatcgcgttcgtcaccgtcgtcgccctgcgccacttgatctcttcatggcggcagcacggccggctgcccccggggccgacgagccttccggtgatcggacacctgcacctgctccgcccgccggtgcaccgcaccttgcaggagctggcgtcccggatcggtcccctgatgcacatccgccttggctccacaaactgcgtggtggccagcagcccagaggtggccagcgagctcatccgcggccacgagggcagcatctcggcgcggccgtttacggcagtggcccgcaagttctcctacgactccgccggcttcgtcttcgagccctacaacacgcactggcgcttcatgaagcgcctctgcatgtcggagctactcggcccacgcaccgtcgagcagctgcgccccgtccgccgcgctgtcaccgtgtccctggtctccgacctgctggcgtcgtcggcgcgcggggagacggtggacatcacccgccatctcatccgcctcacaaacacctccatcatccggatggtggccagcaccgtgtccggcagcgtcaccgacgaggcgcacgagctggccaaggccgtaattgaggtcgtgggcgccttcaacgtcgacgactacatcgccgtggtccgtggctgggatttccagggcctcggcagaaaagccgccgacgtccaccgccgcttcgacgcgctgctggaggacatcctgaggcacaaggaggaggcgagggcagcgcgaaggctcgacgacggacatggcaagcaggccacgcacagcaaggacctgctcgacatcctcatggacaaggcggaggacccggcggcggaggtcaagctcacccgggaaaacatcaaggcgttcgtcatcgacgtggtgacgtctggttcagacacgtcggcggccatggcagagtggatgctggcggagctgatgaaccacccggagacgctgcgcaaggtggtagaggagatcgacgctgtggtcggcggcggcaggatcgccagcgaggcggacctgccgcagctgccgtacctgatggcggtatacaaggagacgctgcgtctgcacccggcggggcccatcgcgcaccggcagtcgacggaggagatggtggtacacggtttcaccgtgccgccgcagtcgacggtgcttatccacgtgtgggccatcggacgcgacccggcctactgggaggagcccctgttattccggccggaacggttcatgccaggcggcgctgccgagagcctggagccccgcgggaagcacttccaatacattcccttcggcagcggccgtcggggatgtcccggcatgggcctcgcgatgcagtcagtgccggccgtggtagcggcactcgtgcagtgcttttattgggccaccgtcgacggcggggtggacaagatcgacatgtcggagtcggacgggctggtgtgtgctcgtaagaagccacttctgctccgacccacatctcgcctcacccccttcccgcccgtcgtatag

SEQ ID NO: 15316 - DNA, 185 bp, Zea mays
  Peptide Sequence Number=SeqID_57095
atgtatcctaactacgcgtccgcctcagatgtggaccgcctccgcgccgatgagtacctgcacttggacaaggcagaaagtgctactgccgctctcaactctagcggtgtggtactgggatccttgccaataagggtgaacccgtccaagacgcccgtgcgtccccgcgaccctcgccagctgat

SEQ ID NO: 15317 - DNA, 273 bp, Zea mays
  Peptide Sequence Number=SeqID_57096
atggctcccaagaaagcaacttcgaaggctaccacctccatcgataacacatcgaaggcagcccttctcgctgaaaggaagggcaaagcagcccttgttggcgacgtccctcatgaggccctcaaggatggggcagtcaatagcaagcgacaccgccaagagaatccgcccaccctagagggcaccgttcgcacatgcaactctgagggactaccccgggcccctccgccaggcttcacccccaaaggctggcaatatagtcgagggcaatga

SEQ ID NO: 15318 - DNA, 408 bp, Zea mays
  Peptide Sequence Number=SeqID_57097
atgactgaacccatcccgttcgcaatgctaagtcctctaaggttagatctgactagcctcttgcagtcaaaggaaactgcttcggctgtcaaggggaaagctaggggacaaaagaaatggcgaatgatgaatgtgatgcaagctattgaacagaccccgcccccagcttcggcggataaagaaattatgcttgtcggtgcggaagataccgccacagccgaagccgataatcatgcaaccataatgttggaaatcgacagacttatatcggatgtggttgctgagaaagatgtagccgcaacgccttctgataaaggaaagcgaattgaagagacctcttcggaagataagaattttgaagaggacatgtcagaattgaaggagtttgccatatcctgcggttactag

SEQ ID NO: 15319 - DNA, 129 bp, Zea mays
  Peptide Sequence Number=SeqID_57098
atggcgagcggaattgagctcgccggagctaaggaaagggggctggccggtgaggagatacggagccaggaaatccggtctgtctccctgcccaaacccgaggcaaatccaaggttttgtcgtgtctag

SEQ ID NO: 15320 - DNA, 453 bp, Zea mays
  Peptide Sequence Number=SeqID_57099
atggcaatcagtagtgttcggatgatggctgggatgaggcgatcggtggccagtaaatccaacttgagagatctccaagacgcgccgtcaggccagggtatcgcactgaggctgctagggccggacgcctacgagccgctggggctgctggtgccggacgccaggccgcgcgcccacggggctgctggggccggacgcgccgtgccgaggccgccccatggccggatcctgcgacggtgtggcgcgcgctcaccggggcctggccagagcgcccgccccgccgggggcccagcctactcgccgcctgggggccacgcgccgagtccgtgcccgcctgccgccgcgaggctgcgttcctggcaccgccgcagaaccgcgcaggccggatccacgcgccgccgcgaaaaatgccgtcagggctgccggcggctctgggaaaggaggagcggttag

SEQ ID NO: 15321 - DNA, 384 bp, Zea mays
  Peptide Sequence Number=SeqID_57100
atgccgtcgatcgtcgttggtccccatccgatgggatcgttggcgacaacgatagcaagcgtcgatggatcataccgtattgggctacttggcatcacgtcctccaagctagggatgaaaacgatttcggaatttttcggtattccggaaaccgattttggaatttttcgatcggattcaccggagtcgtgggatggtcaagttgtcagagctttcaaggcacctaacaaccggactcccaacttcccccatccggacaagaaaaatatgctggtgagtctaagaggtaagtgcattcgttgtttggccaaaggccactacgttattgattgcagggatccgctgaggcacctctactgtggaggtgttggccacaaggcctag

SEQ ID NO: 15322 - DNA, 744 bp, Zea mays
  Peptide Sequence Number=SeqID_57101
atggtcccccttgtggcgtggttggtccgagcccaaggtcgggcgggcggtggctcctccgaggtcgaggctgagtccgagcccgggggtcgggcgaggcggagaccgtcgtccgaggtcgaggctgagtccgagcccgggggtcgggcgaggcggagaccgtcgtctgaggtcgaggggtcgggcgaggcggagaccgtcgtccgaggtcgaggtttagtccgagcccgggggtcgggcgaggcggagaccgtcttccggagtcgaggtggagtccgagccctggggtcgggcgaggcggagattcctatgggcgcccgaggctggacttgggctgctgtccgccctcaccctggccgggtggcaacagcagtcggaccagcgcaaggcggcgctgttttcctatcaggtcagtcagtggaggggcgaagtgactgcggtcacttcggccttgtcgactggagagcacgcgtcaggataaggtgtcaagcgatccttgcattaaatgctcctgcgatccggtcggcaggcgaggtgatctggccaaggttgcttctccgtgaagcctgcccgaactgggcctcgggcgagttgaagcctttgaccggaattgcgcccatcaggcctttgcagctttgtgctgatgggggttaccagctgagattaggagccttggaggggaccgacctttctcggttgcattttgttccagtgggtgcgcgcgagcgcacccgccgggtgtag

SEQ ID NO: 15323 - DNA, 255 bp, Zea mays
  Peptide Sequence Number=SeqID_57102
atggacaagatcgtcccaaagcagaacatggacccgggacggaaggttcgggccgcttggagatgcgtaacaccctacgtcctggcgaagatgcttcgtgtaatgggttacaaggtgattctccagagcgagaacgtggagagtctcggtggatggctggatagtgtgttcgattgttctgaaggggtgccctctgggccttatatattcggtcgtggggcgatacatgtggatatgataacaacgtgcgcctaa

SEQ ID NO: 15324 - DNA, 828 bp, Zea mays
  Peptide Sequence Number=SeqID_57103
atggcgaatgcggccgcctccgccctccgcgtcgtcaccggttgccggtccctccaactcatcctcgacgcaggccggcgggggcggggacacgtcgcggcagcggcagggccggcccgcgcgcgccggctccaacccgctcctcgtcgtctgcggctgcttcagcgtcgtcacggccgccactgcgtcgccgtcaacgtcgtctccgatgtccagtgcttccgcgctggctccgactcatgtctccaattgttataccatcagatatttgaatactggctgggaatgctccagatctttgttgctgtcatgacgaaggcatacccaagtattgaaaggggtgatctgattttgctccaggagattgcgagctacatgatttttgcttgtggagctgtctatgtgatatcggctgaaagttttcatacaaacactccccaaaatattatcatggctattcatgaagtccctactagctgtgtctattataggtccgtactgcggctcgaatgctcgatccctggcttcggctacctcggctggatggacgactggctccggtccccagccctagacaacctccaggacctcgaactaaactcacacagccctcaaaaggttgctgttgttcgtaggaaccgatcagctagacgtctcggtggtctccgcgccaagggattacccactgtcagcgtgaagctcctagctttatctggtgtcaagctctccttgcaagcgctgattgacgtgctcaactgcgttcccaacctggagaagctgtacatcgatgtgattccttccttccttccttctttcttttttaattaa

SEQ ID NO: 15325 - DNA, 975 bp, Zea mays
  Peptide Sequence Number=SeqID_57104
atggggctcgacgtcatggagatcgggatgggcgccgatttgagcctggatctgaggcacttcgcctccaaggccgtgaggcagagcaaggacgacacgccggcgccggacatggacgcatgcatccgccgcctcgaggaggagcggggtaagatcgagatgttcaagcgggacctcccgctctgcgcgcgcctcctcgccgacgctgatgatgaggaggaggaggcggacggcgccaccgcggacaagagcaagtggatgagcacggcgcagctctggacgggcgattccgggcgggaggacgcggaatcagagaagcaagacaaggggcggtgctcgccggaggccaggtcccgcggcgctctcttaccgttcaaggctgatgtgggctctggcgcgccggcgttcgcgccgctcttcttgagaacggacgacaaggctgcggctgcgcgcgtcggggtgccggatctgtcgtccttgctgtcgccgccggcgaccatgcctcctgcggacgccggcgccgaggagagccgtcgccaggttgtgggatttgcgcaagctgcggccagggcggctgccatggcgccgtctgcccctgcgcttgggctccagtcgcagcagcagcagcagcagcagcagcaggcaaggaaggctcggcgttgctggtcgacggagctgcatcgcaagttcgtcgccgccttggatcagctcggtggcccccaagttgccacgccgaagcaaatcagggagctgatgaaggtggatgggctgacaaacgacgaagtgaaaagccatcttcagaaataccggctgcacaaccgcagggcgcctggatccggcgtggtctatctaactgaaagagcagcaaagaagaaagagatctcaataagaaaagaacccgattccaccattgaacaaccaaccaagagggttgctcctgctcctctgctgttcaccatcatcaacagcacgtaa

SEQ ID NO: 15326 - DNA, 339 bp, Zea mays
  Peptide Sequence Number=SeqID_57105
atggcgaatgtcatggattctgaggcagtgcaggtggtagagtcgtcgtttgtagtgccgagcgagccgacaccgtcggaggggctctggctctctccgctggacctcattctggtcagcagaggccacaccccaacagtctacctgtacagctccagcagcaatgctgttgccgccgccgatggtttcttcgacgtggccaggctcaaggaggctatggccaagaccttggtggccttgtaccccctcgctggccgcctcggcgtcaacaacgacgatggcagggcagagatcaccgagctttttggaaccgaggtatcatcaagattgggcttctaa

SEQ ID NO: 15327 - DNA, 141 bp, Zea mays
  Peptide Sequence Number=SeqID_57106
atggcctcgtcgtctgcgctctccctcccggcgctctgcgctcgtcgctgccggagctccctcccggcactcctccgacggcgctactcggcgcgcctctccctggtgctcggcggcgctccctcaggcgcagagatataa

SEQ ID NO: 15328 - DNA, 1242 bp, Zea mays
  Peptide Sequence Number=SeqID_57107
atggattctgaggtagtgcatgtggtagagtcgtcgcttgtagtgccgagcgagccgacaccgtcggaggggctctcgctctctccgctggacctcgttctgcccagcagaggccacaccccaacagtctacctgtacagccccagcgatgttgccgccgccgatggtttcttcgacgtggccaggctcaaggaggctatggccaagaccttggtggccttctaccccctcgctggccgcctcggcgtcaacaacgatggcagggtagagatcacctgcaccggcgagggcgcactctttgtggtcgctcatgctgacctcagtgttggtgacatcgaggacgacttcaggccgtcgccggagctgaggaggctgtttgttccatgcattgagccagcatccatcatattggccatacaggtgactttcctcaagttcggaggtgtggtgctagggacggctctccaccacaccgccagcgatgcctcaagcgcgttccacttcttccagacgtggtcagccttgtgcaagtatggcgaccgcgcgaccgtggagctcccgtgccacgaccgcacactcctccgtgcacggtccccacctaccgtccacccggacgccctctcgaggttctacccaaagctcaccttctccgacgacccgttaggatcaggaccccttgccgttgaagtatttgccatttccaaggatcaggtcgcctccttaaagcgcctctgtggcggcacaagcacgttttgcgccatgagcgccctcccaacgtccgcggcagaaatgagaccgcctctcccgaaccgctacttcggcaacgcgttgatcaggctgggcgtcactggtgcggttcaggacattgcttcggaggctttggtatctgtcgccggccgcatcaaagacaccatcgatcggatggacgacgagctcgtgcgttctgcggtcgactactgtgagatggccgagatggacagccggcctgtaaagggcaccttgctagagacggagctgatgcttattagctggctgggcatgccaatgtacgacacggatttcggatgggggaagccagcggtgatgtcgcgggcggagtccatccgtggcggctttgtgtacataattgacgacgggccaacaaacggcgtcggcagcggcagcggcggcgtccgcgtgctcatgtgtatggaagccgcaaatatgaaggagctggagcggctgctttacgcaaaactctag

SEQ ID NO: 15329 - DNA, 153 bp, Zea mays
  Peptide Sequence Number=SeqID_57108
atgagcaaccgccactgcgttccttgcgtgagagagaatgaccggtcatttcattgtgaagatgagcagcaagtgggaaacggtagtggggcccacctgcaactgtatgggagagagaaaaggaatgggggagaggtacctgtccgtatatga

SEQ ID NO: 15330 - DNA, 264 bp, Zea mays
  Peptide Sequence Number=SeqID_57109
atgggctttctctttctacttgtgaagaatttcttctttcttgaatcgaactttattccttatcgattaagctttgagcattttggtggtattattcaccataagtctgttgaggaatcagggctccgacgattgatgatggccggctccaatgacgacacgattgaggtcgacggcaacgaggagaggtggttgtgtgggttggccaaagatgacgatgaggatgacctatgggagggacgctacaaagctctttggccttaa

SEQ ID NO: 15331 - DNA, 1587 bp, Zea mays
  Peptide Sequence Number=SeqID_57110
atgaggttgcttagacctatactgtcaccatatcttggtattgagaatgttgatgatggtgatggatcccaaattgccatatctatgttcttgaatcatcgttatgcatgtcgtattatcaatctgatagttaaagaggttactactagagctaggcttgctgatgtttataataagtatgaagagaaatatggatctgttaggttgagaagggttgtccctcctaacccatctggtgcagtagaaagtttgaactctgtgcgtgatcgagtagaaattagaatggcgaatgtcatggattctgaggtagtgcaggtggtagagtcgtcgtttgtagtgccgagcgagccgacaccgtcggaggggctctggctctctccgctggacctcattctggccaacagaggccacaccccaacagtctacctgtacagctccagcagcaatgctgttgccgccgccgatggtttcttcgacgtggccaggctcaaggaggctatggccaagaccttggtggccttctaccccctcgctggccgcctcggcgtcaacaacgatggaagggcagagatcacctgcaccggcgagggcgcgctctttgtggtcgctcatgccgacctcactgtcggtgacatcgaggacgacttcaggccgtcgccggagctgaggaggctctttgttccacggattgagccagcatccgtcgtgttggccatacaggtgactttcctcaagtcgggaggtgtggtgcttgggacggctctccaccacgccgccatcgacgcctcaagcgcgttccacttcttccagacgtggtcagccttgtgcaagcacggcgaccgcgcgacagtggagctcccgtgccacgaccgcacgctcctccgtgcacggtccccgcctaccgtccacccggacgccctgtcgaggttccacccaaagctcactttctccgacccgtcaggacctctcgcctttcaagtcttcgccatttccaaggaccaggtcacctccctgaagcgcctctgtggcggcacgagcaccttctgcgccatcggcgccctcgtgtggcagtgcgcgctcgttgcgcgccggcttccgcccgactccgaagcacgcctcaccttcccggccaacgtccggcgcagggtgaggccgtctctcccgatccgctacttcggcaacgcgttggtcaggctgggcgccactgctgcggttcgggatattgcttcggaggttctggcgtccgtggccggccgcatcaaagatgccgtcgatcgggtggacgacgagctcgtgcggtctgcggtcgactactatgagatgaccgagatggacagccggccagtgaagggcaccttggcagagacggacctgcagattattagctggctgggcatgccaatgtacgacgcggatttcggatgggggaagccagcggtgatgtcgcgggcggagtccgtccgtggaggctttgtgtacctaatgagcgacgggccaacagacggcggcggcggtgtccgcgtgctcatgtgcatggaagctgcaaatatgaaggagctggagcggctgctttacgcaaaactctag

SEQ ID NO: 15332 - DNA, 1434 bp, Zea mays
  Peptide Sequence Number=SeqID_57111
atggaagcacggcgcgaggggcagatcggcgtagggaggctgcgatctcgggaaccttccaagctgggatcgagaggtgagatcattggcgatgacactgtgtactactatcatgacatgatagtggaaatgattaaatggggatatcaagaaggaaaaactctctttggatttggttatgatttccgtcaaagcaacaggctctcagagacacttgacagattttccaaaaagctggagtcagtgtacacagcttctggtggaaaaaagatcaatctcattactcattcaatggggggattacttgtgaagtgtttcatctctctgcacagtgatgttagtacttcttgtattttggatctttggttgagatttgccatttttaatgtcctgcgcagccgcgctatcttaaagacatttgaaaaatatgtcaagagttggatcgcaattgctgcaccattccaaggtgcccctgggtacataactactagtctgctcaatggaatgtcttttgtcgaaggatgggaatcaagattctttatttccaaatggtgtatgcagcaattgctacttgagtgcccatcaatctatgagttgctggcaaaccctaacttccagtggaaagacatcccactgctacagatttggagagagaatttggataacagtggcaagaaaagtgccctgttagagtcgtatgagcctgaggaagcaataatgatgattaaagaggctctttccagtaatgagatcattgctgatggcatgcatattccggtgccccttaatttggatatattgaattgggcaaaggaaacttatgatcttttatgcagtacaaagcttccggaatcagtgaaattctacaacatttatgggattgattatgatactccacatactgtctgctatggcagtgaacagcatccggtttcaagtcttagtagcctcttatatgctcagggaaaatacgtctatgttgatggcgacggatctgttcccgcagaatcagcaaaggctgacggatttaatgcagtggcaagggttggggtggctgctgaccaccggggaatcgtgtgcagtcgccgcgtgttccggatcgttcagcactggctgcacgctggagaacctgacccgttctacgacccgctgagcgactatgtcatactcccaacactctacgaaatcgagaagcatcgtgagaaacacggggatgtcacgtccgtagcggaggactgggagatcatctccccgaatgacggcaagaccttgaggccaggcgagcttcctcctatggtcagcacactgaccacgagccgggaaggcaaggagggtgcactggaagaggcgcaggccactgtggtcgttcacccggagaagaaggggcggcagcatgtgcaagttagggctgtgggtgtcagccatggtggctaa

SEQ ID NO: 15333 - DNA, 1470 bp, Zea mays
  Peptide Sequence Number=SeqID_57112
atgcaggctgttgcggaccaggcgacggggccctccgcgtcccgccgtaccggctcctcccgcgcttcctcgccacgccgctgcacctggaggcgaatggtggtgacggtcagcagacggaggtggagggagaacggagaaggacgcatccgggcggtgcatacaaccggcaacagtggccagatgccgacgggacccggtggtggggtggcggaggtggagcggcgatggctggagacagcagggcccgacggtggcaaggcggaggtgcttctccggccgacggtggaaggcgtcaggacccagaggcgaggaggaagaagtggaggcgagcgagaaccggaggggagggagttggggcgccggccgcgcgaggggagagagaccggggtgagagatggaggtgataaggaagaagggcaaaccaaacaccccatcagtctgcagggcacgatttccgtctgcatcgctgtcagtgccgtagccgccactcctatctccggtgagctctctccttctctcttcttcctcaacaatggcatcatgatagacagctcgccgaggcaggccatggcgaaggggtgcgacagcacgctgcggcacgtgtcgagcaccttgttgaaatggcgcacggcctcgtcggggaggccggcgtccagtgccgccaccgcggcggtggaggacgagcttcacgtgcgccggcagctgcgacacggactccgcccttgtattggcgggcgccagcaggttcgacgggggcgggaacctgtcctccgaccagcacacgctctcgcgccggaacatcacggaggcgaggcggtggtcggtttggagaagcaccaacgcgtcctccatcaggccgaggtggaagcaagcctggcccaggaccaagtacctccattggtgggcgtggatgctggagaaggtggcgaccaggcgacgcttgaggctggacacgtcgaggcagcacaggaagcggccagcgtcggggcggtcgtgtcggccaacaacatccatgttctgctcgaacgcctctgctcccagtgctactgggccaatcttggcggcgtccagcctcttgacaatgaccacgagccgccgtcgagcacactcaggttctccagtgtccaacgctctgcaagggggagcggcggtaccgtttgcgccgccctcgtggaagaagaggaggtgggagccgcggcggaccacctcgccgcagaggttggcgtcgagacggaggagggtgaggtgcaggaaggcggcctcgagcggagaatcgagaaggtgttgttcgactgcgtcctcttcttcgtccagctagaaggggtgctcggtgtcggcgtcggtggggcagggcagggcagtagtggtggaacggcgacccgagcagtaatggcgctgaagacgggaacggtggctgccctgattgatcctcatggtggaggattaatcactgtcgaacgcgtctaa

SEQ ID NO: 15334 - DNA, 1518 bp, Zea mays
  Peptide Sequence Number=SeqID_57113
atgcattcgggctgcaagcttttgttacaaggcggcagcccgactaaaggaacgcccgccgtcgccgtcgccgtcgccgacttcacctgcgcccctctattggaacacctgcttgctgttttttcttctctgttcacctcgtctggccgggccggactgccgcagccttactccccagctgcccaggtttctgttggacccttcgacggcaacgagcatccaccataccagtggactcgagctattgcaatggagattgtgaacagtgtttccttcagctcaattggagtcggaagaattgtaataaacaagacagtgaaggtaggatgccaaacacaccggattggctggaagctaacaaggacatgttgcgagtactctcctggtgcttctagaaagaagcaagagaagtatgagcaacaaccacagaacgtcgatcttccagaattacacccaaaaaacaaaaagaaacccttccctgttccgattaaaaagatgctgcaagcttctcggcgagagaagaggcttgcacaaatgcatatagagaagcctcttgaacccccaaagaacggtttgcttgtgccagagcttgttccagttgcacatgaagtccttgataactggaaagtgctaatcagagggctctctcaacttctgaatgttgtttcagtttatggttgcagaaagtgtcctcaagtccatgttggtccagttggccaccagatccaagactgttacggttccggaagccagcgtcggaacagtcatcactcttgggctagaggttccatcaatgatgttctcatcccaattgagtcttaccatctttttgacccatttggtcggagagtgaagcatgataccaggtttgattatgataggataccagcaattgttgagctatgcattcaggctggtgttgacttaccacaatacccctcgaggcgacggactgctcctgtccggatgataggcaagaaggtgattgaccgcggtgagtttgttgatgagcccaagccacaacgttcagaacactgtgtatctctgcttgctgagctcgacacattcagcaaccaacaagtccagtcaccttcaccatcaaatatgaaagagcttgccaagaggacactgaaagcataccttaatgtccggcgaggcgtcgagcagctgatgagcaagtacactgtgaaagcatgtgggtactgctctgaggtccatgttggtccgtggggccacaatgtgaagctctgcggggctttcaagcaccagtggcgggatggcaagcatgggtggcaggacgcggtggttgatgaggtcatcccgcccaactacgtgtggcatgtccctgaccccagtggctctcctctcagatcctctctcaggagtttctatggcaaagctccagctgtcgtagagctgtgtgtgcaggctggggctgaaatacctgacgagtatcgggccatgatgaggactgacattgtcatcccggactctgtggaagctcggatggctgcataa

SEQ ID NO: 15335 - DNA, 837 bp, Zea mays
  Peptide Sequence Number=SeqID_57114
atggctagggaagaagagctcaagaggattgacctgaaggtgaacgtgagctgctgcgacggctgcaggaggaaggtgatgaaggcgatgagcctcaaaggcgtgctgaggacggagatccagccgtcgcacgaccgggtgaccgtcgtgggcgacgtggacgtcaacgtcctggtgaagaagctggccaaggtgggcaagatcgccgaggcgctgcctcccgcgcctgctgagcagggcaagaagcagcgcgatgacggcgacagagcggtgccggcgcaggcgcaaccgcaggcggaggagaagtgcaagggcaaggacgacgccggtggcaaggcggcggctaaggcagcgccgggcaagcatgaggggtgcaagaagtgcgcgcgcgaggccgccgcgcgcgccgtgggcgacagtggcgaccactgcagcgggaagaaggcgccgtccaaaaaggacaacaacgccggcggcggctggggcggcgaggaaggcggcgacgccgacgccgacggactcgacgccgagcccttggcggtggcgccccaccaccactatgcgcaagcccagacgcagcagcactaccaccgcgcggagccggcgatggtggtgccggtgcacgtgccgccgacctactactacccgcctccggccgccgcggcgatgccgtactacggctactacggcatgcccccgcccccgccgccgacgatggcgatgacgatgggggtggcaccgccgtcccagcggcacccgcaggcccggccgcagccttcccgcttcgacgaggacttcttcgacgacgacaacacggtcggctgcagcgtcatgtga

SEQ ID NO: 15336 - DNA, 1617 bp, Zea mays
  Peptide Sequence Number=SeqID_57115
atgaggccttcagatggcaggacgcagctttcaggctttgcacaatcagatgaatcaacacttgatgtggaggggcattgctaccaccagcagtcattcccttcctctccatcgatgcaaccgattgcttctggctgcacacacacagagaacagcgctgcgtacttcttatggccaacatcaaacctgcagcattgtgcagccgagggacgcgcaaactacttcgccaacctttcaaagggactgttgcccaagtctggccggttgcccaagggccagcaagcaaatagcttgcttgacttgatgactataagagctttccatagcaagggtccaggaggtatttggtgtgatgttgacgttgttgagttctcgtactacggtgcaccagctcaaaatccaaaagtgcaaatgttcactgagcttgttgataagttgtgtggcagtgatgaatgtattggctctggctctcaggttgcaagtcaggacacttttggaactttgggcgccattgtaaaacggcgaactggcaacaagcagataggtttcctcaccaaccgacatgttgctgttgacttggactacccaaaccagaagatgtatcacccattgccacccaaccttgggcctggtgtttatcttggagctgtcgaaagggcaacatctttcatcacagatgatgtttggtatggaatctatgctggaacaaacccagagacatttgtacgcgccgacggggcattcatcccatttgctcacgacttcgacatctccacagtcacaactacagttaggggtgttggtgacattggggatgttaaggttatagatctgcagagtccacttaatagcctcatagggaggcaagtatgcaaaatcggcagaagttctggtcacacaactggaactgtggtggcttatgcccttgagtacaatgacgagaaaggaataagcttcttcactgacctccttgttgtcggcgaaaaccgccaaacttttgatctagaaggtgatagtggaagccttattatcctgactggccaggataatgagaagccgtgtcccattgggataatatggggtggcacagcaaaccgtgggaggctaaagcttaggtgtgaccatggccctgaaaattggaccagtggagttgatcttggccgccttctggatcgtcttgaacttgaccttatcataaccaatgaatcactcaaagaatttatcctcgataaagatgccgtgcagcagcaaaggctcgcgttggtggctgcagctaactctgctgttggggagtcgtcgacagcagctgttcctgccccagaagaaaaggtggagatcttcgagcctctggggatcaaaatcgagcagctgcctcggcacgacgtttcggcgacgacggaaggggatgaggcagctgtgatcaatgtggaagagcgccagttcatctcaaactttgtcggcatgtcccctgtacgcgacgaccaggatgctccgaggcaaatcgcgaacctgaacaatccgtcagaggaagaactcgccatgtcgcttcacctaggtgaccgggaggccaagcggcttcgcactgacacagaatccgagcttgacctggagaagtga

SEQ ID NO: 15337 - DNA, 2160 bp, Zea mays
  Peptide Sequence Number=SeqID_57116
atgccgttcggcttgaggaatgcgggcgcgacgtaccagcgatgcatgaaccatgtgttcggcgaacacatcggccgcacggtcgaggcctacgtcgatgacatcgtagtcaagacgaggaaagcctccgacctcctttccgaccttgaagcgacattccgatgtctcaaggcgaaaggcatcaagctcaatcccgaaaagtgtgttttcggagtaccccaaggcatgctcttggggttcatcgtctccgagcggggcatcgaagccaacccggagaagatcgcagctatcaccagcatggggcccatcaaggacttgaaaggcgtacagagggtcatgggatgcctcgcggctctgagccgcttcatcacacgcctcggcgaaagaggtctacctctgtaccgcctcttgaggaaggccgagtgcttcacttggacccctgaagccgaggaagccctcgggaacctgaaggctctcctcacaaaggcgcctatcttggtgcccccagctgccggagaagccctcctggtctacgtcgccgcgaccactcaggtggttagcgccgcgattgtggtcgagaggcaagaagaggggcacgcattgcccgttcagaggccagtctacttcgtcagcgaggtactgtccgaaaccaagatccgctacccacaagttcagaagctgctgtacgcggtgatcctaacgcggcggaagctgcgacactacttcgagtctcatccggtaactgtggtgtcatccttccccctgggagagatcatccagtgccgagaggcctcgggtaggattgcaaagtgggcggtggaaatcatgggcgagacaatctcgttcgctccccagaaggccatcaagtccaaggtcttggcggacttcgtggctgaatgggtcgacacccagctaccgacggctccgatccaaccggagctctggaccatgttcttcgacgggtcgctgatgaagacaggagccggcgcaggcctactcttcatctcacccctcgaaaagcatctacgctacgtgctacgcctccacttcccggtgtccaacaatgtggccgagtatgaggctctggtcaacgggttacggatcgccatcgagctaggggtccgacgcctcgacgctcgcggtgactcgcagctcgtcatcgaccaagtcatgaagaactcccattgccgcgacccgaagatggaggcctactgcgatgaggttcggcgcctggaagacaagttctacaggctcgagctcaaccacatcgcccggcgctacaacgagactgcggacgagctggctaaaatagcctcggggcgaacaacggttcccccggacgtcttctcccgagacctgcatcaaccctccgtcaagatcgacgacacgtccgagcccgagaaggcacctgggggctacacgcacctgctggtcgccatcgacaaattctccaagtggatcgaggtccgaccccttaacagcatcaggtccgagcaggcggtggcgttcttcaccaacatcatccatcgcttcggggtcccgaactccatcatcaccgacaacgacacccagttcaccggcagaaagttcctggacttctgcgaggatcaccacatccgggtggactgggccgccgtggctcatcccatgacgaatgggcaggtggagcgtgccaacggcatgattctacaagggctcaagcctcggatctacaacgacctcaacaagttcggcaagcggtggatgaaggaactcccctcggtggtctggagtctgaggacaacgccgagccgagccacgggcttcacgccgttctttctagtctatggggccgaagccatcttgcccacagacttagaatacggttccccgaggacgagggcctacaccgaccaaagcaaccaagttagccgagaagactcgctggaccagctggaggaggctcgggacaaggccttgctacactcggcgcggtaccagcagtccctgcgacgctaccacgcccgaggggtccggtcccgagacctccaggtgggcgacctggtgcttcggctgcgacaagacgctcgagggcggcacaagcccacgcctccctgggaggggtcgttcgtcatcgccaaggttctgaagcccggaacgtacaagctggccaacagttaa

SEQ ID NO: 15338 - DNA, 939 bp, Zea mays
  Peptide Sequence Number=SeqID_57117
atggcgggggctgccgagggcgccggcgcggaggcggtggagagggcgcacgggctctaccgcggcggccgccaccgggaggcgctggagctctactccgccgcgctggctgcggcgcggggccccgcgcagcgcatcgcgctccacagcaaccgcgccgcctgctacctaaagctccacgacttccacaaggtcccactcccggctccctctgctctgggtgggtttgggttgctttcctgcacagattgcgtcgtcgcttttggtccccacctcgcctcggtggtgacttcggggaaggggcgttccttcggcgcttccaagtgtcagttttggtcgaaatacagctgtcctgttccgggttcagggttcaggggctcctgcgatttcggtctcgtagattgtgttttctgctcgtcatacaacaatatgcatgctcaatttgtactgggtatttgtgcgcatggactggcagcacaagagtgtacatctgtcctcgagttggatacggagcatgctggagctctgatgttacgtgcccagactctcgtcactctgaaggattatcagtcagctctgtttgatgtcaacaggctcgttgagataaacccgtcgtctgaagtgtatcggaacctgcaggcacgattgaagacacagctatcactggccccaattcctgagtgcgaagaggagtccctttgtcgtgaagaggaagacgaagaacttcctccacgagttcagaagaccgacacttcttctatcgctaagcctgaccaaccagcaaccaaactggtcctcgagaacaaaccttcagctggaccaattctccacagaaaacctgcaactgaacctctaaaggctgtggttccgtccacttcgccttcaaaaccccaggggttgggaagccatcccaaaaccgaagagtcattcaggccttga

SEQ ID NO: 15339 - DNA, 1782 bp, Zea mays
  Peptide Sequence Number=SeqID_57118
atggatgaaatcaacctgctgcggcaggcgcagcggcagcatcagcatcatctcatggtgcgcggcatcggcgaggagatcgacctcgagatcggccctgtcgacgatccctctttttccggagcttccttagtggccgttacgtccacgcacgacactgtcgttcacgccgacgaccacaagagcctcctcatcccgtgttcgcagcccggcgcggcggacgggctggcgccgcagcagcacctgtcgcagggggaagagcatgacgggatgctcaggtcgccgtcggggcacaccaagaagaagaagaaggtggtcaagaaatggcgggaggagtgggcggacacctacaagtgggcctacgtcgccgtgcacgacaccaccaccaggatcttctgctcggtgtgcaaggagtacggccggaagcaccgccggaatccatatggtaacgagggaagcaggaatatgcagatgagtgcgcttgaggagcacaacaatagcttgttgcataaggaggcgctccggttacagatggcctccaaggagaagttgcagcctcccgagattgaggggccggtctatgtcaaagctttatcgaaaacagcagcatcaatacttgaatgtgtcctaaggagggatccccatgaagctgaatatatacagtcgatccaggagactttaaagaatgctttgtcactatataaacttggaggtgctgctggaggaagtgattttgatccaaagggaaaaagtgataatgagataatgcgcttttgccaaagtttcatggatgagctgtatagatatttgggccctgatcaggattttcccgctgaagatattggtgttggtccaagggaaatgggttacctttttgggcagtatagacgtctttctggtcattttcagggaaattttacaggacctaaaattttctggtcagggtcaagttttcgaacagaagctactggatatggtctggtgttttttgcacgtcttttacttgctgaaatgaataaagagcttaaaggattaagatgtgtgatcagcggttctgggaagatagcaatgcatgttttggaaaagcttttgccttgtggagccattcctattactgtctcagattcaaagggatatttgttagatgaagatgggtttgattatatgaaatattcacttctaagggatattaaggctcagcaaaagagcctcaaggagtacttgaaatcatatccacatgctaagtatattgatgatgcaaaaccatggagccagcggtgtgatgttgcatttccttgtgcatcacataatgagattgaccaaggggaggctgttgcaatcagcaactctggttgtcgtgttcttgtcgaatgttcaaatatgtcgtgcactgttcaagctgttgatatcctaagaaaggcaaaagttattgttgctccagcaaaggcaactgctgctggtggggtagcacttggggagattgaattgaatccagagtttaatttgatgcaattgtcagtggaggattttgagaatagaattcaagtaaactctgctgctcctgaccacctggcagtcatttttcccttctgcttcccaattgtgattccttgggagttctctcttttctctgttgaattcaatcaggatgcaataaagcaaacctatgaaagtcgagaagctgatccctctgtctctccatgcaggtttttggtccatggcgcgaacatttgtgctttccttaatatcgcgcaagccatgactgaccagggatgtgtttag

SEQ ID NO: 15340 - DNA, 237 bp, Zea mays
  Peptide Sequence Number=SeqID_57119
atggcttcgttcgacaaccaagtggtagcacctttggctacaaagctggtgctcccaatcatgggtggaaagtcttccaaagagttgaagtcaattggagaagaaaatgacttagaaccttatgtctgggtgcaccgggccttctacaggactggtcctgtggtgcatcagacctgctactggactggtcctgtggtgcataggacctgctatagtactggtccggtgcacgaatag

SEQ ID NO: 15341 - DNA, 363 bp, Zea mays
  Peptide Sequence Number=SeqID_57120
atggcgccgggtcgcgcattcctccgcgccagatccgagagtccttccatggcaaccgctcccccaccgcgccagatccgagagtacttccatccatggcacgaaaccgtcgcgcccccaccgcgcctcccccagcattccatccatggcgctccctccgcgctcgtccccgctctctgttgtccgccgcccccgcccccgttctcctctctcgcgcccccgctctctgttgtccgctctctcgcatcctccacggagtcgtgggccagtggctccacggtgatggactgggtcagccccgtggtggccgagatgcagtgcgacgatggcttctcgctgctgatctacgcctggaagagctaa

SEQ ID NO: 15342 - DNA, 648 bp, Zea mays
  Peptide Sequence Number=SeqID_57121
atgaagagagacatgctcaccgctcacggagagaaggtcattcttcgtgcccttgaaattgagaaatcccggctgccacactcaaagatcagcggctttgtcacccctattggtcctttatctgaagaaaatcacacgatcgacaagaatttgttgccgctggagtgtgaagggacaatggaatgccacacacgagacaacgatgctgttgggttggatgcaagagcggaaggtgttgtctgtgagctcacagaccttcagaataacatacaagtttatgatatcgagttgactgttctaggaaactacacaggtcacggcttgccccttgatttccttgagagtaaaacgactggtggacccatcaagggctaccctgttgttgtggatgttttagaggattgttcttcagtgagtattcatgatcacctcccagtggctaggagagttgggaagaagaggcagagacgcagacatgatggaaggtggacgaagaggaccccgctacgttttccggctgcgtccacggctgtgcgtgccatttccaccaccgtgcagacaaaaaagaactcaaacaaggacccggtactcgaggaatgctccctgctattggctctagctgcgaaagcctccctgctgcatacatga

SEQ ID NO: 15343 - DNA, 624 bp, Zea mays
  Peptide Sequence Number=SeqID_57122
atgaccttgcagcaagatcaagagcgtgtcaagaacaccaaggatgataagaaagagaagaaggcaaagggggtccctggaccgacgagtaaattatcgccgcgtgccccagcccagatgggtcggcgcgagacggagcgcgaaggggggaagaagccggagggagataggcgtgcaaaggggaaacccgcggccttcatgtttgtcccgcgcccaggtcggggtaatgatggcgcctcctgtgacgtggtcggtccgagccctgggttggccgaggtggaggctcctccgaggtcgaggtcgagtctgtcttccaaggccgaggtcgagtccgagcccctgggtcgggcgaggcggagaccgtcagctgaggccagggctgagtccgagccctggggtcgggcgaagcgaagttcgtcgtcttccggggctgagcccgagtctgagccctggggtcgggggaagcggagttcgtcgtcttccagggctgagcccgagtccgagccctggggtcgggcgaagcggagttcgtcgtcttccggggctgagcccgagtccgagccctggggtcgggcgaagcggagttcatcgtcttctggggctgagcctaagtccgagccctag

SEQ ID NO: 15344 - DNA, 237 bp, Zea mays
  Peptide Sequence Number=SeqID_57123
atggaccctatcttacttagccacccacatcaactctctgtgtcttcaatccagagagccctctttcgtcgacaccgtcctactcctagaaacaccttgaggggcaaccccggcagcagcgactacaacgacttctgcttcggggggccgaacagcagcagcgatgacctcagggcggatgcagctgccataaggccctcgctcatgccctcactcgagaggcaaggacgagcataa

SEQ ID NO: 15345 - DNA, 1434 bp, Zea mays
  Peptide Sequence Number=SeqID_57124
atgacaggggagaagaagatgttctcctcctacgagaaaaaccaagattcccaacgagctatcacattcggggatggaaatcaaggtgtcactgtctttagaagaagtgatgattcaatagcatttaagggagtattagagggtcagctatacttagtaaattttgatagagctgaactcgacacttgcttaattgctaagaccaacatgggctggctctggcatcgccgactagcacatgttgggatgaagaatcttcataagcttctaaagggagagcacattttaggattaacaaatgttcattttgagaaagacaggatttgtagcgcatgccaagcagggaagcaagttggtgctcaccatccacataagaacatcatgacgactaacaggccactggagctcctacacatggatctattcggcccgattgcttacataagcatcggcgggagtaagtactgtctagaaaaatctcatacccaagaaaccttaaagggattcttgagacgggctcaaaatgagttcggcttaaggatcaagaaaataagaagcgacaacgagacggagttcaagaactcacaaattgaaggcttccttgaggaggagggcatcaagcatgagttctcttctccctacacgccacaacaaaatggtgtagtggagaggaagaatcgaactctattggacatggcaagaaccatgtttgatgagtacaagacttcggatcggttttgggccgaggcggtcaacaccgcctgctacgccatcaaccggttgtatctacaccgaatcctcaagaagacatcatacaaactcctaaccggtaaaaggcccaacatttcatattttagagtctttggtagcaaatgctttattcttgttaaaagaggtagaaaatctaaatttgctcctaagactgtagaaggttttttactaggatatgattcaaacacaagggcatatagagtctttaacaagtcctctagacaagttgaagtttcttgtgacgttgtgtttgatgagactaacggctctcaagtagagcaagttgatcttgatgagataggtgaagagactccgtgcatcgcgctaaggaacatgtccattggggatgtgtgtcctaaggaatccaaagagcctccaaatgcacaagatcaaccatcctcctccacgcaagcatatccaccaactcaaaacgaggatgaggctcaagtggatgaaggaaaaaatcaacaagatgagccacctcaagatgacggcaatgatcaagggggagatacaaatgctcaagataaggaggatgaagaagcaagtccgccacacccaagagtccaccaagcaatccaacgagatcaccccgtcgacaccatcctcggcgacatccataagggggtaaacactagatctcgtgtttgcacatttttatga

SEQ ID NO: 15346 - DNA, 1581 bp, Zea mays
  Peptide Sequence Number=SeqID_57125
gcgagctccaccagctggatctccagggagcccctgcgaccttggccatggccgacctccacttctcccttggcaggcgctgccctcctctggtccgagctcgagcaggtgagctcgccccatggcctcggctcctagcctccaggctcggctacgaggacaccacgctcgccctcaccctccgcctcccgggctccgactccggccgttcctcctcgctcgccgcgccctccgctgcgccgtcacccaaggcgcgggtggtggggtggccgccggtgaggtcgtaccgcaagaacgcgctcgccgactccagcaaggccaaccgcgcagccaatttcgtgaaggtggtcgtctcccgccgctcctcggcctctgctcctcccgcgcccggttcccatcgccgctctcttccccagcgcgtcttcttccccagccgcgccgtgccgagctgcttcttgcgcacgcgccgtgccgagctcgcccccgacctctgctcttccctggcgcgtcgcgttcttccctgcacttgcccatggcggccgagctcccagcctgcgcgccctccggttctctgtgtcgcgcgctgctccagctcccacggcgcgcagcctccctctcggctcaccggatctcccagcgccgcgcccagcttctttctccctcagctcccgtggttctctctccatctccctccgttctctgttgcgtgcccagcagaactcccctgcgcgcccggattctctccttccctactcgaatttggtcaggcccgtgcagctccctggcgccctgcttcctctgttctctccctggacgcgcacagcgttccgtcgaactcctgcgccgtgccctgctcaggttccatggccgcaccaaattccctgcgcgcgctggcctacaactcgactgcacacctccctacttgtcatggccaccgtgccctgctccctgatttctgctcgccgcgcgcgctcatctctctgttcgcctctgcgcacaactctccgagctccatggccggttccctgctcgccggggatgctcctgctccagctcaacctcgccttaggtatcgtcctcaccatccccgtaggaagccgaagtacagccagaagcgtcgtcacaactcacaagcactgatcatggccgagatcgacccaagtgagagtgggatcgctaccaccgcccggtgcttccagatcctactctctcctcaggatgatgattttgacgagtcagcttatgtcccagttcaactggccctgatttttgcgcacactgagaagtaccctgatgaacctccggtactgaatgtcaaaagtgtacgagggattaaaccacatgatcttgcatccctaaaggaaaagcttcagcgagaggcaacagagaatcttggcatggctatggtctacactcttgtttcatcagccaaagagtggctaagtgagaaatatggtcagaatggtggtgatgaggaacctgaagaatctgaagcggaaaaagaggagaaaggagcaagcacagttgctgatgaagatgaagaagaggaggaagacattgatttcgatgatgattttgaag

SEQ ID NO: 15347 - DNA, 3051 bp, Zea mays
  Peptide Sequence Number=SeqID_57126
atgctcgacataacaagggatgtcgccgagcactcgctagatatccgggctggagcccgacccgtgaagcagcctctgcgccgattcgacgaagaaaagcgcagagccataggcgaggaaatccacaagctaatggcggcagggttcatcaaagaggtattccatcccgaatggcttgccaaccctgtgcttgtgagaaagaaaggagggaaatggcggatgtgtgtagactacactggtctaaacaaagcatgtccgaaggttccctaccctctgcctcgcatcgaccaaattgtggactccactgctgggtgtgaaaccctgtctttcctcgatgcctactcagggtatcaccaaatcaggatgaaagagtccgaccagctcgcgacttctttcatcacacccttcggcatgtactgctatgtcaccatgccgttcggcttaaggaatgcgggtgcgacgtaccaacggtgcatgaaccatgtgttcggcgaacacattggccggacggtcgaggcctacgtcgatgacatcatagtcaagacgaggaaagcctccgacctcctttccgaccttgaagtgacatttcgatgtctcaaggcgaaaggcgtgaagcttaatcctgagaagtgtgtctttggggttccccgaggcatgctcttggggttcatcgtctccgagcggggcatcgaggccaacccggagaagatcatgaccatcaccagcatggggcccatcaaggacttgaaaggcgtacagagagtcatgggatgccttgcggctctgagccgcttcatctcacgcctcagcgaaagaggcctgcctctgtaccgcctcttaaggaaggccgagtgcttcgcttggacccctgaggccgaggaagccctaaggaacctgaaggcgctccttacaaacgcgcccatcttggtgccccccgctgccggagaagccctcttgatctacgtcgccacgaccactcacgtggttagcgccgcgattgtggttgagagacgtgaagaggggcatgcattgcccgtccagaggccagtctacttcatcagcgaggtactgtccgaaaccaagatctgctacccacaaattcagaagctgctgtacgcggtgatcctgacgcggcggaagttgcgacactacttcgagtctcatccggtaactgtggtgtcatccttccccctgggggagatcatccagtgccgagaggcctcgggtagaattgcaaagtgggcggtggaaatcatgggcgaagcgatctcgttcgcccctcggaaggccatcaagtcccaggtcttggcggacttcgtggctgaatgggtcgacacccagctccccacggctccgatccaaccggaactctggaccatgttcttcgacgggtcgctgatgaagacaggagccggcgcaggcctgctcttcatctcgcccctcagaaagcacctacgctacgtgctacgcctccacttcccgacgtccaacaatgtggctgagtacgagactctggtcaacgggttgcgcatcgccatcgagctaggggtccgacgcctcgacgcttgcggtgactcgcaactcgtcatcgaccaagtcatgaagaactcccactgccacgacccggagatggaagcctactgcgatgaggttcggcgcctggaagacaagttctacgggctcgagctcaaccacatcgcccgacgctacaacgagactgcggacgagctggctaaaatagcctcggggcaaacaacggttcccccggacgtcttttcccgagacctgcatcaaccctctgtcaagaccgacgacacgcctgagcccgagaaggcctcggccgagcgtgaggcaccctcggctcagtccgaggcaccctcggttcggcccgaggcaccctcggttcggcccgaggtaccctcggcccacgaggtaccctcggcccccaagggcgagacactgcgcatcgaggaggagcgaagcggggtcacgcctaatcgaaactggcagaccccgtacctgcaatatctccaccgaggagagctacccctcgaccgagccgaagctcggcggttggcgcggcgcgccaagtcgttcgtcttgctgggagatgggaaggagctctaccaccgcagcccctcaggcatcctccagcgatgcagccccatcgccgaaggtcagaagctcctacaagagatacacttgggggcttgcggccatcacacagcacctcgagcccttgtcggaaacgccttccggcaaggtttctactggccgacggcggtggccgacgccactagaattgtccgcacctgcgaagggtgtcagtactacgcaatgcagacccacctgaccgctcaggccctgcagacgatacccatcacctggccttttgttgtgtggggtctagacctcgtcggccccttgcagaaggcacccgggggctatacggacctgttggtcgccatcgacaaattctccaagtggatcgaggtccgacccctaaacagcatcaggtccgaacaggcggtggcgttcttcaccaacatcatccatcgctttggggttccgaactccatcatcaccgacaacggcgcccagttcaccggcagaaagttcctggacttctgcaaggatcaccacatccgggtggactgggccgccgtggctcaccccatgacgaatgggcaagtagagcgtgccaacggcatgattctacaaggactcaagcctcggatctacaacgacctcaacaagttcggcaagcgatggatgaaggaactcccctcggtgatctggagtctgaggacaacgccgagccgagccacgggcttcacgccgttctttctagtctatggggccgaggccgtcttgcccatagacttagaatacggttccccgaggacgagggcctacgccgaccaaagcaaccaagctaatcgagaagactcgctggaccagctggaagaggctcgggacatggccttactgcactcggcgcggtaccagcagtccctgcgacgctaccacgcccgaggggtccggtcctga

SEQ ID NO: 15348 - DNA, 393 bp, Zea mays
  Peptide Sequence Number=SeqID_57127
atgacagttggcacgcagggtaggagaatattagtgttccaagtgacatcttccactctgatggctcagtcatcagtgtttgtcggtggcaagacctttgcgtctaggagccacatcacgttcggttccccggacttcctcgccaccgccaccggtgaactccaccttgtcgactccgacgtttcggccgcagtaggcgtgggaggaccaacatgctctgccaccaggagcaatgcagataagcaatgtctcaagaggcatgatgtcattcttaagcggcgccttaaccggcttgccgccgccatcaggcaaaatgcagagggagccttaccctcaacatttgtggccgtcatcggccatcatccacttccattcttgacctgctcgacttag

SEQ ID NO: 15349 - DNA, 141 bp, Zea mays
  Peptide Sequence Number=SeqID_57128
atggagattattaattatagactcttagaatttaagttcgtttatatcctttctccatcgctgtttgaggtgcgtggtcaagtcgaggcgaagatgagcaaggaggatgtgctcaaggtgcaggtcttggattcaacatag

SEQ ID NO: 15350 - DNA, 243 bp, Zea mays
  Peptide Sequence Number=SeqID_57129
atggcttcggcggcaactcaggtggggacttacttcctgcggaactactacaacctgctgcaacaaacccccgatgtcgtccaccagttctacatcgaagccagcaccatggtccgcgtcgacgacctcaccggcacgaccgcggctgccaacaacatgatgaagcagaagagaaaccgagaagaacccagcttagatcagactgaagaactagatgcggtggacgccttcaagacctgctga

SEQ ID NO: 15351 - DNA, 135 bp, Zea mays
  Peptide Sequence Number=SeqID_57130
atggccctggtcgtcgcatcgttgtgcacagcgtggcgtggtacgttaattaatcacatgatgcggaagacgagccaagtcaaccccaagcacgggctactccgcatggtgatgctgatggacgaacctgcctga

SEQ ID NO: 15352 - DNA, 294 bp, Zea mays
  Peptide Sequence Number=SeqID_57131
atgacgtcaacatgcaagcaaaccaggggtagcgtcgggtttggcgtgggcattggcctgggggcgcggtgttgtcaccgaccgaatcgggaggtagaagatgggccgatggccggtgatccgggggcgctcggggtgcacgtggcgtcatggtggttgcagctggtcagtgcgccatggaggcctggtgtcgcgccagggaaggagacggcgtcctgctatcgtagcgtctgtaggaagaagacgctgtgtccagccattgatcggccaatggacgggcggattagatcctag

SEQ ID NO: 15353 - DNA, 267 bp, Zea mays
  Peptide Sequence Number=SeqID_57132
atggcggagcaggccgccgaaagtctactacacaccgccgattatcatggacggatccctgaccacggcgaaccgcggccaatcgatgctagaggggctctggtgagcaattctcgacccgctgaagagcacttccctccctcgcgggacaccacacttcgaggattagccaacgaaaacaacggaagcagccatacctacgacggtgctttgatagagctggcccactgcgcgaggcggaaccgaggtgatgtcgagctccggtga

SEQ ID NO: 15354 - DNA, 315 bp, Zea mays
  Peptide Sequence Number=SeqID_57133
atgagcaatttccctcccctgtgggacaccacacttcgaggattagccaacgaaaatgacgaaagcggtcatacctgcggcggtgctgtgattgtgccgacccaaagcgcgtggcggaaccgaggcgatgtcgagctccggggagaagccggttggctcaagctggtgcccggtggtttcaaggataaggggaagctccaaccacgtggtcccggcgtggccggctgtagacctggcgtctgttacgcgaggagcgcgatgacaatatgggtccacctgtcagcgcgtgatcagggcaaacacagagtcacgtag

SEQ ID NO: 15355 - DNA, 210 bp, Zea mays
  Peptide Sequence Number=SeqID_57134
atggccatggaggaatggagctgctgcgtcgcatcatggacatggacctcgccgaggtcggcccagggagctcctgcacgctggggaaggaggctccctgctgcagccgctcaccaggaggagcagggagggcgctcaaccattgggggagtttggctgctcgagcttaaccggcgcagtgggagcctctgcgcacgcacaggagaatag

SEQ ID NO: 15356 - DNA, 558 bp, Zea mays
  Peptide Sequence Number=SeqID_57135
atgagtggaccttgtttgtgtaaatcacctactttcacaataaaggcatatggcctcggcctcagtctcggcctcgggagaaggtctccgccttgcccgagcttaggcctcgtcctcagcctcggcctcgggagaagatctccgcctcgcccgaccccaggcctcggcctcagcctcggcctcaggagaagctatgaaggaacaagactggtgtcccatctaaggtcactccggcaacagggctcaaggcacttctccgacggccacgttagctcatgtacagggctcaagacgctcctccgccagccatgggcacgcagcaacaaattcaccggtcggttgacggacctcgcgggtccgaaacaccgacagttggcgcgccagccggggacggtgcttcgctccgggagtctcgagttcatgttccgcgacagcggctacgacatgaagaggaacacccgggttcgccccgccaccctcctcgtcgtcggaggaggagacggggcaaccgtggccaggcaggaggaggcacctcgtcggctgtcggaccagagctag

SEQ ID NO: 15357 - DNA, 588 bp, Zea mays
  Peptide Sequence Number=SeqID_57136
atggcggtggggggccctcctctcgttttggtggtgtggctctgcgggatgtcgcgcctcgcgggccggcgggcgttgcctcttctaaaccgcgtggggctcgacaaggcggcctggctggcagcgatgccaccggccaatggcccgggcaggcacaaggtggtggtgacagcgacggtcttctattccttcttcccctctatcattccctttcgtcctcgcatggtgtcttcggcagggaaggcctgggctgctctagggcctgggatgatggatctgatgccttggtggttggatctagtgcccctaggcctggacgcggtgccggtggtgtcggccatgctgggggcgactgcgctggcctacccgggttttccgtcttcgtggccggatccagggtccattgggcggcgggctatggtggtcgtgtgtgccagggccagagacgttttcggcacgtggcagtgtgacgcacgtggcaaggtgatacccggttccatgggcccgaccggagggggtgtcgctattgaagttcgtctcggccacagcgtcacattcgcgattgatgctttcgcttctcagtgcccg

SEQ ID NO: 15358 - DNA, 2880 bp, Zea mays
  Peptide Sequence Number=SeqID_57137
atggcgtcgcccttgtcttcctcctcctccagcaccagcaccagcaccagcacgctcctccggctgatctgcctctgcaccgccttgccagtcgccctgcaggcggcggcggcgcgcccgcccaacgtcaccgtcggcgccctcttcaccttcgactccgtcatcggaaggtctgccaggaccgccatccagctcgccgtcgacgacgtcaaccgcgaccccgccgtgctgagggacaccaacctcagcgtcatcttccaggacaccaagtgcagcggattcgtcggcacaatccaagccctggagctgatggagaggcatgtggtggccgtggtgggcccccagtcctcgggcatcgcgcacgtcgtctcccacgtcgccaaccagctgcgcgtcccgctgctgtccttcgccgccaccgacccggcgctcgcctcctcgcagtacccctacttcgtccgcgccacgcacgacgaccgcttccagatggccgctgtcgccgacgtcgtcgcgcaccacggctggcgggaggtcacggcggtctacgtcgacaacgactacggccgcggcggcgtcgtcgcgctcggagacgcgctcgaggccctgcgcgccagggtctcctacagggccgcgttcccgccgggcgccgaccgcgccgcgctcgccgacctcctcgtgcgggccaacatgatggagtcgcgcgtcttcgtcgtccacgccagccctgactcgggactcgacgtcttcgccgccgcgaggtcgctcgacatgatggccaccggctacgtctggatcgccaccgactggctcgccgccgccatcgatgctgctggtgctggtgctgctgctgctgctggtaatatacagggtgtcctcatgctgcgccagtacaccccggactcggacgccaaggcgtcgctcgtctccaggttcgcggccaaacagtacatcaacgcgtacggcctcttcgcctacgattccgtctggatggcggcgcgcgccatcgaccagttcctcgacgacaacgccagcggcggtaacgtctccttctccgccgaccgcaacatccgcgacgccaacggcagcgcgctgggcctcagcgcgctcagggtgttcgaccagggcgagcagctgcttcggaaggtcatgctcgccaacttcactggcgtcacgggcagcgtccggttccagttggacgccgatgggagcgggggcgcgaccctcatcaaccccgcctacgagatcctcaacgtcggtggcacgggcgtccgccgggtcgcctactggtccaactacacgcgcctgtcggtggaggcgcccaggctgctcgccgacggagggccgccgcccaactccaataacacgaccacccagcagcagcagcagatgtacagcgtcatctggcccggtgacaccacggctaagccgcgcggatgggtattccccaacaacggcaagccgctgcggatcggcgtgccgtaccggacgacgtacaagcagttcgtgtccaaggaccggtccagccccgacggcgtcagcggctactgcgtggacgtgttcaatgcggcggtggcgctgctcccgtacccggtgccggcgtcgttcgtcctgttcggcgacggcgtcaagaaccccagctacaacgatctggtgcagagggtggctgacggcttcttcgacgcggcggtgggcgacatctccatcgtcacgaaccggacgcgggtggtggacttcacgcagccgtacgtggagtccggccttgtcatcgtgtccacggtgaaggccaagaactccaacgagtgggccttcctcaagcccttcacgccggggatgtgggccatcatcggcgccttcttcctcttcgtcggcgccgtggtgtggatcctggagcacaggttcaacccagagttccgggggtcaccgaggaggcagatggtcaccatcttctggttcagcttctctacgatgttcttcgcgcacagagagaacaccgtgagcactcttggccgcttcgtcctcatcatctggctcttcgtggtgctcatcatcaactccagctacacggccagcctgacgtccatcctgacggtgcagcagctgtccacgggcatccagggcctggacagcctcctctccagcaacgaccccatcggctaccaggtcggctccttcgcccggagctacatgatggacgagctgggcgtcccagcgtcgcgcctccgggagctggccatcgacggctacgccggcagcctgcagcgcgggcccagcaacggcggcgtggcggccatcgtcgacgagctgccgtacgtggagctcttcctctccaccaactgccagttcaggacggtgggccaggagttcaccaagagcggatggggattcgcgttccagcgagactcccccctggcggtggacctgtcgacggccatcctgacgctgtcagagaacggcgacctgcagcggatccacgacaagtggctcagcccagggacgtgcgcgtcgcagagcaccgacggcgtgggcgccgacaggctcaatctgggcagcttctggggcctcttcctcatctgcggcgtcgcctgcttcgtcgccctcctcatctacttcgccaggatactctgccagttctgcaagtaccacggccacgggaccaccgacggtgccggcccgttccccgtcccggagaggagcctgcggcggcccgccaggctcaccagcatccgggacctcatgtcctttgtcgacatgaaggaggccgaggtgaagagggccatccggagcaggtccgacaggcgactcgacgggtccatgggcggcaggagctacacctccgaagggccgtccttgtcacggccgtcctccatgtcgccggtgtaa

SEQ ID NO: 15359 - DNA, 573 bp, Zea mays
  Peptide Sequence Number=SeqID_57138
atggccattcaaggcaccacggggtctcctgcgccgaacagagaacatggaggaggggcgctcggtagagagaggagaagggggcgtcgaggaagttggagccgaggggtggggtggcgccatggaggccctgctcctgcgcgctggggagaagggctccctgctgccgaatgtcgtggagaaaggggggcagaggttggaggagaagacacttggggcagccttcggagctctggcgtccgagcagagggaagccgggctccatgggaggaacacacgcgcctggaagaagaggagggagaaattactcttgtgcctgtggagaagaagggtgcggctcctgcgcttgggttcaagggaaacagagaggagggaggtgaggcctggtcgagctccaatggggcaagggtgccgagcgccattggaggagctcggttggggagggagatggcagggaggtgctccacggctggaagatgggagcggctgagcagggaagacgccaggagttgcttctgcgcgctgaggaagaaggattccgtgcctggcgttcgtgaggagcctagcggctag

SEQ ID NO: 15360 - DNA, 309 bp, Zea mays
  Peptide Sequence Number=SeqID_57139
atggaggagcacttgaggaggagctcggcgagcgcagtacaggcgctgcttgagctcggccagagaaggtccctacgtgccaggtgcttggaggaggggatctcgtcgcggtcatcaagaagagacccggcaccatgggggctcctgcgccgaacagagaacatgtacgaggggcgctcggtagagttaggagcagggggcatcgaggaagctggagccgaggggtggggtggcgccatggaggccctgctcctgcacgctggtgagaagggctccctgctgccgaacgccatggagaaaggggggtag

SEQ ID NO: 15361 - DNA, 342 bp, Zea mays
  Peptide Sequence Number=SeqID_57140
atggggatccggcaccgagcacagagggcagaggtccggttggagatgtggcgccatggatctagggagaaattactcatgtgcctgtggagaagaagggcgcgacttcctgcgcttgggttcaagggaaacaaagaggagggaggtgaggcctggtcgagctccaatggggcaagggtgtcgagcgccatgggaggagctcggttggggagggagatggcaaggaggtgctccacagcaagaagatgggagcgacttagtagggaagacgccaagagatccttctgcgcgctgaggaagaaggattccctgcctggcgtgcgtgaggagcctggcagctag

SEQ ID NO: 15362 - DNA, 303 bp, Zea mays
  Peptide Sequence Number=SeqID_57141
atggacccttccctcgcgccgactaggtcggagaagatggccctctcctcaaaagggcacaaaagcccttccgggggagatgcatgcatgacaaagaaccgacagattactcggcggaccgggggttacatcatactgatgcgcttgcgtgcaatcaagccatgctccgatgggcattacctctgggcaactccgtacgggatcattaaagtgtctttcctcgcaaacgtcgtgctgctcgtgtttaccctcgtcatgttcacaaccgcctctcttgctcggtcgcaactgaaagggaattag

SEQ ID NO: 15363 - DNA, 468 bp, Zea mays
  Peptide Sequence Number=SeqID_57142
atggcggaaggcatagtacgacgagcaattcagagcagccctgcccacgatctggcctcggaaggttaccaccacgagcagcttgcaccggtgaaccccactgtccccaccacagcgtcccgacagcgtagaccgtccgtacccgttgtggcggtgctcaccaacccctctctactgagctctgaggtgttcaatgaggcagtcgctagaagggagaatggagggagggggctgtgggtgaggtccgcatttatcaactgtgcccacggagtcgaagacgtggctcagcatgcacgaagaaaaggggagagtctgtgccctgcactcaggttgttgccgcggcggcgggatgacacgcgggctgcgttacccagtgaaacgagtgcgtatactctggcagaggctgactcaggtggcccacgccgaaggatcctgaggcgagcgacgtgcaggaggctgacaccctag

SEQ ID NO: 15364 - DNA, 165 bp, Zea mays
  Peptide Sequence Number=SeqID_57143
atgacgtcgaccagaaaccgtcatcgtgcttccgactatcgcgtcgaagtagtctggggtacattaattaatcacgtgatgcggaagacgacccaagacgaccccaagcgctggttactccgcatagtacatcggatggacgaacctgaagatgggatgatctga

SEQ ID NO: 15365 - DNA, 345 bp, Zea mays
  Peptide Sequence Number=SeqID_57144
atgccgagcagggggaactcgcggctggggaagcagtggccgaggaagagcgccatgggagggaactgggggtcgcggcatagaagcaggcgcgcgcacggagttcgacggcggccgccatggaagaacctgaaggagcgccggcgttggaggcagctccggcagggaggacgctcggccgaaggggcgtctagggagaaggatgcggtggaggagaagagagaagaacaagggctagaccaggaccgcgcaccatggggagctcgagactgcgcggcaagcaccagcgagctgagggaggagagagggagacgcgactgccattgcactatctatgtctgttga

SEQ ID NO: 15366 - DNA, 369 bp, Zea mays
  Peptide Sequence Number=SeqID_57145
atgccccgcctggccgagctgaaggaagcgcggaccagagacagagtgggcaccacaggcgagttcacggcaacagacacacttgacgaccacagacgcagccggataactaaaaatactgcgacagccaagaatcggctcggagacgacgaccggcacggaagagaggagctcgacacggaagctcgacacgccattgcaagcagagaactttgcgcacacaacagattcgcgcacacaacagaggagctcgacacatgcagaggggaagctgggcgcgagctacagcaaggaccgagcgacagagcggagctcgcagctgtgcgcagggagaggaatgccatccagggcgagctagagacgatttag

SEQ ID NO: 15367 - DNA, 414 bp, Zea mays
  Peptide Sequence Number=SeqID_57146
atgtacaagaatcagctgcaggagctggcgcagcggagctgcttcaacctgccttcttacacgtgcctgcgggaggggcccgaccatgcgccgcggttcaaggcggcggtgaacttcaacggggagcagttcgagagtcccgggttcttcaccacgctccgccaagcggagcacgccgccgcggaggttgcgctcgccgcgctcgcgcgacgcggcccgtcctactcgctcgccgcccgcatcctggtggtggaatctggggatctgcgggtgtttctagtccgagtattgttgatcgttaatagatcactcgaaccatttgctactgcaactcatcacggaattctcgtgggctattcattatccagggcgagtcgtttgcgtttgctcggggctaaaaatggcgtctcgtag

SEQ ID NO: 15368 - DNA, 867 bp, Zea mays
  Peptide Sequence Number=SeqID_57147
atggcgtgctgcgcatctatgaccgccgaggagacttttgggattataacacacggcagatttggcttcatcgaaacggaggacacgtacgacgtgttgtcctcctccttgccgccgagcgccggcgtcgtcaaggagttcttcgtcccggcaggcggctccggtgacttccgcgtcacgttcacgccggccgccggctcggccgcgttcgtcaacgccgtcgagctgttcccggctccagaggagctgctgtggaacgccagcgtgacgccgccgaacacgtacagggactacgccgcctcggctcccatctcccggaacctcacggttaccgtcggcatgtccgacaagagcagccctagcgaaggcggtttcctgaagctgcggccttcgggttcgggatcacgcagtagcagcaggagagttctgatcattgcgctctcggccgtgctcggcgcctcggttctcgcgtccgtcgtgctctgcttgtgcttcgtcgcgcggaggaaaggcggatggcgcgaccggcgccactggagaaggagagcagcaagcagctgccgtggtcccatcgcgaaggtggccgacttcgggctgtgcgcgcggccggtgatcgaccaggcgctggagcgcgagcagatcaacctggcggagtgggccgtggggtggcagaggcgcgggcagctggagcgcatcgccgacccgcggatcctcggggaggtgaacgagaactcgctgcgcaagttcgcggagacggcggagcggcgccgtccatggccgacgtgctgtggaaccatacatgagctcttccgcgggttggataactggagtccgccgctgcccaggaactccaccgggacgggctaa

SEQ ID NO: 15369 - DNA, 207 bp, Zea mays
  Peptide Sequence Number=SeqID_57148
atggggattaaggccgagcgagccgagagggcgtgctggcgagcaggaaactccgatcgacgcaacagcagggagatgggcgcgagcggggaacggcgggcgaccaagcgaaatccgagatgggcgaactccaagctggggcgagcagcaggcgcggctggaggagaagccggttgcgcgcacaggaagcaggcgcgcgcgcggtga

SEQ ID NO: 15370 - DNA, 552 bp, Zea mays
  Peptide Sequence Number=SeqID_57149
atgaaccttctacgtggtcttagctcccgctaccaccacctgaaggctctcatcaagcggaccgtgccattcttgtccttccacgacgtccgcaatgagcttctcctcgaggagctcaccctggatactaagtcccccgcctccaccacaaccctctacggcacgccctccggtgctcaggcgccctccgcactgacgaggtcgtcggccacgcaaggtcgaccgcgggagcggaggctccactcggggtggccccgatcgtggcggtggcccggtgtggccgtcattctacaacccgtggaccgggaccatcgccatgtggatgggcacgaccatggttgctactccaccgcgtccacctcagccggctctgccaccctacggtatcccccacctccgacgactccgacttcaccccttctctcgcattcgaggaccactaccccgacacattggtccccgatggctggaggttgggatcaagcctccctcgccgctgccttccgcaccatggcgatgactcccccccaccaattgggcggtggactctga

SEQ ID NO: 15371 - DNA, 564 bp, Zea mays
  Peptide Sequence Number=SeqID_57150
atggcgcaaattggttcttcatcctcggaggaccaacaacggacacctggagctgctcaatactatactggctcacgccaaagtggtactagtataggcgatcaaggaatgttttcatcctaccaagcaggttctgttcctgttggactttatgcagtacagagggagaatttatttccagagagacctgaccaacctgaatgtcagttctatatgaagaccggagactgtaagtttggtgctgtatgcaagttccatcatcccagggagcgaataattcctactcccaattgtgcactgagtccattaggcctacctttgcgcccgttgttactaaccttaggaagattggaagaacaacgctcccttagtggagactgctatatgcagatagagcatcatgggcctatagtagatgtacacttaacaacccctttcaaactcaaggtggacagaggaatcctcaagagggactccatcagtgggagtgtgggacgaagctacaagcgaagatccataggtgcggcaactaataccagaaatgagcaacaagaccatgggtga

SEQ ID NO: 15372 - DNA, 210 bp, Zea mays
  Peptide Sequence Number=SeqID_57151
atgtggcagatgaatttggaagaagccatggaactggggccatacccagagcgtgttggtgagccagactgtagctattacatgaggactggcatgtgcaggtttgggatgacctgtaaatttaatcacccagcagaccgaaagctgtttcatacggttttcatttctgaggcatctagaatgggttctcaattctgggtgtactcatag

SEQ ID NO: 15373 - DNA, 189 bp, Zea mays
  Peptide Sequence Number=SeqID_57152
atggcagcgccatccggcggtgggggcggcggtgcgggggagggctcctcctcggccgccgcagctgcgacgatcggggtccacggggtggaccaaggtgagcaacccctactccttctcctcgggctcaggttgtttactttcggtgtggagtgctgcctatttactctttcaaattacatgatctga

SEQ ID NO: 15374 - DNA, 489 bp, Zea mays
  Peptide Sequence Number=SeqID_57153
atgggcaggagcaagaggggccaggatggcctcgccgcattgacgtatcaggggctagattcaatcaggttcaccttgttgttacttgtgcggagggtggatggtggcacggctggcggtgtcgagctatccatcgcggtccgggcgtactggcgatccatcgagctcgccgggctcggtgggtcgaatgactcggaggagacctcctcggaggaggtggaagactcctccgactccgaggagtggagcggcggcaaggacgacggcagcagcggcgacgatgacggcaagggtggcggcgagggcgacgacgaagatggagacgacaagggcgatggtgacgacgatagcaaaggcgacgatagcggcaaaggcgacgacaagggcgacgacggtgacggcaaggccgacggcgacagcaagggcgataacagcggcaagggcgacgacggcaatggcaaggccgacggcataatgctgttggcgtaa

SEQ ID NO: 15375 - DNA, 477 bp, Zea mays
  Peptide Sequence Number=SeqID_57154
atgtccggtgcaccagaggactccaactctaactcgtcaccttcgggaatttgtagaggcaactccgctataattcaccggactgtccggtgtacaccggacagtgtccggtgctccaaggaagagtggcctcaggaactcgccagcttcgggaaactgcaacggctgctccgctataattcaccggacatgtccgatgtacaccggactgtctggtgtaacagcggggcaacggctacctgcagcgcatttattgcgcgccagcgcgcgcagaagtcaggcgtgcccatactggcgcaccagacactctacagtgcatgtccggtgcgccatcggacatccaggagagcccagaagacagagctccaatggtcagaacccaacggctttggttacgtggctggcgcaccggacatgtccggtgtgcaccggactgtccggtgcaccatacgacagtcagccccaccaaacggctag

SEQ ID NO: 15376 - DNA, 264 bp, Zea mays
  Peptide Sequence Number=SeqID_57155
atggggtttgatataaaggatgaactcgacagcgacgatggtgttgctgtgcgtgcgggcaggggaaatcagatggtatggcggtggcggtctgggtggttccggcgaactatactgcgagagagggggaggcgcgacaagagagagcgagctcagctgtgggagaatggaagggagttcggcgtccaatttatagaggggagggaaggggagagagcggtcggggtgcttggtggccatcaatggcgtcggttcatggagtaa

SEQ ID NO: 15377 - DNA, 528 bp, Zea mays
  Peptide Sequence Number=SeqID_57156
atgcaggcggcatgcaaccgcaccaagggggcgcaccctttcgacttcgacgcgtccagcatggaggcccaggcccacacgtcatgtaaccggcgcgccggttactacgtgcgagaaactgcaccgccactcgcgccagtaccgcgcctcctcgactgcggaacaggtgctgcgactcaaggcgaccctgcgcatgacccgacagtgccaaccgagcacatcggtcacgggtcagtcagccgcgggagaaggcgcgacggtcgatacggccagaaatgggccggcagtaatggtggtggcagggaccgggaaaggggatactccgaaagggatccttctctgcgaaggaagcgggccccgagcccccctactgatcagaggttcgaaggctggcccctcggaagggttcaacagccgcctcagagcactcgggctccgcgcccactactggtcagaggttcgaaggctggcccctcggaagggttcaacggccgcctcaggccactcgggctccgcgcccactactga

SEQ ID NO: 15378 - DNA, 636 bp, Zea mays
  Peptide Sequence Number=SeqID_57157
atggcgcctcctgttgacgtggtcggtccaagccctaggttgagcgaggtggaggctcctccgaggtcgaggtcgagtctgtctttcgaggccgaggtcgagtccgagcccctaggtcgggcgaggcggagaccgtcggctgaagccaaggctgagtccgagccctggggtcgggcgaagcggagttcgccatcttccgtggctgagcccgagtccgagccctggggtcgggcgaagcggagttcgtcgtcttccggggctgagcctgagtccgagccctggggtcgggcaaagcggagttcgtcgtcttccagggctgagcccgagtccgagccctggggttgggcgaggcggagttcgttgtcttccagggctgagcccaagtccgagccctggggtcgggcgaagcggagttcgttgtcttccggggctgagcccgagtccgagccctggggtcgggcgaagcggagttcgtcgtcttccggggctgagcccgagtccgagccctggggtcgggcgaagtggagtttcctatggcgcctgaggccggacttggctgctgtcagcctcactctgccgagtggcacagcagtcggagcggcgcaggcggtgctgtcctcttgtcagaccggttag

SEQ ID NO: 15379 - DNA, 768 bp, Zea mays
  Peptide Sequence Number=SeqID_57158
atggatcttttgaatcaattacaaggaatgtacaagtcgcgactgcaggagctgtgccagaagcggcgatgggcgtcgtcgttgtacgagcctacccgagagggtcctgcccacgcgcccctcttccacgccactgtcatcgtgaatggcgagaggttcagttcccgggatgaaggggagaagtcactcaaggaggcgtacaacctcacagcgatggccgccttcgacaatctcatcccgctcccggccgtggcccttgccccggctgctccagcgccgcccccatccgagacccagcttccttacaagagtcagttacaaatttatgctcagaagagaggcaaactcctgccttcatatcgtctcattcgtgtaggttctcttggtgcacctctatttaagtcagaagtaaccatagatggtcaaacatttgagagcccagagtactgtcacacaataaaggaagctgaaacagttgctgcaaaagttgctctgatgtccttacctcaagaagcaaacccaacacagcaattactggttggcttggatgtctcgaactattctgctggcttcgtatcaactgtggaaatccaaggttcttcttttcatggaaagcgagggaacagcaaaaagcaagcagagatgaatgctgcaaagtcggcttttgaacatttaaaaacagatgctggtcttgtgagcctaagtcgaggtgacgggaaaagacgacataacatgcgggctgctgctcaggctgctctgggtgcttag

SEQ ID NO: 15380 - DNA, 426 bp, Zea mays
  Peptide Sequence Number=SeqID_57159
atgaggctgttaatgagcaccccgaacagcccgagcagcagcccgcatgttatgtcgtcacctcgactcaggctcacaagaacaacatcctacaagatgagaaacacggagctgtgccagaagcggctatgggcgccaccgttgtacgagcctacccgagagggtcctgcccacgcgcccctcttccgtgacactgtcgtcgtgaatggcaagaggttcagtttctgggatgaaggggagaagtcactcaaggaggcgtacaacctcgcggcgatggccgccttctacaacctcatcgcgctctcggttgcggcccttgccccggctgctccaacgccgtccccatccggtaggaatcactccaaggttcaagcatctgcctaccttttgaaattaatcttaccagatgaactgaagaagagttga

SEQ ID NO: 15381 - DNA, 228 bp, Zea mays
  Peptide Sequence Number=SeqID_57160
atggcggcactcaagacttccgtggcgggtggcggcgtgtggtttctgtgcggggagaaggcagggagatccgcgtggcgttcaggggggtcttatccccagacaagtgggctccacatgtcggcgcggtgcactgagcggagacggacgcgagtctggcaaagtgggcccatgtgccagcggcagggtgagagggcgcgggatgcagagctgggctgggcgcgctga

SEQ ID NO: 15382 - DNA, 666 bp, Zea mays
  Peptide Sequence Number=SeqID_57161
atgatggttacttttgcaaaaactccgatgatgatgatggtgatgacaggcggcacctttggcaggcgaagcaggcgacgcttcacctccgccataataaccgcgtcaaaaaaggctggcccctcggaagggttcaacagccgcctcagagcactcgggctccgcgcccactactggtcagaggttcaaaggccggcccctcagaagggttcaacggccgcctcaggccactcgggcttcgcgccaactactgatcaggggttcgtaggctggccccgaaggccaagtccggcctcgggcgccataggaaactctgcctcgcccgaccctagggctcagaatcgacctcggctccggaagacgacgaactctgcctcgcccgaccccagggctcggactcagcctcggctccggaagacgacgaactccgcctcgtccgaccccagggctcggactcggcctcggctccggaagacgacaaactccgcctcgcccgacccccgggctcggactcagccttggcctcggacgacggtctccgcctcgcccgacccggggctcggactcgacctcgacctcgaaagacagactcgacctcgacctcggaggagcctccgcctcgcccgacctagggctcgggctgaccacgtcgcaggggggccataa

SEQ ID NO: 15383 - DNA, 297 bp, Zea mays
  Peptide Sequence Number=SeqID_57162
accagaccacgcacgccggcagagaaaaaccagaattctccaagcaatcctatcgccaacccggccacggatcggggctgccgtctgttgccgccggcgctggcgccgacgccgatgggctccgccgatcgcagtaagatcgacgggatcgtggtgccggagaaaggcgccaggagctgcgtcgaatgccgcgccaccaccacgcccatgtggcgcagcggccccaccgggcccagggcaaattgtgagctgggttttggtctgttgctaatgcggtacgagactcgtcctcgttga

SEQ ID NO: 15384 - DNA, 543 bp, Zea mays
  Peptide Sequence Number=SeqID_57163
atgaccttggacacccggcgaggctcccagttccgacttctcgccctgaacggttacactcgcatgaatccatggcagcggcgcacgcggataggcacacgacggccaccaggcttcttcaatttccccggaagcacatggataagccgatggggaagggtttgctgggccgtgtataaatactcagggcgcacgagtccgaccggcagttttctggcgagagaatcccgaaaagcacggcgggggtcacggcggacaccatcctattcgcagcttcggttgggtgaggaagaggatagggctaacaaggtgaccccacgagtcagcgggagtacagggcaggagcgatacggtgcgcgcacccgaccagacgggcccacaccacagtggcccagggaggaaattacgcgcgtgcgcgcgacgctgaccgagctgtggtatttccacgaggttgttgatgaacctgccaggtgggacccattcgtaggccacacgcgtgaagggggcacgaggaagcaggctgcgccctggaggagggtttag

SEQ ID NO: 15385 - DNA, 633 bp, Zea mays
  Peptide Sequence Number=SeqID_57164
atgcagtcggcatgcaaccgcgccaagtgggcgcacccctttgactccaacgcgcctagcatggaggcccaggcccacacgtcatgcaaccggcgtgccggttgctacgtgcgagcaacgacaccgccactcgcgccactaccgcgcctcctcgactgcggaaccagtaccgcgactcgaggcaaccctgcgtatgacccaacagtgccagccaggcacgtcggtcacgagtcagtcagctgggggagaaggcgctacagtcaatacggccaaaaatgggccgacaggaccgggaaaggggatagcccgaaagggatccttccccgcaaaggaaacgggccccgagcccccctactgatcagaggttcgaaggctggcccctcggaggggttcaacagccgcctcagagcgctcaggctccgcgcccactactggtcagaggttcgaaggccggcccctcggaagggttcaacggccgcctcaggccactcgggctccgcgcccactactgatcaggggttcgtaggctggccctcgaagggttcacagccgcctcagacgaagagcgagggaggaccctgggtacgttcgacacataaccaaggctcgggctacgctcccgaggtaccctag

SEQ ID NO: 15386 - DNA, 1341 bp, Zea mays
  Peptide Sequence Number=SeqID_57165
atgactccaaaatggagtgcatgctcttcaaatagctacagagaactaccttcacatgaaaatggagagtgcaaatcaaccttaacagagtcagtcccttcacctacaagctgttttggcttgcacactgcaaacacaatgtgctccttatcttcacaaaagaaggatggtaatgtttataaaagaaggaagatggataaggattcaaattctcctataacatttgaagatgctaaagaaatggcaacccaaagttgcacaatttctgatgaccactcatcattactgctacccattatctcctcagaggcattgcttttaaattcaacagcaagcatggcaggtcctatcctagattgtgaggagcctgctgatgttccattggagccaaattctggtacagatgatagatgcttcatttcaaacatgtctccaacttccatgactccagacaaaaagaatgctgctgaatgttcctcatcgaatattggccctacagaatcaattaccgagcatatttcaccaagggatctttgcattgccatactgatgaaagatggactaataaatgaatcaagaacaagaatggcacataaagaggaattcactgacaatgatgctaaccctttgttggcatgcaataattgtggctgcttggaacattcattgaagatgctgatatgcgattcttgtgaagcaggatttcatttgtcttgctgcattccttgtattaaggagctacctactgatgaatggtattgtgctccatgcttgtgtaagaaacccaagagtctttatggcaaactctcagagggcaggataaatccttccaggaatactaacacaaggcctcatgggatgagtcacatagagtacatgctgaaggatgctgaaccatatgtaactggggttcgacttggtagagattttcaggcagaggtgccagaatggtctggtccatcatccagcagcgatgtttactttgacgagccctgtgcaattgattctgcagaactaactacatttaatttgtgcaaaatgagtaatcaaagtcattcttccattggtaattggatccaatgccgtgagaccttgaatccaggagattctgacaagcaagttgtctgtggaaaatggagaagatggtttgggtatatccaacggaaacctttagaagcaccaatgcgtagtgggattctaagacgcgatattaatggaaagagagggcacccttatatgttgtacagtcagataattgggattgtttttgttgtcttctttgggatccagtccatgctgattgtgctgttccacagccaactatccaatgtatcttggtaa

SEQ ID NO: 15387 - DNA, 2016 bp, Zea mays
  Peptide Sequence Number=SeqID_57166
atgaactacatctccgtccggagcaacgcgctctctgggcaaatatccaacaagctcacctcctgcggcggcattgacctcttcgacgtcggcagcaacaacttctccggagctgcgccctttgcgctccttggctcggtaaacatcacctacttcaatgtctcctccaacgcctttgaaggcgaaatccccagcattgcgacctgcggcaccaaattctcacgcttggacgcgtccggcaaccggctcacggggccggtgccggagagcgtcgtgaattgccgcggcctgaggtttttggatttgggggcgaatgctcttggtggagctgtacctcctgtgattgggactctgcggtcgctctccttcctccggctcgcgggcaatcctggcatttccggttcgattccacctgagcttggagggatcgagatgcttgtcacactcgacctcgcgggccttgctctcacaggagagattccagggtccctcagccagtgccgattcttgcttgaactgaatctgtccggcaacaaactgcaaggagctatcccagacacactcaacaacataacctacctcaaggtgcttgatctccacaggaaccagcttgatgggggcattccagtcacacttgggcagctcacaaaccttgttcttctagacctctcggagaatcaactgactggggcaatacctccacagcttgggaacctctctaacctgacacatttcaacatgtccttcaataacctatctggcatgattcctcctgagccagtcttgcagaaatttgattacactgcctacatgggcaaccagtttctatgtggctctccattgcccaataactgtgggaccgggatgaagcaccgcaaacgagtgggtgtgcctgtcataatcgccattgttgctgcagccctcatacttattggaatatgcattgtttgtgctttaaacatcaaggcttatacgcgtaagagcacagatgaggacatgaaggaagaggaagaggttcttgtgtctgagagtactcctccaattgcatctccaggctcaaatgccatcatcggaaaattggtgcttttcagcaagagcttgccatcaaggtacgaagattgggaaactggaactaaggcgctacttgataaagactgtctcattggcggtggatcaatcggtacggtgtacaaggccacttttgaaaacggcatgtccattgctgtgaagaaactggagacactagggagcgtgagaggccaggatgagtttgagcatgagatgagccagcttggtaacctcagccaccccaatctggttgcttttcagggttactactggtcatcctcaatgcagttgcttctgtcggaatttgtggccagcgggagcttgtatgaccacctccacggtagccatcctcatgctttctctgagagcagcagcagaggtgctggaggtgaactgtcttgggaacagaggttcaacgtcgcacttggagcggcccgtgcacttgcttaccttcaccatgattgccggccacagatcctgcacctcaacatcaagtcctccaacattatgttagatgggaaatacgaagctaagctatctgactatggattggggaagctgttgccgattctaggaagcattgaattgagtagaattcacaccgcaattgggtacattgctccggagctgtcatctccgactttgagatatagcgacaagagtgatgtatttagctttggggtggttttgcttgagaccgtgacagggcggaaaccggtggacagccctggggtagctacagctgtggttctgcgtgattatgtaagagaggtattggaggatggaactgcatcggactgctttgatcgaagcctgaggggaattgttgaagctgaattggttcaagtgctcaaattaggtctggtatgcacttccaatacaccatcaagccggcctagcatggcagaagtggtacagttcttggagtcggttagaattagttcttga

SEQ ID NO: 15388 - DNA, 1029 bp, Zea mays
  Peptide Sequence Number=SeqID_57167
atggcggcgttcgtgcccgagcagggcagcgccaataggctgaccaggccgccggggctgccgccgctgccgcaggcgttcgcggcccagcagcgcggggacgtgtgcatggaggccgtcgaccccgcggctggcccgcgcaaggcgcaccggcgctcccgcagcgacgtccgttcggctacttcccgccggcgggccaccaccagctcccgccgcccaagcagcgagaacgagtcggaggagtgcgccgccgacagccgcgccgggatccgcctctgcgccgccgctgccgacaggcgggaggggctcaagagggccgccgctgcgcccgtggcgcgccacgccaggagcctgtccatggatagcctcatcggcaagctcaacttctccgccggcgcgacgggcgccgctagcggcgtcattccgggacccaacaggttcagcctcgagttcggcaccggcgagttttcgccggtcgagatgaagaagatcatggccgacgagaagctggccgagatggcgctcgccgaccccaagcgcgtcaagagcttcggactgatcgagctgcggtgcggttcgtcgcttgctagggtgctggccaacaggcagtcggcggcgcggtccaaggagcgcaagatgcgatacattggcgagctggagcacaaggtgcagatcctgcagacggaggccaccactctctccgcccagctcacgcttcttcagcgggactccgcggggatcgcgacgcagaacaacgagctcaagttccggctgcaggccatggagcagcaggcgcagctgcgtgacgcattgaatgaggcactgacagccgaggtccaacgcctgaaggtcgcgaccgcagagctcggggattcttgctcgtccagcaacctagcccagcagatccaaatcagcgttcaggaccagatgtttcaactgcatcagcagcaggcaacgcctataccgttctaccagctgcagcaggcgcagcagaatggcgcagggaagaagcatgagccgacggaatga

SEQ ID NO: 15389 - DNA, 1188 bp, Zea mays
  Peptide Sequence Number=SeqID_57168
atggaatcatgcgtgcccccgggtttcaggttccaccccaccgacgaggagctcgtcggctactacctcaggaagaaggtggccgcccagaagatcgacctccacgtcatacgcgacatcgacctctaccgcatcgagccatgggatctccaagggcattgcgggatcgggtacgaggagcaaaacgagtggtacttcttcagctacaaggaccgcaagtaccccacggggacgcggaccaaccgggccaccatggccggcttctggaaggccacgggcagggacaaggcggtgcacgacaagagccgcatcatcggcatgaggaagacgctcgtcttctacaaggggagggcccccaacggccacaagaccgactggatcatgcacgagtaccgcctcgagaccgacgagaatgcgccgccgcaggcaagctccatctccttcacagtgatctaccttaaattacccatattcattagaccaagatgtgtatatgatgaagctttatcatatactgatgaagagccttcaggaagaaggctgggtggtgtgccgagcgttcaagaagagacagcgtacccggcaaaggatggcatggggggaccccagctacgcctaccgcgagatcagcgccatggggcgcggcggcggcggcgttcgtggaccctaacgcgggcgtcgtacgcgcagatcagacgccagcagtccaacaagagcgcgcgcttcaagcaggaggccgagctggacggcggcgccgccgccgcgctgctgcagtactcctccagccacctggtcgagctgccgcagctcgagagcccgtcggcgccggccaacaagagccaggcggcgtcagcctctgatgaggttgtggacgccgccgacagcggccggcggccgggcaagaaggcgcgggctgatgaagtggccacggactggagggcgctcgacaagttcgtcgcgtcgcagctcagccccgcggcggagtgcggcttggaggcggcggcagcgtcgtcgacggccgccgccagcaacgtgggctcccagctggaccacgttgaggatgatgacatggcggcattgctgttcctcaacagcgacgggagagacgaggcggagaggtggacggggctgctcggcccggccgccggggacgacggcgactttggactgtgtgtgttcgacaaatga

SEQ ID NO: 15390 - DNA, 375 bp, Zea mays
  Peptide Sequence Number=SeqID_57169
atggcgcagcgggaggcgcgtgcggcggataaggcggtagctgccggcggcggggagacgagggacgccagccacgtcgcgctggagatgggcggcggcgtgggggagctgcgggcggggcagagtgcgacggcgacggcgtgggcgtgcggggcggccgcggcgggcgtggggctggcgggggccggcgcgctggtgtggtgggcgctggcgttccgcccggcgcgccagcagacgtggatggtgcccgtgggcctcgtcctgctcggcacgccgctcctcgcctggctctccctgtcggcctccggcgcgtgccgctggctctcccgcctccgcggccaccagccgcccgtccgcccgaccccggagcgatga

SEQ ID NO: 15391 - DNA, 429 bp, Zea mays
  Peptide Sequence Number=SeqID_57170
atggcgaacggcggcggctacgtgtgggcccttgcggcggggcttcaaacgccgcgctcgccgccatctccgccaaattcatcgccactctgctcactagtttgcactttactcagtggtcctctccatgcttatagtgaaaacgagccgctcaaatatggcacggtgatacttttcaacgtgacaatgtgggggtgctacgtcaacagcctcaaagctttgtcgtccctccaggcaacagtcacaaacttcgccgccaacttcctctcgtctgggcttgcagggtatttcctgttcgaggagccgctgccttctaagtcttttcttccaggcagacgaacaaagcattccactatttctcaggaaggagtaaaaaaacatttcttatgcgatgatgagccgcatgataagaaaatattttcaatttag

SEQ ID NO: 15392 - DNA, 387 bp, Zea mays
  Peptide Sequence Number=SeqID_57171
atgagctcgtggtgtcgagagccggcagctgagcagagtttaacacaagtgagggagatagctgcgttcagcggtagcgcgtcaactgaggacaagtacgtagtgatgcacaacggtaaagcatcgcgaaaaaatgacgttcttgagctggagcaagatcaggacagggaggcgctggtcgagttcgagcacaaggatgagacagaaacaaagagacacgccggcgtgaaggagctgggagacgtcaatttaagcacgacggcgagatcggcgcacgcaacagagttcgcgagcatagggaggaaccttggctctgctcgggtggaggggcgccgcgtggaggaagatgagcagggacttgacacacgacgtcaagggagcgcgtag

SEQ ID NO: 15393 - DNA, 258 bp, Zea mays
  Peptide Sequence Number=SeqID_57172
atggcgccgacaactggagcccacgtgccagcatctccccgccgtcacctacaagagggccctctctctcagctgttcgacctcaccatgctcgttcccatcgctctcaggatcttcgccaaggcacagcttaagggtcgagggtcacagttggatcttgccttatttaaatccgagcagtcgatcttgcagcggatggataagatcgcataccggttcactaagggttataatctatttttggcccttcaaaactga

SEQ ID NO: 15394 - DNA, 405 bp, Zea mays
  Peptide Sequence Number=SeqID_57173
atgacgaagagcggtgctgcgagaatggagcacgacacaacaggacaacggttgggccatcgccgagccagtcgagcaccgaggaggctttgtgggtacagatcggcgcacgcaacagagttcacgcgcgaagggaggaaccttggctgggtgcgcacacaagggagctttgcggccgaaaagaacttgaccgacccggccgaacagggggcgcggccaagtggaatccgagcagagagcacggctgcgcgcaccagggagctgctcgggtggacgcgcgtcgcgtggaggaagatgagcagggactcgacacacgacgtcgagggagcgcgcagagatggccgtggggaattaaagctgagcaggacgcgaccacgacatggagataagcgcagccggagttga

SEQ ID NO: 15395 - DNA, 519 bp, Zea mays
  Peptide Sequence Number=SeqID_57174
atgggcgcgattaagctaagtccagcctcgggtgccatacgaagctccgcctcgcccgaccccagggctcggacacagcctcggctccagaagacgacgaactccacctcgcctgaccccaaggctcggacacagcctcggctccggaagacgacgaactccgcctcacccgaccccagggctcggactcagcgtcggctctggaagacgacgaactccgcctcgcccgaccctagggctcggactcaaccacgactcagaagacgacggactccgcctcgcccgaccccagggctcggctcccgtctcagcctcggaagacggtctccgcctcgcccgaccccagggctcggacacagcctcggccttggaagacggtctccgcctcacccgacccggggctcggactcgacctcggaagacagactcgacctcgacctcagaggagcctctgcctcgcctgacctagggctcgagccgaccacgtcacagggagcaccatcattaccctacccctag

SEQ ID NO: 15396 - DNA, 339 bp, Zea mays
  Peptide Sequence Number=SeqID_57175
atggtgataggaaatcacttgacttctaccgttctaagccagcctaagcaattaagcatacttaacttaaccaggtgtgggggacagaatcccctgggtccactagaaggcaaaaaccctgcttggggccacaagccagtcgctccgcaaggccgccgcgtcatgggctgggcaaagacagcggtggaaatggttcgacctaggaaggcgatgggctcacatctcgattattcgcggcttgggcgtgatcctgttgaagcttctcgcttttctcgcgcccgatgtcctcaaacgccggggatagctccgaatggaggtgccaagttttcctcgggataa

SEQ ID NO: 15397 - DNA, 354 bp, Zea mays
  Peptide Sequence Number=SeqID_57176
atgcccgacaccaagttcgcgctcaccggcccgtcgcggcatgggcgttgtcgctcctggacggctggactggacaccccgggctgccctgcctctccagtctctacttgtatacatacatgtccctatctttgttcagagaatgcagcccccgaagagaacgttggaagctgtatttttcgagtctatcattttagactgatcctatggaaagtgcaaaaagttcagggaaatgcaggtgccgcttgctctgcctccgatccaacccaacccaaggcagcagcagcagcgggtacgttcttctcggccatgcatggaatggaacgaagaccgcccaccgccggcgccgcctag

SEQ ID NO: 15398 - DNA, 513 bp, Zea mays
  Peptide Sequence Number=SeqID_57177
atggaagccatctttggtagtgaggtagcaactggtaggtttgctatggggtccaatgaaccacttgggatccatgttaatgtagacaccattgacatggatgccgacacacttgtgcaagttgaggaggatgctctatgtgatgatatcaagaatgttgccgagacatctaagaaagagaagaagaaagtgccatatgaggaggcctccctcatgcttgtgttgacagattcatcaagggcttgtcttcaccctgcaatcctagggctatataaagcaattatgggtttcttggttccactagggaggcacttatggcaatttttgggcatctatctgagaaatgatcgggcttgtcttcagttgaatcacaatcaatcgtttcctctaaattttgaaatgggtcatattcagacttgtgaaacaagggtgatcaatttatctttttcacaacttaaatcattcaaactgcatcactcacattcggacatgaactcgatggcggacaagtga

SEQ ID NO: 15399 - DNA, 330 bp, Zea mays
  Peptide Sequence Number=SeqID_57178
atggcgatcttggtaggcctcgtcgccgtcctctccgccctcttcgccgccgcgcttcggcgcctcctaatctcttgtcgccaccccgcatacgccgccggtttcttccacccgtacaccaacgacggcggcggaggcgagcgcgtgctctggtgtgcggtgcgcgccgtgcaggagctttgcccggacctcccctgcgctgtctacaccggcgatgccgatgcggcgcccgaggccctcgccgcacgcgctctcgaccggttcggtgtccgtctcctccgcccgccgcagttgagcattgtgccactttggaaatccgcttcatattag

SEQ ID NO: 15400 - DNA, 999 bp, Zea mays
  Peptide Sequence Number=SeqID_57179
atgtctcagctacatgatgagaaggacgatccatctacttcaacacaaaagacactagatatattctttcattcatcaaacagtaactcaaatggcaatggaaccaatgttcagagaaccactaattccccagggcaggataatgactctattagtctcacaagcaaggaggagtacttggcacctgatgctggaacaagtgtttccacaggccaacaggatttcttcctacatgatgagatctgttttattcccgaacaacaacggagtttagacaacgatactaaagaggctgtcctaagcgacccgttaggtggaacaaagtcagatgatgtgtcttacagtgcaaagcacgtgaaacttgcttttcataaggttacgcccactacgaagttggatgaacctgatcccttggtcagcccgaaggttgtgtcttcatcaagtaaacctgaccagcagtcatggattgatggctacatttgttccatctgtggatttgaactgccttcgggcttcgaggaggagaggctggaacattcagattttcacctggctgaaacactccagcaggaagaagaagtggacggcacaagacacatctcaaacgagaggtcggctgggtcgtcgagcccaatggcaccacctacctcaagatcaattttgctgccgatacatgatagcttaggtagcagatgtgatagatcactgcgagttttagttaacatgttggatatcattattcatagattaaataaatgccttccagtggatgggacatgcttgatcaagcaaccgggcgacacctatgacgacttcgccagctccaagcccgacagcgagtgccactacgtcgtcttcgacttggacttgaacaatttttatgcctgtgggagcagtggcgtcagtttgagtgcatttgcattcttgttctctgagttggttcagtacaaccagactcaagttgacaacattactgagctagaacggaggctagaatag

SEQ ID NO: 15401 - DNA, 321 bp, Zea mays
  Peptide Sequence Number=SeqID_57180
atggatggaggcaacatctggaggtgtcggggctggcggcaggcacaacgtggctcctgcggcgggggacgcggacaggcgtggagctgcatctcagccgctcagggggaggcggcgactgctgcagatcccgggcatcacggggtgaggcgaaggcgtgttggtggggagtgggaggttgctcatgactcccggatgaggttggcgatgttggacatgtgtggcatgtggcggatgcggatggggcgcgaggtcggcctgcgcgacattcggccaccggcggcggatgcggatggggcgaggaggaccgatgacggatga

SEQ ID NO: 15402 - DNA, 396 bp, Zea mays
  Peptide Sequence Number=SeqID_57181
atggggaggaggaaggagcacctagagagagtccgagtggaggcgtactgcttggacgtgttcaagccagtggagatggtggagatcgatagcatggagaagcttgacgacgcgttcagttgttctttcaaaaaaattggaataaaagtcattttggaatcgtgtggttctattgctgctagcttagggaagcactcggagatgaagctgaagcagagcaaacgtgagacgcaccgtgggcattctctatccaaggggaagaaacctttatgcgtattttgtggacttgctcctactaaggttttgctatttgcaaatttatatagatcagtctcaccattcaaaaagtgcttggatgaaagggaaaaagttaccattcaaaaagtgcttggatga

SEQ ID NO: 15403 - DNA, 657 bp, Zea mays
  Peptide Sequence Number=SeqID_57182
gtgtaccaagacaagagggttcccctggagaagaccaacaaccacttcctggttcttaatttcagtggcacagttccgccccagaaaagagagtcaagtccttttttggcccatggccttcagctggaggcatttgcacttgctcttcaaaagctagaccctgactttcctaagccaaagattcaatttgtcggtagttgccggaataaagaggatctggacagactacaaaagcttaaggacaggtccactgaactacacatagatgagcttgtggagttccacaaggatatttcttacagggacctggtacaatttcttgggggtgccattgctgggctccattcgatgacagatgaacatttcggaataagtgttgttgagtatatggcagctggagctattccaattgcacataaatcggcaggaccgatgatggacatcgtgctagatgaggatgggcatcaaacaggatttctagcctccgagaaggaggaattcactgaagcgattatcaaggtcttgaggatgccagagtcggggaggcaagaaatggcagctgcggctaggaaacgtgcacaaagattttcagatcagagattccaccaagatttcactgagaccgtccgccctattttgtcagcaagggaaggctga

SEQ ID NO: 15404 - DNA, 1497 bp, Zea mays
  Peptide Sequence Number=SeqID_57183
atggcaagagtgcaaaagaaaagtggctcaagttgtagtttttaccgaaacctaacaaaacaattgtggcttcacttttcagctgtgtatatcataactggaattacatgctacctactgtatcatgagtacaaatatatctctggcaagaggctagagtattttatgatctcaaagccattacctcagcacttcacagttcttgttcgagctattccagtatctgatggtgtttcagtgggtgatgctgttgataagttttttaaagagtatcatgcatccacgtacttatcacacacaattgttcgtcaaactggcaaacttcgccgtcttctgaacgatgctgagagtatttgtacaaagcttaccaacttaaaccatgtccgacggtcaactggagatcctccaagaaaacttggattatttagcagaaatgatcttgttggagaataccagaaaaggctggaagaccttgaagagaatgttagaatggaacagtcagatgctactaggagacaggaaattcctgctgcctttgtttcattcagatctcgatatagcgctgcaaatgcagtttacattagacagtcagacaacccaactgagtggcaaactgaggaagctcctgatcctcatgacgtttattggcctttcttttctacatccttcatggaaagatggattgccaagtttgtagtatttgtagcttcagttctcctgatacttgtctttctcctagttgtggcatttgttcaaggactcacctatctggaacaactagagaagtggttgccttttctgaggaacatactggaaattgctgttgtgagtcaactggttacaggatatcttcccagtgttattcttcacgttctttcatcttgtgtgccctcaataatgaagttattttcaactatgcaaggatttgtttctgttagtgggattgagcaaagtgcttgcaataagatgcttcggtttacaatatggactgcgttctttgccaatgttctcactggttcagccttagttcaattcgagattttccttaatccaaaggagctaccttcaaaacttgcagttcttgtaccagcgcagctttttaatgtatatgcgccaaagtatgatactggagggaaattttggcccgttgtgcacaacacaacgatattctctctggttgttctgcatataattgctattggagtatttgggataaagaagcttccccttgcgtccagtttgctacttcccctaccaccgctgacccttctgttcaacgaattctgccggaacagatttctgcctatctttgaagcatactctaccgagtcattgctaaagaaagatagagaagaacagagcaaaccagatatggcggagttcttcagtaatcttgtaacagcttactgtgacccagctctgaaacctttccaacgggcttctaactccgacgaacgcaccgcgccgctcttggcctctctgtctagctccagataa

SEQ ID NO: 15405 - DNA, 189 bp, Zea mays
  Peptide Sequence Number=SeqID_57184
atgggataccgcttcgcgcacgcgcgccctgtgtccggacccacctgtcggtcgcctgtgcccctggcaccgggcccggccgacaacgagcagtccgtggttcctgagtgtgttgctgaagatgttcctgagcaacaacctggtgaaggcaagtgtcctctgacctattatgtcctacttactctataa

SEQ ID NO: 15406 - DNA, 786 bp, Zea mays
  Peptide Sequence Number=SeqID_57185
atgactagaccaattcggccggttacctcgcgagcgcggctaaactccggcgaagctgaagttggacgacgacaaggcataattgagggaactgggcatgggaacgggtgtctcaccttggggcgaagctcagggtcgcttggcgcggcgtctggcggactgggtgatcggtacggcgagcgcgggtctccggcgaggccgagcggcgaaaggcagagcgcaagagatagtgggactgtgcgtaatgggatggggaagcgagtgcgggtgcaggcggtgctcaaaagggagctgggggcgtgggcgagcgacgtggccggggatcccggcgaacgtgcgcgagtgcgcacgtgctggtccacgatgggtcgcggggaaggcggagctgacagggcgtcccacggcgtggcgagagagagcaggcgcgcggtgaaacgggtcagtgagttgacaaggcaggccctgcgaggcagagaggaagaagggtgcgcgggcgagggcgactggtgccgagagagcggccccactgggcagagggagaggagggggcacgcgggggggactgccgctgataggtggagcccacctgtcaggcgacacgggcgcacggttcaactccccttgccgccggcgacccccgcgcctaaattcacgctggcaatgcgattcgtgcccactggtgcccggataacgcctcgggatgaaaagatcttcaccgcggatgagcttgagacactgttccgccctggccgccgtgtccgcttgactcacggccagttcagataa

SEQ ID NO: 15407 - DNA, 273 bp, Zea mays
  Peptide Sequence Number=SeqID_57186
atggacgggcttgctacacaggttcactgtgacgtgctaagcttccaagacgcgtggcgcacgatcgttaagcggctaacgccggtgaggatcatcccggccagccgcagtccaagtgggttcgtggtggcgaagaacgttatcggtcaaggtcctagagcggtgctgcgaatggaccagaagtccatcgacgaggagagaggctccaccgggcaccagacggaaaatgaggttaatttcttccagaaaggcgatacttggtaccctgattga

SEQ ID NO: 15408 - DNA, 1344 bp, Zea mays
  Peptide Sequence Number=SeqID_57187
atgatcacgatcatcagatgcatgggtgcaatggaagttctgacgaccttacttttatcagttgcctcactgcacagctcggcggcgtcaccgccattgggctaccgctccacactcacccacgttgactcccatggcagcttcaccaagaccgagctcatgcgccgggccgcgcaccgaagccgccaccgagcatccatgatgctgtcgcgttatttcacaatgtctaccagctcggatgcgggacccgccaggctccgctccggccaagccgagtacctcatggagctcgccatcgggacgccgccggtgccatttgtcgccctcgccgacaccggcagcgacctgacctggacgcagtgccagccgtgcaagctctgcttcccgcaggacacgcccatctacgacaccgccgtgtcgtcgagcttctcccccgtgccatgcgccagcgccacgtgcctgcccatctggagcagccgcaactgcaccgctagtagctcaccctgcaggtaccgctacgcctacggcgacggcgcctactcggccggcgtcctgggcacggagacgctcacgttccctggcgcgcccggtgtctccgtcggcggcatcgcgttcggctgcggcgtcgacaacggcggcctctcgtacaactccaccggcacggtcggcctgggccgcgggagcctgtccctcgtggcgcagcttggggtcggcaagttctcctactgcctcaccgacttcttcaacaccagcctgggtagcccggtgctgtttggcgccctcgccgagctcgccgcccccagcaccggcgccgccgtgcagtcgacgccactcgtgcaaagcccctacgttccgacgtggtactacgtctccctcgagggcatatcgctcggcgacgcgcgcctgccgatcccgaacggaaccttcgatctgcgcgacgacggctccgggggcatgatcgtggattccggcaccaccttcaccttcctcgtggaaagtgctttcagggtggtcgtcgaccacgtggccggcgtgctccgccagccggtggtgaacgcctccagcctggacagcccatgctttccggctgctacaggtgaacagcagctcccggccatgccggacatggtgctgcacttcgccggcggtgcagatatgaggctgcatagggacaactacatgtcctttaaccaggaggagtcgtccttctgcttgaacattgctggtagcccgtcagctgacgtttccatcctgggcaatttccagcagcagaatatacaaatgctgtttgacatcaccgtagggcagttgtcgttcatgcccaccgactgtggtaagctatga

SEQ ID NO: 15409 - DNA, 390 bp, Zea mays
  Peptide Sequence Number=SeqID_57188
atgggtggggatagggcggccagcatcgggcggtccccggggcagccgaccgcaggcggggtagtcgacgtcgatgcggtcattggcgggtggggtcgggggctgtcggtgtcgagtgaggccacgggcgaggatagggtggccaacgtcgggcgatcccggggcagccggctacgggcgagttgtcccttaaaattagagcgacgaaagaggacgctaagagacatttctgtcctgtatgtcctcggttgtccacaaccaaacacagaggcctggggcgggacaaaaatagaggccacattgacaataaacatattaagattatacacagttgcaactataatacatcatgaaagttaccagcaaaattataatacgaagatcatttaa

SEQ ID NO: 15410 - DNA, 698 bp, Zea mays
  Peptide Sequence Number=SeqID_57189
acgggctgccacgcgccacgcaggccgtcacgagcaagccgcgcgggctaccgcaggcgagctgggacgccagggggcgcgccacgccacaacgtcgcgggcgagccgcgcaagcaggccgccgagccgggcggggctacgcaccacgccgaagccacgacggggccatggccgcgcgccagcagccagggcgggcctgcgcaggacaccgggggcccgcgccgggcgccacggccgagctccggccgccatggccgagccgcgccatccggccgaaccgtgccggggccaaccgcgggcgggcgcgcggagaccgcgccacgacgggcgcgccgagctgggcgcgggcgccggaccgagccgagcgcgggcgagccatgtcgccgcgccatggccgagcgctggccgagccgcgccgcgcacgcagccaagccgaggtcgcgcgcccacggccgggccggtgcacgcacgccgggccgcgccacggcatggggcacagcccgcgcgagcagggggaggtcgaggccacgccggggttggggcacccgcgcgcaacggagaagaagggaggggaaaaggggaagggaagggggaagatggggacgagctcacctcggcgaatcccgaacggccggcgggacatcgggcgcacggcagagctcgacgatcggcgcgacggcgattttgcgtgggcgtga

SEQ ID NO: 15411 - DNA, 219 bp, Zea mays
  Peptide Sequence Number=SeqID_57190
atggagatggttgatagaactacaactttgatgcagagggatgatgatgttgccaaagaaagtttagagataatctaccctaaacatcatatgtctggcgttctgaacatgactctcatggtaccgatcagatcaggttccgtaaacctcaccgccgatgatcgtcgcgctgtgattcacgatgatcgtcgagattcgtgcgctgtggattgtggataa

SEQ ID NO: 15412 - DNA, 456 bp, Zea mays
  Peptide Sequence Number=SeqID_57191
atggctccggcttccgttccagctctacctacagccatggatactaaggacgagggcgacggtggctccaagaaccaaaacagcgtggtggtggtgaaatccgaggttgtctgcacgaatggtggccctctggtggtcgggactgaacttgtgaaatacgagggaggtgataccactgaatgctcgagctcgtttggtgacacctgctctggatttgaaggtgaggcagacaatggtgaaccagaagtgaattctagcctgtctgctcatgccaatggtgttggcccctcaaaaccccctagaagtattatgaatttacaattatgcttgttcaaccaggactttgtttcagctaccagtctgtatttggaaaagaagtttccagcttgggattcaaacccaagccagcagcaacaacaacaatatagcattttagttacaagcatgttggggtag

SEQ ID NO: 15413 - DNA, 1376 bp, Zea mays
  Peptide Sequence Number=SeqID_57192
ttgatggtagtatcagtggtggacttgattcaaatacattgcttgattccgaggattatgatatgatttgtgagcaacacggtttacaggatattctcctgacaattgatgggcttcagtctcgagtccatctgctgcaagatcgtctcagcaaagctcattctgaaggagaaaatttggcattttctggggccgatactgatgtcagagtggctgggaagagacagcgtactcaaaagcactcattctctaatacaaagtctcgacatactaaaccacagaaaaggaagaatctaaatatcttgctgaaggatgatgatgatggacaagctcttgcaggcggacctgctttggctgatggggaaactgatgtgcatatgataggtgctagtaggagtactgaagaaagaagtggagagtgcaatcactcgagggacaaagccatcacagtggacctactgttgggtactggcaattccataacaaatagtgatattggggatttatacaatgtaaacactgatgatgtcctcatagccaatcaagcagccgttgaagcttgtcagcagtttcatgaggcaaagcatctgccttctggaagtccttccaaagacaagatcatttctgctccagcagaaatgaagaataattctccaccagtggaggtgaagaacacttgcggtccagtaaaaattgagagcttgtgttctccagttgaaggagaaaacacttctgatccagcattggagcaagaatcgttccttgaaaagtcaccctcgaggcagcctgtatccccggggaacaagcaggagctgaaacctaagaaaagacggaagaagaaaggctctttatttactaagaagcagcggaaggtggactccagaacacctgatgcaaaggaaaaaactgagggcacgccctctgatgtagcagaggaaactgagagcccactctctggtgcaacaggaccaggaaccatgaggtcttgctgtgctggaaagaagcgcaaatctggaaatgaacctgcagatgcaaataaaactgggaagccatcctcagcagtgaagaagcagaaaactgaaaacccgactgcagctgcaaatgcgacaaagaagcgggccacggagaagaagctagagagcgcgagtgcctcccagaagctgcaggttgagaaagctgtgcttgtcgctgtaaatagcaggaggagccaaaggctaaacagcctgcgcaatctcaaccttgattgcaaatggtttctgtgccggtgtagcatagaagcagtggataccatgaatgaatggatccagctacttccccgctgcttactgtgccagccttcacaccagattgtcccttatatgaatgcttactattag

SEQ ID NO: 15414 - DNA, 345 bp, Zea mays
  Peptide Sequence Number=SeqID_57193
atggtgagcaatccctcaaaagcatcatactgttaccctctacctattaccgccttcggatcggagttcaggaataggaatcgaagtttgggtggtcgcgaccacggcctccgtcgtgggtctcgggcggccgccgggctcacggttgttggggggatccttagcgtgcggccatgggatcctcgatggagggtctggattagatcggtgtatgggttagatgtgggtgttggtgtgtcatcgtggtcgttggatcctgcgatggacgactgcgatttgatcacatcataccgattcgactgtgtgatcgggaccgtcgacctatgtgagcacggtgaagattag

SEQ ID NO: 15415 - DNA, 369 bp, Zea mays
  Peptide Sequence Number=SeqID_57194
atggcgcgcgcagccctaccgcggccggtctcctccccagtagcactgcggccggactcctcaccgtcgctgctggcatcctccccgctgtgggcatcttctcccgccacagtgacggccccccattcatcgccggccgtgagccacttcacggggtccctgcagctgccctcgctgcgcagcagcgcccccggcgctccccgccgggcttccccgctcgctcatcaccctgttcttactgagcccgcatgggccgacctggcccctctgcctgcctcctccgcgttggttgcggccctcgccaccatccaggaggtcgtcgccgcgtccctcgccctggagcacgagcatgccatggcgccgctctaa

SEQ ID NO: 15416 - DNA, 773 bp, Zea mays
  Peptide Sequence Number=SeqID_57195
ggaaaatagagcagtcaacaaaagatgaatgccgggaagttttcagtctctggattaagctcgtatgtctattctcatacttgaagatatttctcagtgctacttttcatctggagggtcatgatcttttgaagcaggagtatgatcgatcaaaaggcgcctccagcacacctgattctggtgttcaaccaggggctacaacaaacgaggaaagtgccgtggaagtagcagttccagtggcaagtattctggagactagatttggtcttcctgctggttcttgctcacctatttgtgaccatcatagttctactaacaagacccccccaggtccaaatggatcctcatgggatctggacgggcagttcagggtacagcaaagaaagcatagagtgggtgcagaagcgcctcagcttactaagcgaggagatgcagctcgcggaggcacacatggagacgatgaggcgcgagtttgcctggctcaggtcttacctggagagactgcagaggacgcggggcagcacatgacggcggcgcgtgtacatggcacaggggcacgagttcgctacgcgaattcggaggtgtatacaaatacaatacaatacaacccggaggtggtgttcagtgtttcttctgttgttacagatggtacagatgcaaacagagagaggtggattgttgtttgcagaggtatttgccgtaaggcagaactgcaagatcccggtatagcgttcgatgtaaatagctggagcttccccattgcgctggggtga

SEQ ID NO: 15417 - DNA, 549 bp, Zea mays
  Peptide Sequence Number=SeqID_57196
atgtcgtccaacgcaatccccttccccacgcgttgcaccactagagccatcaccgtcgctcgagccactcgagccgtcaccatccttcccccatgccttgctccaccatcccgcgttcaacgttgcccttccccacgtgatccccttacccacgagctatgccaccatgtcgtgcatcaacgcgatgctatgaaaccacgatcagtgcccaccggtaccgccccgctcgccccacgtgtcgtcgaacgctctagtcatgacccccctcccgcgcagccgcgaccgcccctgctcctcctttttgcgtgcgtatgcctccctgtagctccgattcactcgctacgcgtacttaagcagttttttcgtgagaaggataccatgctcgccgacatggtgattggggagcttgtcaaggtgttgaagattacacctgtacctatcgtgtttgcgtcatttttaggagggtcaaaagggtgcagatacaaggttcttcaggttagacggaaagctctaacccttaaccaaaataatttctctcattggagttaa

SEQ ID NO: 15418 - DNA, 1329 bp, Zea mays
  Peptide Sequence Number=SeqID_57197
atggccgcacccgcggttgcctccccgagccgggcgacccccaccgacatccccaccgccgcgccctctcccgcctccccgccgcgccgccttgcgtcggcgccgcccgccgtcgacgcgtccgggtcctcctccccggcctccgcccattcgggggaccagctctccgcccccgacgcctcgagcccgctgctcgcgagcaggagcgaggagtacaggcttctgttccggctgccgcccgacgaggttctcgtgcaagattttaactgcgctgtccaagaaaatattcttcttcagggacatatgtatttatttcttcaccatatatgtttctactctaacatatttggatatgagacaaagaagtgccctgacattgttcctgttttccagaaaacaatacctttgcaagaggtaactgatgttcgtaaagcaaagacagctgccatttttcataatgccattgaaattgttgctggtagtagaaggcatttttttggatctttcttgtcacgtgatgaagcctatcgaattatagtagatggctgggaacaacatgttagtgatgcaagattgctccttgaacgtcaggagacaaagtcagctagtagcagtgaagaaaatggttatgttgtattggaaggaacaaaggaatctaaacaagatggagatttatcactgccggacaggtctgtcaacagtacagctgtctcaagtagcaatgctgatggtggtgattcgaacatcaacatttccaaaaggttttcagaagttgaggagaacggacttgaagacaacatcgtcgcgctaaacccattcaatttggagccagttgatgctcctcctagtgtacctgaatcttacactatgatctcggagtcgaagtttcaggtgcctgtggaggttctctttaatttcttgttgtctgatggtgcttttggctttgtggatgatttccacacaaaatgtggtgacaaagaatttagttgctccaaatggcgtacagatgagcaagggggacttgtaagggatgtctcatttttgcatccaataaaaatttatcttggtgcaaaatttgggacttgtcaagaggttcagaaacttcgtctttacaaaaacaggcgtctagtcattcaaacctctcaatcaataggtgatgccccatatggggaccattttactgtagagggcatctgggatgttgaacaagatagcctagatgagaactgttgtgacctcaggatatacatcaatgtagccttctcaaagaaaacaatatttagagaattaacccctaccaactctagtttgtgcaagaaagtttgttaa

SEQ ID NO: 15419 - DNA, 267 bp, Zea mays
  Peptide Sequence Number=SeqID_57198
atgggtgcatctaccgccatgggagcgctcgagcaggcccacctcgcggccgtcgcttgcgcatgcgatgatgatgagcaaaacgactacatcgacctgctctcaggggacaccgcggtgacggggctacaccgtggagccaatggttatttgcaaatacccaagcagaaagttatatgcacactgactaactgtgttgaatgcataaagcaggcgcacaatcacacctacctgtatggcactttggctattctttttcctttttaa

SEQ ID NO: 15420 - DNA, 579 bp, Zea mays
  Peptide Sequence Number=SeqID_57199
atgggggagaggagatggagcgaagcccaggttcctgccgatgccgctagactcgagatcgacaaggacgagaacggggggcgagatggtaggtgcgtatgggtatcgcgcggtgtcggcggtgtctcaagcacaaatttgatgtcggttttcagttttctacttacccgaagtccccaggtgctcgcaccctaccttcggcgtgccctccctgcctgcttcgctgccgcgcggccgcgctgcatgcgttgcttgcgccgtcgccggcccctggtcgtggcgcttggaacggcattcacggacgacgtcgaggttgttacgaggatggggggttgcggatccccggcatcacggacgcgcgcggcgtggggggagcaggggagggggctgggggatggggggttgcggatccccagcatcacggacgcgcgcggcgtgggggagcaggggaggggtctaggggatggggggttgcggatccccggcatcacggacgcgcgtggcgttgggggagcaggggcggggagggggctggatggcagctatgcgcaggggaccccggtatcgtggacgcgataa

SEQ ID NO: 15421 - DNA, 675 bp, Zea mays
  Peptide Sequence Number=SeqID_57200
atggagcagaccttcatcatgatcaagcccgacggcgtccagcggggcctgtttcttgcgcagatcggggacatcatcagtcgcttcgagaagaaagggttctacctcaaggttatacgcatgaacttctctgctgttgaggcaagatttgatgtgcagattctgtctaatcgcgaagtggacaagaaccacagatcagcactgctgttagaaaagaaaagaaaaaagaggatcctaggacatggattccaaaagcagatattcctgcccaccgtttgtgcctttcaccaggtttcgaacattccctttccatttcagcgtcaagggatgaagttcatgaacgtggagaggtccttcgcgcagcagcactacgctgacctttccgacaagcctttcttccccgggttggtggagtacatcatttccggccccgtggtggcgatggtgtgggaggggaaggacgtcgtgttgactggccgcaggatcattggggccaccaggccttgggaggcagcccccggtaccattcgtggggactacgccgtggaagtcggcaggaatgtcatccatggaagcgactccgtggagaacgggaagaaggagatcgctctctggttccctgaaggtgtggcacagtggaagagcaaccttcatccctggatctacgaggcttga

SEQ ID NO: 15422 - DNA, 495 bp, Zea mays
  Peptide Sequence Number=SeqID_57201
atgccggcgccacggccccgcagcggccaccgtggccgccttggcgacgccgcggtcggagcaggacatcgtcatcgtcggcgcgggcgtcgcggggctggccacggcggtggcgctgcgcggctcggcgtgggcgccgccgtgctggagcagggcgacgccctgcgcgcgggcggcacgtccctgacgctgttcaagaacgggtggcgcgtgctggacgccatcggcgtcgccgacgagctccgccccaagtacctccgcatccaggggtgcgtccctcttcctcttgttgcgttccacttccagcaagatgccgttcgtggatcatccttgcaggaggtacgcgcggtggagaggagagcgcttctcgagacgcttgcttctaagctgccaccaggcgccatatcgttctcgtcgaagctgaaatcgatctcggagcaagggcgtgcaggcaccctgctcgaactggaagacgggaggcagattcttgccaag

SEQ ID NO: 15423 - DNA, 576 bp, Zea mays
  Peptide Sequence Number=SeqID_57202
atggcgtcggcgtccaaggaggaggtgatcgggaagctcaacgtccgcgtggtgcggggcaacaacctggtcatcgccgacccgctcacccacaccagcgacccctacgtcgtcctccagtacggcgctcaggtccatgtccatccgaccatccccgctccgctcgccttctccctcttcctctgccatctggtctcctttttttcccccgcagcattgcctggctggacctccgcgatcgacggggactcgttcgcagttgacgacccgtgccgtgcgtggtccacggaagtttttgatgaagacaagttcacagcagacgacagcatgggtgttgctgagatcaacattactgacatctacgatgctgcgaagctggacctgaagcacgcctctgatgggacaaggatcaagacgatctaccctgtcggagtaaactaccttggcggcgagagccatgttcagtggaaggatggcaaggtggtccaggacttgattctgaagctgaggaaggtcgagagtggcctgattgtggtgcagctggagtgggttcatgttcctggcgtgaagctgtga

SEQ ID NO: 15424 - DNA, 243 bp, Zea mays
  Peptide Sequence Number=SeqID_57203
atgtcgccggaggccggagctgttcgtgtacgctcggcagcggcggcggcgaacggacgccagaataatgtattgcaagaagttgcgagaatgcgaggtcaggatctgagctggcacgccgggcacctacgactgagctggctggggaggagtgaggtcgcggcgcgggtgacaagtggcaaggcgggtgagctgcttgttgtcgacagcagccacagtcagacagcagcagcggctgtttag

SEQ ID NO: 15425 - DNA, 606 bp, Zea mays
  Peptide Sequence Number=SeqID_57204
atgagcagaaggcttggtattgaagagcctcagttaatgaagatagtcagaacaacaatccatacacacactgaatggtttaagcttcagatgtgcaaggaccgttttgagcacttattgaagattgattctctaaaagaggttgatccatcattggggagtcaccgtaagtccaaggtccttacagatgaatgtgcaaatggatcatctcaaatgacaacatgttcaagtggcaaggtgccagatgaaggtagtagccctcaagtctcatcagaagttgcctgtgatgaaaatgctatactgaaggttatggcacagccgagtcgtacgccatcccccttcctctattcctccctttttaccgcgaatgacgagagagagacacggtgggaggagaccggagggtacacttgcgccattgtcgtcgaccgcgccgtggccaagctcgccgccgtcaccctgacctctgaatggggcttcctcggcgaggtcaccaccgccctggggttcgccgatgtgatttggtgggcggcgtcgccaggtcgcgacgcagatagggttaggcagatcgtgtccgtcggttgtgcggtctacggctctgattag

SEQ ID NO: 15426 - DNA, 408 bp, Zea mays
  Peptide Sequence Number=SeqID_57205
atggagctgcggcgagcgattccggtgaacccagccatcgttcttgcacgagatgtcgacgaggatcatcgatgtgaactcgcgaagaccagaggcaggggcgacgaagcgggggggcatgtctacgtcggaggcggctccgcgatgtcatggaataggtccttggaaccggacgaggacctccggcccgagcttaggcggttgggggtgagggcatggcgagcgccgagcgccatggtagaggagcggaaccaccgtagaatacaggagggagaagacggccctgacgtcacgggcccaccatgtggtgagacgaatccggcacaactgggagcacaggcgcaagcggagtcaagtctagagctgaccggtggggcccgcggttggggttactgggccgcacggtag

SEQ ID NO: 15427 - DNA, 240 bp, Zea mays
  Peptide Sequence Number=SeqID_57206
atggacatgttactattcactgccctgtgcaccggaaaggttactattcactgtcctgtgcaccagaaagagacgaccgatcaagctaagcatggaggcaagaagagcttcgaggtatcgagtgcacagaagaaggtcaaggagaccaggaacccaaagccaggggtgaagaagaagacttgtaaagtcaaggttgatcgagttacgaagaattatggtgcatcaaggatcactacataa

SEQ ID NO: 15428 - DNA, 294 bp, Zea mays
  Peptide Sequence Number=SeqID_57207
atggcgcctcctgttgatgtggctggtccatgccctaggttgggcgatgtggaagctcctccgaagccgaggtcgagtctgtcttccgtggctgaggtcgagtccgagcccctgctttgtgctgatgggggttaccagctgagaattaggagccttgagggtacccctaattatggtccccgacagatacctttggcttgctcgaagtctatgccaaagctaatggaagcttcggcgctcgccatcgctgcttccagacgagatcttcgtcttaaggagcttcgacagaaatag

SEQ ID NO: 15429 - DNA, 354 bp, Zea mays
  Peptide Sequence Number=SeqID_57208
atggataatgttgtcaatctccggatccacaaggcagcaccgaccacaccccttttctcttcacagcttgctgcttctatgcgagactacccggtgacttcgagatggcaaggaagggtctgcggggagcaccgtggccggtccttattgcccaccccaacttggattagttggcgagattcccggagggtcgccgaggtggccacgattattgtattaattggaacatggagaaccacctgggaaaacagtgctaccacaagggtggaatggtacgcccttggccatgtaattagaaaagctagggagagattaccttacccgaaaggggcaagcggggaggcatcactttag

SEQ ID NO: 15430 - DNA, 672 bp, Zea mays
  Peptide Sequence Number=SeqID_57209
atggttttgaagacgcgggtcatcgacgatggcccgaagctctcccgcttcatactcagcggcttcccagattggaagattgagctgacaacgtgggggtcaccgggcagagacagaccaaggcacgtgcgctggtgtggttggctcgagagcgggcccggcttgacagtgagagaaggaaagagtgaagtggagtgctgcgctgacgggtgggaccccagtgtcggcgccgatccatccaacaggctgcgtgggtccgggaagcccaatgcagggatccctcatgtgaccgccatcgcagcaaaattagcccgaggacctccctacaccaaccactccccttctgcccttgcccctttcggcgctttcctgcccagcgcgccgccgcctaaacacagaccgccgccccgccgactgctacaccgccaccgctacaccgcccaaggtcggctcgccgccgccagcccgccaaatcctgtcctcggctcgccgccccggagacaaacctcaccgcgctgtcgccctgcagccaacgccaaccgcgccgccgccagcacctcgccgccgcaaggccgcccaagctcgttctctgccatcgtcctccgcggtcctccgcggtcgctagtcatcctccgccgcaaggccgcccaagctcggctcgcctccgtgtaa

SEQ ID NO: 15431 - DNA, 216 bp, Zea mays
  Peptide Sequence Number=SeqID_57210
atggcgaaggactcgatgataaattggcaacccaggctccccattcacaagaatgtcatctacaagataaaactaccaggtaatgccattttaggtgaaggaaagccagaaaaccagaaccatggtggaacttggaagcacatcgtgttgtgcatggtggaacttgcggctataatacactgtaaatcttttatggttgctatggtgattggatag

SEQ ID NO: 15432 - DNA, 307 bp, Zea mays
  Peptide Sequence Number=SeqID_57211
atgccgggggcacgtcgcatgggaacacagacagccacgccggggctgcgctgccgaccctcgcgcaagccgtgccggggcacgccgaccgcaggccgcgccgtgctcgagcaagctgcacgcgcgccaggggctagaccacgccacgccgggagcatggcgagccgcgccaagacgctgtgcgccagacggggccgcgctgggcaacctgtgcaccacgccaggggccgggctgtgccagggccaggcgtcgcgagctgcgcgggcgcacgagcgccggggcgtgcagaccaggggcgtgagggag

SEQ ID NO: 15433 - DNA, 2286 bp, Zea mays
  Peptide Sequence Number=SeqID_57212
atgcagggtgctcctcctgaccagatgggagcaagctatcctcacatgtttttgatcctcttgctgcttcgtggagccaatgctgctttgaaatctccagcagggccgaaatggcagactctgagcggcggtccccctctagtcatagctcgaggaggattctctggcgtgtttcctgactcgagccagtttgcctaccagtttgccttgactgccagcttgcctgacgtcgttctgttatgtgatctacaattctcaagcgaccatataggcttctgcaaaacagggttgaccctggataactcgacgactgtctccgagaggttccccaagatggagagaacatacaaactgctcggagaggacgtccatggctggttctctctagattttaccgcggagcagctggttcagaacatcacattgatccaaaacatcttctcgcgcccaagcacatttgatgactccttggggatgtacacgcttgatgatgttgttgaactccacccccctcaaatatggcttaatgtacagtacaattcgttctttttggagcacaaattaagtagcgaagattatatattagaactgccaaaagatagcctctcttacatctcctccccggaggttgaattcctgaaaagcttggctgggaagctcaagaaagccaagacaaagctcatcttccggttcctcaatgaaaacgtcgaggagccttcgaccaagaagacatatggggaactcctgaaagatctgaaatccatcaaggcattcgcggctgggattcttgtgcccaagacatacatctggccgctgaaaaaggatcagtacctggcgccatccaccagtctggtcaaagatgctcatgccctcgggctggaggtgtatgcatccggatttgccaatgatatcgtcttgagctacaactacagctacgatcccagtgaagagtacttgcagttcatggacaatccagacttctctgtggacggtgtgctcacggacttcccgtccaccgcatcaggagctgttgcttgcttggctcattccaagggcaatcctctaccgcctcctggaaaggacaccaggccgctgatcatcacccacaatggcgcgagcggcgtgtttcccggcagcacagatcttgcctaccagcaggcgatcaaagatgccgccgacatcatagattgcacggtccagatgtcgaaagacggaacggccttctgcaagcactccgctgacatctccagctccacgaccgcgtccgtcgctttcgcgtccaaagcctccaccgtccacgagatccagaataagtctggcatcttctcgttcgatctgtcgtggagcgagatcgcaaccttgaagcccagcatcatctcccccttcgctcaggcaggcatgttaagaaatcctgcagcgaagaatgccggcaagctgatgactttgcccgaattcttagacttggccaaggccagcaacatcaccggtatactgatcgaaatagagcatgcttcctacctcgccaagagagggatcggcgtggtggaggcggtgtccagcgcgctgaccaaggcgggctacgacaaggagaccaagcagcaggtgttcatccagtccgatgactcgtctgtgctcgcggcgttcaagaagttcgccaggttcaggagggtgctcaacatcgaggccaagatcagcggcgcctccaaaccgtcggtggatgacatcaagaagtacgcggacacggtgagggtcaaccggaactccgtggcgcagatcaatggctacttcctgacgcacttcaccgacacggtcagcagcctacaggacgccaacatcaccgtgtttgtcggcgtactcaagaacgagttcatgaacctcggcttcgactacttcgctgacccgacggtcgagatcgctacctacacgttggcggtgctggctgatgggctcgtcacggacaaccctgccactgcagcttcctacttcaggagtccatgcagtgacatgaagctgaacctgagctacacgatcctgcctgcacaacctggcgctctggtcaacctggcatccccgggggcgctggctccggcgggagcgccggcaccgttgctccaacccgctgacgttgtggacccgccgctgcctccagttaaagctgtgatcgccgccgacgcgccggcgccaggggcggctgacaacacctcctcggcgttcagctccagcgcggggaacggcctcttgtgggctggcatcgctgccctcttgtccctgacctttctgcactga

SEQ ID NO: 15434 - DNA, 438 bp, Zea mays
  Peptide Sequence Number=SeqID_57213
atggcccgaatccgctccaaataccggtatgaacccgctttgtgcgcaacggcgaaccccgacagctggacacagggtcgcaattacggcgaactcctgagcacggcgacgacggcgctaatattcagctcctcaccaactctctatgcaacactacgaccaagacgaggggaagggggagaaaagaacggcgagctggttcttatgcacgaggccggcgaggaactgaccaaagggggccaccagtcagcgcaacaagagatgggcgcagaattggcaaagcgggctcagcagtcatccggtcactacccccgtgggcacacttgttggcactgcggcacgtgcgcgcccgaccacgcgaggcacgacagggggccgcctggtgaagagcaggtacccccgaaggaagactactatgacgagttcaatgagatctag

SEQ ID NO: 15435 - DNA, 414 bp, Zea mays
  Peptide Sequence Number=SeqID_57214
atggtggcggcagttcacgcagagatgcaaaccacgacggagggggaaagtcgtcgagcaatcgccactgattttcggccacaagagctcaacgagaacagcagatacgatccacccgagagtgcaaagctatctctcctacaagttccaccggagcgacggtggtccctagttcacccgcggcggtactccgccttctctcttctctcggttcacggagctggcagtggaatggagggacgtgcaatggccgaggcgccgggaggatatttacgcaccacgcgggcgagtcgggaggaggaccgcggacttctcgagcgagatccatgcacgaacgtggccactgcggccgatttctacggcgaggacggcggaggtcgttggatcgcgcggtatttgcgcggagctgggtga

SEQ ID NO: 15436 - DNA, 303 bp, Zea mays
  Peptide Sequence Number=SeqID_57215
atggacgatgaacgacggcgggttggatacaacgacactcgggggctagaggcggcgtttgggcgggcggtggcgctccgggacgagcagagggcggcggcgctcgagctaggccaggggcgatggcccacgggcgttggcggcctcgggggcggcgttccggcctcggatggcgcagcggcgtggtggcccagcgacacgggagcgtggcagcgcggcggctcgggcgggcagcggcggctcgacgatttgagtggagagaggaggaagaatgagtccgcgcgcggccgctggtggctctaa

SEQ ID NO: 15437 - DNA, 168 bp, Zea mays
  Peptide Sequence Number=SeqID_57216
atggaggagaaagacatgattgtagtacagtttccacacatgttgattaatttgatgcaactcgcgagtcggctcatgagccagaacaaaacgccttggctcattacaccaatgagcctagaaacctggctcagctcattcgaggctcgcaagccacttcgagattga

SEQ ID NO: 15438 - DNA, 252 bp, Zea mays
  Peptide Sequence Number=SeqID_57217
atggccacgcctacaccagatcccaagcgtccatcaacggatctatggacagattttaatgttgccaagaggtatcgctcgtctaatccacgccgcccaccgacagatctacggtccatagtctctctgacccagatcaaatcccagccgccagctactgatccagcggtcgcggcatcatcttcccacactgccaacaggcacggcggcgcacctaaggcagcggcggatccctcaccggcgtcgcgctaa

SEQ ID NO: 15439 - DNA, 384 bp, Zea mays
  Peptide Sequence Number=SeqID_57218
atgaccctgcacaagtcagatctcaaaggctcccagaggatgcaaggacagccggttggggcctttctagcctggagaactctgttgtccaccttgcccactaaggagtgggcatggatcactcagagaaaggaagtgaatatcccataccgaggaaggaaaacacaggggaggaacctccccagcgtgatgcccgacgatagagaaacagacgccggaatgtgcggcgacatcacgatgccggagaacgggacccagcacaacccgtatctcaggatgaaccctcagaaatgggagaaacacctgatgaacgagcacatcgagaaagacgcaactcccgccgccgcgatcgccgacagcctcaagaacgagagcgggaactag

SEQ ID NO: 15440 - DNA, 162 bp, Zea mays
  Peptide Sequence Number=SeqID_57219
atggtgagggcgccgacgggggctgagctggtgagggcgccctggatctcggaagggggagaaaggcaaccggacttggggcggtgctcgtgcagaggggaagaggaaagggaagaggaggttcgagtgggggaggagagcgccggctggagcaggcaatag

SEQ ID NO: 15441 - DNA, 561 bp, Zea mays
  Peptide Sequence Number=SeqID_57220
atgagggccctggaccttccttttatagatgcaatgagaaggtccaggtgtacaatggagggcaatgatgtatcccctatggtgcggtcggtccgagcccaaggttgggtgaggcggagactcctcctgaggccgaggctggggtcgggcgaggacgcgattcatcccgaggtcgaggttgaggctgagctctggggtcgggcgaggcggagaccaccttccgaggtcgaggttgaggccgagccctggggtcgggcgaggaggagaccaccttccgaggctgaggcgggggccgagccctggggtcgggcgaggcggagacctcctcctgaggccgaggcccaaggtcgggcggggcgaagcttcctgttgtgcctgaggctggactcgactgctgtcagcctcaccctggcgggtggcacagcagtcggagaggggcgagcggcgctgttttcctgtcaggtcggtcagtggaagggcgaagtgattgcggtcacttcgaccttgcgactgaggcacgcgtgtcaggataaggtgtcaggcgatccttgcattgaataa

SEQ ID NO: 15442 - DNA, 399 bp, Zea mays
  Peptide Sequence Number=SeqID_57221
atgggcagaggcaagagaggcaagggatggccccaccgtgctgacgggaagcgccagcatcctctaggtcctctctcggaggacttcggggactcggagtactcggaggaggtttcctccaacgcgcgcggactcggtgagttggacgactcggaagaggcctccttggaggaggtggaggactcctccgactccaaggagtggagcgacaacgatggtggcgagggcagcggcgaaggcggcagctgcggcggcgatggtggcgaaggcggcggtagcggtggcgacgatgatggcaaaggcagcgacgacgaaggtgacaacgaccacggcaagggtggcggcagcgacggtgatggcggcgatggcaaggccgtcggcataatgctgtcgatataa

SEQ ID NO: 15443 - DNA, 273 bp, Zea mays
  Peptide Sequence Number=SeqID_57222
atggccacgcctacaccagatcccaagcgtccatcaacggatctacggacagattttaatgttgccaagagggcttataagctcacgcccccgcggatcacggtgggcaggtgcgcctatccacgagctgccgagcatgcggacaccgtcacgatcccgccagatgcgatgacagaggtggcccacaggtcggcgcaaccagggagcgggtgtaacgggctgcacaaagagctggagatgggccggttctgcaagtttcagcccatgcgctag

SEQ ID NO: 15444 - DNA, 579 bp, Zea mays
  Peptide Sequence Number=SeqID_57223
atggggtgtgaaggccatgaagaagaccacatcataggggaagtctgtccctcttcaatcaggcagaaaaggttgtcttcaacaacgactcgtaaacggtcttgtacgaggacactgctcaaaagtcttatacaagatattataggatatagcaggaagttgtctagtgtgataattaggggtacccttaaaacacgcttaagaagattctctgtttcgggtgaggctgacagcagtcgagtccagcctcaggcgcaacaggaagctccgccccgccctaccttgggcctcggcctcaggaggaggtctccgcctcgctcgaccccaggggctcggcccccgcctgggcctcggaaggtggtctccgcctcgcccgacccccagggctcggcctcaacctcgacctcggaaggtggtctccgcctcgcccgaccccagggctcggcctcaacctcgacctcgggaggaatcgtgtcctcgcccgaccccggcctcggcctcaggaggagtctccgcctcgcccaaccttgggctaagaccgaccgcaccataggggatacatcattgccctacccctag

SEQ ID NO: 15445 - DNA, 198 bp, Zea mays
  Peptide Sequence Number=SeqID_57224
atggcgaccgcattatcgcagtcgacgcgcggcagaggcagctcgcggaggatccagggaccaccggcaggcgggagttacttccatggcgacggcgaacgagcagaaccacagcggtggcacagattttctctcccttactctctctatcctcacgacgcagatgcacacggtggcggtaaatgttattcaacctaa

SEQ ID NO: 15446 - DNA, 290 bp, Zea mays
  Peptide Sequence Number=SeqID_57225
atggcgccactaccccgatcgctccctcacacggtggcattggcttttcgtttgggtcaacgaggggcgagggaagaatggcctcagaccggaagtcatatagcgcagggaagtccggaatggagcgaacgtgccgggttaatcgcacaggttgttgagctcatgcctcgcgataatggcggcgaggggctgaccggtggactggcaaatggggcccaccctccagtgtgggtggcgaaagagagttggcgcggcgtgactaccccgtggaccagcgacgcagtcacacg

SEQ ID NO: 15447 - DNA, 1050 bp, Zea mays
  Peptide Sequence Number=SeqID_57226
atgggaaatactgaccaggcaggcaattcacatggcccacttgtgcagggaggcaaagatcacaaggcttcagatgcatctactgatcatgagaaaggacgactgtttcaacaggcatcactgcaaaatgcaggggcaccgggctcttatgtgcccccaggtgtggtaccacatccatctggaccagataaaatgcttcctcagcatatgacgaatcatggtcatatgcatggtttctctgaaaatatccgtcctccgctgcaacaaccatatggtgtgtttcattctggaacgataacaaggccatttggagagaaccagattcagatgccaatgccacagcctgggggtatcagacctggtgatggaatgttgaacagcaatgactttggtggtgaggggttcaacgcttcagggggtgcagcgtatcctgaaagacatgataataccgaagacagtcggaaacattttccagcaccagcccctctagatgatcagggcttgcgaagggaccctagacattttgagagagctttaggtagacctgatggtttccttgattcagtacctggaaggcctccatttgcaaaccacagaagtgcaggtttgcatgaggattttccaagaaagcaaaatgcaactgccagtcaccctgacttcctgtcacatggagcagaatttgatcatcacagggctattggaatgcctaatttcagaaatccaggcccatttgctcaagggacaagtggcggtcctggtggccctcctaaacaccagcttggctctggtaaccttcctgggaatttacattcttttgagggtctggacttccctccagctcctttcaaccttggtgattcttttccttgcactagcctacatggtcagtgtggagaaccccatggtgacatgcatccaggtgaccctcatcttgtcgctgaatatgctcagcatggatttcctaaaactgcagcacactttggtttgggggctaatggaaacatgttgaagttactttcagtgcctgaaaattgtgctagttttgcatag

SEQ ID NO: 15448 - DNA, 1053 bp, Zea mays
  Peptide Sequence Number=SeqID_57227
atgacttcgatctccaatggtgagaccgcgctcatgcccagcgtgcccaggcgacccgcaatagctactcgccaagaggaacccacggtagccacgcgttctgcgatggtcactcgcaacacacatgcagcctggattctttggctagggtggtgcccggggccttggttcttgatgcggaagagtcgagggcatccttatttaaacccccggagatgtccgagtccgcgaccccagctagtatctcgcgtttgttgcgagtttgttcacgttcccgaaaagatctctgggaggaagaaagcgctgacaagcattccccatctgtcagaggcagagcaaccagtggcgggcatgcttccaaggtgggcccacgcgacagcgacatacaacgcgtttctggtagaaggaacgggccgggagcagctggccgaggagggattaggagacttgggccccaggaaagtggaatcggcccagatgacgaatgatgaagaagttgaggacttcggcggcctggagagctcggggacccgggcagaagatgcgaggacgagggttggggagcaaccgacgccacctgccagccctggcgaggaccctatggcggccaccgtgcctgctggcgaagacactccggcagtgcctgcgcaggctgccgaagaccctgcagtgccggctgccccttcgcaggttccgacgtctgggcctacgcaagcagcccctactgatgatattaattttatggcggctgcgaatgcaatgcctgttaatgaaaatatgtctggttcggaaactgggtcttggtcatcggatgtgggggagtttgggagcctgtttttgtggactgaagagtctccagacgaggatttggattattttgctgcgttggatgtggccgcagcggaggctgtgccgctactggaagtgcgcgaggcgtctgatcccccggctggggcgaggtccgtggagcaccgccatcgaagagtggtgttgaagcatagtgatggcgagatgtcacgaagtggtagacgtcatcagatggggatggaatga

SEQ ID NO: 15449 - DNA, 441 bp, Zea mays
  Peptide Sequence Number=SeqID_57228
atgtgggaggcccacagatttcggcaagacctttgtcttgcaacacgagagcaaaggggactgcactggtcttcgttcggtcggcgccttcggcttgttatgatgtgttctgtgaatgtggccttcgtctgcgcgatgagaagacaaagtcgtagagcgaagggaagcgagtttgccttcgccccaacacccgaggccaccctcgggctggagacagaggttcttatgactaatattcataaagggcgcttctttgcaatcctaatgactgatattttacatgttcttgtgccatgtaaattcaacggtttaaatgaggtgtgctgccggctctggggttacaaccctatttacataggcaggacggatgagtatggcactaccaccgagatgaaggccatggaagagaagtgcatacataaggagatctacgacaagtaa

SEQ ID NO: 15450 - DNA, 1260 bp, Zea mays
  Peptide Sequence Number=SeqID_57229
atgtcgggagctcacgccaaggagatggtgaccggcgagaagcccgccacaagccacgggaaggctccatcgggagagtccggcaacaaaagggaggaatcacctccccgcgtcaagtcgcaccggagtggcgacaagaagaaaatgaagaaagtggtctactacgagaccgattcttcgtcgccatccacctccggctctgcaacaaagctttgcaagagcctagaagtggttgctgaacggcacagcaacaaagcttcccagtccactctagagcattgcacaaagaaaggcaaggagaccaagcagatcgttgatgaccacgttgccgatatcttgtacgagaacaagatttcgttggacatggtcaactcaagaagctgggagatcgtgttggagtcaatagggcagtatagtcctgaataccacgacattcatggacagatattagaggatgacatctcatcaactttctcgcaaaaaagtccaatagggacatactttttttgctctattgatgcatcaagtgagatagctaatgccaacatgttggcaaatttgctagagaagcaaattgacaaaatcgacagagaaaatatagtgcaagtaatcactgacaacggagcgaacttcaaatcagctaggaggctccttatggagagcattccgcatttgttttggacactgtgtgctgcccattgcttggatttgttgctggaagacattgggaagattaagtccttcatcacttgcatgaaccaagcaaagaaggtatctcggttcctttacaagcatggaagactccatagccttatgagagacaagattggtggtgaccttgttaggcctggtattactcggtttgccacgtcttttctcaccttggctagcatgcacaagcttaagaatggtttgaagagtctatttcttagtgacgaatggcagttggcagcagagcaagttctccaccaatcaaggatttctgatggtgatgagacacctgctgctccggagatcatggcggctatggacaaagcaaaagccaccgtcaaagaggcaataaaaataagccaagattacttgcagaacagctcaggacttgcagtcttgcagcaaggagataacggtgacagtcacaacaaagatgatcatcaagagtcaacttcaaatgagaaagatgttgcagaaaaagcaattgatgatgaagaagaatctggagctgttggtgataaattcaagctggatgatgatcgcatatag

SEQ ID NO: 15451 - DNA, 1242 bp, Zea mays
  Peptide Sequence Number=SeqID_57230
atggtgaaaaccgaggcggcggaggagcgggagcccctctcccggacgccagcggcggcagtagcggtcgagggtagcggcagaaggaccgccacggcggtgatcgacctcagcagcagcgactctgattccgacggcgagggtgcggtcggaagcggtaagagggtgaggggcgttggtggagacggctccgcgactaagcgggctagggtttcagcggtcgtcgatctgcccccgggtttcctcgagccaatcccgccgccgccggtgccggtgccattggcagcttgtgcgacgaagcagttctggaaggctggggactacgacggaaagccgctcggtgatggggtggctcagcagtcagtctctggaatggatcatgttcgcgtgcaccctagatttctgcactcaaacgcaacaagtcacaagtgggctctaggtgctttggctgagctgctggacaattctcttgacgaagttataaatggagctacctatgtgaacatagatgtgttagagaatgataaagatatcgataaaaagaagtccagaatgcttcttgttgaagatgatggtggtggaatggaccccgataaaatgcggcaatgcatgtccttgggttattcagctaagagcaaagttgctagtactattggacaatatggtaatggtttcaagacgagtacaatgaggcttggtgctgatgttttggtcttctcccgtagtcctggaaaatcaggcaaaaggcctactcaaagcattggcatgctatcttatacatttcttaggagcactggcaaagaggacatcattgttcctatgattgattatgaatataaacaaggctgggaaagaatggtccggactacattggatgattggagcacaagcttccaaaccatcattacatggtctccatattcaactgaagcagaattacttgaacagcacctccacgatcctgtccagcccgagccacacgcccccatcctcgccccacgcgcctgcgcgtctgcatgctacaacgtcgccccgaacgctgtccgccaatccggcaccgcccagttggccaccagcgctacacccgaccccacgcacgcctctagcagcccctgcctggccccagctagccggccgccggcgtccagctgcccctgcttggtcgccttactcaatttcgaaggtgaggcgaagcgacgcttcaaggacgccttaaaaactatgggtagggggagggattga

SEQ ID NO: 15452 - DNA, 717 bp, Zea mays
  Peptide Sequence Number=SeqID_57231
atgtcgttccttactccaaagccaacgtccacctcaaaggcatcgggacaagttcttctggaccgccccacctgctctcttggtcgaagcatggccctccagtggagagattcttatgtcatcctgctcttgtgcgggagaggatctgccattgttcagcccctcattcaaggacgttcttctggcgggtacagcctcggccattgcatcgatgaactccggcggctctgcccgcctggatgtcccaatctgcctcatctacaatgcgactgggcactgctctccttcctgcccacgctctcgtctagctcggcaacgagctgccccgctccgtcctggtatggccagacgaatgcagaggatctcgagcaagctctggtgatcaatgtcatgatgggtaatcctgttgatgcggaggccccaatcctgtcatgttttgcccggcgcttggacattgaagttgttaccatgtcgttgcgacgcctgggacctactaccgtcctcctctgcttgcccagtgtggaggcgtcgactcgcgcctttggcgacggcaagccggttactgtctcacctacgatcagaattcatgtgatgcgctggagtaggttccagaactcctctgcggcaactctttctcatccaatcgaggttgaactgcgaggcattcctgctcatgcctgggatattgggacggcagaaaccctcctctgtgaatag

SEQ ID NO: 15453 - DNA, 909 bp, Zea mays
  Peptide Sequence Number=SeqID_57232
atggtttgtgcgggcatctctaggacctcttttgctggtgtcccccatgatgatgcaactctgccagtgcaaacttctcagttagatgatccttcggttgtttctcccaccttggagtcctttgaagttgaactatctcctctcactacagatgatctgcctttgactccatcacccagtgatgttgagaatttgtgccagttcagctgtgtggaaaacgaagttgacaaagattttttgcctaagtccacacacttacaaacgctaccagtggggattcctgagcccacacacccggacctaatagtgtacacaagacgaagatttcacaagaaaaaggcaattgggggaaacgaagatggagggattgttcctgataccgctcttgcgacagtggaagcttcaggagggcacagcttgaaggtcattgatggttgtacagacatggttgacatacatcatcaggctaaaactattaacatcgctcaggaagatcttgaaacatcccagagatcagatgcaacctccttagctactgcccaaactgagtttttctccaagctcgctaagaaggtagctggcattctctctaatcctgcagaactctccacgcaaaggtgtaagcaggctcctgctgccacccctcatcacagtcgtcgcaatgcaagagttggggtggaatttgacaagcaagaactctatctacggtccacaaagatggccatgaaggctctgaaagtaattggtgaagccgaaggagtgactcagcaagcaaaagaagattatacggaagtgtttagtgaaaaccttcctatggctcatgttgaggcactggctaccttgtttggttggacagtgccggaggaactgaaaatggggctgagtagtgcagttgtttcagcttgctaa

SEQ ID NO: 15454 - DNA, 351 bp, Zea mays
  Peptide Sequence Number=SeqID_57233
atggctgccggcgatgggtggggggggggggtggcgctgggaaggggaggggggaaggaggggaagcctttctggagagtgtggactgctgctggaagtggaggtcgtggtgtcataggtgttcttgaggcaaacttcattgaacctgctcatgataagcaagactttgagcggacaacacttctagcaagacttgaagcacgattagttcaaatgcagaaggattactggtctgggaatgctcatcgaataggatatgttgcaccacgatttggcaggaatactgaggcaggagatggaggagaactgcgcaccatttcattaagagaggaaaaatccctgggagattag

SEQ ID NO: 15455 - DNA, 618 bp, Zea mays
  Peptide Sequence Number=SeqID_57234
atggcggcaccacctgcccccctgttaggtctgctggtctcatcaggccttagcgttgaccgccagtcagtctgcatcgactctttcatgtcgatgcccggacgcgggagctcctgggggcgcgagcttggggaagggcggctcggccgcagtggctgcgcggggccgaggccggcgcgagcttggggaagggcggctcggccgctggtgctgcgcggggccgaggccggtcggtgcagggctgggctcctggacccaaaagcaacaagcaacggagatctacatactatggatgagtatcagtctgttatcatgcagttaagggatgaaaattcatcactaaaggaaagattatcaaagatggaagaatcgatgtcgcaagagctagtggttgagtgtgacaagaacaagtctttgacagagagggtggaggatctgcagagacaacttgagtctgcaaccaaggaacaggaggcgctgatcgacatcttctcagaagaaaggaaccgacgagaccaagaagaggagagcctgaggaagaagctgaaggacgcatcttccaccatacaggatttgctggagcaactgaatgctgccaggaaaggccgcaaagtttga

SEQ ID NO: 15456 - DNA, 375 bp, Zea mays
  Peptide Sequence Number=SeqID_57235
atggcgcggttaatacggtccacaccgaggctgtcctcggtgcccgaccgcgacggcgcgaccgtgttctactcaacgtatggcggaagggaaaagatcaaggggggttggattctggaacttgcagcaaggataactgtgagcatgggatgcagtcgtggcttactccagaagatccacgcagattcacagaatacagccattaagggtgacgattatccatggaaaaaggagggggtaagggtggagcgcactgtagcagatttttctactgatgatatttcagctatgcacgagtctggatatttctgctccttcttatcccaaccaccgctctatttcacagtgggacacgacaggggaagaaaatattag

SEQ ID NO: 15457 - DNA, 705 bp, Zea mays
  Peptide Sequence Number=SeqID_57236
atggtgaagtacaactcgtatcctgaggagggcacttctgatgttggggatattgatgatcacaagagaaatggcgtggtgacccgtggtggtgtgaatgaggggtgctctaaaggtaaggccgtggttatggtggtgagaaaaaataggagggttgaggataaaaagaagggtttggcgaagacatctagggtggcgggagcctcggacagatttgttgaggagctggcggagatgtgcgccgaaccaggggaggtcatgacctcgtccgacctccgagaagcatcttctctgatgctgaaaggcgcggaggcccaggttgcccgagagcgtgttgtcacgttggagctagagacgaagaatgcgaggacttatcatgataaggtggaggctgccacgcgagccggcgctgtaaatgccttgtcccctgaaggctgtcggtacttcaaagcttttaaccaaggcaacgagggcctcgaccgggaggtgttccaggttgaagacgctatactgaagcggtctgctggagctgcattgagggacaaagagattgaggacctcgctggcttggagggcaccctggccactctagacggtggcgttgctgagacaggtgtagaggagcaatcatcctgtgctagagctggccatgtcaatcctaatgcggtggggactttgcgtcattctgctaataagaaaatgtaa

SEQ ID NO: 15458 - DNA, 2610 bp, Zea mays
  Peptide Sequence Number=SeqID_57237
atggagggtgaggaggacagctccggctccgtggtgcagcgcccgccgccaccgcagcagcagatacgggtggtgcgctgccccaagtgcgacaaacttttgccggagctgcccaattactccgtctacgtctgcggcggttgcggcgccacgctccaagcaaagaagagctcaggatctgatacttcttcagataagtctgatactgagcatgtgaagtaccttgaagtgcttgagagtttaccagataagaaaggagcagcatctgaagctagctgtgctgttcgagaagcagacaccaacaagatcgaagctaggtcagaagagagatttgcacccaacagaatggtggcggctgcacatagccaatctggattcagtttcgatgataaccatgctacttgtgcacccaactgcaccatgaaacttgaacctgcacttagagatgacagcagggaagttaaggaggcaaaataccgccgcattcgtcttgaagagaaaggagaagcaaagcagccagcgagggcaagtgacagatcaccaaggcctgtggttagcaacatcccttctaatgcttaccctttagaagggccatctgagtgtcataaaaaaccaggattcatatatgctagcggtgagaagggacatctgagtgacaagaatttagatgttcctagcaccagagccggtggccttgagaaagaccgtactgagcttctgcggatgctcgatgagttgagggaccaggtacagagatcctacgagattgctgacaagtcaagtgtgaatgcttcaacaaatagaatggtggatcctgcaagctcctacaatcctcatgagcgtctgagtcgattgcggtatggttcacctcagttgcagcgtaatggttctcagtgctcaccttctttgaatggacaggcacctgttgttcctcctgcttatccttcagtatctgtacagcaagatctccatggatacggacaatctgttgcacatatgggagctcctatttacccagccgccccttatccatggagaaacttcgataactatttccatggacagtatgatcctgaccctctgatctcttatcaccatgacggcttctaccatcagcctgcttgctcttgcttacattgttaccatcgtgaattattacctgttcatggggctccactgggtttcaaccatcgcagggcaccatatcttatgaacaaccctgtagaaggcccggtggtgtttggtgcacagaactacaatccaagaggtattaatggtctgatgcgacacaatcatctgagggacaccctgagtaaaaaacctgcacagacttgtgaaccaattgccaatggtgccccttttaccatatgctacaattgctatgaagtactgcatcttcccaagaattctctcatgctgggaaaagatgagtacaagctgcgctgtgggtcatgttcacatgcaattgtggtcagacttgatggaaacaggcttgatgtttcagcacctacaccagtttcacacttatcacctggaagtaaaaattactccaacaatggccaaggaagcaatggacaaaatgctgacgagagacttcttccatcttatagcttttctgcaggcagtcatttctctcaagaaaaagatttaccatcgaattccagtgaagcagacaaaatgcaatgcatatcatcttccgccagcatttctgaggatgataatagccgagctagttctaactcacagaagaactctggatctagagaccttcctcctgatgctgaagtggttatacgtgttccaagtttgcctcttcgtgatcattttggatattctccatcagagatggtggttgatgggtcaggcaaaggaagcagaagcacccggtctgaacatgagaagggtgtgttaactgaaagttttaagccaaacaaagtgaaagatgtacctgtagcaagcgtgctagacccatcagatgatgagtttgatgatcctgagtacaatcaagatccaggtgacggagcacaatgcgtcgatcacccaagggccacaaaatcgggcgactcctttttctccagcctgataaaaaagagctttaaaattaacggtgggatgggcaatggcagagcaaaggtgttcatcaatggctatcccatttctgatcgtgctgtgaggaaggcggagaagattgctggaccaatctatccgggtgaatactggtatgactaccgtgctggattctggggtgtcataggacagccctgccttggcatgatacccccatacattgcagaatttaactatcctatgcctaagaactgtgctggcggaaatactggtgtgttcatcaacagccgagaacttcaccagaaggacttggatttacttgtgggtcgagggcttcctgattctcctgatagatcatacagagttgagatttctggtaaagtatccgacgaagtatccggtgaagagctttattgccttggtaaactcgcaccaactttccttgtgttagttgagggtggagaagatgaagcgtgggttcgggatgcgagtcccaaggaccattcagtgaaattggttcacatcgagaagcagaggctctga

SEQ ID NO: 15459 - DNA, 303 bp, Zea mays
  Peptide Sequence Number=SeqID_57238
atgacttgtgatttgattgcgctacttgggattcctaaacagatcattgaggcctcggtcagtgggtacccttatgttataggcctcaaaatagtgtctaagtttgcgtgtcacacctggttttggaagataacaatagaaggttgcacactttacccacgagccgtgatccctttcgagcctgggtttgcaagacccgatcttcactaccgaggtgaatggctaggaatacactgcgtagcctttacaaagattccccctagtgtgggggatagatatcccctgggtccactaaagaagtaa

SEQ ID NO: 15460 - DNA, 141 bp, Zea mays
  Peptide Sequence Number=SeqID_57239
atggcctccgccgtggggtggcacgccggcatcgcctgcgagcgggagttaggggatgacgagcaagccactgtggaatctgaggttcagcaagtagagactgctgagcaggagctcgttgaaggcaagttgtgcccttga

SEQ ID NO: 15461 - DNA, 3501 bp, Zea mays
  Peptide Sequence Number=SeqID_57240
atggacgccggaggccgtgcgggcgtgagcggccccgccgcggcgaacggctcgttcggactcgtccgcaccgtggtggggtactccacctcgcccctcttcttctggctcctcaccgtcgcgctcgtcgccgccatccacatcgtctccggctcgtcctccaagcctgccaggaacaatgagacggaggagaggaagaaggcgcgccgcgataggttcctcccggccgccgaggaacgggaggcgtcgggcaggggagatgaccgggttctggagatgatgcgcagtttcagcttcatgcaggcgaccgaggaggatttcatggagggcatgaccgcatacgagcacaacggcgttggcgacggcacagcgcacgggcctgtcgcgccggagccgcctgcgctgacggcgactagcctcagcttcaggtttcagcaccagatgcccgaagttccaacggagacggcgctggtttcgagagaattcactgcggcaagacaagagacggcggtagtttcgagagaactgacagcagcgagagacgatgatggacgacaacgagaggaagagaaggaaccacactttcctttggaaccattcgctccgttgcagacggcggcagacatgcaagaacaccggcacgacgaagcagaggaaacagagttcctggcggaggagccggcagaagagcggagcggagaggttgcgcaggaggaggcagcgccacccaagaccgtcgcggccacgcacaactatcagttcctgactgagcgcgacttccgggggttcgtcagggagccggaggccgtgacggtgcgcgtccaggaatctttcgtgccgtcgccgcctccggcgcaccagcccgaggagcgacgggtggtcgacgtctcctcccgcagcggccggttcctcacggcgagggacttccggccggcgaacgagcccgacgtgtgcgagagcgtggcgtcgtccgggaagtggacgccgccgcctccgaggccgaggccgaagccgaagccgaagcctgcgagctccccgtccgctgcttccatgggcggcggcggcggcttcacgtcggagttctccggtttcggcgactcggactccgagtccagcgccagcgacggctactcggtgaaggatctcgtcgtcgactccgacagcgattggttcctctcagagaaggagttcccggcgtctgcacttggctccggcaacctcaaaacttacaaggccaaggtgctcagggcgatcgaagccatggaggcggcgtccaacctggagccgtcttaccaggaggactcagcgacgacagtgtcgccgagctcggtccggcagcgctcaccggacaccgttcccgatggttctcccaagttccctgaggacgtgtggtctcgcagcccttcgccggacgtcgagtacaaagaggacgaggaggaggtaacgagagaagctgaagcacagtatgatgaggacatcgaacagcgaagcacgggggaagaggaggagggcaagggcatcgacatgagcgatgacgagcactcgtcgggcggcaaggaggtagaatccgcaccaatctatgatctggctcctgttgctgacgactgtatggatcattcagagaaggggatcatcactctaaatgatcattcaggaggtcaagctgcttctgatgctcaaagaagtccagaggcagtctctgccagacaattagctgccgtaccatcagatcaagttgctggcccagtcaagagaagtccggagccaccggagcaggaatttgttggtatggttgatcattcactcgagcacagttcttacgaccggaaacaaactgccagcgaaagcgatcagtcatatgaaatagtatttgatgacaaaagaaggccgcagcgtgcagagacaggatttcttgtttgggaagagatcgtcaccagaaacgatcaaccgcccctagggccccatgctgatgagcaaggcctggatacagcagaggaagagtatgtgggcacaggtgatcagccacatggtgcagtttctgatgagaagagcggtgcagagactccggagcaagaattcagccttaccgaccaccgaaacgtagcagttcctgacgccaggaacatctcggagaccagagaagatgaggaacaagccagtgcagatgatcattcggacaatgcagtcaccgggaaggcaaaggtatatgacgaagacggggaggaccgggaagcgaggtggaaggatctgacagacgaggaggaggacgagctggagtcgctgtgggagcaccaggatctggtagagcagctgaagctcgagctgaaaaaggttcggtcgtcggtcgggctgcccacgatcctcgaggagtcggacacaccaaaggctccggtggaggacctcaagccatggagtatggatgctaagttccttcgcgaggaccccatggacgagctgaacaagttctacaagagctacagggagaggatgaggaagttggacattttgtgctaccagaagatgtacgcaatagatttcctacagctcagagggtcccagcagtccaacaacaacaacaacaactctgtaaagtccttgtcgcctacggtggcgtccatcctgtcgcataacttccggtcatcgcgccggagatctcccgaggacccgtcggaacggttcctcagggagctccgctacgacctggagacggtgtacgtcgggcagatgtgcctgtcgtgggagttcctccggtggcagtacgagcaggcgcgcgacctcccggagtccgactcctaccacagccaccagtacaaccaggtggccggcgagttccagcagttccaggtcgtggtgcagaggttcgtggaggacgagtcgttcaaaggccctaggctgtcgaactacatcaacaaccggtgcgtcctccgcaacctgctgcaggtgcccgtgatcaaagacgcgctgaccgtagcaatgcatgcacttccgggctgttgtgtagaggacagcctgaaggacaggatggaggaccagcgcaaggggaactacgtgataaccagcgaggagctggaggacgtcatggaagaggcgatgcacgtcctgtgggagttcatcaaggccgacagggccgagacgacgacgacggcggcggcggcatcggtgctcaagggcctgtcgagcagcaacgtcgagctccaggaccctctggatcatggcctcatggcgcacatccattccgcgttacagaagaaagagaagaggctcaaggacctgctcaggacgggcaactgcatcgcgaagaagtttaagaagcccaaggaggacaggtccaaccagaacctcttcttctcgcaggtggacatgaagctggtggcgcgggtgctgaggatgcccaggatcaccagcgagcagctgcagtggtgcagggccaagctcgacaagatcgtactggtagataggaagatccacagggaggcttcatttttgttgtttccctgctga

SEQ ID NO: 15462 - DNA, 432 bp, Zea mays
  Peptide Sequence Number=SeqID_57241
atgaacggaagcaaggtacccgccgcggcgtatgtagcgggcggtgcgacgggatgggacgacctaccgatggatcctactaccccccgctcgctttctacaacgcgccgcggaaggggggagggcgaagaaaacaacttggcaccagtcgtgcccgcccgtatcgagcgggcagtggagagtggagacgagaggagaaagaagagagatagagtagcgactgggtgcctggggaggctctggcttcaaaagaaagaccgcgtcgcgctacaggggtttgccacctacacattcgacgtgacgcgcacgcgccgggccgaaccactacacagacgaaggcgtgcgaccgcgctcgccggacggaccccgcccgacccagatcaaactgactccttttcgttgtatgccactttggtgtcgcgggtgggttag

SEQ ID NO: 15463 - DNA, 894 bp, Zea mays
  Peptide Sequence Number=SeqID_57242
atgaaggaacatctaatgcttaatattgatgacctaagcattcttgagcctaacgaggtcattgggacagtcaagaataaatcatctggggaaaccattgcacatccaccctccatggctcatgccattttagcagtgggagaaagcatggtttctgaagcggaacctcttctgcaagtggtggagtgtcgcatttgtcaggaggaagatagtatcaaaaatttagagagtccatgtgcttgcactggcagtctaaaggtggtggagtgggaggtgaccagcgacctgagtcaactgacaaccaatgggagagttgcccccaaggtggtgaagagggtggcaatcagtagcgtagagtccagtggccacctcacctctctgcacaccctcatcttcatggatgctgggtgggggccagaggaaatgatcaactgccaggctatatcggtggctggtggtggtgaggaaaaccctaggcagtatgctcataggacttgtgtacaacgatggtgcaatgagaaaggagatgtaacatgtgaaatatgtcatgagccttatgaacatgggtacactgcacctcccagaggccatcctgatgaaactaccattgatataagtggtgggtggacaattaccggtaccgcatttgacttgcgtgatcctaggatacttgcagtggcacaaaaccacatcatggaagctgaatatgatgattattctgccacaaatgcgagcactgctgccttctgccgctctgctgctcttgttgaggcagctgctctagctgcagcggaggtggcattcatcctgcagtcaggccaaggaaggggagtgcatttcaccatcgcaccggactccccggccacaccacagcatgaaccaccacaaccataa

SEQ ID NO: 15464 - DNA, 264 bp, Zea mays
  Peptide Sequence Number=SeqID_57243
atgtgtcctggaggggggaggcgctcgggagccgcgcctgggcaggaagagaagagacaaccttatgtttctttaagtggtccggcccaccgttgcctatttcctcacttgccttttcttccacttctttgcaagcctttattctcctgtagaacactgatgggcggaggtaggagtgctatgtgcaatggcgggaagggcggcaatggcaagggcgccaagaggaagcgccctccaactccatcgttggaccccttcgggtga

SEQ ID NO: 15465 - DNA, 204 bp, Zea mays
  Peptide Sequence Number=SeqID_57244
atgtggccagagaagacgatacactccaggatgccaacagtgggtctgggcccccatgggaaagtgccggacctctgtacatgtagaccggacctccggggcaaggtccaggacccccgcgagtgcgacccggacctctgggatgggtcctggacccctctgcgtggggtccggactacccacagccgggtcccaggactctag

SEQ ID NO: 15466 - DNA, 147 bp, Zea mays
  Peptide Sequence Number=SeqID_57245
atggcgggcggattcggcaataggaaggaaagcgagtttcgatgcgcaaagaaacgagtggagaggagcgctttaacaggcctttatccccccgacgagttcgattgcttcagcgacaatcgcagcgaaggcggcgcggatgtgtag

SEQ ID NO: 15467 - DNA, 456 bp, Zea mays
  Peptide Sequence Number=SeqID_57246
atggggattgaaggattagaggttggattagatggatgggggtccctgggccgaccagtgagtgtcgccgcgtgccccagcccagatgggtcgagcgcgagggcgagcgcgaaggggaagagcgaggcggccggagaccggcgtgagagaggtgggaatcccgcggccttcgtgttcgtcccgcgcccaggtcggatgggacgccggtctggttccctgtggcctgagtcagctcggggtagggtgatgatggcgcctcctgttgacgtggctggcctgcgccctaggttgggcgatgcggaggctcctccgaagccgaggtcgagtctgtcttccgtggccgaggccgagtccgagcccctgggtcgggcgaggcggaggtcgtcggctgaggccagggcagagtccgagccctggggtcgggcaaagcggagttcgtcgtcttctgggacttag

SEQ ID NO: 15468 - DNA, 1137 bp, Zea mays
  Peptide Sequence Number=SeqID_57247
atgccggggagccagaacggggggccgaggcctcggccggtcaaagtcgagaccatccacgatcttgcgcgcgccggcgacctcgccggcgtccagaggaagctgctggagaacccctccctcctcaatgacaaaaatcccgtgatgtgtcaaacaccacttcatgttgctgctggctacaataatacagaaatagtcaagttcttgcttaaccagcaaggtacagaaacagttgatctggaggcaaagaacatgtatggggagactcctctgcatatggcagtgaagaacagttcttgtggatcaacaaatctactccttgaacatggaggagctggtagcgagaagctgctgaaactcctcactcatcatatggaagagcaaagaaaacggaaagctctcatgtcatgcctcgaagggaaagcaatgtcagagtttgaagaggcaatgtcacaaattgttggattgcaggagctaaaaatgcaattgcgccgatgggcacgaggaatgttttttgatgagaagcgacgggctatgggcttggggattgctaaaaggagagctccccatatggcatttcttggcaatccaggaactgagggaggtattctcttcgtggatgaagcttacaggttgataccaatgcaaaaatccgatgacaaggattatggtttagaagccttggaggagataatgtctgtaatggacagtggcaagatagttgtcgtatttgctgggtactgtgagccaatgaagcgagtcatcgcctcgaatgatggcttctgcaggcgggtcacgaaattcttctatttcgatgatttcagtacgacagaactagcagagatcctacatatgaagatgaagagtccaagtgactgtagcttgctttacgggtttaagctgcacccaagctgcagcattgaagccattggagagctgattgccagggagatcactgaagagcagaggaagcagatgaatggaggccttgtagacacgctgctcatcaatgcccgcgagaacctggattcgcggcttgatttcagctgcaacgatgccgatactatgatcacgatcacgttggaagacctggaggcagggcttcgtcagatttccagacaacgtcacctgcagtga

SEQ ID NO: 15469 - DNA, 519 bp, Zea mays
  Peptide Sequence Number=SeqID_57248
atggccaccgcgacgacgctgcccctaggcctcctcccctccaaaacgctgaccctctcccctctcccttctgcgcgccgatccctctccatcgccgccgtggagccccggcgctggctcctccgagccgccgctgaggaggcgcctgaggccgtggaggttgagttcgtggagcccgacgcggaggcggaggaggagcccgcggtaccggagcccgtagaggcgcagctcgccgccgcgggggctgggaaggacgccgacatcttcgctgttgtcatgattggttcaagacaatacattgtgatgccgggcaggtatatatacacacagagactgaaaggtgccaatgtcaatgatcagggacgtgatgataaagttatagtcttcaagtacaagaagaagaagaagtaccagaggaaacttggtcacagacagccaaacacaaggttaagaatcacaggcataagtggatacgaagagtaccctgctgacccaatacttgaccctgctgcagcttaa

SEQ ID NO: 15470 - DNA, 216 bp, Zea mays
  Peptide Sequence Number=SeqID_57249
atggctccccctaagcagacgccccatatgcgggttggaccacgaggcgtgcccaagcatcagatggcctcccgtgtagtggagaccgacagtagcggtcgtgcacctcagtcgcaggtggagcagctacagcagagtctagatgtgtccttcaatgagcggtgtctcgatgcagcccatattcttgagctgctagcagaaaagaagcagctttag

SEQ ID NO: 15471 - DNA, 756 bp, Zea mays
  Peptide Sequence Number=SeqID_57250
atggatgagtcacatactggagatgccattgctaaccatatacttgaggtagttcgtgattttgcaatagatgctggtataacaattgcaaataagtacttgaataatattcgtgctgctattcgtttcataacaagcacacctcaaatgatatctagatttgctgagtattgtaaagctcaagatatgagaccaagaaaatttggtcttgatatgaagattagatggaattcaacctaccatatgcttaagagtttagaaggttatgaagaactaattactgtctttgtgaatgctaatgccaaagatctagatttaatacttacagatgttgattggttcattacacgtcaatttagagagtttctaatgactttttatgcagctacacatgttctatcaggtgtatactatcctacaacttgcttagtgattgattatatttggttaatggttgaatctttttctaagttcagatctgatagccttgtaaacactattgttgctccaatggagatgcttttaatcatgcaaaagatgacttgttccgtgtctttggctactattacaaaaaaatatggtgaaagtgagatagactcacatgttactgagtgtgatgcagaaatttcagatacctctcttacagctcacttatggaaaagagcgaagtggaaagaaaatgccaacttctctcaaaggtggaatcttaatgctgaatttgaaagggaattaggctttcacctagtccctaattaa

SEQ ID NO: 15472 - DNA, 282 bp, Zea mays
  Peptide Sequence Number=SeqID_57251
atggagcccggtcgcatcccatggagggccaatctccaatggatccatggcttgaaggtgtcatcacctctcgaggatccaagatatgaggcactaaatcagcggagagactgtcatgcagagggttcgatatttggtgtcgagtgtgagaagtgtgggatgctcattagggtggctgggaacagcatcatgttgtcacccccgctcatcatgactcccaatgaagtggaagaagtaagaccattttactgtcacttttgcctttctgatacaatcatctaa

SEQ ID NO: 15473 - DNA, 327 bp, Zea mays
  Peptide Sequence Number=SeqID_57252
atggaggataatctaccagttaatgtccaggaatatcaagaacttgctaagaaattaattctaaaaaagtcattacacgataagaaaaataatgtgcaagctactgaatttacaatcaagcaagggtggttgcatactggtgatattggatactttgatgagggaggtcagcttttcgtagttgatagacttaaagaacttattaagtacaaaggttttcagtgtgtccatgtgacgacaagtcttgaactagattcattgttttcgctagcctggctaactaacaagtacaagtcagcaatgccatcaattggtttaaatatatag

SEQ ID NO: 15474 - DNA, 477 bp, Zea mays
  Peptide Sequence Number=SeqID_57253
atggaggagatcgacgccgccaagctcaccaaggacaacgtcgacgtccgcctcaagtggcttggcctcttccaccgctacaagcaccagtgtacacccactgattctacaccccctgcaatggttgttgttgctgttggtaggagcgaccccgcgagcgtgacacggacaaagcagccttcggtgtcagtggacttgtgcatcgacataatttgcagtctccataaggatgctaatgataggtcctcaacacaagccttattggaccatccattcttgagtgtgtatgacctgcatgcagtttcagagacaaccgatcaagccaaggatggaggcaagaagagcttcgaggtatcgagtgcacgggagaaggtcaaggagaccaggaacccaaagccaggggtgaagaagaagacttgcaaagtcaaggttgatcgagttaagaagacttatggtgcatcaaggatcactacataa

SEQ ID NO: 15475 - DNA, 711 bp, Zea mays
  Peptide Sequence Number=SeqID_57254
atgagtggccttccgtcctctggggttcaacaacctggaggtagcattcctgggagattcccttcaaacaaccttccagttggcatgcctcagattcctcatgcacattcaggtgtcagtggtagagggatgaattttggcgcaggtccggcatttagtagcagcatgaatattggtggtaacatccaaggcttatcctcgggcttgggctccggtggtaatcgcaattctgttcatgggatgccagtatcttcatctataggaaactcgggtcaacggataagttctgtaggaaatatgcaataccagcagcctcagcctcaaaatcatttcagattgcagcagatgtcttcagctgcacattcatatcgggatcagattcaaaagattcaggcgggaccgacaccacctgatccatatggcttgttaggatttttgggtgttataaggatgaatgatgctgatttagcatctcttgctttaggaatagatttgacagcattgggtttgaacttgaactcgccagataatctatacaagacatttggctcaccctggtcgaatgacccagcaaaaggagatactgattttcgaattccagcttgttacctctttgacaaaactcctccactacaggacaactttgttctccactatgagatggtagagaaaaggccagttctgccttcaacatcaccaaaccttagatga

SEQ ID NO: 15476 - DNA, 270 bp, Zea mays
  Peptide Sequence Number=SeqID_57255
atgaggcccgtggacgttggcaaagagcggcgagacttggcgctggcgaactgggtggtgcccaagatccaggtcggcgagcacagggtggtcgtcgaccaccggtgctgcccaagatccagtttggctttgcagattgttctgtcagcaactcttggtataattgtttgcagtggcgatatcacaagctcttcatggattggtgatgatggtttgggttacatgtacctcatggatcactttttctgcacactttctcggaaggaataa

SEQ ID NO: 15477 - DNA, 783 bp, Zea mays
  Peptide Sequence Number=SeqID_57256
atggccgtccaggcgcaacacgtaatcaaccccgccttccagccccacgacatggggcacgcctttagggcgttggagggcgccacaatcggcggcggctccgcgttcctggatgagaacggcttcggcgggtgcgcgccggcgcccatcgaggtcgccttggtgcgggacggggagacgatgcagttgttgctagcgtgcggccacctattccacgtcgaggaagcggttgttgaactcaacaagaaattgatcaatgacatacctacatcaaaattcccgtgcggccgtgctgggctgctggctgctgcagtgcctggctgggcggtcgagcgcgctgcgctgcgcgcctggctgggcgcttgggcctggccgctggagaggaggcatggcacgggcgctggagaggaggcgctgcgctggagaggaggggaggacaggagcagccgagcaggtggcgcacgccgcaggtcagcgggtgagctcgctgcggcgctggagctgaggaggtgcggccgcgcggtaccacgacaggcgcgacgactggagctagggttgggggctgggcgcgagcgtgactatgggcctctagtgggtcgcgacttccgatcggggctgcagcccaggcagccccgggtggagatccgcccctgcctatggctgcgctctcatgcaacatgcctcgcgaaggcgcccccatcggctcagacagttctgaacgaggatggtcgtggcaaggtcgaaggctcgcttcacagggtgaaggttgttgcgcatgggtga

SEQ ID NO: 15478 - DNA, 243 bp, Zea mays
  Peptide Sequence Number=SeqID_57257
atggacagggcagcagaccacagtctgcggaggcggagcagacctagacatgcgacggaggcgcacacagagcttcgcggacgccggacgggtggagccgcggagacagtcgcagtcctgggctcggcagctagcagcgttaggaccaaggtattgctcaagcaataccgggccatattgggccctccgcctatgaaatctctcaattataagcgtaaatacttggccaatgtgagaggttga

SEQ ID NO: 15479 - DNA, 249 bp, Zea mays
  Peptide Sequence Number=SeqID_57258
atggtcaatcgcgctggcatcaccgacgttcgccattatctggccaggctatgtgcctcgacgctttaccaagtcgcgataaacttcaaatattatttagaagccttgggtaaaatttggtatgatttgaaccatgtttggtacttagaacccaaaaccctaaccccctgcgctatgaacttcactatagactccaaaaaccctagtttcctggagatccgtgaaggaaagttatattcaagacattag

SEQ ID NO: 15480 - DNA, 1068 bp, Zea mays
  Peptide Sequence Number=SeqID_57259
atggtggacacgggcggggggaggctctaccagcgccgtggcgcggtcgctttcgtcgcggccaacaaggcgctgctcgccgctgcgtgggtcgtcgggttcgcgctcgtgttcctatggcagagcgcctccatgtccttcggcagcgccggcggcggagggtacctcaggctcctgtcggtgccgcctccgccgccgcgccccgcgccgcggctccgccccacggcgtacaacatcacggacttcggcgccgtcggggacggccgggcggtcaacaccgcggcgttcgagcgtgctgtcgaggccatcgcggcgctcgcggagcgaggcggcgggcagctcaatgtgccacccgggcgctggctcacggcacccttcaacctcaccagccacatgacgctgtttcttgccgagggcgcggaaatccttggcattacggatgagaagtactggccattgatgccagcattaccgtcatatgggtatgggcgggagcgcaaaggaccacgatttgggagcctcattcatggacagaatttgagagatgtagtcattacaggcagtgagatgtctggcggagttgcaaatgttactgtggagaatgtgcgcatctgggaatcaaggagaggtgtgaggataaagactgccacaggaagaggcggctacatccgtaacatctcataccgcaacataactttcgacaatgtccgtgctgggattgtgataaaggttgactacaacgagcacgctgatgatggatacgaccggactgccttcccagacatcacaagcatatcattcaagggaatccatgggcagggtgttcgggtgcctgtccgagctcatggcagcgacgtcatccccatcaaggacatcagcttccaggacatgtcggtaggcatcagctacaagaagaagcacatcttccagtgctcctacctcgaggggcgtgtcatcaggcctgtgttcccgaaaccatgtgagaacctggacgtctatgatgagcaagggcagcttgtgaagcgggcagtggccctaaacagcacagaacttgactacgatatatga

SEQ ID NO: 15481 - DNA, 450 bp, Zea mays
  Peptide Sequence Number=SeqID_57260
atggctaacgcacgcccctactcgtgcctccacaatcgtcgacgcccgggcctcagctccgagctcctccatgctctcgccatggctggaggtggccgcgtccggcagcaccgcgggccccctctcctgctcccctggcacgtccgcatctcgcgcccacgatcgcacgcgcggctgctagcgacgctcgccccaggtcgcgggccgtgtggctcgcccctcttcccccgtgtcgcagccatgaaccctctactccggcgtatcctctctccccctctccttcgcccggctcccggccagctaaccgtcgcgaccctgggcaccagcaccgccgccgccaccatgggcgcatatctgcccgccagcgctttgggcaccgtcaccgttgcctctctggtgggtttcccctgcgggtctcctcctggggacctccagctccgatgggcataa

SEQ ID NO: 15482 - DNA, 228 bp, Zea mays
  Peptide Sequence Number=SeqID_57261
atggaggtggtgtcaggctccaaggaaggctcctgtgtgctgggaagcagagaaggggtctggtggtgtgaggtgccagggaaagggagggaaagtggcggctggggtggtggccggccccgagaggaaaggatgagcctcccggggacgacggcgcaggagcagatggtggatgttggaggtaggagaaagggtggcagctgctggagatataactatgacaactaa

SEQ ID NO: 15483 - DNA, 516 bp, Zea mays
  Peptide Sequence Number=SeqID_57262
atgcatgaaggaaagacttcatcaaaggaggtcaaggtatccggcgacaagcacaaggaggacaaggaagaatcagccggctccatcgagtcgcacaaggagaaaggcgacaagaagaaaaagaagatgaagaagatggtctactacgagaccaactcatctgcgccctcaacctccaatgccaaaaaaccaccatattttgatgaagactattctatgtggagtgataaaatgaggccccatctaaccttactccacgaaagcatttgggatattgttgagtttggagcgcaggcagcacaagtaggcgatgaggacaatggcttcgatgaggccgcccaatggttgcgttggacggcaggggtgagggggcattggcataaaatcattgttatcattgtagtcattagctattacattagggtggatatcgagggtcactggcataaaatcatcgtcatcattatggttctcacctatcacattggggtggacgacgttggggcattggtataa

SEQ ID NO: 15484 - DNA, 579 bp, Zea mays
  Peptide Sequence Number=SeqID_57263
atggacggaggacgtccaccaccgcaccgtgcccccgcccgcaattttggccccagcgcgcgtcttcctcccgcccgcgaatcacgcctgcgcgcgtcgccctcgccgccgggtatcccgcccgcgccaggcaccccggcgcgccatgactcccgcccccgcgcgcgccgacacctcccgcccacgccagacaccccgccccccctctcccggcgcgtcgtgactcctgcccccgcgcgcaccgccacctggcctgcgtgcacgaagatggagctctggccgcgcgatgggcctatgggctccccaagcgacgcctcggccacgaccgtgacaccatctacatgcgtcgtgatgcctgagatcggaagcggcggcctcgctcctaccactgccgccaccaagcccttcgccaagctcgccgtcaaggcaacaaccatcgccgacatcccgcacctcgtcttccaggccctcgccgccgccatgtctggccgtcccggaaggtgctacctcgatatcccgtccgacgtcctccaccaaaccctccccgaaggcccgaatccgaggccacgactctcatag

SEQ ID NO: 15485 - DNA, 1410 bp, Zea mays
  Peptide Sequence Number=SeqID_57264
atggacgcgagccagggcgtcctcctgtccagctccctggtcggcggcgccaagggctccgcgtcatggccggagctgctcggctccgcgcactgggagggcctcctcgatcctctcgatctcacgctccgccgcctcatcctgctctgcggcgacctctgccaggtcacctacgattccttcaactccgacacccactccaagtactgtggcagctgccgctactccaggtccacgctcttcgcccgcacgctgttcccggccgccgccgacatcttcccggcggcgtacctctacgcaacctcccagtcgtcgttcccgggcggtatcatggtgttctcgctctcccgcgaggcgtggaacaaggagtccaactggatcggctacgtctccgtgtccacagacgccgccgcggccgccacgggccagcgcgtcatctacgtcgcgtggcgcggcaccatccggacgctggagtgggtcgacgtgctcaagccggagctcgtctcgcccgacgccatcctgccggaaggggacccggcccgcggccacgctcgcgtgatggaggggtggtacctcatctacacctccagcgacgagcggtcgcccttctccaagtacagcgcgcgggagcagctgctcgccgcggtgcgcgagctggtggcccggtacaagggcgagagcctcagcatcgtgtgcaccggccacagcctcggcgcgtcgctggccacgctgtccgcgttcgacttcgcggtgaacggcgtgtccagggtcggcggcgccgacatccccgtcacggccatcgtgttcgggagcccgcagatcgggaacccggagttcaagaagaggttcgaggagctgcccaacctgcgggcgctgcacgtcaggaacatgcccgacgtgatcccgctgtacccgagcggcctcctgggctacgcaaacgccggcgacctcctggccgtggactccaagaagtcaccgtacgtgaagcacgactccaccaacgtcggggactaccacaacctgcagggcatcctgcacacggtggcgggctggaacgggaaggacggcgagttcaagctgcaggtgcaccgcagcgtggcgctggtcaacaagtcgtccgcgttcctcactgacgacaacctcgtgccggagtcgtggtgggtggagcggaacaaggggatggtcatcggagaaaccgggctgtggcagctcgaaccgcctggcgaggagcccgtacccccgttcgtgaccgggaaggtcatcgatgacgacgaccatgtcgctgccaccaccaccactactgccacggctagtaaggagacgaagacaccggtcaaggataagaatcggctcgggactcagcttttctcggcatgctttagaggggtcaatcagtctgtcgataactga

SEQ ID NO: 15486 - DNA, 1068 bp, Zea mays
  Peptide Sequence Number=SeqID_57265
atgccgagaagatacaattggagaatatggttgaaagaaactgtcatgaatatcgaggctgtctgggataaatcgaccacagagtcgaagagtcggtgcctcctggagaaggtcgacagtctcgagaaagaaaatgaggacctcggtcgccaggtggtggggctgaaggacatgatggccaagacgtgggtgaaggcacagggcacgcaggagcgtgccactatgttggagtcagaattgttggccgtgaaggcttatcatgagaagttggaagttgatacgcgagctggcgtggaccgagtgcattccctatttgttgaggcctatcacgacctaggcgctgtaacgatgcccaacgatatgtccgggggggagatggacacccgcttccttgcgctgagggacgaagatgtcgaagacttggactctcttggtacgctagggactcgtactgctgacgttgaatctagagatgcgaggacttcacactggttgattgcggaagaacagacactaacacttggtttggtacctgcgcaagttccgatgactgtgcctatgcaggggaattttgattcctcgggcaaggggaaggatattcttgatgtcgccgcatgtgttacgctgctatcttgttggagtccatcgttttccaatgacggtggcggtttttccgattttgattcattgtgtagcgaaaagggtttggaattctttgagggtatggacaacgagtcctctaaggaagacttaaatttttttgttgcactatacattgcgtctatgtccaaggctgcgactggcgaggggtcttcaggtggtgctccgcctgctaagggtaaacaaaaaaagacacgtgctaggattccgaagcgaagggttcctagctccggagtatttgcttgtgatcgtggtggcggctgtaggcgaaggtgtatgggtatgcaaggtcctacctcgaggattttgctctcggaggtactagggatggtcccttcacatattaatgaaggtgagtcggtcgaactgagcatgggtccttgtcatgctgtcttgacaaggagttga

SEQ ID NO: 15487 - DNA, 462 bp, Zea mays
  Peptide Sequence Number=SeqID_57266
atgggcaagaacaacaaacgcaagcgcgagccgactcctccatcagaggactttggcgacacgaaatactcagaggaggagttctcctctgaatccgaggggtctccagctcccgcctctcccccagcgtcgtccgatgactcggacgactctcaggggattgccgcggaggtctggacttacatccgggccgtcgagcgctccgggctcgagggctcggatgagtcggagtactcctcggacgaggaggactcgcccgaggaggacggtgaaggtgacgacgacgacgacgacggaggcgacgacagcgacgacggtgacggcggcagcaggggcggcaacggcggcagcaggagcggcaacggcggcagcaggggcagtgacggcggcagcagcaggggcagcggcggcggcggcagcaacaaggccagtggcgaaatgccactggtttttagatattag

SEQ ID NO: 15488 - DNA, 2295 bp, Zea mays
  Peptide Sequence Number=SeqID_57267
atgtcttcgctggacccttcgccagcgacgagcacccaacagcagaagcaattggagagtttggtaaatctactgacgcagggaagcaggttctaccgcaaagcatataatgaactgttctcaggtgtaactactgagcaggatccggattcatcgactaatattcctgagtatatgctttttgggtggcatctcttcttaatgctccatttgagatcaccagaattgttcaaggacctggtgtcctgcatccatggattagttgctgtgttggccatacttttgattcacgtgccagctaaatttaggagcttcacgattgaaggctcttctcacttaaatgacctgatgtatttcaaaggtctgattgatatggaatgtttccagtcaaatttggaaaaaatggagaaactatgtaattctaatagctgtaaaggggagcttgattttaaatcaattttgatcaataatgattatattccctatgatgagaactcgacgggggattccaccaatttaggacattcaaagtgtgcctttgaaacattggcatctcccacaaagacaataaagaacatgctgactgttcctagttctcctttgtcaccagccaccggtggttcagtcaagattgtgcaaatgacaccagtaacttctgccatgacgacagctaagtggcttcgtgaggtgatatcttcattgccagataagccttcatctaagcttcagcagtttctgtcatcatgcgatagggatttgacaaatgctgtcacagaaagggtcagcatagttttggaagcaatttttccaaccaaatcttctgccaatcggggtgtatcgttaggtctcaattgtgcaaatgcctttgacattccgtgggcagaagccagaaaagtggaggcttccaagttgtactatagggtattagaggcaatctgcagagcggagttacaaaacagcaatgtaaataatctaactccattgctgtcaaatgagcgtttccaccgatgtttgattgcatgttcagcggacttagtattggcgacacataagacagtcatcatgatgtttcctgctgttcttgagagtaccggtctaactgcatttgatttgagcaaaataattgagaactttgtgagacatgaagagaccctcccaagagaattgaaaaggcacctaaattccttagaagaacagcttttggaaagcatggcatgggagaaaggttcatcattgtataactcactgattgttgccaggccatctgttgcttcagaaataaaccgccttggtcttttggctgaaccaatgccatctcttgatgacttagtgtcaaggcagaatgttcgtatcgagggcttgcctgctacaccatctaaaaaacgtgctgctggtccagatgacaacgctgatcctcgatcaccaaagagatcgtgcaatgaatctaggaacacagtagtagagcgcaatttgcagacacctccacccaagcaaagccacatggtgtcaactagtttgaaagcaaaatgccatccactccagtccacatttgcaagtccaactgtctgtaatcctgttggtgggaatgaaaaatgtgctgacgtgacaattcatatattcttttccaagattctgaagttggctgctattagaataagaaacttgtgcgaaagggttcaatgtgtggaacagacagagcgtgtctataatgtcttcaagcagattcttgagcaacagacaacattattttttaatagacacatcgatcaacttatcctttgctgtctttatggtgttgcaaaggtttgtcaattagaactcacattcagggagatactcaacaattacaaaagagaagcacaatgcaagccagaagttttttcaagtatctatattgggagtacgaaccgtaatggggtattagtatcgcgccatgttggtatcattactttttacaatgaggtatttgttccagcagcgaagcctttcctggtgtcactaatatcatctggtactcatccagaagacaagaagaatgctagtggccaaattcctggatcacccaagccatctcctttcccaaatttaccagatatgtccccgaagaaagtttcagcatctcataatgtatatgtgtctcctttgcggcaaaccaaggtttttcttctcattattcgctttactttctttatatttgctcttaataatggcaggaaagtaaacagtcgattaaatttcgacatgcttctccatcagactgatgatcccatattcagtgtgctgcaagtgatttga

SEQ ID NO: 15489 - DNA, 705 bp, Zea mays
  Peptide Sequence Number=SeqID_57268
atgcagagggtgagcgacgattgggtcctggtgcgggcaagcaacggcgaccccgaggccccaaggcgggcgagaggcggtggaactcccatggagggcgggcaagcggcgacgcacccccaggcccgagcagcggtggcacaccctaacccacgtacgacggtgcccacccacccccccatgcgagtagtgacgacgtcgcacgaggttcgaacggcgtcacggaaggcacgagcgtttgtgggccttaatggcctaatgggcctttacccaactgctgatccaacgcgcgcagccgctgatccatcgccgccagacgccatcgcgcccaaccgccgtcgcgcgcgcccaggagccgccatcgcgcgcacccaggagccgccagagccaaacgctgtcggtcgtcctccaccgccctccaggtacgccgctggccccctcctccctccgccgccacccccaaagtcgtcgccgccagctattgcctctctcgtaccgccgccgccgtcgtacgagcaggtcgtaagggtgggtggtggccgaagggaggaggatgacgacgagggcgccggggcggtgatacgggcacacctgctctccgacttcaaggtcgcggtgcgtgcaggaaaagtactggtgtccgacccgtcgtctggaaggtccccactcgcatcctcttctgattctatagcgaattttggttga

SEQ ID NO: 15490 - DNA, 582 bp, Zea mays
  Peptide Sequence Number=SeqID_57269
atggtgggtcgatcgaggacgaggaggtctctcaccgttgagccctcacatactgggcgctttctaaaagaggcaaggaccgaggtggctggcgaagagaagttggctccgggtgctgagggtgccacgtctccacttggcccggtggacttcgagatctcggacatggacctggcggtgaagtcaccgctgaagatcgtgtcgtcagtagctaccttggcgaaggctcggattgaggcggccgtggccaaggcagagtcctctgcccttcacgacaagctaaaggagaagaaaaaggaagctgtcgtgtttgagcaagaggcgaagtctgccaaggcggagattgtgttcagtgacttcagcccagtctacgaggagctgggagctacgaggctgcatatcgtgattcaaggattgatgttcttttctgctctcataacttatgagagcggatttgagtcattggtccgtggaggcttcgaccacatggctcgtcttagctcagctgatttcgaagccagcgaaaacttgtatactaatgttggtgaagtagatgggggcagtggtggacaacttgcttaa

SEQ ID NO: 15491 - DNA, 1194 bp, Zea mays
  Peptide Sequence Number=SeqID_57270
atggtcgagcagctaccaagaagggcgtcagcttgtcttctgctagggttccacgctccagtgctcaggaagtctaaggttcagcttcatcaattgacgccaaatgttgtggtggcgctgagtacatttgtttgggcaacgactacgtttggtggaggccctagtaatgaagccttcgcagagcattattgtctacattggcaaaagaggtctttgggtcgtgttgttgatcaatttggtagttgtactttcacggcgaagcctggtaaaacgaaagagaaggttattgagctagccccctatgcaaagaataagtgggggtggatgaaaatttggttctatgtgtgttgttccaggggcaaagggtggccactagcgagcaccctgagtgtattccagtttgaagctttcccacacaatgcagttgaggagggggaccatgacgaccgtacttcgattttgctactgttgtatgtagcggtcgagattaggttgagtagtacttggagtgtgggatttggccgcttaatcgaggctagactgtgggcccaattgcccatagggatttcaatggtttcaataggcagattttgggcccttccttcgcagttgagctttgggagcgtgctcgggacacgtttgttgcagagacagaaagggaggcgaaagagctcgtcgatcctgttattgaattggaaattgaaaggacagctgaacttcgtcatgggcatgtgcgagcgaatcgtgtgtttagccagatggggcttgcttatgaagagcacatggtacgtccaaagacgcggtggaagacactggtgggggcccgcccaatcacatacattgatagtgataacgtcgacctgctcagtgaggaccgaagcagcttgcttcgaagtatttgatgctgatctcacggagacttgcggtcatgttgatgtggaggctgggtctatgggggacttcgctgaactcgtgaccaggggtaagttggggagggattttatttcttctgatgcgagtcggttccaggagcgcaaaacgatgggttgtaagggagatgactacggtgtgcggctgcgaggacgttgcgctggctcgctcggggagggagtttcttacattcccttacataacatcccatatgtaattgttgcaccgatggatttgaaggggaaggcgcccgctctgagttag

SEQ ID NO: 15492 - DNA, 282 bp, Zea mays
  Peptide Sequence Number=SeqID_57271
atggctccatcggaggcaggcgtagatgggagacgcggcgtcgactgcggcgaggatggctccatcggcgtggaaggcagcctggggaagggtgctaggatttggggcgaagatggctctagtggaggtgcggtgttgatgggaggcgcgacagctgcgttgatggctcgggcgctgttggaggtggccgcgctgatggctcgggcgcagttggaggcgtcgcacaatggtggtggacaagcggggttttcaggttccactcgctcgctacaagagcaataa

SEQ ID NO: 15493 - DNA, 243 bp, Zea mays
  Peptide Sequence Number=SeqID_57272
atggtgagccccatcaccactgcctatgacgagggcttgctcccctccctttgcgtggccaacttcaaaaactaccagcagtgtgtttcacatattgaagcagcttggggtcttgcatattccattggcagctatgtgttcagtagtggttctgaccccaagtcacagcctagggacttctgcgtcatcaagcaggagtggactgtcgtccgcatccagttcgcctccttgcattcctggtag

SEQ ID NO: 15494 - DNA, 258 bp, Zea mays
  Peptide Sequence Number=SeqID_57273
atggagattgctacttcggctgcccaacctttccagctgaaggaggtgttcagtacatcttcgtactactcaccctacattccacattatgtccaacctcaggaccctctttatggtcgccatccgcttctttcatcccagagccacctctttatggtcaaattcctgctggccatcatcccaagttcccattgcaagttatgcaacaagggagaagggaagcctctgaagcctgtacggtcaacagtatggtcctag

SEQ ID NO: 15495 - DNA, 318 bp, Zea mays
  Peptide Sequence Number=SeqID_57274
cattcaagagaagatctcatttctgagcaacaaactgtgttgagacatcttgaagctattctccatatttataggctagctcgagctgggcaaactgtagatgctttgagggaaaccatcaggctacccttccttcatctggaccctaaggctccaaatgtgactgttgacattttcaggaacttgtcaccccatgttcaagcttgtgtgccagatctcctgatggttgctctaaattgcattgacaatgttagagatactgatgggaccttgcgtgctgtcaaaacaaaggttgttcagttgatgtccttttcgtga

SEQ ID NO: 15496 - DNA, 678 bp, Zea mays
  Peptide Sequence Number=SeqID_57275
atgaaatatgttcatacagcggaccgtgaaggcataatgtgtattcaagaactggatcagaagattaagctggttcaacatttgcagaaggcttgggttaatgtctacgggacggagcctgagactgatttttatcctacttctgataagaaagagggagatgatgatgattcaaaggacgaggaatttgatgggttcgatgatttccagagtaatcgtgatgctacaacggaagatgctgctattgatgacgtgtctggtaataatgctgataatccacctacagtcaaccactctacaaccagttcggactgttctcactatgtttctatggctaatcttaatgaaggatttatttctcacattaatccttcctcttctgattgctcaaaagtgccatatgctggacgtatagttcttccccaaattatggctcaagtaattccctttgggcagaaagctgattcaggcttgggagaacctggggaattttttacaactttgtcttctgatgccgcccaacagctgcttgccgccagcacggggatagggtccaacaccatggcagatgctgctcgtccagtagcggtcatcagcaaagctgttttaaacagtgttccagatcaactgctctctaccaaatttgaacatgcacaattctcagattgttgcaaatga

SEQ ID NO: 15497 - DNA, 279 bp, Zea mays
  Peptide Sequence Number=SeqID_57276
atgaagacagggctccttgcgcctgatcccctcatggagacattgatgcctgccgagcatcctgtgcgagtccgtgatattactgatgtcctacagcgagatgatcaacgggaatgcctctgcaaaatcgctggcaggagtctcgaaaatcttaaccaatgtgtacctctgaaaatcacatgtataattgacgaccagagtgaattcaaccactggcaacccagcaaaggagactctgttctgcagctggtcgatggaaggctctgggacttatgttga

SEQ ID NO: 15498 - DNA, 201 bp, Zea mays
  Peptide Sequence Number=SeqID_57277
atggaggtagcttgttttgatcaggggtcttggcttaacattgtgctagggaacttcttgaatgaaagcctcgacgactgtgatgcccataggttgtatgacggggtgggcggaggatcaagattggaagtctcgttggtgaaaaatcagagctgcctagcatgggatgtctcgaggcttggcaacgacgacgcgtcgtag

SEQ ID NO: 15499 - DNA, 192 bp, Zea mays
  Peptide Sequence Number=SeqID_57278
atggcaaggaaactcctacgggggtacgagataagccacgtgcccatctgcctgtttgtgctggagtcgagatttcagaggaatgcaggtcttgtggccagtggtgtggctaagaacctgaatagagttgggacctacatcaaagacactgtcagtgatatgatgcagcctcaccgcaagcgtcccaaataa

SEQ ID NO: 15500 - DNA, 1275 bp, Zea mays
  Peptide Sequence Number=SeqID_57279
atggctgccgcaggagggagcaccggctcgctgccgggcggctcgcctagggagaaggagggagaagcgctggttgcgggaggagaaggagtagaggtgatgggcggcttcttgcgcgcggggcaggcgcttgtcgctgcctgcgccgggcttagtgctctgaacctctccggtggtttgattggtgggccgaggtctgccggcgttgtcgcctccggatttgtccggctagaagctctcgacctgtccggcaacaagatctccggcgatggcgacctccggtggatagtgggcgccggcgtcagagcagtccgccaactggacctctccgggaacaagatctctagcctgccggagttcaccaactgctctgggctggagtacctcgacctctccggcaacctcatcgccggcgaggtggccggcaggactctcgctgactgtcgtggtctgagaacgctcaacctctcaggcaaccacctggtcggcccgttcccgccggacgtcgccgccctcacctcgctcgccgcactcaacctctcaaacaacaacttctccaacgacctctccgccgacgctttcaccgagctacaccagctcaaggtggtcgccctctccttcaaccacttcaacggcagccccaactcaagcctctgcatgctgtacctccagaacaactacctctccggcgccatccctgagtcaatctccaactgcaccaggctcgaatctctcgatctcagcctcaacaacatcaacggcaccctcccggcatccctcgggaagctcggggagctccgggacctcattctttggcagaacttcttggagggcgagattcgggcgtccctggaaaatttggacaagctcgagcatctcatcctcgactacaacgggctcatcggcatcatcccgtcggaactctccaagtgcaaggagctgaactggatatccttggcaagaaaccagctgtctggtccgatcccggcttggcttgggcagctcagtaatttggccatcttgaagctgagcaacaattccttctccggaccaatactggctgagctcggcaactgccaaagcttggtctggctggacctgaacatcaaccagcttaacgggtcaataccggcggaactggcaaaacagtctgggaagatgaacatcggtcttgtcattgggcggcgcaggaagagaataggagaaaaaaacggcggctgctacgacgtgagcatcaatggttttaatcatagacgttaccttgtaatggcgtga

SEQ ID NO: 15501 - DNA, 282 bp, Zea mays
  Peptide Sequence Number=SeqID_57280
atgggcagttggaatacgacgcaattcgagacgcctcacagatacgacacgtggagcgatggagaagaaatggtggagaagaatgagcgcggtgagattgggaaagagcaatgcgacaacggtgttctactagagcttggagacgctagtagtctatcactggctcatagtcgccaccggtgggtgctgcagcaggggaaggggcagggaggtgtagccataggtctgaaggggcaagggcagtcgccgacgaccaagtatgaagagcgaaggctggagtag

SEQ ID NO: 15502 - DNA, 393 bp, Zea mays
  Peptide Sequence Number=SeqID_57281
atgaagcagtgtactttttcttccccctccgcgctcgtatttgtctacaacctcaccagcgagctcctaatcaactggcgattgcggcggcgcccgggattctgccatcggattgccacctccactgcctcgacagtgaacggtcttactccgtgctggtgcccttcgtcgtcgtcgaagccgggtgtggagcagcacagccccgaatttgccgcagcccaacctaattcgagcgctcgcggttactcgccaggatcacgatccgcctcgggctcgactgcacgcgtgggcggaccttacagtgggttaaccaccgatcattatgttaatgggaacatggagaaccacccgggaaaacagtgctaccacaagggtataatgggacgcccttga

SEQ ID NO: 15503 - DNA, 225 bp, Zea mays
  Peptide Sequence Number=SeqID_57282
atggagggcgccgccggggaggagggcgcctccacgccggcggcgagagggggagcggaggcaggggcaggggcaggggcaggtggagggatgctgaaggggaggtcctgcaagggctgcctctactactcgtcaaagctcaggtcgcgagcgcgcggccccgtctgcgtcggcgtcacccgcgcccttccccaagatttagttgtaaactacgaatcaagctga

SEQ ID NO: 15504 - DNA, 255 bp, Zea mays
  Peptide Sequence Number=SeqID_57283
atgtcttcgctgacccttcgccagcgacgagcacccaacaggttctaccgcaaagcatataatgaactgttctcaggtgtaactactgagcaggatccggattcatcgactaatattcctgagtatatgctttttgggtggcatctcttcttaatgctccatttgagatcaccagaattgttcaaggacctggtgtcctgcatccatggattagttgctgtgttggtcactttgcgtattgcccctttattttaa

SEQ ID NO: 15505 - DNA, 375 bp, Zea mays
  Peptide Sequence Number=SeqID_57284
atggatccgctgcggtgctccctgcgtcctactaatgtcccgccatcgatgggaggcaatagagggttgcctggccacgtggagtatcgacatgacatcgattggccggaagggcccttggggcactatgaattgctcaccggacttactccttccccgtggtccgcctcctaccgcgaccggctatgtacctgccgtttctgcccgaaagaatcagagaaaagacaattggaaaagacttggctcgagcagccaagactctgctcagtctgggtgcaccggactgtccggtggtgcaccagacagtgtccggtgcgccaggctggctctggtgaaaaggccgctctcgggaattcgtcggcggcgtacgactaa

SEQ ID NO: 15506 - DNA, 258 bp, Zea mays
  Peptide Sequence Number=SeqID_57285
atggccgccgcctgccttcgccgcctccaccgcatccctcatcctgtccttaagctcgccgcagccactcactggcccttgccattccccggtgccaagttggctccggtcacacagtcgtgcccatccgccgaccgcgtcgaagtacagctgagcgcccgctgccccgacagatatgaccaggaggtcggaagttctctgcttcatgtgaccaataagcgaacaatatctcctctcagctcacgtctatcacgataa

SEQ ID NO: 15507 - DNA, 1125 bp, Zea mays
  Peptide Sequence Number=SeqID_57286
atggatgggggaagcatgctcaacatcatgtatgttgagaccttcgacggcttagggatcgcacgctctgcgctgcgcccgagccctacgcctttccacagtgtcacccccggccaccaggcctacccgctcagacgaatctctctgcccgtcacgttcagcgacccctccaactttcgtattgagcggctgcaattcgaggtggtgcatttcccgggggcctacaatgtcattctctggaggccacactgcattaagttcatggctgtccccaattacacataccccaagctgaaggtgcccggtcctcctgggaccattacaactctcaaggccagccccgacaccttcatgtccgctgaggacacaaaggatatccagattgatgccattgatacatccaagcacatacgcatcggggcggcgctctccgacagacaggggagcacactcgtcgacttcctccgggctaaccgtgacgtctttgtctggaagcccgtggacatgtcgggggtcccaagggaagtcgctgagccttccctgaacatcttgccgatggccaggccagtcgcccaacggctccgccgttttgatgaagaaaagcgcaaagccatcgatgaagaggagctagaggatgtgcgtcggctagtcggatgtgtcgccgcgctcagccggttcgtctccaggctcggagaaaggggcatgcccctttacaaactcctcaggaagagcgaccatttctcttggattacagaagcacaggaggccctcgacaggataaaagctttcttgaccacgactccaatcttggttgcgcctaacctaggcaaagccctcctctatgtcgcggccactacccaggtggtcagcgtcgcgctggtagtggaaagggagaacgaagtcctcattgccaagcggaagttgatccactacttcgattggcactccgtgtctgtggtatccacgacactccttggcgaaatcgtccgcaatcgggatgcgtttgcacgcatcgcaaagtggtccctcgagctcaatgggctcgacatcggctatgtccccaaaattgcgatcaaatcccaggctcttgtcaactttgtcacagaatggacggaggcgcagtaa

SEQ ID NO: 15508 - DNA, 1299 bp, Zea mays
  Peptide Sequence Number=SeqID_57287
atggatcttcgccgcccgccgcgctcctcgtcgggcggcgtggagcccaagatccgccaggtcggcttcttcaccccggatgcctccgcgccgtccgagcccatgccccccgccgcggtggtccaggcaccatcggcgcagcagaggccggtcacggcgtcgcctccggcgtcagacgacttctcccaggggcgcctttcccctgtcatgatccctcccccgcgccatgccgaccacctcgccctgggcccacaccccccggcggcggccgacgtcgtcctcgccacttctgcgcccgtgcgttcgtccccgcgcctcgacatcgtgtccgagatcggcgacgacgactcctggtcacgcgctccttctgctgtggagctaggtactctatcaaatcatgagattgccattggccgttgctttgggggtgggaatgggattggtttatactgccatgaagaaaacaagtgtggtttggctgaaatacggaatgagggtgctccagcttccattccacaaaagcagaaaacctcgaaggcagagagacgtgcaattcaggaggcccaacgtgctgctaaagctgcagcgaaggaggcagataaatcaggaaaatctgctggtgctgcgatgtccaagcaagccaagccagcaaaaactgctcagaagaaagatgtgccccaagctgcaagtacacttgcttctgagaagaaggctactgaacgtcctccagaaagagaaaaaaaattagatgctccccatccccgcatgcagtttgatgatgtgcataaggtggagaaagcaaaaaaacgtgcggtagtcaaccaatcagaagctcaaaacagagttgaactgttcaggcatcttcctcagtatgtgcatggcactcagcttcctgacctcgagtcaaaattctttcaattagaaccaatgcatccttctgtatacaaggttgggctccaatatttgtctggtgaagtatctggtggtaatgatcgttgtgtagcaatgcttcttgcattcaaagaggcaataaaagattacactacacctacaaataaaacactcagcagagatcttactgcaaaaatcagcagttatgtgtcatttcttatcgagtgtaggcctctttcaatcagcatgggcaatgctattaggtttctgaagagcaggatagcaaagctaccacatgcattgtcagagtctgaagccaaaactagtcttcagtctgatattgatcgttttataaatgagaagatagttcttgcagataaagttattgtcagccatgccatcacaaag

SEQ ID NO: 15509 - DNA, 627 bp, Zea mays
  Peptide Sequence Number=SeqID_57288
atggctggccacgccgagggctgcacggggaggggctgcacgcgcacacggggaaggggatcggctaggggagatagaggggagctcaccacgggctcgatggacgacatcaacggctcaacgggatccaacctagggcaaggggagaggtggagagaggtggaagagagggatagggaggttgctgcacgtgaaagagagaatgagggggagggggtgcacatagggggagagagagaggaagagtggtgccgccgtaggggaactcttcaccaagcctccgtccacgccgtgagtggtgtccagaatcatctacagatcgaggggaaaggcctccacaacatagccgtcgggattggcccctacgtcgccgggaattcctcaccaaagtttcggttgacgctcaagccgcaccgcaccgtcgccaggaaactcggcgccataatcgtcggtgagtatttgtcctccgtgttcgtgcggccgtcctcttcatttagctctagtagaatcggggaatggtgctcggaatcaccgggcagggagagttcgtcggcgcgatttcgaccgccggggcggcgccgccgtcggtcacggttggatgaggaagatgactctggtgccgtctga

SEQ ID NO: 15510 - DNA, 1893 bp, Zea mays
  Peptide Sequence Number=SeqID_57289
atgcgcaagtacagcgtgccatactgcttcagaatgtgcatctggctggcgtacatctccagcgacgccctggcgatctacgcgctggccaccctcttcaaccgccacgcgaggacggtcccggccagctactgccctgctccggcgccggccggcaaggagcagtcgcgcattctggaggtgctatgggcgccgatcctgctcatccacctgggcgggcagaaggagatgacggcgtacgagatcgaggacaacgagctgtggacgcggcacaccgtgaccctggtgagccaggtctcggtggccctgtacgccttctacaagtcgtggcaccccagctccagcgacaggaagctgacggcggccgcggtgctcctgttcgtcatcggcgtcgtcagcttcagcgagaagccggtggccctgaacaaagccaagatcaagcagctggcggacgtgtcggcctggatacaagggacgaagcagcggtcggtgtggagggaggacctgatccacttctccctgttcgaggagagcaacctcttcaccgtcgtgccacgacgtctctggacggtgtgctgcggccacaacaggagggagaaagaggtggccctgcctccggaggacaaggtcctgatggtgctctcggacatgtccttgctagctgccgccaaggagctggtggagcggggtaaagccgagaagctggaggacgtgctcccgcctctggtgctcgtcgccgagaaaggcttgaagcagtggctgcgcggcgcgttcgccttcatctacaccagggcctcggtggtggtcacccgtccctacctcatctaccacctggcgcttgtcccagtgctgcacgtcggcgccctggtgctgttcgcgacgagcgacaagcgcagatacaagcgcgccgacgtgaagataacgtacatcatcctgtgcctcactgccgcgctggacttcctggcggtgttcgtccgcctgctggtgtaccggctcatgtccatgacgtcggtgtcggcgctgtgcgagacgctgcccggctacaacctcatcgacgagtctgtccgggaagctgaccagggcagttgcgccaggtacatctcaagctggtgcaggcggcgaccggatggcgagctgtacaagaaagtcgagccacatctgctcgcggacctggtagagggctcacaggaccgagacctcgccagctacaggatcttcgactcaaccacagagaactgggctctaagcaaggagctgcaggataaatgtggcaaagagataaaagatagcctgcagggcatatcatttgaccggagcgtcctcatatggcacatcgccaccgatctttgcttccgctgctctgacgtcgtcgattatggccaagaagaggtagaagatggaggaggagcagaagggccagaagaagaagaaggaggaggaggagtcggaggagctggacagggaacggaggacaactacgccgtccgagcattacggctccaaatcaattgcacagaggccatatccaactacatggtgcacctgctcaactccaaccccgagatgctgctgaccggaagcaggaaccacattttatctgaagccagggaaggcctcaaatccatcattctgtcggacaaggccattacagaagagctcgccccagagtcagagggctgcacctgcacctgcaggcgctgctgcgctagcatcggtcgctggtgcagctgcgctagtaccggttgcagctgcagctgcggccagttgaaccgagcacaccacttcagccagaaagacctgttgaggaatctcgtctccgagacggccagcagagaagtcgatcgtggcaaaaattcccaaactttctacgtcattaagggcttgttcggttag

SEQ ID NO: 15511 - DNA, 426 bp, Zea mays
  Peptide Sequence Number=SeqID_57290
atgtactgcgttcttgggcaagggttcgacggagggagcgccgtggaactcgtggacgtcctcgccggcaacggggaaggagtagaggtctccgacgacgggagaaaggagggcggtgcagaggcgtcgcaggggtgtgcgcagggcaggcaacaagcaagagcgagctatcggggtcgcggctcgatgagtgcaggggcgcggggtcgcggctgggtgctcctggcgcgcgacgtgcagcagggcgccgggtcgcgtgcccggtcggggctgggctcggcgcggggctcggtcgcggctgcttggctcggcctcggcgagcagggcggctccctggcgcggggttggagcagggcgcgcaggggcggttcgggtgcaggggcgcgtgctagggttttaggtagttgggcccctagtgggccttag

SEQ ID NO: 15512 - DNA, 429 bp, Zea mays
  Peptide Sequence Number=SeqID_57291
atgagcatcaaatatgtcgggaaagaagggagacagggaggctcatcgcggggaacgacgacgacgtggatggacggcgagcacgacatggacgaacgtcggccgtggacgaacggcgtggacggcgggcacggcgtggacgagtctgctcctatgaaacggcgtggacaaacgacgagccacacgcggcggcgcggagcggcgagggcgcgcgcgggggccacgacgccggcgatggcggacggcggcgcagcgatggtggacgggggcgcggctatggtgggcgggcgggagggcgggcgccgacggcggcgcgacgcgtggagagtgggcggcgttgcggtgagggaggacgggtgggcgggcgccgacggcggcgcggcgacggagggcgggcgggcggtggcgcaaagacgagggagagattga

SEQ ID NO: 15513 - DNA, 321 bp, Zea mays
  Peptide Sequence Number=SeqID_57292
atggtatccggcggaggaagcgcgcccttgggagcagagggggaggaagccctggcaagcaaaggatgggttgagactcgtcggtatgataactacactcgcaaaaacaagaatggggctacacttacttggggccctagaccttccagcgaccctggaagcgggacgtccgttgctgttgttgttgctgctgctgctgtggtcgttgctgctggtgctcctaggggagatcacccccaggtggtggtggtggtggcgggaccgacggtggtggtggtggcggtgacagcggatccgatggtggtggtggaggaggactga

SEQ ID NO: 15514 - DNA, 954 bp, Zea mays
  Peptide Sequence Number=SeqID_57293
atgagcggcgacaattcgtcaggaatggccaacaagccgagtcttctgagcactctgccgactaacccaccagcacagtttctgaaagatatcacggacggcttctctgaaactcaaatgcttggtgaaggtgcatttggaactgtttacaagggcattctgcaagatgggcagccaattgcggtgaagaagcttgcagagaatgcgccggtggcacctgagaagcagttcaagattggggttgggaaccttatggccatgcagcatccgaatatagtcaggatactcggctactgccgtgaaccgcaaaggaaagtgattgagcagagtggaagatacattattgtagacgtggttgagagcttactgtactatgaatacgttcctaatggaaaccttgaaaagtatatttccgatgcatcagcttctagacctgattggaagacatgcttcgagataatcaagggcatctgccagggcttacgttacctacataaggaaatggataggccaattgttcatttggatcttcatcctaccaacatattgttggatgagaacatggtgccgaaaatcacggatttcggcctgtccagactctttggtgaagaacaaaccagaataaacacaattaatgttgtgggaaagaaagggtacatggctccagaatatctatataggggtgaaatttcaacccggtcagatatatatagcttaggtctagtaatcatggagattataacaggcaagaacagttcttcaagcgacaaagatatgtctgcaagggactttgtagataaggcaagactaagactggaaaacgtgcgtgagacgtggacagatgagcacatagcatccaagcactcagcactagatgcagtcagcctccaggaaaacaagagaccttctatagttgaaattgttgacaagctcaatggaaggcatgctcactga

SEQ ID NO: 15515 - DNA, 663 bp, Zea mays
  Peptide Sequence Number=SeqID_57294
atggaagaagcagtctacgcgcatagggagctccaaggcttgaacgacgacaaatggagcaggaaatcacggaggggattcaaggatatgggcaaccgagctaggctgcggtggccatggcgagctaggcgctggagagagcggagcaggggccaggacgcaaaagggcgagctggaggggcttgggcaccggcagagaggagcacgcagcttgcgatggcgagcagagtgcagggcgcagaggagcaagcttcgcgcgacaaacatacagagggagcagggcgcaacgtaggcagccatgggagcttcaaggccgagcgccagggagcgcggcaagcagaaagcacgcgacggaaaagagctaaacagggagttgcaggggcgcggcatcagagagctggagcagacgagctgcagacgcgctacacagggaggagggaggagcgcgggggagagacctcggctggctgggcaagttggaggaactcctccagacgcgcgcgcagcagagaggaagacgcacgaggaggaagaagcagggagagcgctagggaagacgaggagtgcacgtgggaggagagaagtggctgcgcgcgaggagataagcacaacgacgaaaaatctgacggggagggatgcatagttttccttggggatttttag

SEQ ID NO: 15516 - DNA, 1410 bp, Zea mays
  Peptide Sequence Number=SeqID_57295
atggcgtgcggctctgctaccgccgctcgaccagcagcccgcctctggctgctggcggcggtggtggtggcgacctccttcctcgccgtcgcggcgccgccgggcgcgctggtgacgagcgtcccggggttcggcaacaagcagcagctgccgtcgaagcactacgccgggtacgtgacggtggacgagcggcacggcaggcggctgttctactacctggtggagtcggagcgcgacccggcccgggaccccgtcgtgctctggctcaacggcgggcccggctgctccagcttcgacggcttcgtctacgagcacgggccattcagctttgagtcatcaggagggtcagctgggagcctgccaaagcttcatctcaacccttatagctggtctaaggtgtcgagtgtgatatacttggactcccctgccggcgtcgggctttcctactcaaacaacgtttcggactacgagactggcgacttcaagaccgccgccgattcgcacactttcctgctcaagtggttccagctctaccctgagttcttggcaaatccgttctacatagccggagagtcgtacgctggcgtttatgtccctaccctttcaagcgaagtcgtcaaaggaatccacaaaggagtgaagccagttataaactttaagggctacatggtcggcaatggtgtgtgcgacaccgtctttgatggtaatgctcttgtgccgtttgcgcacgggatggctctcatttcagagagtatatacaaggaagccagcactgcatgtcaagggaattactggaactctagcagtgcaaaatgcgacgaggcgctgtcaaaagtcgagacggaaatcgacggattaaatatctacgacatccttgagccatgttaccacgccccagctgataccaaacaagcagcagtgaccccacaggcacagagtactagcgagctgcctcagagtttcaaagacctcggcgtgaccagcaacaagcctctccctgtaaggacaagaatgcacggacgggcgtggcctttgagagctccggtcagttcaatcggaccctgggaattatgcacggataaactggattttgatcatgatgccggcagcatgatcatctatcacaagaacctcacgagtcagggctaccgtgctttcatctacagcggcgaccatgacatgtgtgtaccttacaccgggactgaagcatggactgcgtctttaggctacgccgtcgttgatccgtggcgacagtggattgtcgacgaacaagttgccgggtacacccaaggatatgaaaagggccttacttttgccactattaagggtgctgggcacacagttcctgagtacaaaccacaggaagcactagctttctacagccgttggcttgccggtgctaaactgtga

SEQ ID NO: 15517 - DNA, 537 bp, Zea mays
  Peptide Sequence Number=SeqID_57296
atggaggcaggaagcggagcaaagaaccatcgccagaccctcccccgagtatataaagaccaaagcaagaccgttccaacgctccacccggaccggccgcgggattcaaaaacgcgaagcaaaacagccgttcctcgaacagctcgcggctcgcgcacgcgcaacggccgccccgcaaaccgcacgccccgtcgcattaactccgtggcgggacaggcggcgcctccggcaggagaagcgagcgacggaccgggaaagggggataccccgaaaaggatccttccccgtgaaggaaccaggctccgagcctctctactgatcagaggttcgaaggctggcccctcggaagggttcaacagccgcctcagagcacgtgggctccacacccactactggtcagaggttcgaaggtcggccccttggaagggttcaacggccgcctcaggctactcaggctccacgcccactactgatcaggggttcgaaggctggcccccgaagggttcacagccgcctcagacacagagcgagggatga

SEQ ID NO: 15518 - DNA, 663 bp, Zea mays
  Peptide Sequence Number=SeqID_57297
atggcgcggaaacgtcgcgcgaagtttctactgaaaactgaaagtgatgtagatcattggactcagcaaatggtcgagtgctatagtccctgctttgccaagcttctcggactgctcccatggatggtagtaaagaaaacgagttctatttgtgtatatcgtccttcctttttgcgtcccaagcaaccagtgcctcctttctccacactcgaagcaactgtctcttcctccggcgctttctctctccctctcactcatactctcgttctccagtctctccatagaagaggcgtgtcaggtttcgcccaccgcgccatgggatcgggatcgtgctgctgcatagggtgcaacggcggcggcggcgacgagggcggagttgacgccggcggcggcctcgaccccaaggggttcctgctggcgatgatgattgccctggtgcttctaatgctctgccaccagcaagataagaagatggagatcgtatttgttctctccatctctgtaggcaccgcacctggaaccaagcgcaggagttcatgtccctgtaaatttctctcatctgtctttcgtatagttgcggtcatcaaaattgacggggtgtttttgttggtaggtacagacaggaagccaatgagaaaaccggtctaccgaggacaaaattga

SEQ ID NO: 15519 - DNA, 576 bp, Zea mays
  Peptide Sequence Number=SeqID_57298
atggcgggctggtcggccatggacgagcaggaagggagcagcgacggatgcgcacgacctggcaccagaggagagctcgcaccgggcgctggagctggaggccgagcaagctccaagctggggccaaggagaggggcgcgccatggctggagagaaagagagagaaaagcagggggcgccgcgagctgggaagcagggaggaagctggggccagggcgcgacgcaggaggggcgagccagggagacagaacgagcggccgccatgagaaggaggccgagctcggctgggcgcgagcgagcagagggagaagacgagggcgcgcgctggggaaggagatgagaggaaggagccgagcgcctgcactacgtaggaaacggagatgggaggggataaggagaagcatcaagcggtggaaaagaaaaatctccaggagaccaacgcctgcgcgcggcagtgagaaatatcagggaaaaacggcggcaggggataacgctgacggctccacgacagatatccataactctcatattagagttaaaaatagacatcaacaagttggatcaggacagtattag

SEQ ID NO: 15520 - DNA, 282 bp, Zea mays
  Peptide Sequence Number=SeqID_57299
atggccgtgcctgggcctgctctgcgcgtcccggcgtggcgcgtgacttgcgtggcttgcctgcggcgcgtggccggttcagcttgcccggcgcggtggctcggccagccagccagcgtggcggccaacggcctgcctgcgtggcggcgcgaccagccaacccgcggcagcgcggcttgtggccctgttcggccggcgaaccgccatcgtgctcggcagttcccaggcaccgatgaagaaggactggcgtcgcgctgtccatgtccgcacgtagttaattag

SEQ ID NO: 15521 - DNA, 396 bp, Zea mays
  Peptide Sequence Number=SeqID_57300
atggcgcccttctcctgcgccaccattcaccctgacgcctcttggcgtgttgtcggccttttcgcatgctgcgcttgcacccgtgacttgtgcgggatatctcatgataaagggttcgacatttctgaccccaatgttgttggacagaatgatttactgattgtgggccctggtgttcttgggcgaatcatagctgagaagtggaaaaaggagcatccaagttgcaaagtttatggccagaccgcaagcaaaaatcatcacaacgagttaacagatcttggcatcatcccctcattgaaaggcaccactattcatcagaaggttccacatgttattttctgcgctcccccgtctggttcagatgattaccctagggatgtcagtgccatattttag

SEQ ID NO: 15522 - DNA, 102 bp, Zea mays
  Peptide Sequence Number=SeqID_57301
atggcgggcggaaaggagctcttcggagctaaggaggggcgtctggccggtgatggaacgtttcacccgtcttgcagacattacagaacatcggagatatag

SEQ ID NO: 15523 - DNA, 417 bp, Zea mays
  Peptide Sequence Number=SeqID_57302
atggggcgcacgcagaagccggaaagccgcggccagggctggacagcgttggggctttgccggacagaggccgcgccagcaggggagacgcgcgctaggggcatagtggctggccgcacgcgcaggcacgcgagcacgccgcctgggaggctcagtcgcacgccagcggcggcgaggcagaggccaggcacgctgcgtgggtggccggggctgggcgccacacggagctgtaggggcacgcaaggcagaagcgcgcacgcgcgctatgctgctgcggcactgcgctgggtgggcaagcgtccaccgggagcgcaagggatgggcagcgtaggggacggcgaccgccacggcggctctacagatctgggcatcggtataacagatgaagggaggatgagggagctgcgtacctggtaa

SEQ ID NO: 15524 - DNA, 423 bp, Zea mays
  Peptide Sequence Number=SeqID_57303
atgggcagcgtcggggacggcgaccgccacggcggctctacagatctgggcatcggtataacggatgaagggaggatgagggagctgcgtacctggggagaagttcgtatctgtgtagagggaaggagttttagcgatagagaaatagaagaaggaacgtctgcatatataaataaaggtggggtggggtgtggcgaggcggttgcgcgtacaacgcgcaaggcgctgcgcgacgaggcgaggcaaaacgaggtggctgcgactgattctgagttgatgctcgtgtgtgaaacagataacaatttaggaacaacagatttgactcatgggcctgaggtgtcagcgagtggagcatgtgaggcggttgtgtctacgcgatacggcgagggcggggaaaaggttgcacacacgagcgttgcgtga

SEQ ID NO: 15525 - DNA, 585 bp, Zea mays
  Peptide Sequence Number=SeqID_57304
atgactcagaagacgtgctgctgcaggggcgtggtccaagaacagaccgccggcttgagagggctgagcgccatgacgatgacgtatggccggaaggttgacgctgagcaaagcaaacgcgaggacaagcccgacgactacgagacggttgattggccaccggcaagcgcgacattgacgacgatgggccgaggcggggtccaccggcgtggcttggggaaatatcagggagatggacaggccaccatggctgaagctggaggccagacagggctagagaagagagaaaggagaaggctagagcggcgtccggacttggactccagggaggcggccgagcagaggagggatccaggggagccgccatgggaggggcaggaaagaagcaccacagtgcgtagggctccacgacgcggtggtgtcaacaactctacaccacacgaggatggctccagcccgactatagagaacctgatgggaggaaagccaacgttggaagcggaagctgatggagatgtgaagctgagaaggagcaacagagttaagaagccaaactccaaatatattggtgccaactggctgtaa

SEQ ID NO: 15526 - DNA, 312 bp, Zea mays
  Peptide Sequence Number=SeqID_57305
atggccaccttaaacgctttcgagttagctgtgcatgtgtttccacaccatgttggtgttcagatatgtatatggccttacttgccacaggttatgcaatcgtacgatctaattatttcacacaaggaagagcttgcacttctcatgacactggagcaggggaaacctatgaaagaagcccttggtgaggtcaattatggtgcaagtttcatagaatattttgcagaggaagcaaagcgcatatatggtgatataattcctccaactttatctgatcgtagattgttggttctgaagcaggcaatatgctga

SEQ ID NO: 15527 - DNA, 231 bp, Zea mays
  Peptide Sequence Number=SeqID_57306
atggagaagatccgcgccgcgggtctgctcaagacgcaggggctcatcgccggacagtgggtcgacgcatacgatggcaagaccatcgaggtgcaaaatccagcaactggtgaggtccttgcaaacgtgtcctttatgggcagcagagaaacatctgatgctattgcttctgctcacagtacattctattttattgtttctactgtaactcagataaatctggtcttgtag

SEQ ID NO: 15528 - DNA, 324 bp, Zea mays
  Peptide Sequence Number=SeqID_57307
atgggcaatgctcctgagataggtgatgcattactgcagagtacacaggtcagaaagattacgttcactggatcaacagctgttggcaaaaaactgatggctgaatctgcaaatactgtgaaaaaggtctctttggaacttggtgggaatgcaccttgcattgtttttgatgatgcagacattgatgttgctgttaaaggcagtgtaagactcacttttacatttatcttctttgtttctttactagcatacaattatataaaatcatctcaagttcccttggtgaatgagggtgacattatctacctgagaatctgtaaataa

SEQ ID NO: 15529 - DNA, 399 bp, Zea mays
  Peptide Sequence Number=SeqID_57308
atggccctcggatctgaatccagcgatccgcgagcgcccgcagagttagttaaacctagatctaatctggcgcgtacatctctaatcggacggccagaatctcacaataccccttcggccgcgcaacttgcaaatatgacccccttattttcaggaattaaacccgctgtccttgaccactattcactgagtcttggaattattgcaccggagcccctgacctttctggttaccccagttttggttatctttataccttgttcatccctgaaatatttttgggtagtacctgctattgctttatgtggattggatcattatgttaatgggaacatggagcgaccacccaggaaaacagtgctaccacaagggtataatgggacgcccttggctgattaa

SEQ ID NO: 15530 - DNA, 390 bp, Zea mays
  Peptide Sequence Number=SeqID_57309
atggaccgcgggtttattactaagaagtccagggactctttatcaaataggcacggcgaagggcggcgtcttaccggcaatggagttgacgacaggtccggccacatgcacaggttagcccgcgccgaggagatggcgccggtgagcgattctggtggccgcaaggtccttccactacctagcgatgccaccgcaagcacccatgaagacgcggcgaagcccctcgccccaggccaagggacccgacgcaagtgcccacgcgattcggcagcggcgacgacacgtttttctctgttcacggcgatgaagtggctctcggcgcgagagaatgaagaacgggggttcagggaagaccgcaggggcgggtttatatgccccccccacggttga
